United States Patent Application Publication US 2025/0084491 A1 - sequence listing, part 25

SEQ ID NO: 470679 - DNA, 75 bp, synthetic construct
  source 1..75: mol_type = other DNA
gcggctgcgtcgtctgccagtgctgcgtcaacaagtgccgggcaggcctcagccagtgccaccgccgccggaaaa

SEQ ID NO: 470680 - DNA, 75 bp, synthetic construct
  source 1..75: mol_type = other DNA
gcttttgacagagaaatgacggcctgtcgtaaagcgggtggagactgtggcgatattcagaataaatatgctgta

SEQ ID NO: 470681 - DNA, 75 bp, synthetic construct
  source 1..75: mol_type = other DNA
gtctgcttcaaaagatgaggcgaccagacaagcgtcagcagcgaatggcagagccacgactgcagcgacgaaggc

SEQ ID NO: 470682 - DNA, 75 bp, synthetic construct
  source 1..75: mol_type = other DNA
cggaaaccatactcatagtgtcacaggcgcatcagcagtcagccagtggtcacaaaatgggtcagtacataaggt

SEQ ID NO: 470683 - DNA, 75 bp, synthetic construct
  source 1..75: mol_type = other DNA
acgggcgtgtgccctctggacgtaaggttaatggcaaatcactagccaatgatgtcaatgttacatcgcaggata

SEQ ID NO: 470684 - DNA, 75 bp, synthetic construct
  source 1..75: mol_type = other DNA
caaaagtcggcgatgtgcggcgtagagattttgtttgcggtgtctgccgcgaccacgcttgctgtagaagtggct

SEQ ID NO: 470685 - DNA, 75 bp, synthetic construct
  source 1..75: mol_type = other DNA
cagccgttgggggtaaagaagatatcaccgcatggatatctcaatttgagaatcaaaaatctcagcaaacaggtg

SEQ ID NO: 470686 - DNA, 75 bp, synthetic construct
  source 1..75: mol_type = other DNA
aaaatgttacagggtaagctggatgaagccttgaatcatatcagcccgatggttagtgaggtcagcgatccgcat

SEQ ID NO: 470687 - DNA, 75 bp, synthetic construct
  source 1..75: mol_type = other DNA
tcgggtaccttctgcccgtaaggtgaatggtaaggcgctttcagcggatataacactgacaccgaaagatattgg

SEQ ID NO: 470688 - DNA, 75 bp, synthetic construct
  source 1..75: mol_type = other DNA
gtggagcaacttaatgacatcggtaaaccggtgcagccgctgccgttcacccagacgtttgatctcaacaaactg

SEQ ID NO: 470689 - DNA, 75 bp, synthetic construct
  source 1..75: mol_type = other DNA
ccagacgtttgatctcaacaaactggatgatgcattacgccatctcaatgatttccagccagtggggcaactgac

SEQ ID NO: 470690 - DNA, 75 bp, synthetic construct
  source 1..75: mol_type = other DNA
tggacgggagccagccgccaactctattactgccggagcaggaaggcattaatggcattcgtttccccatctggc

SEQ ID NO: 470691 - DNA, 75 bp, synthetic construct
  source 1..75: mol_type = other DNA
ccgggcggacagtctttgccggaaggtgacggtaactgccgccgccgcctggcaacctggctgctggacgggagt

SEQ ID NO: 470692 - DNA, 75 bp, synthetic construct
  source 1..75: mol_type = other DNA
ccgactacgcccggatcgctggccggaacgtgccgaagccgcgcgtaataaagtgctcgaacggatggctgcgca

SEQ ID NO: 470693 - DNA, 75 bp, synthetic construct
  source 1..75: mol_type = other DNA
tggatcgcggtcgcgtgaagaaagtctatgtgcaggcagctgcgccgtatcgcatgctgccagatgacatcaatc

SEQ ID NO: 470694 - DNA, 75 bp, synthetic construct
  source 1..75: mol_type = other DNA
atccggctggtcactggatgtattcgttatacgatttactcgacaattctgtgtttgtactttttttcttagtct

SEQ ID NO: 470695 - DNA, 75 bp, synthetic construct
  source 1..75: mol_type = other DNA
ctgatgttccgtcacccggaaaacgagtacgactggctgagctcagacgccgctgtggatgaggtcctgctcatc

SEQ ID NO: 470696 - DNA, 75 bp, synthetic construct
  source 1..75: mol_type = other DNA
cgtcaaaattcaggtactgattctgatgaccctcgtcggtttgttgccgacgatggtgctgatgatgacctgctt

SEQ ID NO: 470697 - DNA, 75 bp, synthetic construct
  source 1..75: mol_type = other DNA
atgaaacgccgtactcaactgacgctgggcctggcgctgctggcgctcgccccgctggcgctggcccagggtggc

SEQ ID NO: 470698 - DNA, 75 bp, synthetic construct
  source 1..75: mol_type = other DNA
cagttttggcccgtatgtccggctgatgagtgtcaccctgaactgatgttccgtcacccgggaaacgagtacgac

SEQ ID NO: 470699 - DNA, 75 bp, synthetic construct
  source 1..75: mol_type = other DNA
gtatgtccggctgatgagcgtcaccctgaactgatgttccgtcacccggaaaacgagtacgactggctgagctca

SEQ ID NO: 470700 - DNA, 75 bp, synthetic construct
  source 1..75: mol_type = other DNA
tccagattggctttatgatttacatcccgtttctggttatcgacctgattgtcgcaagcgtactgatggcgatgg

SEQ ID NO: 470701 - DNA, 75 bp, synthetic construct
  source 1..75: mol_type = other DNA
gatattgcgctgcttaatgtggtcactcacggcaacactcaggagtacagcgtcaaaattcaggtactgattctg

SEQ ID NO: 470702 - DNA, 75 bp, synthetic construct
  source 1..75: mol_type = other DNA
tccggttccccctagatatagagacaccgtaaataaagcgatggcaatcttatcattcatctgttctcagcggga

SEQ ID NO: 470703 - DNA, 75 bp, synthetic construct
  source 1..75: mol_type = other DNA
gctggtaaatattgatgcgccggaaaagaaacaggattatggccggtggtcgacagacataatgaaatcactggt

SEQ ID NO: 470704 - DNA, 75 bp, synthetic construct
  source 1..75: mol_type = other DNA
atgaacagaatcagtcgctattattttcaccgctcagtactttccttattgatagctgccatgatatatgccccg

SEQ ID NO: 470705 - DNA, 75 bp, synthetic construct
  source 1..75: mol_type = other DNA
tcgaggtcatggactcacggaaggcggtgcggatcaggctggtaaatattgatgcaccggaaaagaaacaggatt

SEQ ID NO: 470706 - DNA, 75 bp, synthetic construct
  source 1..75: mol_type = other DNA
gcatcgacctgacgacctccaatgccagcggtatcttcgtgattcgtccaaccaaagcgggcaacaacggcaaga

SEQ ID NO: 470707 - DNA, 75 bp, synthetic construct
  source 1..75: mol_type = other DNA
cagaacgaagccagacaacaaaaacgtgggctctggtcagatgctgatccggttcccccctggatatggagacac

SEQ ID NO: 470708 - DNA, 75 bp, synthetic construct
  source 1..75: mol_type = other DNA
tccggttccccctggatatggagacaccgtaaataaagcgatggcaatcttatcattcatctgttctcagcggga

SEQ ID NO: 470709 - DNA, 75 bp, synthetic construct
  source 1..75: mol_type = other DNA
caatgaaatggagatttatccgggagtgaccttttcagaagagttagaggggcaactctttgtcgatcatgcttg

SEQ ID NO: 470710 - DNA, 75 bp, synthetic construct
  source 1..75: mol_type = other DNA
ggtcatgttccgcgcccagctcaatgagcaggatttaccgctttcgctaaccgtagtcggcattgcaccggaaaa

SEQ ID NO: 470711 - DNA, 75 bp, synthetic construct
  source 1..75: mol_type = other DNA
ctgcagggagaagtacgacagcagaaacgtggtctgtgggcagacagcgctcctgttccgccctgggtatggtgc

SEQ ID NO: 470712 - DNA, 75 bp, synthetic construct
  source 1..75: mol_type = other DNA
ttgcagaaattgactcagaaaagattaaccaatctgcttgagtctactgaaaaacctttgatggataatatacat

SEQ ID NO: 470713 - DNA, 75 bp, synthetic construct
  source 1..75: mol_type = other DNA
tcgatcatgcttgatatggaaaagctgattagcgcgtatcgacgtatgctgcgacaagggaatcatgcgctgacg

SEQ ID NO: 470714 - DNA, 75 bp, synthetic construct
  source 1..75: mol_type = other DNA
gaatcacggatcgaagtgagctgcgtaaaaagttttccattaagcgactcaatgaaatggagatttatccgggag

SEQ ID NO: 470715 - DNA, 75 bp, synthetic construct
  source 1..75: mol_type = other DNA
tcagagtttttaattgcgtttttgatttatttgttttatttaagggagcttccagagtgtagaatacgaataaaa

SEQ ID NO: 470716 - DNA, 75 bp, synthetic construct
  source 1..75: mol_type = other DNA
caaagatacccttcttctggactatcctccttctggtaaccagatacatttccatattttccctgacgaatcagc

SEQ ID NO: 470717 - DNA, 75 bp, synthetic construct
  source 1..75: mol_type = other DNA
atgagtcctgataatatcagttctgctgtcaatcgcttctcaggttggccatctaatgatcctctaaaaacagat

SEQ ID NO: 470718 - DNA, 75 bp, synthetic construct
  source 1..75: mol_type = other DNA
cgcccacagatttgccgggttgaagaccagtatttactgaattatcagtctcagtacagctggcaggagtttatt

SEQ ID NO: 470719 - DNA, 75 bp, synthetic construct
  source 1..75: mol_type = other DNA
cagtggctggcgttaagtgcgctgaaccagtggctggcacctgagcgcgatttaagcaatgcctccaatgccgct

SEQ ID NO: 470720 - DNA, 75 bp, synthetic construct
  source 1..75: mol_type = other DNA
aacaccattgctatctacaccacccatcgcattctggtagaaatattcagcttaactctgcttgcgcaaatgaac

SEQ ID NO: 470721 - DNA, 75 bp, synthetic construct
  source 1..75: mol_type = other DNA
ctgtgcaggtaataaagatgattgccgccatccttgacccacatcggatagtcgttggaattgatacactttata

SEQ ID NO: 470722 - DNA, 75 bp, synthetic construct
  source 1..75: mol_type = other DNA
gaaaaagagaaattccgtataacgcaattcagtgaagctgaaatacgtggtattggaacaaaaatcgcggcagag

SEQ ID NO: 470723 - DNA, 75 bp, synthetic construct
  source 1..75: mol_type = other DNA
gcgagctcattaacccactggccaggttcccgcagaacctcacaatgataatttttgacccaatgaaccctgggc

SEQ ID NO: 470724 - DNA, 75 bp, synthetic construct
  source 1..75: mol_type = other DNA
gtggatgacggcccataacatcgctttcgtggtggtgaatatcaatattaactatcgtcgtccggcggtattaag

SEQ ID NO: 470725 - DNA, 75 bp, synthetic construct
  source 1..75: mol_type = other DNA
tgaatcctgactttgtgattgttggcgaaacgcgctcctataactgggaaatgatgcataaagcagcctatttcg

SEQ ID NO: 470726 - DNA, 75 bp, synthetic construct
  source 1..75: mol_type = other DNA
gttttatacctccgcgatggcaaccgccgatttcctgcgtcgtcaggaaggtaaaaaagcgtatgtggtgggcga

SEQ ID NO: 470727 - DNA, 75 bp, synthetic construct
  source 1..75: mol_type = other DNA
gttttatacctctgcgatggcgactgccgatttcctgcgtcgccaggaaggcaagaaagcatatgtggtgggcga

SEQ ID NO: 470728 - DNA, 75 bp, synthetic construct
  source 1..75: mol_type = other DNA
aaaatttcacaacgcgcattcagcgatctgttgttctccccgccttctctgcctgcaaccagttactctcgctaa

SEQ ID NO: 470729 - DNA, 75 bp, synthetic construct
  source 1..75: mol_type = other DNA
gaagccgttaatctgacaaccacgccttgctggaagcgtctgaaacggctggaggatgacggtatccttatcggc

SEQ ID NO: 470730 - DNA, 75 bp, synthetic construct
  source 1..75: mol_type = other DNA
aactatctgccatgacaaagcgtttgtccgtgcactgcgcaaagcgtttgaccttccgcatattaaaaaagccag

SEQ ID NO: 470731 - DNA, 75 bp, synthetic construct
  source 1..75: mol_type = other DNA
atgtcgcggcggagtttcgttgccgtggtgacgatctgctgggtatttatgccgatgctattcgtgaacaggttc

SEQ ID NO: 470732 - DNA, 75 bp, synthetic construct
  source 1..75: mol_type = other DNA
tatatactagatataatagcatgttttttttggttgtggttatgatttcatctatcgcaacattaattccgtctg

SEQ ID NO: 470733 - DNA, 75 bp, synthetic construct
  source 1..75: mol_type = other DNA
caaagcagacttatcacaaaatggggaaagtgatatagccagcaatacactaaatcactggctacatcgcataca

SEQ ID NO: 470734 - DNA, 75 bp, synthetic construct
  source 1..75: mol_type = other DNA
tccaggttgccgacatgaaacgctacgacgagttttataagcgtctggtaaacagcgtaccggggctgtcggacg

SEQ ID NO: 470735 - DNA, 75 bp, synthetic construct
  source 1..75: mol_type = other DNA
aaaattctgctgatgcacacgccaaccgtattaacagaaaccgtcgccgatacgctgatggcgctggtgttgtct

SEQ ID NO: 470736 - DNA, 75 bp, synthetic construct
  source 1..75: mol_type = other DNA
gacgcgttatggcatggccgcctgtgccgtggataacttgattgatgcgttacaaggaaaggttgagaagaactg

SEQ ID NO: 470737 - DNA, 75 bp, synthetic construct
  source 1..75: mol_type = other DNA
gttgcgggcttgctggtaagaaaactttcacagcgcgcattcagcgatctgttgttctccccgccttctctgccc

SEQ ID NO: 470738 - DNA, 75 bp, synthetic construct
  source 1..75: mol_type = other DNA
atttacgcaaagcggtcgaactgtatcgccacttcgcatcccgcgtgcaactgagttttggcatcgggacacgtc

SEQ ID NO: 470739 - DNA, 75 bp, synthetic construct
  source 1..75: mol_type = other DNA
cttataagttgcatatgcagcaagccgtgtttcatcactattacgatgtgcatgtcgcggcggagtttcgttgcc

SEQ ID NO: 470740 - DNA, 75 bp, synthetic construct
  source 1..75: mol_type = other DNA
atcgctatcgctcaccgcaggccgacgttgcgcaagccctcgacacgctggaaagcaaattagtcgacttctcgg

SEQ ID NO: 470741 - DNA, 75 bp, synthetic construct
  source 1..75: mol_type = other DNA
aatgtgaatacttcgatgccatgattcgtggagagaaaacggaagagtatcgcttgtgtaatgactactggaata

SEQ ID NO: 470742 - DNA, 75 bp, synthetic construct
  source 1..75: mol_type = other DNA
tatgacggatatgaaatcaagacaatcacacatccccacttcggcgataaaccggtaaaggtatacgcgataaag

SEQ ID NO: 470743 - DNA, 75 bp, synthetic construct
  source 1..75: mol_type = other DNA
atgaaaattattgctgcagatgtttttgttacttgcccaggacgtaatttcgttacgcttaaaataaccactgaa

SEQ ID NO: 470744 - DNA, 75 bp, synthetic construct
  source 1..75: mol_type = other DNA
cggacaggcggcagcccgtgaagagaaagaaaacgcgcaattacttcagcatgaagtggctgccctgaaacacat

SEQ ID NO: 470745 - DNA, 75 bp, synthetic construct
  source 1..75: mol_type = other DNA
gccatgcaggctgcagaaaatgcagtggcagaacaggaaatcagggcagccggacagacagcagcccgtgaagag

SEQ ID NO: 470746 - DNA, 75 bp, synthetic construct
  source 1..75: mol_type = other DNA
cggcatcagacccggcatctgcactggcgctggcccgccagcaccccgaaagtggtgttgtgctgcaacaggata

SEQ ID NO: 470747 - DNA, 75 bp, synthetic construct
  source 1..75: mol_type = other DNA
tcggcttgatttgaattttgacagatctgaagctattcgcgataagaggtatgacccaaatgaaaaaggtgacaa

SEQ ID NO: 470748 - DNA, 75 bp, synthetic construct
  source 1..75: mol_type = other DNA
gacttgcagcggaaacaatagagcaaaggggtaaacaaaacgggtacgacagaaaagaggaaaagtcagcgccaa

SEQ ID NO: 470749 - DNA, 75 bp, synthetic construct
  source 1..75: mol_type = other DNA
tggagtggcaaacacacccgtctggcagcgaatattttgggcctcgctcatgggcattgtcgcaattgcgcttct

SEQ ID NO: 470750 - DNA, 75 bp, synthetic construct
  source 1..75: mol_type = other DNA
gggtaccaaattttggcgttcaggagtacatgggctattccgaacaaatgcttgaagttttcccgcacagctggc

SEQ ID NO: 470751 - DNA, 75 bp, synthetic construct
  source 1..75: mol_type = other DNA
tgcggaaaaccaggaatgcttccgtctcattcgccaacataccgtcacacccatcgcagtgggtgaagtcttcaa

SEQ ID NO: 470752 - DNA, 75 bp, synthetic construct
  source 1..75: mol_type = other DNA
tcaaggaggcgcgtttagaggctattttgagcaataacagcgatccgacagacacactaattgatttaattagct

SEQ ID NO: 470753 - DNA, 75 bp, synthetic construct
  source 1..75: mol_type = other DNA
ggtcttttcccgtcaggatgtggtactggaggcactgaaagcgcatccgtcagtgacaccatacggtattcacca

SEQ ID NO: 470754 - DNA, 75 bp, synthetic construct
  source 1..75: mol_type = other DNA
tgaaatcaagacaatcacacatccgcacttcggcgataaaccggtaaaggtgttcgcgataaaggtgaatattga

SEQ ID NO: 470755 - DNA, 75 bp, synthetic construct
  source 1..75: mol_type = other DNA
gctatcggaaccgcgctggcggaagcatcagcaaataaggccagcaccgccagcgcagtcgcagctttggttcct

SEQ ID NO: 470756 - DNA, 75 bp, synthetic construct
  source 1..75: mol_type = other DNA
agcgagaagtttcagaactgccgatctctattgccattggtgacgcgactacaacgaaatcgcttgaggactctg

SEQ ID NO: 470757 - DNA, 75 bp, synthetic construct
  source 1..75: mol_type = other DNA
atggcgctctggttactggtattgcagaacgtgcccgtgggaattgcctatcccatgctgagcctgaatttcgtc

SEQ ID NO: 470758 - DNA, 75 bp, synthetic construct
  source 1..75: mol_type = other DNA
gttgtgtcagaaacaggcaaccggctttgtggcaataaaaaagcggcgcaaacatatcgtactgtggctgggact

SEQ ID NO: 470759 - DNA, 75 bp, synthetic construct
  source 1..75: mol_type = other DNA
ggcgctggcttgtcttggccttgcgatggtgctttggctactggtcttacagaatgtaccggtgggcattgccta

SEQ ID NO: 470760 - DNA, 75 bp, synthetic construct
  source 1..75: mol_type = other DNA
atcacacatccgcactttggcgataaaccggtaagggtgttcgctcttacggtaaataccagcactgaatgtcaa

SEQ ID NO: 470761 - DNA, 75 bp, synthetic construct
  source 1..75: mol_type = other DNA
atcacacatccgcactttggcgataaaccggtaacggtgttcgctcttagggtaaataccagcactgaatgtcaa

SEQ ID NO: 470762 - DNA, 75 bp, synthetic construct
  source 1..75: mol_type = other DNA
atcacacatccgcactttggcgataaaccggtaacggtgttcgctcttacggtaaatagcagcactgaatgtcaa

SEQ ID NO: 470763 - DNA, 75 bp, synthetic construct
  source 1..75: mol_type = other DNA
gaattgatgttccgtatgacggatatgaagtgaagacaatcacacatccgcacttcggcgataaaccggtaaagg

SEQ ID NO: 470764 - DNA, 75 bp, synthetic construct
  source 1..75: mol_type = other DNA
tgaaataaagacaattacacatccgcactttggagagaatccggttaaggtatttgcgataaaggttaatatcaa

SEQ ID NO: 470765 - DNA, 75 bp, synthetic construct
  source 1..75: mol_type = other DNA
tgaaatcaagacaatcacacatccgcacatcggcgataaaccggtaaatgtgttcgcgataaaggtaaatattga

SEQ ID NO: 470766 - DNA, 75 bp, synthetic construct
  source 1..75: mol_type = other DNA
aaagccttagcatggcgactattgctcctacggctgcacgtaacccaattccctggcagagaaggttacgcaata

SEQ ID NO: 470767 - DNA, 75 bp, synthetic construct
  source 1..75: mol_type = other DNA
ttcgatgaaaagctggcggcgaaatatccctacgaacctgcttatctgccagtcgcacgtctggaagatggcacg

SEQ ID NO: 470768 - DNA, 75 bp, synthetic construct
  source 1..75: mol_type = other DNA
ctgatgaacatgccgctggcgatatcattgcgcgcattggcagcctgacgcgtatgttgcgtgacagtctgcggg

SEQ ID NO: 470769 - DNA, 75 bp, synthetic construct
  source 1..75: mol_type = other DNA
acgctgggatgactggttcgccgatccgattgaccttgccgacgcccgtgaactggtgacagatacgcggcaatt

SEQ ID NO: 470770 - DNA, 75 bp, synthetic construct
  source 1..75: mol_type = other DNA
ggaaggaaatagccggacgctgagacagttcacgtcagacctggcattaaatgccggtatgaacctggactggtc

SEQ ID NO: 470771 - DNA, 75 bp, synthetic construct
  source 1..75: mol_type = other DNA
gtacgctgattcagcatacattgaacctgagttgaataaacttttccgaactctggagaacgagcaattctttca

SEQ ID NO: 470772 - DNA, 75 bp, synthetic construct
  source 1..75: mol_type = other DNA
gccgatcttgcttcgctttaccaggtacgtactggctcacatggtccttccgatttgtcaccagtctgcatggct

SEQ ID NO: 470773 - DNA, 75 bp, synthetic construct
  source 1..75: mol_type = other DNA
atgatatcggataaactcataacgctggcgaagatcctctgtgtaatcgtcggcatttcatttttagtcattctg

SEQ ID NO: 470774 - DNA, 75 bp, synthetic construct
  source 1..75: mol_type = other DNA
tggcgaagggcctttgtgtaatcgtcggtatttcattttcactaatgctggttgttctttttcttttcctgccct

SEQ ID NO: 470775 - DNA, 75 bp, synthetic construct
  source 1..75: mol_type = other DNA
tgatgggtgaagtgggtaaacagagcacgctgaaaatggaccgcagcggtatgaccctggcggaagcgctgggta

SEQ ID NO: 470776 - DNA, 75 bp, synthetic construct
  source 1..75: mol_type = other DNA
ggtctggaagaattacgtagctttgatcgcatggagcgtgatccaacctttcgctggtcgatgcgtgtttaccag

SEQ ID NO: 470777 - DNA, 75 bp, synthetic construct
  source 1..75: mol_type = other DNA
catttcattttcagcaacgctgattgctcttcttctttctatggcatggatgacgttgaattcggcagggctggt

SEQ ID NO: 470778 - DNA, 75 bp, synthetic construct
  source 1..75: mol_type = other DNA
cgcagctgctttcgaccgacagctcggtgctgatcgacagcagcagtagcgcggcgcagggcgtggggctccgcc

SEQ ID NO: 470779 - DNA, 75 bp, synthetic construct
  source 1..75: mol_type = other DNA
ggtcgcttcttatctgaaagatcatctttgcccacaattaattggccgcgatgccagccgtatcgaagatatctg

SEQ ID NO: 470780 - DNA, 75 bp, synthetic construct
  source 1..75: mol_type = other DNA
tttgtcacttctgctgactccggggcaatggttgttgataccctggcttcaggtggaattgttaacactcctgtc

SEQ ID NO: 470781 - DNA, 75 bp, synthetic construct
  source 1..75: mol_type = other DNA
tttgcaggttaatgcgggcctgaaccatcttttcggggtgccagtgaatgaaatggtacaggtcactctgatcgt

SEQ ID NO: 470782 - DNA, 75 bp, synthetic construct
  source 1..75: mol_type = other DNA
acacttcgctccgcactttatcccatcataggtgatcgtatctatggccctgttggacatgctgtcgatattttc

SEQ ID NO: 470783 - DNA, 75 bp, synthetic construct
  source 1..75: mol_type = other DNA
gtaacgtctgctgattcgggggcaatggttgtggatactctggcatcaggtggggtggcaaacacgcccgtctgg

SEQ ID NO: 470784 - DNA, 75 bp, synthetic construct
  source 1..75: mol_type = other DNA
gataagccacatcagtgacgccgccgaggatcgtattcgccttgaagtcgatttgggcaacgagctgaattatat

SEQ ID NO: 470785 - DNA, 75 bp, synthetic construct
  source 1..75: mol_type = other DNA
cgttaccgaacctgtgcccactgtcacagctgggacgtcggtgcgcccgggcggcaatggtcatgctcttgggtt

SEQ ID NO: 470786 - DNA, 75 bp, synthetic construct
  source 1..75: mol_type = other DNA
ctttgtccacaattaattggccgcgatgccagccgtatcgaagatatctggcaattcttttataaaggtgcttac

SEQ ID NO: 470787 - DNA, 75 bp, synthetic construct
  source 1..75: mol_type = other DNA
atgtcgaaaggtaaaggtctggcttatgaacccgcaaccaaaggacagtggccggaagagcagctgtggtcgacg

SEQ ID NO: 470788 - DNA, 75 bp, synthetic construct
  source 1..75: mol_type = other DNA
cttcagaaaagtatctcgattttacgccgaagctctttgaggccgtgcgcaacaagttcggttttaatgaacatc

SEQ ID NO: 470789 - DNA, 75 bp, synthetic construct
  source 1..75: mol_type = other DNA
attccaaaacaaatgcttcgttaatttcaatgtttcaaagaatatcagatatcattgttatttttggagtacagt

SEQ ID NO: 470790 - DNA, 75 bp, synthetic construct
  source 1..75: mol_type = other DNA
gtggtaattattgatgaaaatgcatatataccgtttagacataatatattttcagttgtaaaagactattatagc

SEQ ID NO: 470791 - DNA, 75 bp, synthetic construct
  source 1..75: mol_type = other DNA
atggcctggcgaagggcaaagggctggcgtacgaaccggcaaccaaaggtcagtggccggaagagcagttgtggt

SEQ ID NO: 470792 - DNA, 75 bp, synthetic construct
  source 1..75: mol_type = other DNA
ttgaaagcggttggaaatggaagtatctggtgaagaagcatcgcgaaggggagttaatcacccgttacatagaag

SEQ ID NO: 470793 - DNA, 75 bp, synthetic construct
  source 1..75: mol_type = other DNA
tgcgcttatttctggcggcgtttaccgggttttgcctggtgattttgattcgaaacgctggcctgccaatatagc

SEQ ID NO: 470794 - DNA, 75 bp, synthetic construct
  source 1..75: mol_type = other DNA
cgtccgccattggtgatgcgttaatttttcccacgctatcgtttatggcatttatgccggaaatatcagctatgc

SEQ ID NO: 470795 - DNA, 75 bp, synthetic construct
  source 1..75: mol_type = other DNA
tcaagcccgttctacatcttcgatgaagcctcagcggttcctgacaaaatttgggaagtagcagagggcggcctt

SEQ ID NO: 470796 - DNA, 75 bp, synthetic construct
  source 1..75: mol_type = other DNA
ttgaaagtggttggaaatggaaatatctggtgaagaaacaccgtgaaggtgagttgatcacccgttacatagagg

SEQ ID NO: 470797 - DNA, 75 bp, synthetic construct
  source 1..75: mol_type = other DNA
acaagcatatgaatccggaactggtcaatcgcatgaagcaaaccattcgggccagacggaagcgccattttaatg

SEQ ID NO: 470798 - DNA, 75 bp, synthetic construct
  source 1..75: mol_type = other DNA
aagaaaagaagagggaagctgagtatcgcacagcgttgtcttctatcaccactaaggtgctggacgcatttcttc

SEQ ID NO: 470799 - DNA, 75 bp, synthetic construct
  source 1..75: mol_type = other DNA
ttgccggtgatgctgacggggcgcgtaaagcaatgatggcgcaccttagttttgttcacaccaccatgaaacgat

SEQ ID NO: 470800 - DNA, 75 bp, synthetic construct
  source 1..75: mol_type = other DNA
gtggaagctgcaatttttattttgtgttactggcaggtctggtttatctggtgcgtattggcgcgctggactgga

SEQ ID NO: 470801 - DNA, 75 bp, synthetic construct
  source 1..75: mol_type = other DNA
cgttatttctggctggagaaggaatacagcggcgatacaaaatgaagcagcaatggctttctccttgctacacaa

SEQ ID NO: 470802 - DNA, 75 bp, synthetic construct
  source 1..75: mol_type = other DNA
gggaatttggtgtgttgcaccagcgggtagtcgaaattctaggggtgtcgttgcttgaggttattgctactgggg

SEQ ID NO: 470803 - DNA, 75 bp, synthetic construct
  source 1..75: mol_type = other DNA
acgatcaactgcgagaggctgaatatcgcaaggcgctatcgtctataactacaaaggttctcgactctttcttga

SEQ ID NO: 470804 - DNA, 75 bp, synthetic construct
  source 1..75: mol_type = other DNA
cataacgcagcgttcgatatcggctttatggactacgagttttcgttgcttaagcgcgatattccgaagaccaat

SEQ ID NO: 470805 - DNA, 75 bp, synthetic construct
  source 1..75: mol_type = other DNA
cggtggcgagctgacgcaatcccctggtctgagcacaacactgaggcattcgccggactacacaacgagcgcaaa

SEQ ID NO: 470806 - DNA, 75 bp, synthetic construct
  source 1..75: mol_type = other DNA
gaagcaataaccgaatatctggatctggattggttcaggcagcagcatctgacatcacaaaatccattcgatatc

SEQ ID NO: 470807 - DNA, 75 bp, synthetic construct
  source 1..75: mol_type = other DNA
tggactggttcaggcagcagcagcggacgtcgcaaaatccgttcgatatcattccggctcatggcacatcctccg

SEQ ID NO: 470808 - DNA, 75 bp, synthetic construct
  source 1..75: mol_type = other DNA
tgctgctaacgttcgccttcccggtagccaagaaaactaatgacccacggcagcagcaggggaaagctattactg

SEQ ID NO: 470809 - DNA, 75 bp, synthetic construct
  source 1..75: mol_type = other DNA
gtcgaagcgcctgcgaattcccggtcagcagaaccagcaaggcaaggccatcacagattacgacccgtttgcgtg

SEQ ID NO: 470810 - DNA, 75 bp, synthetic construct
  source 1..75: mol_type = other DNA
cgttcgcctggtaaaggcgatgcgctactgctgacgtttgcgttccctgtgtcgaagcgtctgcgaattcccggg

SEQ ID NO: 470811 - DNA, 75 bp, synthetic construct
  source 1..75: mol_type = other DNA
aggtagccgatgagttcatggactatatccgcggcgcggagttggtgatccataacgcagcgttcgatatcggct

SEQ ID NO: 470812 - DNA, 75 bp, synthetic construct
  source 1..75: mol_type = other DNA
attactcgatgcccagatccttgcggaagtttatctggcgatgaccggtggtcaaacgtcgatggcttttgcgat

SEQ ID NO: 470813 - DNA, 75 bp, synthetic construct
  source 1..75: mol_type = other DNA
cacgccagatcgttctcgataccgaaactaccggtatgaaccagattggtgcgcactatgaaggccacaagatca

SEQ ID NO: 470814 - DNA, 75 bp, synthetic construct
  source 1..75: mol_type = other DNA
gtgacagatgcagtgttatctcctgaagagcagttaatcgaagatattgcagggttcactcacgatccgcttggc

SEQ ID NO: 470815 - DNA, 75 bp, synthetic construct
  source 1..75: mol_type = other DNA
cgtcgaacattgcggatctggtgtgggaagttgctgagggtgcgcttacggacgaagacactgagattatctggg

SEQ ID NO: 470816 - DNA, 75 bp, synthetic construct
  source 1..75: mol_type = other DNA
tgtttttgcgacagatgaagagcttgcggcacatgaagcccgtctcgatctggtgcagaagaaaggcggaagctg

SEQ ID NO: 470817 - DNA, 75 bp, synthetic construct
  source 1..75: mol_type = other DNA
tatctttcttatcgttgccattggcctatgttgcctgatgctggtaggcggttggtttttaggcggtcgcgcacg

SEQ ID NO: 470818 - DNA, 75 bp, synthetic construct
  source 1..75: mol_type = other DNA
cctggtatcatctcgatcaccagttatggacgccacaaaatctgactataccggtgattacggcaacctggattt

SEQ ID NO: 470819 - DNA, 75 bp, synthetic construct
  source 1..75: mol_type = other DNA
gtgggcgaaattccctggcttgcagaaaatccagaaaatgcggcaaccggaaagtacataaaccttgccttgttg

SEQ ID NO: 470820 - DNA, 75 bp, synthetic construct
  source 1..75: mol_type = other DNA
aaacggaataagccagggaaggcgacaggtaaaggtaaaccagttggtgataaatggctggatgatgcaggtaaa

SEQ ID NO: 470821 - DNA, 75 bp, synthetic construct
  source 1..75: mol_type = other DNA
ccgacagacccggtgttgtaccgctcaggcagtaacagcccgtttcctgcagaactgctaatccggcatgcggaa

SEQ ID NO: 470822 - DNA, 75 bp, synthetic construct
  source 1..75: mol_type = other DNA
aggttgagctaagaaccgatgcgccgatagaactggaagtgccggtcacttaccggggaaacctgcagatagccc

SEQ ID NO: 470823 - DNA, 75 bp, synthetic construct
  source 1..75: mol_type = other DNA
agggggaagaacgtgctaaattcaggaaagaaatcgccagagaacgtaagaaacgttttgctgtgaaaacaggga

SEQ ID NO: 470824 - DNA, 75 bp, synthetic construct
  source 1..75: mol_type = other DNA
caggctcgaaaagcgaataaagcacattctcagtgtgcttagtcgttcaccaaaggaaagtattcccgtatcact

SEQ ID NO: 470825 - DNA, 75 bp, synthetic construct
  source 1..75: mol_type = other DNA
attaatcaggggactgtattgtctgttattgttccgcgaaatatcgacttttcatccgtatatgaacttcagtaa

SEQ ID NO: 470826 - DNA, 75 bp, synthetic construct
  source 1..75: mol_type = other DNA
ataatgacgcgggaaatcgcggaattatcgaagtaaaaggtaaagcagcaccaaaaaaaatattaatcctcatca

SEQ ID NO: 470827 - DNA, 75 bp, synthetic construct
  source 1..75: mol_type = other DNA
ctggcggtcacagaatgtggcaaatggccgggcttaaagctcagcgggcgcagacggatgtaaataataagcagg

SEQ ID NO: 470828 - DNA, 75 bp, synthetic construct
  source 1..75: mol_type = other DNA
gacattaagcccaggtgttacaaataatactgataaggatgttcgcccggcaggatttactcaggggggtaatac

SEQ ID NO: 470829 - DNA, 75 bp, synthetic construct
  source 1..75: mol_type = other DNA
tggtcagcatcttggttcatttgatcctaaaaccggtaagcagttgaaaggtccagatccgaaacgaaatattaa

SEQ ID NO: 470830 - DNA, 75 bp, synthetic construct
  source 1..75: mol_type = other DNA
ccgacagacccggtgctgtaccgctcaggcagtaacagcccgttgcctgcagagctgataatccggcatgcagaa

SEQ ID NO: 470831 - DNA, 75 bp, synthetic construct
  source 1..75: mol_type = other DNA
gtaagcgaaattactaaaaataaaacacagagcaaggtacagccaagttctatatcgaatgtgaccaaaacaaat

SEQ ID NO: 470832 - DNA, 75 bp, synthetic construct
  source 1..75: mol_type = other DNA
taaggatagctggataagctgtagtgagcgaatgcctgtaatcggcgagctaaattggagaactggttttccttt

SEQ ID NO: 470833 - DNA, 75 bp, synthetic construct
  source 1..75: mol_type = other DNA
accaatgcctaatcctcttagcatgtacgcggttgatgctgttgccgctattgcagaggtgagaggctggaatgc

SEQ ID NO: 470834 - DNA, 75 bp, synthetic construct
  source 1..75: mol_type = other DNA
atggattactggcgtaatgaagtagaaagattatcagcaggtatacgccgaggcccacgaattaaacgagtggtg

SEQ ID NO: 470835 - DNA, 75 bp, synthetic construct
  source 1..75: mol_type = other DNA
gtaaaaaagatcattccaaataaagaacagagcaaaacgcaacctagtcctgtcccggagtcagttccaaaagaa

SEQ ID NO: 470836 - DNA, 75 bp, synthetic construct
  source 1..75: mol_type = other DNA
tttaatatagacgtttcaaatgacaaaatagctaaaaaattagtgcaagagttgaaattgaatttatcttctgat

SEQ ID NO: 470837 - DNA, 75 bp, synthetic construct
  source 1..75: mol_type = other DNA
gtgtcgctggcgctgacagcaggcctttctattgtgaaatcatcccagtccactgctcaggttgaaggtgcgtgc

SEQ ID NO: 470838 - DNA, 75 bp, synthetic construct
  source 1..75: mol_type = other DNA
cagcgtggtgaaggtaacccgcacaccgacagacccggtgctgtaccggagtggagagacgacgcctcttcccgc

SEQ ID NO: 470839 - DNA, 75 bp, synthetic construct
  source 1..75: mol_type = other DNA
cagtgtggtgaaggtgacacgtacaccgacagacccggtgctgtaccggagtggagacacgacgcctcttcccgg

SEQ ID NO: 470840 - DNA, 75 bp, synthetic construct
  source 1..75: mol_type = other DNA
gtgactacctcaaggatggagaatggcctattgataatgggacaattgaagtatacgccgcccctccagtgccag

SEQ ID NO: 470841 - DNA, 75 bp, synthetic construct
  source 1..75: mol_type = other DNA
ctttactccggtgtgctcctgtttattctgtatttttgtttttttgccctgactgacctgcagaaagctgatgaa

SEQ ID NO: 470842 - DNA, 75 bp, synthetic construct
  source 1..75: mol_type = other DNA
tttgattacagcgattgtcatttccccggtaattatctggtcgtgggatacggtaaaagaaacaactgcaggtga

SEQ ID NO: 470843 - DNA, 75 bp, synthetic construct
  source 1..75: mol_type = other DNA
catggccctatcgtcagctcaatccggatttggtgttttctctggttgaagcctggctggcagacaacggcggcg

SEQ ID NO: 470844 - DNA, 75 bp, synthetic construct
  source 1..75: mol_type = other DNA
cgagatatgccattcaaaggaactcgccacaacgctcttgatgatgccattcaccaagccaaatacgtttcagcg

SEQ ID NO: 470845 - DNA, 75 bp, synthetic construct
  source 1..75: mol_type = other DNA
ctggaaactgctggcggagtcattgatcgggacaccattaaatggtggcttaaacaatcacgcgaagcgcaatct

SEQ ID NO: 470846 - DNA, 75 bp, synthetic construct
  source 1..75: mol_type = other DNA
ccgctatcctgcttgataccaaaggtccggaaatccgcaccatgaaactggaaggcggtaacgacgtttctctga

SEQ ID NO: 470847 - DNA, 75 bp, synthetic construct
  source 1..75: mol_type = other DNA
ccaccttcgacaacgtaattttacgcggagcttatgaacgagcaggacaaatctgcccatgggcgtactggaatg

SEQ ID NO: 470848 - DNA, 75 bp, synthetic construct
  source 1..75: mol_type = other DNA
atgacgcaactcgccagcctgacggcattcattgaaaacaatctgccggcacgcgcacgcattccgttcaccagt

SEQ ID NO: 470849 - DNA, 75 bp, synthetic construct
  source 1..75: mol_type = other DNA
tattgtccctggtggcctgagaacggttttcgcactattaatgatgccagaatatgggtaaaccgttttgtaaac

SEQ ID NO: 470850 - DNA, 75 bp, synthetic construct
  source 1..75: mol_type = other DNA
tcgcaagattattgctgcagaggtatttgccagcgaatctggaaaacatgcagcagaactactccagcgggcaat

SEQ ID NO: 470851 - DNA, 75 bp, synthetic construct
  source 1..75: mol_type = other DNA
atgaatattgtggtgcttatttccggcaacggaagtaatttgcaggcaattattgacgcctgcaaaaccaacaaa

SEQ ID NO: 470852 - DNA, 75 bp, synthetic construct
  source 1..75: mol_type = other DNA
tcgcctgccgtgcgctggggctggataccggcccgatgtcgggttttgatcgtcaacacgtagacgacgcttttt

SEQ ID NO: 470853 - DNA, 75 bp, synthetic construct
  source 1..75: mol_type = other DNA
tttgcgccatcgaagcgattcatcgtcacgccacaccctacgggctggtgtggttcgatcgcagttatcacgcgc

SEQ ID NO: 470854 - DNA, 75 bp, synthetic construct
  source 1..75: mol_type = other DNA
tcgcctgccgggcgctggggctggataccggcccgatgtcgggctttgaccgtcaacacgtggacgacgcctttt

SEQ ID NO: 470855 - DNA, 75 bp, synthetic construct
  source 1..75: mol_type = other DNA
tatctgtaaggtactgaacaacggcgatctgggtgaaaacaaaggcgtcaacctgccaggtgtttccatcgctct

SEQ ID NO: 470856 - DNA, 75 bp, synthetic construct
  source 1..75: mol_type = other DNA
cactgtattacgaagccaaaaatgacaaagtaagaaaacgtctcggtattaaaggcggtttttactgggctgaag

SEQ ID NO: 470857 - DNA, 75 bp, synthetic construct
  source 1..75: mol_type = other DNA
aaacaggccgaatggtgcgaagtgtttgaccgtggacgtaccacatcgctgctgctgttcgaacatgttcatgcc

SEQ ID NO: 470858 - DNA, 75 bp, synthetic construct
  source 1..75: mol_type = other DNA
gccggcactggctgaaaaagacaaacaggatctgatcttcggttgcgaacaaggtgtagactttgttgcagcttc

SEQ ID NO: 470859 - DNA, 75 bp, synthetic construct
  source 1..75: mol_type = other DNA
gatatcatctcgatgtctatcaacacgtcaataacgctcgctatctggagtttctcgaagaagcccgctgggatg

SEQ ID NO: 470860 - DNA, 75 bp, synthetic construct
  source 1..75: mol_type = other DNA
gccctggctatttcccacaacacaaagctgctcgacccgctggagattcgcgaccttcacaaactggtacgcgac

SEQ ID NO: 470861 - DNA, 75 bp, synthetic construct
  source 1..75: mol_type = other DNA
gcgaagcagcagcttcatcattagaaaaactcgactggaaaagacaagtggtgattgcggcggtttacggtttat

SEQ ID NO: 470862 - DNA, 75 bp, synthetic construct
  source 1..75: mol_type = other DNA
gacctgggtgaaaacaaaggtgtgaacctgcctggcgtttccattgccctgccagcactggctgaaaaagacaaa

SEQ ID NO: 470863 - DNA, 75 bp, synthetic construct
  source 1..75: mol_type = other DNA
aaactggaaggcggtaacgacgtttctctgaaagcgggtcagacctttactttcactactgataaatctgttatc

SEQ ID NO: 470864 - DNA, 75 bp, synthetic construct
  source 1..75: mol_type = other DNA
gccatcctcgacggtaccgacgcagtcatgctgtctggtgagtcagcaaaaggtaaatatccgctggaagcggtt

SEQ ID NO: 470865 - DNA, 75 bp, synthetic construct
  source 1..75: mol_type = other DNA
tctggatttcaacaacgacagccgtaaactgcgtatcactgaagcagtttgccgtggtgcagttgaaactgcaga

SEQ ID NO: 470866 - DNA, 75 bp, synthetic construct
  source 1..75: mol_type = other DNA
ggcacacaaaggcgacgtcgtggtaatggtttccggtgcgctggtaccaagcggcaccactaacaccgcatctgt

SEQ ID NO: 470867 - DNA, 75 bp, synthetic construct
  source 1..75: mol_type = other DNA
gttgacgatggtctgatcggtatggaagttaccgccattgaaggtaacaaagttatctgtaaagtactgaacaac

SEQ ID NO: 470868 - DNA, 75 bp, synthetic construct
  source 1..75: mol_type = other DNA
attgcaacgcatacgctcatcgccagcgcgtttgacagtcgtgaagcctatgaccgggagttgattcatgaaatc

SEQ ID NO: 470869 - DNA, 75 bp, synthetic construct
  source 1..75: mol_type = other DNA
aataatgggcaaagcgtgaaggctgggcaaaaaatcgccactatggggagcactgatgcggcatctgttcgcctg

SEQ ID NO: 470870 - DNA, 75 bp, synthetic construct
  source 1..75: mol_type = other DNA
ttgagtgcgggacgcctgaataaaaaatctctgggtatcgtgatgttgttatcgattggactgcttttggcgggc

SEQ ID NO: 470871 - DNA, 75 bp, synthetic construct
  source 1..75: mol_type = other DNA
aaagtttgttttacgagaaatgaaaactcttctggcgatccaccggcgtctaccccaagaaggtgtggcttcttt

SEQ ID NO: 470872 - DNA, 75 bp, synthetic construct
  source 1..75: mol_type = other DNA
atcggttggactgcttttggcgggctgttcgggtagcaaatcatccgatacaggaacgtattccggctccgttta

SEQ ID NO: 470873 - DNA, 75 bp, synthetic construct
  source 1..75: mol_type = other DNA
ttgcccgcattcagcggaactgttgaatatgggcaaattcagggaacaatagacaactttcaggaaatcaatgtg

SEQ ID NO: 470874 - DNA, 75 bp, synthetic construct
  source 1..75: mol_type = other DNA
gatgttgatattccgttacagttaaagggtatttctgtagaacagttagacttcgtacgtatccacgatattcaa

SEQ ID NO: 470875 - DNA, 75 bp, synthetic construct
  source 1..75: mol_type = other DNA
ctgggagaaatcccctggcttaaggaaaatccagaaaatgcactaaccggaaagtacattaatctcacatcattg

SEQ ID NO: 470876 - DNA, 75 bp, synthetic construct
  source 1..75: mol_type = other DNA
gtgagtaaacgctattttgttaccggaacggacaccgaagtgggtaaaaccgttgccagttgcgcactgttgcag

SEQ ID NO: 470877 - DNA, 75 bp, synthetic construct
  source 1..75: mol_type = other DNA
gacgaagacactgagattatctgggtggcgttcggaaacccgacacgtaacaccgggcgtttccgcgaatgtttc

SEQ ID NO: 470878 - DNA, 75 bp, synthetic construct
  source 1..75: mol_type = other DNA
ctactttattttggcgatctcgatgttgcgggcttaaaaatcgcccatcagttacgttgtaagttgcttaatgat

SEQ ID NO: 470879 - DNA, 75 bp, synthetic construct
  source 1..75: mol_type = other DNA
ccagagataataccctctttcgggaaacactggaaaaaggtgcactcaagcccttgctgtctcattcccccgaca

SEQ ID NO: 470880 - DNA, 75 bp, synthetic construct
  source 1..75: mol_type = other DNA
ttgacgccatgctttattatgctgaccgcgagcgccagcctggaatgacgcgtaaggaagcggagttatgtctgg

SEQ ID NO: 470881 - DNA, 75 bp, synthetic construct
  source 1..75: mol_type = other DNA
ctggccgccagtagggcaacgttgttggttatggccaacgacagggaaagttatcatgccgtattcgacagcaga

SEQ ID NO: 470882 - DNA, 75 bp, synthetic construct
  source 1..75: mol_type = other DNA
ggtagataaagcagggcgtaaaccggctctgaaaattggtttcagcgtgatggcgttaggcactctggtgctggg

SEQ ID NO: 470883 - DNA, 75 bp, synthetic construct
  source 1..75: mol_type = other DNA
cgaccagcgttgaaatgctgattgccgcccgtgtggtgctggggattgctgtcggaatcgcctcttatactgcac

SEQ ID NO: 470884 - DNA, 75 bp, synthetic construct
  source 1..75: mol_type = other DNA
cttcaaaatggcgggctttacgaccacagaacaacagatgattgcgactctggtcgtggggctgacctttatgtt

SEQ ID NO: 470885 - DNA, 75 bp, synthetic construct
  source 1..75: mol_type = other DNA
ctcttgccgacagaggggtttatatcgcgtcagaatcaactttttatcgcgtattaaatttagctaaccaactga

SEQ ID NO: 470886 - DNA, 75 bp, synthetic construct
  source 1..75: mol_type = other DNA
ttattcctggaatgtacgatgctttcaaagattatgggaataaacctgttacgaatgtagcagtagctccttttg

SEQ ID NO: 470887 - DNA, 75 bp, synthetic construct
  source 1..75: mol_type = other DNA
ataaattcataacgttgggaaaccaacatcataatcctctgacccacatgcaactgcagaagcttacttatattg

SEQ ID NO: 470888 - DNA, 75 bp, synthetic construct
  source 1..75: mol_type = other DNA
atggagccccctacgggagtgaatccttatttaacagcctgcggctggccattgcgctacgagagcagaagagcg

SEQ ID NO: 470889 - DNA, 75 bp, synthetic construct
  source 1..75: mol_type = other DNA
ttgtcgtgtacagagattattattatagaagcccccatgaataaatcgctcatcattttcggcatcgtcaacata

SEQ ID NO: 470890 - DNA, 75 bp, synthetic construct
  source 1..75: mol_type = other DNA
tttctggctcattcctgaaaccaagaatgtcacgctggaacatatcgaacgtaaactgatgtctggcgagaagtt

SEQ ID NO: 470891 - DNA, 75 bp, synthetic construct
  source 1..75: mol_type = other DNA
gacgcgggatcagcacacttccgctgattgatggcgtggaaattggcaccctggtggaactggcgcaatggacgc

SEQ ID NO: 470892 - DNA, 75 bp, synthetic construct
  source 1..75: mol_type = other DNA
cgttaaccgcgacaccgggaagatggacagcaagaacaagccattccgctctgtctacttcgagactggcggcga

SEQ ID NO: 470893 - DNA, 75 bp, synthetic construct
  source 1..75: mol_type = other DNA
gtggatataaactctgcatcaagtacggcaactttaagctatgtggcctgcaatggatttacatggactcatggt

SEQ ID NO: 470894 - DNA, 75 bp, synthetic construct
  source 1..75: mol_type = other DNA
tatttttatccctgtcaggctgtaatgatgctctggctgcaaaccagagtacaatattttactcgtttaatgata

SEQ ID NO: 470895 - DNA, 75 bp, synthetic construct
  source 1..75: mol_type = other DNA
aaatgattgatccggttactgtaaaagatgctttgtatggattaccagatattatcgatgccaattggcaatcag

SEQ ID NO: 470896 - DNA, 75 bp, synthetic construct
  source 1..75: mol_type = other DNA
gcgttggaggtctaagtcttggtgctgcacgtgctggatttgatgttaaaatggcagttgaaattgatcaacatg

SEQ ID NO: 470897 - DNA, 75 bp, synthetic construct
  source 1..75: mol_type = other DNA
ctccgcgctgggaagtgaacggcgaagacgtttacgcctcatcctgccctggcatgctggcactcggtcaggtta

SEQ ID NO: 470898 - DNA, 75 bp, synthetic construct
  source 1..75: mol_type = other DNA
agtggcgcgtgttttcaggaggcacggcgtgcttacgttaatggtcagggagtatgaaaacgcgcttcttcatca

SEQ ID NO: 470899 - DNA, 75 bp, synthetic construct
  source 1..75: mol_type = other DNA
ttttgaaatggaacggttagttcatcccaacaccattacaccgagagagagaggaatgttacatttttcaattga

SEQ ID NO: 470900 - DNA, 75 bp, synthetic construct
  source 1..75: mol_type = other DNA
cgttcgcgctggaagataagattgaagtggcgcgtgttttcaggagtcacggcgtgcttacgttaatggtcaggg

SEQ ID NO: 470901 - DNA, 75 bp, synthetic construct
  source 1..75: mol_type = other DNA
aatcccatacaatgtggccaaaactctcccaagagagaatgaaatgttattcttatttaagaatatcggcggatg

SEQ ID NO: 470902 - DNA, 75 bp, synthetic construct
  source 1..75: mol_type = other DNA
cattgtcactggtagcggcggcagtcatttcatggatagtttatttctatatgatctacttattgcttacccgcc

SEQ ID NO: 470903 - DNA, 75 bp, synthetic construct
  source 1..75: mol_type = other DNA
gaatttagcagatgctgaatttgaagatgtgaccctcaaagcaaacaaacgattaaaaccctctcaaatccacca

SEQ ID NO: 470904 - DNA, 75 bp, synthetic construct
  source 1..75: mol_type = other DNA
aaaagaaagagtttcggttctgttaatgacaacaaatatctgaatgcgatgtggcgcaaaggaggcaaccagtga

SEQ ID NO: 470905 - DNA, 75 bp, synthetic construct
  source 1..75: mol_type = other DNA
actggtttacaaattactgactgcagaacaggagtatgaaacgacaggaagcgaagaaacactcagggcggttat

SEQ ID NO: 470906 - DNA, 75 bp, synthetic construct
  source 1..75: mol_type = other DNA
atcgccgcttatgtttcatacaataccaacagatggttctatgaaaaagaagtaaaaggtattcatacctggagc

SEQ ID NO: 470907 - DNA, 75 bp, synthetic construct
  source 1..75: mol_type = other DNA
cgtgaactgattactgaattaattgagcttcatgaaaaactgaaggcacaaggagtcgatgatgcagccagtgat

SEQ ID NO: 470908 - DNA, 75 bp, synthetic construct
  source 1..75: mol_type = other DNA
atcagcatggcgaggtcctggttactgggatacttctggatatgttctgaccgcagccggaaacagcaacaccga

SEQ ID NO: 470909 - DNA, 75 bp, synthetic construct
  source 1..75: mol_type = other DNA
ctcctgatggaagtggcgcatttgcagaccagttaaacaatgccaccgcgccttttgttcagacgcggtttgcct

SEQ ID NO: 470910 - DNA, 75 bp, synthetic construct
  source 1..75: mol_type = other DNA
aaaaccgcaaaactggttcttaacgacggacaaattcttgccatacaggtaaacgatactggtgatatatcggct

SEQ ID NO: 470911 - DNA, 75 bp, synthetic construct
  source 1..75: mol_type = other DNA
gtggaattccattacggtaaaatgatgctggaaaatccttcaccagagctgctcacggtgttgatccgtgagctg

SEQ ID NO: 470912 - DNA, 75 bp, synthetic construct
  source 1..75: mol_type = other DNA
gcattcttccggcagaaatgattattcgccaacgcgtaaagccaatgccatcgagagaagaattgcttaagagaa

SEQ ID NO: 470913 - DNA, 75 bp, synthetic construct
  source 1..75: mol_type = other DNA
tcgagagaggaattgcttaagagaaattcttttccgtcagtaaatcaaaacaaatatctgaatgcgatgtggcgc

SEQ ID NO: 470914 - DNA, 75 bp, synthetic construct
  source 1..75: mol_type = other DNA
attcggcaaaccagaagatatcggctgggctgcaacctatctggcttctgatgctgccggtttcgttagcggtca

SEQ ID NO: 470915 - DNA, 75 bp, synthetic construct
  source 1..75: mol_type = other DNA
tatgaccacggagcttgccgttcatgggattcgcgtcaatggtattgcgccaggctggatcgatacaccaatgtt

SEQ ID NO: 470916 - DNA, 75 bp, synthetic construct
  source 1..75: mol_type = other DNA
ccgcatatgaaacaacgcggtaaaggctgtgtgctttttactgcatcgatgacctcatttcttgggcagcctctg

SEQ ID NO: 470917 - DNA, 75 bp, synthetic construct
  source 1..75: mol_type = other DNA
gattgcgatactttgatttactactggccgaagaataaaccggaagcccagttccagttgatgaatttactttct

SEQ ID NO: 470918 - DNA, 75 bp, synthetic construct
  source 1..75: mol_type = other DNA
ctgtaaggaactggtgtatgcctatgcaatgtggatcagcccgtcattccatctgaaggtgatccgtactttcga

SEQ ID NO: 470919 - DNA, 75 bp, synthetic construct
  source 1..75: mol_type = other DNA
acgctgtcgctgagtgcactgctgaagcagtatggtatccgcctgacggctaatcaggcatatcaccagatggcg

SEQ ID NO: 470920 - DNA, 75 bp, synthetic construct
  source 1..75: mol_type = other DNA
aatgccgggtgtaccggtggaggccttttccggacgctcacagactatccgggaggccgtcggggaagacgcctc

SEQ ID NO: 470921 - DNA, 75 bp, synthetic construct
  source 1..75: mol_type = other DNA
ctaccggaaggatggaaattcagacaagagaatgcagccacgcccaagctgaataccaaactggtttcatggtct

SEQ ID NO: 470922 - DNA, 75 bp, synthetic construct
  source 1..75: mol_type = other DNA
ggaaacagcgtatcttcgtcaacgcccgccgccaccccgactccaaccggctccacagtcaagtctatcccgctc

SEQ ID NO: 470923 - DNA, 75 bp, synthetic construct
  source 1..75: mol_type = other DNA
ggttgctggctgaacagcatctgtgggggcacctggactggaaaaaccgcaccctgaccgtcaccacctcaccgg

SEQ ID NO: 470924 - DNA, 75 bp, synthetic construct
  source 1..75: mol_type = other DNA
gagcaagagatggcagttaagactgtctgcggactgaaaaagtcagcaactaaggtactatataccctgaccaat

SEQ ID NO: 470925 - DNA, 75 bp, synthetic construct
  source 1..75: mol_type = other DNA
aaagcatccctgaaggtcatatggtgttagtagatactggacgtgagccagtgaatggaagccttgttgtagcca

SEQ ID NO: 470926 - DNA, 75 bp, synthetic construct
  source 1..75: mol_type = other DNA
ggtcagaagtacctgaaaggcctgaatccttcatggcctatgactcccatcaacgggaactgcaagattatcggt

SEQ ID NO: 470927 - DNA, 75 bp, synthetic construct
  source 1..75: mol_type = other DNA
acgtcgatcctgaagtcagaatggccgagtggatgcagacgctgaaggaaaccgggttcgacatccgggcatatc

SEQ ID NO: 470928 - DNA, 75 bp, synthetic construct
  source 1..75: mol_type = other DNA
gtgaggctgtatggctccattatttcacctcttgctgtgtcattgttgaaaaatggatatgggcgttacagcctg

SEQ ID NO: 470929 - DNA, 75 bp, synthetic construct
  source 1..75: mol_type = other DNA
tccgggcactcagtcgtgacatcatgaaacagaaccgggtgaccgtacatccggagaaaagtgtcccccggacgg

SEQ ID NO: 470930 - DNA, 75 bp, synthetic construct
  source 1..75: mol_type = other DNA
aagagaatgcagccacgcccaagctgaataccaaactggtttcatggtctgccaatgatcagtggacccgttctc

SEQ ID NO: 470931 - DNA, 75 bp, synthetic construct
  source 1..75: mol_type = other DNA
attactggggggcgtttggcgacgtgccgcagtgggtctttgcgctcgctgcgctgaccatcgtaggcaccatga

SEQ ID NO: 470932 - DNA, 75 bp, synthetic construct
  source 1..75: mol_type = other DNA
ttctggtcgtgggtacagtgttcctcggtagcggtcagccactggatggcaacaccacaggatttcatttaatta

SEQ ID NO: 470933 - DNA, 75 bp, synthetic construct
  source 1..75: mol_type = other DNA
caccagatggtgaagctggggatcgtcgagcagcgcgaacgatacagccgtaccgcgattaacaacatcaaaaaa

SEQ ID NO: 470934 - DNA, 75 bp, synthetic construct
  source 1..75: mol_type = other DNA
gaatgagcgcacatcgttcgaatcgcactggcgtgatctgagtgacttcatcaatccgcgtggctcccgctttct

SEQ ID NO: 470935 - DNA, 75 bp, synthetic construct
  source 1..75: mol_type = other DNA
cttcatgatgctgcaaaacatcaacacccgctctatgccggtggaagcggtgatcgagatgaaggaagagaaact

SEQ ID NO: 470936 - DNA, 75 bp, synthetic construct
  source 1..75: mol_type = other DNA
tgctcgccattgtgacctttttggtcgtgggtacagtgttcctcggtagtggtcagccgctggatggcaacacca

SEQ ID NO: 470937 - DNA, 75 bp, synthetic construct
  source 1..75: mol_type = other DNA
cgctccccaggtaaacgatgactatctggcgctttacgccggaaaaaacgcccctgacaaggtttataagaacgg

SEQ ID NO: 470938 - DNA, 75 bp, synthetic construct
  source 1..75: mol_type = other DNA
ctcccctcaggtaaacgatgactatctggcgctttacgccggaaaagacgccccggacaaggtttataagaacgg

SEQ ID NO: 470939 - DNA, 75 bp, synthetic construct
  source 1..75: mol_type = other DNA
caattacgttaaattacgtgaacggtacgtttatcctgcattacaggacgattacgagacagtacagatctacaa

SEQ ID NO: 470940 - DNA, 75 bp, synthetic construct
  source 1..75: mol_type = other DNA
cgcgaacgatacagccgtaccgcgattaacaacatcaaaaaattctggtcgctgacagcgaaaggctgcatgttc

SEQ ID NO: 470941 - DNA, 75 bp, synthetic construct
  source 1..75: mol_type = other DNA
attcccgctcgtttgagcagcaaatgattgacagggataaacgcgccacaaaagcaggctttctggtcggtggag

SEQ ID NO: 470942 - DNA, 75 bp, synthetic construct
  source 1..75: mol_type = other DNA
tatgtctgcaaggaactggtgtatgcctatgcaatgtggatcagcccgtcattccatctgaaggtgatccgtact

SEQ ID NO: 470943 - DNA, 75 bp, synthetic construct
  source 1..75: mol_type = other DNA
ttacaaaaatattattgctgattatggcccacaggatggaccgctgattattattggtgcgcactatgattccgc

SEQ ID NO: 470944 - DNA, 75 bp, synthetic construct
  source 1..75: mol_type = other DNA
cattagtcattgatttaggtgcgcagaaacgtcccactgtgatttctgttgttggtgcaggggggaaaaccagct

SEQ ID NO: 470945 - DNA, 75 bp, synthetic construct
  source 1..75: mol_type = other DNA
ttggggataatttatcccagagaggtcataaagactcgtgaaagtatagttgacccatcggcattagtcattgat

SEQ ID NO: 470946 - DNA, 75 bp, synthetic construct
  source 1..75: mol_type = other DNA
catcgggttactgcataaaacaacacgatgcgctgcgtggtatccagcgccttaccgacgcggggcatcaggtca

SEQ ID NO: 470947 - DNA, 75 bp, synthetic construct
  source 1..75: mol_type = other DNA
tcgaacgtatgctgttgcagctctatcatgcgggaattttgccacgtcagaaggcgattattctcggtagcttta

SEQ ID NO: 470948 - DNA, 75 bp, synthetic construct
  source 1..75: mol_type = other DNA
acgccagcggcgtggcaggcttactggaactggcacgtttgttacagcaacaagcgccaaaaacaggtatccaac

SEQ ID NO: 470949 - DNA, 75 bp, synthetic construct
  source 1..75: mol_type = other DNA
cggcgctggtgatgacctggtgcctgtcatatatcgaacgctgggtggatcgcattacaccggcggtgaccaaaa

SEQ ID NO: 470950 - DNA, 75 bp, synthetic construct
  source 1..75: mol_type = other DNA
cgacagtccgacgttgaaaaccatccccggcgtgctcggcgtggtacgtagtgacaaccagtgtcaggtgattat

SEQ ID NO: 470951 - DNA, 75 bp, synthetic construct
  source 1..75: mol_type = other DNA
tgcaccgcgtctttacgccaaccatcattcagaccattgccgaaaccggcaaagaagggatggtcatgccgtcag

SEQ ID NO: 470952 - DNA, 75 bp, synthetic construct
  source 1..75: mol_type = other DNA
agcgatacaggggaaagcacagggattttcgccagatgccattgatgcactggcgcaacggtcggaatgtgacgt

SEQ ID NO: 470953 - DNA, 75 bp, synthetic construct
  source 1..75: mol_type = other DNA
aacaaggtacgaagcaagtcgcggttagtggctggcaggaaaactccggcgtcacgctggaagaactggttgaaa

SEQ ID NO: 470954 - DNA, 75 bp, synthetic construct
  source 1..75: mol_type = other DNA
ttcgcgccgaagtggcggaggtggccaacaccatgtgtgaccttcgggccaggctgaacgatatggagcatcgct

SEQ ID NO: 470955 - DNA, 75 bp, synthetic construct
  source 1..75: mol_type = other DNA
ttttggtcatgaacaacgaacggttacgctgccattgggcgcacatgccatacttaataacacccaggaaggcac

SEQ ID NO: 470956 - DNA, 75 bp, synthetic construct
  source 1..75: mol_type = other DNA
ctgcggatatgttgccagagctgtttgtttcgcctccctggatgaccaaagagaaaaagaaaaatacgccggtgt

SEQ ID NO: 470957 - DNA, 75 bp, synthetic construct
  source 1..75: mol_type = other DNA
caaaatcaacatggtcgctgaaaaccgtgggctgactatggctgaactggaagaccgcctggcaccggatttagg

SEQ ID NO: 470958 - DNA, 75 bp, synthetic construct
  source 1..75: mol_type = other DNA
ggaaaaatacgacttcccaccgttgtatcgtgattttcgtaattttcgcgcttatctggcaatgttgttggcaaa

SEQ ID NO: 470959 - DNA, 75 bp, synthetic construct
  source 1..75: mol_type = other DNA
caaaaatcgccccactgcccggcttttatcagttcaccttatggcgcagaccacggcttaaaagtaacaacctgc

SEQ ID NO: 470960 - DNA, 75 bp, synthetic construct
  source 1..75: mol_type = other DNA
tagagaaaccttcacccgcgaatcactggctgaatttggctgggatctgtataccgcctggacagaagctggcgc

SEQ ID NO: 470961 - DNA, 75 bp, synthetic construct
  source 1..75: mol_type = other DNA
atgagacactttatctatcaggacgaaaaatcacataaattctgggcggtggagcagcagggaaacgaactgcac

SEQ ID NO: 470962 - DNA, 75 bp, synthetic construct
  source 1..75: mol_type = other DNA
gtcgctttgattccgatgtgcttgttgaacgcctgacacgccagacgctgtatcgcgccaatcgcctgtttatgg

SEQ ID NO: 470963 - DNA, 75 bp, synthetic construct
  source 1..75: mol_type = other DNA
cgtcgggttactgcattaatcagcacgccgcacagcgcggcattcagcgccttaccgatgcggggcatcaggtca

SEQ ID NO: 470964 - DNA, 75 bp, synthetic construct
  source 1..75: mol_type = other DNA
acgctgccgttgggcgcacatgccattctgaataacacccaggaaggcactcagttgacgattagcggtcatcct

SEQ ID NO: 470965 - DNA, 75 bp, synthetic construct
  source 1..75: mol_type = other DNA
tcgcgaataacaccagggcatatgaccccgacaataattaccgctcttatccagaaaactggcagcaggcttttg

SEQ ID NO: 470966 - DNA, 75 bp, synthetic construct
  source 1..75: mol_type = other DNA
tggcaattaggttttaatgaatggctgcattgcgaagatgacttacatgaaaaaaaatatataccgcaaagcgct

SEQ ID NO: 470967 - DNA, 75 bp, synthetic construct
  source 1..75: mol_type = other DNA
ggtacgtcacttaacccgacggttgttatggggggtatatactgaggaaaacacgctgattgcctgcttccgggt

SEQ ID NO: 470968 - DNA, 75 bp, synthetic construct
  source 1..75: mol_type = other DNA
aaaacgaaaaacccggaactgcgccagacggcgctggctgcggcggcatcagccattatggcggggatttccgaa

SEQ ID NO: 470969 - DNA, 75 bp, synthetic construct
  source 1..75: mol_type = other DNA
gtagtagcctatgttgctgttaacacgaataaatggttctatgagaaagaggtaaaaggattaaatacctggagc

SEQ ID NO: 470970 - DNA, 75 bp, synthetic construct
  source 1..75: mol_type = other DNA
actattcaaatgaattttattgctttcttcttttcctggatatatttatttgttctcgggttatggaaaaaagcg

SEQ ID NO: 470971 - DNA, 75 bp, synthetic construct
  source 1..75: mol_type = other DNA
aatggaaataccgatttaatttttatgatcaacatggctttcctggattctggggggcaacaccagaatataaag

SEQ ID NO: 470972 - DNA, 75 bp, synthetic construct
  source 1..75: mol_type = other DNA
cgcgtcaacaagtgccgggcaggcctcagccagtgccaccgccgccggaaaatcggcagaaagtgccgcatcgtc

SEQ ID NO: 470973 - DNA, 75 bp, synthetic construct
  source 1..75: mol_type = other DNA
atgactaacgcgcttgcgggtaagcaaccgaaagatgccaccctgacggcgctggccgggcttgctactgcggca

SEQ ID NO: 470974 - DNA, 75 bp, synthetic construct
  source 1..75: mol_type = other DNA
attatagttctattacttggtattctatctctatttgttggtgcactaattggcgttaacattctggtaatgctg

SEQ ID NO: 470975 - DNA, 75 bp, synthetic construct
  source 1..75: mol_type = other DNA
gcgctggtggccattttgttggcgatcccgcgtccgacggtaaaagccagtaaaggcaaaccgctgccgtttcgc

SEQ ID NO: 470976 - DNA, 75 bp, synthetic construct
  source 1..75: mol_type = other DNA
gttagcgttaatcattatgggcgtggcgctggtggccattttgttggcgatcccgcgtccgacggtaaaagccag

SEQ ID NO: 470977 - DNA, 75 bp, synthetic construct
  source 1..75: mol_type = other DNA
cgaacccgcgctaaacggattgcgcctgaatttgcgcattgtctccattgtcatgtttaacttcgccagctacct

SEQ ID NO: 470978 - DNA, 75 bp, synthetic construct
  source 1..75: mol_type = other DNA
gtagcaatcgcgttattgctgacgtggcgattaaaaaaacggcctccggtggaagtaccggagaccgtctcatca

SEQ ID NO: 470979 - DNA, 75 bp, synthetic construct
  source 1..75: mol_type = other DNA
ccgttaggtgtcgtgttttatcactggggcggattgcaggcgttagcgttaatcattatgggcgtggcgctggtg

SEQ ID NO: 470980 - DNA, 75 bp, synthetic construct
  source 1..75: mol_type = other DNA
ttggcgtggcgaccatgccgtggatggcgaaaatcggcgtcctactggcgggggcgggattttcgctggtgttcc

SEQ ID NO: 470981 - DNA, 75 bp, synthetic construct
  source 1..75: mol_type = other DNA
tctgcgtcagcttcaaaagatgaggcgaccagacaggcgtcagcagcgaagggcagcgccacgacagcatccgcg

SEQ ID NO: 470982 - DNA, 75 bp, synthetic construct
  source 1..75: mol_type = other DNA
cggtcatgggagcctttgctgagttcgagcgcgctctgatccgcgaacgtcagcgcgagggaatcgtgctggcta

SEQ ID NO: 470983 - DNA, 75 bp, synthetic construct
  source 1..75: mol_type = other DNA
caaacgggatgccagaaggcaatggaagcacgcagtttaattgtaaaacccccaatacggtcgaggttgaaatcg

SEQ ID NO: 470984 - DNA, 75 bp, synthetic construct
  source 1..75: mol_type = other DNA
ggctgctgggcgcatcgtcgcggcacactgcgagttcatgccgatctcacctttgaaaatctgtctcatacccgg

SEQ ID NO: 470985 - DNA, 75 bp, synthetic construct
  source 1..75: mol_type = other DNA
caggcgaccaaaaaaccttggtggcccgtgacttcggcatcagccgcgaaaccttgtaccagtacctgcgggaag

SEQ ID NO: 470986 - DNA, 75 bp, synthetic construct
  source 1..75: mol_type = other DNA
cagcgcgagggtattgcgctcgccaagcaacgcggggcttaccgtggcaggaagaaaggcactgttgcaaagtta

SEQ ID NO: 470987 - DNA, 75 bp, synthetic construct
  source 1..75: mol_type = other DNA
cggcaggcgagcagaaaaccttggtggcccgtgacttcggcatcagccgcgaaaccttgtaccagtacctgcggg

SEQ ID NO: 470988 - DNA, 75 bp, synthetic construct
  source 1..75: mol_type = other DNA
aacattgcgttgccagttatgcagactggtgtgcatctggagaatatattgcaatttcagtcctgatggataatg

SEQ ID NO: 470989 - DNA, 75 bp, synthetic construct
  source 1..75: mol_type = other DNA
cctgaagcaggatgaacggctgtccggtgaactgataaccggacgtcgtcagttgctggaaggaatggccttcac

SEQ ID NO: 470990 - DNA, 75 bp, synthetic construct
  source 1..75: mol_type = other DNA
gccccggtttttattacagaaacgccggaagcggggaaaacttgcttttccccgcttccggggttggacaactga

SEQ ID NO: 470991 - DNA, 75 bp, synthetic construct
  source 1..75: mol_type = other DNA
actatttgcaacagtgccttgcgccggatcgtgcaaacgctgacacaacgcggcgtgcatatcgaattcgtcaag

SEQ ID NO: 470992 - DNA, 75 bp, synthetic construct
  source 1..75: mol_type = other DNA
caaaaggggatgataagtttatcaccaccgactatttgcaacagtgccccggcaaggatgtcaagcgtccgcaac

SEQ ID NO: 470993 - DNA, 75 bp, synthetic construct
  source 1..75: mol_type = other DNA
caatatatcagcagacatgatttactcgaagagataaaaaacaaaatttatcacagagcattaaaaattataggg

SEQ ID NO: 470994 - DNA, 75 bp, synthetic construct
  source 1..75: mol_type = other DNA
ccggtatgaaattaccggaaggtgcagttgaactgcagccgggtgaggtgttcgtaatgacagacatcattgatg

SEQ ID NO: 470995 - DNA, 75 bp, synthetic construct
  source 1..75: mol_type = other DNA
agatgttcaaattgtgaagcgtgaaggtccagagcagcgagaaaactcaccgatatctattggtgcagagtctgt

SEQ ID NO: 470996 - DNA, 75 bp, synthetic construct
  source 1..75: mol_type = other DNA
ttgtcattaccggaatcgtggatggtaagcaggaatattcccgtattgaggtaaataacggccacatctgtttga

SEQ ID NO: 470997 - DNA, 75 bp, synthetic construct
  source 1..75: mol_type = other DNA
gcacacctggtcttccggtaccaacggcgtagtggcggcaacgttctccctgcgcctgaaaggtaagcctgaaaa

SEQ ID NO: 470998 - DNA, 75 bp, synthetic construct
  source 1..75: mol_type = other DNA
ggtgttgtggctgcaacgttttccttgcgcctgaaaggtaaacctgtgctgacgacagagccgctgaaagtgaag

SEQ ID NO: 470999 - DNA, 75 bp, synthetic construct
  source 1..75: mol_type = other DNA
gtttaagtttgagttgtctcaactggtggagatgcgcatcagtgatgaatggggtgaggttaaagcccgcgcgca

SEQ ID NO: 471000 - DNA, 75 bp, synthetic construct
  source 1..75: mol_type = other DNA
cgcggggcgtatcattatttttccccgtcggtatccgcttcagttcaggcgcgattatttctgcaaacggtggat

SEQ ID NO: 471001 - DNA, 75 bp, synthetic construct
  source 1..75: mol_type = other DNA
ttcgcattcctgccagttacaccattcatggtattgatgtttcacgctggcaggagcgaatcgactggcagcggg

SEQ ID NO: 471002 - DNA, 75 bp, synthetic construct
  source 1..75: mol_type = other DNA
atggcttacagtccgttagcccaggccgggcggttgcgcaatggactgttaaaaaacgcggtagtcaacgaaatt

SEQ ID NO: 471003 - DNA, 75 bp, synthetic construct
  source 1..75: mol_type = other DNA
tatcgcccggtcaaatcttttgctattcgcatccctgccaattacaccattcatggtattgatgtttcacgctgg

SEQ ID NO: 471004 - DNA, 75 bp, synthetic construct
  source 1..75: mol_type = other DNA
atgcaactgagaatcaccagtcgaaaaaaattcaccgctttattatgcgctctggggctcatttctatcgttgcg

SEQ ID NO: 471005 - DNA, 75 bp, synthetic construct
  source 1..75: mol_type = other DNA
aaaaactcaccgctttattatgcgctcttgggctaatttccatcgttgcgattcatccgcgtcagacggtgaatt

SEQ ID NO: 471006 - DNA, 75 bp, synthetic construct
  source 1..75: mol_type = other DNA
tagcggtgggggctgcgatcagcatggctgtagtagctgccggtggtaagcctccgtatgcctacacctggaaga

SEQ ID NO: 471007 - DNA, 75 bp, synthetic construct
  source 1..75: mol_type = other DNA
agttctgccagttttcttgaactgagctgtacgattaaagaggttcagtttaccgccgggcagaaacaggatatt

SEQ ID NO: 471008 - DNA, 75 bp, synthetic construct
  source 1..75: mol_type = other DNA
gacgtgataataataagaaaagggatcttatacgcgaatatgtaagcgatgtaacaaaagaatattcgttatgta

SEQ ID NO: 471009 - DNA, 75 bp, synthetic construct
  source 1..75: mol_type = other DNA
tttatattcttatcttcttgagaaacatccattgtcagaagttaaaaaactgatggaggatttgccttcaacgga

SEQ ID NO: 471010 - DNA, 75 bp, synthetic construct
  source 1..75: mol_type = other DNA
ttggcgctttcaggaatactggttcgtgtttcaaatcaagatagcgatacccgatacgctgctatcgataaaaat

SEQ ID NO: 471011 - DNA, 75 bp, synthetic construct
  source 1..75: mol_type = other DNA
ggcggcacgccggtgatgtcgaaaaccggacacgcctttattaaagaacgtatgcgcaaggaagacgccatctac

SEQ ID NO: 471012 - DNA, 75 bp, synthetic construct
  source 1..75: mol_type = other DNA
cagcggtgataccggactgcgcgatgtccagcgtctggcagaagccaacgactttcctcccgttgatgaaaccaa

SEQ ID NO: 471013 - DNA, 75 bp, synthetic construct
  source 1..75: mol_type = other DNA
tccacccatgacggtgacgataacccgttcaatacgcttatcggtgatatccgggccgggcgtcaggggggcagc

SEQ ID NO: 471014 - DNA, 75 bp, synthetic construct
  source 1..75: mol_type = other DNA
gggctctcatttattttgctgatatggacatgtatcaatcgttgccgcaatatatcggagagcccaaatgcctga

SEQ ID NO: 471015 - DNA, 75 bp, synthetic construct
  source 1..75: mol_type = other DNA
acaaacacatcaggacttacaccatcaaatttcctgactccggctttcgtattgttgcgctctccagccgcccgt

SEQ ID NO: 471016 - DNA, 75 bp, synthetic construct
  source 1..75: mol_type = other DNA
gcctattgcgatgaattaggccaatataatattcaggtgaatggtattgctcctggttattatgcaaccgatatt

SEQ ID NO: 471017 - DNA, 75 bp, synthetic construct
  source 1..75: mol_type = other DNA
aaccgaggagaaagaaaaggatcatatccattcaatagcccttgccctaatggtactgagaaagtatcagcttat

SEQ ID NO: 471018 - DNA, 75 bp, synthetic construct
  source 1..75: mol_type = other DNA
gccttaaataaaataaatagccaatctatttgcgaagataaagagttcgctggtttaatatgtaaggataatagt

SEQ ID NO: 471019 - DNA, 75 bp, synthetic construct
  source 1..75: mol_type = other DNA
tcgactctggcacaaaatattcccactcgattaccacaattgcccggtgaaatggggcaaatcagtcagagtgtt

SEQ ID NO: 471020 - DNA, 75 bp, synthetic construct
  source 1..75: mol_type = other DNA
ttttggtcgtgggtacagtgttcctcggtagcggtcagccgctggatggcaacaccactggctttcatttaatta

SEQ ID NO: 471021 - DNA, 75 bp, synthetic construct
  source 1..75: mol_type = other DNA
ttgcaggctggatgtacttcatcaactgggcgatgacggggattgtcgatattaccgccgttgcactgtatatgc

SEQ ID NO: 471022 - DNA, 75 bp, synthetic construct
  source 1..75: mol_type = other DNA
tgctgatggcgttcgattacccgaacgggacttataccatcgcggcgctgccgattatcggtattctgctggtta

SEQ ID NO: 471023 - DNA, 75 bp, synthetic construct
  source 1..75: mol_type = other DNA
atgcgcgcaacggataagcaacgcggttttacattactggaaattatggtggtgatcgtcatcattggcgtactt

SEQ ID NO: 471024 - DNA, 75 bp, synthetic construct
  source 1..75: mol_type = other DNA
atgcaatcaccattacgaaatgtgcgtaaggcgcacgggcttactttgcagcatgttgctgcgggcgttcaggtt

SEQ ID NO: 471025 - DNA, 75 bp, synthetic construct
  source 1..75: mol_type = other DNA
cgatgggcggctctgcaccaagtttcatggcgaaaatgagtcgtcagcatgtgccgtatgccgggatcctggcga

SEQ ID NO: 471026 - DNA, 75 bp, synthetic construct
  source 1..75: mol_type = other DNA
attccttattccttaatcaatgcctggaatagtagtccaggacctgatccgcaaaacagcgatgaggttcgttat

SEQ ID NO: 471027 - DNA, 75 bp, synthetic construct
  source 1..75: mol_type = other DNA
ctgggcgatgacggggattgttgatattaccgccgtcgctctgtatatgcattactggggcgcgtttggcggcgt

SEQ ID NO: 471028 - DNA, 75 bp, synthetic construct
  source 1..75: mol_type = other DNA
agaataaaaactgctttaggactacatcctgagttggcacacttgcggcacgaagagttagctatctttgatatt

SEQ ID NO: 471029 - DNA, 75 bp, synthetic construct
  source 1..75: mol_type = other DNA
cagttttgtctcttatgcccgtgagtttttgggtgagaaggccgcttatgttgctggctggatgtacttcatcaa

SEQ ID NO: 471030 - DNA, 75 bp, synthetic construct
  source 1..75: mol_type = other DNA
ctcgtaatgtaaaacggtttggtgaaattagtggaaatgtaggtacagaaactcgccctcgcaacgttgcattca

SEQ ID NO: 471031 - DNA, 75 bp, synthetic construct
  source 1..75: mol_type = other DNA
gttatcgctgctgcgtgaactggggccggtggttgccgcgttgctgtttgccggacgcgccggttcggcgttaac

SEQ ID NO: 471032 - DNA, 75 bp, synthetic construct
  source 1..75: mol_type = other DNA
cattatcaatctggtagtgggatgtgttatgtggtttattgccttgcagctggcgagagacggtattgctcatgc

SEQ ID NO: 471033 - DNA, 75 bp, synthetic construct
  source 1..75: mol_type = other DNA
ctgatcagcggcaatgcgttcaagctgggcgatatcatcacctatcgcaacggtaaaaaagttgaagtgatgaac

SEQ ID NO: 471034 - DNA, 75 bp, synthetic construct
  source 1..75: mol_type = other DNA
atgacagaagcgatgaaaattaccctctcgacccagcctgccgacgcgcgctggggagaaaaagcgacttacagc

SEQ ID NO: 471035 - DNA, 75 bp, synthetic construct
  source 1..75: mol_type = other DNA
ctgcgggtcagggaagccaggtaacagtgggtaagggcgctcactccattagcactttgggattctccggggaac

SEQ ID NO: 471036 - DNA, 75 bp, synthetic construct
  source 1..75: mol_type = other DNA
cgctggaacctgcaaccgttactgcaaagtgcacagttgacaggaatgactgtaacaatcaaatctattacctgt

SEQ ID NO: 471037 - DNA, 75 bp, synthetic construct
  source 1..75: mol_type = other DNA
ggctgcacaccgtcggacgcggttcagaacgttctccggtattgctggcgctggattacaacccaactggcgata

SEQ ID NO: 471038 - DNA, 75 bp, synthetic construct
  source 1..75: mol_type = other DNA
gcgccggttgaacagtggtctgcgggcgcgaccgggctgggtgtgcgcacgattgctaatctgttaacggcgtaa

SEQ ID NO: 471039 - DNA, 75 bp, synthetic construct
  source 1..75: mol_type = other DNA
gtgttttcttattactttcaaggtcttgcacttggggcggctatgatcctaccgctcggtccacaaaatgctttt

SEQ ID NO: 471040 - DNA, 75 bp, synthetic construct
  source 1..75: mol_type = other DNA
ttgcgcttggggcggctatgatcctaccgctcggtccacaaaatgcttttgtgatgaatcagggcattcgtcgtc

SEQ ID NO: 471041 - DNA, 75 bp, synthetic construct
  source 1..75: mol_type = other DNA
gtgttttcttattactttcaaggccttgcccttggggcagctatgattctgccgctcggcccacaaaatgcttta

SEQ ID NO: 471042 - DNA, 75 bp, synthetic construct
  source 1..75: mol_type = other DNA
aaaagcgtcgctgcgctgatggaagaaggacggcatgtcctgagtcgcgagcaggtcatggaaggcataccagaa

SEQ ID NO: 471043 - DNA, 75 bp, synthetic construct
  source 1..75: mol_type = other DNA
gcaacatattaatgagccagagaaaatgctggcggcactgaaagcttttgtacaaccgatgaaagcagctacacg

SEQ ID NO: 471044 - DNA, 75 bp, synthetic construct
  source 1..75: mol_type = other DNA
atttcgtggtgggctgcgtgatgtggtttatcgctctacaactggcgaaagaggggattgcccatgcacaagcct

SEQ ID NO: 471045 - DNA, 75 bp, synthetic construct
  source 1..75: mol_type = other DNA
gcacgaaacgccagaggcgtatacctgcatttgcgtgaaatccatcaaatctggacaagccagctttatccaatg

SEQ ID NO: 471046 - DNA, 75 bp, synthetic construct
  source 1..75: mol_type = other DNA
gcatgtaaaagtcaacgccgagtcaggattaaatggcggtacatacacgctaagaggcggaagtacaccagggaa

SEQ ID NO: 471047 - DNA, 75 bp, synthetic construct
  source 1..75: mol_type = other DNA
ctgcaatttcgggacgttacactgttccggcaccttataaagcgggtgccgggattggaaccccggaattgcata

SEQ ID NO: 471048 - DNA, 75 bp, synthetic construct
  source 1..75: mol_type = other DNA
ccctcaatccggcttatgatcttgttggtttttgcccggaaattgaacgcggcgaagtgaatctggtgaaaacta

SEQ ID NO: 471049 - DNA, 75 bp, synthetic construct
  source 1..75: mol_type = other DNA
tagcagcccggaacacatcacagcgcacaaccgcgcctgcggtttttttgtgtgcaatgcccggtcacatctgaa

SEQ ID NO: 471050 - DNA, 75 bp, synthetic construct
  source 1..75: mol_type = other DNA
aacgtcatgacgatgttctgaaaaagattcgcattttggattgttctccagagttttgtgcccgcaattttgcgg

SEQ ID NO: 471051 - DNA, 75 bp, synthetic construct
  source 1..75: mol_type = other DNA
aaattcaccgcgtttggttagaacaactttatccgatgctggtttcagttcagtctccgctggcttcatcgctct

SEQ ID NO: 471052 - DNA, 75 bp, synthetic construct
  source 1..75: mol_type = other DNA
ggtagtctccggtaacgccaaccctgtacgtctcaccacctctgtgattggcgtcccatgtggtgagttttctaa

SEQ ID NO: 471053 - DNA, 75 bp, synthetic construct
  source 1..75: mol_type = other DNA
gggattggcgtcctgaaattgattactgagcataaccgcgctcatgcggttttttcgtgtcatgagcattgctac

SEQ ID NO: 471054 - DNA, 75 bp, synthetic construct
  source 1..75: mol_type = other DNA
acgtcgaattcactgaaaccgttcctgatgacgctctcgtctgtaccctagacactttccgcctttatctggaga

SEQ ID NO: 471055 - DNA, 75 bp, synthetic construct
  source 1..75: mol_type = other DNA
cgcataaccgcgctcatgcggtttttttatgcgtaatgcacagccacattcagattatggtggggcgtgcagggc

SEQ ID NO: 471056 - DNA, 75 bp, synthetic construct
  source 1..75: mol_type = other DNA
accgagcgacgttgcacataacgccagcgttctctgttcctacatttcatcaattcatcaggtctggctgcagca

SEQ ID NO: 471057 - DNA, 75 bp, synthetic construct
  source 1..75: mol_type = other DNA
gagctgggcattgccaaccgtttccaggttgtacaggggcgcacccgaattaacgttaagctgacggaaaaagac

SEQ ID NO: 471058 - DNA, 75 bp, synthetic construct
  source 1..75: mol_type = other DNA
gctgttgccaacttcttctccaagcgtcacgacgatgtgctgaaaaagatccgcactctggattgttcccctgag

SEQ ID NO: 471059 - DNA, 75 bp, synthetic construct
  source 1..75: mol_type = other DNA
aaattggcgtttccggtggtggaagtttttcactgtcaacggaggctgccatcatggctacgatccaagccctca

SEQ ID NO: 471060 - DNA, 75 bp, synthetic construct
  source 1..75: mol_type = other DNA
agcgtcttttttatcgtccgcatttgctcacatccagattatggtgggctgggcgggggcaccgaaaggtgcgcc

SEQ ID NO: 471061 - DNA, 75 bp, synthetic construct
  source 1..75: mol_type = other DNA
tcatccactataggcggccaaagttacgccaggcacaaatatcaacaaaaatcgataatgatgagacggaatata

SEQ ID NO: 471062 - DNA, 75 bp, synthetic construct
  source 1..75: mol_type = other DNA
ccaaacacaaggttgttggcgatactgtcacgttgccgttcgttgagtttgtaaggctgtgtggcattccgaccg

SEQ ID NO: 471063 - DNA, 75 bp, synthetic construct
  source 1..75: mol_type = other DNA
cagataacgccagcgtgctttactcccacctgtcggtaatccacaaggtctggctgcagcagctttatcctatgt

SEQ ID NO: 471064 - DNA, 75 bp, synthetic construct
  source 1..75: mol_type = other DNA
gtcagacgctggaagtcgattgcaatttgcatcgtctcggcgggaagctggaaagcaaaacgctggaaggctggg

SEQ ID NO: 471065 - DNA, 75 bp, synthetic construct
  source 1..75: mol_type = other DNA
atgaagaccattctacctgcagtattgtttgccgctttcgccaccacttccgcctgggcggcagagagcgtccag

SEQ ID NO: 471066 - DNA, 75 bp, synthetic construct
  source 1..75: mol_type = other DNA
tgtttgccgctttcgccaccacttccgcctgggcggcagaaagcgtccagccactggaaaaaatcgcgccttatc

SEQ ID NO: 471067 - DNA, 75 bp, synthetic construct
  source 1..75: mol_type = other DNA
cagctcagtcgccgctggcttcatcactctacgactacatcaacgatggtgtattcgttgccgggctggtggact

SEQ ID NO: 471068 - DNA, 75 bp, synthetic construct
  source 1..75: mol_type = other DNA
agcgggttttagatagaattcgaaaccttgaatgctccgctgaatttgctgaacacaattttgtgttaagtggtt

SEQ ID NO: 471069 - DNA, 75 bp, synthetic construct
  source 1..75: mol_type = other DNA
cgatcgtggtgtatacaccagacaatgtggatgtgaaataccgcgtctggaaggcggaagagaagattgagaacg

SEQ ID NO: 471070 - DNA, 75 bp, synthetic construct
  source 1..75: mol_type = other DNA
ctggcgagcaagctgtatgaccgtgtaggagatgctgtttttggcgctgcacttgttgattccagacttaatggt

SEQ ID NO: 471071 - DNA, 75 bp, synthetic construct
  source 1..75: mol_type = other DNA
tcactgtttacgctgaccgttcttttactttcgttaccaagactccgccggcagcagttctgctgaaaaaagcgg

SEQ ID NO: 471072 - DNA, 75 bp, synthetic construct
  source 1..75: mol_type = other DNA
cggcgaagtatgaaatcacggaagaagacacgcgacagtcagaggacgtgaatgccctgccggatttatccctgc

SEQ ID NO: 471073 - DNA, 75 bp, synthetic construct
  source 1..75: mol_type = other DNA
gttgctgcgtgtgctgcaaggaaatcccgctcgatgccgccttcacgccggaaggggccgagggcactgttgcaa

SEQ ID NO: 471074 - DNA, 75 bp, synthetic construct
  source 1..75: mol_type = other DNA
cgcattcgttcctttcgtcaccctcggtgatccgggcattgagcagtcgctgaaaattatcgatacgctaattga

SEQ ID NO: 471075 - DNA, 75 bp, synthetic construct
  source 1..75: mol_type = other DNA
ttgttgtcgcgtgcgggtgtgacgggtgcggaaaaccgcgcggcattaccgcttaatcatctggtcacgaagctg

SEQ ID NO: 471076 - DNA, 75 bp, synthetic construct
  source 1..75: mol_type = other DNA
cagttcaaaaatctgccggaggtcggaaagctgagactcccggcggcgtatgtggtaccgggggatgactctccg

SEQ ID NO: 471077 - DNA, 75 bp, synthetic construct
  source 1..75: mol_type = other DNA
atgctccagatattaatcgcattatgagtaataatcatcatgcccctgaacatcagcccgtatcacctatagttg

SEQ ID NO: 471078 - DNA, 75 bp, synthetic construct
  source 1..75: mol_type = other DNA
tgttgctgattgccaccagtgtacaggcgtccacgctggaagagctgcgccagcttgaatcacacaagacaacac

SEQ ID NO: 471079 - DNA, 75 bp, synthetic construct
  source 1..75: mol_type = other DNA
tggtgcgcgagaatgcgaagcccatcagcggcgacaccggcctgcgggatatccagcgcctggcggaggagaacc

SEQ ID NO: 471080 - DNA, 75 bp, synthetic construct
  source 1..75: mol_type = other DNA
ggcgccgccttccagccacgtacctatcccaaagtcgacatcctgaatgtaattctggatggagaagctgagtac

SEQ ID NO: 471081 - DNA, 75 bp, synthetic construct
  source 1..75: mol_type = other DNA
caaaggcgaaagtgcgaatttccagttgcatgggccacgcgcgtatttgcaatcgattcacgggaaatttcatgc

SEQ ID NO: 471082 - DNA, 75 bp, synthetic construct
  source 1..75: mol_type = other DNA
acggaagaactgacgcgtctttccctggcccgtgcagaaggattcgataaggttgagatcaccggcccccggctg

SEQ ID NO: 471083 - DNA, 75 bp, synthetic construct
  source 1..75: mol_type = other DNA
aactctgtacgtctcaccacctctatgattggcgtcttatgtggtgagttttttaagcttgctaccgaggctgcc

SEQ ID NO: 471084 - DNA, 75 bp, synthetic construct
  source 1..75: mol_type = other DNA
aagcgcacagccgcgctcttgcggtttttttgtgtcatgagcagcattacgcccaaattatggtggggcgtgcag

SEQ ID NO: 471085 - DNA, 75 bp, synthetic construct
  source 1..75: mol_type = other DNA
aatgtatcgggcaaaaccatttacacctcgaatgcccagcttggaagctaccagctcaatacttacgctacaggt

SEQ ID NO: 471086 - DNA, 75 bp, synthetic construct
  source 1..75: mol_type = other DNA
ggcctgtattacaaccgccaccgctattatgacccgctgcaggggcgatatatcactcaggatccgattggactg

SEQ ID NO: 471087 - DNA, 75 bp, synthetic construct
  source 1..75: mol_type = other DNA
tgtacgaccgtgtaggtgatgctgtttttggcgctgcacttgttgattccaggctgaatggttctgacaaggagg

SEQ ID NO: 471088 - DNA, 75 bp, synthetic construct
  source 1..75: mol_type = other DNA
aggcatacatcaacgcctttaacctgatggagaagagtttatcaggtgccgatgcgtctgatatgtcagctgtcg

SEQ ID NO: 471089 - DNA, 75 bp, synthetic construct
  source 1..75: mol_type = other DNA
ccgcaaacttccttgctatcaaataacccgcgacggctttgcgtttcttgctatgggcttcactggtaaacgtgc

SEQ ID NO: 471090 - DNA, 75 bp, synthetic construct
  source 1..75: mol_type = other DNA
gttggtttactggataactcgcggatgaaaagcgatacccagtgggtgattgattcgatgcgggtaaaaacaccg

SEQ ID NO: 471091 - DNA, 75 bp, synthetic construct
  source 1..75: mol_type = other DNA
agtacgcaacctgacatcgctacgccagccatcgattcgtgatgtctcgtttgatctgcataaaggagaaattct

SEQ ID NO: 471092 - DNA, 75 bp, synthetic construct
  source 1..75: mol_type = other DNA
tgtttggtatttatcaaaaagactccggcaccattttattccagggtaaagagatcgatttccattctgccaaag

SEQ ID NO: 471093 - DNA, 75 bp, synthetic construct
  source 1..75: mol_type = other DNA
gggattggcgtcctgaaattcgcacatgcgcataaccgcgcttcagcggtttttttgcgcacgtttcctcacatc

SEQ ID NO: 471094 - DNA, 75 bp, synthetic construct
  source 1..75: mol_type = other DNA
cctcgtatgatgtggtggacgatgtccggcagatgctctttaaggctctgctggctggaacccggaagcgtgcgg

SEQ ID NO: 471095 - DNA, 75 bp, synthetic construct
  source 1..75: mol_type = other DNA
ggtgaccgaagagcgccgctcgacgggaatttatgcctatctggatattggttttaactcgttaatttccaatat

SEQ ID NO: 471096 - DNA, 75 bp, synthetic construct
  source 1..75: mol_type = other DNA
attcaggcttaccagcggaaaaaacgacgtgccaacaagcgtgtgcgtgcaaccactctgcgttatttctggtgt

SEQ ID NO: 471097 - DNA, 75 bp, synthetic construct
  source 1..75: mol_type = other DNA
ttttccaggtggacgccttcccgtaaaccagcatcgtctgatgctcgcccttcttccgatgacacgcctttgtcg

SEQ ID NO: 471098 - DNA, 75 bp, synthetic construct
  source 1..75: mol_type = other DNA
actggttatcccgttttgacagcattctcgacagtgccctggcgcaacaccgtgccatctcgttaatccgggtgg

SEQ ID NO: 471099 - DNA, 75 bp, synthetic construct
  source 1..75: mol_type = other DNA
tccaggcggacgcctttccgtaaaccgacatcatctgatgctcgcccttcttccgatgacacccctttgcctggt

SEQ ID NO: 471100 - DNA, 75 bp, synthetic construct
  source 1..75: mol_type = other DNA
gattcagcggtgatttctcgtttttttgcatccctgaaagcaaaaattcaggcttaccagcggaaaaaaagatgt

SEQ ID NO: 471101 - DNA, 75 bp, synthetic construct
  source 1..75: mol_type = other DNA
taagaaataaattattggatttggtttgtcaattgaatcttgtggataaagttttcttcttggggcaaagaagtg

SEQ ID NO: 471102 - DNA, 75 bp, synthetic construct
  source 1..75: mol_type = other DNA
cagcttggcgcaagcctgatgtatgagcagtattatggcgatgaagtcgggctgtttggtaaagataaacgccag

SEQ ID NO: 471103 - DNA, 75 bp, synthetic construct
  source 1..75: mol_type = other DNA
cagacggtttccctgggacttgtggtgagtaaagcaactcacggtctgaaaaatgttcaatgggaagcgccgtct

SEQ ID NO: 471104 - DNA, 75 bp, synthetic construct
  source 1..75: mol_type = other DNA
cggaaaaatcacgcgtacatttagtaccagcaagcctggtgtctatacgttcacatttaacgccctgaccatggc

SEQ ID NO: 471105 - DNA, 75 bp, synthetic construct
  source 1..75: mol_type = other DNA
aagggcaggctattttcaccgccaccacgactgttgcagcgaaatatacacttacggcgcaagtgagtcaggaca

SEQ ID NO: 471106 - DNA, 75 bp, synthetic construct
  source 1..75: mol_type = other DNA
tccagtattgaggtgattggcaaccgtgcagtggcggatggcaaagccaaacagacgtataaagttacggtgact

SEQ ID NO: 471107 - DNA, 75 bp, synthetic construct
  source 1..75: mol_type = other DNA
gctccgaccgtcaaagcgacgacggaacttaccttcaccgcgaaggatgcgtatgggaaccctgttagtggcctg

SEQ ID NO: 471108 - DNA, 75 bp, synthetic construct
  source 1..75: mol_type = other DNA
tggatgttctgataccaggaaggcttcagacaaaaagccgggtgaagccgctgtactctgggtcaagcgtggtga

SEQ ID NO: 471109 - DNA, 75 bp, synthetic construct
  source 1..75: mol_type = other DNA
cagacaaaaagtctggtggatccgctgtgctctgggtcaagcgtggtgatgtggaagcgatgcagaaagcccgga

SEQ ID NO: 471110 - DNA, 75 bp, synthetic construct
  source 1..75: mol_type = other DNA
ggatgttctgataccaggaaggcttcagacaaaaagccaggtgaagccgctgtgctctggatcaagcgtggtgat

SEQ ID NO: 471111 - DNA, 75 bp, synthetic construct
  source 1..75: mol_type = other DNA
caaccatcggcgcgatttcgccgtttgtgggcctctttggtacggtctggggcatcatgaacagctttatcggta

SEQ ID NO: 471112 - DNA, 75 bp, synthetic construct
  source 1..75: mol_type = other DNA
gcaaggcgatggcctggtccatttttccaggtggacgccttcccgtaaaccagcatcgtctgatgttcgcccttc

SEQ ID NO: 471113 - DNA, 75 bp, synthetic construct
  source 1..75: mol_type = other DNA
atgaatcaaccaatacacaatgcttactggttatcccgttttgacagccttctcgacagtgctctggcgcagcac

SEQ ID NO: 471114 - DNA, 75 bp, synthetic construct
  source 1..75: mol_type = other DNA
acaaagatacctggtgctcgatcggggatttcagcgaaccgtcttcgctggcgacgatgatccaggaggcatggt

SEQ ID NO: 471115 - DNA, 75 bp, synthetic construct
  source 1..75: mol_type = other DNA
tggatgttctgataccaggaaggcttcagacaaaaagccgggtgcagccgctgtcctctgggtcaagcgtggtga

SEQ ID NO: 471116 - DNA, 75 bp, synthetic construct
  source 1..75: mol_type = other DNA
tggatgttctgataccaggaaggcttcagacaaaaagccgggtgtagccgctgtgctctggttcaagcgtggtga

SEQ ID NO: 471117 - DNA, 75 bp, synthetic construct
  source 1..75: mol_type = other DNA
tggatgttctgataccaggaaggcttcagacaaaaagccgggtgaagccgctgtgctctggatcaagcgtggtga

SEQ ID NO: 471118 - DNA, 75 bp, synthetic construct
  source 1..75: mol_type = other DNA
cactaagagcgtggagttctttaaacagaaacgtcgccttaagcgtgaacagcaactgctggctgacgctcgctc

SEQ ID NO: 471119 - DNA, 75 bp, synthetic construct
  source 1..75: mol_type = other DNA
tggatgttctgataccaggaaggcttcagacaaaaagccgggtggagccgctgtgctctgggtcaagcgtggtga

SEQ ID NO: 471120 - DNA, 75 bp, synthetic construct
  source 1..75: mol_type = other DNA
tggatgttctgataccaggaaggcttcagacaaaaagccgggtgcagccgctgtgctctggctcaagcgtggtga

SEQ ID NO: 471121 - DNA, 75 bp, synthetic construct
  source 1..75: mol_type = other DNA
tcattatcgggcgcagctgctgctggttctacggcatcaggctggacggataatggcgacgggacctggactgcg

SEQ ID NO: 471122 - DNA, 75 bp, synthetic construct
  source 1..75: mol_type = other DNA
gcgattgcgttattcaaccaggcgaatcaggcacctggttttggtggtggctttaaaagcggtttacgtggagga

SEQ ID NO: 471123 - DNA, 75 bp, synthetic construct
  source 1..75: mol_type = other DNA
atgacagtgaaagcaaaacgtttccgtatcggggtggaaggcgccactaccgacggacgcgaaatccagtgtgaa

SEQ ID NO: 471124 - DNA, 75 bp, synthetic construct
  source 1..75: mol_type = other DNA
tgccctgcaggcacaacaagccgcctttaacgaactggtggataagctgagtcatgaagacagccgccaggacta

SEQ ID NO: 471125 - DNA, 75 bp, synthetic construct
  source 1..75: mol_type = other DNA
tcgaatccctgaaagcaaaaattcaggcttaccagcggaaaaaaagatgtgccggtcagcgtgtgtatgcaacca

SEQ ID NO: 471126 - DNA, 75 bp, synthetic construct
  source 1..75: mol_type = other DNA
atgtcagttttaacgaatgctaaagctgatgcgacccgaatagataacggcggggtaatggatgttaccggaaac

SEQ ID NO: 471127 - DNA, 75 bp, synthetic construct
  source 1..75: mol_type = other DNA
ggcttaccagcgacataagcgacgtgccggtaagcgtgtgcatgcaaccagcctgcgttatttctggtgccggga

SEQ ID NO: 471128 - DNA, 75 bp, synthetic construct
  source 1..75: mol_type = other DNA
atgaaaccattctgggttaagcctgtcaaacccaatgaatctgtgccagcttcgtcaattggctttgtccgcggc

SEQ ID NO: 471129 - DNA, 75 bp, synthetic construct
  source 1..75: mol_type = other DNA
tgccagggcgaagtctattcccaaccagcaagtttgccgctgtatcccaaatcgccgtattcacgccgcctgttc

SEQ ID NO: 471130 - DNA, 75 bp, synthetic construct
  source 1..75: mol_type = other DNA
ttgctccacctcctgggaacaactgcaacagtacgtcactgccctcaacgatccgcgtatcacctacattcacaa

SEQ ID NO: 471131 - DNA, 75 bp, synthetic construct
  source 1..75: mol_type = other DNA
agcctacctggtcggcctggcggccactgatgaccctgccagtctgggtacggaaatgctgacattcagcgccag

SEQ ID NO: 471132 - DNA, 75 bp, synthetic construct
  source 1..75: mol_type = other DNA
gcatcggggtggaaggtgccaccaccgacgggcgcgaaatccagcgtgaatggttggaacagatggcagccagct

SEQ ID NO: 471133 - DNA, 75 bp, synthetic construct
  source 1..75: mol_type = other DNA
ggttgaggaaaaatttcttgctttcaccacctccgcaccatcatggacacaaatcagccgagttgtggtagataa

SEQ ID NO: 471134 - DNA, 75 bp, synthetic construct
  source 1..75: mol_type = other DNA
cgacatcatctgatgctcgcccttcttccgatgatacgcctgtgcctggtggatgttctgatacccggaaggatt

SEQ ID NO: 471135 - DNA, 75 bp, synthetic construct
  source 1..75: mol_type = other DNA
caaacggcaaagatgcctttacgctgacggcgaccgttgaggataaaaatggtaaccctgttccagggagcctgg

SEQ ID NO: 471136 - DNA, 75 bp, synthetic construct
  source 1..75: mol_type = other DNA
tgtgaccagcaagacggggaatacagtaacaaccaatgcggcaggtaaagcggatattgagttgatatcaaccgt

SEQ ID NO: 471137 - DNA, 75 bp, synthetic construct
  source 1..75: mol_type = other DNA
cagcttggcgcaagcctgatgtatgagcagtattatggcgatgaagttgggctgtttggcaaagataaacgccag

SEQ ID NO: 471138 - DNA, 75 bp, synthetic construct
  source 1..75: mol_type = other DNA
ccgttggtgccatttcggaaataaaaccaggggtttacagcgccacggtttcttcgacccgtgccggaaacgttg

SEQ ID NO: 471139 - DNA, 75 bp, synthetic construct
  source 1..75: mol_type = other DNA
cagacactttccctgggacttgtggtcagcaaagcaactcacggactgaaaaatgtgcagtgggaagcgccgtca

SEQ ID NO: 471140 - DNA, 75 bp, synthetic construct
  source 1..75: mol_type = other DNA
acgatcgtactcagtcaaatattggttttggctggcgtcatttttcaggaaatgactggatggcgggggtgaaca

SEQ ID NO: 471141 - DNA, 75 bp, synthetic construct
  source 1..75: mol_type = other DNA
aaatggacaggatgcggcagcaaatgcggcaaaagtaaccgtggtggctgatgcgttatcttcaaaccagtcgaa

SEQ ID NO: 471142 - DNA, 75 bp, synthetic construct
  source 1..75: mol_type = other DNA
atactacggtaactgctgataataacgtggaaaaaaatgtcgcgtcgtttgccgcaaatgccgggacatttttaa

SEQ ID NO: 471143 - DNA, 75 bp, synthetic construct
  source 1..75: mol_type = other DNA
ggatgttctgatacccggaaagcttctgacaaaaaatctggtggatccgctgtgctctgggtcaagcgtggtgat

SEQ ID NO: 471144 - DNA, 75 bp, synthetic construct
  source 1..75: mol_type = other DNA
gtgcagtggcggacggcaaaaccaaacagacgtataaagttacggtgactgatgccaataacaacctgctgaaag

SEQ ID NO: 471145 - DNA, 75 bp, synthetic construct
  source 1..75: mol_type = other DNA
tcggtgaaaaactctcagaagacggtcaaggtgaaattcaaggcggatttcagtaccggtcaggcgagcctggag

SEQ ID NO: 471146 - DNA, 75 bp, synthetic construct
  source 1..75: mol_type = other DNA
tcagcaaagcaactcacggtctgaaaaatgtgcaatgggaagcgccgtctttgctggccgcaggcggaaaaatta

SEQ ID NO: 471147 - DNA, 75 bp, synthetic construct
  source 1..75: mol_type = other DNA
taaattaataattccccttccatcactggacgaacaaaaacgaattgtatctattctcgataaattcgacaccct

SEQ ID NO: 471148 - DNA, 75 bp, synthetic construct
  source 1..75: mol_type = other DNA
ggacattcatatcgtcagtaataaacggatttcagaattataaagtatatgttttattaggtataatctcagctt

SEQ ID NO: 471149 - DNA, 75 bp, synthetic construct
  source 1..75: mol_type = other DNA
aatagctcagacaagatggtcatggatgctatcaaacgtcatgctaaattagttgcgcagcatgtagaagacgtc

SEQ ID NO: 471150 - DNA, 75 bp, synthetic construct
  source 1..75: mol_type = other DNA
cttacaagcatacctcccagaccatgtaattaatttcctaggaggacgtgatggtgtaaacacgcttggcaatat

SEQ ID NO: 471151 - DNA, 75 bp, synthetic construct
  source 1..75: mol_type = other DNA
caagtagcaatcaagttaatccactgataaaaatgaaaaatattggtgataaaactatggtcgctgcagagggta

SEQ ID NO: 471152 - DNA, 75 bp, synthetic construct
  source 1..75: mol_type = other DNA
gatacacaacgatgagcaactgcgatggagatactgtaactacaccttctcgggggcagggaggtattggttttg

SEQ ID NO: 471153 - DNA, 75 bp, synthetic construct
  source 1..75: mol_type = other DNA
agacgccaatacggcgttgttcgatttagtaaaagcttcctggggaatacgattcgtcaactggctcacagacga

SEQ ID NO: 471154 - DNA, 75 bp, synthetic construct
  source 1..75: mol_type = other DNA
gtgcaggccttgctatatcctcactgccggcaatggcttcagtgacctatcaggatattgtgtctgccgccacca

SEQ ID NO: 471155 - DNA, 75 bp, synthetic construct
  source 1..75: mol_type = other DNA
ctctcgcagctcattttcctctggggcgtctcagtgatgggcgtggggggagcaaacctgatagtcacgactgcc

SEQ ID NO: 471156 - DNA, 75 bp, synthetic construct
  source 1..75: mol_type = other DNA
atggggaacatcgcaaacatcaagtctactaatgttagcggtatggctcatgatggtatcgataacatccctcgt

SEQ ID NO: 471157 - DNA, 75 bp, synthetic construct
  source 1..75: mol_type = other DNA
cccagggctggatcacactgggcgcgtggtatcagacctttgcgaccgccaaccagagactggcaagcattgcca

SEQ ID NO: 471158 - DNA, 75 bp, synthetic construct
  source 1..75: mol_type = other DNA
cccagggttggatcacactgggcgcgtggtatcaaacatttgcgaccgccaaccagagactggcaagcattgcta

SEQ ID NO: 471159 - DNA, 75 bp, synthetic construct
  source 1..75: mol_type = other DNA
cttttgcaaatgagaaaaggaaatactctaaaggaactaaagtaattgatgtatctgcatctgatatggcgaaaa

SEQ ID NO: 471160 - DNA, 75 bp, synthetic construct
  source 1..75: mol_type = other DNA
tgctgtaacttcaatgtcatcactgggagaagttggtgatactgacttattcagtgcggtcatgagtgcctatag

SEQ ID NO: 471161 - DNA, 75 bp, synthetic construct
  source 1..75: mol_type = other DNA
attacatatttgatggtgattttttactgatttctgaagatggcgcaaatttgttagcccgcaatacgcctatag

SEQ ID NO: 471162 - DNA, 75 bp, synthetic construct
  source 1..75: mol_type = other DNA
gcttaccgctgagcttaccatgcgtaaaaaacagtacaactactatcgcgaccaattgctgagttttaaagaagg

SEQ ID NO: 471163 - DNA, 75 bp, synthetic construct
  source 1..75: mol_type = other DNA
cagtagaaggaaacggaaccacagatcagtcgacgattgaaaaattttttaatcccttcagtaaagacgaataca

SEQ ID NO: 471164 - DNA, 75 bp, synthetic construct
  source 1..75: mol_type = other DNA
atggagccaacacgcttggcagcatggcaaattctgttaaagaaatatttattggaggaagtcgcaatatccgac

SEQ ID NO: 471165 - DNA, 75 bp, synthetic construct
  source 1..75: mol_type = other DNA
gtctcactaacaggattgcaacggaaacaagtggcacaggcacaaccagtgctcaaattaatcctctgataaaaa

SEQ ID NO: 471166 - DNA, 75 bp, synthetic construct
  source 1..75: mol_type = other DNA
acatctacctgatagacagtatgatcagaccactgctgatggtgttcgggttcttttttgcatcggtggccatca

SEQ ID NO: 471167 - DNA, 75 bp, synthetic construct
  source 1..75: mol_type = other DNA
cttctgatgagatatatgctgccaatacaaatgatccacaaagtgcaattataaagttaatgtcaccggacttta

SEQ ID NO: 471168 - DNA, 75 bp, synthetic construct
  source 1..75: mol_type = other DNA
gaaatcgttcggattctggataaatttactgcacttaccgctgagcttaccgctgagcttaccgctgagcttaac

SEQ ID NO: 471169 - DNA, 75 bp, synthetic construct
  source 1..75: mol_type = other DNA
catcaactgaatacagaacagcagaagctgctgaacctaaaagcataataatgaaagtatggtcgggtgtaaatt

SEQ ID NO: 471170 - DNA, 75 bp, synthetic construct
  source 1..75: mol_type = other DNA
tttccacggccggcagcaactccgtttttggtcgactggtcaatgccgtcagcggattatctgacgccgcaaagg

SEQ ID NO: 471171 - DNA, 75 bp, synthetic construct
  source 1..75: mol_type = other DNA
cggaaacaccaatatacgcagaacacctggcgttcgtgaagataaactgaaaaatattaatagagatgataagga

SEQ ID NO: 471172 - DNA, 75 bp, synthetic construct
  source 1..75: mol_type = other DNA
atttattggtctgggactgatgctggctgtgaaatatctcattgatgaaaaaatgaaaaagcgccgcgctgaagc

SEQ ID NO: 471173 - DNA, 75 bp, synthetic construct
  source 1..75: mol_type = other DNA
ttcacaagcagagcgcggagcgcaggttaaagccaatacattgacgatgaattttagtaaagctgatcctaccca

SEQ ID NO: 471174 - DNA, 75 bp, synthetic construct
  source 1..75: mol_type = other DNA
ctgggccataaaacccagcagcaaaccgatcgttaccatgatgaccgaaggaaaggttggagcaaagtagcattg

SEQ ID NO: 471175 - DNA, 75 bp, synthetic construct
  source 1..75: mol_type = other DNA
ttgcccgtattaactggtcgggaactgctgcggtcaatattgatacgcttcgtgcattgcacctgaaacacaatt

SEQ ID NO: 471176 - DNA, 75 bp, synthetic construct
  source 1..75: mol_type = other DNA
tcttcagcattacatttttattttctgccatcgcctcaccgttttggggtggactcgccgaccgtaaaggccgca

SEQ ID NO: 471177 - DNA, 75 bp, synthetic construct
  source 1..75: mol_type = other DNA
gtatatcgctgccggacaaccaagaatggcgcaagtagtccgctccgtcctgattgatgtattcaaggaggcaca

SEQ ID NO: 471178 - DNA, 75 bp, synthetic construct
  source 1..75: mol_type = other DNA
tcaaggtattgatactcagaaattgcttggccacaagtctctaaaccagacagctaaatatcgagatgatcgagg

SEQ ID NO: 471179 - DNA, 75 bp, synthetic construct
  source 1..75: mol_type = other DNA
ccaattcactactggtttagcagttgttatctccactgcttacaatgaaacccgcattcagccaaacgcgacatg

SEQ ID NO: 471180 - DNA, 75 bp, synthetic construct
  source 1..75: mol_type = other DNA
atgaatcaaccaatacacaatgcttactggttatcccgttttgaaagcattctcgacagtgccctgtcgcagcac

SEQ ID NO: 471181 - DNA, 75 bp, synthetic construct
  source 1..75: mol_type = other DNA
cgtgccgtctcgttaatccgggtggatttacgtttccctgagtatatgcctgccaccatcatggataccgattta

SEQ ID NO: 471182 - DNA, 75 bp, synthetic construct
  source 1..75: mol_type = other DNA
ggtctgggcgtggatgatgcgaaacatggctttaccgtggatgagttagcgctggtgatggcggcgtttgatacg

SEQ ID NO: 471183 - DNA, 75 bp, synthetic construct
  source 1..75: mol_type = other DNA
ctctgtgaacagcagcaaagcgattatgtgatgggcaacttctggtcggcgcactggccgcaatcgcattttcgc

SEQ ID NO: 471184 - DNA, 75 bp, synthetic construct
  source 1..75: mol_type = other DNA
ttgcccgtattaactggtcgggagctgctgcagtcaatattgatacgcttcgtgcattgcacctgaaacacaatt

SEQ ID NO: 471185 - DNA, 75 bp, synthetic construct
  source 1..75: mol_type = other DNA
gacgctgtatgtccgcgaactggcgggtaacgtcagtaacgtcgcctttatcagtggcatgatcgcctcggtgcc

SEQ ID NO: 471186 - DNA, 75 bp, synthetic construct
  source 1..75: mol_type = other DNA
atgggccgcggtaacggctaccttgcaaccatcggcgcgatttcgccgtttgtgggcctctttggtacggtctgg

SEQ ID NO: 471187 - DNA, 75 bp, synthetic construct
  source 1..75: mol_type = other DNA
atgctcgaacagagcggtcgctatggacgtgcggcgcttgagtcgctgaaaagcaatgccgagtatatgaaagac

SEQ ID NO: 471188 - DNA, 75 bp, synthetic construct
  source 1..75: mol_type = other DNA
attggcatggagcacaacctcggtctgacctgcgaccccgttgcagggcaagttcaggtgccgtgcattgaacgt

SEQ ID NO: 471189 - DNA, 75 bp, synthetic construct
  source 1..75: mol_type = other DNA
ctgccactaacgctctgggtttaggacttgcgactacgctggtactgacgctgaccaacctgaccatttcgacgc

SEQ ID NO: 471190 - DNA, 75 bp, synthetic construct
  source 1..75: mol_type = other DNA
gcaacaccattatcggcaacctgttcatggtgtttaacgcaattatcgccattatggggatagtctggttcctgt

SEQ ID NO: 471191 - DNA, 75 bp, synthetic construct
  source 1..75: mol_type = other DNA
tggatagtcagcgtactgattggatgtgctgctggccccctgtgggccgccacccatctgggaacaagtcaggac

SEQ ID NO: 471192 - DNA, 75 bp, synthetic construct
  source 1..75: mol_type = other DNA
gtcacaacgttaataatccaggtggcgaccggttctatcgcgccaatcctgacactctatgtccgtgaactggcg

SEQ ID NO: 471193 - DNA, 75 bp, synthetic construct
  source 1..75: mol_type = other DNA
ccacgactcggcaaacttggcgatcgaatcggacccgaaaagatcctgattacggcgctgatcttttctgtactg

SEQ ID NO: 471194 - DNA, 75 bp, synthetic construct
  source 1..75: mol_type = other DNA
ctgttgatcccaatgtcttatgtccagacaccactgcaactggggattttacgctttttgctcggcgccgcagac

SEQ ID NO: 471195 - DNA, 75 bp, synthetic construct
  source 1..75: mol_type = other DNA
ccattgcaacttgggattttacgttttttgctcggtgccgccgatggtgcactactccccgccgtacagacactg

SEQ ID NO: 471196 - DNA, 75 bp, synthetic construct
  source 1..75: mol_type = other DNA
ctatggctggcggcctgctcgctgataactacggcttacgtccggtattctttattaccgccagcgtactgatcc

SEQ ID NO: 471197 - DNA, 75 bp, synthetic construct
  source 1..75: mol_type = other DNA
gggaagtggtgacatcacttaaaaacccgaaactggtactcagcctgtttgtcaccacgttaatcatccaggtag

SEQ ID NO: 471198 - DNA, 75 bp, synthetic construct
  source 1..75: mol_type = other DNA
tgaagccagcgatctcggcgtggtgaatatgtgcgctgaacgcaaactgccgttcgtcgccgggcacgcgctgaa

SEQ ID NO: 471199 - DNA, 75 bp, synthetic construct
  source 1..75: mol_type = other DNA
ctggagatggcaaaatcgctcgccggaagtggcaagcagattgtgctctccacgctggcgctggtgcaggcatcc

SEQ ID NO: 471200 - DNA, 75 bp, synthetic construct
  source 1..75: mol_type = other DNA
ttggtgaagcggtatgcagcaagcgccgggcaaccaaagttggcgactggctggagatggcaaaatcgctcgccg

SEQ ID NO: 471201 - DNA, 75 bp, synthetic construct
  source 1..75: mol_type = other DNA
ccactcccgttgacggcaaacagcgactgtaacggctactggcgacggctggctgggctggaactgcaagcctaa

SEQ ID NO: 471202 - DNA, 75 bp, synthetic construct
  source 1..75: mol_type = other DNA
gttcggaagaccgcccgaaagatgagtgtgaaacctgctgcattaagtatccgaacgggcgcaacgtgctgtcgc

SEQ ID NO: 471203 - DNA, 75 bp, synthetic construct
  source 1..75: mol_type = other DNA
cacgctggcgctggtgcaggcatcctccgaacttggcgaactgaaacgctatgttgagaatggtgagttcctgat

SEQ ID NO: 471204 - DNA, 75 bp, synthetic construct
  source 1..75: mol_type = other DNA
tagctctggccttgcgccaacgcctgatcaaacgctggtcactgatgcactctgttcaaccggagtctgtgttgg

SEQ ID NO: 471205 - DNA, 75 bp, synthetic construct
  source 1..75: mol_type = other DNA
accaaagctaaaagaggcattcatacgggctaaagaaaaagctacgatatttggttatcaggtaaaagatcctga

SEQ ID NO: 471206 - DNA, 75 bp, synthetic construct
  source 1..75: mol_type = other DNA
tatgataatgatgttgttgaaattgccaaatcaattactccttctcaacgaggtgagctagaaataacttcgata

SEQ ID NO: 471207 - DNA, 75 bp, synthetic construct
  source 1..75: mol_type = other DNA
acaaacatgatctcatatcagggacttgttcgcaccttcctttacgcttgcgtttaaaagatgaaaccagtgtga

SEQ ID NO: 471208 - DNA, 75 bp, synthetic construct
  source 1..75: mol_type = other DNA
catcgataactcctttgccatgcgtcgtcagatgttgtcacctgattacacgacagactggcgctcaataccaat

SEQ ID NO: 471209 - DNA, 75 bp, synthetic construct
  source 1..75: mol_type = other DNA
gaacagcataacgttgccgtattcagttccaactacaccctttacgcctcattctccgccagatttgcaaccgtg

SEQ ID NO: 471210 - DNA, 75 bp, synthetic construct
  source 1..75: mol_type = other DNA
cactgtaaccacgtttttattgttaattacagtagcgttatgttcttcctttcagtttgcgttgaagaaacagta

SEQ ID NO: 471211 - DNA, 75 bp, synthetic construct
  source 1..75: mol_type = other DNA
atcagtcgcctttaccggaacaactgtaggtaatccagatactttaggtctgtcagatactaacgctgtgattaa

SEQ ID NO: 471212 - DNA, 75 bp, synthetic construct
  source 1..75: mol_type = other DNA
tactggaaatattgttaatggtactgccgatgaacttaatacagcaggaaatactggtactgctgttgttataaa

SEQ ID NO: 471213 - DNA, 75 bp, synthetic construct
  source 1..75: mol_type = other DNA
agcattgctcaggaatcagcagatcagactattaatttcggtcagatttctaaaaatcagctggaaaaaggggga

SEQ ID NO: 471214 - DNA, 75 bp, synthetic construct
  source 1..75: mol_type = other DNA
gggaacgcacagcctacaccatgaaacggatgcttttcttatcagaaaagggagaccttagtgaagtgcaaacgc

SEQ ID NO: 471215 - DNA, 75 bp, synthetic construct
  source 1..75: mol_type = other DNA
cggaggtgatgctgacggacagcatgcgttttatacccgggatcttcctgccctgttcgaacagctcatcgttca

SEQ ID NO: 471216 - DNA, 75 bp, synthetic construct
  source 1..75: mol_type = other DNA
gctgagcattaccgcaataaaatcgccatttatttgcactggtatcagaaaaaaggcatcgaggttccacaaacc

SEQ ID NO: 471217 - DNA, 75 bp, synthetic construct
  source 1..75: mol_type = other DNA
attgctaacacgcggcaacgtgctgcagctgtcattgccagatattgttttaccggaacctgaaacgccgcctgc

SEQ ID NO: 471218 - DNA, 75 bp, synthetic construct
  source 1..75: mol_type = other DNA
ccgctggagttacagccgaagttgctgcgtgtattacaggaacaggagtttgaacgtctcggcagcaacaaaatc

SEQ ID NO: 471219 - DNA, 75 bp, synthetic construct
  source 1..75: mol_type = other DNA
tcaaataaatgaagttgatccttacatagtcgcttcccggtttgccacatatacagctttcctccactgcgtata

SEQ ID NO: 471220 - DNA, 75 bp, synthetic construct
  source 1..75: mol_type = other DNA
ccggtggacggggcagcaagaaccgaacttactgccggtgatttttactcaccgaccaccctgaccatttcgtat

SEQ ID NO: 471221 - DNA, 75 bp, synthetic construct
  source 1..75: mol_type = other DNA
ttcaacattaatagaaaagaatacagatattataaattcctctcaaactaatgaattatcatgtcagcttccagt

SEQ ID NO: 471222 - DNA, 75 bp, synthetic construct
  source 1..75: mol_type = other DNA
atgaacagaatagttgttgttggccatccaaattcaaagtttgaggaagttgaggacattcttaggcaaagagga

SEQ ID NO: 471223 - DNA, 75 bp, synthetic construct
  source 1..75: mol_type = other DNA
gttcaggtacgagactttatccaataaccatgggggtctcgaaacaacttctccctatttatgacaaaccaatga

SEQ ID NO: 471224 - DNA, 75 bp, synthetic construct
  source 1..75: mol_type = other DNA
tgctgaaaccattaaaaatggtgaatggcaaaatgacgtaggctccgccagcagcatttatgaagagtattatca

SEQ ID NO: 471225 - DNA, 75 bp, synthetic construct
  source 1..75: mol_type = other DNA
atgatgaattacagcggatttgaagatatgcgtgaacaagtggctgaactggccaacaccatgtgcgacctgcgc

SEQ ID NO: 471226 - DNA, 75 bp, synthetic construct
  source 1..75: mol_type = other DNA
gttgaaggcgacaccaagcctgaactggaacttactctgaagtatttccagggcaaagctgttgtagaaagcatt

SEQ ID NO: 471227 - DNA, 75 bp, synthetic construct
  source 1..75: mol_type = other DNA
aacttcctgctgcgccggatgtggcaaaacaggttgctgaaactatcggttatccaacgccaaaccttgcggcgc

SEQ ID NO: 471228 - DNA, 75 bp, synthetic construct
  source 1..75: mol_type = other DNA
tccattccgtatatctggggcgcgacggcgattggcgttaacggtgatgcggttgatccgaaatccgtgacgagc

SEQ ID NO: 471229 - DNA, 75 bp, synthetic construct
  source 1..75: mol_type = other DNA
gtaacactaccgatccgaaagagattgaagctgcatacaacgagctgaaaaaactgatgccaaacgtcgcggcgt

SEQ ID NO: 471230 - DNA, 75 bp, synthetic construct
  source 1..75: mol_type = other DNA
taaaaacaaacgtccctggctggcggatgatgcggtcattccagtcactgacgatattaatcaatttgcttttcc

SEQ ID NO: 471231 - DNA, 75 bp, synthetic construct
  source 1..75: mol_type = other DNA
gcggaactgaagctgattgcagagaaagtgaagaagggatatgtggatgatgattcggcacatgtgactctcacg

SEQ ID NO: 471232 - DNA, 75 bp, synthetic construct
  source 1..75: mol_type = other DNA
ggttaagactggtagtaaccaatgacgcggctctgactgcagcagaaaaatacgacttcccaccattgcatcgtg

SEQ ID NO: 471233 - DNA, 75 bp, synthetic construct
  source 1..75: mol_type = other DNA
tggtgtgcgcggcgtaatagttggtcgggcattactggaaggtaaattcaccgtgaaggaggccatcgcatgctg

SEQ ID NO: 471234 - DNA, 75 bp, synthetic construct
  source 1..75: mol_type = other DNA
gcgaagaagacgtggcggcgttactggaagcgggcgttgcgcgcgtggtggtcggctccaccgcggtgaaatcac

SEQ ID NO: 471235 - DNA, 75 bp, synthetic construct
  source 1..75: mol_type = other DNA
tgctctggagtttctggaactcttactctgcggatgaactggtcgatgacttagtcattcgctgtggactggaaa

SEQ ID NO: 471236 - DNA, 75 bp, synthetic construct
  source 1..75: mol_type = other DNA
atgaactatgccggacacgaaaaacttcgcgccgaagtggcggaggtggccagtgccatgtgcgacctgcgtaca

SEQ ID NO: 471237 - DNA, 75 bp, synthetic construct
  source 1..75: mol_type = other DNA
atatattctttggacaaggttttacgcccaaattacaaatggcaacgaatcgaacaagaggtgcaactgtttttg

SEQ ID NO: 471238 - DNA, 75 bp, synthetic construct
  source 1..75: mol_type = other DNA
tcgtaaatgaaactggtgtggctgtctttcctgtagataagcccaccagcaattacatcggcgcaggacgtcgtt

SEQ ID NO: 471239 - DNA, 75 bp, synthetic construct
  source 1..75: mol_type = other DNA
cagaagcgcggaaattgatgtccgggcatgggaaaaggcacatggcatacgcctctacgttgccgccaaccagct

SEQ ID NO: 471240 - DNA, 75 bp, synthetic construct
  source 1..75: mol_type = other DNA
gatatcaagtaatggatcctgagagatttggagtggtggagtttgatagaaattttaaagcgttaagtattgaag

SEQ ID NO: 471241 - DNA, 75 bp, synthetic construct
  source 1..75: mol_type = other DNA
aggctttacctggcttgataccggaacacatcaaagcatgttggaagcatctcattttgtggaaactatcgaaca

SEQ ID NO: 471242 - DNA, 75 bp, synthetic construct
  source 1..75: mol_type = other DNA
atcataacaacgcctgaagatctgaataattttcagcgattactcggcgatggtaaacgttttggtattaatctc

SEQ ID NO: 471243 - DNA, 75 bp, synthetic construct
  source 1..75: mol_type = other DNA
gcggccagccgtgctcatacccagcaattccaccactggcaggtgttaagccgccagatgggggataacgcccgt

SEQ ID NO: 471244 - DNA, 75 bp, synthetic construct
  source 1..75: mol_type = other DNA
attgtagcgaacgccttcctgccttacccggacgtgctggatgagacatttggcttccacgaagtgatcgcgcaa

SEQ ID NO: 471245 - DNA, 75 bp, synthetic construct
  source 1..75: mol_type = other DNA
cgctgattcgcggcgcggtgcgtcatcttaacagcggcggcgagttgcgaattgtagcgaacgccttcctgcctt

SEQ ID NO: 471246 - DNA, 75 bp, synthetic construct
  source 1..75: mol_type = other DNA
ctggatgagacatttggcttccatgaagtgattgcgcaaaccgggcgtttcaaggtgtatcgcgccattatgacc

SEQ ID NO: 471247 - DNA, 75 bp, synthetic construct
  source 1..75: mol_type = other DNA
cttttccgaggtgaaaggtcgttttgatatgatcatctccaacccgccgttccacgatgggatgcaaaccagcct

SEQ ID NO: 471248 - DNA, 75 bp, synthetic construct
  source 1..75: mol_type = other DNA
ttcaccgaagatccgcctcactctgtgtgatgtttctgcaccagcggtagaagccagtcgcgcaacacttgctgc

SEQ ID NO: 471249 - DNA, 75 bp, synthetic construct
  source 1..75: mol_type = other DNA
aacaaacatacaagattacggtaactgatgctaataacaacctcctgaaagggagtgaggttacgttgagtgcca

SEQ ID NO: 471250 - DNA, 75 bp, synthetic construct
  source 1..75: mol_type = other DNA
ctgaagtttgttgccgggccgattgatgccaaacactcaactatcactctgacctcggataaacctgtggttggc

SEQ ID NO: 471251 - DNA, 75 bp, synthetic construct
  source 1..75: mol_type = other DNA
ggtttcatttacattttgagaaagatgatgctcatgagatggtttgtgctctttatagtttattggagacggaag

SEQ ID NO: 471252 - DNA, 75 bp, synthetic construct
  source 1..75: mol_type = other DNA
aaagatttctcgctgaaggattcttcgctggaaatgctttatccgatttatgatacgccgacaaatatgttgttc

SEQ ID NO: 471253 - DNA, 75 bp, synthetic construct
  source 1..75: mol_type = other DNA
cagggcaagagcggtgagaatgacactcgctttggcctggaagttaactaccggattggcgaacctctggagaaa

SEQ ID NO: 471254 - DNA, 75 bp, synthetic construct
  source 1..75: mol_type = other DNA
tttgaagaagtggaggaaagcagcggcgaatcgctgtttacccgcatcaaggcgctgttaagtaaaaagcagaac

SEQ ID NO: 471255 - DNA, 75 bp, synthetic construct
  source 1..75: mol_type = other DNA
tcatctggcggcattggcggaatcgaggacgtagcggccctgcgcgggaccggtgttcgtggtgtgatcgtcgga

SEQ ID NO: 471256 - DNA, 75 bp, synthetic construct
  source 1..75: mol_type = other DNA
ggacgccggcgtggcgcgcgtggtggtcggctcgacggcggtcaaagaccccgacacggtgaaaggctggttccg

SEQ ID NO: 471257 - DNA, 75 bp, synthetic construct
  source 1..75: mol_type = other DNA
gacggtacgctggcgggctctaacgtctcgctgtatgaagaagtttgcgctcgctacccacaggtggcatttcag

SEQ ID NO: 471258 - DNA, 75 bp, synthetic construct
  source 1..75: mol_type = other DNA
tgcgtcagttttaggggaaatagctgccgattttgcgcaaaacaaaaaaagcgattttgatttgacctcattcag

SEQ ID NO: 471259 - DNA, 75 bp, synthetic construct
  source 1..75: mol_type = other DNA
ccgatcgcgtttcgctgacattacgggatgttcagttcacttatccggagcaatcccaacaggcacttaaaggga

SEQ ID NO: 471260 - DNA, 75 bp, synthetic construct
  source 1..75: mol_type = other DNA
ctgatccatcacggatatatgttcgaactgaaaggtgaaagctacaggaaaaagacagcgaaggcagtaacaagc

SEQ ID NO: 471261 - DNA, 75 bp, synthetic construct
  source 1..75: mol_type = other DNA
ctgctctttgtcaccagataccgacgccagatttttgaccatgacgcgacagaaaaactacgcacttacttttca

SEQ ID NO: 471262 - DNA, 75 bp, synthetic construct
  source 1..75: mol_type = other DNA
ccgcgctgttcaccaaaaaagaacagaccgacgatgcgcgcttctctgatgtgcataaagccgtagagctggtcg

SEQ ID NO: 471263 - DNA, 75 bp, synthetic construct
  source 1..75: mol_type = other DNA
acaacccgacggtctataccgcgctgattaaccttgagcacatcaagtcttattccccggacagtgccttcaatc

SEQ ID NO: 471264 - DNA, 75 bp, synthetic construct
  source 1..75: mol_type = other DNA
tggacggtcactttgtccccaatctgacactctcaccgttcttcgtaagtcaggttaaaaaactggcaactaaac

SEQ ID NO: 471265 - DNA, 75 bp, synthetic construct
  source 1..75: mol_type = other DNA
accgggatcgatgatgatgatgaatggacacccaaccgcctgagcgtcttcctcgcccataaacagcaactggtc

SEQ ID NO: 471266 - DNA, 75 bp, synthetic construct
  source 1..75: mol_type = other DNA
caatttatatgccaacctggaaccgccagcagctggccattcgggcgattaaatcggtgttgcgccaggactacc

SEQ ID NO: 471267 - DNA, 75 bp, synthetic construct
  source 1..75: mol_type = other DNA
ctgagtcatgaagacagtcgccaggactaccgccagcgtgcaacaggcggtacctgcattttcataaatactttt

SEQ ID NO: 471268 - DNA, 75 bp, synthetic construct
  source 1..75: mol_type = other DNA
ttgggtttgtccgtggtctattctggcaaccagcgcatattgaattatgcgatcccattgggattggtaaatgtt

SEQ ID NO: 471269 - DNA, 75 bp, synthetic construct
  source 1..75: mol_type = other DNA
cccataacccactggcaaaccgcaagcagaatcctgccaatctctttaccgctgcagaggaaacggtgatcgaac

SEQ ID NO: 471270 - DNA, 75 bp, synthetic construct
  source 1..75: mol_type = other DNA
agactgccctgcaggcacagcagaccgcatttaacgaactggtggacaagctgagccaagaagacagccgccagg

SEQ ID NO: 471271 - DNA, 75 bp, synthetic construct
  source 1..75: mol_type = other DNA
ctgaaatgctgacattcagcgccagtgcagcccataaaccgcttaacccgtcgctggcccgcgacattatcgaag

SEQ ID NO: 471272 - DNA, 75 bp, synthetic construct
  source 1..75: mol_type = other DNA
ctgagccatgaagacaaccgccaggactaccgtcagcgtgcaacaggcggtaatgcccccgctgacactctgaca

SEQ ID NO: 471273 - DNA, 75 bp, synthetic construct
  source 1..75: mol_type = other DNA
cgaactggaagaagtccaggacgaaaaaacatccctgtttgcccgtgtcacggcgctgttcaccaaaaaagagca

SEQ ID NO: 471274 - DNA, 75 bp, synthetic construct
  source 1..75: mol_type = other DNA
aacgtcaaatcccgctgattaaaaccctggtggcgggcgttaacgttccggtgcaggttggcggcggcgtgcgta

SEQ ID NO: 471275 - DNA, 75 bp, synthetic construct
  source 1..75: mol_type = other DNA
cattcgcgatgctcgcaaggcaggtaaatggcacccacagccagatattcgtttccctaatcttgctgagatgca

SEQ ID NO: 471276 - DNA, 75 bp, synthetic construct
  source 1..75: mol_type = other DNA
ccagtcttaagcgcggcgactatcaggcattaagcacgtttgcagaggatgaagctcaactggcgcagtgggttg

SEQ ID NO: 471277 - DNA, 75 bp, synthetic construct
  source 1..75: mol_type = other DNA
tcaaaacatcaaccttattaaaactactcaatgacggcaagaaatcagaagcgtgcgcacagcttaaacgctgga

SEQ ID NO: 471278 - DNA, 75 bp, synthetic construct
  source 1..75: mol_type = other DNA
aagcccgcgtgattggctgcttgctggaaaagcaggtgaccacgccggagcaatacccgctctcagtcaatggtg

SEQ ID NO: 471279 - DNA, 75 bp, synthetic construct
  source 1..75: mol_type = other DNA
gtcaatgccgcctacctgggcgacgctggatcgtgcaccacaaaacatgcgcagtatttttgccttacgcggcga

SEQ ID NO: 471280 - DNA, 75 bp, synthetic construct
  source 1..75: mol_type = other DNA
gcaaaatatagtaatggtgactccaaagcatatgggcgttatttggagaaattcgtcagtgagggatatttaaat

SEQ ID NO: 471281 - DNA, 75 bp, synthetic construct
  source 1..75: mol_type = other DNA
gatacccgcgatattggtgtgataatgacgttaccgctctttttcccctttctctggttcacgctgcggcgaaaa

SEQ ID NO: 471282 - DNA, 75 bp, synthetic construct
  source 1..75: mol_type = other DNA
aaacgcggctggtttatgtacgccaccgcactggcgatcttcggctactggctatggcagtttttcctgcgctat

SEQ ID NO: 471283 - DNA, 75 bp, synthetic construct
  source 1..75: mol_type = other DNA
gttggtacgtattgaagccgtacaccggggattcctttatcagcacttgtatgccgttggctgcttgctgctggc

SEQ ID NO: 471284 - DNA, 75 bp, synthetic construct
  source 1..75: mol_type = other DNA
atgattagccaatcgctgaaaaataagattattgcggcggcggctggtggggcgatcgctattgcggcggtgatg

SEQ ID NO: 471285 - DNA, 75 bp, synthetic construct
  source 1..75: mol_type = other DNA
tgtttacacgatatgttatggacacgtcggaaaagacatcatgcttgggaagacttacacgcaatcagaatgcga

SEQ ID NO: 471286 - DNA, 75 bp, synthetic construct
  source 1..75: mol_type = other DNA
tctggaaaatgacgatacccgtgatgtcggtgtgatattgacattaccgctctttttcccctttttctggttcgc

SEQ ID NO: 471287 - DNA, 75 bp, synthetic construct
  source 1..75: mol_type = other DNA
tggataatctggtcaaacgtcattatctacgcacggtgagcggttttggtaatcgggtcaccaaatatgagcaac

SEQ ID NO: 471288 - DNA, 75 bp, synthetic construct
  source 1..75: mol_type = other DNA
tatgctctatctgcgtaaccacaaccccgccacctttgtgttgatcccggtatttattgtggtgaccaaggtcat

SEQ ID NO: 471289 - DNA, 75 bp, synthetic construct
  source 1..75: mol_type = other DNA
ggacgtccaggcgacttttggtaaggactccacgatgatgtactacttcatggtcgccgaagtgttcctggtctt

SEQ ID NO: 471290 - DNA, 75 bp, synthetic construct
  source 1..75: mol_type = other DNA
atgcaaaaagaagacttatttatccgaaatatacattctcgtaatcaggacaggatatcggtggcccttgtatat

SEQ ID NO: 471291 - DNA, 75 bp, synthetic construct
  source 1..75: mol_type = other DNA
aaagtggcggcatttacgccggacatgacaatcatttctatgggcatcggaaaatcctcaagccagaacatttag

SEQ ID NO: 471292 - DNA, 75 bp, synthetic construct
  source 1..75: mol_type = other DNA
atttttatttgaatgccccaatatcatttgaagtttttcagttttctagactgttaaaaatgagtgtgtatgggg

SEQ ID NO: 471293 - DNA, 75 bp, synthetic construct
  source 1..75: mol_type = other DNA
ttggacgctgcgttgttctgcgaaagcgtattgaagaaaatctttgcgcgctgcaaaaaataaaatcggaaattg

SEQ ID NO: 471294 - DNA, 75 bp, synthetic construct
  source 1..75: mol_type = other DNA
ttatcccgatcggggagactttattgccgtggtcggcagaatgcaggatatcaacgccgttcgtcaggtaaaagc

SEQ ID NO: 471295 - DNA, 75 bp, synthetic construct
  source 1..75: mol_type = other DNA
aagctcgcgtgattggttgcttgctggaaaagcaggtgaccacgccggagcaatacccgctctcagtaaatggtg

SEQ ID NO: 471296 - DNA, 75 bp, synthetic construct
  source 1..75: mol_type = other DNA
agtgaatccgaggtgcaggagcaactggataatctggtgaaacgtcattacctgcgtacagtgagtggttttggt

SEQ ID NO: 471297 - DNA, 75 bp, synthetic construct
  source 1..75: mol_type = other DNA
ttatatcattactactatcgcttacttttattattttttaccaaccctgggtcaatgcattaccgccaacgcccc

SEQ ID NO: 471298 - DNA, 75 bp, synthetic construct
  source 1..75: mol_type = other DNA
atatcaccagtctggcgatactgcagacagactcaattaccagaaaatggcgcaggtaattgatggcgttattag

SEQ ID NO: 471299 - DNA, 75 bp, synthetic construct
  source 1..75: mol_type = other DNA
gacagattgaattatcagaaaatggctcaggtcgtggatggcgttatcaccttgttatacaacagtaaacaataa

SEQ ID NO: 471300 - DNA, 75 bp, synthetic construct
  source 1..75: mol_type = other DNA
ggcgcgccgcgtaccaaagaagccgaaaacgccacctgtgcgccgctcctgatgagcgtaagcgtagtggcactg

SEQ ID NO: 471301 - DNA, 75 bp, synthetic construct
  source 1..75: mol_type = other DNA
tgatcgatccacgctataccgacaccgcagccggacgggaagatgaatggctccctatccgtcctggcactgatg

SEQ ID NO: 471302 - DNA, 75 bp, synthetic construct
  source 1..75: mol_type = other DNA
gcattagccgcagaacattagttaaatcaacggctatcggttcactggcactcgcggctggcgggttttcattgc

SEQ ID NO: 471303 - DNA, 75 bp, synthetic construct
  source 1..75: mol_type = other DNA
ccgaatgtgcgccgacgtttgcctgcttcggcaatcacgatcgccccgtgggaacggagaaaaatcacttaattg

SEQ ID NO: 471304 - DNA, 75 bp, synthetic construct
  source 1..75: mol_type = other DNA
tgcaatacagcgacgtcgactggcagttacattactgctcgcgaaatccagaaagttgcgcatttcgtgatgagc

SEQ ID NO: 471305 - DNA, 75 bp, synthetic construct
  source 1..75: mol_type = other DNA
gtatttcagtaatgaggagcgcgccagccagcagagtatgttgatctgctgttcgcgcgctaagagtaaacgact

SEQ ID NO: 471306 - DNA, 75 bp, synthetic construct
  source 1..75: mol_type = other DNA
ggtacgcgcctgtttgcgcggtcgctccatccgtcggcgtattaatcatcccgatcgcttgaattacccaatgaa

SEQ ID NO: 471307 - DNA, 75 bp, synthetic construct
  source 1..75: mol_type = other DNA
tttgtgaaccgttaaataacataaaaatttcagcagacatcatgaacacaaattgttcattagaggaaatttaca

SEQ ID NO: 471308 - DNA, 75 bp, synthetic construct
  source 1..75: mol_type = other DNA
gatccagaaattaattatactgtcgattacaacctagattacactaactcaaacgacttgctttcagataatagc

SEQ ID NO: 471309 - DNA, 75 bp, synthetic construct
  source 1..75: mol_type = other DNA
tgcgcgactccgggcgcgtgctgattattgatgaagctgagaacctccctctgcgtgcgctggaatctatccgcc

SEQ ID NO: 471310 - DNA, 75 bp, synthetic construct
  source 1..75: mol_type = other DNA
caatgtcagcaacttgatgcgctactgacgcgtcgtcgcgatggtgaacccattgctcatttaaccggggtgcga

SEQ ID NO: 471311 - DNA, 75 bp, synthetic construct
  source 1..75: mol_type = other DNA
gaagttagaacttttgttgaaaagcctaatcttaaaacagcagaaagctttatagaaaaagatgagtattattgg

SEQ ID NO: 471312 - DNA, 75 bp, synthetic construct
  source 1..75: mol_type = other DNA
ggattccaatgttaataactcagatgtcgatctttttgacgttctgatccgtattaaaagtgtattagaacaaaa

SEQ ID NO: 471313 - DNA, 75 bp, synthetic construct
  source 1..75: mol_type = other DNA
tcactaagaagctgcagctggttggtgtaggttaccgtgcagcggttaaaggtaatgtgattaacctgtctctgg

SEQ ID NO: 471314 - DNA, 75 bp, synthetic construct
  source 1..75: mol_type = other DNA
tgagcagtcggtgcatcagattgccgctgaacgccgcgtctggatccaggtggtgaaaggcaatgtcaccattaa

SEQ ID NO: 471315 - DNA, 75 bp, synthetic construct
  source 1..75: mol_type = other DNA
aacgtggccatgcaaatcatggctggctggactcctggcatactttctcttttgccaactattacgatccgaact

SEQ ID NO: 471316 - DNA, 75 bp, synthetic construct
  source 1..75: mol_type = other DNA
atgtctcgtgttgctaaagccccggtcgttgttcctgccggcgttgacgtaaaaatcaacggtcaggttattacg

SEQ ID NO: 471317 - DNA, 75 bp, synthetic construct
  source 1..75: mol_type = other DNA
accttcggtccgcgtgatggttacgcagacggttgggcacaggctggtaccgcgcgtgccctgctgaactcaatg

SEQ ID NO: 471318 - DNA, 75 bp, synthetic construct
  source 1..75: mol_type = other DNA
aggttaccgtgcagcggttaaaggcaatgtgattaacctgtctctgggtttctctcatcctgttgaccatcagct

SEQ ID NO: 471319 - DNA, 75 bp, synthetic construct
  source 1..75: mol_type = other DNA
agctgtcggaaagtatcacaggcttgcttatgcccgttcttttgttcttcgccctttgtcttcaaaggaacttta

SEQ ID NO: 471320 - DNA, 75 bp, synthetic construct
  source 1..75: mol_type = other DNA
atttggaggacattctgatgagccattccaggtatacagccctatggttaatggtcttgcccgcactgcggggac

SEQ ID NO: 471321 - DNA, 75 bp, synthetic construct
  source 1..75: mol_type = other DNA
agagactgtggtatgcctattgatgttgacgagttagaagaactaccatatgttcttgttgtgactttatctgct

SEQ ID NO: 471322 - DNA, 75 bp, synthetic construct
  source 1..75: mol_type = other DNA
tgggatgagcaggcaatcgccattcatgcggatagcgacagcgaagtgttactgttcgatctgccgccagtttaa

SEQ ID NO: 471323 - DNA, 75 bp, synthetic construct
  source 1..75: mol_type = other DNA
aggttccggcgggtgagttccagattatgagtgcgggtacgggtattcgtcactcagagtacaacccaagcagca

SEQ ID NO: 471324 - DNA, 75 bp, synthetic construct
  source 1..75: mol_type = other DNA
ttatgggcttctccgcgctgcgcgtgattaacgacgacgtgattgaagcagggcagggcttcggcactcacccgc

SEQ ID NO: 471325 - DNA, 75 bp, synthetic construct
  source 1..75: mol_type = other DNA
tgcgttgctgattgaggccgaccctggctacaccgcacgcgtaatcctggaagaactctgcaacctgctggggct

SEQ ID NO: 471326 - DNA, 75 bp, synthetic construct
  source 1..75: mol_type = other DNA
ccaggcagacgttggcgcagtggtttgaagagaagggatttcagaagggatttcagaagggatttcagaagggat

SEQ ID NO: 471327 - DNA, 75 bp, synthetic construct
  source 1..75: mol_type = other DNA
ggtggtcgatgaagatgtctgcattggctgtcgctactgtcatatggcctgcccgtacggcgcgccacagtacaa

SEQ ID NO: 471328 - DNA, 75 bp, synthetic construct
  source 1..75: mol_type = other DNA
ccactgacagatgaccttgcggaccttcctgaattaattgcagcgtccgccattaagcttactgaagagatttac

SEQ ID NO: 471329 - DNA, 75 bp, synthetic construct
  source 1..75: mol_type = other DNA
ccagcgttttctaagtaaagggatgtctcgggaagacgttgcagaggtgacaactttacctcttacagagattga

SEQ ID NO: 471330 - DNA, 75 bp, synthetic construct
  source 1..75: mol_type = other DNA
ataaagagggactccagaaggtaagactggcccagcgtcttctgagtaaaggaatgtctcgggaagacgttgcag

SEQ ID NO: 471331 - DNA, 75 bp, synthetic construct
  source 1..75: mol_type = other DNA
tcttctgagtaaaggaatgtctcgggaagacgttgcagagttggcaaatttacctcttgcagagattgataagct

SEQ ID NO: 471332 - DNA, 75 bp, synthetic construct
  source 1..75: mol_type = other DNA
tattgttgggaatgcaccaacagaaataaataccggtcatggagcgttgattgattctaaaaaaacagtgattag

SEQ ID NO: 471333 - DNA, 75 bp, synthetic construct
  source 1..75: mol_type = other DNA
aaaagcattgaccctaagcgagttgcattaataaatcgctctcttggtgatgggactattgcaaatttaagccta

SEQ ID NO: 471334 - DNA, 75 bp, synthetic construct
  source 1..75: mol_type = other DNA
attttggcgaaatccgcgttccacataaaggtgatattgtcgggcaggttatcgagggagcgtatgaagtgctcg

SEQ ID NO: 471335 - DNA, 75 bp, synthetic construct
  source 1..75: mol_type = other DNA
atcgcggcgttttttttcatcttcagaaggaatcagcaccgacaattttttattcagatcagcgacgctgccctc

SEQ ID NO: 471336 - DNA, 75 bp, synthetic construct
  source 1..75: mol_type = other DNA
acagtggcggccctgtagctacagataaagacgaatcgaccagcgatccaaagctggataaatgcagccaccgcc

SEQ ID NO: 471337 - DNA, 75 bp, synthetic construct
  source 1..75: mol_type = other DNA
tggctttcgcgatcgcgatggctatcgctgttaacgtcgccttgttcggcggcttatatctactagttaatccat

SEQ ID NO: 471338 - DNA, 75 bp, synthetic construct
  source 1..75: mol_type = other DNA
atcctgaattcatctggcgcttctattcctgccagaaacgtcactatcacttcgttattgcaccgacagaagatg

SEQ ID NO: 471339 - DNA, 75 bp, synthetic construct
  source 1..75: mol_type = other DNA
aagacgaggaagaagaattaccattaatggatgaaccggaagaacaagaaccagaagaagatgatgaatttgatg

SEQ ID NO: 471340 - DNA, 75 bp, synthetic construct
  source 1..75: mol_type = other DNA
gctgccagtgattataccgctggtgctcgcttgtatatcgttaatcctgcttatcatgaaggtaaaggtattggt

SEQ ID NO: 471341 - DNA, 75 bp, synthetic construct
  source 1..75: mol_type = other DNA
agaccaggccatcaaacttggtgatgtaaccgttgcatactgccaggaagatgtaaccctggaagatgtcgattt

SEQ ID NO: 471342 - DNA, 75 bp, synthetic construct
  source 1..75: mol_type = other DNA
gggaaaaggaaaacagccgccgtattaaagcaaagtttgtgaccaccggtatggctgccaaaggactggaggtgc

SEQ ID NO: 471343 - DNA, 75 bp, synthetic construct
  source 1..75: mol_type = other DNA
ccttccggctgttcagaaatggcgtgatcgtggtcttccgtataatacgaatacccgccgttgtccgaaagataa

SEQ ID NO: 471344 - DNA, 75 bp, synthetic construct
  source 1..75: mol_type = other DNA
atacacgacgtgttccggcgcagcctgggtgtgattgggtcttgaagaacatcattaatccgctcaaagaaacta

SEQ ID NO: 471345 - DNA, 75 bp, synthetic construct
  source 1..75: mol_type = other DNA
gcgtcgtcatcccgctttaatggaaagcgtggagggtatcgtcttatttggggtcagtttggatatcgaaaatta

SEQ ID NO: 471346 - DNA, 75 bp, synthetic construct
  source 1..75: mol_type = other DNA
atccttttgaattattacaatttaatgatcttaaagtcaatacaagtgaatggtgtccagagatgatgaacttaa

SEQ ID NO: 471347 - DNA, 75 bp, synthetic construct
  source 1..75: mol_type = other DNA
atggctactacccctaccccaactcattctgaatttatctggcgtttctattcctgccaaaaacacctctatatc

SEQ ID NO: 471348 - DNA, 75 bp, synthetic construct
  source 1..75: mol_type = other DNA
ccggtggcgcatccggcattggtctggcgattgtggatgaattattagcacaaggcgcgaatgtacagatggtcg

SEQ ID NO: 471349 - DNA, 75 bp, synthetic construct
  source 1..75: mol_type = other DNA
tgtttgttatctgctgtctgaacgcgcggctaaggaggctttatggtcaatgccattttttgcgcccacggcaaa

SEQ ID NO: 471350 - DNA, 75 bp, synthetic construct
  source 1..75: mol_type = other DNA
atgacaacgtcactgcacaggtttatccgcatttactggtaacgaccggtttacacgattctcaggtgcaatatt

SEQ ID NO: 471351 - DNA, 75 bp, synthetic construct
  source 1..75: mol_type = other DNA
tagtatacctgtgtccgaggaatttgctcataatatactgaaaaaaaataaagcaggaactaagaagaatgttga

SEQ ID NO: 471352 - DNA, 75 bp, synthetic construct
  source 1..75: mol_type = other DNA
gcgaaattaccgctgtagatcgtatgcccgatgctgtcgccctggcacaacgtaatgcccagcatctggcgatca

SEQ ID NO: 471353 - DNA, 75 bp, synthetic construct
  source 1..75: mol_type = other DNA
attcaggaagccagttcaatgttacccgttgctgcgttgtttgccgacggtaattctccgcaacgggtgatggat

SEQ ID NO: 471354 - DNA, 75 bp, synthetic construct
  source 1..75: mol_type = other DNA
tttgatggccatgctggtcgggatgttcccgattattatcctgctggcgaccattcatggtctgaccctgccggt

SEQ ID NO: 471355 - DNA, 75 bp, synthetic construct
  source 1..75: mol_type = other DNA
gtgtgctgccgcagtggctgctgcttgatacccaatggcattatcagattgtaattgtcaataataataagggcc

SEQ ID NO: 471356 - DNA, 75 bp, synthetic construct
  source 1..75: mol_type = other DNA
aggtggaagtctcactgtgggagggggaaacacgaattgccggcgagcgccggccaccggggacgccggtgattg

SEQ ID NO: 471357 - DNA, 75 bp, synthetic construct
  source 1..75: mol_type = other DNA
tgaaagatcgcgaagccggacaaattcgtcaggcggctgcaagtgttggcttaaactgggatggaaacctgcgac

SEQ ID NO: 471358 - DNA, 75 bp, synthetic construct
  source 1..75: mol_type = other DNA
cgacctgtaccttaaaccgtgacgaaaacgaagccgtttgcctgtggctgaaagagacttatcccgatgcagtag

SEQ ID NO: 471359 - DNA, 75 bp, synthetic construct
  source 1..75: mol_type = other DNA
acgtaaagaccccgacgcgctgaaaaactggtcaccggaaagcaacctggaaatcgccgccacccagcgtgaact

SEQ ID NO: 471360 - DNA, 75 bp, synthetic construct
  source 1..75: mol_type = other DNA
ccgattggtttagccaaacggattggttcgcgactgaaaaacagctacccgcgtgaactggtgcgcgacgggaaa

SEQ ID NO: 471361 - DNA, 75 bp, synthetic construct
  source 1..75: mol_type = other DNA
tacgctggtttactcgacctgtaccttaaaccgggaagaaaacgaagccgtttgcctgtggctgaaagagactta

SEQ ID NO: 471362 - DNA, 75 bp, synthetic construct
  source 1..75: mol_type = other DNA
cctttcatgcattacgtcctggcggtacgctggtttactcgacctgtaccttaaaccgggaagaaaacgaagccg

SEQ ID NO: 471363 - DNA, 75 bp, synthetic construct
  source 1..75: mol_type = other DNA
caaagctcaggctgatttcagttataaaggctccgacaggtcgtctcatggaattaattcagatatcagctcaaa

SEQ ID NO: 471364 - DNA, 75 bp, synthetic construct
  source 1..75: mol_type = other DNA
gcgactaaccgtgacttacgggaagaggtactggcagggcgatttcgcgccgatttgtttcatcgcctgagcgtg

SEQ ID NO: 471365 - DNA, 75 bp, synthetic construct
  source 1..75: mol_type = other DNA
gcctgcgcgcggatgctggaaactgacgtcgccaacctgcatcggctggcgaaacgtctgggattgaaggattaa

SEQ ID NO: 471366 - DNA, 75 bp, synthetic construct
  source 1..75: mol_type = other DNA
ctcgagaaagacgaaaattctccagacaatggctttgaggtcgtaaaatataacacatatgaagcttataactca

SEQ ID NO: 471367 - DNA, 75 bp, synthetic construct
  source 1..75: mol_type = other DNA
agacgcagatgatcggcctgtcgccaggcatgacgcaattgaaaaaacagattgagattgtggcggcgtccgatc

SEQ ID NO: 471368 - DNA, 75 bp, synthetic construct
  source 1..75: mol_type = other DNA
ctggaagcgattgcccgcgccggggacgtggtgcgctttcccgcagacagcgaattgcccgatccctatgacggt

SEQ ID NO: 471369 - DNA, 75 bp, synthetic construct
  source 1..75: mol_type = other DNA
ggcgagagccacccgcagcggcgatgaagtgattcttgaggcgcaacattttgcttttcctgaggtgacgttgcc

SEQ ID NO: 471370 - DNA, 75 bp, synthetic construct
  source 1..75: mol_type = other DNA
aaccaggtgggaaatgcattatcactggtgattttcaaaaagaattagcgtacttacaaaatgtaattctttata

SEQ ID NO: 471371 - DNA, 75 bp, synthetic construct
  source 1..75: mol_type = other DNA
tcgaaaaatgaatgaccttcctgaaagccccataggaaataacctcgaagcactagcaccaggcatagaaaaact

SEQ ID NO: 471372 - DNA, 75 bp, synthetic construct
  source 1..75: mol_type = other DNA
agaaaagctgatgaaactgaagtataaatcacaacatggtgattcagaggcatcatttcgactatatcaatatta

SEQ ID NO: 471373 - DNA, 75 bp, synthetic construct
  source 1..75: mol_type = other DNA
agaagagttactttcagataatggtatcgagaaagacgataattcttctgacaattactttgaggtcgaaaaaat

SEQ ID NO: 471374 - DNA, 75 bp, synthetic construct
  source 1..75: mol_type = other DNA
catgtttcaggtaaatttcgttagttcaacacaaaacgccacaatctcctgggattatttactaaaaataacgcc

SEQ ID NO: 471375 - DNA, 75 bp, synthetic construct
  source 1..75: mol_type = other DNA
tggtatcgcgggcgcgatgtttacccgcaagccgcgccagtggcggatgacgtgttggttactttccagcatcag

SEQ ID NO: 471376 - DNA, 75 bp, synthetic construct
  source 1..75: mol_type = other DNA
cgttagatgaaatcatcaagacgactctgcctaaagcgaaagagctgcgccgcgtagttgagccgctgattactc

SEQ ID NO: 471377 - DNA, 75 bp, synthetic construct
  source 1..75: mol_type = other DNA
aagcgatccgtggtttgcggactagtttacatttcgcaatgatggaagcaagaaataatatattgatgatttcag

SEQ ID NO: 471378 - DNA, 75 bp, synthetic construct
  source 1..75: mol_type = other DNA
tgaggcttctcggtgcgtcgtggatggtggtgacgttcattgtggttgccagcagttttatccggttggtaggtg

SEQ ID NO: 471379 - DNA, 75 bp, synthetic construct
  source 1..75: mol_type = other DNA
taattactttcttactcttctggctggtcaacgttggtataggttttggcggtggcaaagttttaaataaattca

SEQ ID NO: 471380 - DNA, 75 bp, synthetic construct
  source 1..75: mol_type = other DNA
gtgatgtcggtgttggctgatggggcactggtttcagtagctgtggtattgctattgccgattattaaagctgcg

SEQ ID NO: 471381 - DNA, 75 bp, synthetic construct
  source 1..75: mol_type = other DNA
tggtaccattggtgtcgaaaacaggtgtcgcaatagcactgattgtgatggcattatttgccgctatattattta

SEQ ID NO: 471382 - DNA, 75 bp, synthetic construct
  source 1..75: mol_type = other DNA
agaccctaaaaaaccgtgggcctcacttgttggccgcctccagcatccagagttacaggttcagccctttgacga

SEQ ID NO: 471383 - DNA, 75 bp, synthetic construct
  source 1..75: mol_type = other DNA
tcagattgtgaagcgaaaaggacggctatatgtcatttgtaaatctaatccccgttttaaggctgttcaggggcg

SEQ ID NO: 471384 - DNA, 75 bp, synthetic construct
  source 1..75: mol_type = other DNA
atgtcagagggcacggcaaaggcctgtacagatgagtttatccaggatgttccgtcgttcaccgaaaaatatgct

SEQ ID NO: 471385 - DNA, 75 bp, synthetic construct
  source 1..75: mol_type = other DNA
atgcgtcgcacaggttcactgaacattgcgcgtaaaacaccgatcgtgatgggcatgttgttgtcgatggtgatg

SEQ ID NO: 471386 - DNA, 75 bp, synthetic construct
  source 1..75: mol_type = other DNA
tccggtggcctgttcaacatgttcggtaacatttctggcatcgtcacgccaatcgcaattggttatatcgttggc

SEQ ID NO: 471387 - DNA, 75 bp, synthetic construct
  source 1..75: mol_type = other DNA
caggcactggtaagcaaccgatgatgagcagtcgcgagattgcagaacttaccggcaaagaacataaaatagtcg

SEQ ID NO: 471388 - DNA, 75 bp, synthetic construct
  source 1..75: mol_type = other DNA
cactaccttggttcgcctggatatgggccgtttctatagcaagtatctcggtgaaaccgagcgccagttcaatcg

SEQ ID NO: 471389 - DNA, 75 bp, synthetic construct
  source 1..75: mol_type = other DNA
cggttaaaagacaggctgagtgaattggcagatgaggaaggtattacccaggcgcagatgcttgaaaaactgatt

SEQ ID NO: 471390 - DNA, 75 bp, synthetic construct
  source 1..75: mol_type = other DNA
tcttggcaagctatctgggatgccgaaatcgcgccccaaatggaggctttgataaagaaacctggttatagcatg

SEQ ID NO: 471391 - DNA, 75 bp, synthetic construct
  source 1..75: mol_type = other DNA
accgacgttattattcgccatctgaacagtaaagacagttcgataagcattgctctacagcagattcaaccagaa

SEQ ID NO: 471392 - DNA, 75 bp, synthetic construct
  source 1..75: mol_type = other DNA
cattttgctggacgctccctgctccggcgaaggcgtggtgcgtaaagatcccgatgcgctaaaaaactggtcacc

SEQ ID NO: 471393 - DNA, 75 bp, synthetic construct
  source 1..75: mol_type = other DNA
cttcctcatcgaaacgagcttaccgaaagggtacgcctcttagtgtaagtgagaggaaaatgcgttcggtatccc

SEQ ID NO: 471394 - DNA, 75 bp, synthetic construct
  source 1..75: mol_type = other DNA
gcagaaacggtgtgcggattcacggtcaataaagtgtgtggttcgggtcttaaaagtgtggcgcttgccgcccag

SEQ ID NO: 471395 - DNA, 75 bp, synthetic construct
  source 1..75: mol_type = other DNA
cctttgacgacttcgccaaagttgacctgcgcgtggcgctgattgaaaacgcagagtttgttgagggttctgaca

SEQ ID NO: 471396 - DNA, 75 bp, synthetic construct
  source 1..75: mol_type = other DNA
taatgaactcagcggccagagcgcttccgttccagtgtggtggtacttcacgcatgcactgggcaaaggcatcac

SEQ ID NO: 471397 - DNA, 75 bp, synthetic construct
  source 1..75: mol_type = other DNA
agaagcggtactgcgctcgctggtcagcccgcgcaatatgcagatgtcgcagggcggactggtgtacaacgggtt

SEQ ID NO: 471398 - DNA, 75 bp, synthetic construct
  source 1..75: mol_type = other DNA
gatgagcaccattgaccgcatggagcgcaatggcgagttcccgcagcgcttctggatcactgataaacgttgtgc

SEQ ID NO: 471399 - DNA, 75 bp, synthetic construct
  source 1..75: mol_type = other DNA
atgaaaggtgcattaggtaagaaggaactcctggcggtggtgccactgtcatggagcactatcgaccgtatggag

SEQ ID NO: 471400 - DNA, 75 bp, synthetic construct
  source 1..75: mol_type = other DNA
actctggtgtcaagtctttaattctcatattatgtatgttgtctttaatgactttgtctttgtgggatgatgttg

SEQ ID NO: 471401 - DNA, 75 bp, synthetic construct
  source 1..75: mol_type = other DNA
aaacaacggcaccggcagccacgacctggcgatgaactttggcatccggggcctgaacccgcgcctcgccagccg

SEQ ID NO: 471402 - DNA, 75 bp, synthetic construct
  source 1..75: mol_type = other DNA
ctaattattgaaagttgcttggagcaactaaaaaaaagaaaaccttatgagcattctttactggttgcgcattat

SEQ ID NO: 471403 - DNA, 75 bp, synthetic construct
  source 1..75: mol_type = other DNA
tggtaacaccggggtggactattctccgatcgctgccggattcaaaggacttttaccatctgccactaaaccacg

SEQ ID NO: 471404 - DNA, 75 bp, synthetic construct
  source 1..75: mol_type = other DNA
ctggcgcccttgcttattggtatcctggtagccgtgataggtgcttcaactgggccattaactgggtttgcgatg

SEQ ID NO: 471405 - DNA, 75 bp, synthetic construct
  source 1..75: mol_type = other DNA
gtacttatcctgcggcggctatcagcgtctggcaggctacgttagtggaaattgtgattacctcaatgctgatgg

SEQ ID NO: 471406 - DNA, 75 bp, synthetic construct
  source 1..75: mol_type = other DNA
cgctggacgacaaacgccgcgagcaacaggaaagcgccacggcgaaagcgcaaaaagcggtggatgacatcgccg

SEQ ID NO: 471407 - DNA, 75 bp, synthetic construct
  source 1..75: mol_type = other DNA
tctggaagctaagtatgaagacgagaaccccggcgtgaatgatgacgtcgtggccggggctctggaagccgtctg

SEQ ID NO: 471408 - DNA, 75 bp, synthetic construct
  source 1..75: mol_type = other DNA
aaactgaccgaactggctcccgaaattctggcggcgctggcgaaggatgaaatcaccaccgaacactgccaggca

SEQ ID NO: 471409 - DNA, 75 bp, synthetic construct
  source 1..75: mol_type = other DNA
cacaggtcgagtatgtccctgtgacggcactggtgaagtctcccctgaacgtcaggaccattccctatccggcgg

SEQ ID NO: 471410 - DNA, 75 bp, synthetic construct
  source 1..75: mol_type = other DNA
gcattctttgattgtggcccattacctgtatggtatctcgaaaagaaagcttgcaagagctcgcaaaaaagatga

SEQ ID NO: 471411 - DNA, 75 bp, synthetic construct
  source 1..75: mol_type = other DNA
gaaattgattcgtacagaaatacatctggctgaaggatttattgacgggtgtctttcgatgcttgggactaggct

SEQ ID NO: 471412 - DNA, 75 bp, synthetic construct
  source 1..75: mol_type = other DNA
aaccccggcgtgaatgatgacgtcttggccggggctctggaagccgtccgggaagaacagcagaccatcgcgcac

SEQ ID NO: 471413 - DNA, 75 bp, synthetic construct
  source 1..75: mol_type = other DNA
gataaagtctttgaagataaagcgtcaggcaagaacactcagcgcccacagtttgaggcaatgatgaactatgtg

SEQ ID NO: 471414 - DNA, 75 bp, synthetic construct
  source 1..75: mol_type = other DNA
atcgacgagctgcgtaaaaaacatggcgatctggcggccgttgcgccgttgccgcgagctcactttaccaaaccg

SEQ ID NO: 471415 - DNA, 75 bp, synthetic construct
  source 1..75: mol_type = other DNA
ctcactccctcagtttctcggtttttttagcggttcgcgttttgtaccgattattagttcccttgccgcgattgt

SEQ ID NO: 471416 - DNA, 75 bp, synthetic construct
  source 1..75: mol_type = other DNA
tttgattaaccgttttaactggctgacgcccgggcgcgagaacacagcccaggtggagtccggtctgcctcagag

SEQ ID NO: 471417 - DNA, 75 bp, synthetic construct
  source 1..75: mol_type = other DNA
gacctcaccgatgtgaagcacgtcctgacagcgctaatcagcatggccgctcaggccattgtgacgaccaacgga

SEQ ID NO: 471418 - DNA, 75 bp, synthetic construct
  source 1..75: mol_type = other DNA
atcgccaaccgcagattgatttttatcagcgtttacgtagtcctctgaaagagctgcatctgctgccaggctttt

SEQ ID NO: 471419 - DNA, 75 bp, synthetic construct
  source 1..75: mol_type = other DNA
tggttgtgatcgcgcaaagcgttggcgcagtgctggttgccacatgggttcatgattatgcgcctgctattcgcg

SEQ ID NO: 471420 - DNA, 75 bp, synthetic construct
  source 1..75: mol_type = other DNA
cgtaaaaccgccgagagctttaatgttgctccttcaacggtgcaacgtatcaagaaggaagaagaggaggcgtaa

SEQ ID NO: 471421 - DNA, 75 bp, synthetic construct
  source 1..75: mol_type = other DNA
caccttagacatccttgctttagttgaacaacttaataatcgaggtgtaattgttcgatttcacaaagaaggaat

SEQ ID NO: 471422 - DNA, 75 bp, synthetic construct
  source 1..75: mol_type = other DNA
gtggtaaaggtaaggcagtggatagagaaggtataaagaaagccctttctgatggcgtgtcagtgcgtaaaaccg

SEQ ID NO: 471423 - DNA, 75 bp, synthetic construct
  source 1..75: mol_type = other DNA
tatggtttcattctgcgtatgcttggcccactgggtttacaccatatcttttatttgccgttctggacaacagcg

SEQ ID NO: 471424 - DNA, 75 bp, synthetic construct
  source 1..75: mol_type = other DNA
ggttgtcgccggactacttttgtcggcagccttgacctctttcctgacggaaatcactgagcctgttgagttctc

SEQ ID NO: 471425 - DNA, 75 bp, synthetic construct
  source 1..75: mol_type = other DNA
cacaagaaccccggttcagttggccaggggatgacgcttggtattcagacactggaaactggtgtgtttggtggg

SEQ ID NO: 471426 - DNA, 75 bp, synthetic construct
  source 1..75: mol_type = other DNA
aaactgcaccgaaaaccagcaaaaaaacgcttaagtctgccgaagctgaggcgcttaaagtggctctcgatgccg

SEQ ID NO: 471427 - DNA, 75 bp, synthetic construct
  source 1..75: mol_type = other DNA
ggtgccgcagtagaagcggcagaagcacagcgccagtcactgattgatgcagcaatggcttccattagtctgatt

SEQ ID NO: 471428 - DNA, 75 bp, synthetic construct
  source 1..75: mol_type = other DNA
tatgcccgcctgttccactggaattgaccctggcgaaaacattccgggaagagtggtagtatttacaggtaaggg

SEQ ID NO: 471429 - DNA, 75 bp, synthetic construct
  source 1..75: mol_type = other DNA
tgccagagtgatgaatgatactcgtggggtattaaaagcgattgttgataataaaacccaacgtatgttaggggc

SEQ ID NO: 471430 - DNA, 75 bp, synthetic construct
  source 1..75: mol_type = other DNA
cagtggttgtcatgttctggcgacgtctgtttggccttattggtattcactttggtcgcccgttgcagcacgaag

SEQ ID NO: 471431 - DNA, 75 bp, synthetic construct
  source 1..75: mol_type = other DNA
agcgattaaaaccttcctgcaattgattaagcgcatttcgtttatcccgttcgccatttatcgctttattgtggc

SEQ ID NO: 471432 - DNA, 75 bp, synthetic construct
  source 1..75: mol_type = other DNA
aattcagtctcgaatgatattagggaaaactgtagatgatctaaatttacaagcagaaatcgagccaaagtattt

SEQ ID NO: 471433 - DNA, 75 bp, synthetic construct
  source 1..75: mol_type = other DNA
aacatttttttaccagcagtgataatacagcgttgttttatcggcactggcccgctttacagcccggggctaaaa

SEQ ID NO: 471434 - DNA, 75 bp, synthetic construct
  source 1..75: mol_type = other DNA
gaaacagcgccgaaaaattactaggcaaaattaacacatttagattttctggagatgaagaaaaccagaaaattg

SEQ ID NO: 471435 - DNA, 75 bp, synthetic construct
  source 1..75: mol_type = other DNA
atgacaaacatgatctcatatcagggacttgttcgcaccttccttagtgggtacattggcagtgtagttaagcca

SEQ ID NO: 471436 - DNA, 75 bp, synthetic construct
  source 1..75: mol_type = other DNA
ctgtgtatttacaattgctgagccgacagcaagagttaaatattgccaaatctagtgccataggtaacgtacgta

SEQ ID NO: 471437 - DNA, 75 bp, synthetic construct
  source 1..75: mol_type = other DNA
cagacaatatttgggcgatgggagatgttaccggcgggctgcaatttacttatatttcactggatgattaccgca

SEQ ID NO: 471438 - DNA, 75 bp, synthetic construct
  source 1..75: mol_type = other DNA
atagcctccatcttccatgaacaccggggatgttatgggtaccggcggatccattgtgagcttcagaaaagaggt

SEQ ID NO: 471439 - DNA, 75 bp, synthetic construct
  source 1..75: mol_type = other DNA
ggggcgaccatttcaggtgggatgctgatgggcgtgagccgttacgctgcttccgagttctcgttcctgctggcg

SEQ ID NO: 471440 - DNA, 75 bp, synthetic construct
  source 1..75: mol_type = other DNA
agcatattgctacagtggccggtgatataacggtgtttaactacgatggtgagacccgtgaatatctttcttcat

SEQ ID NO: 471441 - DNA, 75 bp, synthetic construct
  source 1..75: mol_type = other DNA
ctcgacaagcagcacaagatgccaaaagtttagatttccttaataaacaattgccgattgttcgtacagatcttg

SEQ ID NO: 471442 - DNA, 75 bp, synthetic construct
  source 1..75: mol_type = other DNA
gattatatagacgcgctgaacgcaatggatataaacatggtaccagatatcaacttgccggaaataccactggca

SEQ ID NO: 471443 - DNA, 75 bp, synthetic construct
  source 1..75: mol_type = other DNA
agttttctatgacatatggaaagatgaaaatgcattttatagaacaatgaaatctgagggtgcatacagtccatc

SEQ ID NO: 471444 - DNA, 75 bp, synthetic construct
  source 1..75: mol_type = other DNA
cgatatattactacgggggctatagtaatgaattcatgttttaagagtgttttcccagtttttgcgtcgagaaat

SEQ ID NO: 471445 - DNA, 75 bp, synthetic construct
  source 1..75: mol_type = other DNA
aaaatgttactgaggaaacgatatagaaaactcaatgccaaacaatttgattatgtatatgctgattttttaaaa

SEQ ID NO: 471446 - DNA, 75 bp, synthetic construct
  source 1..75: mol_type = other DNA
tttacaaccatgctcagtatctcgataagcgcagagaaatgatgcagtggtgggcggattggcttgatgaaaagg

SEQ ID NO: 471447 - DNA, 75 bp, synthetic construct
  source 1..75: mol_type = other DNA
tatcgaaagagtcagtgagggtgattttgattatatttgtcgtggacaaacaccacctaatcctgcagagttgct

SEQ ID NO: 471448 - DNA, 75 bp, synthetic construct
  source 1..75: mol_type = other DNA
tctgtttggcctgattggcattcactttgggcgtccgttgcagcacgaaggagaaagcaaaggtcggttaacgct

SEQ ID NO: 471449 - DNA, 75 bp, synthetic construct
  source 1..75: mol_type = other DNA
gaacggcagcgagccgcagaactggaggttgccagacagcaacgccagcaacgggtgaaacaggcgatggcgtca

SEQ ID NO: 471450 - DNA, 75 bp, synthetic construct
  source 1..75: mol_type = other DNA
taagcgcagagaaatgatgcagtggtgggcggactggcttgatgaaaaggtgggggaatgccacccatcacacca

SEQ ID NO: 471451 - DNA, 75 bp, synthetic construct
  source 1..75: mol_type = other DNA
tgaacgagcacgaatggcctgccgacgccattgaagtgcaactggcacatgccaacggcggatctgtgcgtggga

SEQ ID NO: 471452 - DNA, 75 bp, synthetic construct
  source 1..75: mol_type = other DNA
tcagcttccgccgcatttatgaatatgctggcggtgactggcaggaagataacggtgtctggcaccagaacgtgt

SEQ ID NO: 471453 - DNA, 75 bp, synthetic construct
  source 1..75: mol_type = other DNA
gcccgtatggcgcaccgcagtacaacgcaaccaaaggtcatatgaccaaatgtgatggttgctatgaccgcgtcg

SEQ ID NO: 471454 - DNA, 75 bp, synthetic construct
  source 1..75: mol_type = other DNA
gcaccggggaaatgtggtggagagagtaattgaaggggcttacgaggtggtgggcgtgtttgaccggattgagga

SEQ ID NO: 471455 - DNA, 75 bp, synthetic construct
  source 1..75: mol_type = other DNA
agtgacgaacaacatttatttggcagagctgcactgatgggcaggtaggaagatgaaaataaaacgccagtgacg

SEQ ID NO: 471456 - DNA, 75 bp, synthetic construct
  source 1..75: mol_type = other DNA
ttgataaggtcactgataatatggaggcgatgaaagaaatacatcttaacagtgacgagcaacatttatttggca

SEQ ID NO: 471457 - DNA, 75 bp, synthetic construct
  source 1..75: mol_type = other DNA
taccagaacaagagccatcaccggtatcgatggtgatatcagactcaataaagcgttatggatgattgccgaaca

SEQ ID NO: 471458 - DNA, 75 bp, synthetic construct
  source 1..75: mol_type = other DNA
gcaccggggaaatgtggtggacaaagtcattgaaggggcttacgaggtggtgggcgtgtttgaccggattgagga

SEQ ID NO: 471459 - DNA, 75 bp, synthetic construct
  source 1..75: mol_type = other DNA
gcaccggggaaatgtggtggaaaaagtaattgaaggggcttacgaggtggtgggcgtgtttgaccggattgagga

SEQ ID NO: 471460 - DNA, 75 bp, synthetic construct
  source 1..75: mol_type = other DNA
cgatgaaagctgtacagcaacaggcgcaggcccgcgaggaagtggaagatgcggtggaagtccgcctgagcaaag

SEQ ID NO: 471461 - DNA, 75 bp, synthetic construct
  source 1..75: mol_type = other DNA
gcaccggggaaatgtggtggagatagttattgaaggggcttacgaggtggtgggcgtgtttgaccggattgagga

SEQ ID NO: 471462 - DNA, 75 bp, synthetic construct
  source 1..75: mol_type = other DNA
gcaccggggaaatgtggtggagaaagtgattgaaggggcttacgaggtggtgggcgtgtttgaccggattgagga

SEQ ID NO: 471463 - DNA, 75 bp, synthetic construct
  source 1..75: mol_type = other DNA
gcaccggggaaatgtggtggacacagtaattgaaggggcttacgaggtggtgggcgtgtttgaccggattgagga

SEQ ID NO: 471464 - DNA, 75 bp, synthetic construct
  source 1..75: mol_type = other DNA
agtgacgatcaacatttatttggcagagctgcactgatggtcaggtaggaagatgaaaataaaacgccagtgacg

SEQ ID NO: 471465 - DNA, 75 bp, synthetic construct
  source 1..75: mol_type = other DNA
atttcttcgccactgcgcggcttcaatctaagtacaattcatttgcagcattgtctgcagcagcaaccgcgctat

SEQ ID NO: 471466 - DNA, 75 bp, synthetic construct
  source 1..75: mol_type = other DNA
gcatatctttgaaccctttgttcgcctcgaccccagccgtgaccgtgcaaccggcggctgcgggctgggactggc

SEQ ID NO: 471467 - DNA, 75 bp, synthetic construct
  source 1..75: mol_type = other DNA
catcttagcgaaccagacctgccgttgtggctgtcaacgcatctggccgacattcaggcactaactcccgataaa

SEQ ID NO: 471468 - DNA, 75 bp, synthetic construct
  source 1..75: mol_type = other DNA
ccggtgataaacatgagtcccggagtgaacgttatacgtatattccaacaatcaatatcatcaataagttacgtg

SEQ ID NO: 471469 - DNA, 75 bp, synthetic construct
  source 1..75: mol_type = other DNA
taatttgtggctggattatctggaagcactggaactggttgatacatccagtgcgccagatattgaatggcctac

SEQ ID NO: 471470 - DNA, 75 bp, synthetic construct
  source 1..75: mol_type = other DNA
gaagtcgcagatgcgaactttcaaaagcagatgcttatctctgatgcaactgattttatcaatagcagacagtgg

SEQ ID NO: 471471 - DNA, 75 bp, synthetic construct
  source 1..75: mol_type = other DNA
aattcatcttaacagtgacgagcaacatttatttggcagagctgcactgatggtcaggtatgaagatgaaaataa

SEQ ID NO: 471472 - DNA, 75 bp, synthetic construct
  source 1..75: mol_type = other DNA
agtgacgagcaacatttatttggcagagctgcactgatggacaggtaggaagatgaaaataaaacgccagtgacg

SEQ ID NO: 471473 - DNA, 75 bp, synthetic construct
  source 1..75: mol_type = other DNA
agtgacgaccaacatttatttggcagagctgcaatgatggccaggtaggaagatgaaaataaaacgccagtgacg

SEQ ID NO: 471474 - DNA, 75 bp, synthetic construct
  source 1..75: mol_type = other DNA
cttaacagtgacgaacaacatttatttggcagagctgcattgatggccaggtacgaagatgaaaataaaacgcca

SEQ ID NO: 471475 - DNA, 75 bp, synthetic construct
  source 1..75: mol_type = other DNA
ccccggaatttttcgttttgtctgcacaaatggcctggtgtgtgggaataattttggcgaaatccgcgttccaca

SEQ ID NO: 471476 - DNA, 75 bp, synthetic construct
  source 1..75: mol_type = other DNA
ggtaaaaataccaggacaagagccattacaggcattgacggtgatatccgaatcaacaaagcattatggatgatt

SEQ ID NO: 471477 - DNA, 75 bp, synthetic construct
  source 1..75: mol_type = other DNA
gcaacagcaggcatttatcgatcagttgctggctgccgggcgctggttgctggtgctgctggtggcgtggctgct

SEQ ID NO: 471478 - DNA, 75 bp, synthetic construct
  source 1..75: mol_type = other DNA
aacggctgaaccgcgaacctgcggtgtttcgcggtctgacggtcagcgagctgctgatagcgctgcttgtcgggc

SEQ ID NO: 471479 - DNA, 75 bp, synthetic construct
  source 1..75: mol_type = other DNA
atatgacggtgcgtctgcgccggaaggttgtgcgcgagtacggtattaaatcgctggtggaagcaccagtcatct

SEQ ID NO: 471480 - DNA, 75 bp, synthetic construct
  source 1..75: mol_type = other DNA
caaatacgagatctgggggctgccgtctgtgctgatatttcatgaagggcaattagttaaacgcataccgggtgt

SEQ ID NO: 471481 - DNA, 75 bp, synthetic construct
  source 1..75: mol_type = other DNA
tgatgccggtacgctggtattgtgcaaaatgccggcgctactattgtggaaatcagccctgtccctggtgctggc

SEQ ID NO: 471482 - DNA, 75 bp, synthetic construct
  source 1..75: mol_type = other DNA
ccgcgctggcagaaagagcagccgccactgctaccggctgaaacgagctggtgtgcgtttggggttatcggatgg

SEQ ID NO: 471483 - DNA, 75 bp, synthetic construct
  source 1..75: mol_type = other DNA
gtacttatcctgcagcggcgttaaatatatggcaggcggcgttggttgaagtggttatcacctctatgttaatgg

SEQ ID NO: 471484 - DNA, 75 bp, synthetic construct
  source 1..75: mol_type = other DNA
attagcgcgaccggtttttctgccgtttctaagctgcctgtacggcagtgaacaattgcggcatattgctgcgcg

SEQ ID NO: 471485 - DNA, 75 bp, synthetic construct
  source 1..75: mol_type = other DNA
cagtgaactaatttgtgattctgttattgtgagttgcggctttctaagctgcctgtacggcagtgaactttctcc

SEQ ID NO: 471486 - DNA, 75 bp, synthetic construct
  source 1..75: mol_type = other DNA
aacaacgcagcactgaatgcgctggggttgtctcttggcgattacacaggtctgacgcccttccctgaacttatt

SEQ ID NO: 471487 - DNA, 75 bp, synthetic construct
  source 1..75: mol_type = other DNA
ccctgcactgttcggcagtggctgtgagagcgctgcagactttcattactggctgagaacacaagggttgcagtg

SEQ ID NO: 471488 - DNA, 75 bp, synthetic construct
  source 1..75: mol_type = other DNA
ttaagaacggaccgtgcattgccgggctggggctgggcggggaaggctggaccaccatgaccatcaccacgccaa

SEQ ID NO: 471489 - DNA, 75 bp, synthetic construct
  source 1..75: mol_type = other DNA
tcagatagacgatatgcgcgtcattcgctatcaggcgattaaaggcggaatgcttttgttggttgtgactgaaac

SEQ ID NO: 471490 - DNA, 75 bp, synthetic construct
  source 1..75: mol_type = other DNA
atggaagctcaagcggttttaaaccaaatcgttaatgtagataatcagctaaatgaacttacatttagagaagct

SEQ ID NO: 471491 - DNA, 75 bp, synthetic construct
  source 1..75: mol_type = other DNA
cttaagtgttgttgaccaaggcaaagatacgggaatgctaagtattacttttaccgatgaaaatccagccttagc

SEQ ID NO: 471492 - DNA, 75 bp, synthetic construct
  source 1..75: mol_type = other DNA
tctctggacaacctggcagcgggttcaggagaatatgataaaaggtggattatcggggcgaagtgcctccggtaa

SEQ ID NO: 471493 - DNA, 75 bp, synthetic construct
  source 1..75: mol_type = other DNA
tacccggccgcgcactcgatgaagggcaaattagcgccattgtacatctggtttccagcgcggttgctggtctgc

SEQ ID NO: 471494 - DNA, 75 bp, synthetic construct
  source 1..75: mol_type = other DNA
ggcctagtgtgtgggaataattttggcgaaatccgcgttccacataaaggtgatattgtcgggcaggttattgag

SEQ ID NO: 471495 - DNA, 75 bp, synthetic construct
  source 1..75: mol_type = other DNA
tgggttcgtccgggtgaagccgttcgcgcaaggtggtctgatattgatacaaccaacagtatttggaacattcct

SEQ ID NO: 471496 - DNA, 75 bp, synthetic construct
  source 1..75: mol_type = other DNA
cggggcgaagtacctccggtaaaaataccaggacaagagccattacaggtattgatggtgatataagaatcaaca

SEQ ID NO: 471497 - DNA, 75 bp, synthetic construct
  source 1..75: mol_type = other DNA
aattactgatcaagggaaggatacagggattttattactatcacttaccggagatgaccctgagttaacaaaaaa

SEQ ID NO: 471498 - DNA, 75 bp, synthetic construct
  source 1..75: mol_type = other DNA
acattcgactaacggccttgaggaattccgtaaagcacgggcgctgaaaatgaccgtcgatacaatgaaagacct

SEQ ID NO: 471499 - DNA, 75 bp, synthetic construct
  source 1..75: mol_type = other DNA
tacgtcttcgcagggaagggcatattaacgggaaagaagttcctgaaattatcctgcttaattcacatgatggtt

SEQ ID NO: 471500 - DNA, 75 bp, synthetic construct
  source 1..75: mol_type = other DNA
atattaacgggatagaagttcctgaagttatcctgctttattcacatgatggttcatcccgttatcagatgatcc

SEQ ID NO: 471501 - DNA, 75 bp, synthetic construct
  source 1..75: mol_type = other DNA
ttgtgattttagacacgcctccgattttggttgttaccgatgcagcaataattggtaattatgcgggtacaactt

SEQ ID NO: 471502 - DNA, 75 bp, synthetic construct
  source 1..75: mol_type = other DNA
aacaaccaacgcacacgccagaaatgccgcatacggacaacgttaatcagcatgagaaggacgcaaagaccttgc

SEQ ID NO: 471503 - DNA, 75 bp, synthetic construct
  source 1..75: mol_type = other DNA
cgccagccgaactgagtgccgagcaactcttaagcaagctgtggctatgggaaggcaaagcggaaagctatggct

SEQ ID NO: 471504 - DNA, 75 bp, synthetic construct
  source 1..75: mol_type = other DNA
cggagaaggtgaagaaggggtatgtggagcaagcgaaggataattctttgcaaccttcccaaacggtaacgggct

SEQ ID NO: 471505 - DNA, 75 bp, synthetic construct
  source 1..75: mol_type = other DNA
gagcctcctgcggctgttactggggaagttgttggcgatgttgaagacgctgagattgagttcgttgacccagag

SEQ ID NO: 471506 - DNA, 75 bp, synthetic construct
  source 1..75: mol_type = other DNA
agagcgtctctcgggaccttcgccagagtcgtctcgatgtaaacgagttctcctatggtgtgcctgtcgaacggt

SEQ ID NO: 471507 - DNA, 75 bp, synthetic construct
  source 1..75: mol_type = other DNA
gttggccgcagagcaggaagcagagaaagctctagctggtcttggctttggtgatgcgatggagatgctgaaaag

SEQ ID NO: 471508 - DNA, 75 bp, synthetic construct
  source 1..75: mol_type = other DNA
agcgaaggataattctttgcaaccttcccaaacggtaacggattctctcaaggtagcggccttatccaccattat

SEQ ID NO: 471509 - DNA, 75 bp, synthetic construct
  source 1..75: mol_type = other DNA
gcagcaatggcggcactgacggaacttcttgggcaaaaagaagagaacagttggcgcattatgctaatgacaatg

SEQ ID NO: 471510 - DNA, 75 bp, synthetic construct
  source 1..75: mol_type = other DNA
ctgatgagcacattcttgcctcattagaaaaatatcacgaaccatatgccatttttgatgattactattgtggtg

SEQ ID NO: 471511 - DNA, 75 bp, synthetic construct
  source 1..75: mol_type = other DNA
ggagcaacagggaaacgagttgcatatcagttggggaaaagttggcacccaagggcaaagccaggtaaaaaattt

SEQ ID NO: 471512 - DNA, 75 bp, synthetic construct
  source 1..75: mol_type = other DNA
gcggagcttgaagatcggttagcaccggatctcggtctggatgataacggttcgctgctgctggattttggccca

SEQ ID NO: 471513 - DNA, 75 bp, synthetic construct
  source 1..75: mol_type = other DNA
ctgcaactcgctgggttacagggttttattcactccttttcacgctatccacaagaagctctacctgtagcacaa

SEQ ID NO: 471514 - DNA, 75 bp, synthetic construct
  source 1..75: mol_type = other DNA
cgtaatgaaaaaatctagctcgtattatggctatgggtataatcattatggatatacatataatgatgataaata

SEQ ID NO: 471515 - DNA, 75 bp, synthetic construct
  source 1..75: mol_type = other DNA
gttgcactggggcggcgtaactacatgttcttcggctctgatggtggaggcgagagtgcggcagtgatgtacagc

SEQ ID NO: 471516 - DNA, 75 bp, synthetic construct
  source 1..75: mol_type = other DNA
acgccagtccggctctgctggcccgcataatcatggctaagttcgccgagcatctgccgctgtaccgtcagtcgg

SEQ ID NO: 471517 - DNA, 75 bp, synthetic construct
  source 1..75: mol_type = other DNA
ttattgttgatacaccgccagtcctagcagtgacagatgctgagattattggtcgctatgttggaacaactttgt

SEQ ID NO: 471518 - DNA, 75 bp, synthetic construct
  source 1..75: mol_type = other DNA
cagccagtctggatttaacaagagcagcggcctttgctattcgtattgtgtccattgctgttctggtctgggcaa

SEQ ID NO: 471519 - DNA, 75 bp, synthetic construct
  source 1..75: mol_type = other DNA
agaatccggtgattgctgccgtaaaagataatgccagcctgcaactggcaatcgactctgaatgccagtttattt

SEQ ID NO: 471520 - DNA, 75 bp, synthetic construct
  source 1..75: mol_type = other DNA
tatagaaaaggtaccgaatggagcgtttgattttatatcgcgaggacaagtaccgcctaatccatcagaattatt

SEQ ID NO: 471521 - DNA, 75 bp, synthetic construct
  source 1..75: mol_type = other DNA
gctgatgatatccccgtcccggtccaggagccgggcagcggtaaaacccggacagcccggctgtgggtctacgtc

SEQ ID NO: 471522 - DNA, 75 bp, synthetic construct
  source 1..75: mol_type = other DNA
cctgcctgtggtggtgaactcagttctctgggatgtgatgtgtcagagcaactggagcttatcagcagcgccttt

SEQ ID NO: 471523 - DNA, 75 bp, synthetic construct
  source 1..75: mol_type = other DNA
tgcccggtctgcagcggcaaactgaaaccgctgggggaaagcatctctgaacagctggatatcatcaatactgcg

SEQ ID NO: 471524 - DNA, 75 bp, synthetic construct
  source 1..75: mol_type = other DNA
atttcgagataacaaactttttacaactagtgctcacctggagtttgttaatcattctttcatgtggcatcggct

SEQ ID NO: 471525 - DNA, 75 bp, synthetic construct
  source 1..75: mol_type = other DNA
caatgttcacattgataactctgttcattggtctggctttataccgaactcgtgaggaggcaatgctgacatcat

SEQ ID NO: 471526 - DNA, 75 bp, synthetic construct
  source 1..75: mol_type = other DNA
tgcatgtcgtggagttaagccgcgaggcagttatgcctggctatatcagcgaaggcgtgagtctgaactacctgg

SEQ ID NO: 471527 - DNA, 75 bp, synthetic construct
  source 1..75: mol_type = other DNA
gaccggatccgcactgttaatctgattaaatctgcccgtgttggttatacaaagatgttgctgggagtggaggct

SEQ ID NO: 471528 - DNA, 75 bp, synthetic construct
  source 1..75: mol_type = other DNA
aaaccaacatcagtactttaccttgctttcctatcagtcctttctgaacatgacttgcttatttttgatggggaa

SEQ ID NO: 471529 - DNA, 75 bp, synthetic construct
  source 1..75: mol_type = other DNA
tatacaaagccgtctcgataggaaactaggtgcatctttacttcgttatgcactatacggaatggttcctcgttg

SEQ ID NO: 471530 - DNA, 75 bp, synthetic construct
  source 1..75: mol_type = other DNA
caatttctcaggctctgagtgaatatgccccgggacgtttgattgttattgataggaaaacctatcgctctggtg

SEQ ID NO: 471531 - DNA, 75 bp, synthetic construct
  source 1..75: mol_type = other DNA
aaccgcagtgcaaaaagaactgaatattggttttgattttatttcaagagggatggttcctcctaatcctgcaga

SEQ ID NO: 471532 - DNA, 75 bp, synthetic construct
  source 1..75: mol_type = other DNA
ggcgatacgactgccgggccgcgtgaccacctcccgcctgctgcataccgccaccggggccatagcacacgttac

SEQ ID NO: 471533 - DNA, 75 bp, synthetic construct
  source 1..75: mol_type = other DNA
attctacaaacccacttggggtagtcaaggacggtttggaaaagctcttaggaaaaccctgatacagtatcctgc

SEQ ID NO: 471534 - DNA, 75 bp, synthetic construct
  source 1..75: mol_type = other DNA
catgatgtttttgatccttatcccgcggcgttacatggtcaatttgattccatttccatgttttaccttcttcac

SEQ ID NO: 471535 - DNA, 75 bp, synthetic construct
  source 1..75: mol_type = other DNA
ggtgtatcaaatcggcttgcatggagatgtcctacaaaggaacaccttcttccacactttctggaacatttaggt

SEQ ID NO: 471536 - DNA, 75 bp, synthetic construct
  source 1..75: mol_type = other DNA
atgttatttacgctcaagacaaagctgatagcctcgaaaaaacgcctttccgttcgtccggcacatttagcacgt

SEQ ID NO: 471537 - DNA, 75 bp, synthetic construct
  source 1..75: mol_type = other DNA
aatacactccatgggctggctgaaattgttccacaaactgccgttcttgttgatgaggaaaatgaagatgatgag

SEQ ID NO: 471538 - DNA, 75 bp, synthetic construct
  source 1..75: mol_type = other DNA
ttttatcaaaccccttttcgatgagttttacaataaactcgcaaataacgcccccgtacgtgcggaactgaaccg

SEQ ID NO: 471539 - DNA, 75 bp, synthetic construct
  source 1..75: mol_type = other DNA
taagaaacgtccctccgcaacgagaaaattatcagcaacgtgctgggcgagcaggccgccgtggcgcatctgttt

SEQ ID NO: 471540 - DNA, 75 bp, synthetic construct
  source 1..75: mol_type = other DNA
cgataccgatgatggcgacactcgcatttcagcgggtgcattctggccggatattgtgctgcgtgagctgcgtct

SEQ ID NO: 471541 - DNA, 75 bp, synthetic construct
  source 1..75: mol_type = other DNA
ttgcatttttttctttagtagtgtttttcgtaggactttgcctttaccgtttcaaagaggaggctatgttaacct

SEQ ID NO: 471542 - DNA, 75 bp, synthetic construct
  source 1..75: mol_type = other DNA
ggctgtaatgccgagttatgtaagtgaaggagtaagcataaattacttactaatatttagcttagctactctatt

SEQ ID NO: 471543 - DNA, 75 bp, synthetic construct
  source 1..75: mol_type = other DNA
accaggtgctggtgacacgctgtaagcagacgttacatcaagtcgagccattgcgggaagttgaacctggcagga

SEQ ID NO: 471544 - DNA, 75 bp, synthetic construct
  source 1..75: mol_type = other DNA
gcagacgttgcatcaagttgagccattgcgggaagttgaaccggacagaaaacgtctggtatttgatgaaaatct

SEQ ID NO: 471545 - DNA, 75 bp, synthetic construct
  source 1..75: mol_type = other DNA
ttgcatatactctggttattttaatgagtatataagtataaattatctcgctttttgtgcacttttaatgttttt

SEQ ID NO: 471546 - DNA, 75 bp, synthetic construct
  source 1..75: mol_type = other DNA
cccattttaataaaacctttatattttatttcatgtgtaatgtttccgttgcatgcaatacctaaggattattgg

SEQ ID NO: 471547 - DNA, 75 bp, synthetic construct
  source 1..75: mol_type = other DNA
acctccacacgtctggcgcacgttgccacgggagccgtggctcacgtcacgcgggagctggaagagtggcagaag

SEQ ID NO: 471548 - DNA, 75 bp, synthetic construct
  source 1..75: mol_type = other DNA
aattaacggagaaagcgtcaatctctggcactggcgcaatgcggtttataccgccacacgcgccctgattctgga

SEQ ID NO: 471549 - DNA, 75 bp, synthetic construct
  source 1..75: mol_type = other DNA
cgctgtgcgcggcaactgcgacagcgaagtggaccaaatgctgctgcatttcccgataaccgcgccgtggcaaca

SEQ ID NO: 471550 - DNA, 75 bp, synthetic construct
  source 1..75: mol_type = other DNA
gcgcaacagcctgctttataccggaatatccaccgtgaccatcgcggccggtgatgtggtgcagattgagcgtca

SEQ ID NO: 471551 - DNA, 75 bp, synthetic construct
  source 1..75: mol_type = other DNA
cagacggtatggtctggatggcgcataccggcaccttcggcacggcaaccagttttggtgagtcccgtaatgatt

SEQ ID NO: 471552 - DNA, 75 bp, synthetic construct
  source 1..75: mol_type = other DNA
ggcaggctcagaagaggtcatcattgcatgtgcaattctcagtaaataactgtattaaagttttcgttcgaccag

SEQ ID NO: 471553 - DNA, 75 bp, synthetic construct
  source 1..75: mol_type = other DNA
gggctatatgcaggcatttgtgaactatggactgcgtaacctgaaggaaggggcgaagttcagaagccggattga

SEQ ID NO: 471554 - DNA, 75 bp, synthetic construct
  source 1..75: mol_type = other DNA
cgccgagctggcgaagaaacagtccgttgacgcgatgctgatgagcggcgacagctatgactgcggtaagaaaat

SEQ ID NO: 471555 - DNA, 75 bp, synthetic construct
  source 1..75: mol_type = other DNA
gcctgggccactccattctgtgcgcgcgtccgatcgttggcgataacccgtttgtggttgttctgcccgatatca

SEQ ID NO: 471556 - DNA, 75 bp, synthetic construct
  source 1..75: mol_type = other DNA
tgaagtacagtctatttgtcctccgcatgtcactattatgcaagttcgtcagggactggctaaaggtctgggaca

SEQ ID NO: 471557 - DNA, 75 bp, synthetic construct
  source 1..75: mol_type = other DNA
gaactggaacgtaccgagccgggtgcctggggccgtatccagctgaccgacgccattgccgaactggcgaagaag

SEQ ID NO: 471558 - DNA, 75 bp, synthetic construct
  source 1..75: mol_type = other DNA
ggatgatgatctgtccgaatactctgttattcagaccaaagagcctttggacaacgaaggcaaagtcagccgtat

SEQ ID NO: 471559 - DNA, 75 bp, synthetic construct
  source 1..75: mol_type = other DNA
cgtcgagttcatcgaaaaaccggaccaaccgcaaacgctggattccgacctgatggcagtagggcgctatgtgct

SEQ ID NO: 471560 - DNA, 75 bp, synthetic construct
  source 1..75: mol_type = other DNA
gcgtatcgttgagtttattgaaaaaccggacgaaccgcagacccttgactccgacctgatggcggtggggcgcta

SEQ ID NO: 471561 - DNA, 75 bp, synthetic construct
  source 1..75: mol_type = other DNA
tagatgaaaaagagactgcgtttggttctactgaatttatagtgatgcgaggtactcctcaagtacattatttgt

SEQ ID NO: 471562 - DNA, 75 bp, synthetic construct
  source 1..75: mol_type = other DNA
ttccgctgacatttgggccgaactggaaaaaaccgcgccgggtgcctggggacgtattcaactgacggatgctat

SEQ ID NO: 471563 - DNA, 75 bp, synthetic construct
  source 1..75: mol_type = other DNA
cagccgcagacgctggattctgacctgatggcggttggtcgttatgtcctgaacgcggatatctgggccgagctg

SEQ ID NO: 471564 - DNA, 75 bp, synthetic construct
  source 1..75: mol_type = other DNA
tcatcgataccgcttctgcggatccgctgcgctataacctggcggcgatggtggcgcgtttcaacgaaacaggcc

SEQ ID NO: 471565 - DNA, 75 bp, synthetic construct
  source 1..75: mol_type = other DNA
agataatgccagcctgcaactggccatcgattctgaatgccagtttatttccgtgttgtacggcaatatctgcac

SEQ ID NO: 471566 - DNA, 75 bp, synthetic construct
  source 1..75: mol_type = other DNA
cgagaaaagtgacctggaaaggtgtcaccttgaggcggcattaaacattaagccggggcatacgcttggcattat

SEQ ID NO: 471567 - DNA, 75 bp, synthetic construct
  source 1..75: mol_type = other DNA
attcatgcactggctgcgggtagcttacgaggctggcaactatccggatattccggatagttcggtgccagcgcc

SEQ ID NO: 471568 - DNA, 75 bp, synthetic construct
  source 1..75: mol_type = other DNA
gtttctttattccattgaaagagaagcatggtcgttctccggcgaagcgcctggagcatgtattgcatccgtggg

SEQ ID NO: 471569 - DNA, 75 bp, synthetic construct
  source 1..75: mol_type = other DNA
tcgtcaaaaaggaatcctggaagcgcttcggggttaaggccggtgtgacactactggttctttgggctgctggtg

SEQ ID NO: 471570 - DNA, 75 bp, synthetic construct
  source 1..75: mol_type = other DNA
catacgctaggcgtcattgatgccatgttggttcatgaaatggcgaaggctttattgccgctggtggctgataaa

SEQ ID NO: 471571 - DNA, 75 bp, synthetic construct
  source 1..75: mol_type = other DNA
gcaaaggacggcagcctgacgccggaagaggtagatcatgtcattgcgctggcgcagaaactgatcaatgaataa

SEQ ID NO: 471572 - DNA, 75 bp, synthetic construct
  source 1..75: mol_type = other DNA
cagccgcagaccctggactcagacatcatggctgtagggcgttatgtgctttctgccgatatttggcctgaactg

SEQ ID NO: 471573 - DNA, 75 bp, synthetic construct
  source 1..75: mol_type = other DNA
ccatttgtcgtggtgctgccagacgttgtgatcgacgacgccagcgccgacccgctacgctacaaccttgctgcc

SEQ ID NO: 471574 - DNA, 75 bp, synthetic construct
  source 1..75: mol_type = other DNA
tttttgaaactggtgacagaggcggacggaattatcagtaccaaagcctcaatgctgaaagcagcaagagcggaa

SEQ ID NO: 471575 - DNA, 75 bp, synthetic construct
  source 1..75: mol_type = other DNA
ttgatgcactattggttcataagatggccagggctttattgccgctggtggctgaaaagcatgaggcgggccatg

SEQ ID NO: 471576 - DNA, 75 bp, synthetic construct
  source 1..75: mol_type = other DNA
aatgccacaccgttttattatgctgaagacgatcatcaacagtatttgcataaaaatccgtacggctattgtggc

SEQ ID NO: 471577 - DNA, 75 bp, synthetic construct
  source 1..75: mol_type = other DNA
gaacgcactcagccaggtgcatgggggcgtattcagctgactgatgccattgctgaactggcgaaaaaacagtca

SEQ ID NO: 471578 - DNA, 75 bp, synthetic construct
  source 1..75: mol_type = other DNA
atgcagcttctggccgaagaagtcaaagcgttaatggatgatgattttgatattgatctgcttgggtttaatgat

SEQ ID NO: 471579 - DNA, 75 bp, synthetic construct
  source 1..75: mol_type = other DNA
taacattgaaacccgtcagtttgatggattaaccgtttcttgtgttgacggtggcaaattgtttacctgctttgc

SEQ ID NO: 471580 - DNA, 75 bp, synthetic construct
  source 1..75: mol_type = other DNA
tctgagatacaaaatctttccaaaattgttgaaagtttgctggatattagccgaacaaatcaccaattattgcgt

SEQ ID NO: 471581 - DNA, 75 bp, synthetic construct
  source 1..75: mol_type = other DNA
cttgtttaaaattaaaccatctgagataacaggcccaatattacaattccagtatactcgttcggatgataagaa

SEQ ID NO: 471582 - DNA, 75 bp, synthetic construct
  source 1..75: mol_type = other DNA
gcactggagaaatttaaaggcgataaaacagcagcggcgaattatttaggcataagccggacgaccttctggcgg

SEQ ID NO: 471583 - DNA, 75 bp, synthetic construct
  source 1..75: mol_type = other DNA
ctggtacagaaactggggacgctacggccttactccggcatgacggggtatgacggcatccggcgaaattttctg

SEQ ID NO: 471584 - DNA, 75 bp, synthetic construct
  source 1..75: mol_type = other DNA
taaacaaatccctgcatcttcagtagaagaactgaccaaggggatcatcgactggcataagagtttgaaagctgg

SEQ ID NO: 471585 - DNA, 75 bp, synthetic construct
  source 1..75: mol_type = other DNA
gaattctggattgtgtattggatctggcgcgtaaactttcgatcagtatcgtcgctgaaggtgtcgaaacgaaag

SEQ ID NO: 471586 - DNA, 75 bp, synthetic construct
  source 1..75: mol_type = other DNA
ccgcaaccggactgctttctgcgtcctggcgaagagtattccagcctgacggaatatcagtttattgctgagtaa

SEQ ID NO: 471587 - DNA, 75 bp, synthetic construct
  source 1..75: mol_type = other DNA
ctgcaattctactccggcaacttcctcggcggcacaccgtcgcggggaaccgaaccttacgccgactggcaaggg

SEQ ID NO: 471588 - DNA, 75 bp, synthetic construct
  source 1..75: mol_type = other DNA
gcttctttattccgttaaaagagaagcatgggcgctctccggctaaacgtctggagcatgttttgcatccgtggg

SEQ ID NO: 471589 - DNA, 75 bp, synthetic construct
  source 1..75: mol_type = other DNA
cttagctataaaaacaattaagtcagctgggtttgactatatttcccgtggtatggttcctcctaatccagctga

SEQ ID NO: 471590 - DNA, 75 bp, synthetic construct
  source 1..75: mol_type = other DNA
aattgatcacagtttcgttggccgcgtcaacgcagacccagcactgagagatcccctcataatttccccaaaacg

SEQ ID NO: 471591 - DNA, 75 bp, synthetic construct
  source 1..75: mol_type = other DNA
actaatgacttatcgatggcctctcttggcgtcgcggctgtagcaattgcggtactcgcggtattgaatctgtgt

SEQ ID NO: 471592 - DNA, 75 bp, synthetic construct
  source 1..75: mol_type = other DNA
acttaagcgtattgatttggctgttgatgatttcgatggtgtttttacgtgtgacgctgctgttcgcgatcatcg

SEQ ID NO: 471593 - DNA, 75 bp, synthetic construct
  source 1..75: mol_type = other DNA
aaagccgccgccatattcgcgcgctgcgccgggattttgtcgatcagctaagccgccatccaacactgagtgaaa

SEQ ID NO: 471594 - DNA, 75 bp, synthetic construct
  source 1..75: mol_type = other DNA
cggcgattaactggggtactgttaccgacgtagctaaacgcaaatcagcgtttgcgggtacgccagtcagcgtcg

SEQ ID NO: 471595 - DNA, 75 bp, synthetic construct
  source 1..75: mol_type = other DNA
gttctgtatggtacatggatgatcagcagcgattgaatgataacgcagtaaaaaatactaaagttatgatgtctg

SEQ ID NO: 471596 - DNA, 75 bp, synthetic construct
  source 1..75: mol_type = other DNA
tcacgccgcatccggcaaaaaaaccgcccgcacaataacatcattcttcctcaacacgttttaccgcaaattatc

SEQ ID NO: 471597 - DNA, 75 bp, synthetic construct
  source 1..75: mol_type = other DNA
acgccagccaaatatttgtaatattttcatattattattcagctttcacagttgttacatttcttttcagtaaag

SEQ ID NO: 471598 - DNA, 75 bp, synthetic construct
  source 1..75: mol_type = other DNA
catctaaagatgatgaagggcttgatttaggacgtttacttggagaagttattgaccatagaaagctaatagtgt

SEQ ID NO: 471599 - DNA, 75 bp, synthetic construct
  source 1..75: mol_type = other DNA
ggagaaatttggtaatgtaaacaagggcgaaacagaacaggtcaagtacaatcgcctttatcgggactcgccgtt

SEQ ID NO: 471600 - DNA, 75 bp, synthetic construct
  source 1..75: mol_type = other DNA
gaaggacgatttatttgtgcatcctgtggttcctgctgtacgacgcatcaggagaaatttggtaatgtaaacaag

SEQ ID NO: 471601 - DNA, 75 bp, synthetic construct
  source 1..75: mol_type = other DNA
cggcgattaactggggtacggttactgacgtcgctaaacgcaaatcagcgtttgctggtacgccagtcagcgttg

SEQ ID NO: 471602 - DNA, 75 bp, synthetic construct
  source 1..75: mol_type = other DNA
atgattttattctgggacccgatcttgttgtgacgaccgtcggtcattttcagggcgggatcaacgtaccccggc

SEQ ID NO: 471603 - DNA, 75 bp, synthetic construct
  source 1..75: mol_type = other DNA
taatacagtgtgttgcccgtattgtggttctgtcgaccccttcggctattaccggaatacagaccgtatcgttac

SEQ ID NO: 471604 - DNA, 75 bp, synthetic construct
  source 1..75: mol_type = other DNA
gacagactgcgaaatctggtcgaccgtctgttggggccgcaactaccaggcacacacgtcaccgaaagcattcac

SEQ ID NO: 471605 - DNA, 75 bp, synthetic construct
  source 1..75: mol_type = other DNA
accggaataccgatcgtttgctctgtttattgatgttactgctggtgctgattctggttaccgtttcaggcgtca

SEQ ID NO: 471606 - DNA, 75 bp, synthetic construct
  source 1..75: mol_type = other DNA
aacccacagcataagccaattaaaggttttagtgcgcgtggtggctttaactccgctttcgttagctggaatggt

SEQ ID NO: 471607 - DNA, 75 bp, synthetic construct
  source 1..75: mol_type = other DNA
gtggatcacctaactggattaaagctggccagacgtcgcagcaaatttttaatatcaatgcactggcaagcgata

SEQ ID NO: 471608 - DNA, 75 bp, synthetic construct
  source 1..75: mol_type = other DNA
ggtatgcttgatgctactcaggttaggggtgacttcgtgaaagcggttggtaagcgattcccgcacaaaaacgcc

SEQ ID NO: 471609 - DNA, 75 bp, synthetic construct
  source 1..75: mol_type = other DNA
gcgccataaaattcgtttgcaggttgatggcggcctgaaaacaggcgttgatatcatcaaagcggcaattctcgg

SEQ ID NO: 471610 - DNA, 75 bp, synthetic construct
  source 1..75: mol_type = other DNA
gcgtatctggtcaatgccgacgtcattcagattaaagtcgcccagggcgcgaaaccgggtgaaggtggtcagtta

SEQ ID NO: 471611 - DNA, 75 bp, synthetic construct
  source 1..75: mol_type = other DNA
aagcgatgaacagcatcggcggaaactcgaactccggtgaaggtggtgaagacccggcgcgctacggcaccaaca

SEQ ID NO: 471612 - DNA, 75 bp, synthetic construct
  source 1..75: mol_type = other DNA
catactgctggcactgattattgtggtcctgctgactactgtcagcgtcagtgtgtgtagtggtcaagtaatatt

SEQ ID NO: 471613 - DNA, 75 bp, synthetic construct
  source 1..75: mol_type = other DNA
aagtgtcgcgcatcaagcaggtggcttctggtcgctttggggttactccggcgtatctggtcaatgccgacgtca

SEQ ID NO: 471614 - DNA, 75 bp, synthetic construct
  source 1..75: mol_type = other DNA
ggcagccgatcctatcaaagcgtacttcaacggcaccgcgggtcagagcttcggcgtgtggaacgcaggcggcgt

SEQ ID NO: 471615 - DNA, 75 bp, synthetic construct
  source 1..75: mol_type = other DNA
taccagcgaacaagcgagcgcgactaagatcgaacaagttcgggtagaaatggatggtaaggtcgctggtgttaa

SEQ ID NO: 471616 - DNA, 75 bp, synthetic construct
  source 1..75: mol_type = other DNA
cggtactctgaacaacgtcacgattaacgaatcctgtgttattaagggtatgttagaagctactcaggtacgcgg

SEQ ID NO: 471617 - DNA, 75 bp, synthetic construct
  source 1..75: mol_type = other DNA
aagtggcagtcgatgttatgggcttaaaaatccgtaacctcgaaaccaatgctattgaggcaagcactaacggcg

SEQ ID NO: 471618 - DNA, 75 bp, synthetic construct
  source 1..75: mol_type = other DNA
tataacccaagtgcatatatcagcgatctaacagtaatggtaactaaaaaagccactactggtattactgtttct

SEQ ID NO: 471619 - DNA, 75 bp, synthetic construct
  source 1..75: mol_type = other DNA
cagaagggaagggggttgttgaaatggacaacgggaaagcaaagggcgagatccagatgttgattaaggagttgt

SEQ ID NO: 471620 - DNA, 75 bp, synthetic construct
  source 1..75: mol_type = other DNA
agggaggctgtggcaagtcaaccaccagcgtcaatatttgtgccgagctggcccgaaaaaacaaagatgtcgtct

SEQ ID NO: 471621 - DNA, 75 bp, synthetic construct
  source 1..75: mol_type = other DNA
acatgatgcttctaaatcgtcagcaagaactaaatatcgcaaaatcaagtgcaattggtaatgtgagaattattg

SEQ ID NO: 471622 - DNA, 75 bp, synthetic construct
  source 1..75: mol_type = other DNA
gtggatcgcctaactggattaagctgggacagacttcacagcaaattttcagtgtcaatgcactggcaaaagatc

SEQ ID NO: 471623 - DNA, 75 bp, synthetic construct
  source 1..75: mol_type = other DNA
gacgtagaacatgactatgcagggtcaatcatccagtatgcaaccgataacactttctccgatgcaagggcagta

SEQ ID NO: 471624 - DNA, 75 bp, synthetic construct
  source 1..75: mol_type = other DNA
ggatcggaagtatgcccgtttggtatcgaagataacaaagtttatctcgataatgcgatgattcgtaatgctgca

SEQ ID NO: 471625 - DNA, 75 bp, synthetic construct
  source 1..75: mol_type = other DNA
tccagtcttcaaactggaacggatctaccggatggcatatcaacaagaacgggtccgctacgttcatgaacgcta

SEQ ID NO: 471626 - DNA, 75 bp, synthetic construct
  source 1..75: mol_type = other DNA
tgggtggaactggttaaccagaatccagaagttacctatgaactgcctacgccagtgatccgcatcaaaaatcag

SEQ ID NO: 471627 - DNA, 75 bp, synthetic construct
  source 1..75: mol_type = other DNA
ggacgcctagcacatggatcagtgatttaactgtaatggtaactaaaaaagccactaccggtattactgtttctt

SEQ ID NO: 471628 - DNA, 75 bp, synthetic construct
  source 1..75: mol_type = other DNA
gagctgatggtgatcgacactcgcagtgggcgtattctgcactcggcggaaaccgatgatgacctgaaaagccgc

SEQ ID NO: 471629 - DNA, 75 bp, synthetic construct
  source 1..75: mol_type = other DNA
atggatatcatccgcgccatgcgtctattagtaccacccgcctggcagaacaacccggatatggacccggaactg

SEQ ID NO: 471630 - DNA, 75 bp, synthetic construct
  source 1..75: mol_type = other DNA
taaccgggaaaatccgttctggcaggatatgacggaacagcatttaccggtgctgtttactaccgacgatctcaa

SEQ ID NO: 471631 - DNA, 75 bp, synthetic construct
  source 1..75: mol_type = other DNA
gaaaatccgttctggcaggatatgacggaacagcatttgccagtgctgtttactaccgacgatctcaacgaggat

SEQ ID NO: 471632 - DNA, 75 bp, synthetic construct
  source 1..75: mol_type = other DNA
caggatgacaaactgcgtaagaaccactatcacggcttgccgttcaaggtgaccaactactttgaatttatcgcc

SEQ ID NO: 471633 - DNA, 75 bp, synthetic construct
  source 1..75: mol_type = other DNA
ggccaggcgcaccgtttaagctttaaatcgccgattctgctctactccgatttcaaacagctcacgacgatgaaa

SEQ ID NO: 471634 - DNA, 75 bp, synthetic construct
  source 1..75: mol_type = other DNA
accggctctgactccagttcgatggataacatgctggaactgctgctggcgggcgggatggatatcatccgcgcc

SEQ ID NO: 471635 - DNA, 75 bp, synthetic construct
  source 1..75: mol_type = other DNA
gtcgccggactttccgctacaggaatttgtctgttatgcccgcgagcaagtgatgacgattttgccggactcacc

SEQ ID NO: 471636 - DNA, 75 bp, synthetic construct
  source 1..75: mol_type = other DNA
aagtactggcagggcgatttcgcgccgatttattccatcgcctgagtgtgtttccgctttccgtgccgccgctac

SEQ ID NO: 471637 - DNA, 75 bp, synthetic construct
  source 1..75: mol_type = other DNA
gcaaaacctgcgtgaagcgacagaagcgttccagcgtgaaactattcgtcaggcactggcacaaaatcatcacaa

SEQ ID NO: 471638 - DNA, 75 bp, synthetic construct
  source 1..75: mol_type = other DNA
gccagttcaatccaaaactatggctggcgctgcttagcggcggaatcaagcccagccagttttactggcatatat

SEQ ID NO: 471639 - DNA, 75 bp, synthetic construct
  source 1..75: mol_type = other DNA
gcgaagcacgggagtggtttcgtagtgaaacccgccgcgttgcgcctattacgctggatgtcatgtgggatcact

SEQ ID NO: 471640 - DNA, 75 bp, synthetic construct
  source 1..75: mol_type = other DNA
tagacgcccattacgatgccctggaaacccgcttctggcagttttatccgcggatgatggcacaggcgtcacaca

SEQ ID NO: 471641 - DNA, 75 bp, synthetic construct
  source 1..75: mol_type = other DNA
tccgcaaacgcgttaacccggaactggtcgaggtcttaagcgttgacgatctggcgatccatgaagagcatctgc

SEQ ID NO: 471642 - DNA, 75 bp, synthetic construct
  source 1..75: mol_type = other DNA
ttttcgacctcaagcaggttaacccgaaagcgatgatctccgtgaagctggtttccgaaccgggcgtaggcacca

SEQ ID NO: 471643 - DNA, 75 bp, synthetic construct
  source 1..75: mol_type = other DNA
cgggcggcttaatcgccattcgtcctccggttggctcagccttccgcagccatgaagcaagcattatcggcaaca

SEQ ID NO: 471644 - DNA, 75 bp, synthetic construct
  source 1..75: mol_type = other DNA
ggcgcgtcgctttcaggctatatcgcccagacgcacggcgatcagggtctggctgccgatccgatcaaagcatac

SEQ ID NO: 471645 - DNA, 75 bp, synthetic construct
  source 1..75: mol_type = other DNA
tggttaaaccgaagtccagtgatgtaaaagcactgctgggtcaccgtagtcgtagcgcagcagagttgcgcgtgc

SEQ ID NO: 471646 - DNA, 75 bp, synthetic construct
  source 1..75: mol_type = other DNA
tggcgtggcgaaagcctatgcggacttgatcaccatcgcaggctatgacggcggcaccggcgcaagtccgctttc

SEQ ID NO: 471647 - DNA, 75 bp, synthetic construct
  source 1..75: mol_type = other DNA
ccgcagccatgaagcaagcattatcggcaacacctgcctgtatggcgcgaccggtggtcgtctgtatgccgcagg

SEQ ID NO: 471648 - DNA, 75 bp, synthetic construct
  source 1..75: mol_type = other DNA
ccggcaggctggcgtccgcgcgatatggaacgccgtctgtttatcgcccgccgccgcattgaaaagcgtctcgaa

SEQ ID NO: 471649 - DNA, 75 bp, synthetic construct
  source 1..75: mol_type = other DNA
aagcgatgaacagcctcggcggcaactctaactccggcgaaggtggtgaagaccctgcgcgctatggcaccaaca

SEQ ID NO: 471650 - DNA, 75 bp, synthetic construct
  source 1..75: mol_type = other DNA
ccggtgctatcaccgtggtagaaggcattggcgacaacggctgtgaatatatgacgggtggtatcgtctgtattc

SEQ ID NO: 471651 - DNA, 75 bp, synthetic construct
  source 1..75: mol_type = other DNA
aggatttagcgcagctgatattcgacctcaagcaggtcaatccaaaagcgatgatctccgtgaagctggtttccg

SEQ ID NO: 471652 - DNA, 75 bp, synthetic construct
  source 1..75: mol_type = other DNA
gaagccgggcgaaggcggtcagttgccaggtgataaagtcacgccttacatcgccaaactgcgctattcggtgcc

SEQ ID NO: 471653 - DNA, 75 bp, synthetic construct
  source 1..75: mol_type = other DNA
atatcatcaaagcggcgattctcggcgcagaaagcttcggcttcggcactggcccaatggtggcgctcggctgta

SEQ ID NO: 471654 - DNA, 75 bp, synthetic construct
  source 1..75: mol_type = other DNA
acggcgatatcgcctatacccgcgatggcaacttgcaggtgaacgccgacggcgtgctgactaactcgcagggtt

SEQ ID NO: 471655 - DNA, 75 bp, synthetic construct
  source 1..75: mol_type = other DNA
cggcaatttgcaggtgaacgccgatggcgtactgaccaactcacagggcttgccattgcagccggaaatcgacgt

SEQ ID NO: 471656 - DNA, 75 bp, synthetic construct
  source 1..75: mol_type = other DNA
aaagctttatgactggtgggttttgggagtatcaaatcggcttgcatggggatgtcctacaaaggaacaccttct

SEQ ID NO: 471657 - DNA, 75 bp, synthetic construct
  source 1..75: mol_type = other DNA
ctaaaatttacacaccacttaccctaaagctttatgactggtgggttttgggagtatcaaattggcttgcatggg

SEQ ID NO: 471658 - DNA, 75 bp, synthetic construct
  source 1..75: mol_type = other DNA
gatggaactctatacggagccacaattcttggcgatggagttgtgcacaatagcttcggtcaaaaactgatgcgc

SEQ ID NO: 471659 - DNA, 75 bp, synthetic construct
  source 1..75: mol_type = other DNA
caatgcggcgcaggccttaactgacgatggaactctatacggagccacaattcttggcgatggagttgtgcacaa

SEQ ID NO: 471660 - DNA, 75 bp, synthetic construct
  source 1..75: mol_type = other DNA
aagcgccagaaacgcctgccaaagaaattatctggaaaagtgaacggttgaaaaattcacgccgtgtatggattt

SEQ ID NO: 471661 - DNA, 75 bp, synthetic construct
  source 1..75: mol_type = other DNA
ccgcgcctttatgcagcaacgcgccgccgacgaagcgccgggtaaaaactggctgttctttggcaatccgcattt

SEQ ID NO: 471662 - DNA, 75 bp, synthetic construct
  source 1..75: mol_type = other DNA
accagaaaattaccgggcgtaactctgaaaaagacgttcgccatatcgaaattgacttaggtgactcgggcctgc

SEQ ID NO: 471663 - DNA, 75 bp, synthetic construct
  source 1..75: mol_type = other DNA
gcactggcctgaacgttttggctgtgtattaagccagtcgggatcgtactggtggccgcatcggagtgggcagcc

SEQ ID NO: 471664 - DNA, 75 bp, synthetic construct
  source 1..75: mol_type = other DNA
gtgtcagccgcagtcacaggcgtcctgccagcagtggctggaagcccactggcgtactctgacaccgacgaattt

SEQ ID NO: 471665 - DNA, 75 bp, synthetic construct
  source 1..75: mol_type = other DNA
gtctgcgcattgtgctggaagcgggtattcgcgagccgatgattatgcgggccaatcaggcgctgtatgcgcaat

SEQ ID NO: 471666 - DNA, 75 bp, synthetic construct
  source 1..75: mol_type = other DNA
acgcctgatgtttatgccgaaattcttcggccaatattggctttttgtggaaaaccacacttataactggatgcg

SEQ ID NO: 471667 - DNA, 75 bp, synthetic construct
  source 1..75: mol_type = other DNA
tgtttatgatgcgtatggtgcgcagcagttctattttcctaatgtgctgaagtatgaccctgatcagttacggca

SEQ ID NO: 471668 - DNA, 75 bp, synthetic construct
  source 1..75: mol_type = other DNA
cgactcaccttctgaaggcgcttactctgtacaaggtattgcgtctgatggaagatatatacatatacttaaggg

SEQ ID NO: 471669 - DNA, 75 bp, synthetic construct
  source 1..75: mol_type = other DNA
cgacaattatttttgatcagttgattagtctcggagataagtacgaaggcgtgaccatccagccagttgagttca

SEQ ID NO: 471670 - DNA, 75 bp, synthetic construct
  source 1..75: mol_type = other DNA
gcttattatcatcagctgtttgattacgccagcgggcatcaagaatatgcgctgttccgtgcggccatcgattaa

SEQ ID NO: 471671 - DNA, 75 bp, synthetic construct
  source 1..75: mol_type = other DNA
ctcgtaaacttacagattatgaagaacgcctgatgtttatgccgaaatttttcggtcaatactggcattttgtgg

SEQ ID NO: 471672 - DNA, 75 bp, synthetic construct
  source 1..75: mol_type = other DNA
ctggccccggcagccgtcagtctctatctcgctggcggtatggcgttacagtggctgctggggccactttccgac

SEQ ID NO: 471673 - DNA, 75 bp, synthetic construct
  source 1..75: mol_type = other DNA
aaagatccgaccgaaccgcggtttatctggcgtgccgtacccattcaactggtcggcctctcgctgttgattgtc

SEQ ID NO: 471674 - DNA, 75 bp, synthetic construct
  source 1..75: mol_type = other DNA
aagggatcaagttgatggcgattatcacctccatcgtactgattgcgccgattattggcccgctttccggcgcag

SEQ ID NO: 471675 - DNA, 75 bp, synthetic construct
  source 1..75: mol_type = other DNA
aaatatcccgaattgcagattgcacgatggcgtgatgacaaagatgttcgcggttggggggctatcagtgatgga

SEQ ID NO: 471676 - DNA, 75 bp, synthetic construct
  source 1..75: mol_type = other DNA
atgaataaccattttggtaaaggcttaatggcgggattaaaagcaacgcatgccgccacgctgtttttcccgatg

SEQ ID NO: 471677 - DNA, 75 bp, synthetic construct
  source 1..75: mol_type = other DNA
tctgtatgctttcgggattggtttgatcttcccgaccttattccgctttacgctgttttccaataacttaccgaa

SEQ ID NO: 471678 - DNA, 75 bp, synthetic construct
  source 1..75: mol_type = other DNA
gcccaggcaccggcatcgcgccgttccgcgcctttatgcagcaacgtgctgccgatgaagcaccgggtaaaaact

SEQ ID NO: 471679 - DNA, 75 bp, synthetic construct
  source 1..75: mol_type = other DNA
cgcgttctatcgctatcgttattccgccgattggtctggggctggcgaccattatcgaccgtcgtttaaccggca

SEQ ID NO: 471680 - DNA, 75 bp, synthetic construct
  source 1..75: mol_type = other DNA
gtcggctcaaccgccgctgtctggctgggcgcaatggttcccggagtccgctatctgggcatggccgctggtcac

SEQ ID NO: 471681 - DNA, 75 bp, synthetic construct
  source 1..75: mol_type = other DNA
ggtatccgtaccgtgctgactgccgcaggtgagaagggcgcgctaatgtatgcgatgggtatcgcagcagcgaca

SEQ ID NO: 471682 - DNA, 75 bp, synthetic construct
  source 1..75: mol_type = other DNA
gccgtttggcggctggatcaatgggggtatccgtaccatcctgactgctgctggtgagaagggcgcgctgatgta

SEQ ID NO: 471683 - DNA, 75 bp, synthetic construct
  source 1..75: mol_type = other DNA
acttaaatttgcctggctgtcgcagtccttcggcggcgtgttgtttggttttgccattccgatgtttgctgcatt

SEQ ID NO: 471684 - DNA, 75 bp, synthetic construct
  source 1..75: mol_type = other DNA
ttgttattccgccgattggtctgggtctggcgaccattatcgaccgccgtttaaccggcaaacgtctgttcaacg

SEQ ID NO: 471685 - DNA, 75 bp, synthetic construct
  source 1..75: mol_type = other DNA
aatttaccggtttcgatctctccttactgaaatttgcctggctgtcgcagtcctttggcggcgtgctgtttggct

SEQ ID NO: 471686 - DNA, 75 bp, synthetic construct
  source 1..75: mol_type = other DNA
ctggcgttcccggcagggtttatcggcgggttgatgtctacccagcccacgcaactgctgaattttgaccccagc

SEQ ID NO: 471687 - DNA, 75 bp, synthetic construct
  source 1..75: mol_type = other DNA
gaagcgcggcgcggttccatttagcgccaaaagcgtctttcgcgattttcgtaatgtcttttgcaatcggctgtt

SEQ ID NO: 471688 - DNA, 75 bp, synthetic construct
  source 1..75: mol_type = other DNA
atcatggatgctcttaatagcgggaaattctccggtttcgacctctccttactgaaatttgcctggctgtcgcaa

SEQ ID NO: 471689 - DNA, 75 bp, synthetic construct
  source 1..75: mol_type = other DNA
aattctccggtttcgacctctccttactgaaatttgcctggctgtcgcagtccttcggcggcgtgttgtttggtt

SEQ ID NO: 471690 - DNA, 75 bp, synthetic construct
  source 1..75: mol_type = other DNA
gttggttccaccgccgctgtctggctgggtgcagtgcagtggttcccggaatctgctatctgggcatggccgctg

SEQ ID NO: 471691 - DNA, 75 bp, synthetic construct
  source 1..75: mol_type = other DNA
agtcctcagagtaatcgaatggcagaaaggttcgtgaaaacgatgaaggaagactacatcgcgttcatgccgaaa

SEQ ID NO: 471692 - DNA, 75 bp, synthetic construct
  source 1..75: mol_type = other DNA
tctccaaaaaagcgccgaaactggaaaacaccgcttttgctgtgtttagcctcggtgacacctcttatgagtttt

SEQ ID NO: 471693 - DNA, 75 bp, synthetic construct
  source 1..75: mol_type = other DNA
aagtccgcgtatttatcgaacataacgacaacttccgcctgccagccaacccggaaacgccggtaattatgattg

SEQ ID NO: 471694 - DNA, 75 bp, synthetic construct
  source 1..75: mol_type = other DNA
gcggaccgtgtggaagaagagggcgaagtccgcgtatttatcgaacataacgacaacttccgcctgccagccaac

SEQ ID NO: 471695 - DNA, 75 bp, synthetic construct
  source 1..75: mol_type = other DNA
aaggggaaggggaaccgccggaagaagccgtcgcgctgcataagttcctgttctccaaaaaagcgccaaagctgg

SEQ ID NO: 471696 - DNA, 75 bp, synthetic construct
  source 1..75: mol_type = other DNA
ggctgttctttggcaacccgcactttacggaagatttcctctaccaggtggagtggcagcgctacgtcaaagagg

SEQ ID NO: 471697 - DNA, 75 bp, synthetic construct
  source 1..75: mol_type = other DNA
accagtccgtatagtaaagaagcgccgctggtggcgagcctctctgttaaccagaaaatcactggacgtaactct

SEQ ID NO: 471698 - DNA, 75 bp, synthetic construct
  source 1..75: mol_type = other DNA
ggtatattttcagatggcaaatttactgttaatactcgtcgtgtgcataaaggttactggatgatagcagtgttt

SEQ ID NO: 471699 - DNA, 75 bp, synthetic construct
  source 1..75: mol_type = other DNA
tttctttatgtgttcagtttacgggagggatatttacaaccatgccatttctgtcggggggtaatacagttttat

SEQ ID NO: 471700 - DNA, 75 bp, synthetic construct
  source 1..75: mol_type = other DNA
ggcattattattcctcttgtcaaatggtttgtgcagcattatggctatgcgccgaatatcaggaaatacagattt

SEQ ID NO: 471701 - DNA, 75 bp, synthetic construct
  source 1..75: mol_type = other DNA
gccgggaacgaccttctccaaccctgacgctgcgcgagctagagcgctggctcacattggcggtcggcacctacc

SEQ ID NO: 471702 - DNA, 75 bp, synthetic construct
  source 1..75: mol_type = other DNA
ctagagcgctggctcacattggcggtcggcacctaccacggttcggtgcacaacggccggcactgttgcaaatag

SEQ ID NO: 471703 - DNA, 75 bp, synthetic construct
  source 1..75: mol_type = other DNA
cttgacccgcgcaaggtcatccgccggcgggaaggccaggatgccgctcgtgacctacaaggtgtgggcggcgag

SEQ ID NO: 471704 - DNA, 75 bp, synthetic construct
  source 1..75: mol_type = other DNA
aaccttgagttattacgcacagtacgcgagcgtaatccgcacgcctacattgtttataaaccgcacccggatgta

SEQ ID NO: 471705 - DNA, 75 bp, synthetic construct
  source 1..75: mol_type = other DNA
gttatgcgaaactggatgacagcgtaattactgatgacattaaagacgatgccatcaaaactaaaggctacttca

SEQ ID NO: 471706 - DNA, 75 bp, synthetic construct
  source 1..75: mol_type = other DNA
attgaagccggtgatgacagtatctgttatgcgaaactggatgacagcgtaatggatttgcccctatatttccag

SEQ ID NO: 471707 - DNA, 75 bp, synthetic construct
  source 1..75: mol_type = other DNA
tgggcgttttcggtcgacaggtgggatgaaaagtggccggaagcgacaaaacgcgccgttattcgcgatgcctat

SEQ ID NO: 471708 - DNA, 75 bp, synthetic construct
  source 1..75: mol_type = other DNA
cgaagttaattattattagcgataactttagaaagttagcaaaaaatgctgattataatgggccggaacttttca

SEQ ID NO: 471709 - DNA, 75 bp, synthetic construct
  source 1..75: mol_type = other DNA
ccaacactgctacaacctattacggttgaagaggcggcggaatatttgatccagacgccgcgcaagccgatgttt

SEQ ID NO: 471710 - DNA, 75 bp, synthetic construct
  source 1..75: mol_type = other DNA
atgcacaaatttactaaagctcttgccgccatcggtctggctgccgttatgtcacaatccgctatggcggaaaat

SEQ ID NO: 471711 - DNA, 75 bp, synthetic construct
  source 1..75: mol_type = other DNA
tccttctcccaacgccagaatacaaagacttactattaacaaaaacaggtgaaaacataatttcggaatttaatt

SEQ ID NO: 471712 - DNA, 75 bp, synthetic construct
  source 1..75: mol_type = other DNA
cctgttggcacgcgaccttacaatactccagaactttggatggaaggagagttgtctcaggaggaatcattagcg

SEQ ID NO: 471713 - DNA, 75 bp, synthetic construct
  source 1..75: mol_type = other DNA
gttcggcgcgctgctgagcattacagagtggtgggaaaacggcgaccctccaggcagttttcgtctcaacatcga

SEQ ID NO: 471714 - DNA, 75 bp, synthetic construct
  source 1..75: mol_type = other DNA
acgctttcagtggacagatgggataaggcatggacggaagagactcgccgggacgttatacgcgagtcgtggatg

SEQ ID NO: 471715 - DNA, 75 bp, synthetic construct
  source 1..75: mol_type = other DNA
gagaagctgcgtgagcagcagccagagccggagccgcagaaaaaaacgactcgttactatggcccctcgatgtga

SEQ ID NO: 471716 - DNA, 75 bp, synthetic construct
  source 1..75: mol_type = other DNA
atgacaaatgatatttacattaatggcaaagtgattgatagcttcggtgactggtcgccacagactgaacatcca

SEQ ID NO: 471717 - DNA, 75 bp, synthetic construct
  source 1..75: mol_type = other DNA
atgaaacgcagaagaagattgctatgcaggctgatattgagcagcttactaagatttcaacgaaatacagcaagg

SEQ ID NO: 471718 - DNA, 75 bp, synthetic construct
  source 1..75: mol_type = other DNA
gtcaccacagactgaacatccagctatcgctattcagcgtcaagagcatgacaagcgtatcgagcttgagcaaga

SEQ ID NO: 471719 - DNA, 75 bp, synthetic construct
  source 1..75: mol_type = other DNA
atggaaaatctatatatcaacggtaaaaagattgatagcttcggtgactggtcaccacagactgaacatccagct

SEQ ID NO: 471720 - DNA, 75 bp, synthetic construct
  source 1..75: mol_type = other DNA
atgaatgttggtttctctactctggaggcatgggtatgtcagctcagacgggaacgtcaggatatcacgccttct

SEQ ID NO: 471721 - DNA, 75 bp, synthetic construct
  source 1..75: mol_type = other DNA
gctcggcaatctcggtgatgccgacactgagcactacgccgcgtcagcgcgcgcgtttggtgcggcgttccccaa

SEQ ID NO: 471722 - DNA, 75 bp, synthetic construct
  source 1..75: mol_type = other DNA
ttccgccagctcgcaccgaatgtctggcagcacacttcctatctcgacatgccgggtttcggggcagtcgcttcc

SEQ ID NO: 471723 - DNA, 75 bp, synthetic construct
  source 1..75: mol_type = other DNA
agcgtgttagacttgatgacgcttacagcaaagttaccctgatgcaatcagctattgagccatcagaatttgaga

SEQ ID NO: 471724 - DNA, 75 bp, synthetic construct
  source 1..75: mol_type = other DNA
taagttgtatctatcaagagagcttcagactatgaaagcgcttattagtgactatgaaacgcagaaaaaggttgc

SEQ ID NO: 471725 - DNA, 75 bp, synthetic construct
  source 1..75: mol_type = other DNA
gctatcgctattcagcgcaaagagcacgatgaaagaattgcacttgagcaagagttaaagatgtcgccaaaagaa

SEQ ID NO: 471726 - DNA, 75 bp, synthetic construct
  source 1..75: mol_type = other DNA
acgaggcacagaaaaaggttgccctgcaaggtgacattgagcagcttactaagatttctcagaaatacagcaaag

SEQ ID NO: 471727 - DNA, 75 bp, synthetic construct
  source 1..75: mol_type = other DNA
atctttgtgtctcctgagcctcaagagatgcccgatatctgcaagagtgaagcattacttgagcttgaaaagaaa

SEQ ID NO: 471728 - DNA, 75 bp, synthetic construct
  source 1..75: mol_type = other DNA
attacctttgtgtctcctgagcctcaagaaatgcctgatgtttgcaagggtgaatcattacttgagcttgaaaag

SEQ ID NO: 471729 - DNA, 75 bp, synthetic construct
  source 1..75: mol_type = other DNA
tcaccgataaaggaacccacgttctgtggcaggtgaacggagttgccggtgataacctgcataaaactggcgaag

SEQ ID NO: 471730 - DNA, 75 bp, synthetic construct
  source 1..75: mol_type = other DNA
tgccggggaccaccgggccgggccgtatgagcggaataaacgccttgagcgggaatggttttacgacaaagcgta

SEQ ID NO: 471731 - DNA, 75 bp, synthetic construct
  source 1..75: mol_type = other DNA
ttccggtcggcgctgacagtagtcctgatactgaaaacagcatccgctggatatatgagccgggaagttttacac

SEQ ID NO: 471732 - DNA, 75 bp, synthetic construct
  source 1..75: mol_type = other DNA
ggctggaatgccgctacgataaactcacccgcctgaccgaaatcatcaacgccagcggcgagcactaccgcctgg

SEQ ID NO: 471733 - DNA, 75 bp, synthetic construct
  source 1..75: mol_type = other DNA
tgccggggaccaccgggccggctcggatgagcggaataaaagcctgaagcgccagtggctgtatgacaaagcgta

SEQ ID NO: 471734 - DNA, 75 bp, synthetic construct
  source 1..75: mol_type = other DNA
acactgacctacagctacgatgcggcaggccgctgtacccgcaccaccttcccggacggcactcacctgaaccgc

SEQ ID NO: 471735 - DNA, 75 bp, synthetic construct
  source 1..75: mol_type = other DNA
aacgtcatctggaaatacgatattaacggcaggctggtacagaagctggtcgataaaggtggctaccgccctctc

SEQ ID NO: 471736 - DNA, 75 bp, synthetic construct
  source 1..75: mol_type = other DNA
ctataaccggttcaggtactatgatcctgatacggcgcagtatatttcggcagatcccattgggttacttggggg

SEQ ID NO: 471737 - DNA, 75 bp, synthetic construct
  source 1..75: mol_type = other DNA
ggcacgattgtctggcggggaaaacagcaactttggggccgggaagaaggcagaaacaaggatgatgcgcctgac

SEQ ID NO: 471738 - DNA, 75 bp, synthetic construct
  source 1..75: mol_type = other DNA
tttttggcctggttgacggcctgaactttgcagtacagtaccagggtaaaaatgaacgtaatgatttagatcatt

SEQ ID NO: 471739 - DNA, 75 bp, synthetic construct
  source 1..75: mol_type = other DNA
ctgagaatgagtttttgtcactactcaatgaacgtgatgctaaaaaaagcgccgattcacttaaggcttgggcga

SEQ ID NO: 471740 - DNA, 75 bp, synthetic construct
  source 1..75: mol_type = other DNA
accggctgcattttaccgacagtgaaggcgttgtactgtattaccgcctgccgcaggacggtatctttcgcggtg

SEQ ID NO: 471741 - DNA, 75 bp, synthetic construct
  source 1..75: mol_type = other DNA
gctttcgctgccgggttccctgccgctgacgctctcgcgtttttaccgctcacaggccagggggaccgggatttt

SEQ ID NO: 471742 - DNA, 75 bp, synthetic construct
  source 1..75: mol_type = other DNA
atgcataaccatcaacataattatgatttatgcctgcaagccataaatgagcgggtaaaatcggaatgcctctta

SEQ ID NO: 471743 - DNA, 75 bp, synthetic construct
  source 1..75: mol_type = other DNA
tcctggcagacagcgctgcaggcgacgacagcatggatgggctgcggatgagttcgatcacctaccgcatcgcca

SEQ ID NO: 471744 - DNA, 75 bp, synthetic construct
  source 1..75: mol_type = other DNA
atggctacttggcagggaacaaatggcggattgttggctggtatcggtggtatcaactcaaacgctccgagcgta

SEQ ID NO: 471745 - DNA, 75 bp, synthetic construct
  source 1..75: mol_type = other DNA
gtcggatggaattagaggacaagaaatacgacagactcatcgcaaatgaaactaatgccttaaaacttgctgaat

SEQ ID NO: 471746 - DNA, 75 bp, synthetic construct
  source 1..75: mol_type = other DNA
atcatgaatatggcgaaaatgaacaatcagcctacggctacatttgcgccctgaaaaacgtcgaaccggaaaact

SEQ ID NO: 471747 - DNA, 75 bp, synthetic construct
  source 1..75: mol_type = other DNA
aggtgatgtttctccgagtcaaacgtttacgattaatgtacaaggatgcccgactgcaaaaagtactgtttatag

SEQ ID NO: 471748 - DNA, 75 bp, synthetic construct
  source 1..75: mol_type = other DNA
atgatgctaatgaatttttaaatgtaggtgatgtttctccgagtcaaacgtttacgattaatgtacaaggatgcc

SEQ ID NO: 471749 - DNA, 75 bp, synthetic construct
  source 1..75: mol_type = other DNA
ctttaacgagcaggctgcggcaaaggcaggtactgcgttcagtgacggtgatgtttcctggaatgtgggtgtcaa

SEQ ID NO: 471750 - DNA, 75 bp, synthetic construct
  source 1..75: mol_type = other DNA
ctccagaagcaatgcaatcatggctgcaaaacaacgccaaggaactgagtcgcgtcggtgttgaccctaacaacg

SEQ ID NO: 471751 - DNA, 75 bp, synthetic construct
  source 1..75: mol_type = other DNA
agttccatatgaaagacaaccgctgggtgcctggctggatgtgtgcaccacgtccacagacggataccactgaac

SEQ ID NO: 471752 - DNA, 75 bp, synthetic construct
  source 1..75: mol_type = other DNA
atgtcggtagtcgaggctaagggcttttttaacctcgcatccgcgcctgcggtaacactgaatcagccattcggc

SEQ ID NO: 471753 - DNA, 75 bp, synthetic construct
  source 1..75: mol_type = other DNA
cacaacaactcctcagtatgtatcaaaaagacccacaagcaacatcacaacttatcggacaatatggtcagtttg

SEQ ID NO: 471754 - DNA, 75 bp, synthetic construct
  source 1..75: mol_type = other DNA
accctgcaggcgcatgagcgtcgtatgaacagtcagcagcgtcagattaatgagaatcatgaggaaatgaagcgg

SEQ ID NO: 471755 - DNA, 75 bp, synthetic construct
  source 1..75: mol_type = other DNA
gtcaggccggaggattccaggggccgaatggcagcgtaacgactgtagaaagcgcaaaatccctgcgtgacgaca

SEQ ID NO: 471756 - DNA, 75 bp, synthetic construct
  source 1..75: mol_type = other DNA
ggtgttaggcttcgatgtatgccttgatcaccacgcggatgattttgccgaacaactggcgaaagcgtgcccaaa

SEQ ID NO: 471757 - DNA, 75 bp, synthetic construct
  source 1..75: mol_type = other DNA
actaccacgaagatattactgatggtttagagggtaatgactccaacttattgatagtgttttatgttcagataa

SEQ ID NO: 471758 - DNA, 75 bp, synthetic construct
  source 1..75: mol_type = other DNA
ggaagatggttttctgcgttcatccggacttggctctgaccttttgccgccgctatcgttggtcctggataaacg

SEQ ID NO: 471759 - DNA, 75 bp, synthetic construct
  source 1..75: mol_type = other DNA
cgctggaggaactttttgccgctgcatacctgcgttactgtcgctatatcgatccgcaaacgggagaagtaagcg

SEQ ID NO: 471760 - DNA, 75 bp, synthetic construct
  source 1..75: mol_type = other DNA
aagcattaatggtcagagtatctatggtgttactaatgaaattggtcttctggtatggatgggcagtgccggata

SEQ ID NO: 471761 - DNA, 75 bp, synthetic construct
  source 1..75: mol_type = other DNA
gaaacgttggtggtagctgcggcgacaggtcctgtgggagcaacggtggggcaaatcggcaaacttaaaggttgc

SEQ ID NO: 471762 - DNA, 75 bp, synthetic construct
  source 1..75: mol_type = other DNA
ttgccctgactgcaggaatgcatatcactgttcatgcctcagacaatgtgaacactcctgaaaaccgccagttcc

SEQ ID NO: 471763 - DNA, 75 bp, synthetic construct
  source 1..75: mol_type = other DNA
aacaatgacctgaagactaccgctgaagccgtgttgtccctggtaaaagatggcgcgaccgatggtgttcagatc

SEQ ID NO: 471764 - DNA, 75 bp, synthetic construct
  source 1..75: mol_type = other DNA
atcggcctgctcgacgggtctttccggcatttttgtaagtcgtacgcccaccgctactgctatcgacaacaattt

SEQ ID NO: 471765 - DNA, 75 bp, synthetic construct
  source 1..75: mol_type = other DNA
gcaaatcggcaaacttaaaggttgcagggtggtgggggtagccggtggcgcggaaaaatgccgccatgctaccga

SEQ ID NO: 471766 - DNA, 75 bp, synthetic construct
  source 1..75: mol_type = other DNA
actatcgtgaacaaattaccgatggtttagagaacgccccgcagacattcatcggtctgctgaatggtaaaaact

SEQ ID NO: 471767 - DNA, 75 bp, synthetic construct
  source 1..75: mol_type = other DNA
ttatccgcccgacgctgttctgccacgctggaagaactttttgccgcagcatacctgcgttactgtcgctatatc

SEQ ID NO: 471768 - DNA, 75 bp, synthetic construct
  source 1..75: mol_type = other DNA
gccactggtaaaaatggcgcgattactcactactggctggaagtgggtgattacgttattgatatcacaggggat

SEQ ID NO: 471769 - DNA, 75 bp, synthetic construct
  source 1..75: mol_type = other DNA
ggtttttgcatcatgaagttcaggcaactaaaaagattatcttcagagatggtaataagagaaattgccacccaa

SEQ ID NO: 471770 - DNA, 75 bp, synthetic construct
  source 1..75: mol_type = other DNA
ggtttttgcatcatgaagttcaggcaactaaaaagattatcttcagggatggtaataaaagaaattgccacccaa

SEQ ID NO: 471771 - DNA, 75 bp, synthetic construct
  source 1..75: mol_type = other DNA
tagaaaaggcagcatttttgctctcatccttgcgcaattcgtcttcgtattgctggtatggggcgcaggaaaggc

SEQ ID NO: 471772 - DNA, 75 bp, synthetic construct
  source 1..75: mol_type = other DNA
gggcatgagcggggggcagcgactccttcatgtccagttacctctggcgctgccggtatttctacgcagtctgcg

SEQ ID NO: 471773 - DNA, 75 bp, synthetic construct
  source 1..75: mol_type = other DNA
gggcatgagcggggcgcagcgattcctgcatgttcagttaccactggcgttaccggtatttctgcgcagcctgcg

SEQ ID NO: 471774 - DNA, 75 bp, synthetic construct
  source 1..75: mol_type = other DNA
cgtggtatggggtgtaaagggagaacagcaatggcgagccgaagcgcagcgaaactcactgccattatggcgaat

SEQ ID NO: 471775 - DNA, 75 bp, synthetic construct
  source 1..75: mol_type = other DNA
ttgaagaggcagcggaatatttgatccagacgtcgcgcaagccgatgtttattacccgaaaaaagcgggatgggt

SEQ ID NO: 471776 - DNA, 75 bp, synthetic construct
  source 1..75: mol_type = other DNA
tcgctattgcgacacgtttcccgggtttacgtcgtgacatcccaatacggctttgaagccttgctggcaggaaaa

SEQ ID NO: 471777 - DNA, 75 bp, synthetic construct
  source 1..75: mol_type = other DNA
caagggctacagcgaataggtacggtaaccacgatggttcgaggttctccagatgacgcattagcagaaatcaga

SEQ ID NO: 471778 - DNA, 75 bp, synthetic construct
  source 1..75: mol_type = other DNA
gattacggagaatatcagtccgcagtcgctgttgcgacatatttccagagtttacgtcgtgacctcccaatacgg

SEQ ID NO: 471779 - DNA, 75 bp, synthetic construct
  source 1..75: mol_type = other DNA
atcctcaagcgacaatttgggtgaaggtgcacccagatgtactgaaaggaaagaaaacaggttatttcgccgatc

SEQ ID NO: 471780 - DNA, 75 bp, synthetic construct
  source 1..75: mol_type = other DNA
acctgcgggtcggccaggcgctggagaaagtggccgccacgggggactgccggcaggtggctcgggcgttgctga

SEQ ID NO: 471781 - DNA, 75 bp, synthetic construct
  source 1..75: mol_type = other DNA
tgaaattaccgttataaaaacagacaatatcattgtctttcaggtagttatatgtcccgttcagctaaaccccgt

SEQ ID NO: 471782 - DNA, 75 bp, synthetic construct
  source 1..75: mol_type = other DNA
atgcacattgcacacccggcactgcgtggtggtcgtgtggtgaaaaccgtttcacctgccagagattttaaatgt

SEQ ID NO: 471783 - DNA, 75 bp, synthetic construct
  source 1..75: mol_type = other DNA
ttgtgcgccatcggttgtctctgctggcgcagcaggtgccagttgttcaggctggcgtgtggattgtaaaccaga

SEQ ID NO: 471784 - DNA, 75 bp, synthetic construct
  source 1..75: mol_type = other DNA
atgccctgttcgatacagggcgttacagacgtaaaaaaattcgttaccgcgatgaggtaaccggaaaaatgatca

SEQ ID NO: 471785 - DNA, 75 bp, synthetic construct
  source 1..75: mol_type = other DNA
gctggagcgtgtgaagaagttgatatggctggcggcacaggatgtcagaggatgggttaccgggagtgaggtcta

SEQ ID NO: 471786 - DNA, 75 bp, synthetic construct
  source 1..75: mol_type = other DNA
caagaaaattgcaggtaagacactggaacgtttgaagaagttgatctggctggcggcacaggatgtgaagaacga

SEQ ID NO: 471787 - DNA, 75 bp, synthetic construct
  source 1..75: mol_type = other DNA
gggttccggtatcagcgccgtttcatggaatctaattttcagtaaaaaagagagtcgcgttgagctgtggattgc

SEQ ID NO: 471788 - DNA, 75 bp, synthetic construct
  source 1..75: mol_type = other DNA
ggttcgccgcctggaggaacaaaatacgatattaaaaaaggctactgcactcttgatgtccgactcgctgaacgg

SEQ ID NO: 471789 - DNA, 75 bp, synthetic construct
  source 1..75: mol_type = other DNA
gcaacgtattcgcgagctggaaaagcaggttcgccgactggaggaacaaaatacgatattaaaaaaggctaccgc

SEQ ID NO: 471790 - DNA, 75 bp, synthetic construct
  source 1..75: mol_type = other DNA
gcagaaagaggcggaagaacaatccacttccagcagtagtgaactgcagcaacgccattatctgcgccgcgagtt

SEQ ID NO: 471791 - DNA, 75 bp, synthetic construct
  source 1..75: mol_type = other DNA
cagaattcctcgaacatgaaagcctggatgaagtgcaaattaaccaaagccgttcccagcgcgtgatgatggttg

SEQ ID NO: 471792 - DNA, 75 bp, synthetic construct
  source 1..75: mol_type = other DNA
aggtgaaaccatacaaattcaatgacgatgtcttcgttgatatccggcaggtgatcccgacgccggaagcggaat

SEQ ID NO: 471793 - DNA, 75 bp, synthetic construct
  source 1..75: mol_type = other DNA
cgctgatttgagtggggcaacaaaaggtcagcttgaagcctggcaagagaatgccatgttcgatacagggcgtta

SEQ ID NO: 471794 - DNA, 75 bp, synthetic construct
  source 1..75: mol_type = other DNA
atcatccggggaaatctgcgcgtcaggcaggcgctggagaaagtggccgccacaggagactgccggcaggtggct

SEQ ID NO: 471795 - DNA, 75 bp, synthetic construct
  source 1..75: mol_type = other DNA
ggcaggctctggaaaaagtgtccagcgcgggagactgccggcaggtggctcatgatttactggcaggcaaaggag

SEQ ID NO: 471796 - DNA, 75 bp, synthetic construct
  source 1..75: mol_type = other DNA
atcatccggggaaatctgcgcgtcaggcaggcgctggagaaagtggccgccacgggtgactgccggcggggatgg

SEQ ID NO: 471797 - DNA, 75 bp, synthetic construct
  source 1..75: mol_type = other DNA
cagctgaaagcctgggcggagagacaggtgctggaacccccccttcagcgttcagataaccatttcctggatgag

SEQ ID NO: 471798 - DNA, 75 bp, synthetic construct
  source 1..75: mol_type = other DNA
atcatccggggaaatctgcgcgtcaggcaggcgctggagaaagtggccaccgcaggagactgccggcaggtggct

SEQ ID NO: 471799 - DNA, 75 bp, synthetic construct
  source 1..75: mol_type = other DNA
atcaggggaagtctgcccctgcagcaggctctcgaaaaagtggcagaaagtggtgattgtgcggcaacggcacgc

SEQ ID NO: 471800 - DNA, 75 bp, synthetic construct
  source 1..75: mol_type = other DNA
acaactgcgtgaaaaacctgaccatcagctgaaagcctgggcggagagacaggtgctggaaaacccccttcagcg

SEQ ID NO: 471801 - DNA, 75 bp, synthetic construct
  source 1..75: mol_type = other DNA
atgacgattaattactgtctgtttgcaggagaattatatgaacaaaaaaatatacattttattcgccctgacagc

SEQ ID NO: 471802 - DNA, 75 bp, synthetic construct
  source 1..75: mol_type = other DNA
tgcccttctggaactggaagaacatcagaaggcgtggttgttgtggtgttatggcggaaacatttgctgggagca

SEQ ID NO: 471803 - DNA, 75 bp, synthetic construct
  source 1..75: mol_type = other DNA
cacctacacaacgttgaaaaaaagtttccggtatgctgacggtaactatattgatgaatgtagtgatacaggatt

SEQ ID NO: 471804 - DNA, 75 bp, synthetic construct
  source 1..75: mol_type = other DNA
gacccgacgctgttttcacagtacggcatccgcagcgtgccggccctggtggtgttctgcagccaggggcacgac

SEQ ID NO: 471805 - DNA, 75 bp, synthetic construct
  source 1..75: mol_type = other DNA
taaatcatcaagttgtaaacgaactcaacggggaaagactgaaagaaccaaacgaagtttttaaacgttatggtc

SEQ ID NO: 471806 - DNA, 75 bp, synthetic construct
  source 1..75: mol_type = other DNA
gcgtcacgcaggcacaacaacgttacgatcgtgttcaggatatcgccggtaaactcagccagcgcggtgcgcttg

SEQ ID NO: 471807 - DNA, 75 bp, synthetic construct
  source 1..75: mol_type = other DNA
caagtgttgagattcctgatggacttctcaagcaatcaaatcgtaccgaaaaagatcaggagttgataactaaac

SEQ ID NO: 471808 - DNA, 75 bp, synthetic construct
  source 1..75: mol_type = other DNA
aaagcaataacgctcactgaaaaattggagcaagccaccatccttgaaaaccaaaaagaagaaattgcaaatgat

SEQ ID NO: 471809 - DNA, 75 bp, synthetic construct
  source 1..75: mol_type = other DNA
gttcttcgcaggctcaaaggtatcgagggtaatacgtcgggtatgcttcaggaagcccgcaagcgtatcggtcct

SEQ ID NO: 471810 - DNA, 75 bp, synthetic construct
  source 1..75: mol_type = other DNA
ttgtacaggctgttgcttctgtgggtgaacgcttcaggtcgtgggttcaggaaaacccgcagcttgtacgcacgc

SEQ ID NO: 471811 - DNA, 75 bp, synthetic construct
  source 1..75: mol_type = other DNA
ttgaggcttatgggctgattggccttaatgcggaaaaaatgtcgtcagcgattgccagcggaggcgcggctgctc

SEQ ID NO: 471812 - DNA, 75 bp, synthetic construct
  source 1..75: mol_type = other DNA
tattccggtggaatggggcggcgactggaagaccctgaaagacggaccgcattttcagttaccacacggagccta

SEQ ID NO: 471813 - DNA, 75 bp, synthetic construct
  source 1..75: mol_type = other DNA
aaatataggccaaaatcaatttaacataataaacgtaatatgcactaaggaacacatagaacgccttgagttgat

SEQ ID NO: 471814 - DNA, 75 bp, synthetic construct
  source 1..75: mol_type = other DNA
gtatcaggggggaaaaatgatggattttttacgtaggagcacgagagggcttctgttgacttttgtatgctatga

SEQ ID NO: 471815 - DNA, 75 bp, synthetic construct
  source 1..75: mol_type = other DNA
ctgccctgtattgaacaggccagggaggatatccgtaccctgcaccaactgcagcttctgcaccagaacgggtga

SEQ ID NO: 471816 - DNA, 75 bp, synthetic construct
  source 1..75: mol_type = other DNA
ttatctttgacaacgatgagtatagaacggattcggcagcactgttgccctgtatcgaacaggccagagaggatg

SEQ ID NO: 471817 - DNA, 75 bp, synthetic construct
  source 1..75: mol_type = other DNA
gaaaagaatttgcagggtataaatcctgatctggtgaaagtgacccgacgggcactggaaatctcggaagtggat

SEQ ID NO: 471818 - DNA, 75 bp, synthetic construct
  source 1..75: mol_type = other DNA
cgctgaaatgcgcgatgaactgccggaaattctgcatgagtattccacccacttccgcaacatgggcttcaccgg

SEQ ID NO: 471819 - DNA, 75 bp, synthetic construct
  source 1..75: mol_type = other DNA
tatgttcagccgcaagcacaggttacctggatgggagtcaaagccgataagcaccgcgaaagcaacggaaccctc

SEQ ID NO: 471820 - DNA, 75 bp, synthetic construct
  source 1..75: mol_type = other DNA
ctgttgccctgtatcgaacaggcccgggaggatgtccgtactcttcgtcatctgcagcttctgcaccagaaccgg

SEQ ID NO: 471821 - DNA, 75 bp, synthetic construct
  source 1..75: mol_type = other DNA
ctctggctctctttattgcttttatcgtggggttaatcaagccgacgctggttcgaatgccgaaccgtaagcgct

SEQ ID NO: 471822 - DNA, 75 bp, synthetic construct
  source 1..75: mol_type = other DNA
tatctttgacaacgatgaagataaaacggattcggcagcactgttgccctgtattgaacaggccagggaagatat

SEQ ID NO: 471823 - DNA, 75 bp, synthetic construct
  source 1..75: mol_type = other DNA
atgtctgccgggtttacccactttcgactggtaaccagaaacaacatgaaatcattaaccacggaaacagcgctg

SEQ ID NO: 471824 - DNA, 75 bp, synthetic construct
  source 1..75: mol_type = other DNA
cactggatagtctgattgcatggctgcaggacaatatcgactgtgaatcggaaattatctttgacaacgatgagg

SEQ ID NO: 471825 - DNA, 75 bp, synthetic construct
  source 1..75: mol_type = other DNA
cgttgccggtacgctgtttggcggactgacgggtgtgatttcagccgtgggggctgcgctgggggcgctgacctg

SEQ ID NO: 471826 - DNA, 75 bp, synthetic construct
  source 1..75: mol_type = other DNA
caaaaactccaggagagtgccgcaaaacaggccacacaaaaagcgccggttgcgtgggagtgggatcctgcacag

SEQ ID NO: 471827 - DNA, 75 bp, synthetic construct
  source 1..75: mol_type = other DNA
caggggggcagcaccgcacgtcaggcgatgcaggtgaccgcccgtgcactgctggccatccgtgacccggcagag

SEQ ID NO: 471828 - DNA, 75 bp, synthetic construct
  source 1..75: mol_type = other DNA
tcagtgatgtgttggggtggtgtttcaacgacttcgagaaggatccacaatctctgaataataaaatcaaccttg

SEQ ID NO: 471829 - DNA, 75 bp, synthetic construct
  source 1..75: mol_type = other DNA
ttatggaggagtggtgaaacagacgattgctgcgcgtgttgatataaaaactggtaaggtgatatcaatcataga

SEQ ID NO: 471830 - DNA, 75 bp, synthetic construct
  source 1..75: mol_type = other DNA
ggcgctactgggatcgggtcagggcgtttgtgagcggatttattgaaggggtacagtcagcactggcgcccttca

SEQ ID NO: 471831 - DNA, 75 bp, synthetic construct
  source 1..75: mol_type = other DNA
ttgaacgaattacaggacgttcttgatcgctgtccatcaccgaaaaaaattggtttttacaccattggcgataaa

SEQ ID NO: 471832 - DNA, 75 bp, synthetic construct
  source 1..75: mol_type = other DNA
atgaaattattaaccacagaaacggcgctggatattctgattgcgtggctgctggacaatattgactgcgaatca

SEQ ID NO: 471833 - DNA, 75 bp, synthetic construct
  source 1..75: mol_type = other DNA
tgatactgtcattgaatttgatctgccgctgctggaagagaaagccaagtcaaccctgactccggttgttatctc

SEQ ID NO: 471834 - DNA, 75 bp, synthetic construct
  source 1..75: mol_type = other DNA
taccggaactattgagatcattgctccgctctctggcgagatcgtcaatatcgaagacgtgccggatgtcgtttt

SEQ ID NO: 471835 - DNA, 75 bp, synthetic construct
  source 1..75: mol_type = other DNA
ctgccctgcattgaacaggccagggaagatatccgtacactgcgccagctgcagtttctgcaacagaaccggtga

SEQ ID NO: 471836 - DNA, 75 bp, synthetic construct
  source 1..75: mol_type = other DNA
gtgcaattagaatcttgcgaatggctgcaatacctgaatctcagccataatcaattaactgatattgttgcaggt

SEQ ID NO: 471837 - DNA, 75 bp, synthetic construct
  source 1..75: mol_type = other DNA
ataaaacggattcggcagcactgttgccctgtattgaacaggccagggaggatatccgtatcctgcgccaactgc

SEQ ID NO: 471838 - DNA, 75 bp, synthetic construct
  source 1..75: mol_type = other DNA
atgcaaaccggtatcaaaaaaatcgccgcgctatatacctttttccagaaacatactctgcttaatgtcttagtg

SEQ ID NO: 471839 - DNA, 75 bp, synthetic construct
  source 1..75: mol_type = other DNA
gatctgctaattgtcgtggggatgtttttaaccggcttcgatgctccaacattgaacacgctattcgtcgataaa

SEQ ID NO: 471840 - DNA, 75 bp, synthetic construct
  source 1..75: mol_type = other DNA
gccagtgtatttggtcgtgaattgcattcatatgttattaccgatgcgattcgagatgaaaaagtgcttaaattc

SEQ ID NO: 471841 - DNA, 75 bp, synthetic construct
  source 1..75: mol_type = other DNA
aagattcaggattatcgttctgcctataacgatattcgcgactggcagcgccgtgagaaagaagctgagaaaaaa

SEQ ID NO: 471842 - DNA, 75 bp, synthetic construct
  source 1..75: mol_type = other DNA
cgccaccgagcgcattctgtggaaaattaagagttcctttacagcgaagaactggtcaaaaccggaaagcggtgg

SEQ ID NO: 471843 - DNA, 75 bp, synthetic construct
  source 1..75: mol_type = other DNA
ttatggaaaatcaacagctcctataaagcgaaaaactggtctacccccgaaagcggtggctttatctggcacaca

SEQ ID NO: 471844 - DNA, 75 bp, synthetic construct
  source 1..75: mol_type = other DNA
gtgattgtagacttcctcaacggcgatccggaccagccgatcattatggggcgcacctaccaccaggaaaaccgc

SEQ ID NO: 471845 - DNA, 75 bp, synthetic construct
  source 1..75: mol_type = other DNA
gcagcactgctgccctgtatcgaacaggcgcgacaggatatccgtaccctgcgtcatctgcagcttcagcacccg

SEQ ID NO: 471846 - DNA, 75 bp, synthetic construct
  source 1..75: mol_type = other DNA
atgcctgccgggtttacccactttcgactggtaaccagcaacaacatgaaatcattaaccacggaaacggctctg

SEQ ID NO: 471847 - DNA, 75 bp, synthetic construct
  source 1..75: mol_type = other DNA
atgcctgccgggtttacccactttccactggtaaccaggaacaacatgaaatcattaaccacggaaacggctctg

SEQ ID NO: 471848 - DNA, 75 bp, synthetic construct
  source 1..75: mol_type = other DNA
tatcttcgacaacgatgaggataagacggattcggcagcactgttgccctgtatcgaacaggcgagggaggatat

SEQ ID NO: 471849 - DNA, 75 bp, synthetic construct
  source 1..75: mol_type = other DNA
cctgcgccgcatggatgaaatcatggaggctcttgataatcgttcgtcgatggattggtgtgttgctgttcatga

SEQ ID NO: 471850 - DNA, 75 bp, synthetic construct
  source 1..75: mol_type = other DNA
gaggctcttgataatcgttcgtcaatggattggtgtgttgctgttcatgatatgaatgccggatttgatgaaaag

SEQ ID NO: 471851 - DNA, 75 bp, synthetic construct
  source 1..75: mol_type = other DNA
atgcctgccgggtttacccactttcaactggtaaccagcaacaacatgaaatcattaaccacggaaacagctctg

SEQ ID NO: 471852 - DNA, 75 bp, synthetic construct
  source 1..75: mol_type = other DNA
gcaggacaatatcgactgcgaatcaggaattatcttcgacaacgatgaggataaaacagattcggcagcactgtt

SEQ ID NO: 471853 - DNA, 75 bp, synthetic construct
  source 1..75: mol_type = other DNA
agcctgccgggaacaaagacgcagatgaccattcgttcgaaaacctataagggcagcgggtttaatgaactgaag

SEQ ID NO: 471854 - DNA, 75 bp, synthetic construct
  source 1..75: mol_type = other DNA
atgcctgccgggtttacccactttccactggtaaccagcaacaacatgaaatcattaaccacggaaaccgctctg

SEQ ID NO: 471855 - DNA, 75 bp, synthetic construct
  source 1..75: mol_type = other DNA
atgcctgccgggtttacccactttccactggtaaccagaaacaacatgaaatcattaaccacggaaacagctctg

SEQ ID NO: 471856 - DNA, 75 bp, synthetic construct
  source 1..75: mol_type = other DNA
atgcctgccgggtttacccactttctactggtaaccagcaacaacatgaaatcattaaccacggaaactgctctg

SEQ ID NO: 471857 - DNA, 75 bp, synthetic construct
  source 1..75: mol_type = other DNA
atggtcttcgagttcaccgacacccaaggcgttatggggatgcactatgcgcgtcacgatggcgaagcggaagac

SEQ ID NO: 471858 - DNA, 75 bp, synthetic construct
  source 1..75: mol_type = other DNA
aagcaaaccgttatttaatcggcgcgtttatctcatcgatactggagcgcaacagcatcgggagcgggatgtcat

SEQ ID NO: 471859 - DNA, 75 bp, synthetic construct
  source 1..75: mol_type = other DNA
aatataaattcttgctatccattagctttggttgatgaagctatcgctatataccagaaagtagttgaggcaaga

SEQ ID NO: 471860 - DNA, 75 bp, synthetic construct
  source 1..75: mol_type = other DNA
gcgctggcgattgctgacaagatggatactctggcgggtatcttcggtatcggtcagcatccgaaaggcgacaaa

SEQ ID NO: 471861 - DNA, 75 bp, synthetic construct
  source 1..75: mol_type = other DNA
agggcgttatggggatgcactacgcgcgttacgatggcgaagcggaagatgttgcagtggcgctgaacgagcagt

SEQ ID NO: 471862 - DNA, 75 bp, synthetic construct
  source 1..75: mol_type = other DNA
cgaaagatccgcagcagattatctccggtaacgagaaagtcgttcgtccgcgtctggcggatgccgagttcttct

SEQ ID NO: 471863 - DNA, 75 bp, synthetic construct
  source 1..75: mol_type = other DNA
cgcagaataaatctgatgaaatagaagtgaaatatccttctgtacatgttgcaccacttcagaataacgatctac

SEQ ID NO: 471864 - DNA, 75 bp, synthetic construct
  source 1..75: mol_type = other DNA
gtggcttcaatggatcagggcggttctcccattacctggttactgattcaggttttctccccgcaaaatattccc

SEQ ID NO: 471865 - DNA, 75 bp, synthetic construct
  source 1..75: mol_type = other DNA
gcccggcagattcgccgtgttggcacccggaacaaaacaattggtgtacttgcgctggataccgtcaccactcct

SEQ ID NO: 471866 - DNA, 75 bp, synthetic construct
  source 1..75: mol_type = other DNA
tgctggacgagatctggctgaggtgaaacaatttcacatggcaacaggtgatgatcactacaccgatctcgcaag

SEQ ID NO: 471867 - DNA, 75 bp, synthetic construct
  source 1..75: mol_type = other DNA
cggtcgcgttttgcattatttgcttcctgtttgtggttgttttttgtggcgcacttgctgcggtggtcaacttta

SEQ ID NO: 471868 - DNA, 75 bp, synthetic construct
  source 1..75: mol_type = other DNA
gattctgacagatatctaataaaatcaatttattataatttatttagtggcgaagattctaataaaaaaccatag

SEQ ID NO: 471869 - DNA, 75 bp, synthetic construct
  source 1..75: mol_type = other DNA
gtatcgcgcctatgtgaagggcgaaagcaccgaagcactgctgccgaatatggttgcgacttctctggcgaaact

SEQ ID NO: 471870 - DNA, 75 bp, synthetic construct
  source 1..75: mol_type = other DNA
gatctggctattggtgctgccaaagcattctggaatcagttcccggatttggtgacgatgttgggccagggggcc

SEQ ID NO: 471871 - DNA, 75 bp, synthetic construct
  source 1..75: mol_type = other DNA
cggccagtgaagccgatcctgcgccagagccagaaacaaaagaagagcaaagtatctgggacatgatgttgatgt

SEQ ID NO: 471872 - DNA, 75 bp, synthetic construct
  source 1..75: mol_type = other DNA
ggcgcaagcgacgtgcacttcgtgcgtccggtgcacaccgtgaccctgctgctgggcgacaaagttattccggca

SEQ ID NO: 471873 - DNA, 75 bp, synthetic construct
  source 1..75: mol_type = other DNA
atttgaatataacgatgcaaaccagattgttgccgaaacgctgaacggcaggcgcacagaataccgttacgaccc

SEQ ID NO: 471874 - DNA, 75 bp, synthetic construct
  source 1..75: mol_type = other DNA
ttcactgcggatctgctgaaggtaaacaaagcagacgatgttgtcagtgacgcagaaaagctggcggatgatatg

SEQ ID NO: 471875 - DNA, 75 bp, synthetic construct
  source 1..75: mol_type = other DNA
atgacaaggcgtacaacctgacggtaatatcagactcgctgcggggatcagccttcaacaatatgacggtgaacg

SEQ ID NO: 471876 - DNA, 75 bp, synthetic construct
  source 1..75: mol_type = other DNA
gccgaacagattggcgctgacgttaaccacgcaacccgtgcgggcctactgtctaagtgtgacctgatgaccaac

SEQ ID NO: 471877 - DNA, 75 bp, synthetic construct
  source 1..75: mol_type = other DNA
aaggcaaaccgagcaaagcggcagaaggttgggcgcgtggttgcggtattaccgtggaccaggctgagcgtctga

SEQ ID NO: 471878 - DNA, 75 bp, synthetic construct
  source 1..75: mol_type = other DNA
caaacgctgaccgaagaagcggtgcgtctgtatggcgataagctgactaatgccaacgtagttgatgatgttatc

SEQ ID NO: 471879 - DNA, 75 bp, synthetic construct
  source 1..75: mol_type = other DNA
gctgggcgacaaagtcattccggcaaccattctgggcattaagtccgatcgcgtgattcgcggccaccgctttat

SEQ ID NO: 471880 - DNA, 75 bp, synthetic construct
  source 1..75: mol_type = other DNA
caaacgctgaccgaagaagcagtgcgtctgtatggcgataagctgactaatgccaacgtggttgatgatgttatc

SEQ ID NO: 471881 - DNA, 75 bp, synthetic construct
  source 1..75: mol_type = other DNA
accgtgctgttccagcaacaattaggtacgctgcgcgacaagactgaccgcattcaggcgctggctggctggatt

SEQ ID NO: 471882 - DNA, 75 bp, synthetic construct
  source 1..75: mol_type = other DNA
aactggccaatgtatcgctcatgacggtttcacgggtactgaatgacccaaaacgcgtaaagcctgagactatgg

SEQ ID NO: 471883 - DNA, 75 bp, synthetic construct
  source 1..75: mol_type = other DNA
gcgcaggtgtctggactgacgggatcggaaatacatccggggtggtgccggggaaaactatcacggaacggcagg

SEQ ID NO: 471884 - DNA, 75 bp, synthetic construct
  source 1..75: mol_type = other DNA
tcgctatgcagcatggattaagcccgagttcgaaatcgaggtgtatgaggtatttcggacggttgttcgtatggg

SEQ ID NO: 471885 - DNA, 75 bp, synthetic construct
  source 1..75: mol_type = other DNA
tgttggccacaacattttacaagcctcttctcctaacaccgcaaaacgttacgcggcaacaatcaggcttcgcct

SEQ ID NO: 471886 - DNA, 75 bp, synthetic construct
  source 1..75: mol_type = other DNA
gcaggatttcacctggcagcagggaacgctgctggatcaaatcgcctcccgacagggcgatacggcgcaatacct

SEQ ID NO: 471887 - DNA, 75 bp, synthetic construct
  source 1..75: mol_type = other DNA
agtttacccggcgcgccgaactggaaatatcactccatgccgttgatttagcacagatgttcagtgcggcctggg

SEQ ID NO: 471888 - DNA, 75 bp, synthetic construct
  source 1..75: mol_type = other DNA
aaacaaaagaaattagtcagtgtgcaagcaaaatggcccggtggggaactggtggacggaagcaacttttgtatt

SEQ ID NO: 471889 - DNA, 75 bp, synthetic construct
  source 1..75: mol_type = other DNA
tgccagcgctgaatgcctgccggatttacccactttcgactggtaacccggaaattcacaacatgaaatcattaa

SEQ ID NO: 471890 - DNA, 75 bp, synthetic construct
  source 1..75: mol_type = other DNA
ggaattatctttgacaacgatgaagataaaacggattcggcagcactgttgccctgtatcgaacaggccagggag

SEQ ID NO: 471891 - DNA, 75 bp, synthetic construct
  source 1..75: mol_type = other DNA
ctgccctgtattgaacaggccagggaagatatccgtaccctgcaccagttgcagtttctgcaacagaaccggtaa

SEQ ID NO: 471892 - DNA, 75 bp, synthetic construct
  source 1..75: mol_type = other DNA
cactggatattctgattgcgtggctgcaggacaatatcgactgcgaatcgggaattatctttgacaacaatgagg

SEQ ID NO: 471893 - DNA, 75 bp, synthetic construct
  source 1..75: mol_type = other DNA
cactggatattctgattacgtggctgcaggacaatattgactgcgaatccggaattatcttcgacaacgatgagg

SEQ ID NO: 471894 - DNA, 75 bp, synthetic construct
  source 1..75: mol_type = other DNA
ataaaatggattcggcagcactgctgccctgcattgaacaggccagggaagatatccataccctgcgccaactgc

SEQ ID NO: 471895 - DNA, 75 bp, synthetic construct
  source 1..75: mol_type = other DNA
atggacgtttacgaagatctataccttcagacgaatacccacactttttattttttgaaaaacggcgttgtatat

SEQ ID NO: 471896 - DNA, 75 bp, synthetic construct
  source 1..75: mol_type = other DNA
aaatggagcaggttgttactgagctggcagagaaaagtcaggctattcgcgacaaccggcagaaactgagcctta

SEQ ID NO: 471897 - DNA, 75 bp, synthetic construct
  source 1..75: mol_type = other DNA
tccttcacgtgatcttaatctggcggtatatcaacgcggtttttttgatgtatttccttctcgtcaggaaatgct

SEQ ID NO: 471898 - DNA, 75 bp, synthetic construct
  source 1..75: mol_type = other DNA
tctgatgtcctgcgtattgctctgttgggggcgttctccgatggcaaaaccagcgttatcgccgcatggctgggt

SEQ ID NO: 471899 - DNA, 75 bp, synthetic construct
  source 1..75: mol_type = other DNA
aatgggcaaccgataaatacagaagtaatccacctagcgtctcaacattgcgccgttacgctaagcaaaatctct

SEQ ID NO: 471900 - DNA, 75 bp, synthetic construct
  source 1..75: mol_type = other DNA
atgcttcaaatgctgacacttgaggaatgggctgcggaaaaatttaggagtaatcctccaagtgtgtccacatta

SEQ ID NO: 471901 - DNA, 75 bp, synthetic construct
  source 1..75: mol_type = other DNA
aagcgccgaagttgaatatccacaacgtcagcttttgggctttaccgaagacgaccggcaacttgtggaaagcgt

SEQ ID NO: 471902 - DNA, 75 bp, synthetic construct
  source 1..75: mol_type = other DNA
gtcatggagatggaggcatggaagacatggaagaacggctgtaacgatgtctgcaatccatgggagcgtggatgg

SEQ ID NO: 471903 - DNA, 75 bp, synthetic construct
  source 1..75: mol_type = other DNA
atgcatagtctgttaatactcctttacgttgttgtatggcgtgcctgcaccattcttcgggtaatcgcaccagtg

SEQ ID NO: 471904 - DNA, 75 bp, synthetic construct
  source 1..75: mol_type = other DNA
ttcaaacaaatacccgcactttttattttttgaaaaacggcgtcgtatatcgcagcgatgacggggtaataatga

SEQ ID NO: 471905 - DNA, 75 bp, synthetic construct
  source 1..75: mol_type = other DNA
agagcgccagaaaaaagactggtcgtgttaagcgaaaaatgtttgcgaaacttatcaccagtcgttttttgcata

SEQ ID NO: 471906 - DNA, 75 bp, synthetic construct
  source 1..75: mol_type = other DNA
agccggtgcggagcaagaaaggtcggattaaacgtgaaatgttcgccaaactgcgcaccagtcgctttatgaaag

SEQ ID NO: 471907 - DNA, 75 bp, synthetic construct
  source 1..75: mol_type = other DNA
cagccgggatgtgcagtacgaggcgcgcccgctgctgggtattaacgctgatgatgtttctgttattaatgatat

SEQ ID NO: 471908 - DNA, 75 bp, synthetic construct
  source 1..75: mol_type = other DNA
cgcgaacgtctggtgttgctcaatcgtcagttacgctcccgacgccagcgtctgatggcgatgcgtcgtgagagt

SEQ ID NO: 471909 - DNA, 75 bp, synthetic construct
  source 1..75: mol_type = other DNA
gtgaaaacgccagtgaaattaacgcccggctggcgcgcgccgcccgctatactccacaggattgccatacgctca

SEQ ID NO: 471910 - DNA, 75 bp, synthetic construct
  source 1..75: mol_type = other DNA
ccggctggcgcgcgccgcccgctatactccacaggattgccatacgctcaataatgacggcagcctgcgccagtc

SEQ ID NO: 471911 - DNA, 75 bp, synthetic construct
  source 1..75: mol_type = other DNA
ggacagtggtgcagggacccgcgttttattccccctctgctgacgctgtctgccagtccttcgctgatgactgaa

SEQ ID NO: 471912 - DNA, 75 bp, synthetic construct
  source 1..75: mol_type = other DNA
gaacgacagcgcggttgttctgctggcgctgccgcttgcccatggtaacggcggtaatctcggtcagggtgagca

SEQ ID NO: 471913 - DNA, 75 bp, synthetic construct
  source 1..75: mol_type = other DNA
cctttgctttctttgctgaatcatctgctggaggcaggcctgccttcccgagtggtcttcattgaactgaaacaa

SEQ ID NO: 471914 - DNA, 75 bp, synthetic construct
  source 1..75: mol_type = other DNA
cgtggtggtcaacggctcacgcgcccatctgccgcaggcgcgggcgcgctatcaatcggcgctgctgcccatttg

SEQ ID NO: 471915 - DNA, 75 bp, synthetic construct
  source 1..75: mol_type = other DNA
ctgattgaccaacatgggccaatctcgcgaattcagattgccgaacaaagccagcttgcccccgccagcgtaact

SEQ ID NO: 471916 - DNA, 75 bp, synthetic construct
  source 1..75: mol_type = other DNA
cgccgatacctggcgcatactgagcggtggccctgcgctgtattcgctggacgatatctcttaccgctgtttgcg

SEQ ID NO: 471917 - DNA, 75 bp, synthetic construct
  source 1..75: mol_type = other DNA
tattatggcgtcggcgtcgagattgacctctggctgcacgctggattcgacgtgctggtcaacggctcacgcgcc

SEQ ID NO: 471918 - DNA, 75 bp, synthetic construct
  source 1..75: mol_type = other DNA
atgatgggaaaactgatttggttaatggggccgtccggctccgggaaagacagcctgctggcggaactccgccag

SEQ ID NO: 471919 - DNA, 75 bp, synthetic construct
  source 1..75: mol_type = other DNA
ggcagcctgcgccagtcggtcgacaagctgctgacgctgattcatcagaaggagaaacaccatgcctgcttgtga

SEQ ID NO: 471920 - DNA, 75 bp, synthetic construct
  source 1..75: mol_type = other DNA
ggaactcttttaaataataatggcattagcattcttattgataagattaatgctgatccaggaacagaattttat

SEQ ID NO: 471921 - DNA, 75 bp, synthetic construct
  source 1..75: mol_type = other DNA
tgattcagatggccatgaaattatggccgttgatatttatgtaaaccctccacgtgtcgatgtctttcatggtac

SEQ ID NO: 471922 - DNA, 75 bp, synthetic construct
  source 1..75: mol_type = other DNA
tggattattgcaaaagccgggcacaccattgataacagcggctttaccacgcagcttgagcttgaggcaaaaatc

SEQ ID NO: 471923 - DNA, 75 bp, synthetic construct
  source 1..75: mol_type = other DNA
atcccggtgcagaatcgctgggatatgattcagatggccatgaaattatggccgttgatatttatgtaaaccctc

SEQ ID NO: 471924 - DNA, 75 bp, synthetic construct
  source 1..75: mol_type = other DNA
tcgtgaacgttatcctgatggcaatatcgcctgcacccgaaaagcaattccgggcacccgcttactggcctcgca

SEQ ID NO: 471925 - DNA, 75 bp, synthetic construct
  source 1..75: mol_type = other DNA
ccttcggcatccgtaagacggatttactctggccgggtcgcagacgagacagtgacaaatcggctgttcccgttt

SEQ ID NO: 471926 - DNA, 75 bp, synthetic construct
  source 1..75: mol_type = other DNA
agcatgcaaatgatgctcttaatgccctgttgaaggaaaaagagaatatccgtagccagcttgctgacataaatc

SEQ ID NO: 471927 - DNA, 75 bp, synthetic construct
  source 1..75: mol_type = other DNA
ttgcgagtatgttgatatcgtcgaacaactggcgatcgatcgcgcgaaagaactgttcggcgctgactacgctaa

SEQ ID NO: 471928 - DNA, 75 bp, synthetic construct
  source 1..75: mol_type = other DNA
aaatctgatagtcatgatttctcaggtgttaagaaagaaatcacctttattgaggaccggcagcaggttacattc

SEQ ID NO: 471929 - DNA, 75 bp, synthetic construct
  source 1..75: mol_type = other DNA
gagaaagcaaaggccgtctaacgctgatccacattctgctggggatggttccggcggtagtgctgggactgttat

SEQ ID NO: 471930 - DNA, 75 bp, synthetic construct
  source 1..75: mol_type = other DNA
actgagtttggtaaggctgtccggacagagaactggcgtcctctttttgttaaaacagaagcgattatagcaggc

SEQ ID NO: 471931 - DNA, 75 bp, synthetic construct
  source 1..75: mol_type = other DNA
aacgatccgaagagcccgtttgtgacctccggtattcgcgtgggtactccggcgattacccgtcgtggcttcaaa

SEQ ID NO: 471932 - DNA, 75 bp, synthetic construct
  source 1..75: mol_type = other DNA
gggtatgaacctggcgcatggcggtcacctgactcacggttctccggttaacttctccggtaaactgtataacat

SEQ ID NO: 471933 - DNA, 75 bp, synthetic construct
  source 1..75: mol_type = other DNA
gcaaggcgaaacggcggtaagcgagatccttctgcgcgattacagcgaattaaacgtggcgaaaggtcaggagat

SEQ ID NO: 471934 - DNA, 75 bp, synthetic construct
  source 1..75: mol_type = other DNA
tgcggtcgctgcctgcaaaaaccgccgccctggcaaagactggtcacggttgccgactatgcgccgccgttaagt

SEQ ID NO: 471935 - DNA, 75 bp, synthetic construct
  source 1..75: mol_type = other DNA
atgaagattattcaacattaataagtaaatttaagttgtttcattcatctgccaggcattattggaatttgggga

SEQ ID NO: 471936 - DNA, 75 bp, synthetic construct
  source 1..75: mol_type = other DNA
ccgtggctttcgaaaaagaaaaaatctgtaatgccagtattggacttagcgccattaatcctcgaaccactctgt

SEQ ID NO: 471937 - DNA, 75 bp, synthetic construct
  source 1..75: mol_type = other DNA
ctataattactggggacataaaggaagtcgtaatgaataccagatggggtacagcaacttctggaaacaactcgg

SEQ ID NO: 471938 - DNA, 75 bp, synthetic construct
  source 1..75: mol_type = other DNA
cagtgttccgttatggcagcgccgccactggcgtcggggattcaatcaaagcgatttgctgtgccagcctttatc

SEQ ID NO: 471939 - DNA, 75 bp, synthetic construct
  source 1..75: mol_type = other DNA
gcgatttgctgtgtcagccgttatcacgctggttgcactgccaatgggatagcgaagccgtcacacgaacacggg

SEQ ID NO: 471940 - DNA, 75 bp, synthetic construct
  source 1..75: mol_type = other DNA
ggcaggcagaaaatgcccaagtggtcgggtaatggggctggcaaataaaggctggatacgtggcgaaccacagga

SEQ ID NO: 471941 - DNA, 75 bp, synthetic construct
  source 1..75: mol_type = other DNA
tggagagccttaacctgcgtggagcgcgactggcatcagatgaacgaatgttgccggggtctttgcgtggatatg

SEQ ID NO: 471942 - DNA, 75 bp, synthetic construct
  source 1..75: mol_type = other DNA
acgaatgctattgatattagtcgctttagttatggtaatccgatccctgaggggaagtattatgctgacatctat

SEQ ID NO: 471943 - DNA, 75 bp, synthetic construct
  source 1..75: mol_type = other DNA
ctctgcctgtagcacaatattttgcggctatcgaattagcgccactgatcgcccgcgccttcaacaaactcaaaa

SEQ ID NO: 471944 - DNA, 75 bp, synthetic construct
  source 1..75: mol_type = other DNA
tttaaaaaggtgatcaccttcgattacagcacctgttcactggactggcagcaggcgataacacaagcagtgggc

SEQ ID NO: 471945 - DNA, 75 bp, synthetic construct
  source 1..75: mol_type = other DNA
tcatggaaatcgacgaaggttttgcggtggggatgtcgccagccgagctaagtgctgaacaactcctgagtaaaa

SEQ ID NO: 471946 - DNA, 75 bp, synthetic construct
  source 1..75: mol_type = other DNA
ggcggggaggataatcagttctcttatggtctttcaggaaacagccaggaaaacgggccttccggttatgcaatg

SEQ ID NO: 471947 - DNA, 75 bp, synthetic construct
  source 1..75: mol_type = other DNA
ggatacacgcagactttaagcgtgtgcgtaactacgcattccacaagcgttttttcaaactcctgcaactgggat

SEQ ID NO: 471948 - DNA, 75 bp, synthetic construct
  source 1..75: mol_type = other DNA
gaacaatatctgaataccgttgcgacacgcagaacccaggatatggcattgctcaaatcatttgacgctttccgc

SEQ ID NO: 471949 - DNA, 75 bp, synthetic construct
  source 1..75: mol_type = other DNA
tcgattactggactccgatcggtggggcgattacgcctcgcgaacgagaactggtatcaggcttcgttgagtacc

SEQ ID NO: 471950 - DNA, 75 bp, synthetic construct
  source 1..75: mol_type = other DNA
ctggtgttggcatcaccggcgtttaaggtcaaattgtatgtgccgtttgctcgccaggggctggaattgatgtat

SEQ ID NO: 471951 - DNA, 75 bp, synthetic construct
  source 1..75: mol_type = other DNA
tggattctgttccgtaaattctcctctcaggaggaagttgaaaatgtggccgcacaactactggagtttgcgtaa

SEQ ID NO: 471952 - DNA, 75 bp, synthetic construct
  source 1..75: mol_type = other DNA
tccatcgcgtttgcgaatatggacgaaaccgactttcagcaggtttataaagccgtactgaatgtgctgtggaac

SEQ ID NO: 471953 - DNA, 75 bp, synthetic construct
  source 1..75: mol_type = other DNA
ttagaacaaccattttcttttttcttcaaatgcaaacaagttgaagagaagatctttacctcattcaagaataat

SEQ ID NO: 471954 - DNA, 75 bp, synthetic construct
  source 1..75: mol_type = other DNA
gatcataatcgtaatccacttgttaagaattacttggtcgatatagtatggtttttaggtgttgttttatttttt

SEQ ID NO: 471955 - DNA, 75 bp, synthetic construct
  source 1..75: mol_type = other DNA
aaatcattcctcgtgctaatagcgccacgttagtgaaatttgacactaaaacaggaagaagtctgttatttgata

SEQ ID NO: 471956 - DNA, 75 bp, synthetic construct
  source 1..75: mol_type = other DNA
tcgattactggactccgatcggtggggcgatcacgcctcgagaacgagaactggtatcaggcttcgttgattacc

SEQ ID NO: 471957 - DNA, 75 bp, synthetic construct
  source 1..75: mol_type = other DNA
cacgcagaacccgggatacggcattgcttaagtcatttgacgctttccgcgaatgggtaaccattcaggctggat

SEQ ID NO: 471958 - DNA, 75 bp, synthetic construct
  source 1..75: mol_type = other DNA
cgcgctcgatgttctgtggcgctggatattgtcgcgcgcattcagggaccagcgcgaggctgagaacgccgccgc

SEQ ID NO: 471959 - DNA, 75 bp, synthetic construct
  source 1..75: mol_type = other DNA
ttggcgtgactgaacgactcagcacctggaatcaacgcactgaggttcatgactggaaaagacgtgccgagcgtc

SEQ ID NO: 471960 - DNA, 75 bp, synthetic construct
  source 1..75: mol_type = other DNA
caggaagtattggccttcatgtcgtcaataccgctatcaaaatgggccatcagcctgtagcgctgatccgaaata

SEQ ID NO: 471961 - DNA, 75 bp, synthetic construct
  source 1..75: mol_type = other DNA
tgccatagaaaagcaactggcgcacgcaaacagcggatcaatacgtggcatttacaaccatgctcagtatctcga

SEQ ID NO: 471962 - DNA, 75 bp, synthetic construct
  source 1..75: mol_type = other DNA
gcggctcagtagctggaatcaacgtactgaagttcatgactggaagagacgctctgaacgcctggtcagagccag

SEQ ID NO: 471963 - DNA, 75 bp, synthetic construct
  source 1..75: mol_type = other DNA
gattacaacaatgatgatgagcacagaatcgtcatgcttcagggggacagacgccatgcgggaacgccggaagat

SEQ ID NO: 471964 - DNA, 75 bp, synthetic construct
  source 1..75: mol_type = other DNA
ccggaagtattggtcttcatgtcgtgaataccactatcgaaataggccatcagcccgtggcgctggtcagaaata

SEQ ID NO: 471965 - DNA, 75 bp, synthetic construct
  source 1..75: mol_type = other DNA
tttccggcagccgcctgaaagacttacctaaacccaataaaagcgatgatgaatcacaggcgaacgatgcggtta

SEQ ID NO: 471966 - DNA, 75 bp, synthetic construct
  source 1..75: mol_type = other DNA
ctggagaaagcagtaaaagcatggaatgcccttaccctatctccacataccgataccgaatacgccatgttacat

SEQ ID NO: 471967 - DNA, 75 bp, synthetic construct
  source 1..75: mol_type = other DNA
gcccagcgtaactatcagtctaacgcccagaccattaaaacccaggaccagatcctcaacacgctggttaactta

SEQ ID NO: 471968 - DNA, 75 bp, synthetic construct
  source 1..75: mol_type = other DNA
atatcgtgggttgtggagttatcaggaatagatcattcaaaattaacggccattccagatatgattgatattgca

SEQ ID NO: 471969 - DNA, 75 bp, synthetic construct
  source 1..75: mol_type = other DNA
aagctcccgaagcggtagttgaggcatggctaaatgaagattattcaaccttaataagtgagtttaaggtgtttc

SEQ ID NO: 471970 - DNA, 75 bp, synthetic construct
  source 1..75: mol_type = other DNA
aaacttccagctctttctggttgagcatccgctggcccgccacttaacccgccgtctgatttggggcatttatag

SEQ ID NO: 471971 - DNA, 75 bp, synthetic construct
  source 1..75: mol_type = other DNA
cagcctgtagcactggtcagaaataagcgcaaagtgaaatcgcttcctcggggaacggatgttttttacggcgat

SEQ ID NO: 471972 - DNA, 75 bp, synthetic construct
  source 1..75: mol_type = other DNA
cttggcggctgcatgaacaggtcacggccaagtggttcaaattcgctgggttgaggctgctgcgcaacgaagatg

SEQ ID NO: 471973 - DNA, 75 bp, synthetic construct
  source 1..75: mol_type = other DNA
gaactggaaaaagatgtcgcaatgcttcgcagcgtacagcgcacggaagaccgcatcgaactgaaacgtgatgtc

SEQ ID NO: 471974 - DNA, 75 bp, synthetic construct
  source 1..75: mol_type = other DNA
cgcacgtttgaaaacatccgcgaaaagtggcgtttgcacgaagacattaacgcgaagtggttcaagttcgccggt

SEQ ID NO: 471975 - DNA, 75 bp, synthetic construct
  source 1..75: mol_type = other DNA
ccagatcaacgacggtttgcgtattgcccgtaaattgctgcttgatattaacgacagcggtctgccagcggcggg

SEQ ID NO: 471976 - DNA, 75 bp, synthetic construct
  source 1..75: mol_type = other DNA
gaagggctgaacaaagcaggcctgccagcacaggtgatgatcgatttcagccatgctaactcgtccaaacaattc

SEQ ID NO: 471977 - DNA, 75 bp, synthetic construct
  source 1..75: mol_type = other DNA
cgaaaatccgcacacaggaggcactcgaacgccgggaggcgctgacggcctccccggtcagcttccacctgttac

SEQ ID NO: 471978 - DNA, 75 bp, synthetic construct
  source 1..75: mol_type = other DNA
aagggtgttctgttggaagataagggagtttcaattctcgtagactccatcgatgccgaagctggaagccaattt

SEQ ID NO: 471979 - DNA, 75 bp, synthetic construct
  source 1..75: mol_type = other DNA
ggctcagcacttggaatcaacgcactgaggttcatgacaggaaaagacgtgccgagcgtctggtcagggccagcg

SEQ ID NO: 471980 - DNA, 75 bp, synthetic construct
  source 1..75: mol_type = other DNA
gattacaacaatgatgatgagcacagaatcgttatgcttcagggggatagacgccatgcgggaacaccggaagat

SEQ ID NO: 471981 - DNA, 75 bp, synthetic construct
  source 1..75: mol_type = other DNA
aatcctccggaaaatttacgtatagcaatagaaaaatttggctggaagaaaaaactatcactgcataaaataatg

SEQ ID NO: 471982 - DNA, 75 bp, synthetic construct
  source 1..75: mol_type = other DNA
tttacaaccatgcgcaatatctcgataagcgcagggagatgatgcagtggtgggcggactggattgatgagaagg

SEQ ID NO: 471983 - DNA, 75 bp, synthetic construct
  source 1..75: mol_type = other DNA
ggaagtaatccgcagatttgaagatcgcggtgcaatggagcgagccaacaaagcccgcagaagatgcggcgaggt

SEQ ID NO: 471984 - DNA, 75 bp, synthetic construct
  source 1..75: mol_type = other DNA
gcccagcgtaactatcagtccaatgctcagaccatcaaaacccaggatcagatccttaacacgctggttaactta

SEQ ID NO: 471985 - DNA, 75 bp, synthetic construct
  source 1..75: mol_type = other DNA
tcaagcgacagaaccgaggaaaaaagaataaatgaagaaagatatcagagcactttaaaagaatgggaagataag

SEQ ID NO: 471986 - DNA, 75 bp, synthetic construct
  source 1..75: mol_type = other DNA
agattcagctcatcacctcatctgaaggattatctgtaccaacaaatatcgtgactgattcaacagggcatgttt

SEQ ID NO: 471987 - DNA, 75 bp, synthetic construct
  source 1..75: mol_type = other DNA
tacatggtcgaacggttggttcgtataaattaacggcgaccttaaacgaacttggcagtgatgttagcgcggtga

SEQ ID NO: 471988 - DNA, 75 bp, synthetic construct
  source 1..75: mol_type = other DNA
tcctgggcgctggttggcagtagcgtgatggctatctggacaattcgccatccgaatatgctggttcgctgggcc

SEQ ID NO: 471989 - DNA, 75 bp, synthetic construct
  source 1..75: mol_type = other DNA
gtgagcggtaaagtcgaacgtgaacgccgcaaggcacaactacttagccagatccagcaacaacggctggatctt

SEQ ID NO: 471990 - DNA, 75 bp, synthetic construct
  source 1..75: mol_type = other DNA
tccgccagtcgtcgtgaatggctggaggcgacaggcgcttatgatcgtcgctggaatatgctgctgagtctgcgc

SEQ ID NO: 471991 - DNA, 75 bp, synthetic construct
  source 1..75: mol_type = other DNA
ggcgaagcattaagtggtcgagcactgaatattaagacctctggaccgtccaaatatggtgcgttggtggttgat

SEQ ID NO: 471992 - DNA, 75 bp, synthetic construct
  source 1..75: mol_type = other DNA
agttatgcgagaagtccagaaccggcgttatgattttgttgaacgaaataacaacattgttctggagtacaagaa

SEQ ID NO: 471993 - DNA, 75 bp, synthetic construct
  source 1..75: mol_type = other DNA
gtggcttgcaagatgttaactacactgggattaaccatcgatgatgctgtcagcgacggttcactagcgaacccg

SEQ ID NO: 471994 - DNA, 75 bp, synthetic construct
  source 1..75: mol_type = other DNA
tgacattgaaatgtcagtggaatttacagcagatagcaatagtgctcgacagcgtgaaacggtaactgctccgtc

SEQ ID NO: 471995 - DNA, 75 bp, synthetic construct
  source 1..75: mol_type = other DNA
ggatgctcatggacaggcaacaacgcagttcactgcatcgaaatcaggccagtacacaattcaggccgagtatgt

SEQ ID NO: 471996 - DNA, 75 bp, synthetic construct
  source 1..75: mol_type = other DNA
tattgagaaagaaatctcctttattgaagatcgaacacagttcgcattctctcgtattgaagccagtaaaaataa

SEQ ID NO: 471997 - DNA, 75 bp, synthetic construct
  source 1..75: mol_type = other DNA
cgagtttcaataatgatccgctgatcacacgggcgattgccgtcaatatcttgctcgatctctataaaacgtctg

SEQ ID NO: 471998 - DNA, 75 bp, synthetic construct
  source 1..75: mol_type = other DNA
tggcattcggtgtgaaaaacatcttcgaccaggactacttcatccgctcttatgacgacaacaacaaaggcatct

SEQ ID NO: 471999 - DNA, 75 bp, synthetic construct
  source 1..75: mol_type = other DNA
ctatgtgaatgaatcaacgcatgaaatgcgttactacaccgccaccagcagcgggcagttgccgtccggctcaag

SEQ ID NO: 472000 - DNA, 75 bp, synthetic construct
  source 1..75: mol_type = other DNA
gtttgcggataacgccaatacggtgaaagagagcgccgacggcagtaccggccgcattcccggcttcatgctctg

SEQ ID NO: 472001 - DNA, 75 bp, synthetic construct
  source 1..75: mol_type = other DNA
atgtttacacccaggacagcagtgatccaacaggcacagcgaaccacgcaacgacgctagcgtttaatgccaatg

SEQ ID NO: 472002 - DNA, 75 bp, synthetic construct
  source 1..75: mol_type = other DNA
aaacaccggtgctaacaacattgtggcaaccacccagaacggctacaaaccgggcgatctggtgagttaccaaat

SEQ ID NO: 472003 - DNA, 75 bp, synthetic construct
  source 1..75: mol_type = other DNA
aactttggcaccctgaccaacggtgcgctggaagcgtccaacgtcgatttaatgtcaccccgcaggacgctaaag

SEQ ID NO: 472004 - DNA, 75 bp, synthetic construct
  source 1..75: mol_type = other DNA
atattcaaacaaaaggatggcaaactgaagcacgtcttgtcagcaactggaccagtgcggcccgctcttatatag

SEQ ID NO: 472005 - DNA, 75 bp, synthetic construct
  source 1..75: mol_type = other DNA
aaattactgctggtgtttatttaggggcgtttccacgacatattccggcacagaatgaaccgccccgggtttcct

SEQ ID NO: 472006 - DNA, 75 bp, synthetic construct
  source 1..75: mol_type = other DNA
ctgttcgtttgtagcacgacattcgaacagcgccgacttgtccaccggcttattctggcaacggtaatggcctgc

SEQ ID NO: 472007 - DNA, 75 bp, synthetic construct
  source 1..75: mol_type = other DNA
cattctcaagcgttcttccccctccggtaacagtgcatgggtagctggttgcagccaaaacaccaaccagaatca

SEQ ID NO: 472008 - DNA, 75 bp, synthetic construct
  source 1..75: mol_type = other DNA
atttaaaaaccaaaggttggcaggctgaagctcgtcttgtcagcaactgggccagtgcagcccgctcttatatag

SEQ ID NO: 472009 - DNA, 75 bp, synthetic construct
  source 1..75: mol_type = other DNA
ggtgaatacttacaactggaaagaactgccgttgctggcgcatcatgttcgcctaacggccttgtaggccgcgat

SEQ ID NO: 472010 - DNA, 75 bp, synthetic construct
  source 1..75: mol_type = other DNA
agacttttttaaaatccccatatattaatgatgtaagaatactggattggtgttttaataaaagaatgcaatatt

SEQ ID NO: 472011 - DNA, 75 bp, synthetic construct
  source 1..75: mol_type = other DNA
gtgcgtcactgtacagtcttatcgggacgtgcaaattaaacggcgtggatccggaacgctatctgcatcatgtac

SEQ ID NO: 472012 - DNA, 75 bp, synthetic construct
  source 1..75: mol_type = other DNA
gctgggcgctcagctgacgattatcgggatcgtttttccgctggttgtgggccttatcagcgtgctttttcagaa

SEQ ID NO: 472013 - DNA, 75 bp, synthetic construct
  source 1..75: mol_type = other DNA
ggttaatttggagttggcaaaaaaatgcttttcactgcttaatgctgaatataaattttctcgcgtagatgcgaa

SEQ ID NO: 472014 - DNA, 75 bp, synthetic construct
  source 1..75: mol_type = other DNA
gcgactggagaagctggagaaggcgccattcaccccggtatcaccgtcatctgcgaaaggaacgggcacggtgaa

SEQ ID NO: 472015 - DNA, 75 bp, synthetic construct
  source 1..75: mol_type = other DNA
gctgggtgcttgagcgtgcaggacgtggcgaggccacgttccgggtgaatggtcgtcaggtccgggtcatggtgg

SEQ ID NO: 472016 - DNA, 75 bp, synthetic construct
  source 1..75: mol_type = other DNA
cagcaccgccagtaacggaccatccgcaagaaattcgccgcgaccagacgcaagggttacagcgaataggtacgg

SEQ ID NO: 472017 - DNA, 75 bp, synthetic construct
  source 1..75: mol_type = other DNA
ggcaaccggcttctacggatcactgctgccaagcccggacgtacatggttataagtccagcgaaatgctttacaa

SEQ ID NO: 472018 - DNA, 75 bp, synthetic construct
  source 1..75: mol_type = other DNA
ggctaccggtttctacggttcactgctgccaagcccggacgtacatggttataagtccagcgaaatgctctacaa

SEQ ID NO: 472019 - DNA, 75 bp, synthetic construct
  source 1..75: mol_type = other DNA
gtcatattgattttgattgcaatcaatctaaaatagctgagactttatttttcaatctcgataaagaaccctata

SEQ ID NO: 472020 - DNA, 75 bp, synthetic construct
  source 1..75: mol_type = other DNA
aagtttgttatgaataatcctgaaggggagcgagcggatttatctaaggtggaaatagaaattacactttccact

SEQ ID NO: 472021 - DNA, 75 bp, synthetic construct
  source 1..75: mol_type = other DNA
agcgcactgcaaggtacgccacagccagcaccgccagtaacggaccatccgcaagagattcgccgcgaccagacg

SEQ ID NO: 472022 - DNA, 75 bp, synthetic construct
  source 1..75: mol_type = other DNA
ttcgctggttaatgacgcttttcccatcgagcctggttcacggcattattatgatgagtcactgggatactggcc

SEQ ID NO: 472023 - DNA, 75 bp, synthetic construct
  source 1..75: mol_type = other DNA
agctgatggaagattatccgggttgcgaaatgcagatcgtcgagaaggttaacgagatttactcccccaaacttg

SEQ ID NO: 472024 - DNA, 75 bp, synthetic construct
  source 1..75: mol_type = other DNA
tcacgatgaccaacaagatagcgccaatgaccacctatcttaaccgtatcgtgaccgctgactgccgggatgcac

SEQ ID NO: 472025 - DNA, 75 bp, synthetic construct
  source 1..75: mol_type = other DNA
gattgctgattgttgtaagtctcgcctggacggggtgggctattaccctggtgttttatctactgaccgttattg

SEQ ID NO: 472026 - DNA, 75 bp, synthetic construct
  source 1..75: mol_type = other DNA
agtgccgtttaatggaaaacgaatttatcagcactcttgcgggattttctgaaatgctcactaaatcgggtgtta

SEQ ID NO: 472027 - DNA, 75 bp, synthetic construct
  source 1..75: mol_type = other DNA
atgcataatcatgaaacgcacttacctgtagtgctgaatgtgccatcagattatacgggtcgcgtactggtgtat

SEQ ID NO: 472028 - DNA, 75 bp, synthetic construct
  source 1..75: mol_type = other DNA
tgttggttctctggcttttttttctgaagcctgtattcgtgccggaataaaatcggaatcactgacaggaaaata

SEQ ID NO: 472029 - DNA, 75 bp, synthetic construct
  source 1..75: mol_type = other DNA
atgatcacaatcagtgggatagaggttaccggcggtcacttctatcttgggcagcgtatgaaacctgccgggcat

SEQ ID NO: 472030 - DNA, 75 bp, synthetic construct
  source 1..75: mol_type = other DNA
aaaaatctacgccagcctcggtctggacagcagtgccgttaccagcgatatccaccgactgtcaaccgcagaaac

SEQ ID NO: 472031 - DNA, 75 bp, synthetic construct
  source 1..75: mol_type = other DNA
ttattcgaagagatatcgcgcctgagaaccgtatttcaggcaagcggttccttccggcattatgcaacgcagttg

SEQ ID NO: 472032 - DNA, 75 bp, synthetic construct
  source 1..75: mol_type = other DNA
tgatgcgattgctgattatcgtaagtctcgcctggacggggtgggccattaccctggtcttttatctgctgaccg

SEQ ID NO: 472033 - DNA, 75 bp, synthetic construct
  source 1..75: mol_type = other DNA
atccacgatgttcacgtccgtacccgtcagccctgacggaggaggcgctgaaacggatcggcgagctgtatgcca

SEQ ID NO: 472034 - DNA, 75 bp, synthetic construct
  source 1..75: mol_type = other DNA
ctgagttggcttgccagcgacagatgcgacacttcctgcccaattggttacgttttcatttatctgtatggtctg

SEQ ID NO: 472035 - DNA, 75 bp, synthetic construct
  source 1..75: mol_type = other DNA
ggctaccggtttctacggttcactcctgccaagtccggacgtacatggctataaatccagcgaaatgctctacaa

SEQ ID NO: 472036 - DNA, 75 bp, synthetic construct
  source 1..75: mol_type = other DNA
tgaatacaccacatgtcacaatcgaacgttatagcgaactgactggccttgctattgatacgattaacgacatgt

SEQ ID NO: 472037 - DNA, 75 bp, synthetic construct
  source 1..75: mol_type = other DNA
cagacggcgcgttcacggcagacgtggaagatgctcaggacaacgagtccgttacagaggatgaaacggttttat

SEQ ID NO: 472038 - DNA, 75 bp, synthetic construct
  source 1..75: mol_type = other DNA
aaatctcggcgctgaccactctgagccaccagcaggaggcggaaattcgccagcttgagcgcgagcttcgcatcg

SEQ ID NO: 472039 - DNA, 75 bp, synthetic construct
  source 1..75: mol_type = other DNA
ggtgacggtaaaccgctatgaacgcgataaaaaagctcgcgagaaagcagtcgaacatcacggatgccagtgcaa

SEQ ID NO: 472040 - DNA, 75 bp, synthetic construct
  source 1..75: mol_type = other DNA
cctgcttattcggccttacctaacctctaagcatttaagagtaattgagtggagcggtgcaggtgaacaaaatga

SEQ ID NO: 472041 - DNA, 75 bp, synthetic construct
  source 1..75: mol_type = other DNA
tgaatacaccacatgtcacaatcgaacgttatagcgaactgacaggcctttctattgatacgattaacgacatgt

SEQ ID NO: 472042 - DNA, 75 bp, synthetic construct
  source 1..75: mol_type = other DNA
tccatcgataccatcaatgatatgttggctgatggacgccttatccgtcaccgtctgcgcaaagataaaaaacgc

SEQ ID NO: 472043 - DNA, 75 bp, synthetic construct
  source 1..75: mol_type = other DNA
acgttatagcgaactgactggcctttctattgatacgattaacgacatgttggctgatggccgactacctcgtca

SEQ ID NO: 472044 - DNA, 75 bp, synthetic construct
  source 1..75: mol_type = other DNA
ctacagaagttaaataatttacagaagttaaataatctacagaagttaaataatccgcaggagttaaataatccg

SEQ ID NO: 472045 - DNA, 75 bp, synthetic construct
  source 1..75: mol_type = other DNA
acacggcgattgcccggattcggttgtcggcagtggacggcgcatttacggcagacgtggaagatgctcagaacg

SEQ ID NO: 472046 - DNA, 75 bp, synthetic construct
  source 1..75: mol_type = other DNA
tgatcgacattctctgccgccgccgtaaaaacaacccggtggtggtgggcgaagcaggcgtgggtaaaagcgcgc

SEQ ID NO: 472047 - DNA, 75 bp, synthetic construct
  source 1..75: mol_type = other DNA
cgttatctctccgggcgtcagttaccggacaaagcgattgatgtgctggataccgcctgcgcccgtgtggccatc

SEQ ID NO: 472048 - DNA, 75 bp, synthetic construct
  source 1..75: mol_type = other DNA
gatgttgcaccgacgcaaaccaccgtttacgccggaggagttaaaagcgttgatggatgcgaataaatcaaatta

SEQ ID NO: 472049 - DNA, 75 bp, synthetic construct
  source 1..75: mol_type = other DNA
agtaggagagaaggcacttcgtgacattattcgggaagcagaatcgaaaaaaccatcccgccgttcttcctctaa

SEQ ID NO: 472050 - DNA, 75 bp, synthetic construct
  source 1..75: mol_type = other DNA
ggttatacactggcagatgttcgtgacacgctcaaaaatgcagggtatgaagtaggagagaaggcacttcgtgac

SEQ ID NO: 472051 - DNA, 75 bp, synthetic construct
  source 1..75: mol_type = other DNA
agaataaagagtttaaggcattacctttttccccatcaaatcttaaattaattaaagataaaaaggggaaaagtt

SEQ ID NO: 472052 - DNA, 75 bp, synthetic construct
  source 1..75: mol_type = other DNA
atgcacaaatttactaaagctcttgcggccatcggtctggctgctgttatgtcacaatccgctatggcagaaaac

SEQ ID NO: 472053 - DNA, 75 bp, synthetic construct
  source 1..75: mol_type = other DNA
ggttccagaccgaatggaagtttgccgataaagccgggaaggatttagggtttgaggttattaagattgccgtgc

SEQ ID NO: 472054 - DNA, 75 bp, synthetic construct
  source 1..75: mol_type = other DNA
gtcacaatccgctatggcggaaaacctgaaactcggtttcctggtaaagcaaccagaagagccgtggttccagac

SEQ ID NO: 472055 - DNA, 75 bp, synthetic construct
  source 1..75: mol_type = other DNA
ctgtataacctgctctacaccagcacaaccaaagtcccacagaccgatgcgggtgttacgcgcctcctttccaat

SEQ ID NO: 472056 - DNA, 75 bp, synthetic construct
  source 1..75: mol_type = other DNA
aatgaatgctcacctttcgcgccaaaactgcaaaattgcttctacaaacctgtcagaaataatcccccgacgggc

SEQ ID NO: 472057 - DNA, 75 bp, synthetic construct
  source 1..75: mol_type = other DNA
cagggatttcatattcatcaggataaagccgctgcggctcccatagccgatgttctgttcccggatgagttgccg

SEQ ID NO: 472058 - DNA, 75 bp, synthetic construct
  source 1..75: mol_type = other DNA
tcagaacgtgaagcccgtaaggctccggtgattcaggctgcaataaaacttgcaggcgcggttcattacgctgac

SEQ ID NO: 472059 - DNA, 75 bp, synthetic construct
  source 1..75: mol_type = other DNA
ccaaaggttattacgtatacgcccagccgctggatgaacaggcacaatcagaacgtgaagcccgtaaggctccgg

SEQ ID NO: 472060 - DNA, 75 bp, synthetic construct
  source 1..75: mol_type = other DNA
taaaaaaaacaaaaaaaacaaagtacaaaaacctttacttataccattattaaacccaaaggcgtatttattctt

SEQ ID NO: 472061 - DNA, 75 bp, synthetic construct
  source 1..75: mol_type = other DNA
atgaatttaggtcaggatattcataatctatcaggaaaattaacaacatacgatttcagtgcatgttctgctaac

SEQ ID NO: 472062 - DNA, 75 bp, synthetic construct
  source 1..75: mol_type = other DNA
ctgcgcgtattgagagcctggtaacgcccgccgaactcgcgctacggtatcccgtaacgtctggcgtcgccaccc

SEQ ID NO: 472063 - DNA, 75 bp, synthetic construct
  source 1..75: mol_type = other DNA
gttgcgggcgtacctgaaactcttgggcgaccgggcgcggccatatcactcgaagacgatgcacctgagcaacga

SEQ ID NO: 472064 - DNA, 75 bp, synthetic construct
  source 1..75: mol_type = other DNA
gcccccgtccaggttatcgcatgctctgaaaaagcccctttgccgcaagacaaaccaccatttgctgaagaccac

SEQ ID NO: 472065 - DNA, 75 bp, synthetic construct
  source 1..75: mol_type = other DNA
taaagggcaccccgcaggatgcaggttggatcggctggatgatcaaacctctgggccgctggtcgttaatcatgg

SEQ ID NO: 472066 - DNA, 75 bp, synthetic construct
  source 1..75: mol_type = other DNA
attaccggcctgctaccttcggcgctcggcaaagccggtgaagcacaggataacgcccgcgctgccttgcgtatg

SEQ ID NO: 472067 - DNA, 75 bp, synthetic construct
  source 1..75: mol_type = other DNA
ctgatgctgtgtgcctcctgggtcgcccagacggatctttcggagttctttaagaaatggaatccgggcgcgaat

SEQ ID NO: 472068 - DNA, 75 bp, synthetic construct
  source 1..75: mol_type = other DNA
aacacgctggcgtcgctcaagctgccgaaaccggaacagggaccggaaaccattaatcaggttaccgagcataag

SEQ ID NO: 472069 - DNA, 75 bp, synthetic construct
  source 1..75: mol_type = other DNA
ttcaccgtgaaagccctgtccgcgatgtagctattaagcgatattgcaatcgcaattgcacgcaagatatagcca

SEQ ID NO: 472070 - DNA, 75 bp, synthetic construct
  source 1..75: mol_type = other DNA
cgaaaaggtgatgagtttaagttgatgaaagagctgggctgtcgtggcgagttcctgaccttccgggccagcgct

SEQ ID NO: 472071 - DNA, 75 bp, synthetic construct
  source 1..75: mol_type = other DNA
tggagagaatcaggttttgaaaatgaacattcaggaataacacaccatgtattccccgaggaaatattacccata

SEQ ID NO: 472072 - DNA, 75 bp, synthetic construct
  source 1..75: mol_type = other DNA
atgacaactttaaccgacaaagaaatgattaaagaaatcaaagagcgcataggcagcctggacgtgcgagacaat

SEQ ID NO: 472073 - DNA, 75 bp, synthetic construct
  source 1..75: mol_type = other DNA
accaaccacactaagtcatcgacgctggcctggcgattctgtgccacaggagaatgaattaactctgctacgctc

SEQ ID NO: 472074 - DNA, 75 bp, synthetic construct
  source 1..75: mol_type = other DNA
attcccaccgaaaacggcatcgcccttatccgcaacctgccgcccaccatcacccgcccggacctcacggcgctc

SEQ ID NO: 472075 - DNA, 75 bp, synthetic construct
  source 1..75: mol_type = other DNA
gccggggataacacggcctggctgaaacgtctggtaccgggacaacagctgcagtgtgtctccgccacggcagtc

SEQ ID NO: 472076 - DNA, 75 bp, synthetic construct
  source 1..75: mol_type = other DNA
ccactgacactgctggatctgcagcgcctcatggcccgtcagcacggcatcgatggccagaccacgctggccatc

SEQ ID NO: 472077 - DNA, 75 bp, synthetic construct
  source 1..75: mol_type = other DNA
tgtccataaattacctgtgctgattgaaactcaactgtatgaccccggaaagattattgttgatgtttttgttcc

SEQ ID NO: 472078 - DNA, 75 bp, synthetic construct
  source 1..75: mol_type = other DNA
gcgaggcgatgggcttttctgaaaaacgcggtgactcgctcaatgtcgttaactcgccgttcaatagcagtgacg

SEQ ID NO: 472079 - DNA, 75 bp, synthetic construct
  source 1..75: mol_type = other DNA
atcaggggttttaaagggaaaaatgacaaaacttttgatgcgtatctggtgttccgggatatcaggaaaggcgat

SEQ ID NO: 472080 - DNA, 75 bp, synthetic construct
  source 1..75: mol_type = other DNA
cactaccaccgatggttctggcggtactggttgcgctggaacaaggcttcaatcgcaacgatcacgaagagttaa

SEQ ID NO: 472081 - DNA, 75 bp, synthetic construct
  source 1..75: mol_type = other DNA
cgtcgccgcgcatactcaccggcgttttaaaaaggtgatcaccttcgattacagcacctgttcactggactggca

SEQ ID NO: 472082 - DNA, 75 bp, synthetic construct
  source 1..75: mol_type = other DNA
ttttgcggtcggcatgtcgccagccgaactcagtgccgagcaactcttaagcaagctgtggctatgggaaggcaa

SEQ ID NO: 472083 - DNA, 75 bp, synthetic construct
  source 1..75: mol_type = other DNA
gctggtcgttaaccgctggctggccgtcaaaaaccatcaggaagcctggtatttcaccgtggatgccgcattctc

SEQ ID NO: 472084 - DNA, 75 bp, synthetic construct
  source 1..75: mol_type = other DNA
ccaaaccaaacaaaagcgatgatgaatcacaggcgaacaatgctgttaaccgctacaaattgctgaaaaaagatg

SEQ ID NO: 472085 - DNA, 75 bp, synthetic construct
  source 1..75: mol_type = other DNA
aacttctggcacaaaaagatgaaaagcgctggcgcatgatgctaatgacaatgcttatctcacagccaacattag

SEQ ID NO: 472086 - DNA, 75 bp, synthetic construct
  source 1..75: mol_type = other DNA
cggagatgagctatacaagaaagctcgcgaactggtcattcctcaatcatcgtttagccacatcatcactctcgc

SEQ ID NO: 472087 - DNA, 75 bp, synthetic construct
  source 1..75: mol_type = other DNA
cgcggattcagattgccgagcaaagtcagcttgcccccgccagcgtcaccaaaattacgcgtcagcttatcgaac

SEQ ID NO: 472088 - DNA, 75 bp, synthetic construct
  source 1..75: mol_type = other DNA
atccgcaaaaaattgttattgctggagaaatcaccgaagccgataaagtgctgctccctgctattgaaagctgca

SEQ ID NO: 472089 - DNA, 75 bp, synthetic construct
  source 1..75: mol_type = other DNA
aatataacaaactgatcgcgccattaccggcacagcatcaggcgtttaatcaggcctggaccgcagcagtaactg

SEQ ID NO: 472090 - DNA, 75 bp, synthetic construct
  source 1..75: mol_type = other DNA
atggcgtttgtgtgcatccggaaagtgaaatcgttcacgtatggcgcggcggggtatggtgtccggtcagcacaa

SEQ ID NO: 472091 - DNA, 75 bp, synthetic construct
  source 1..75: mol_type = other DNA
ggaattattgttggagcagcgcgacggtgccgaagctctgaaaataaaacaggaaactgatcctgtcattgggtt

SEQ ID NO: 472092 - DNA, 75 bp, synthetic construct
  source 1..75: mol_type = other DNA
agatgttcattgaggccaccggagacggcgggagcggaaagagtacattcacgcacatagccagccttctggcag

SEQ ID NO: 472093 - DNA, 75 bp, synthetic construct
  source 1..75: mol_type = other DNA
accctggtcttttatctgctgaccgttattgccttctggatcacacgtaaccagatggcgcaacaggtagcagca

SEQ ID NO: 472094 - DNA, 75 bp, synthetic construct
  source 1..75: mol_type = other DNA
gcactggctgcgttaattaagaatggcccgctctggcaggagttaagggcatctttgctgaagacaattacccga

SEQ ID NO: 472095 - DNA, 75 bp, synthetic construct
  source 1..75: mol_type = other DNA
actctggtcttttatctgctaactgttattgccttctggatcacccgtaagcagatgacgcaacaggtagccgca

SEQ ID NO: 472096 - DNA, 75 bp, synthetic construct
  source 1..75: mol_type = other DNA
acctgacgccagaacaggaaaaagcgtggaatcgtcttgtgaaggctgtaaaggatttcagggcagccggaggaa

SEQ ID NO: 472097 - DNA, 75 bp, synthetic construct
  source 1..75: mol_type = other DNA
tctcgcctggacggggtgggccattaccctggtcttttatctactgaccgttattgccttctggatcacacgtaa

SEQ ID NO: 472098 - DNA, 75 bp, synthetic construct
  source 1..75: mol_type = other DNA
caggggatttttccggtactggcagcgtccggcgtctgggtagcctgtctgctgacatgggcggtaattccggta

SEQ ID NO: 472099 - DNA, 75 bp, synthetic construct
  source 1..75: mol_type = other DNA
cgatgatattcaccgaacgggccggaggtgtggcacgtcgtcgcgtgattttccgtttcgacaatattgttagtg

SEQ ID NO: 472100 - DNA, 75 bp, synthetic construct
  source 1..75: mol_type = other DNA
ggggtatggtgcccggtaagcacaatggtacttaatcgcgaaatggtggcgatttattccgaacacaaagccaca

SEQ ID NO: 472101 - DNA, 75 bp, synthetic construct
  source 1..75: mol_type = other DNA
atatctggccagtgagcgccagaatctttctgatgggctggttattgagcttcctgtaaagcaaaaggcgcaact

SEQ ID NO: 472102 - DNA, 75 bp, synthetic construct
  source 1..75: mol_type = other DNA
gctttgatagcgtttgtgtgcatccggaaagtgaaatcatccacgtctggcgcggcggggtatggtgtccggtca

SEQ ID NO: 472103 - DNA, 75 bp, synthetic construct
  source 1..75: mol_type = other DNA
gcgcgaatatctggcccgtgagcgccagaatctttctgatgggctggtcattgagcttccggtagaaaaaaaagt

SEQ ID NO: 472104 - DNA, 75 bp, synthetic construct
  source 1..75: mol_type = other DNA
ggcagatgtttattgaggccaccggagacggcgggagcggtaaaagtacattcacacacatagccagccttctgg

SEQ ID NO: 472105 - DNA, 75 bp, synthetic construct
  source 1..75: mol_type = other DNA
ggcacgggctttactactggaacagcgtgacggtgatgaagcactggcaataaagcaacagacggatccggttat

SEQ ID NO: 472106 - DNA, 75 bp, synthetic construct
  source 1..75: mol_type = other DNA
gcgggaactgtggttcgattggcatgggaaatggtacgtggtttaccatccttgatattccgggggtggaaaacc

SEQ ID NO: 472107 - DNA, 75 bp, synthetic construct
  source 1..75: mol_type = other DNA
aagccgcgcaagatgcgaaaagtcttgagtttttaagtaagcagttacctcaggtacgcagtgatttggatgagg

SEQ ID NO: 472108 - DNA, 75 bp, synthetic construct
  source 1..75: mol_type = other DNA
gcgggaactgtgcggcgattggtatggggaatggtacctggtttaccctcctcgatattcccggagtggaaaaac

SEQ ID NO: 472109 - DNA, 75 bp, synthetic construct
  source 1..75: mol_type = other DNA
gcagcgaaactttacggacatgaatatatcacgcgaaaagttaagggcgtaacgcagaccaacgtaatcacaacg

SEQ ID NO: 472110 - DNA, 75 bp, synthetic construct
  source 1..75: mol_type = other DNA
aacagcctcgcggaataaaacacgaacaaaccgaagtgatcatttttgcgggtagtgatgcctggtcacacgcga

SEQ ID NO: 472111 - DNA, 75 bp, synthetic construct
  source 1..75: mol_type = other DNA
tttcaaaacgtatcacctacaccgtgcaggcgaccgacgatcagaaaaacgtttttgtaaaaacctctactgata

SEQ ID NO: 472112 - DNA, 75 bp, synthetic construct
  source 1..75: mol_type = other DNA
cgcggcagataaactgtttatcaacaccgctggcatgggcgcaattccggcgaatattcactggggcgcacagac

SEQ ID NO: 472113 - DNA, 75 bp, synthetic construct
  source 1..75: mol_type = other DNA
gcagtgctgacgcctctgattcagacactgcgtgacattcccggcgtgaaggcgctgcgcgatgccacccgcggt

SEQ ID NO: 472114 - DNA, 75 bp, synthetic construct
  source 1..75: mol_type = other DNA
gcgatttgcggcaccgcgaatgacgttgcggtcagtggcgctattccgcgctatctctcctgtggctttatcctc

SEQ ID NO: 472115 - DNA, 75 bp, synthetic construct
  source 1..75: mol_type = other DNA
atgctgattggggaaagtgtgaaagaaaagaagactgctgcgctgtttgtcgtcacctttatcttcattggctat

SEQ ID NO: 472116 - DNA, 75 bp, synthetic construct
  source 1..75: mol_type = other DNA
atgctgggttgggaaagtgtgaaagaaaggaagattgctgcgccgtttgtcgtcacgtttatcttcattggctat

SEQ ID NO: 472117 - DNA, 75 bp, synthetic construct
  source 1..75: mol_type = other DNA
ttgatccccaagggaattgttgtatcaagctcatactttctaggtatgcttgaaacggttttgccgaaattttct

SEQ ID NO: 472118 - DNA, 75 bp, synthetic construct
  source 1..75: mol_type = other DNA
gggatggattttaacgttggaaagatggcggggatcgtccatgtgctgcgtttggggcttccatgtgcggtaact

SEQ ID NO: 472119 - DNA, 75 bp, synthetic construct
  source 1..75: mol_type = other DNA
tcatgcacattatctcgatggtcgccgtaaaatgatgcagtggtacgctgattacattgattctcttatgggaaa

SEQ ID NO: 472120 - DNA, 75 bp, synthetic construct
  source 1..75: mol_type = other DNA
taatcgatactgtaaaatatgatgtgaaaagtgacgcggaatctacagatgttaacagcgttgttttacatgatt

SEQ ID NO: 472121 - DNA, 75 bp, synthetic construct
  source 1..75: mol_type = other DNA
gaagaaggattgccgatggagacgctaaaagccgtggttaccagcatggcagaaaccgcccgcgcggcaggcatt

SEQ ID NO: 472122 - DNA, 75 bp, synthetic construct
  source 1..75: mol_type = other DNA
gcgctgattggtgaagtggtagaacgtaaaggtgttcgtcttgccggtctgtatggcgtgaaacgaaccctcgat

SEQ ID NO: 472123 - DNA, 75 bp, synthetic construct
  source 1..75: mol_type = other DNA
ggggcgcacagacgctaaccgcaggcgatgtattgctggttagcggtacactcggcgaccacggggcgactatcc

SEQ ID NO: 472124 - DNA, 75 bp, synthetic construct
  source 1..75: mol_type = other DNA
ttgtggtgctggagctggatctggagtactaccaggggccggaggatttcttcccgtctgagatcgtgccactgc

SEQ ID NO: 472125 - DNA, 75 bp, synthetic construct
  source 1..75: mol_type = other DNA
agcgataagtcagattaaccaggctaacagccagatgcaggccctgaacagcgctgccgaagccgccggtgccct

SEQ ID NO: 472126 - DNA, 75 bp, synthetic construct
  source 1..75: mol_type = other DNA
cagactgtatctgagcggtggcagttaccgaaacggccagcgtgaagtgccagccggcacggtgggttacgcgca

SEQ ID NO: 472127 - DNA, 75 bp, synthetic construct
  source 1..75: mol_type = other DNA
gttcgtaaccagcaaacaccggatggcgtagcgtggcaaaagcgcaaaacaaagcgcaaaggcaagatgctgcgc

SEQ ID NO: 472128 - DNA, 75 bp, synthetic construct
  source 1..75: mol_type = other DNA
tatctggtgcccggaaatgggagcacactgccgcaggagacaccggactttaaaaggacagacgttacggtcacg

SEQ ID NO: 472129 - DNA, 75 bp, synthetic construct
  source 1..75: mol_type = other DNA
caaaatcagggagctccagtctgcgctcctgctgggtagcgcgccgcagggggtggccctgacctcaggtgaaca

SEQ ID NO: 472130 - DNA, 75 bp, synthetic construct
  source 1..75: mol_type = other DNA
ccgggtcaggtacttgaaacggacggcacgttacccgatgttgtcagggaaggcatcgttatcaccacggtgcgt

SEQ ID NO: 472131 - DNA, 75 bp, synthetic construct
  source 1..75: mol_type = other DNA
aacccaaacgatgccatacagccgggcggggctactgattcgaaaactcagcggtaaagcggtgaaaaccagctg

SEQ ID NO: 472132 - DNA, 75 bp, synthetic construct
  source 1..75: mol_type = other DNA
taccgggtgaaaaccggtaagcgatggaaaaagcccacactaggcgagatcaccaaaacgatgccgtacagccag

SEQ ID NO: 472133 - DNA, 75 bp, synthetic construct
  source 1..75: mol_type = other DNA
aacagttccgccagctccaggaggcgctgaaaaaactggatttaccttctgcgaaacgtcaccggctgttgtggc

SEQ ID NO: 472134 - DNA, 75 bp, synthetic construct
  source 1..75: mol_type = other DNA
aaccaaattattgcgcggcaaatgcaggcaatcggcttcggctgggacgtcaacgcgcagcaaatcagggggtaa

SEQ ID NO: 472135 - DNA, 75 bp, synthetic construct
  source 1..75: mol_type = other DNA
tgatattcctgggcgcgtttttctgggggtgagcaacgacgaatttaaccaaattattgcgcggcaaatgcaggc

SEQ ID NO: 472136 - DNA, 75 bp, synthetic construct
  source 1..75: mol_type = other DNA
gcagggttactgattcgaaaactcagcggtaaagcagtgaaaaccagctggacagtggatcttcctgcccgtgtg

SEQ ID NO: 472137 - DNA, 75 bp, synthetic construct
  source 1..75: mol_type = other DNA
gttacggcgatcatcgtaccctggaacgccgtattcagggcatggaaaaatggctggcgaatcctgagctgctgg

SEQ ID NO: 472138 - DNA, 75 bp, synthetic construct
  source 1..75: mol_type = other DNA
tctgttgctcacacggttctgcgtgccgtccgtgactcggtggtctctgttgcccgtgcggtatggaactggatt

SEQ ID NO: 472139 - DNA, 75 bp, synthetic construct
  source 1..75: mol_type = other DNA
accgtgccctgtctgtggatgagtatttctggcgacacatcctgcaccggggacatcagcaggtgctgtttgtgg

SEQ ID NO: 472140 - DNA, 75 bp, synthetic construct
  source 1..75: mol_type = other DNA
gtgacgcaggccgacaaaacggagccctgccacgaatgggatatggccggcattcagccttctcccgcacaggca

SEQ ID NO: 472141 - DNA, 75 bp, synthetic construct
  source 1..75: mol_type = other DNA
cacaagagctgcccaagaaggatatagtgagtatatcatagcgaagcttttggatcatagatcaacgagacttgt

SEQ ID NO: 472142 - DNA, 75 bp, synthetic construct
  source 1..75: mol_type = other DNA
gtcacgaacccgtgattggcattatgggtaaaagcggggccggtaaatcttcactctgtaatgcactgtttcagg

SEQ ID NO: 472143 - DNA, 75 bp, synthetic construct
  source 1..75: mol_type = other DNA
acaacatggttatcactgacctgcccggggtgggcgagagccgggacagggatgcagagtatgaagccctgtacc

SEQ ID NO: 472144 - DNA, 75 bp, synthetic construct
  source 1..75: mol_type = other DNA
tcggctttgagattgaagggaccggtaagaagtacgcattgcgtaatggtgaatatgtcgatgcgtattatatgg

SEQ ID NO: 472145 - DNA, 75 bp, synthetic construct
  source 1..75: mol_type = other DNA
ccggcaattaaggtctataaaaaatacggctttgaaattgaagggactggtaagaagtacgcattgcgggtgatg

SEQ ID NO: 472146 - DNA, 75 bp, synthetic construct
  source 1..75: mol_type = other DNA
cggtattccggctgttccggcccgtacatccggttgtggccgtatcggcccgcaccggctgggaactggatacgc

SEQ ID NO: 472147 - DNA, 75 bp, synthetic construct
  source 1..75: mol_type = other DNA
ctcatccttcggaaggctggtggccagaaagattgaaagatcgccaggggtttaaacaactggttgcctgcattg

SEQ ID NO: 472148 - DNA, 75 bp, synthetic construct
  source 1..75: mol_type = other DNA
gaagggactggcaagaagtacgcattacgtaatggtgaatatgttgatgcgtattttatggcgcgggtgaagtaa

SEQ ID NO: 472149 - DNA, 75 bp, synthetic construct
  source 1..75: mol_type = other DNA
gaatatgtcgatgcgtatggtaatgactccaacttattgatagtgttttatgttcagataatgcccgatgacttt

SEQ ID NO: 472150 - DNA, 75 bp, synthetic construct
  source 1..75: mol_type = other DNA
ttacccgctgccgccggaggaacgcgaatggatggatgcgccgtctgtgggtcgggaatggccaaacagtgaaga

SEQ ID NO: 472151 - DNA, 75 bp, synthetic construct
  source 1..75: mol_type = other DNA
catttttattacggacgtcagtatcggggaaccactatctgcagatcgatggagaagccacaaacgatcgtcggt

SEQ ID NO: 472152 - DNA, 75 bp, synthetic construct
  source 1..75: mol_type = other DNA
tgagaaccagaaagtggaaagaccagtcagggcaagaccgttacacaaccgaggttcatgtcggaattaatggcg

SEQ ID NO: 472153 - DNA, 75 bp, synthetic construct
  source 1..75: mol_type = other DNA
gccttgcagcagaaaatcagactttgagcaggttattgaacccggcaacgtcagaggttgacttcatttgtgagt

SEQ ID NO: 472154 - DNA, 75 bp, synthetic construct
  source 1..75: mol_type = other DNA
tgccggatctgaaagttgagcaggcctttgagctgaccgatgcgtccgccgagcgttctgctgccggttgtacca

SEQ ID NO: 472155 - DNA, 75 bp, synthetic construct
  source 1..75: mol_type = other DNA
cctaacacaggcgctacaggcctatcctggcccgattggacaatggggtgtcggtttgcatatcgacaaccatgc

SEQ ID NO: 472156 - DNA, 75 bp, synthetic construct
  source 1..75: mol_type = other DNA
aaaagccagaacagcgtggcgcaagataattgcgcgtatgcgttataaggttgatggacttcgtaacggtattga

SEQ ID NO: 472157 - DNA, 75 bp, synthetic construct
  source 1..75: mol_type = other DNA
gttcataaatattcccccgctgcattcgagttaatcaaaaaaatcattaatggtcagaagtataaactcaaacca

SEQ ID NO: 472158 - DNA, 75 bp, synthetic construct
  source 1..75: mol_type = other DNA
aaataattgaagatatcaaatcatgtcttgaaggtttacaggtacagccaattctctttatgggtgcaggggtat

SEQ ID NO: 472159 - DNA, 75 bp, synthetic construct
  source 1..75: mol_type = other DNA
ataaagagaattcagcttacagaacctcgtattaatcttattgaggatgggcttacgagacttggtgcagggaaa

SEQ ID NO: 472160 - DNA, 75 bp, synthetic construct
  source 1..75: mol_type = other DNA
atcaaccattatcggtattgaaagatgttggtgtagagcttctaaaatcctacgcaaaaaagaaatttggtcttt

SEQ ID NO: 472161 - DNA, 75 bp, synthetic construct
  source 1..75: mol_type = other DNA
attgtcattaagtaagccggatgtttttgaaagattgaaagagttgagcaatgaacccatcggggttttgaagga

SEQ ID NO: 472162 - DNA, 75 bp, synthetic construct
  source 1..75: mol_type = other DNA
tatactacatacggtgaaatcatgaagattcacggcagtagtaaagaaccagaaagcatcattataacaaatgaa

SEQ ID NO: 472163 - DNA, 75 bp, synthetic construct
  source 1..75: mol_type = other DNA
atcaaacaggtcctgcatctttaaatacgcctccggtttcatttcctgaaggatatggagaaacgttcattacga

SEQ ID NO: 472164 - DNA, 75 bp, synthetic construct
  source 1..75: mol_type = other DNA
agatctcactgcgccgggaatgctgttgcatgctcctgatgggattggcatggttagtgcgcgggcgttacgaat

SEQ ID NO: 472165 - DNA, 75 bp, synthetic construct
  source 1..75: mol_type = other DNA
cctgaaaggctgggagtttgagttccgtctcaaaaaaacgtatccgaagcgtgaacagattaaccagtatcagga

SEQ ID NO: 472166 - DNA, 75 bp, synthetic construct
  source 1..75: mol_type = other DNA
tcgtggtgtaacagatgaacagggttacacgcaggcgcactacggtattgattctgaaaatatcagtttgttttt

SEQ ID NO: 472167 - DNA, 75 bp, synthetic construct
  source 1..75: mol_type = other DNA
taggtattcttagcccacagaccgttcgtctggcgtcaggagaacaaagtatcggtctgatgtccggaagaaata

SEQ ID NO: 472168 - DNA, 75 bp, synthetic construct
  source 1..75: mol_type = other DNA
tgaaactctttgccgctaagggcaaagtagaaattcaggctcaggatgatgcgcttgatgcgatagccaaaaagg

SEQ ID NO: 472169 - DNA, 75 bp, synthetic construct
  source 1..75: mol_type = other DNA
tttgaaaataataatctaatagacgcgcgagtatgtgtaactggacagcatcgtgagatgttggatcaagtgtta

SEQ ID NO: 472170 - DNA, 75 bp, synthetic construct
  source 1..75: mol_type = other DNA
atgatacagcaaaaaatacttataatatttggtactagaccagaggctataaaaatggcccctattgttaaggca

SEQ ID NO: 472171 - DNA, 75 bp, synthetic construct
  source 1..75: mol_type = other DNA
atgagtcatgcaaataatccttatggtgatggcaaaacaagtcagagaattgtagatgctgttttaggttttaga

SEQ ID NO: 472172 - DNA, 75 bp, synthetic construct
  source 1..75: mol_type = other DNA
ccgccgccactgcatgatgaacggtctggacagcatcggcctgaccctgcagcacgacgacgctattgcgtctta

SEQ ID NO: 472173 - DNA, 75 bp, synthetic construct
  source 1..75: mol_type = other DNA
tctgtttaacgactggcgttttctggatgaaaaaggccaacagccaaacccggacttcgtgctgaacttcccgca

SEQ ID NO: 472174 - DNA, 75 bp, synthetic construct
  source 1..75: mol_type = other DNA
gtgattgcaccgagttttgctgacatcttctacggcaacagctttaacaaccagctgctgccggtgaaattaagc

SEQ ID NO: 472175 - DNA, 75 bp, synthetic construct
  source 1..75: mol_type = other DNA
cgataaaattgaccctgcgccggagacggctaacttctgggcccggctcgatcacgagcgttttctggctgagca

SEQ ID NO: 472176 - DNA, 75 bp, synthetic construct
  source 1..75: mol_type = other DNA
aaagcgcccgctactggtgccgccgccttagctggttaagcagtctgattggttatggactgattgtggcagtgc

SEQ ID NO: 472177 - DNA, 75 bp, synthetic construct
  source 1..75: mol_type = other DNA
atcgtcatgaagatgccgataaagccaatcaggcgctaaaagatgccgtggcggaagtgatggaaaatgaagaag

SEQ ID NO: 472178 - DNA, 75 bp, synthetic construct
  source 1..75: mol_type = other DNA
gaacgcagcaactggctgcagcttccggcgatgattatcggggcgtttattatcgacctactgttactggcactg

SEQ ID NO: 472179 - DNA, 75 bp, synthetic construct
  source 1..75: mol_type = other DNA
cctcgcgtgagcacgcgccgtgggcattgaccgattacggttttaaggtggtgattgcgccgagttttgctgaca

SEQ ID NO: 472180 - DNA, 75 bp, synthetic construct
  source 1..75: mol_type = other DNA
cttatcgttttaccatcgatgccttccgccgccactgcatgatgaacggtctcgatagcatcggtctgacgttgc

SEQ ID NO: 472181 - DNA, 75 bp, synthetic construct
  source 1..75: mol_type = other DNA
gatgccgaagtggacgaactgtttgcgctggtgaaagccaatccggggattcattttgatgtagacctggaagcg

SEQ ID NO: 472182 - DNA, 75 bp, synthetic construct
  source 1..75: mol_type = other DNA
aacctggttttgcgcacgttatgcctggtattgccaacagatgatgcaggcaagagagctggagttagagcactg

SEQ ID NO: 472183 - DNA, 75 bp, synthetic construct
  source 1..75: mol_type = other DNA
aacctggttttgcgcccgctatacctggtattgccaacagatgatgcagaccagagaactggaattagaacattg

SEQ ID NO: 472184 - DNA, 75 bp, synthetic construct
  source 1..75: mol_type = other DNA
atgaacgctaacgctaaatatccggcctgggttttcgaactgtacgcaagatactttgaattactggcacaaggt

SEQ ID NO: 472185 - DNA, 75 bp, synthetic construct
  source 1..75: mol_type = other DNA
acacctcgcgtaaagaattgatcgaccagttgcgtactgtcgccgcgacgccccctgcggaaccggtcccgaaga

SEQ ID NO: 472186 - DNA, 75 bp, synthetic construct
  source 1..75: mol_type = other DNA
accacaacgacaacggactcaacgactgaaccggccccggaaccggatatcgaacaaaaaaaagcggcctatggc

SEQ ID NO: 472187 - DNA, 75 bp, synthetic construct
  source 1..75: mol_type = other DNA
aacgctggcagcatgagcgtggctggactgtcacgattatcagattaactgaagcctcgccctccgtggcgctgg

SEQ ID NO: 472188 - DNA, 75 bp, synthetic construct
  source 1..75: mol_type = other DNA
tatttggcacaagaccagaggctataaaaatggcccctattgttaaagcttttaagaataatagattaatagatg

SEQ ID NO: 472189 - DNA, 75 bp, synthetic construct
  source 1..75: mol_type = other DNA
tgggtaaaagtgggtctattcgatgcctttggtatggatgatatccagtacagcccagaagtgaatattaatatt

SEQ ID NO: 472190 - DNA, 75 bp, synthetic construct
  source 1..75: mol_type = other DNA
gtgcggtactaaaagatactttctatactcaggaaagtggctttaatttctcactggacttgaacaagtacaaac

SEQ ID NO: 472191 - DNA, 75 bp, synthetic construct
  source 1..75: mol_type = other DNA
caaatggtaacaaagcaaatattacaactcttacacagacagtagcagataatgacgcagcacaaactacggcaa

SEQ ID NO: 472192 - DNA, 75 bp, synthetic construct
  source 1..75: mol_type = other DNA
cagggccgaagtggacaaataaatttcttggcaaaggccttgtttctgtcagtgcggttatcaaaaaaacacaac

SEQ ID NO: 472193 - DNA, 75 bp, synthetic construct
  source 1..75: mol_type = other DNA
tcggatattagcactgatgaagcaattaagagtgatggtctagtgattaccctagcccgtgattttaaagccgta

SEQ ID NO: 472194 - DNA, 75 bp, synthetic construct
  source 1..75: mol_type = other DNA
tggacgatgaaccagtattagcagtaccgataacgtcagacggcgtagtaccgaaagctagtattgtatctaaat

SEQ ID NO: 472195 - DNA, 75 bp, synthetic construct
  source 1..75: mol_type = other DNA
atgatactgaccgatccagaatggcaggcagttttattaagcctgaaagtttcttccctggctgtgctgtttagc

SEQ ID NO: 472196 - DNA, 75 bp, synthetic construct
  source 1..75: mol_type = other DNA
gccgctacctttgccggagcgccttcgctgacggtcgatgcggttattgtcccttgcggcaatatcgcggatatc

SEQ ID NO: 472197 - DNA, 75 bp, synthetic construct
  source 1..75: mol_type = other DNA
attcgaacagcgccatattatcgatgctttcagctttgagttgagtaaagttgtacgcccatatattcgtgagcg

SEQ ID NO: 472198 - DNA, 75 bp, synthetic construct
  source 1..75: mol_type = other DNA
ttggtttggtatcgcagcgtgtaacccttaacggaatagtaccgacttataactttgctttaccttccgtaactg

SEQ ID NO: 472199 - DNA, 75 bp, synthetic construct
  source 1..75: mol_type = other DNA
gttggggtgctgctgcgggagctgcttcactggtggctacatcaatgttggggcaaatcggcgtaagcggttatg

SEQ ID NO: 472200 - DNA, 75 bp, synthetic construct
  source 1..75: mol_type = other DNA
ttggcattaccttcgcgtttagctggcgcggtgcggttctcgcagccgcagtcatgtcctttccgttgatggtgc

SEQ ID NO: 472201 - DNA, 75 bp, synthetic construct
  source 1..75: mol_type = other DNA
gatggtgaaattaccaatgcgaaaattggtgccacgatacaaagtactaactatgttgccaactctacaggatgg

SEQ ID NO: 472202 - DNA, 75 bp, synthetic construct
  source 1..75: mol_type = other DNA
tggcagtcaatgccgctttctggtgctgcgtgtaccgcgaggccgaaagcaaagaagcacagattgaagcgctgg

SEQ ID NO: 472203 - DNA, 75 bp, synthetic construct
  source 1..75: mol_type = other DNA
gactgcggcattcggcttcctcattactgccgttggcctgccggtattaacggtggtggcgctggcgaaagttgg

SEQ ID NO: 472204 - DNA, 75 bp, synthetic construct
  source 1..75: mol_type = other DNA
gcttgtgcagaattctttgcccagtacgtaccgctctcttatcgtacgctggtgtttatcctcggcggcttctcg

SEQ ID NO: 472205 - DNA, 75 bp, synthetic construct
  source 1..75: mol_type = other DNA
tgatcgtatttggtaccagaccagaggcgattaagatggcgccaatcgtcaaggctttccaggctacccgtgata

SEQ ID NO: 472206 - DNA, 75 bp, synthetic construct
  source 1..75: mol_type = other DNA
ttaaattgttagcatgtgcagaaagttcattaactttaaataattcagcaaaagcaatattaaatatgtggcttg

SEQ ID NO: 472207 - DNA, 75 bp, synthetic construct
  source 1..75: mol_type = other DNA
aatcgttgggggctgaactggctgtgtggggtgtcccgcataactacgctgtagtgtttacagagaaaagcacca

SEQ ID NO: 472208 - DNA, 75 bp, synthetic construct
  source 1..75: mol_type = other DNA
ggtgactgacgtcgacagcggcgagtccgtatccattcccacggaagatattagcgaaccgatgtttcatcaggg

SEQ ID NO: 472209 - DNA, 75 bp, synthetic construct
  source 1..75: mol_type = other DNA
ccaatcaacatcaggtgcagttgatgtatcaacgcggttcagcaacacccgatactttttccagacttccagcaa

SEQ ID NO: 472210 - DNA, 75 bp, synthetic construct
  source 1..75: mol_type = other DNA
tagctgaccttactatgaaatgttcatctaacccaccttcacagatttatgaagttttaactaataatatctggg

SEQ ID NO: 472211 - DNA, 75 bp, synthetic construct
  source 1..75: mol_type = other DNA
agaacgaccgcattgaacgcccccagggcggcggcggtggttccggcagtggtcagggccaggccagccaggatg

SEQ ID NO: 472212 - DNA, 75 bp, synthetic construct
  source 1..75: mol_type = other DNA
atgttttgcctgatggacgtttccggttcgatggatcaatccaccaaagatatggccaaacgtttttatatattg

SEQ ID NO: 472213 - DNA, 75 bp, synthetic construct
  source 1..75: mol_type = other DNA
tatggctaagcgtttttatattctgctgtatctgttcctcagcagaacgtataagaacgtggaagtcgtatacat

SEQ ID NO: 472214 - DNA, 75 bp, synthetic construct
  source 1..75: mol_type = other DNA
ctggccagtggtgcggacaaggatgcagttgtgcgggaggctcttcttcgtgattttgataatccgccctttaaa

SEQ ID NO: 472215 - DNA, 75 bp, synthetic construct
  source 1..75: mol_type = other DNA
ttattttattgcgtctgcacctgataaagatcaggaatgggagtgtaaccggccatcctttgttgtatacggaga

SEQ ID NO: 472216 - DNA, 75 bp, synthetic construct
  source 1..75: mol_type = other DNA
tattcaatggcggaatacaggcgaacaacagtaccgtgaatatctcctcagacagtgccgttctggagaactcaa

SEQ ID NO: 472217 - DNA, 75 bp, synthetic construct
  source 1..75: mol_type = other DNA
gattcaatcacctggaaaatgaaatcactgagcttaataaaaaattgtcggcgttggtgagttctgaagatgaaa

SEQ ID NO: 472218 - DNA, 75 bp, synthetic construct
  source 1..75: mol_type = other DNA
aaatggaaaagtaacactgccatcgcaccagcacagtgagacgctcattgaatttgccattgattacctgaagaa

SEQ ID NO: 472219 - DNA, 75 bp, synthetic construct
  source 1..75: mol_type = other DNA
ttattgtgacaagcgatgactggaatatcacgatcagtgaagatggaaaagtaacaccagcatcgcaccagcaca

SEQ ID NO: 472220 - DNA, 75 bp, synthetic construct
  source 1..75: mol_type = other DNA
tgattttcacctcgctaatacttactggctgccagtcctctcagggaaagtttactcctgagcaagtcgccgcta

SEQ ID NO: 472221 - DNA, 75 bp, synthetic construct
  source 1..75: mol_type = other DNA
cgcagctggtgaggatgtggaggtgcttaccgctgaattagagcgaagcaaagcggaacttgaaaagaccaccgc

SEQ ID NO: 472222 - DNA, 75 bp, synthetic construct
  source 1..75: mol_type = other DNA
catgagcaacctactaccatgtccattctgtggcggcgcagcgcacgttgccagcgaagcggatcaccctgaata

SEQ ID NO: 472223 - DNA, 75 bp, synthetic construct
  source 1..75: mol_type = other DNA
tatcaattactaagcatctgttttttagttggtgtaatataatttttattaaggtaagcggaaaaacaaccaaaa

SEQ ID NO: 472224 - DNA, 75 bp, synthetic construct
  source 1..75: mol_type = other DNA
cgctgcgggtggcggaacgaaaaggtacgctggagaccgctgcacggattcagcagcgcaccacggcaatcatgc

SEQ ID NO: 472225 - DNA, 75 bp, synthetic construct
  source 1..75: mol_type = other DNA
ttttcaggccgctgtgatcattgattcccttatcagtgcaaatgaaaaagcactggaaggcattgcccggttgga

SEQ ID NO: 472226 - DNA, 75 bp, synthetic construct
  source 1..75: mol_type = other DNA
cggcgggtattgattctacggccattagaaagttggatgaggacgaaaagggtctgcatttaatgcagacccctg

SEQ ID NO: 472227 - DNA, 75 bp, synthetic construct
  source 1..75: mol_type = other DNA
tgccgttactgtgtattgtgatgctgcccgcgtggctgctgttggcaggaaaaccaatgatgatcgcaagccgta

SEQ ID NO: 472228 - DNA, 75 bp, synthetic construct
  source 1..75: mol_type = other DNA
cattcacgctgaagcctacgctgcaggcgaactgaaacacggtccgctggcgctgattgacgccgatatgccggt

SEQ ID NO: 472229 - DNA, 75 bp, synthetic construct
  source 1..75: mol_type = other DNA
cgctgattgacgcggatatgccggttatcgtcgttgcaccgaacaacgaattgctggaaaaactgaaatccaaca

SEQ ID NO: 472230 - DNA, 75 bp, synthetic construct
  source 1..75: mol_type = other DNA
tcctccggcacctaactggcctgcgccaccaccgccagtacaaaatgaacaatcaagacctctgcctgatgtggc

SEQ ID NO: 472231 - DNA, 75 bp, synthetic construct
  source 1..75: mol_type = other DNA
cagtggctttcgcggtgggcgaatcttcccggcagtgttcgtcggcgtggcattagggttgatgctgcatgagca

SEQ ID NO: 472232 - DNA, 75 bp, synthetic construct
  source 1..75: mol_type = other DNA
gttgatattttcgcaaaccttaaatggcagtagtgaagttccgctatgggatcgtctttttgcgccgttaatggc

SEQ ID NO: 472233 - DNA, 75 bp, synthetic construct
  source 1..75: mol_type = other DNA
cgaaagacgcaatcaaggcgaaattcggcgctcgctggttgccagcgaaggcgaagaacagcgacttcccaggta

SEQ ID NO: 472234 - DNA, 75 bp, synthetic construct
  source 1..75: mol_type = other DNA
gcgaagagttgtggagtccggttcgttgcgcttttacaggtgcattaacactctattactattttatcggcttct

SEQ ID NO: 472235 - DNA, 75 bp, synthetic construct
  source 1..75: mol_type = other DNA
catgaatgccgcattaatgagtgaacggcccatttgggtaataagttgcttaatgattgtgttatggtcaggcat

SEQ ID NO: 472236 - DNA, 75 bp, synthetic construct
  source 1..75: mol_type = other DNA
gttacgcccaaatacgcgaagctgatcgccacgctgaaggagtttttcccggaaggtaagcaaatcatcttcacc

SEQ ID NO: 472237 - DNA, 75 bp, synthetic construct
  source 1..75: mol_type = other DNA
tatgatcgaaatgcagatgtataccgcgaaggatgacggcgaacgtctggcaatgatgcaggttcaaatggataa

SEQ ID NO: 472238 - DNA, 75 bp, synthetic construct
  source 1..75: mol_type = other DNA
tggactccgactcccaccgcaaagaggccgcgcgtcgccgggtattgtcggagtattcagataccggcaccgaaa

SEQ ID NO: 472239 - DNA, 75 bp, synthetic construct
  source 1..75: mol_type = other DNA
gcgcgagcatcctgctatccagatttgctctttaacgcacgtatgcgacgagttcgccgcccagcttcgtcaggg

SEQ ID NO: 472240 - DNA, 75 bp, synthetic construct
  source 1..75: mol_type = other DNA
acacattgtggtggtgcataacggcatcatcgaaaaccatgaaccgctgcgcgaagagttaaaagcgcgtggcta

SEQ ID NO: 472241 - DNA, 75 bp, synthetic construct
  source 1..75: mol_type = other DNA
gacgattccagcagaacggatgaaggccaagcgtgagcacattgttcctctgtctccacaggcattagaaattct

SEQ ID NO: 472242 - DNA, 75 bp, synthetic construct
  source 1..75: mol_type = other DNA
actcgtcgctttatcttccttgaagaggacgatattgcggaaatcactcgccgttcggtaaacatcttcgataaa

SEQ ID NO: 472243 - DNA, 75 bp, synthetic construct
  source 1..75: mol_type = other DNA
ggataccctgctggcggcacgttctggtagtccgctggtgattggcctgggcatgggcgaaaactttatcgcttc

SEQ ID NO: 472244 - DNA, 75 bp, synthetic construct
  source 1..75: mol_type = other DNA
ccgcaactgcgtggtgcgtacggtacagtgatcatggactcccgtcacccggataccctgctggcggcacgttct

SEQ ID NO: 472245 - DNA, 75 bp, synthetic construct
  source 1..75: mol_type = other DNA
ggtggctatgaccgtcgcagcaagtgttcaggctaaaactctggtttattgctcagaaggatctccggaagggtt

SEQ ID NO: 472246 - DNA, 75 bp, synthetic construct
  source 1..75: mol_type = other DNA
cctttcctacggtcatggaaacgttgtcaatataaaaccggcagagagtgcagccagcgtccagtgcccagtttt

SEQ ID NO: 472247 - DNA, 75 bp, synthetic construct
  source 1..75: mol_type = other DNA
gcactgtcgtgggtgagcgccgcactgtttgcgacgggagtttttattatctctcgcgggacattatatgaattg

SEQ ID NO: 472248 - DNA, 75 bp, synthetic construct
  source 1..75: mol_type = other DNA
gttgttattgccggccaggatagcgttaatccaccggaacagggaagagcattatatgatgctgttgcttctggt

SEQ ID NO: 472249 - DNA, 75 bp, synthetic construct
  source 1..75: mol_type = other DNA
ttcggccaggcaatgtttggctggcatagctggcaactgttgttggcagaactcggtacgctggcgctggtgtgg

SEQ ID NO: 472250 - DNA, 75 bp, synthetic construct
  source 1..75: mol_type = other DNA
cctcaagcgtgcgaaagatggcgagcaccagacggtaatgatgggctggactggcgacaacggggatccggataa

SEQ ID NO: 472251 - DNA, 75 bp, synthetic construct
  source 1..75: mol_type = other DNA
tatgacccgcttgcgtcgtctcggtaaagtacagatgctggcccaggcagcggaagaacatcctctgcatggtgg

SEQ ID NO: 472252 - DNA, 75 bp, synthetic construct
  source 1..75: mol_type = other DNA
aaaaccttgatgcgctgcgcggcatattccatcgctggacaacgcttaaaacggcggaagacgttaaggataccg

SEQ ID NO: 472253 - DNA, 75 bp, synthetic construct
  source 1..75: mol_type = other DNA
taccagaatagcgaggtgcgccgactgtccgaagatgggcgcggcatcctgggcttcggcaccgggctgggtaaa

SEQ ID NO: 472254 - DNA, 75 bp, synthetic construct
  source 1..75: mol_type = other DNA
ccacagaaggtcgtctcggcatgacatttacccagatggcaaatgtccgcgataagtacaccacatcaatcagcg

SEQ ID NO: 472255 - DNA, 75 bp, synthetic construct
  source 1..75: mol_type = other DNA
agaattacctaagctaatgcgttctctcgttatgtcaaatttgtctattccgactcgctgtcttatcgagtggca

SEQ ID NO: 472256 - DNA, 75 bp, synthetic construct
  source 1..75: mol_type = other DNA
ttaagctggatggcactatttctgacgagctgacaggaaagctggttacgcatgattccagcgcaagttatgact

SEQ ID NO: 472257 - DNA, 75 bp, synthetic construct
  source 1..75: mol_type = other DNA
actcctgacgcttgtgcgcccttctgaggcctccggtgctcgttgggcagagatcgatctcgatgcaaagctctg

SEQ ID NO: 472258 - DNA, 75 bp, synthetic construct
  source 1..75: mol_type = other DNA
aacagccaaacgcgatcaaaaacacccttactgggcgcatcagccacggtcaggttgatttaagcgagctgggac

SEQ ID NO: 472259 - DNA, 75 bp, synthetic construct
  source 1..75: mol_type = other DNA
ggatactttgctggcggctcgttccggtagcccgctggttatcggcctcggtatgggcgaaaactttatcgcttc

SEQ ID NO: 472260 - DNA, 75 bp, synthetic construct
  source 1..75: mol_type = other DNA
gatggtaaaaaggccattaatatacatataagaagcaatgcgaaagaaatgcttgatgaactcagaactgtttac

SEQ ID NO: 472261 - DNA, 75 bp, synthetic construct
  source 1..75: mol_type = other DNA
acctgcaaacaggcgctaaagttctgccgcaggagacgctacgcgttcagtaatgccctggacgatttgatcgtc

SEQ ID NO: 472262 - DNA, 75 bp, synthetic construct
  source 1..75: mol_type = other DNA
ctctgttgtccgtacggccctgcgcgctgttcgtgacacggtggtctctgttgcccgtgcggtatggaactggat

SEQ ID NO: 472263 - DNA, 75 bp, synthetic construct
  source 1..75: mol_type = other DNA
ccagtcccctgatgacccgactgcaggacgagctgcgcacggagtctgtccgctctcaggcccgtgaacagttta

SEQ ID NO: 472264 - DNA, 75 bp, synthetic construct
  source 1..75: mol_type = other DNA
gccctgcgcgctgttcgtgacacggtggtctctgttgcccgtgcggtatggaactggattttcttctgaacctgt

SEQ ID NO: 472265 - DNA, 75 bp, synthetic construct
  source 1..75: mol_type = other DNA
aaaaataccccatcgccagtaacaagaccgcacagggtcgcgccgagaaccgtcgcgtcgctgtggtgattagta

SEQ ID NO: 472266 - DNA, 75 bp, synthetic construct
  source 1..75: mol_type = other DNA
tgacaattacggtgaagacagttacaacgaagccttatcgctgaagcgagctaatgtcgtcgccgatgcgtgggc

SEQ ID NO: 472267 - DNA, 75 bp, synthetic construct
  source 1..75: mol_type = other DNA
ccagcaacagatccaaaccatggcagccaaattggcctcgacagggctaacacatgcccgtatggatggacacac

SEQ ID NO: 472268 - DNA, 75 bp, synthetic construct
  source 1..75: mol_type = other DNA
gtcacatcctggaacatctgcgcaaactcaccagtcacgaacccgtgattggcattatgggtaaaagcggggccg

SEQ ID NO: 472269 - DNA, 75 bp, synthetic construct
  source 1..75: mol_type = other DNA
tcacagcatggttatcactgacctgcccggggtgggcgagagccgggagcgggatgcagagtatgaagctctgta

SEQ ID NO: 472270 - DNA, 75 bp, synthetic construct
  source 1..75: mol_type = other DNA
gaccggatatttgacacagcggagagcgtctgtgttgcctctgttgtccgtacggccctgcgcgctgttcgtgac

SEQ ID NO: 472271 - DNA, 75 bp, synthetic construct
  source 1..75: mol_type = other DNA
gcgtctgtattgcctctgttgtccgtacggttctgcgtgctgttcgtgacacggtggtctctgttgcccgtgcgg

SEQ ID NO: 472272 - DNA, 75 bp, synthetic construct
  source 1..75: mol_type = other DNA
tcccgaccatgccgccagtcccctgatgacccgactgcaggacgagctgcgcacggaatctgtccgctctcaggc

SEQ ID NO: 472273 - DNA, 75 bp, synthetic construct
  source 1..75: mol_type = other DNA
atgaatccgtctgatgccattgaggcaattgaaaaaccgctttcctccctgccttactcgctttcacgtcacatc

SEQ ID NO: 472274 - DNA, 75 bp, synthetic construct
  source 1..75: mol_type = other DNA
tgtaccggaagatatcaccacactgctgtcgatgactcagccgattaaactgcgggggtttcagaagtgggatgt

SEQ ID NO: 472275 - DNA, 75 bp, synthetic construct
  source 1..75: mol_type = other DNA
atgacccgcctgcaggacgagctgcgcacggaatctgtccgatctcaggcccgtgaacagtttaccggtgcggtg

SEQ ID NO: 472276 - DNA, 75 bp, synthetic construct
  source 1..75: mol_type = other DNA
gggaggtcaccccggtcagtgatgttcacgccggcacccgggaagtgcggcgcttccgtctgaatggccatggtc

SEQ ID NO: 472277 - DNA, 75 bp, synthetic construct
  source 1..75: mol_type = other DNA
gccttactcactttcccgtcacatcctggaacatctgcgcaaactcaccagtcacgaacccgtgcctggcattat

SEQ ID NO: 472278 - DNA, 75 bp, synthetic construct
  source 1..75: mol_type = other DNA
gggaggtcaccccggtcagtgatgttcacgccggcacccgggaagtgcagcgcttccgtctgagtggccatggtc

SEQ ID NO: 472279 - DNA, 75 bp, synthetic construct
  source 1..75: mol_type = other DNA
caggtgctgtttgtggtgacgcaggccgacaaaacggagccctgccatgaatgggatatggccggtattcagcct

SEQ ID NO: 472280 - DNA, 75 bp, synthetic construct
  source 1..75: mol_type = other DNA
ctggacctggtgctgtggctgattaaagccgatgaccgggccctgtctgtggatgagtatttctggcgacacatc

SEQ ID NO: 472281 - DNA, 75 bp, synthetic construct
  source 1..75: mol_type = other DNA
ggtgcaacgaaaaaggcgtcagcgctcgccagcaacttaccgtccagcgacaaaataacatctggacattagtgc

SEQ ID NO: 472282 - DNA, 75 bp, synthetic construct
  source 1..75: mol_type = other DNA
tagcgttcagcaacaaaatggtatctggacattagttcaaagcgaagaggcggagatccaaccacgcagcgacga

SEQ ID NO: 472283 - DNA, 75 bp, synthetic construct
  source 1..75: mol_type = other DNA
gtggaccctgtattctctatcggtatctcatcgttatgggatgaactacgacatatgccagcaggcggcacctgg

SEQ ID NO: 472284 - DNA, 75 bp, synthetic construct
  source 1..75: mol_type = other DNA
cagtttaccggtgcggtggaccggatatttgacacggcggagagcgtctgcattgcctctgttgcccgtacggtt

SEQ ID NO: 472285 - DNA, 75 bp, synthetic construct
  source 1..75: mol_type = other DNA
tgcgcaaatcgagccactggcccgcagcattcataccctgcgtcgccagcgcggtagtgcgatgaaaatcctcgt

SEQ ID NO: 472286 - DNA, 75 bp, synthetic construct
  source 1..75: mol_type = other DNA
acgaccggttcctggcattcgtgttgagcaagccctgacgctgtgccgtccaaatcgcacaggcgatatcatgac

SEQ ID NO: 472287 - DNA, 75 bp, synthetic construct
  source 1..75: mol_type = other DNA
tattccgtctgttccggcccgtacatccggttgtggccgtatcggcccgcaccggctgggaactggatacgctgg

SEQ ID NO: 472288 - DNA, 75 bp, synthetic construct
  source 1..75: mol_type = other DNA
atgacccgcctgcaggacgagctgcgcacggagtctgtccggtctcaggcccgtgaacagtttaccggtgcggtg

SEQ ID NO: 472289 - DNA, 75 bp, synthetic construct
  source 1..75: mol_type = other DNA
tgattaaagccgatgaccgtgccctgtctgtggatgagtatttctggcgacacatcctgcaccggggacatcagc

SEQ ID NO: 472290 - DNA, 75 bp, synthetic construct
  source 1..75: mol_type = other DNA
tgtttcagggggaggtcaccccggtcagtgatgttcacgccggcacccgggaagtgcggcgcttccgtctgagtg

SEQ ID NO: 472291 - DNA, 75 bp, synthetic construct
  source 1..75: mol_type = other DNA
tgtgttgcctctgttgtccgtacggccctgcgcgctgttcgtgacacggtggtctctgttgcccgtgcggtatgg

SEQ ID NO: 472292 - DNA, 75 bp, synthetic construct
  source 1..75: mol_type = other DNA
gcaggccgacaaaacggagccctgccatgaatgggatatggccggtattcagccttctcctgcacaggcacagaa

SEQ ID NO: 472293 - DNA, 75 bp, synthetic construct
  source 1..75: mol_type = other DNA
aaacggaggcggtattccggctgttccggcccgtacatccggttgtggccgtatcggcccgcaccggctgggaac

SEQ ID NO: 472294 - DNA, 75 bp, synthetic construct
  source 1..75: mol_type = other DNA
atgctgagacacaacgttcctgtgcgacgggatctggaccagatcgccgctaacaacggtttcgactttcatatc

SEQ ID NO: 472295 - DNA, 75 bp, synthetic construct
  source 1..75: mol_type = other DNA
ctggaacatctgcgcaaactcacccgtcacgaacccgtgattggcattatgggtaaaagcggggccggtaaatcc

SEQ ID NO: 472296 - DNA, 75 bp, synthetic construct
  source 1..75: mol_type = other DNA
atgaatctgtctgatgccattgaggcaattgaaaaaccactggcctccctgccttattcgctttcccgtcacatc

SEQ ID NO: 472297 - DNA, 75 bp, synthetic construct
  source 1..75: mol_type = other DNA
gcgtctgtgttgcctctgttgcacgcacggttctgcgtgccgtccgtgacacagtgggctctgttgcccgcgcgg

SEQ ID NO: 472298 - DNA, 75 bp, synthetic construct
  source 1..75: mol_type = other DNA
cgcgcgcgatccttcgctgtatggccgtatggattttgcctggtgtggtaatgcgccggtgaagttgctggagta

SEQ ID NO: 472299 - DNA, 75 bp, synthetic construct
  source 1..75: mol_type = other DNA
caacgccgatacgccgacctcgttgtatgagtcggcttatttccagtggttgtggctggaggatgcccggcgcag

SEQ ID NO: 472300 - DNA, 75 bp, synthetic construct
  source 1..75: mol_type = other DNA
gagactgtgttgcctctgttgcacgcacggttctgcgtgccgtccgtgacacggtggtctctgttgcccgcgcgg

SEQ ID NO: 472301 - DNA, 75 bp, synthetic construct
  source 1..75: mol_type = other DNA
ggcgcaacaacaggcgatgtacgaaagccagcaagagcgcgtggcacatctgcaaagttacatcgatcgtttccg

SEQ ID NO: 472302 - DNA, 75 bp, synthetic construct
  source 1..75: mol_type = other DNA
cgctcccgcgccgccagcctgctgcatggcctcggtttcagcaatgagcaactggagtatccggtgagcgatttc

SEQ ID NO: 472303 - DNA, 75 bp, synthetic construct
  source 1..75: mol_type = other DNA
ttcgcccagcatcaacttgaatacctgcgcgccgacgaatcacctattcaacatctggcacgtttagcgccgcag

SEQ ID NO: 472304 - DNA, 75 bp, synthetic construct
  source 1..75: mol_type = other DNA
ccgtacggttctgcgtgccgtccgtgacacggtggtctctgttgcccgcgctgtatggaactggattttcttctg

SEQ ID NO: 472305 - DNA, 75 bp, synthetic construct
  source 1..75: mol_type = other DNA
cccgcaccggctgggaactggatacgctggtcagtgcgctcatgacagcgcttcccgaccatgccgccagtcccc

SEQ ID NO: 472306 - DNA, 75 bp, synthetic construct
  source 1..75: mol_type = other DNA
gagtacaccggcaactacagctcgtttgaagtgcagcgcgccacccgtctggcacagcaacaggcgatgtatgaa

SEQ ID NO: 472307 - DNA, 75 bp, synthetic construct
  source 1..75: mol_type = other DNA
tttcagcagggaagatttacggcctttcctggggaaacctggccagctccaccatcttcgacagcagccaatcgg

SEQ ID NO: 472308 - DNA, 75 bp, synthetic construct
  source 1..75: mol_type = other DNA
gagtctgtccggtctcaggcccgtgaacagtttaccggtgcggtggaccggatatttgacacggcggagagcgtc

SEQ ID NO: 472309 - DNA, 75 bp, synthetic construct
  source 1..75: mol_type = other DNA
cctcactctgtaatgcgctgtttcagggggaggtcaccccggtcagtgatgttcacgccggcacccgggaagtgc

SEQ ID NO: 472310 - DNA, 75 bp, synthetic construct
  source 1..75: mol_type = other DNA
acgatcgtaaagtcgaaccgttcgacggcgatctggaagattatcaacagtggttgagcgacgtacaaaagcagg

SEQ ID NO: 472311 - DNA, 75 bp, synthetic construct
  source 1..75: mol_type = other DNA
ctgctgctgctcgacgaaccgactaaccaccttgacctcgacatgcgtcaggcactcaccgaagcattaatcgag

SEQ ID NO: 472312 - DNA, 75 bp, synthetic construct
  source 1..75: mol_type = other DNA
ggtcggtgatgtggtctgcagcggcctctcatcgtgggcggcggtgacgcagacaggagaagagaatgagagtta

SEQ ID NO: 472313 - DNA, 75 bp, synthetic construct
  source 1..75: mol_type = other DNA
gatcagcgcgtcgaaacggtgtatatcccggaagacgaccgtgccacgctctgcgtctcttcgcaggtggggtgt

SEQ ID NO: 472314 - DNA, 75 bp, synthetic construct
  source 1..75: mol_type = other DNA
gctgtgtgcgtctgcgtaacgaagacattaaattcctgttcgagaaagtgcctgtcggtactcgcgtgcagttta

SEQ ID NO: 472315 - DNA, 75 bp, synthetic construct
  source 1..75: mol_type = other DNA
cagttccattttacagacgatgacgggataccgtattcagaaacccgctacattgccttctttgaggatggcacg

SEQ ID NO: 472316 - DNA, 75 bp, synthetic construct
  source 1..75: mol_type = other DNA
ctgcgtctcctcgcaggtggggtgtgcgctggagtgtaaattctgttccaccgcccagcagggctttaaccgcaa

SEQ ID NO: 472317 - DNA, 75 bp, synthetic construct
  source 1..75: mol_type = other DNA
gcgcggcaaactgaaagaggtggcggaaatccgcgcaccggaagtggttgaagaacagcgttcatctgacggcac

SEQ ID NO: 472318 - DNA, 75 bp, synthetic construct
  source 1..75: mol_type = other DNA
tcggcgcagcaaaagtcaccggtcagcgcccaatcactaacgtagtgatgatgggcatgggcgagccgctgctca

SEQ ID NO: 472319 - DNA, 75 bp, synthetic construct
  source 1..75: mol_type = other DNA
caatctcaatagcggcggtagtccgggaacgccggtgccgacgctacaaccggcggttttgaaagcgctggcaga

SEQ ID NO: 472320 - DNA, 75 bp, synthetic construct
  source 1..75: mol_type = other DNA
gagcaatcagtttgaggtgataccggcggacaggacgtggcgtcacgcgccgctgccgaagccgaaggtggacgg

SEQ ID NO: 472321 - DNA, 75 bp, synthetic construct
  source 1..75: mol_type = other DNA
aatagcttgctggaaaaaaaagccacgctgatcatctggcagggccccaaggcgctgcgttatgtatcgggtgta

SEQ ID NO: 472322 - DNA, 75 bp, synthetic construct
  source 1..75: mol_type = other DNA
tgcgcagataagcgtggcgtcggtggagacgcaggattatatgttcaaaacgccggggtggccggggtactacag

SEQ ID NO: 472323 - DNA, 75 bp, synthetic construct
  source 1..75: mol_type = other DNA
ccgcgcgtgggccaggaggtgattgttgacttcctgaacggggacccggaccagccgataatcatggggcggacc

SEQ ID NO: 472324 - DNA, 75 bp, synthetic construct
  source 1..75: mol_type = other DNA
agttggattgggcattcggaaaaatagcccaaaatatagcaaaagagttgagtgactttaatgtaaaaatagttt

SEQ ID NO: 472325 - DNA, 75 bp, synthetic construct
  source 1..75: mol_type = other DNA
tcggcgcagcaaaagtcaccggtcagcgtccgatcactaacgtagtgatgatgggtatgggcgagccgctgctca

SEQ ID NO: 472326 - DNA, 75 bp, synthetic construct
  source 1..75: mol_type = other DNA
cgaaacattttggtgatatggctctatttgcccagccagtggaggatgactgttgcggctatggtacacactatc

SEQ ID NO: 472327 - DNA, 75 bp, synthetic construct
  source 1..75: mol_type = other DNA
ataaaaaatgaccggcacaaggttgtaaataacaaccagacaagcaaggtgacgggaactgataccgaagaagtc

SEQ ID NO: 472328 - DNA, 75 bp, synthetic construct
  source 1..75: mol_type = other DNA
aggaagcgggtttaacgagctgcggtttgaagacgccacgggcggtgaacaggtctatatccacgcgcagaagaa

SEQ ID NO: 472329 - DNA, 75 bp, synthetic construct
  source 1..75: mol_type = other DNA
ttcgcactgttaaccccggatggtctggtaaaaaatattattccgggctttgaaaattgtgacgcgacaatcctc

SEQ ID NO: 472330 - DNA, 75 bp, synthetic construct
  source 1..75: mol_type = other DNA
ggcgtatgtccgcccgtcgtcggtgcagagccaggattacacgtttaaggtgccggactggccggggatgtatga

SEQ ID NO: 472331 - DNA, 75 bp, synthetic construct
  source 1..75: mol_type = other DNA
gagatgctgctggagaagaaggcgacactgaccatctggcagggcgcagtggcgcagcgttatgtcaccggcgtg

SEQ ID NO: 472332 - DNA, 75 bp, synthetic construct
  source 1..75: mol_type = other DNA
cggacaaaagttcaggatacatccagacactatgtagacctcaatctccatgtgcagacaaaagggtatagtcct

SEQ ID NO: 472333 - DNA, 75 bp, synthetic construct
  source 1..75: mol_type = other DNA
cgtttctgacccggctgtgggcggaggaaggcatcttcttttatgacagatacgctgacgacagcccggagcaga

SEQ ID NO: 472334 - DNA, 75 bp, synthetic construct
  source 1..75: mol_type = other DNA
gcaggacattcaggccatctccgccacgctgttaaacgaggacggagtgacgcagtggacgccgcgcttttatga

SEQ ID NO: 472335 - DNA, 75 bp, synthetic construct
  source 1..75: mol_type = other DNA
ccatgacggggagagcctgaacggacagggaacgcagtacgagatatttgattatccggggcgtttcaaggatga

SEQ ID NO: 472336 - DNA, 75 bp, synthetic construct
  source 1..75: mol_type = other DNA
tggaagggaagcaggagcacaaaacgacaggaaaccacatcagcctggtggagggaaaacacagcctggaggtga

SEQ ID NO: 472337 - DNA, 75 bp, synthetic construct
  source 1..75: mol_type = other DNA
gcaggtgtatatccatgcgcagaagaacatggatacggaggtgctcaacgaccggacaacggatgtgaaacatga

SEQ ID NO: 472338 - DNA, 75 bp, synthetic construct
  source 1..75: mol_type = other DNA
caaggacattgtggaagacaaagcgctaccgatgcgtttcttcgcccaaggcggcacctttattccgattaattt

SEQ ID NO: 472339 - DNA, 75 bp, synthetic construct
  source 1..75: mol_type = other DNA
ggacaagagagccagaaaacgcctcaatacaaagctattcaaagtccaaccttacccaaaaccacaaacagttaa

SEQ ID NO: 472340 - DNA, 75 bp, synthetic construct
  source 1..75: mol_type = other DNA
attttgattatgtaggcagccatgaaacaacattctatgaacttgatggcgagtggtatcacgagatttgcagga

SEQ ID NO: 472341 - DNA, 75 bp, synthetic construct
  source 1..75: mol_type = other DNA
ggaaatcctgtcgtggggaacagaaagcaagtcacatcccgtatcatcagcacgcctgaacttattcactataac

SEQ ID NO: 472342 - DNA, 75 bp, synthetic construct
  source 1..75: mol_type = other DNA
tgaagcgctggcgacctgtgatgccctggttcaggcgcacggcgcgttgaaagggttggctgcgtcactgatgaa

SEQ ID NO: 472343 - DNA, 75 bp, synthetic construct
  source 1..75: mol_type = other DNA
gcgttgtggctgtcttggtgtcgtgtatcaggcaagcaattttgattatgtaggcagccacgaatcaacattcta

SEQ ID NO: 472344 - DNA, 75 bp, synthetic construct
  source 1..75: mol_type = other DNA
atcagacagctttatccgcaggtacagtgggttcagtcgtttgcagatgagcgttgtggctgtcttggtgtcgtg

SEQ ID NO: 472345 - DNA, 75 bp, synthetic construct
  source 1..75: mol_type = other DNA
ttgctggctggcccggctggtcgtcgtcaataaacattacagccatcgtttcgtaaataattcctaccttcatct

SEQ ID NO: 472346 - DNA, 75 bp, synthetic construct
  source 1..75: mol_type = other DNA
catacgctgcagtaccgcgcatatcacggcaaaggacaacgcctggttgtactcgctgtcgcatcagaccagtga

SEQ ID NO: 472347 - DNA, 75 bp, synthetic construct
  source 1..75: mol_type = other DNA
atgaaactggccctgacgctggaagccgacagcattaacgtgcaggcactgaacatgggacgcattgtcgttgac

SEQ ID NO: 472348 - DNA, 75 bp, synthetic construct
  source 1..75: mol_type = other DNA
ggacaagagaaccagaaaacgccttaacacaaagctattcaaagttcagccttacccaaaaccacaaactgttaa

SEQ ID NO: 472349 - DNA, 75 bp, synthetic construct
  source 1..75: mol_type = other DNA
ttctgacaaaaccctgcgttattgagtatgaagaccggattgtcggctatggttcaaaggagctgcgcgttgaaa

SEQ ID NO: 472350 - DNA, 75 bp, synthetic construct
  source 1..75: mol_type = other DNA
cccttaatccaaacaatggtgcacgcgtcgtaactggcacgcagaaccgcgaatatatggagcttaaccggttat

SEQ ID NO: 472351 - DNA, 75 bp, synthetic construct
  source 1..75: mol_type = other DNA
gcggcggatgaagtactggcaggacagcatgacgacgaattcccgctggcaatctggcagaccggctccggcacg

SEQ ID NO: 472352 - DNA, 75 bp, synthetic construct
  source 1..75: mol_type = other DNA
cgcattccactcggccatgatgacgccgatgctgcacgattttgcacagttgctggggcaaatcccgatgcacgc

SEQ ID NO: 472353 - DNA, 75 bp, synthetic construct
  source 1..75: mol_type = other DNA
acttggcttggagattgatattaccgatctctttaagtacccaacgctcacggcgttagcacattttctcgatac

SEQ ID NO: 472354 - DNA, 75 bp, synthetic construct
  source 1..75: mol_type = other DNA
catggcaaaccgctagatgcattaaacgttgcgcagagtgacctctgtgcatttcccgtcgcgccctcggtggta

SEQ ID NO: 472355 - DNA, 75 bp, synthetic construct
  source 1..75: mol_type = other DNA
cgctacatattgccaaacgctgcggagcacagattttcgccacagcaggtagcgagcagaaacgcgattacttgc

SEQ ID NO: 472356 - DNA, 75 bp, synthetic construct
  source 1..75: mol_type = other DNA
ctatgggccgcgctggcacagcgtacaacaactgtatggcaataccgcccagactcaggttttcgcaacgctggc

SEQ ID NO: 472357 - DNA, 75 bp, synthetic construct
  source 1..75: mol_type = other DNA
cgcttgctcagcgtgagggagtccgtgtggtactgagcagccgcacaggttatcaccatgaagcggtgcagcagg

SEQ ID NO: 472358 - DNA, 75 bp, synthetic construct
  source 1..75: mol_type = other DNA
cacccgttcccgggaccgggcctcggcgttcgtgtactgggcgaagtgaagaaagagtactgtgacctgctgcgc

SEQ ID NO: 472359 - DNA, 75 bp, synthetic construct
  source 1..75: mol_type = other DNA
cacgccgctgacgctggggcaggagatttctggctgggtagcgatgctggagcataatctcaaacatatcgagta

SEQ ID NO: 472360 - DNA, 75 bp, synthetic construct
  source 1..75: mol_type = other DNA
acaaacactgcgcagtgggcattgaaccgaatcgtgagcgaatcaatcaattactcaatgaatcgctgatgctgg

SEQ ID NO: 472361 - DNA, 75 bp, synthetic construct
  source 1..75: mol_type = other DNA
cttgaaaacgatcccagtccgggcctaccttattcagtcaacgaaagaaagtgcttttatactatcataccatca

SEQ ID NO: 472362 - DNA, 75 bp, synthetic construct
  source 1..75: mol_type = other DNA
taatgggcgatggtcgtaagtatgactgggttgtttctctgcgtgcggtcgaaaccatcgactttatgaccgcac

SEQ ID NO: 472363 - DNA, 75 bp, synthetic construct
  source 1..75: mol_type = other DNA
cctcggtcgtgtttccaaccgcattatcaatgaagtgaacggtatttcccgcgtggtgtatgacatcagcggcaa

SEQ ID NO: 472364 - DNA, 75 bp, synthetic construct
  source 1..75: mol_type = other DNA
tatcacaatatttagcctatttaaatcaataaagaaaaatgtcatgcaatttttctgtatcggcgctcttaaaaa

SEQ ID NO: 472365 - DNA, 75 bp, synthetic construct
  source 1..75: mol_type = other DNA
ccttgctgcatattttgctttacgaaatgagcgtaaaaagaaagcgcttgagattagaacaactcaactagatcg

SEQ ID NO: 472366 - DNA, 75 bp, synthetic construct
  source 1..75: mol_type = other DNA
aatacataaaataccgaaaatcaatgcttatgaaactgctttgattaataaaatacgaaattacaattcttatct

SEQ ID NO: 472367 - DNA, 75 bp, synthetic construct
  source 1..75: mol_type = other DNA
tctttgatatggccagagagagcgctggcggttgttgtgtcactcaggatgcgcaggcgggtaacgggtatttcc

SEQ ID NO: 472368 - DNA, 75 bp, synthetic construct
  source 1..75: mol_type = other DNA
aacggctttgaaaaacggcttgcagacctacgccggttcagggccatgcgggacttcatgagggcaggggaaatt

SEQ ID NO: 472369 - DNA, 75 bp, synthetic construct
  source 1..75: mol_type = other DNA
tgttagcaatatagaaacaattgaacgcaatttctctattttttcttttgaatggtatagagatcatcaggatga

SEQ ID NO: 472370 - DNA, 75 bp, synthetic construct
  source 1..75: mol_type = other DNA
tgaactgttaatggactatgcagagttacgtggtggcagtgctgctgatgctgaagcatggcgtgatgattatga

SEQ ID NO: 472371 - DNA, 75 bp, synthetic construct
  source 1..75: mol_type = other DNA
gacttcaccaacgatcccctgttacagggacgtttgttctcctataccgatacacaaatcagtcgtcttggcgga

SEQ ID NO: 472372 - DNA, 75 bp, synthetic construct
  source 1..75: mol_type = other DNA
aggatgcgcataaattccctgattttgttcatgcggtaaaaccagaaccacactgggcaattccacaagggcaaa

SEQ ID NO: 472373 - DNA, 75 bp, synthetic construct
  source 1..75: mol_type = other DNA
ctatttggcgattaaggatataaatattttatctaaaacactagagaaaaataatttatgcctaattattaaatt

SEQ ID NO: 472374 - DNA, 75 bp, synthetic construct
  source 1..75: mol_type = other DNA
acaatgtcagttttgaagaatggcatgaactgttaatggactatgcagagttacgtggtggaagtgctgctgatg

SEQ ID NO: 472375 - DNA, 75 bp, synthetic construct
  source 1..75: mol_type = other DNA
atggctgattttggttcaactaaatacaacgtcagttttgaagcatggcatgaactgttaatggattatgcagag

SEQ ID NO: 472376 - DNA, 75 bp, synthetic construct
  source 1..75: mol_type = other DNA
cctccatctcccgcctgatggccggactactcatgcccggcgctcaggagacgataaagcgtgagggttggatga

SEQ ID NO: 472377 - DNA, 75 bp, synthetic construct
  source 1..75: mol_type = other DNA
gtcagctaccgtgcacatggcctgcccgtattggagaatctgctggagcaggacttcagcgccagtggcccgaaa

SEQ ID NO: 472378 - DNA, 75 bp, synthetic construct
  source 1..75: mol_type = other DNA
tgactgtcatttcgctggtagcgaaaccgcgttatcgcggtgtggtttccggtatcggttacaccatcgtgaaag

SEQ ID NO: 472379 - DNA, 75 bp, synthetic construct
  source 1..75: mol_type = other DNA
ttgaatctttcatgctattcgacaaccgttgatcacaacgtcgccatgattgaagaattgcgcgcagatcctgat

SEQ ID NO: 472380 - DNA, 75 bp, synthetic construct
  source 1..75: mol_type = other DNA
agagtggaacgccagaacaacggtcaaacagcccgttattttgatgttgctatacctgtagaactcgtaagcgtc

SEQ ID NO: 472381 - DNA, 75 bp, synthetic construct
  source 1..75: mol_type = other DNA
ggaaagatatctggtcaatgcctggattgaaaatagtaatggtgtgaaagataaatcatttatcattacgccgcc

SEQ ID NO: 472382 - DNA, 75 bp, synthetic construct
  source 1..75: mol_type = other DNA
atcgggcagagttctgcatcaaagcgatgtgtcgtgtacttcgggttgcccgcagcggctggtatgtctggctca

SEQ ID NO: 472383 - DNA, 75 bp, synthetic construct
  source 1..75: mol_type = other DNA
cagctatatgtcgaaacgggtttctgcgatgaaaaacggaatctatggtcactcccgtttttgcaacaccgattt

SEQ ID NO: 472384 - DNA, 75 bp, synthetic construct
  source 1..75: mol_type = other DNA
gtatttaaagccaccgggcggcatctgcggcgctgggatgttttcagtgattttattacccttgccgccagtgag

SEQ ID NO: 472385 - DNA, 75 bp, synthetic construct
  source 1..75: mol_type = other DNA
aatctgcgcgaagtacagcgagagtgatatcagcaacctgcatacgcttttctgcctgatggtctgcgcactgga

SEQ ID NO: 472386 - DNA, 75 bp, synthetic construct
  source 1..75: mol_type = other DNA
gctgtctgataaacccgaatattaaacttggtgggcttatcagactggatcaggcctctgtgtatcgtcaggctc

SEQ ID NO: 472387 - DNA, 75 bp, synthetic construct
  source 1..75: mol_type = other DNA
atgtcgaaaaactggatgcgtcactttgaattattacttgttgatgataagggcgacgggataaaattttctgag

SEQ ID NO: 472388 - DNA, 75 bp, synthetic construct
  source 1..75: mol_type = other DNA
gaaagcgacggtaatctctacgttaacggtctgccaggcatgtcacagtctgccagcattaatactgacggtgat

SEQ ID NO: 472389 - DNA, 75 bp, synthetic construct
  source 1..75: mol_type = other DNA
ggtctggacttcaccaacgatccgctgttgcagggacgtttgttctcctataccgatacacaaatcagtcgtctt

SEQ ID NO: 472390 - DNA, 75 bp, synthetic construct
  source 1..75: mol_type = other DNA
gtgagtaatgatgacggcctgtacgtcagaaatgaccgtaaagtgacggtggaagggaagcaggagcataagacg

SEQ ID NO: 472391 - DNA, 75 bp, synthetic construct
  source 1..75: mol_type = other DNA
gatgacgatacggtcgaagacctataaaggaagcggctttaatgaactgcggtttgaagacgccacgggcggtga

SEQ ID NO: 472392 - DNA, 75 bp, synthetic construct
  source 1..75: mol_type = other DNA
gccgggtttcggcaatctggcgataccgcgggtgggccaggaggtgattgttgatttcctgaacggagacccgga

SEQ ID NO: 472393 - DNA, 75 bp, synthetic construct
  source 1..75: mol_type = other DNA
cgcagaagatgctgaaccgtgaatggcaggtggtacagagcattctgtcaggaagccagccgcaggcgttgcacg

SEQ ID NO: 472394 - DNA, 75 bp, synthetic construct
  source 1..75: mol_type = other DNA
gcgggagttctgtgtccagtacggggaaagcgacctggcgtttctgtcccggctgtgggcggaggaggggatttt

SEQ ID NO: 472395 - DNA, 75 bp, synthetic construct
  source 1..75: mol_type = other DNA
tacgggtgaagtttcactgggaccgttatcacgggatgacggaggagagttcgtgctgggtgcgtgtgtcgcagg

SEQ ID NO: 472396 - DNA, 75 bp, synthetic construct
  source 1..75: mol_type = other DNA
tgttacccacgatcgtcacaaggatgtagggaacgatcaaatcagtaagataataggaaaagataccgaagaagt

SEQ ID NO: 472397 - DNA, 75 bp, synthetic construct
  source 1..75: mol_type = other DNA
gcgacctgccgggaacgaagacgcagatgaccatccggtcaaaaacctataaaggaagcggatttaacgagctgc

SEQ ID NO: 472398 - DNA, 75 bp, synthetic construct
  source 1..75: mol_type = other DNA
ttgaatatcaaaggagaaagctatcggttgaaggaaaaaacgcagagctggagtgctggccaaaagcgcaacgcc

SEQ ID NO: 472399 - DNA, 75 bp, synthetic construct
  source 1..75: mol_type = other DNA
gatggctacatcactataaatggacatgaattgtcgttgggaacaacaggtgatcagttttataaagctgatggt

SEQ ID NO: 472400 - DNA, 75 bp, synthetic construct
  source 1..75: mol_type = other DNA
aacatggatacggaggtgctgaataatcggacgacggatgtgaaggctgaccacacggagaccattggtaacgac

SEQ ID NO: 472401 - DNA, 75 bp, synthetic construct
  source 1..75: mol_type = other DNA
tgagtgtggatgttgccagcgactcttttatgcagacggcggagatgctgctggagaagaaggcgacgctgacca

SEQ ID NO: 472402 - DNA, 75 bp, synthetic construct
  source 1..75: mol_type = other DNA
ccagcccattgtgacgggacgcacataccatgaagacaaccgttcgccgggcgacctgccggggacgaagacgca

SEQ ID NO: 472403 - DNA, 75 bp, synthetic construct
  source 1..75: mol_type = other DNA
atggctgattttggttcaactaaatataacgtcagttatgaagaatggcatgaattgttaatggactatgcagag

SEQ ID NO: 472404 - DNA, 75 bp, synthetic construct
  source 1..75: mol_type = other DNA
attatgaccatccgcatcacagggtcggcctttgccaccacggctactgaagtggtgatcctgaaaatgctgcat

SEQ ID NO: 472405 - DNA, 75 bp, synthetic construct
  source 1..75: mol_type = other DNA
gtgcgtcactattgcattgtcattagcgacgtttatgcaaatgttggattccactatttctaacgtcgcaatacc

SEQ ID NO: 472406 - DNA, 75 bp, synthetic construct
  source 1..75: mol_type = other DNA
gccggggttcggtaacctggcgataccgcgggtgggccaggaggtgattgttgacttcctgaacggggacccgga

SEQ ID NO: 472407 - DNA, 75 bp, synthetic construct
  source 1..75: mol_type = other DNA
gtttcactgggaccgttatcacgggatgacggaggagagttcgtgctgggtgagggtgtcacaggcgtgggcggg

SEQ ID NO: 472408 - DNA, 75 bp, synthetic construct
  source 1..75: mol_type = other DNA
tgggtggctcgtttgtggtcatccattcagggggcgtggacatcgtcgggccgaaaatcagtctcaatagcggcg

SEQ ID NO: 472409 - DNA, 75 bp, synthetic construct
  source 1..75: mol_type = other DNA
ccgcgggtgggccaggaggtgattgttgattttctgaacggcgacccggaccagccgataatcatggggcggacc

SEQ ID NO: 472410 - DNA, 75 bp, synthetic construct
  source 1..75: mol_type = other DNA
gggatgaaatcgtactggagagtggcggtaaaatcaccctgaaggtgggtggttcgtttgtggtcatccattcag

SEQ ID NO: 472411 - DNA, 75 bp, synthetic construct
  source 1..75: mol_type = other DNA
gggatatcgtgctggagagcagcagccggataagcctgaaggtgggtggctcgtttatcgtcattcagccgggcg

SEQ ID NO: 472412 - DNA, 75 bp, synthetic construct
  source 1..75: mol_type = other DNA
aggcttgccagataataaatttgccaatgcctcgagtatgagtaatttttttcgtaccttgtcaggatcagttgg

SEQ ID NO: 472413 - DNA, 75 bp, synthetic construct
  source 1..75: mol_type = other DNA
ccctgatttcgaccagaatggtcttcagcctgtttcgcatgcgtcagatgtggatgtttgttctctacacgattg

SEQ ID NO: 472414 - DNA, 75 bp, synthetic construct
  source 1..75: mol_type = other DNA
acggcggggatgctgttcagcgttaaccccgagtgggtgttctggatgggctcggccgccgcgctggtactggtt

SEQ ID NO: 472415 - DNA, 75 bp, synthetic construct
  source 1..75: mol_type = other DNA
taagcagaaaatgattaaaggcataattatgctaagctcacctgctgatgaatcgttttttgcgcaactcgataa

SEQ ID NO: 472416 - DNA, 75 bp, synthetic construct
  source 1..75: mol_type = other DNA
tgacctcttcgggttttgatgccattatggtgatttctacccgttcgaccaaaactacggcgggtaatccgtttt

SEQ ID NO: 472417 - DNA, 75 bp, synthetic construct
  source 1..75: mol_type = other DNA
gcacgcttatgttcaacacacctttggcggcggcggtagcttcctgctggcggcgttaatcttcatcgcttgcct

SEQ ID NO: 472418 - DNA, 75 bp, synthetic construct
  source 1..75: mol_type = other DNA
cagcacggcaattattaagtcagtcaccgttgcctgaggcggtgtttgccactgacagcctgaaattaatgagca

SEQ ID NO: 472419 - DNA, 75 bp, synthetic construct
  source 1..75: mol_type = other DNA
aatccttctttgcacaactcgacaaatacgagatcccggtggtggtgatcggtaaagttgaaggtcaatacagcc

SEQ ID NO: 472420 - DNA, 75 bp, synthetic construct
  source 1..75: mol_type = other DNA
gagttaggtcaacaaagctgcgagttattattccgcttaattgccggaaaaccgtcaccacaaaatattaccgtt

SEQ ID NO: 472421 - DNA, 75 bp, synthetic construct
  source 1..75: mol_type = other DNA
atgagattagtcgtcggttgttattactggagttaaagctgcgacaagcaggattgagcaccgattttttacgtg

SEQ ID NO: 472422 - DNA, 75 bp, synthetic construct
  source 1..75: mol_type = other DNA
accgatgggataaggctgtctgattggtattataaatataagaagtcatcagagagtaacgtaaaggatttgcca

SEQ ID NO: 472423 - DNA, 75 bp, synthetic construct
  source 1..75: mol_type = other DNA
aaaagcctggagtgaatgggaaaagaacggtaccccaggcgagcaacgcaatatcgccttcaataggctgaaaat

SEQ ID NO: 472424 - DNA, 75 bp, synthetic construct
  source 1..75: mol_type = other DNA
gcatgcttacgttcagcacacttttggcggcggcggtagtttcttactggcggcgttaattttcattgcctgcct

SEQ ID NO: 472425 - DNA, 75 bp, synthetic construct
  source 1..75: mol_type = other DNA
attatcgtttctatgattttgaaagaaatgaaaaagagatgtcattactttatcaaaattttctttttgaatttt

SEQ ID NO: 472426 - DNA, 75 bp, synthetic construct
  source 1..75: mol_type = other DNA
acgaatgggctcagaaaaatttcattctcaaaatctttatcaactgatgaattacttatggtcgttaaagcctga

SEQ ID NO: 472427 - DNA, 75 bp, synthetic construct
  source 1..75: mol_type = other DNA
tgaatctgccgcgtctgcgaccggtaaagcgcacgttatcaaatctcaccacaacgtgggtggcctgccgaaaga

SEQ ID NO: 472428 - DNA, 75 bp, synthetic construct
  source 1..75: mol_type = other DNA
tctgcggcttaaacgcctggggctgtcaaaaacgttccgtcgtctggttttcacactcaacctacgttatggcgt

SEQ ID NO: 472429 - DNA, 75 bp, synthetic construct
  source 1..75: mol_type = other DNA
tctgcggcttaaacgcctggggctgtcaaaaacgttccgtcgtctggttatcacactaaaccaacgttatggcgt

SEQ ID NO: 472430 - DNA, 75 bp, synthetic construct
  source 1..75: mol_type = other DNA
cgccaccatttgctgccctgaccggcatacactgcagtaccgcgcatatcactgcaaaggacaacgcctggctgt

SEQ ID NO: 472431 - DNA, 75 bp, synthetic construct
  source 1..75: mol_type = other DNA
gtctggttatcacactaacccaacgttatggcgtcagtctcattcatctggatgccagcgctgaatgcctgccgg

SEQ ID NO: 472432 - DNA, 75 bp, synthetic construct
  source 1..75: mol_type = other DNA
gtctggttatcacactaaacccacgttatggcgtcagtctcattcatctggatgccagcgctgaatgcctgccgg

SEQ ID NO: 472433 - DNA, 75 bp, synthetic construct
  source 1..75: mol_type = other DNA
tctgcggcttaaacgcctggggctgtcaaaaacgttccgtcgtctggttctcacacttaacctacgttatggcgt

SEQ ID NO: 472434 - DNA, 75 bp, synthetic construct
  source 1..75: mol_type = other DNA
gtgcgctcccttttatcttctcggaaagcccgaacctcacgattaccgatgcgttttttgaatctttctctggcc

SEQ ID NO: 472435 - DNA, 75 bp, synthetic construct
  source 1..75: mol_type = other DNA
ataacctggggccagggcttggcgtggttgctgataactttaccagcatgaacccggtggctaaatggatcctga

SEQ ID NO: 472436 - DNA, 75 bp, synthetic construct
  source 1..75: mol_type = other DNA
gcgtttcctggctgcgctggcgggtgaaaacgatccggaagctaaacgtaaaatcatcggtcgcgtcttcgttga

SEQ ID NO: 472437 - DNA, 75 bp, synthetic construct
  source 1..75: mol_type = other DNA
agttggattgggcattcggtagaatagctcaaaatatagcaacagaattaagtagctttaatgtaaaaatagttt

SEQ ID NO: 472438 - DNA, 75 bp, synthetic construct
  source 1..75: mol_type = other DNA
ggcggtggcctgaaggtgatccgcatcctgctgctgtttaagcaggggaaccgtgagctgaaacgactggtgcat

SEQ ID NO: 472439 - DNA, 75 bp, synthetic construct
  source 1..75: mol_type = other DNA
ttctggaccgtgctgggtagtgtcggtgcgctcccttttatcttctcggaaagcccgaacctcacgattaccgat

SEQ ID NO: 472440 - DNA, 75 bp, synthetic construct
  source 1..75: mol_type = other DNA
attacgggatgatggattgtggtttttgcaaaaagcccagcgcggcgcaaaaccgctggaaaaaaccatttgcgc

SEQ ID NO: 472441 - DNA, 75 bp, synthetic construct
  source 1..75: mol_type = other DNA
gagcagggctataaaggcaacggcttcaatccggcggaagggctgattaacgaactggctggtgcctggaaacac

SEQ ID NO: 472442 - DNA, 75 bp, synthetic construct
  source 1..75: mol_type = other DNA
tttaaagacaccggccatgtcgccatcattacccaattacgcggcaataaagtccgtattgcggaacagaacgtg

SEQ ID NO: 472443 - DNA, 75 bp, synthetic construct
  source 1..75: mol_type = other DNA
tttttattgttagttatcacaatgtccggtgaaaactcatcaatatctaaatcgcttaatgcattagaaaaagaa

SEQ ID NO: 472444 - DNA, 75 bp, synthetic construct
  source 1..75: mol_type = other DNA
gtggacggtaaatatatccaggtatgtactttcaccgttggcggcaactatggcgggacttgcttgcgcggcgat

SEQ ID NO: 472445 - DNA, 75 bp, synthetic construct
  source 1..75: mol_type = other DNA
aaacgcgtatcttgcgcgggctggatgaactgggctgggatgctgccgggcaactgattgatggggaagggcggc

SEQ ID NO: 472446 - DNA, 75 bp, synthetic construct
  source 1..75: mol_type = other DNA
cattccgaaaatcctctggccacgtttgcgtctctcctggcagcgtcgccgtcaccatatgatcaccggtcgtat

SEQ ID NO: 472447 - DNA, 75 bp, synthetic construct
  source 1..75: mol_type = other DNA
ggcgttatttctggcgtgtgacgttgccggtggatgccggtgctcagtggcagacatgttcggacacctgtaaca

SEQ ID NO: 472448 - DNA, 75 bp, synthetic construct
  source 1..75: mol_type = other DNA
gcggcagccagtgtgacccgcagcaaacaacacaaattattacagactgcccgcttgtggctcgcgcgtcataat

SEQ ID NO: 472449 - DNA, 75 bp, synthetic construct
  source 1..75: mol_type = other DNA
gatgataaaaatgatgatatatcaagcaagcttacattgacggtccgagtaaactcggcttacgttaatcgagta

SEQ ID NO: 472450 - DNA, 75 bp, synthetic construct
  source 1..75: mol_type = other DNA
tttttattgctagttattactatgtctggtgagaactcctcaatttcgaaatcacttaatgcattagacaaagcc

SEQ ID NO: 472451 - DNA, 75 bp, synthetic construct
  source 1..75: mol_type = other DNA
gaaccactggtactcagcagggcgcaattgcactcaggtctgccgacaacggaccccatgaccatgaacagcgca

SEQ ID NO: 472452 - DNA, 75 bp, synthetic construct
  source 1..75: mol_type = other DNA
aattgcactcaggtctgccgacaacggaccccatgaccatgaacagcgcacagttgcagacgggatacaggaccc

SEQ ID NO: 472453 - DNA, 75 bp, synthetic construct
  source 1..75: mol_type = other DNA
agtcgtgcacgtccatttgtccatatcatgcaggacaaagatatcgaggagaactatcacgcgcagtttatggag

SEQ ID NO: 472454 - DNA, 75 bp, synthetic construct
  source 1..75: mol_type = other DNA
tgaaatgcctctggatgttgctccacaagataaacagttgattgaactgcctgaactaccgcagccggaaagcac

SEQ ID NO: 472455 - DNA, 75 bp, synthetic construct
  source 1..75: mol_type = other DNA
ccaggcagaagcagtgctgttgcagtgtacggcagatcggattaccgacgcggtactgattacgactgcccacgc

SEQ ID NO: 472456 - DNA, 75 bp, synthetic construct
  source 1..75: mol_type = other DNA
cggtacagtatgaaggcggcggagccgacacctccgcaaccgatattatttgcccgatgtacgcgcgcgtggatg

SEQ ID NO: 472457 - DNA, 75 bp, synthetic construct
  source 1..75: mol_type = other DNA
acgctgtgcgaccgctacggcctgtatgtggtggatgaagctaatattgaaactcacggtatggtgccgatgaac

SEQ ID NO: 472458 - DNA, 75 bp, synthetic construct
  source 1..75: mol_type = other DNA
tccgccgatcctttccgtccggtacagtatgaaggcggtggagcagacacctcggcaaccgatattatctaccca

SEQ ID NO: 472459 - DNA, 75 bp, synthetic construct
  source 1..75: mol_type = other DNA
gaaattatcgatgagcggggtcgttatgccgatcgcgtcacgctgcgcctgaacgtcgaaaatccggccctgtgg

SEQ ID NO: 472460 - DNA, 75 bp, synthetic construct
  source 1..75: mol_type = other DNA
tcgaacgctggaaggcggcgggccattaccaggccgaagcggcgttgttgcagtgcacggcagatacacttgccg

SEQ ID NO: 472461 - DNA, 75 bp, synthetic construct
  source 1..75: mol_type = other DNA
gtggttatgccgatcgcgtcacgctacgtctgaacgtcgaaaacccggcgctgtggagcgccgaaatcccgaatc

SEQ ID NO: 472462 - DNA, 75 bp, synthetic construct
  source 1..75: mol_type = other DNA
ttgcgtctctcctggcagcgtcgccgtcaccatatgattaccggtcgtatggatttctgtatggacgaacgtggc

SEQ ID NO: 472463 - DNA, 75 bp, synthetic construct
  source 1..75: mol_type = other DNA
caccgccgacggtacgctgattgaagcggaagcctgtgatgttggcttccgtcaggtacacattgaaaatggtct

SEQ ID NO: 472464 - DNA, 75 bp, synthetic construct
  source 1..75: mol_type = other DNA
ttccatgttgctacccattttaatgacgatttcagccgcgccgtgctggaggctgaagtgcacatgggtggcgag

SEQ ID NO: 472465 - DNA, 75 bp, synthetic construct
  source 1..75: mol_type = other DNA
gctgaatatcgacggtttccatatggggattggtggcgacgactcctggagcccgtcagtgtcggcggaattcca

SEQ ID NO: 472466 - DNA, 75 bp, synthetic construct
  source 1..75: mol_type = other DNA
cgttatggcgtcagtctcattcatctggatgccagtgccagatgcctgccgggtttacccactttcaactggtaa

SEQ ID NO: 472467 - DNA, 75 bp, synthetic construct
  source 1..75: mol_type = other DNA
tcgtcacactcatccggcgttatggtgtcagtcccattcatctggatgccagtgccggatatctgccgggtttac

SEQ ID NO: 472468 - DNA, 75 bp, synthetic construct
  source 1..75: mol_type = other DNA
ggttctgcggcttaagcgcctggggctgtcaaaaacgttccgtcgtctggtcgtcacactcatccggcgttatgg

SEQ ID NO: 472469 - DNA, 75 bp, synthetic construct
  source 1..75: mol_type = other DNA
cactggctggcccgcaaataccgtacaggtatcgcttccctgatgaggtggtggtgtaaatcaccgaaaccgggt

SEQ ID NO: 472470 - DNA, 75 bp, synthetic construct
  source 1..75: mol_type = other DNA
tgattaacgtggtctgcgataatggctactcccttcgtgttgttgatgaatttgaccggacctcaacagacagca

SEQ ID NO: 472471 - DNA, 75 bp, synthetic construct
  source 1..75: mol_type = other DNA
gagggtatctgttacgtaccgatgctttgtcgtatccggtgctacaccttaaacgtctgggcctgtcaaaaacct

SEQ ID NO: 472472 - DNA, 75 bp, synthetic construct
  source 1..75: mol_type = other DNA
tctgcgacttaaacgcctaggcctgtcaaaaacgtttcgtcgtctgatcgtcacgctcattcgccgttatggcgt

SEQ ID NO: 472473 - DNA, 75 bp, synthetic construct
  source 1..75: mol_type = other DNA
cattttacaggtaccggttatctgttacgtactgatgcgtggtcgtatccggttctgcggcttaaacgcctgggc

SEQ ID NO: 472474 - DNA, 75 bp, synthetic construct
  source 1..75: mol_type = other DNA
atggtattgagcttgctgaactgattaacgtggtctgcgataacggtcactcccttcgtgttgttgatgaatctg

SEQ ID NO: 472475 - DNA, 75 bp, synthetic construct
  source 1..75: mol_type = other DNA
cagacagtattaacgtgcaggcactgaacatggggcgaatcgtcgttgacgtcgatggtgttaatctcactgaac

SEQ ID NO: 472476 - DNA, 75 bp, synthetic construct
  source 1..75: mol_type = other DNA
tacgtaccgatgcgtggtcatacccggttctgcggcttaaacgcctgggcctgtcaaaaacgttccgccgtctgg

SEQ ID NO: 472477 - DNA, 75 bp, synthetic construct
  source 1..75: mol_type = other DNA
taagcaggcttgctctccgtttgaatttgatgaatacgctgaagcaatacagtctgctacgaaaaatatattata

SEQ ID NO: 472478 - DNA, 75 bp, synthetic construct
  source 1..75: mol_type = other DNA
cagcccgcgtgcgccgcagtatgtctttgaagcaggcgtaccggtattcggcgtttgctatggcatgcagaccat

SEQ ID NO: 472479 - DNA, 75 bp, synthetic construct
  source 1..75: mol_type = other DNA
tcgtctggttgtcacgcttagccggcgttatggcgtccgtctcattcatctggttgccagcgccgaatttctgcc

SEQ ID NO: 472480 - DNA, 75 bp, synthetic construct
  source 1..75: mol_type = other DNA
tcgtctggttgtcacgcttagccggagttatggcgtccgtctcattcatctggttgccagcgccgcatttctgcc

SEQ ID NO: 472481 - DNA, 75 bp, synthetic construct
  source 1..75: mol_type = other DNA
tcgtctggttgtcacacttagccggggttatggcgtccgtctcattcatctggttgccagcgccggatttctgcc

SEQ ID NO: 472482 - DNA, 75 bp, synthetic construct
  source 1..75: mol_type = other DNA
ggcgttatggcgtcagtctcattcatctggatgccagcgctgaatgcctgccgggtttacccactttcgactggt

SEQ ID NO: 472483 - DNA, 75 bp, synthetic construct
  source 1..75: mol_type = other DNA
gaacatggggcgaattgtcgctgacgtcgatggtgttaatctcactggactgattaacaaggtcgctgaaaacgg

SEQ ID NO: 472484 - DNA, 75 bp, synthetic construct
  source 1..75: mol_type = other DNA
catacgctgcagtaccgcacatattacggcaaaggacaacgcctggctgtactcgctgtcgcatcagaccagtga

SEQ ID NO: 472485 - DNA, 75 bp, synthetic construct
  source 1..75: mol_type = other DNA
ctactcccttcgtgttgttgatgaatctgaccggacctcaacagacagctcccccccctctgctgccctgagcgg

SEQ ID NO: 472486 - DNA, 75 bp, synthetic construct
  source 1..75: mol_type = other DNA
cgcctggggctgtcaaaaacgttccgtcgtctggttgtcacactcatccaacgttatggcgtcagtctcattcat

SEQ ID NO: 472487 - DNA, 75 bp, synthetic construct
  source 1..75: mol_type = other DNA
ggcgacgataaagtgatcctcggcctctctggtggcgtggattcctccgtaaccgcaatgctgctgcaccgcgca

SEQ ID NO: 472488 - DNA, 75 bp, synthetic construct
  source 1..75: mol_type = other DNA
actcgctgtcgcatcagacgaatgacaccggcgaatcagaatggattcattttacaggcagcggatatctgttac

SEQ ID NO: 472489 - DNA, 75 bp, synthetic construct
  source 1..75: mol_type = other DNA
ctgcggcttaaacgcctggggctgtcaaaaacgttccgtcgtctggttatcacacttacccgacgttatggcgtc

SEQ ID NO: 472490 - DNA, 75 bp, synthetic construct
  source 1..75: mol_type = other DNA
cgttggtgaatcggaatggattcatttcacaggtagcggatatctgttacgtaccgatgcgtggtcatacccggt

SEQ ID NO: 472491 - DNA, 75 bp, synthetic construct
  source 1..75: mol_type = other DNA
ttctgcggtttaaacgcctggggctgtcaaaaacgttccgtcgtctggtcgtcacactcacccgacgttatggcg

SEQ ID NO: 472492 - DNA, 75 bp, synthetic construct
  source 1..75: mol_type = other DNA
ttattcactccgtgtggtggatgactccgaccaacagtcaacctgcacaccaccaccgttaacaacccttaccgg

SEQ ID NO: 472493 - DNA, 75 bp, synthetic construct
  source 1..75: mol_type = other DNA
aagccgacagcgttaacgtacaggcactgaacatggggcgaattgtcgttgacgtcgatggcgttgagcttgccg

SEQ ID NO: 472494 - DNA, 75 bp, synthetic construct
  source 1..75: mol_type = other DNA
cttcgtgttgttgatgaatctgaccggacatcagcagagcgcacgccaccatctgcgacccttaccggcatacgc

SEQ ID NO: 472495 - DNA, 75 bp, synthetic construct
  source 1..75: mol_type = other DNA
caccggcgaatcagaatggattcattttaccggcagcggatatctgttacgtatcggtgcgtggtcgtacccggt

SEQ ID NO: 472496 - DNA, 75 bp, synthetic construct
  source 1..75: mol_type = other DNA
atgaaactttccctgatgctggaagctgacagcgttaacgtacaggcactgaacatggggcgaattgtcgttgac

SEQ ID NO: 472497 - DNA, 75 bp, synthetic construct
  source 1..75: mol_type = other DNA
aaattacagttttgcttaatgcatttgttttggaatacaattcccggctagaattaattaaagaaaagatgtata

SEQ ID NO: 472498 - DNA, 75 bp, synthetic construct
  source 1..75: mol_type = other DNA
gtctggttgtcacactaacccgacgttatggcgtcagtctcattcatctggatgccagcgctgaatgcctgccgg

SEQ ID NO: 472499 - DNA, 75 bp, synthetic construct
  source 1..75: mol_type = other DNA
gtctggttctcacactaaccccacgttatggcgtcagtctcattcatctggatgccagcgctgaatgcctgccgg

SEQ ID NO: 472500 - DNA, 75 bp, synthetic construct
  source 1..75: mol_type = other DNA
gtctggttttcacactaaccctacgttatggcgtcagtctcattcatctggatgccagcgctgaatgcctgccgg

SEQ ID NO: 472501 - DNA, 75 bp, synthetic construct
  source 1..75: mol_type = other DNA
atggctaagtcactgttcagggcgctggtcgccctgtcttttctcgcgccactgtggctcaacgccgcgccgcgc

SEQ ID NO: 472502 - DNA, 75 bp, synthetic construct
  source 1..75: mol_type = other DNA
tcccccgcatcgtgatttcaacgataaatgggacgatgacgacgactggccgaagaaggatcaaccgaagaagta

SEQ ID NO: 472503 - DNA, 75 bp, synthetic construct
  source 1..75: mol_type = other DNA
gtctggttgtcacactaagcccacgttatggcgtcagtctcattcatctggatgccagcgctgaatgcctgccgg

SEQ ID NO: 472504 - DNA, 75 bp, synthetic construct
  source 1..75: mol_type = other DNA
atctgttacgtaccgatgcatggtcgtacccggttctgcggcttaaacgcctgggcctgtccagaacgttccgtc

SEQ ID NO: 472505 - DNA, 75 bp, synthetic construct
  source 1..75: mol_type = other DNA
gatgaatctgaccgggtctcaacagactgcacgccaccatttgctgccctgaccggcatacgctgcagtaccgcg

SEQ ID NO: 472506 - DNA, 75 bp, synthetic construct
  source 1..75: mol_type = other DNA
caacccttgccagcatacgatgcagtaccgcacatatcacggaaacggacaacgcctggttgtactcgctgtcac

SEQ ID NO: 472507 - DNA, 75 bp, synthetic construct
  source 1..75: mol_type = other DNA
caacccttccccgcatacgctgcagtaccgcacatatcacggaaacggacaacgcctggttgtactcgctgtcac

SEQ ID NO: 472508 - DNA, 75 bp, synthetic construct
  source 1..75: mol_type = other DNA
atgaaactttccctgatgctggaagccgacagcattaatgtgcaggcactgaacatggggcgaattgtcgttgac

SEQ ID NO: 472509 - DNA, 75 bp, synthetic construct
  source 1..75: mol_type = other DNA
caccaccgtttacaatccttgccggcatacgctgcagtaccgcacatatcacggaaacagacaacgcctggctgt

SEQ ID NO: 472510 - DNA, 75 bp, synthetic construct
  source 1..75: mol_type = other DNA
gaacatggggcgcattgtcgttgacattgatggtgtgaatctcgctgaactgattaaccatgtcgctgaaaacgg

SEQ ID NO: 472511 - DNA, 75 bp, synthetic construct
  source 1..75: mol_type = other DNA
tgacgtcgatggtgttaatctcagtgaactgattaacaaagtctctgaaaacggttattcactccgggtggtgga

SEQ ID NO: 472512 - DNA, 75 bp, synthetic construct
  source 1..75: mol_type = other DNA
tgacgtcgatggtgttaatctcactgaactgattaacaaagtccctgaaaacggttattcactccgggtggttga

SEQ ID NO: 472513 - DNA, 75 bp, synthetic construct
  source 1..75: mol_type = other DNA
tgacgtcgatggtgttaatctcattgaactgattaacaaagtcgctgaaaacggttattcactccgggtggtgga

SEQ ID NO: 472514 - DNA, 75 bp, synthetic construct
  source 1..75: mol_type = other DNA
caacccttaccggcatacgatgcagtaccgcacatatcacggaaacggacaacgcctggttgtactcgctgtcac

SEQ ID NO: 472515 - DNA, 75 bp, synthetic construct
  source 1..75: mol_type = other DNA
caacccttacctgcatacgttgcagtaccgcacatatcacggaaacggacaacgcctggttgtactcgctgtcac

SEQ ID NO: 472516 - DNA, 75 bp, synthetic construct
  source 1..75: mol_type = other DNA
caacccttaccagcatacggtgcagtaccgcacatatcacggaaacggacaacgcctggttgtactcgctgtcac

SEQ ID NO: 472517 - DNA, 75 bp, synthetic construct
  source 1..75: mol_type = other DNA
tctgaatgttgaaggcgctgtgaaagaagctgctattgctgccctggctgcaaaaggtttccagatggctggttt

SEQ ID NO: 472518 - DNA, 75 bp, synthetic construct
  source 1..75: mol_type = other DNA
ggcgataacgacattctcgaccagaactaccgaaacgaaggattggtacggcttgcgcctggaacagagcctcaa

SEQ ID NO: 472519 - DNA, 75 bp, synthetic construct
  source 1..75: mol_type = other DNA
actaccgtaacgagggattggtgcgtcttgcgcccggaacagagcctcaacgtggggacatcttctttatccaat

SEQ ID NO: 472520 - DNA, 75 bp, synthetic construct
  source 1..75: mol_type = other DNA
ggaggcccaagttctactgcagatatagaactgatcaaagttgttggcgtacatggtcctgtacatgcaacctat

SEQ ID NO: 472521 - DNA, 75 bp, synthetic construct
  source 1..75: mol_type = other DNA
ttccggtacgtaagagctacacagacattgtgagtgctgcgaccgacaattttgcagcagtagacagtaaagtgt

SEQ ID NO: 472522 - DNA, 75 bp, synthetic construct
  source 1..75: mol_type = other DNA
agtgaagcagcaaaaacagcattaattaaaaaaggcttccagcttgaaggcttccattctgttttcacttcttaa

SEQ ID NO: 472523 - DNA, 75 bp, synthetic construct
  source 1..75: mol_type = other DNA
gcgctatggacgaaatcaaggttatcaaccgtggagggcaggcatattgcgtaaaagatggggtgcaagttaatc

SEQ ID NO: 472524 - DNA, 75 bp, synthetic construct
  source 1..75: mol_type = other DNA
gcgcgaacatccatcaatcaaactttgctctttgacgcacatatgtgacgagttagccgctcagcttcgcaaagg

SEQ ID NO: 472525 - DNA, 75 bp, synthetic construct
  source 1..75: mol_type = other DNA
atgaatcttttagttaaaagaaacgttgaagagtttttaagattgttgggaaatgatttttatttatttgataac

SEQ ID NO: 472526 - DNA, 75 bp, synthetic construct
  source 1..75: mol_type = other DNA
cgagcatcctgctatccagatttgctctttaacgcacgtatgcgacgagttcgccgcccagcttcgtcaggggga

SEQ ID NO: 472527 - DNA, 75 bp, synthetic construct
  source 1..75: mol_type = other DNA
tatggagcatatgcagtcgagcggttcgtcaacatttggagattgctacatatcacttaacgagttcgccgcaga

SEQ ID NO: 472528 - DNA, 75 bp, synthetic construct
  source 1..75: mol_type = other DNA
caaaggtgatgagcttgcagctgcgcaccagtttgcgccagaaacaccagccaccgacgctttcctggctgaagt

SEQ ID NO: 472529 - DNA, 75 bp, synthetic construct
  source 1..75: mol_type = other DNA
actgccttcctgtatcaatctgattggaggcccaagttctactgcagatatagaactgatcaaagttgttggtgt

SEQ ID NO: 472530 - DNA, 75 bp, synthetic construct
  source 1..75: mol_type = other DNA
gttggtgtctggatgggaatgtttgccgactgggctgtgcgggccgtgctgttttactggcgaatggttactgga

SEQ ID NO: 472531 - DNA, 75 bp, synthetic construct
  source 1..75: mol_type = other DNA
tggttttatggtgcgacgctttcggcaatgcactttgtgcgcgttctggataacgccatcggaggtaaagcgtga

SEQ ID NO: 472532 - DNA, 75 bp, synthetic construct
  source 1..75: mol_type = other DNA
ttatagaatttgcaacatcgttagcctataagcacaggttaaagctaccaaatggtattgaggcatattttgcta

SEQ ID NO: 472533 - DNA, 75 bp, synthetic construct
  source 1..75: mol_type = other DNA
ctgaacagtcactgatcaccgtagaaggcgataaagcttctatggaagttccggctccgtttgcaggcgtcgtga

SEQ ID NO: 472534 - DNA, 75 bp, synthetic construct
  source 1..75: mol_type = other DNA
ttcctgcagtttttctcgctgtatatcctgccggttatttgtattgctgcaggttatgtgttcttttctctgctg

SEQ ID NO: 472535 - DNA, 75 bp, synthetic construct
  source 1..75: mol_type = other DNA
tccgtttatagagaaagtacagccaatgtacgcaaacttcgctaaggataacccttcccttgccccactgctggc

SEQ ID NO: 472536 - DNA, 75 bp, synthetic construct
  source 1..75: mol_type = other DNA
ccgacgcccaattttaatggtggcgtgaacgttatgttttgggtgattttcatcctgatatttgtggggcttgcg

SEQ ID NO: 472537 - DNA, 75 bp, synthetic construct
  source 1..75: mol_type = other DNA
attaaagtaactgtaatgccttcaacgaatgaaatccagctcagtggtaaaatccctaaatcggtaagagtttca

SEQ ID NO: 472538 - DNA, 75 bp, synthetic construct
  source 1..75: mol_type = other DNA
ggtgggcctagttcaaccgctgatatcgagttgattaaagttgttggagtacatggtcccgtacatgcaacctat

SEQ ID NO: 472539 - DNA, 75 bp, synthetic construct
  source 1..75: mol_type = other DNA
tggaggatgaaaatcagcgcctgaagaaactggtcgcagatttgagtctggacaaggagatgctgcaggaggtac

SEQ ID NO: 472540 - DNA, 75 bp, synthetic construct
  source 1..75: mol_type = other DNA
tcggtggctaaacgatctaaggagtttctggacaaactgcaggagccaacggcagaaatgataaaaaaggcgagg

SEQ ID NO: 472541 - DNA, 75 bp, synthetic construct
  source 1..75: mol_type = other DNA
gtattgcgcggtatctgttcccgcctgggagtaccaaatcgcaaagccgacatcgttgtggaccagcagtcacag

SEQ ID NO: 472542 - DNA, 75 bp, synthetic construct
  source 1..75: mol_type = other DNA
tatcgatgttttttttctaatgaatacttttcaacagcatgtgcagattattgagcgcgttcgcaggatgacatc

SEQ ID NO: 472543 - DNA, 75 bp, synthetic construct
  source 1..75: mol_type = other DNA
ggcaagcttttagacacaaaagacctatctttgaaaatcgatagtataaatgctcctgaaggtactgaattcata

SEQ ID NO: 472544 - DNA, 75 bp, synthetic construct
  source 1..75: mol_type = other DNA
cggcggcaccgttgaacaggctccgctctcgccgctgttgcgggccgcgatagacgccttcgacgaagccgatcc

SEQ ID NO: 472545 - DNA, 75 bp, synthetic construct
  source 1..75: mol_type = other DNA
cgcgcgcgatttgccgggaaaaaggtttatgagattgccatctcccaggcgctgaaaaatatcgaccagattttc

SEQ ID NO: 472546 - DNA, 75 bp, synthetic construct
  source 1..75: mol_type = other DNA
gatgaaaatgggttaacacacatccgttttggcggtagttttgcgggtcataatttgatatttaagggaaacttt

SEQ ID NO: 472547 - DNA, 75 bp, synthetic construct
  source 1..75: mol_type = other DNA
tatgagtataacggtcaaacaatgtactggagtggacaaggtcgtcggcctaatgttattgcagaagcaataaaa

SEQ ID NO: 472548 - DNA, 75 bp, synthetic construct
  source 1..75: mol_type = other DNA
atgatcgacgaacgtgaatttggcaaaaaattacagacgagcaggaaaaacgattcaggagagtctaataaatac

SEQ ID NO: 472549 - DNA, 75 bp, synthetic construct
  source 1..75: mol_type = other DNA
tactgattctacggcagtgtgcgggaacaatgacggtggaatgcatcgggatgcttattggtcgtagtgaggctg

SEQ ID NO: 472550 - DNA, 75 bp, synthetic construct
  source 1..75: mol_type = other DNA
acaggaaagaaagtactttttatcgacgcagatctgagaaaagggcatgtgcataaaatgtttggcggcaacaat

SEQ ID NO: 472551 - DNA, 75 bp, synthetic construct
  source 1..75: mol_type = other DNA
ttacggggtgattatcaccagtcagccaaattctcacagcgtgatattgagctggcgcggcaactgcatcagcgt

SEQ ID NO: 472552 - DNA, 75 bp, synthetic construct
  source 1..75: mol_type = other DNA
tgatgtccgacctcatgggcgggttgctgcacttcctgaacaccattcctccgtcaatgaagtttgcggcggcgt

SEQ ID NO: 472553 - DNA, 75 bp, synthetic construct
  source 1..75: mol_type = other DNA
ttgttttggttcttcccgataatcctgggatacaccgcggggaaacgcttcggtgatgctgccaacttactgatt

SEQ ID NO: 472554 - DNA, 75 bp, synthetic construct
  source 1..75: mol_type = other DNA
gtgagctggcggggatggggaagggcagaagtcatgatactccgccagtgcgccggaactatgacggtcgagagt

SEQ ID NO: 472555 - DNA, 75 bp, synthetic construct
  source 1..75: mol_type = other DNA
ttcgtttaaacgaaacggcgtcggaaggaaaaccacaaatttttaaaacattaagaaatatcgatcttaatctcc

SEQ ID NO: 472556 - DNA, 75 bp, synthetic construct
  source 1..75: mol_type = other DNA
caacaacattaatcatattcttgaggaagcgtcacaggcgactcaaacggcgatggaaattgcagggaaaaggtg

SEQ ID NO: 472557 - DNA, 75 bp, synthetic construct
  source 1..75: mol_type = other DNA
gcatcgagggatgggactggctgatgagctcatcaaacatcttataaaagaagccaaatcagaaaaggcacttga

SEQ ID NO: 472558 - DNA, 75 bp, synthetic construct
  source 1..75: mol_type = other DNA
agtcagcagtcgatatctctcagccatggcgcacaagaggagagtatgggggcgaacggtcactgggctttaggc

SEQ ID NO: 472559 - DNA, 75 bp, synthetic construct
  source 1..75: mol_type = other DNA
gtaagggtgggaaaagcagaaacagcctactgcccacgcgcctaatcccagcaataaaacaactcattgagcaag

SEQ ID NO: 472560 - DNA, 75 bp, synthetic construct
  source 1..75: mol_type = other DNA
gtcaggctgtttttatccagcttagcaaacagcagacatgtagccataaacacgcagaaaatcgctttaaatgcc

SEQ ID NO: 472561 - DNA, 75 bp, synthetic construct
  source 1..75: mol_type = other DNA
agcggttgaacatactgcatgaaaatggttttgtcatcgcgctggatgatttcggtactggctactcagggcttt

SEQ ID NO: 472562 - DNA, 75 bp, synthetic construct
  source 1..75: mol_type = other DNA
tacattaactccccaggcggggtgatcactgccgggatgtctatctatgacaccatgcagtttatcaagcctgat

SEQ ID NO: 472563 - DNA, 75 bp, synthetic construct
  source 1..75: mol_type = other DNA
actatctgatgttatcgcaggctttttgggtaagtatttttcttacttaaaagatgtaaatgacgagcaattagc

SEQ ID NO: 472564 - DNA, 75 bp, synthetic construct
  source 1..75: mol_type = other DNA
tgttagcgatgatccccagccgctttttcaccctcttcagtcgctgttggccactggagaaactcccctttcccg

SEQ ID NO: 472565 - DNA, 75 bp, synthetic construct
  source 1..75: mol_type = other DNA
atggcgtttcgcatactacacggtggtttttacaggggggggaagctgactcaggcattgaccccctttataccc

SEQ ID NO: 472566 - DNA, 75 bp, synthetic construct
  source 1..75: mol_type = other DNA
aacggtaatactgacagaagcggcacgaattgatatttataaaggagcgcgcttattaggaacgcgctatgagga

SEQ ID NO: 472567 - DNA, 75 bp, synthetic construct
  source 1..75: mol_type = other DNA
actgtcactatctcactaccagtcatacatgggcagtgaaaacgttgatggtcactattgcagtgaaagcgcgac

SEQ ID NO: 472568 - DNA, 75 bp, synthetic construct
  source 1..75: mol_type = other DNA
tccttaactgccttgatcgcgtgggcatccgtcaggcggcaaaacggctgacagactatccgcatcagctctccg

SEQ ID NO: 472569 - DNA, 75 bp, synthetic construct
  source 1..75: mol_type = other DNA
taagattgccatgattttccaggagccgatggtgtcgttaaacccattgcatactctggaaaaacagctttatga

SEQ ID NO: 472570 - DNA, 75 bp, synthetic construct
  source 1..75: mol_type = other DNA
acgatttgcacgttgtccgcgcgttatgtcatcaggttatcgtactgcgacaaggggaagtagtggaacaaggac

SEQ ID NO: 472571 - DNA, 75 bp, synthetic construct
  source 1..75: mol_type = other DNA
gcatcaactggcctatttgtttatcagccacgatttgcacgttgtccgcgcgttatgtcatcaggttatcgtact

SEQ ID NO: 472572 - DNA, 75 bp, synthetic construct
  source 1..75: mol_type = other DNA
cagtattgtcagaaaactggcccaccgcgtggcggtaatgcaaagcggtcgctgtgtggagcaaaataacgccgt

SEQ ID NO: 472573 - DNA, 75 bp, synthetic construct
  source 1..75: mol_type = other DNA
acgatttgcacgttgtccgcgcgttatgccatcaggtaatcgtactgcgacaaggggaagtggtagaacaagggc

SEQ ID NO: 472574 - DNA, 75 bp, synthetic construct
  source 1..75: mol_type = other DNA
gattgatgggagatatctggaggcgggttaccggggggatggttactaccactggtgccggtttaataaaaatta

SEQ ID NO: 472575 - DNA, 75 bp, synthetic construct
  source 1..75: mol_type = other DNA
cactggtgccggtttaataaaaattatccggtaaacattaatcacgtcattcactattcagaccacaaagcggtg

SEQ ID NO: 472576 - DNA, 75 bp, synthetic construct
  source 1..75: mol_type = other DNA
ggagaacgaggaaattgcgctaacggtagggaagctgcgtgttgagctggaagcagcaaaaaagcgcatagcaga

SEQ ID NO: 472577 - DNA, 75 bp, synthetic construct
  source 1..75: mol_type = other DNA
gctgtgtcgagcaaaataacgccgctacgctatttgcctcacccactcatccttacacacaaaagctactcaaca

SEQ ID NO: 472578 - DNA, 75 bp, synthetic construct
  source 1..75: mol_type = other DNA
atgaagacttacaacaccaatcccggttacgaaatggatccccagctcctgacacactttaaccagcatctggat

SEQ ID NO: 472579 - DNA, 75 bp, synthetic construct
  source 1..75: mol_type = other DNA
gattgatgggagatatctggaggcgggttaccgggggggggatggttactaccactggtgccggtttaataaaaa

SEQ ID NO: 472580 - DNA, 75 bp, synthetic construct
  source 1..75: mol_type = other DNA
cagcattgtcagaaaactggcccaccgcgtggcagtgatgcaaaacggtcgctgtgtggaggaaaatcgcgccac

SEQ ID NO: 472581 - DNA, 75 bp, synthetic construct
  source 1..75: mol_type = other DNA
acgctgccacgcggcttttatttgaagaagaatttcaccagtgcactactggcccgtcattttctgatccagtag

SEQ ID NO: 472582 - DNA, 75 bp, synthetic construct
  source 1..75: mol_type = other DNA
taatcagtatcgctacatcagattcctgaacaagcgagcaaggaagcggctaaataccaagctattcagggttca

SEQ ID NO: 472583 - DNA, 75 bp, synthetic construct
  source 1..75: mol_type = other DNA
ggcgtcgggtcgtgcttgaaacggataaccggggctatatggaactgaaccgcatgtggctacatgatgacatgc

SEQ ID NO: 472584 - DNA, 75 bp, synthetic construct
  source 1..75: mol_type = other DNA
tacagccaccgtttcgtaaataactcctaccttcatctgggcatattttcagaacgggagctggttggcgtaatg

SEQ ID NO: 472585 - DNA, 75 bp, synthetic construct
  source 1..75: mol_type = other DNA
ctccccccgaaactgaagcgcagttactggcgcaagcacagcaactttctggttacacactaggtgaactggcgg

SEQ ID NO: 472586 - DNA, 75 bp, synthetic construct
  source 1..75: mol_type = other DNA
ctccccccgaaactgaagcgcagttattagcgcaagcacagcaactttctggttatacattgggggaactggcgg

SEQ ID NO: 472587 - DNA, 75 bp, synthetic construct
  source 1..75: mol_type = other DNA
tgcgggaagtgattaaaggtcatctgacggaacacatcgttcaccagggggatgagctaaaacgtgaagaagatc

SEQ ID NO: 472588 - DNA, 75 bp, synthetic construct
  source 1..75: mol_type = other DNA
aaatttaatcagtatcgctacatcaggttcctgaacaagcgagcaaggaagcgactaaatactaatctattcagg

SEQ ID NO: 472589 - DNA, 75 bp, synthetic construct
  source 1..75: mol_type = other DNA
gtattgaaagtacttgatttacgtgctggtactgactggtctattattgccgattatgacagtttactacgcggt

SEQ ID NO: 472590 - DNA, 75 bp, synthetic construct
  source 1..75: mol_type = other DNA
gaatacgagacgcgcttctctgaactctttttcgattatttacattgcattcagtctctggccggtgccactggt

SEQ ID NO: 472591 - DNA, 75 bp, synthetic construct
  source 1..75: mol_type = other DNA
gccatctgacggaacacattgttcatcagggcgatgaattaaagcgtgaagaagatctggatgtcgttctgaagg

SEQ ID NO: 472592 - DNA, 75 bp, synthetic construct
  source 1..75: mol_type = other DNA
ttcacaagaaagcactgtcacaaacctgacgccggtacctatccagatggcagatcagacggtttacgtcgccca

SEQ ID NO: 472593 - DNA, 75 bp, synthetic construct
  source 1..75: mol_type = other DNA
caccgacgtgttgaataaacttggtgataaagagcgcacggcattattaaaagcagccgatgagtcaatgatgca

SEQ ID NO: 472594 - DNA, 75 bp, synthetic construct
  source 1..75: mol_type = other DNA
aaatgcgacattaggtaatgagcgtgaatcactggaattaatgaactccggtgcattacagatggttaaggttaa

SEQ ID NO: 472595 - DNA, 75 bp, synthetic construct
  source 1..75: mol_type = other DNA
gcctgttaacgttgtgccatgcgcatcatttagggcgtatggggcattacgggcaaatggttgctgatcaaggcc

SEQ ID NO: 472596 - DNA, 75 bp, synthetic construct
  source 1..75: mol_type = other DNA
tgtcatcagcaaatcggctatccatcgctatggccagaagattgagcgccgctatggcgctatccgtgcagccac

SEQ ID NO: 472597 - DNA, 75 bp, synthetic construct
  source 1..75: mol_type = other DNA
agcaagtctacatggacaatataactccatgttttttgatgacattcaattatggctaccaagtgctgcagaaaa

SEQ ID NO: 472598 - DNA, 75 bp, synthetic construct
  source 1..75: mol_type = other DNA
cgaaggaggccgtccagtcgtgtaaatccgttaaatcgtggatgagggccctggaatcaggtcacgattctctgt

SEQ ID NO: 472599 - DNA, 75 bp, synthetic construct
  source 1..75: mol_type = other DNA
cggaaaccgctttattgctatgacaggcgcaaagaactttgcctgttttgatgaaaatggtgagtgtggtctttg

SEQ ID NO: 472600 - DNA, 75 bp, synthetic construct
  source 1..75: mol_type = other DNA
tcctgcgcgaagacgttcaggcttacgtgaaagaagctatcaaacgtgcagaagcggctccggcggcgactggcg

SEQ ID NO: 472601 - DNA, 75 bp, synthetic construct
  source 1..75: mol_type = other DNA
ccggcggcaactggcggcggtatcccaggcatgctgccgtggccgaaggtggacttcagcaagtttggtgaaatc

SEQ ID NO: 472602 - DNA, 75 bp, synthetic construct
  source 1..75: mol_type = other DNA
tgggggtaaaactggggatatcacttaatcaggttgttatcagactgcagaaagctgaagggtttattgacggtt

SEQ ID NO: 472603 - DNA, 75 bp, synthetic construct
  source 1..75: mol_type = other DNA
cgcttcctggttgctctaaacaatgcttctatccgtttagaaacaaggctactgattgagtggcaacttctcaca

SEQ ID NO: 472604 - DNA, 75 bp, synthetic construct
  source 1..75: mol_type = other DNA
ctcacaaagttccactgagcaaagaatctttgcgagtcttgaatcgccacgggtttaacagacacctcagagtca

SEQ ID NO: 472605 - DNA, 75 bp, synthetic construct
  source 1..75: mol_type = other DNA
gcagccagcaacgccgagaaaattgcccgtaagggtggactgtcaaccgatgcggtgcaggcactgcgacgtgaa

SEQ ID NO: 472606 - DNA, 75 bp, synthetic construct
  source 1..75: mol_type = other DNA
gtcttgcagctaaaaacacgccttcaggtataagtccatctttttggattgcagtgagaatgaattatttcatgt

SEQ ID NO: 472607 - DNA, 75 bp, synthetic construct
  source 1..75: mol_type = other DNA
agacggagctttttgagcagtgccagcgttactacgccaatatcctgacgccgttcagccgcctggtaacgccga

SEQ ID NO: 472608 - DNA, 75 bp, synthetic construct
  source 1..75: mol_type = other DNA
ccgtggagtgaagtcccggataacttcctctgcccggaatgctccctcggcaaagacgtctttgacgaactggca

SEQ ID NO: 472609 - DNA, 75 bp, synthetic construct
  source 1..75: mol_type = other DNA
ggaaccttgtttataaatcgctacattccgccggagcaacgttgaacaatgcaagcggagattttacaggcgcta

SEQ ID NO: 472610 - DNA, 75 bp, synthetic construct
  source 1..75: mol_type = other DNA
ctcagcacatgcacgggaaaaggtatcagccctttcggcccgtaaatcgcaggctcttacctggctcgataatca

SEQ ID NO: 472611 - DNA, 75 bp, synthetic construct
  source 1..75: mol_type = other DNA
tggaagcacgctttgtgctggaagataagctaattctgctggtgcttgacgctgcccgcctcaaacatcttgctt

SEQ ID NO: 472612 - DNA, 75 bp, synthetic construct
  source 1..75: mol_type = other DNA
gtgggtaactgggcgcaaagcattttgcacggcggggtcattgcgtcggcgctggatgtcgccgcaggtttggtg

SEQ ID NO: 472613 - DNA, 75 bp, synthetic construct
  source 1..75: mol_type = other DNA
gcgtcaacctgaagaagtttcagcaggagctgcgcgagaaaattgccgcgaaaatggactcgctggaggccgaat

SEQ ID NO: 472614 - DNA, 75 bp, synthetic construct
  source 1..75: mol_type = other DNA
ccagactgaattgtttgagtccatcgtccagttacaggaggcggaggtcggcgagattgacccgcaggagcgtgt

SEQ ID NO: 472615 - DNA, 75 bp, synthetic construct
  source 1..75: mol_type = other DNA
tggttaaagaagaaacctctgccaccacgacggctgacctcggcccacggatgcagtgcagcgtctgccagtgga

SEQ ID NO: 472616 - DNA, 75 bp, synthetic construct
  source 1..75: mol_type = other DNA
aagtggatcagacggagcttttcgagcagtgccagcgttactacgccaatatcctgacgccgttcagccgcctgg

SEQ ID NO: 472617 - DNA, 75 bp, synthetic construct
  source 1..75: mol_type = other DNA
gagtgaaaccagtactcgttcctataaaaaaggtctgcgcacacctggtcaggctacggtagctcttaacgcaga

SEQ ID NO: 472618 - DNA, 75 bp, synthetic construct
  source 1..75: mol_type = other DNA
atgaaacaaatgtcactaattgagatggatggttttctgaaaggcaaatgcatcccacgagatttaaaggttaac

SEQ ID NO: 472619 - DNA, 75 bp, synthetic construct
  source 1..75: mol_type = other DNA
gcggggctgaagtctggcgcaatggacgaaatcaaggttatcaaccgtggagggcaggcatattgcgtaaaagat

SEQ ID NO: 472620 - DNA, 75 bp, synthetic construct
  source 1..75: mol_type = other DNA
catcgttacggtgaaagaagcgacggacgccctgctgcattgtgcggaacagcttcgcaaaggaggcaaccagtg

SEQ ID NO: 472621 - DNA, 75 bp, synthetic construct
  source 1..75: mol_type = other DNA
tcgcgcagcaattggtggtaattgatgctggcgaaaagaatcgaaagagctataattcagcaaccattttacagg

SEQ ID NO: 472622 - DNA, 75 bp, synthetic construct
  source 1..75: mol_type = other DNA
atgacgaatttaaaagcagttattcctgtagcgggtcttgggatgcatatgttgcctgccactaaggcgattccc

SEQ ID NO: 472623 - DNA, 75 bp, synthetic construct
  source 1..75: mol_type = other DNA
atggagtgcaagttaatcccatgtatgcaagagggtggaatgactatcgcgcaaagtctctgcaatcagacaccc

SEQ ID NO: 472624 - DNA, 75 bp, synthetic construct
  source 1..75: mol_type = other DNA
gtggagatggttatggagcatatgcagtcgagcggttcgttaacatttggagattgctacatatcacttaacgag

SEQ ID NO: 472625 - DNA, 75 bp, synthetic construct
  source 1..75: mol_type = other DNA
tccgaccgttcgcggtaccgcgatgaacccggtagaccacccacatggtggtggtgagggtcgtaactttggtaa

SEQ ID NO: 472626 - DNA, 75 bp, synthetic construct
  source 1..75: mol_type = other DNA
cgcacggaactggaaggaatttttaatgattccaccctgctggcggatctcgacagcgcattgccagaaggctcc

SEQ ID NO: 472627 - DNA, 75 bp, synthetic construct
  source 1..75: mol_type = other DNA
acgtgcgcaggcgtttaatgacctttgctcggtgttcgttaaggacgcgagggttgccgggctggacgatggcga

SEQ ID NO: 472628 - DNA, 75 bp, synthetic construct
  source 1..75: mol_type = other DNA
gagcagcaccatgacgctgactgacgccgaaatcgctgagggttacgtgctggcctgttcctgccatccgcaggg

SEQ ID NO: 472629 - DNA, 75 bp, synthetic construct
  source 1..75: mol_type = other DNA
atacatcaccctgaccgtgcggcggattgatgacggtgtcggctcccagtggctgactcgcgaggtgaaacgcgg

SEQ ID NO: 472630 - DNA, 75 bp, synthetic construct
  source 1..75: mol_type = other DNA
gggttatatgcaggcgtttgtgaagtatggactgcgcaacctgaaagaaggggcgaagttccgtaaaggtattga

SEQ ID NO: 472631 - DNA, 75 bp, synthetic construct
  source 1..75: mol_type = other DNA
tggctaatgcgccggaaggcgattttgaccgctcattctctgatggcgttctcgaagatatcgccgcccagcttc

SEQ ID NO: 472632 - DNA, 75 bp, synthetic construct
  source 1..75: mol_type = other DNA
tgattgctgtatgcaccctggttcagacctggtagggaaggttgaaatgactgagtggttagttgactttgctgc

SEQ ID NO: 472633 - DNA, 75 bp, synthetic construct
  source 1..75: mol_type = other DNA
tgtctgaagtgcgggcgcagggggtggatgctgctatagaagctgcaaaaaatctggtggcccaagaatatgagt

SEQ ID NO: 472634 - DNA, 75 bp, synthetic construct
  source 1..75: mol_type = other DNA
tgcgggcacagggcgtggatgctgctatagaagctgcaaaaaatctggtggcccaagaatatgagtataaggatt

SEQ ID NO: 472635 - DNA, 75 bp, synthetic construct
  source 1..75: mol_type = other DNA
cgatgttgttggcgacaacaccgaggttatttgcgaggaggttgggagagatggcgttctggttattttggaggc

SEQ ID NO: 472636 - DNA, 75 bp, synthetic construct
  source 1..75: mol_type = other DNA
ttaaacagtcggagaaggaatttaataacttctgtcgtcaggagtactacggttgggaggacaacttcacggaaa

SEQ ID NO: 472637 - DNA, 75 bp, synthetic construct
  source 1..75: mol_type = other DNA
acgccccgccattggcgacaacccatttgtcgtggtgctgccggacgttgttatcgatgatgccagcgccgaccc

SEQ ID NO: 472638 - DNA, 75 bp, synthetic construct
  source 1..75: mol_type = other DNA
caggcgtttgtgaagtatggactgcgtaaccagaaagaaggggttaagttccgtaaaggtattgaagagttattg

SEQ ID NO: 472639 - DNA, 75 bp, synthetic construct
  source 1..75: mol_type = other DNA
gcgacctgccattggtgacaacccatttgtcgtggtactgccagacgttgtgatcgacgatgccagcgccgaccc

SEQ ID NO: 472640 - DNA, 75 bp, synthetic construct
  source 1..75: mol_type = other DNA
gagaatgcggggctgaaacacgcaatggccgtaactcttgagcatgtgtcggtcacggatgcagggcaggctggt

SEQ ID NO: 472641 - DNA, 75 bp, synthetic construct
  source 1..75: mol_type = other DNA
agcgtcaagctgctcaagatgcgaaaagtttagattttttaaacgaacaattacctaaagtccgaaatgatttag

SEQ ID NO: 472642 - DNA, 75 bp, synthetic construct
  source 1..75: mol_type = other DNA
acagctacgactgcggtaaaaaaatgggctatatgcaagcgttcgtgaagtatggactacgcaacctgaaagaag

SEQ ID NO: 472643 - DNA, 75 bp, synthetic construct
  source 1..75: mol_type = other DNA
ttgactatggaagcaaagacagttcttgatcaaatagttaatgtcgataatcaaattaatgagttaacttttaaa

SEQ ID NO: 472644 - DNA, 75 bp, synthetic construct
  source 1..75: mol_type = other DNA
tggtttacctgacgctggtcgcctatccgcgctatatcgactggcagagcggcctgtggatgagcccggaacaac

SEQ ID NO: 472645 - DNA, 75 bp, synthetic construct
  source 1..75: mol_type = other DNA
cggcgccgcgctggtggacctgctccgccagcatggggtcagcaagtataacgtcggcaccgtgcagccgttcac

SEQ ID NO: 472646 - DNA, 75 bp, synthetic construct
  source 1..75: mol_type = other DNA
cagccgctggctgaggagctgcgctttgtgcgcaccccgcccaaacggctggccgctgacgagcaggtgctggtg

SEQ ID NO: 472647 - DNA, 75 bp, synthetic construct
  source 1..75: mol_type = other DNA
ataactgctataccaatagcactgagcatacatttaatggctctgtccgtgctactgacgggccttctttagatt

SEQ ID NO: 472648 - DNA, 75 bp, synthetic construct
  source 1..75: mol_type = other DNA
accgttgaacaggtgcgagaattgttagcgcaaggtttaccgccagcagtggtacaacacaggttaggtatcagc

SEQ ID NO: 472649 - DNA, 75 bp, synthetic construct
  source 1..75: mol_type = other DNA
ggccgatcgccctgccccagctggtggctgcggcgctgatcctctacccgcgctatctggacccgatcctgggcc

SEQ ID NO: 472650 - DNA, 75 bp, synthetic construct
  source 1..75: mol_type = other DNA
aaatcgcatacggccatgctactgctcaagtgctcagtgaaatgggtccacaagagaattggtataaggcttatg

SEQ ID NO: 472651 - DNA, 75 bp, synthetic construct
  source 1..75: mol_type = other DNA
atccgcgctgtaaagcagtgtacgacgcctgcacgcagctgccggcgttcatcgctgccgcaccagaaaatcaac

SEQ ID NO: 472652 - DNA, 75 bp, synthetic construct
  source 1..75: mol_type = other DNA
tttacggcaagaccacgctgaaagagaataactactggtttatgggcaaaagcccattcagcttcgactcacgtt

SEQ ID NO: 472653 - DNA, 75 bp, synthetic construct
  source 1..75: mol_type = other DNA
cgccggctggggattgacccatgacagtaaatcctgcccgcgtcgccaggcgcaggtcagcctgccgcagctggt

SEQ ID NO: 472654 - DNA, 75 bp, synthetic construct
  source 1..75: mol_type = other DNA
agccgccttgaacagctgatcgccaccccgtgcgataccgcgctgctggcgcgggctgaagcgctgaccagcgaa

SEQ ID NO: 472655 - DNA, 75 bp, synthetic construct
  source 1..75: mol_type = other DNA
tccggttatccgcagcaacgaagcgctgctatgggcggtacgtgacgccagaccggaggcgcacatcctctttaa

SEQ ID NO: 472656 - DNA, 75 bp, synthetic construct
  source 1..75: mol_type = other DNA
tgaacaacgcattcgaacaagtggaaatagcaatcgttaagggcttcgacgacgcattcaaatacggtcaattca

SEQ ID NO: 472657 - DNA, 75 bp, synthetic construct
  source 1..75: mol_type = other DNA
cctgccggcatttattggcgcacgcccgtaccatcaggcgtatgagcgcggggtgaagattattggtgcaacagc

SEQ ID NO: 472658 - DNA, 75 bp, synthetic construct
  source 1..75: mol_type = other DNA
tgagcaggttgaacgctctggctttatcttcatcggcccgaaagcagacaccattcgcctgatgggtgacaaagt

SEQ ID NO: 472659 - DNA, 75 bp, synthetic construct
  source 1..75: mol_type = other DNA
tgatctcgatgttaatatcgaccgtggcggtgcatttaacctgtttatcaagaagtttcagtctgttagcttgct

SEQ ID NO: 472660 - DNA, 75 bp, synthetic construct
  source 1..75: mol_type = other DNA
ggtgaacttattgaaaataaaaatgtaatcattaaggttgcgaagattgatgctaagccaaatgaagaattttat

SEQ ID NO: 472661 - DNA, 75 bp, synthetic construct
  source 1..75: mol_type = other DNA
cgctgaagacatgatgcgcgcaggtcgtgacgtcgagaaaaacgtattaagccgcgcgctttaccaggtactggc

SEQ ID NO: 472662 - DNA, 75 bp, synthetic construct
  source 1..75: mol_type = other DNA
ccgtatcaccaggcgtatgagcgcggcgttaagatcattggcgccacagctcactatgtgaatgataatctggat

SEQ ID NO: 472663 - DNA, 75 bp, synthetic construct
  source 1..75: mol_type = other DNA
tttgtcgtggtgctgccagacgttgtgatcgacgacgccagcgccgacccgctgcgttacaaccttgctgccatg

SEQ ID NO: 472664 - DNA, 75 bp, synthetic construct
  source 1..75: mol_type = other DNA
tcatggccgtaggtcgttatgtgctttctgctgatatttggccggaacttgaacgcacgcagccaggggcatggg

SEQ ID NO: 472665 - DNA, 75 bp, synthetic construct
  source 1..75: mol_type = other DNA
ggatcacgacaaagtcatgaacatgcaagttaaagctgaattctacagcaaagttctgaccatcgttgttgacgg

SEQ ID NO: 472666 - DNA, 75 bp, synthetic construct
  source 1..75: mol_type = other DNA
atgctggataaaattgttattgccaaccgcggcgagattgcattgcgtattcttcgtgcctgtaaagaactgggc

SEQ ID NO: 472667 - DNA, 75 bp, synthetic construct
  source 1..75: mol_type = other DNA
tgttgaatttatcgaaaaaccggatcagccgcagacgctggactcagatatcatggccgttggtcgctatgtgct

SEQ ID NO: 472668 - DNA, 75 bp, synthetic construct
  source 1..75: mol_type = other DNA
ttctgccgatatttggccggaacttgaacgcacgcagccaggtgcatgggggcgtattcagctgactgatgccat

SEQ ID NO: 472669 - DNA, 75 bp, synthetic construct
  source 1..75: mol_type = other DNA
gaaaatccgtgcggtggtaaaaggggcgatggaagaaagcggcgcggtactgattaagcgttacggctttgacgc

SEQ ID NO: 472670 - DNA, 75 bp, synthetic construct
  source 1..75: mol_type = other DNA
ccattcgtgacgcgattctcgacgagaaaatccgtgcggtggtaaaaggggcgatggaagaaagcggcgcggtac

SEQ ID NO: 472671 - DNA, 75 bp, synthetic construct
  source 1..75: mol_type = other DNA
cagcattggtgatgatgtcgttgatctgattgctcaggttgatttagtcactaccgccgttggcccggttgtgct

SEQ ID NO: 472672 - DNA, 75 bp, synthetic construct
  source 1..75: mol_type = other DNA
tgatcaagcgctacggctttgatgctgacaaacatgcggcatacatccagaaaatccttggtcgtttcgagaacc

SEQ ID NO: 472673 - DNA, 75 bp, synthetic construct
  source 1..75: mol_type = other DNA
tcgagcgtaaactcttcaccctaaacaccggccatgctataaccgcgtacctcgggaaattggccggtcaccaga

SEQ ID NO: 472674 - DNA, 75 bp, synthetic construct
  source 1..75: mol_type = other DNA
gttggcgaaaccgagcaagtggataccgtctccggtgtaaatgccgtcagcagcatcggcgacgacgtagtggat

SEQ ID NO: 472675 - DNA, 75 bp, synthetic construct
  source 1..75: mol_type = other DNA
ctgaaagccagaaggaatacgtcagaaaaaaccgcaacgaattggattccatgactcgcgccgcctattgcggaa

SEQ ID NO: 472676 - DNA, 75 bp, synthetic construct
  source 1..75: mol_type = other DNA
tctactgagtttatggctaatgcgccggaaggagattttgaccgctcattctctgatggcgttctcaaagatatc

SEQ ID NO: 472677 - DNA, 75 bp, synthetic construct
  source 1..75: mol_type = other DNA
ttcgtgcagaagcacgcaacgaggggattaactataccgccagccgtcttgctgctgctttcaaccacggattta

SEQ ID NO: 472678 - DNA, 75 bp, synthetic construct
  source 1..75: mol_type = other DNA
atgggcctgggcacggctggatgaagccgaagcgtcggcgcgtagcgggattgaagtcttgtcgtcttatcagcc

SEQ ID NO: 472679 - DNA, 75 bp, synthetic construct
  source 1..75: mol_type = other DNA
tcaggtccgctgtaaaatctgcggttcagttgtggagccgtttgactggatgctctctgtggcgaaaagagaaac

SEQ ID NO: 472680 - DNA, 75 bp, synthetic construct
  source 1..75: mol_type = other DNA
ctaatgcgccggaaggcgattttgaccgctcattctctgatggcgtactcgaagacatcgctgcccagcttcgca

SEQ ID NO: 472681 - DNA, 75 bp, synthetic construct
  source 1..75: mol_type = other DNA
ccgtattcaggaacggcgtcagaaagcgatacccggcgtgcgtacctgcactgagtgtcagcgggtactggaaat

SEQ ID NO: 472682 - DNA, 75 bp, synthetic construct
  source 1..75: mol_type = other DNA
gatgtgagaatgatacagcaggggctgattgatggaaaactaaaaacatcgtattttttccttactcgcatctgg

SEQ ID NO: 472683 - DNA, 75 bp, synthetic construct
  source 1..75: mol_type = other DNA
accccgacgggaaattgccgaaaagttcggaatgaagttgcgcacagtgaataactacgtttatttcgacaggag

SEQ ID NO: 472684 - DNA, 75 bp, synthetic construct
  source 1..75: mol_type = other DNA
gatattctccgggatattaccgccaccagagaacagcagcggtgagtgggtggaagacgtggtgccgggcggaaa

SEQ ID NO: 472685 - DNA, 75 bp, synthetic construct
  source 1..75: mol_type = other DNA
atcggcagtctgattggccgtagtgaggcggctgtcagaacgaaagcccgggagatgggaataagtctgattctg

SEQ ID NO: 472686 - DNA, 75 bp, synthetic construct
  source 1..75: mol_type = other DNA
gaatggtattgtaaagaaagccagcagctattatggctacggatatagccattatggctactcctacgaggataa

SEQ ID NO: 472687 - DNA, 75 bp, synthetic construct
  source 1..75: mol_type = other DNA
tgctgagcaaacgactggcatcatcgctgaaagcggtgaaacccgacagtagcgtggtgcgtgcggcgcaggagt

SEQ ID NO: 472688 - DNA, 75 bp, synthetic construct
  source 1..75: mol_type = other DNA
agacatttccacttttagcaagcggtaagctattggaccaggatgtattggtccacagcctgggctgtagcgttt

SEQ ID NO: 472689 - DNA, 75 bp, synthetic construct
  source 1..75: mol_type = other DNA
gagaaagacgcagttaccgctttatcaggagccttgaaccgtatcgtaagtgccttagcggaggcagatccacgt

SEQ ID NO: 472690 - DNA, 75 bp, synthetic construct
  source 1..75: mol_type = other DNA
tgaaaaaaaggttcgttatcaaaaagctcgcatgaatgttgagtctttaattggtgaagggaaaagtttcatgga

SEQ ID NO: 472691 - DNA, 75 bp, synthetic construct
  source 1..75: mol_type = other DNA
cggcttgtttcgacctttattacactgaaaagatatttccagtatgatgatgaaaattatattgatgatgtgtcc

SEQ ID NO: 472692 - DNA, 75 bp, synthetic construct
  source 1..75: mol_type = other DNA
aggaagcgggcttacaagctcatgtttctggtagctccgttttcggcctgacagagtttgggaaaatggactcag

SEQ ID NO: 472693 - DNA, 75 bp, synthetic construct
  source 1..75: mol_type = other DNA
caaaaggaaagcgttacgctcttccaaactctcgtataatgatccatcagcctttaggcggtgctagaggtcaag

SEQ ID NO: 472694 - DNA, 75 bp, synthetic construct
  source 1..75: mol_type = other DNA
aaagtttctgcaatcagacaccccagctaccgatgcttttctggctgaaattcgtgcagaagcacgcaacgaggg

SEQ ID NO: 472695 - DNA, 75 bp, synthetic construct
  source 1..75: mol_type = other DNA
agcgtcgggccacacgatctttatttcacattgctggatgattatctgcatgtggtggataccgcgctgtggttg

SEQ ID NO: 472696 - DNA, 75 bp, synthetic construct
  source 1..75: mol_type = other DNA
gtgcattccagcaccgccagccactttgacgtggtcagtacgttactcaatgcgggggtacatgtctgtgtcgat

SEQ ID NO: 472697 - DNA, 75 bp, synthetic construct
  source 1..75: mol_type = other DNA
ttctgatggtgaataccgacatgcagctattgtttccgcagctgtatatttcgctgcagagcttcgcaaaggagg

SEQ ID NO: 472698 - DNA, 75 bp, synthetic construct
  source 1..75: mol_type = other DNA
agcgtggttaccggtgctggcggcagcatcagactggacgttacaaggcgcgtggtcgccaacgcgtgagaaagc

SEQ ID NO: 472699 - DNA, 75 bp, synthetic construct
  source 1..75: mol_type = other DNA
atggtcggttttaaccgtcgtttcgcaccactctacggtgagttaaaaacgcaactcgccaccgcagcctcgcta

SEQ ID NO: 472700 - DNA, 75 bp, synthetic construct
  source 1..75: mol_type = other DNA
cgcaacttgccaccgcagtgtcgctgagaatggataaacatcgtactcatagcgtcgggccacacgatctttatt

SEQ ID NO: 472701 - DNA, 75 bp, synthetic construct
  source 1..75: mol_type = other DNA
ttgatggtgaagttgggccaaacaagaacgttccggggctgattagaggcgcagagatatgcgtaagtattgctg

SEQ ID NO: 472702 - DNA, 75 bp, synthetic construct
  source 1..75: mol_type = other DNA
ggatatcagcaacagtatgcagacactggcgaaggcaaacttgccgcctctgctttctgtacctgttggtgagaa

SEQ ID NO: 472703 - DNA, 75 bp, synthetic construct
  source 1..75: mol_type = other DNA
cgaaatcaccattgtcggcgaactgccgccgcaaacggcgaaacgcattgccgagaatattaagttcggggcagc

SEQ ID NO: 472704 - DNA, 75 bp, synthetic construct
  source 1..75: mol_type = other DNA
atgcacttaagggagattctttattttctgatggtgaataccgacatgcagctattgtttccgcagctgtatatt

SEQ ID NO: 472705 - DNA, 75 bp, synthetic construct
  source 1..75: mol_type = other DNA
cctggctgaagtgcgggcgcaaggggtagagatgatgcgcgaacatccatcaatcaaactttgctctttgacgca

SEQ ID NO: 472706 - DNA, 75 bp, synthetic construct
  source 1..75: mol_type = other DNA
gaacgttccggggctgattagaggcgcagagatatgcgtaagtattgctgaacagcttcgcaaaggaggcaacca

SEQ ID NO: 472707 - DNA, 75 bp, synthetic construct
  source 1..75: mol_type = other DNA
tggatggatttctgaaaggtaaatacatcccacgagatttaaaggttaacgaaacaaacgctgaatatcttgtcc

SEQ ID NO: 472708 - DNA, 75 bp, synthetic construct
  source 1..75: mol_type = other DNA
actgacagctcaaagtttggtgccgtacattcttactccatcggccctgttgagagaatcaaacgcgttataacc

SEQ ID NO: 472709 - DNA, 75 bp, synthetic construct
  source 1..75: mol_type = other DNA
gaataattatacgctgaaacgtgaactcgctgagtttgccgcctcactggttcaagcgggagaaaccatctttat

SEQ ID NO: 472710 - DNA, 75 bp, synthetic construct
  source 1..75: mol_type = other DNA
aatcctgactgacagctccaagtttggcgccgtacactcatactctatcggcccggtggagaaattcaatcggat

SEQ ID NO: 472711 - DNA, 75 bp, synthetic construct
  source 1..75: mol_type = other DNA
ggagtctcatatctacgcgggctacaccgtaccgccgtactatgactcaatgatcggcaaactgatttgctacgg

SEQ ID NO: 472712 - DNA, 75 bp, synthetic construct
  source 1..75: mol_type = other DNA
tctatttcatcgaaatgaacacccgtatccaggttgagcacccggttaccgagatgatcactggcgtggacctga

SEQ ID NO: 472713 - DNA, 75 bp, synthetic construct
  source 1..75: mol_type = other DNA
tgaaaaccgtgacgtggcgattgctcgcatgaaaaatgcgctgcaggagctgatcatcgacggtatcaaaaccaa

SEQ ID NO: 472714 - DNA, 75 bp, synthetic construct
  source 1..75: mol_type = other DNA
gtgtaccttttcgtttagggctgtatccagtagtggacagtgtgcagtggatcgaacgcatgctggacgcgggcg

SEQ ID NO: 472715 - DNA, 75 bp, synthetic construct
  source 1..75: mol_type = other DNA
atcgcgctgggacatgtgttcccgacacaaaccaaacagatgccttctgcaccgcaggggctggaacagctggca

SEQ ID NO: 472716 - DNA, 75 bp, synthetic construct
  source 1..75: mol_type = other DNA
tggcgactgcgttacggtgaaagaagcgacggacgccctgctgcattgtgcggagcagcttcgcaaaggaggcaa

SEQ ID NO: 472717 - DNA, 75 bp, synthetic construct
  source 1..75: mol_type = other DNA
agaaaaatgtcaccatcattacggtcagcagctatatagcgcatttactgaaagacgcgccttgtgaagtcattt

SEQ ID NO: 472718 - DNA, 75 bp, synthetic construct
  source 1..75: mol_type = other DNA
agcgattaacacagtcattgcgatgatgaaccatcagcatcctgtcacatcgaaggcaatcgacataatgcgcgt

SEQ ID NO: 472719 - DNA, 75 bp, synthetic construct
  source 1..75: mol_type = other DNA
accgcaggggctggaacagctggcacggcatgttgagcgcctggcggattatcccaccgtggcgattggcggtat

SEQ ID NO: 472720 - DNA, 75 bp, synthetic construct
  source 1..75: mol_type = other DNA
cttcaatgtctgaaattgtcagggacctctcacgactgggctggacagatgaacgaattggaacagaggctgggc

SEQ ID NO: 472721 - DNA, 75 bp, synthetic construct
  source 1..75: mol_type = other DNA
cttcaatgtctgaaattgtcagggacctatcacgactgggctggacagatgaccgaattggaacagaggctgggc

SEQ ID NO: 472722 - DNA, 75 bp, synthetic construct
  source 1..75: mol_type = other DNA
cgggccagggggaaacaccagataacgtcaatgtctgaaattgtcagggacctttcccggctgggctggacggat

SEQ ID NO: 472723 - DNA, 75 bp, synthetic construct
  source 1..75: mol_type = other DNA
cttcaatgtctgaaattgtcagggacctgtcacggctgggctggacagatgaccgaattggaacagaggctgggc

SEQ ID NO: 472724 - DNA, 75 bp, synthetic construct
  source 1..75: mol_type = other DNA
cttcaatgtctgaaattgtcagggacctctcacggctgggctggacagatgagcgaattggaacagaggctgggc

SEQ ID NO: 472725 - DNA, 75 bp, synthetic construct
  source 1..75: mol_type = other DNA
cttcaatgtctgaaattgtcagggacctctcacgcctgggctggacagatgaccgaattggaacagaggctgggc

SEQ ID NO: 472726 - DNA, 75 bp, synthetic construct
  source 1..75: mol_type = other DNA
cgtgccagggggaaacaccagataacgtcaatgtctgaaattgtcagggacctttcccgtctgggctggacggat

SEQ ID NO: 472727 - DNA, 75 bp, synthetic construct
  source 1..75: mol_type = other DNA
cgagccagggggaaacaccagataacgtcaatgtctgaaattgtcagggacctttcccggctgggctggacagat

SEQ ID NO: 472728 - DNA, 75 bp, synthetic construct
  source 1..75: mol_type = other DNA
cgagccagggggaaacaccagataacgtcaatgtctgaaattgtcagggacctttcccgtctgggctggactgat

SEQ ID NO: 472729 - DNA, 75 bp, synthetic construct
  source 1..75: mol_type = other DNA
cgcgccagggggaaacaccagataacgtcaatgtctgaaattgtcagggacctttcccggctgggctggaccgat

SEQ ID NO: 472730 - DNA, 75 bp, synthetic construct
  source 1..75: mol_type = other DNA
cgcgccagggggaaacaccagataacgtcaatgtctgaaattgtcagggacctttcccgcctgggctggacggat

SEQ ID NO: 472731 - DNA, 75 bp, synthetic construct
  source 1..75: mol_type = other DNA
cgtgccagggggaaacaccagataacgtcaatgtctgaaattgtcagggacctttcccggctgggctggactgat

SEQ ID NO: 472732 - DNA, 75 bp, synthetic construct
  source 1..75: mol_type = other DNA
caaaacggcggttcaggtcagctctcatctatttttattcgcggtacaaatgccagtcatgtgttggtgttaatt

SEQ ID NO: 472733 - DNA, 75 bp, synthetic construct
  source 1..75: mol_type = other DNA
gtggaaatcctcggcttgtccggtgttccggctgcgggtgatgaagttaccgttgtacgtgacgagaagaaagcg

SEQ ID NO: 472734 - DNA, 75 bp, synthetic construct
  source 1..75: mol_type = other DNA
cagaaaaattcggggccggacaaattgacgctgcagcgtaaaacgcgcagcacccttaacattccaggtaccggt

SEQ ID NO: 472735 - DNA, 75 bp, synthetic construct
  source 1..75: mol_type = other DNA
actactccgtcatctataacctgatcgacgaagtgaaagcaagcatagagagggattgcagtttgcagcaatccc

SEQ ID NO: 472736 - DNA, 75 bp, synthetic construct
  source 1..75: mol_type = other DNA
agaactacaacgacgtccgcactggcgatgtgatcgaagtattcgaaatcatcgagatccaacgtaccatcgctt

SEQ ID NO: 472737 - DNA, 75 bp, synthetic construct
  source 1..75: mol_type = other DNA
ttggtgccatcgcaggctgtatggttaccgaaggtgtggttaaacgtcacaacccgatccgcgttctgcgcgaca

SEQ ID NO: 472738 - DNA, 75 bp, synthetic construct
  source 1..75: mol_type = other DNA
gtggaagcgatttccgattccttgctgaaactgtctactgacgaagtgaaagttaagatcatcggttctggcgtc

SEQ ID NO: 472739 - DNA, 75 bp, synthetic construct
  source 1..75: mol_type = other DNA
tggaccaggatgaagtgctgagactgaaacagattagcggattggctgagttgtttcaggaggaaagtttcagcc

SEQ ID NO: 472740 - DNA, 75 bp, synthetic construct
  source 1..75: mol_type = other DNA
cgtgccaggggaaaacaccagataacgtcaatgtctgacattgtcagggacctttcacgtctgggctggacagat

SEQ ID NO: 472741 - DNA, 75 bp, synthetic construct
  source 1..75: mol_type = other DNA
tggcgtatttccggatatcgtaacgatgtcagtgatttgatcgattatgatgatcacaccctgaaatattacaac

SEQ ID NO: 472742 - DNA, 75 bp, synthetic construct
  source 1..75: mol_type = other DNA
cgttggcgaactggcgaacaagatggcggttaaaggctctcaggtcatcaaagcgatgatgaaactgggcgcaat

SEQ ID NO: 472743 - DNA, 75 bp, synthetic construct
  source 1..75: mol_type = other DNA
caatcccaatgtcatgtcttccagggaaaaaaaactgcttaaacattcactggagcaggatggattcacgcagcc

SEQ ID NO: 472744 - DNA, 75 bp, synthetic construct
  source 1..75: mol_type = other DNA
gaaagggacaggctgaacgtattgccgcgaccatacgtcataaccgggccagaggaaaacatcagataacctcaa

SEQ ID NO: 472745 - DNA, 75 bp, synthetic construct
  source 1..75: mol_type = other DNA
cgagccagggggaaacaccagataacgtcaatgtctgaaattgtcagggacctttcccgactgggctggacggat

SEQ ID NO: 472746 - DNA, 75 bp, synthetic construct
  source 1..75: mol_type = other DNA
cgctcaggggctgaagtggtgcttatcagtagccgctctgaaactcttgaagcgccaactaaacgatggctgaaa

SEQ ID NO: 472747 - DNA, 75 bp, synthetic construct
  source 1..75: mol_type = other DNA
tacgaacgcgataccaccgggttatacctgactggacagcaacagatttccaatgtgactttggaagcttctggc

SEQ ID NO: 472748 - DNA, 75 bp, synthetic construct
  source 1..75: mol_type = other DNA
tggtgtattccgtcacagccttttctgtctgggcacaggatacccctccggatactctcgttgttactgctaacc

SEQ ID NO: 472749 - DNA, 75 bp, synthetic construct
  source 1..75: mol_type = other DNA
aaatagctaatctgttcaacaaagattatgagactggttatggctatcaggctgcaggacgggaatatatattgt

SEQ ID NO: 472750 - DNA, 75 bp, synthetic construct
  source 1..75: mol_type = other DNA
taccgtgaactgggtatccccctgccgaaagtccgcaccctggttaactgcatggattatacggcgctggccaga

SEQ ID NO: 472751 - DNA, 75 bp, synthetic construct
  source 1..75: mol_type = other DNA
tgactgagctttccatacttgcgtcaaccggccgcgtcatgggcgttgtgaaacccatacttcccgacgttcgtg

SEQ ID NO: 472752 - DNA, 75 bp, synthetic construct
  source 1..75: mol_type = other DNA
aggaagacgctggatgagctggccggaattattcagaccggtcgttacagcagacagttacctgaaggtgccgtt

SEQ ID NO: 472753 - DNA, 75 bp, synthetic construct
  source 1..75: mol_type = other DNA
ctggcagagcacaaaggcgacttacttatcgccgcactggttcatgatccgcgtctgcgttctgcgctggcagat

SEQ ID NO: 472754 - DNA, 75 bp, synthetic construct
  source 1..75: mol_type = other DNA
accatactctgatgccgttcatgcaaactatcgcccaatgaagagcatatacaggaacagaattacaagcttgaa

SEQ ID NO: 472755 - DNA, 75 bp, synthetic construct
  source 1..75: mol_type = other DNA
agcccaatgaagagcatatacaggaacagaattacaagcttgaacttgaactgagaaaattgaaacgatgtctat

SEQ ID NO: 472756 - DNA, 75 bp, synthetic construct
  source 1..75: mol_type = other DNA
cgctggcaggttaacgacgacacggctgcacgccccttcagctcttttacgctggaaaactcagaaaccgtggcg

SEQ ID NO: 472757 - DNA, 75 bp, synthetic construct
  source 1..75: mol_type = other DNA
ctggtcgtggatggttttcatcgtcagttactgggcagggaagcaggtatgggagaacgtctgaagggctggttg

SEQ ID NO: 472758 - DNA, 75 bp, synthetic construct
  source 1..75: mol_type = other DNA
atcgtcagttgctgggcaggaaagcggatacgagaaaacgtctgaagggctggctgccagtgacctgtattaatc

SEQ ID NO: 472759 - DNA, 75 bp, synthetic construct
  source 1..75: mol_type = other DNA
agaattgccaaagctaatgcgttctttagtcatgtcaaatctgtctgttccgactcgctgtctcattgaatggca

SEQ ID NO: 472760 - DNA, 75 bp, synthetic construct
  source 1..75: mol_type = other DNA
atggctattccaaaattacaggcttacgcactgccggagtctcacgatattccgcagaataaagttgactgggcc

SEQ ID NO: 472761 - DNA, 75 bp, synthetic construct
  source 1..75: mol_type = other DNA
ctggacgaatccgatgagccgttcgatgacgacaacctgatcgactacggtctggattcagtgcgcatgatggcg

SEQ ID NO: 472762 - DNA, 75 bp, synthetic construct
  source 1..75: mol_type = other DNA
tttgaaccgcaacgtgccgcgttgttaatccatgatatgcaggactattttgtcagcttctggggcgagaactgc

SEQ ID NO: 472763 - DNA, 75 bp, synthetic construct
  source 1..75: mol_type = other DNA
ggaaaggtgctgcagcacgtattgccgccaccatcagacataaccgggcaagaggaaaacatcagataacatcaa

SEQ ID NO: 472764 - DNA, 75 bp, synthetic construct
  source 1..75: mol_type = other DNA
agaaaaatgggagaatcgccaaaaactcttgcgaagaaagctgagttgatccctgcattaatcaaactaattcca

SEQ ID NO: 472765 - DNA, 75 bp, synthetic construct
  source 1..75: mol_type = other DNA
gtcctgaatcagaaaactgggaatgtcaaattatgagtgatggggctattgagatcgacagaaggtttttatgtg

SEQ ID NO: 472766 - DNA, 75 bp, synthetic construct
  source 1..75: mol_type = other DNA
agggggaaacatcagataacctcaatgtctgatatcgtcagggacctttcgcgtcttggctggacgaatgaacgt

SEQ ID NO: 472767 - DNA, 75 bp, synthetic construct
  source 1..75: mol_type = other DNA
tccttttgcacaggagcctgtggactgtgtgctgtgggtgaaagcggatgaggtggtggctaacgattataaccc

SEQ ID NO: 472768 - DNA, 75 bp, synthetic construct
  source 1..75: mol_type = other DNA
gctgggtatggaccaggatgaagttctcaggttgaaacagattagcgggctgacggagctgtttcaggaagagga

SEQ ID NO: 472769 - DNA, 75 bp, synthetic construct
  source 1..75: mol_type = other DNA
tgaaaaagaatttgtgaaacgcctgaagttaatccgcgccgatattcactcacaactggcctcttgtggttgcga

SEQ ID NO: 472770 - DNA, 75 bp, synthetic construct
  source 1..75: mol_type = other DNA
aaatgctacgaatttgggctgagtacagcctttccacgatcaaccgactcatagacatgaagctgaaggacggtc

SEQ ID NO: 472771 - DNA, 75 bp, synthetic construct
  source 1..75: mol_type = other DNA
gcatggctaagcagattgccattcgtgtcgcgtatatcaaacataaatgcccggcacactgtgtcgcccagaagc

SEQ ID NO: 472772 - DNA, 75 bp, synthetic construct
  source 1..75: mol_type = other DNA
aaacataaagtcttacctggacgagtacctgaaaatctgccagaaccgcaacctgtccccgtcgactatcaacgg

SEQ ID NO: 472773 - DNA, 75 bp, synthetic construct
  source 1..75: mol_type = other DNA
attcgccaccaagcatattagccagggcgttaacctattctggcttgccggacagatgggccacaaagggccgga

SEQ ID NO: 472774 - DNA, 75 bp, synthetic construct
  source 1..75: mol_type = other DNA
aaccgcgaaggggtggcttcttttgtgattattgtaaaccaggcgcctggaccgctgcttcagaagatgattgac

SEQ ID NO: 472775 - DNA, 75 bp, synthetic construct
  source 1..75: mol_type = other DNA
aagctgatcgccgggaagttaaaagacggaaagagccttcacgaatgttccgacactgaaaaagagttcgttaaa

SEQ ID NO: 472776 - DNA, 75 bp, synthetic construct
  source 1..75: mol_type = other DNA
atggcattactgcccctattgatgtgcatctgatggtgaaaccggtcgatcgcattgtgccagatttcgctgccg

SEQ ID NO: 472777 - DNA, 75 bp, synthetic construct
  source 1..75: mol_type = other DNA
taacccggcgacaccgctgagctatctggattacgtgatggacaaactggatgtgatcctgctgatgtccgtcaa

SEQ ID NO: 472778 - DNA, 75 bp, synthetic construct
  source 1..75: mol_type = other DNA
aagttgaaactcattcgccgggatattcacataatgctcgcgtctgttgggtgcgatattgctgacattgacaac

SEQ ID NO: 472779 - DNA, 75 bp, synthetic construct
  source 1..75: mol_type = other DNA
acattgattgccggaaagctgaaagatggtttttcgctacatgagtgcaacgaacaagaaaaatcccttgtcaga

SEQ ID NO: 472780 - DNA, 75 bp, synthetic construct
  source 1..75: mol_type = other DNA
cgctgaagaggaacgttttgtccgtcggttgaagttaatcaaagcggatatacacgcccagctgcgggcctgcaa

SEQ ID NO: 472781 - DNA, 75 bp, synthetic construct
  source 1..75: mol_type = other DNA
tagacactatggtcggtatttgaaggaatatgacaacaatacatctttaaataaattgaaaacaattaataaata

SEQ ID NO: 472782 - DNA, 75 bp, synthetic construct
  source 1..75: mol_type = other DNA
ggatttaatcctgatgtaattgaagcagcacttgctcactgtgataagaatgaagttcgaagagcatataatcga

SEQ ID NO: 472783 - DNA, 75 bp, synthetic construct
  source 1..75: mol_type = other DNA
gaagcaggattcgcaacgattacttttgattatcgtggatttggtgagagtgatggagaacgaggccgtctggtt

SEQ ID NO: 472784 - DNA, 75 bp, synthetic construct
  source 1..75: mol_type = other DNA
agcaagtacagcactcaatgagcagggattcaatgcagatgttattgaagcagcattggcccattctgataaaaa

SEQ ID NO: 472785 - DNA, 75 bp, synthetic construct
  source 1..75: mol_type = other DNA
tatgatatttatgagggcacgttttttgaacgtgtagcatctgtgcagacacaatggttaaaaaaacacatttaa

SEQ ID NO: 472786 - DNA, 75 bp, synthetic construct
  source 1..75: mol_type = other DNA
ctgaaggtattgccctgacatttcgtattcctgaaggaaatataaaacatcctttgattatcttatgccatggat

SEQ ID NO: 472787 - DNA, 75 bp, synthetic construct
  source 1..75: mol_type = other DNA
ctgaaggtatagccctgacattccgtgtccctgaaggggatataaaacatcctttgattattttatgccatggat

SEQ ID NO: 472788 - DNA, 75 bp, synthetic construct
  source 1..75: mol_type = other DNA
cgggtcggggctgtcatcgggatatactcgaactggcggatacggtaagtgagttacgccccgtgaaacatgcgt

SEQ ID NO: 472789 - DNA, 75 bp, synthetic construct
  source 1..75: mol_type = other DNA
gcgtatgactatttgccactggaagaagtggtgcaggcgttaaatgaacgtccacatcaacagacggtgattatc

SEQ ID NO: 472790 - DNA, 75 bp, synthetic construct
  source 1..75: mol_type = other DNA
tcttgaactggcggatacggtgagtgaattacgccccgtgaaacatgcgtttgatgccggtgtaaaagcgcagat

SEQ ID NO: 472791 - DNA, 75 bp, synthetic construct
  source 1..75: mol_type = other DNA
agagttacctaagctgatgcgttctttagctatgtcaaatctttctattccaactcgctgtctaattgaatggca

SEQ ID NO: 472792 - DNA, 75 bp, synthetic construct
  source 1..75: mol_type = other DNA
gcttggttaatagccaaacctatgaaatacacagatgaaatgcctctaactcacactgctgaagggatggccgag

SEQ ID NO: 472793 - DNA, 75 bp, synthetic construct
  source 1..75: mol_type = other DNA
ttgacctgacaccagcaatattaaaaaaatggatttcaaaaagaacaacaaaacttaagaccataagaaacaatc

SEQ ID NO: 472794 - DNA, 75 bp, synthetic construct
  source 1..75: mol_type = other DNA
taacccggcgacaccgctgagttatctggattacgtgatggataagctggatgtgatcctgctgatgtccgtcaa

SEQ ID NO: 472795 - DNA, 75 bp, synthetic construct
  source 1..75: mol_type = other DNA
tgtgtgctgtgggtaaaatcttctgaggtggtagccaatgattacaatcctaatgtaatggcgccaggagagaaa

SEQ ID NO: 472796 - DNA, 75 bp, synthetic construct
  source 1..75: mol_type = other DNA
aggtaaacgcctgaagggctggctgccggtggcctgtattaatcctgagagaaagggacaggctgaacgcattgc

SEQ ID NO: 472797 - DNA, 75 bp, synthetic construct
  source 1..75: mol_type = other DNA
tgtgtgctgtgggtaaaagcagatgaggtggtggccaatgattacaatcctaatgtcatggcgccgggtgagaag

SEQ ID NO: 472798 - DNA, 75 bp, synthetic construct
  source 1..75: mol_type = other DNA
tcagaggaagacactcgtgatatcaatgatagcctgatcctcgatgcgccagagtctccgctggcggatgcggtg

SEQ ID NO: 472799 - DNA, 75 bp, synthetic construct
  source 1..75: mol_type = other DNA
ctgacgcagccacggacgaataaactggttcgcgccctgcagaagcaggggctggcggtttctgtgaaacgggag

SEQ ID NO: 472800 - DNA, 75 bp, synthetic construct
  source 1..75: mol_type = other DNA
cttcccctgttattacgcccgctgttcgcactcttccgcaaaatatgcaggcagaacagcttttatgaccgggag

SEQ ID NO: 472801 - DNA, 75 bp, synthetic construct
  source 1..75: mol_type = other DNA
gggatgaagttctcagactgaaacagattagtggactgtcggagctgtttcaggaagagagtttcagccccgcgt

SEQ ID NO: 472802 - DNA, 75 bp, synthetic construct
  source 1..75: mol_type = other DNA
atgagtcaggtactgattacaggcgcaacggggctggtgggcggtcacctgctgcggatgttgattaacgaaccg

SEQ ID NO: 472803 - DNA, 75 bp, synthetic construct
  source 1..75: mol_type = other DNA
gatccgcgttctgcgcgacaacgtggttatctacgaaggcgagctggagtccctgcgccgcttcaaagatgacgt

SEQ ID NO: 472804 - DNA, 75 bp, synthetic construct
  source 1..75: mol_type = other DNA
ggtgtcggaagaaaacaaccattatctggtggtggatggttttcaccgtcagttactgggcaggagttctgaaac

SEQ ID NO: 472805 - DNA, 75 bp, synthetic construct
  source 1..75: mol_type = other DNA
gtggtggatggttttcatcgccaggtgctgggcagggaagcaggtacgggaaaacgtttgaagggctggctgccg

SEQ ID NO: 472806 - DNA, 75 bp, synthetic construct
  source 1..75: mol_type = other DNA
tgcaaccattagacataaccgggccagggggaagcaccagataacttcaatgtctgatattgtcagggacctgtc

SEQ ID NO: 472807 - DNA, 75 bp, synthetic construct
  source 1..75: mol_type = other DNA
ctctatggaagttccatctccgcaggcgggtatcgttaaagagatcaaagtctctgttggcgataaaacccagac

SEQ ID NO: 472808 - DNA, 75 bp, synthetic construct
  source 1..75: mol_type = other DNA
tttaatcgtaatgatgataagacagatgctattcagaaaaatttaggtgatgcaccgccattaagcaatgaaggg

SEQ ID NO: 472809 - DNA, 75 bp, synthetic construct
  source 1..75: mol_type = other DNA
cactgcaacaactgcacctgataatagtcattctctctttaatacgcttaagggatggcttttcgatgataagtc

SEQ ID NO: 472810 - DNA, 75 bp, synthetic construct
  source 1..75: mol_type = other DNA
aattcaacgggccaagctgggcggtgtagacgttaaccagatgtataatattacagaatgggcgtatagacacgg

SEQ ID NO: 472811 - DNA, 75 bp, synthetic construct
  source 1..75: mol_type = other DNA
caattctgtcggctgattttgcccgcctgggtgaagataccgcaaaagccctggcagctggcgctgatgtcgtgc

SEQ ID NO: 472812 - DNA, 75 bp, synthetic construct
  source 1..75: mol_type = other DNA
aattcgcagaaaacatcaagccagctaaattaagatttgataatgtcactaaaggctataagaaagcacaaagtg

SEQ ID NO: 472813 - DNA, 75 bp, synthetic construct
  source 1..75: mol_type = other DNA
tcagtcagcgaagcaccgataaccaatctcaaacagggtgctttaaataatcttgcaatgacaactccggcttat

SEQ ID NO: 472814 - DNA, 75 bp, synthetic construct
  source 1..75: mol_type = other DNA
atgctaaggtttgtgctgtttttttttactctatctgtatctgcagttgttcagggtagtgtagttatcatggga

SEQ ID NO: 472815 - DNA, 75 bp, synthetic construct
  source 1..75: mol_type = other DNA
atcctgcgcgaagacgttcaggcttacgtgaaagaagctatcaaacgtgcagaagcagctccggcggcgactggc

SEQ ID NO: 472816 - DNA, 75 bp, synthetic construct
  source 1..75: mol_type = other DNA
cggcgcactgattatgattttcgattccgccggcggtgcagcagacgctgcacctgctcaggcagaagagaagaa

SEQ ID NO: 472817 - DNA, 75 bp, synthetic construct
  source 1..75: mol_type = other DNA
cggctgttatgctgggtggcttaggcgctggcgctgcttttatggctatgaataaggcaaatgaattcgttacta

SEQ ID NO: 472818 - DNA, 75 bp, synthetic construct
  source 1..75: mol_type = other DNA
caatcggcaactccatggccgtcccgtgcatggcatggctgggccagcgcctggtgcagtgcctgcacaagacgg

SEQ ID NO: 472819 - DNA, 75 bp, synthetic construct
  source 1..75: mol_type = other DNA
acccgtgttgtttatccggcgactcaaaagagtattagcatacgtttaaataatgacaatgaatctccggcatta

SEQ ID NO: 472820 - DNA, 75 bp, synthetic construct
  source 1..75: mol_type = other DNA
tcgaatggattgttgtcgatggcggttccaacgacggcacccgtgagtatctggaaaatctcaatggtatcttta

SEQ ID NO: 472821 - DNA, 75 bp, synthetic construct
  source 1..75: mol_type = other DNA
atgttgcttagcataatcactgtcgcgtttcgtaacctcgaagggatagtcaaaacacatgcctcgctggcgcat

SEQ ID NO: 472822 - DNA, 75 bp, synthetic construct
  source 1..75: mol_type = other DNA
cagactgtggctggcagtggtgaattacggctgaacggcgagatgccggaacactggagggtgtcactgtcagta

SEQ ID NO: 472823 - DNA, 75 bp, synthetic construct
  source 1..75: mol_type = other DNA
tgcgtctgactttcgccgcatctacaacgatgcgatcaaaaatgtacagtttgaagatccggttgaggcgctgat

SEQ ID NO: 472824 - DNA, 75 bp, synthetic construct
  source 1..75: mol_type = other DNA
ttatgatcgattttggaataaaaaaaataactgtagttacccaaatgatttacatgtatattgtcgaccatcaat

SEQ ID NO: 472825 - DNA, 75 bp, synthetic construct
  source 1..75: mol_type = other DNA
cctggcttttgggctgaattatcctggcatttacgccaacgtactacctcaaagacgaaagccttatataacaaa

SEQ ID NO: 472826 - DNA, 75 bp, synthetic construct
  source 1..75: mol_type = other DNA
tcaccttacacttgcgaaggcacgagctttacgtgatgagtacttgtcgttgcttgcaaatggtatagacccaca

SEQ ID NO: 472827 - DNA, 75 bp, synthetic construct
  source 1..75: mol_type = other DNA
attgttgaaacagttccgggatggacgcatgacattactaataatggctcggatgagctagttgttatgctttgg

SEQ ID NO: 472828 - DNA, 75 bp, synthetic construct
  source 1..75: mol_type = other DNA
ttggtaaatggtgtaagccaaactataattcttttatagcaactttttgctataatatttccaatgatattgaga

SEQ ID NO: 472829 - DNA, 75 bp, synthetic construct
  source 1..75: mol_type = other DNA
aaagccatcagtgggcatagagagtgggttttccccagtatcaaagctccactcaatcacatgcatgaacaaaca

SEQ ID NO: 472830 - DNA, 75 bp, synthetic construct
  source 1..75: mol_type = other DNA
gttcctgctcgatgagagctcaatggtgggcaataccgatatggcacgggcatacgccctgattgcggccggtgg

SEQ ID NO: 472831 - DNA, 75 bp, synthetic construct
  source 1..75: mol_type = other DNA
atctcacagaacgggtgattctcatgcagtggtggagtgactttgtttcgtctcaaaaatacaaaattattgccg

SEQ ID NO: 472832 - DNA, 75 bp, synthetic construct
  source 1..75: mol_type = other DNA
ttctggtggcggctcaagtggcggcggatttagcggaggtggcggttcttctggcggtggcggcgcgtctggccg

SEQ ID NO: 472833 - DNA, 75 bp, synthetic construct
  source 1..75: mol_type = other DNA
ccgctgttgtgctttaccgccgccgccacgcgcctgcgtctctccactctgggctttttccagtatattggcccg

SEQ ID NO: 472834 - DNA, 75 bp, synthetic construct
  source 1..75: mol_type = other DNA
cgataaaatggtgacttttgcctttatctgggtggcgctggcgatttttgtgatggatgcgatttatacgcagcg

SEQ ID NO: 472835 - DNA, 75 bp, synthetic construct
  source 1..75: mol_type = other DNA
caaaccggcatgttaatcgaaacaatgtggctactgcccgtggcggcgatttacctgtttgcgattgccgacagc

SEQ ID NO: 472836 - DNA, 75 bp, synthetic construct
  source 1..75: mol_type = other DNA
ctggattcagtcgtggcgttaagtccgttatggattgtgcattctcttgcggaaattgccaaaggcaccgataaa

SEQ ID NO: 472837 - DNA, 75 bp, synthetic construct
  source 1..75: mol_type = other DNA
aacgtgcgtgagaagaaagccatcaccggcgcggactacccgccaacgcttatcaccaaagagaacctgcagcag

SEQ ID NO: 472838 - DNA, 75 bp, synthetic construct
  source 1..75: mol_type = other DNA
atgaaaaaactgatcttagccgccctaatcgccatgacatccggggccgccatagccgaaaacgagcaaattgtt

SEQ ID NO: 472839 - DNA, 75 bp, synthetic construct
  source 1..75: mol_type = other DNA
gatgggtggattaacactggcaagcgaaaatatcggcgcgcttctgttgaatggtgaattaccggaagacagggg

SEQ ID NO: 472840 - DNA, 75 bp, synthetic construct
  source 1..75: mol_type = other DNA
tactactttgctattttttgggtatttgcagtgatgttcttccctttctggttttttcatcaaggcagtaatttt

SEQ ID NO: 472841 - DNA, 75 bp, synthetic construct
  source 1..75: mol_type = other DNA
gaagttatcattcagacaacagcggttccggtggtggctcaagtggcggcggatttagcggcgggggcggttctt

SEQ ID NO: 472842 - DNA, 75 bp, synthetic construct
  source 1..75: mol_type = other DNA
ttctggcgatatgtggcgtgttagtccagctgtggacttttggttcgctacctattatcgcgctgggactggcat

SEQ ID NO: 472843 - DNA, 75 bp, synthetic construct
  source 1..75: mol_type = other DNA
ggataaaatggtgaccttcgcctttatctggctggcgctggcaatttttgtgatggatgcaatttatacgcagcg

SEQ ID NO: 472844 - DNA, 75 bp, synthetic construct
  source 1..75: mol_type = other DNA
ggtggcggctcaagtggcggcggatttagcggaggtggcggttcttctggcggtggcggcgcgtctggccgctgg

SEQ ID NO: 472845 - DNA, 75 bp, synthetic construct
  source 1..75: mol_type = other DNA
cgtttcgtaacctcgcagggatagtcaaaacacacgcctcgctggcgcatctggcgcaggcggacgatatcagct

SEQ ID NO: 472846 - DNA, 75 bp, synthetic construct
  source 1..75: mol_type = other DNA
gcgcgttccggcggtctggttctatggcgcgacgctttcggcaatgcactttgtgcgtattctggataacgccat

SEQ ID NO: 472847 - DNA, 75 bp, synthetic construct
  source 1..75: mol_type = other DNA
atcccaatcgtattgtggcgctggagtggttgccggtggaattactgctggcgctcggcatcgtgccttacggcg

SEQ ID NO: 472848 - DNA, 75 bp, synthetic construct
  source 1..75: mol_type = other DNA
gcgcgtacccgcagtctggttttatggtgcgacgctctcggcaatgcactttgtgcgtattctggataacgccat

SEQ ID NO: 472849 - DNA, 75 bp, synthetic construct
  source 1..75: mol_type = other DNA
gtggccgtaagtcaggtgccggtcacggcgaagaacatcagtgtggacaccatcaatgactggggtggtgtggaa

SEQ ID NO: 472850 - DNA, 75 bp, synthetic construct
  source 1..75: mol_type = other DNA
cgtttgtccgcgccggacgctttcagcgcgtacccgcagtctggttttatggtgcgacgctctcggcaatgcact

SEQ ID NO: 472851 - DNA, 75 bp, synthetic construct
  source 1..75: mol_type = other DNA
ccgttattgctgacgacgcttatcgatccgcgccatatgctggtcttcggtccaaacagcttgttccaggaaatt

SEQ ID NO: 472852 - DNA, 75 bp, synthetic construct
  source 1..75: mol_type = other DNA
gacaacctaaaaggcagcgatattttagaagtatcggacttactacaatctcaagggcatgttacagttcaaaca

SEQ ID NO: 472853 - DNA, 75 bp, synthetic construct
  source 1..75: mol_type = other DNA
tgatttcgcggcactacgcaaacaagctgaagggttgatcctccagttagcaaaagggggttaccgggcagaagc

SEQ ID NO: 472854 - DNA, 75 bp, synthetic construct
  source 1..75: mol_type = other DNA
ccgctggaaaaactgccttttccgtccttaaatgaggagcaaatagatttctctatccactacaacaaattcagc

SEQ ID NO: 472855 - DNA, 75 bp, synthetic construct
  source 1..75: mol_type = other DNA
aactgccagtgtcctgccatcagacagagaatccttgttctggctgaatgttcaggagattcctccgaagccaaa

SEQ ID NO: 472856 - DNA, 75 bp, synthetic construct
  source 1..75: mol_type = other DNA
agtgatatgaatctgggtaaaaaggtgagcgggaaaatcagcgtggatgctgtaaatgactggggcggagttcag

SEQ ID NO: 472857 - DNA, 75 bp, synthetic construct
  source 1..75: mol_type = other DNA
ttgaaccgggtgaaactgtacgctggcaaacccctaccactaaaagctttaataaatatatggtagatcaggttt

SEQ ID NO: 472858 - DNA, 75 bp, synthetic construct
  source 1..75: mol_type = other DNA
cccaggccaacctgaagctagggcgtaactacccggagccaaaactctcttacacccagcgcggaacctctgccg

SEQ ID NO: 472859 - DNA, 75 bp, synthetic construct
  source 1..75: mol_type = other DNA
cgggctgagcccaggccggatcggggagctttttgataatgaccttgtccgccggcgcgtgacgggatttcagaa

SEQ ID NO: 472860 - DNA, 75 bp, synthetic construct
  source 1..75: mol_type = other DNA
caacagaaaatatcacacagaccatccagcgccttgaccggtatgaaagggattacttcattgtatttgctcacg

SEQ ID NO: 472861 - DNA, 75 bp, synthetic construct
  source 1..75: mol_type = other DNA
ctctggcttaatagggacaaactcccggggattatcaacagctccgcagagacgttcagagattatctggaacag

SEQ ID NO: 472862 - DNA, 75 bp, synthetic construct
  source 1..75: mol_type = other DNA
gacggccacgtttgcgggcgttgataattttgagaacgaaaatgcccgttcaacagaaaatatcacacagaccat

SEQ ID NO: 472863 - DNA, 75 bp, synthetic construct
  source 1..75: mol_type = other DNA
atgccctggacattccgtttggcgagaaggcttctgaccgcgattacaaagaaaatctggtcagtaatttactca

SEQ ID NO: 472864 - DNA, 75 bp, synthetic construct
  source 1..75: mol_type = other DNA
tatcagataactcgcattttcggccaggagccgcaggtcatttttgacggtcagcccacgcaaggtgtcgcgctc

SEQ ID NO: 472865 - DNA, 75 bp, synthetic construct
  source 1..75: mol_type = other DNA
aattcgtctcaatcccgttttgctgatggaaaacagcgaagcctttattgaagaagtggtgccgcatgaactggc

SEQ ID NO: 472866 - DNA, 75 bp, synthetic construct
  source 1..75: mol_type = other DNA
tgccaggagcatcagcttaccgtacgccgccataatcgcgtagttcgtggcgaagccgtctatcgctgtgttcac

SEQ ID NO: 472867 - DNA, 75 bp, synthetic construct
  source 1..75: mol_type = other DNA
gccgcaacaccttcccttaccgctgtaaatgccaggagcatcagcttaccgtgcgccgccataaccgcgtggtgc

SEQ ID NO: 472868 - DNA, 75 bp, synthetic construct
  source 1..75: mol_type = other DNA
ccgggattatcaatagctctgcggagacgttcagcatgtatctggagcagcagatagaatcgcttattgtctggc

SEQ ID NO: 472869 - DNA, 75 bp, synthetic construct
  source 1..75: mol_type = other DNA
catgctggatcaaggtggattttcaccttcatacccgtgcagacaaagaatttcgctatgccggcgaatccgaca

SEQ ID NO: 472870 - DNA, 75 bp, synthetic construct
  source 1..75: mol_type = other DNA
ggcacaagatatcaatttttatacttgcatttactttgatttggcttaggcgcattgacattttgacaaatgccc

SEQ ID NO: 472871 - DNA, 75 bp, synthetic construct
  source 1..75: mol_type = other DNA
tggtatgcgttctattgccagaacagccgccgaagagagtggcaaattcagaacagaagttcttgaagcagcatt

SEQ ID NO: 472872 - DNA, 75 bp, synthetic construct
  source 1..75: mol_type = other DNA
ttctcgctctggcctgccttgcttgtgctggccgtgccagtgctgcgcctgcctccgatgaagttgccaggcttg

SEQ ID NO: 472873 - DNA, 75 bp, synthetic construct
  source 1..75: mol_type = other DNA
gattttgatttcattaataaggtatggactgtaccgccagaacgacataagacaggtgatataacaggcgaaccg

SEQ ID NO: 472874 - DNA, 75 bp, synthetic construct
  source 1..75: mol_type = other DNA
gctggaggccatgaaaccaatcagccaccaccgcaattacgttttcccaagtctgaaagacccacagcagccgat

SEQ ID NO: 472875 - DNA, 75 bp, synthetic construct
  source 1..75: mol_type = other DNA
gccgaagcgtcatcaacgcggtgggatgaaatcaacctggacgcgaagcaatggacgatacctgccggacgcatg

SEQ ID NO: 472876 - DNA, 75 bp, synthetic construct
  source 1..75: mol_type = other DNA
caacctggaaacactcaagcgggttttacagcgcgttaatgaggtaatggattacgccgccaacagtgggctgat

SEQ ID NO: 472877 - DNA, 75 bp, synthetic construct
  source 1..75: mol_type = other DNA
acaaaatctgtaagcgcggcgaatcctccggcccggatgtttcccgtgaaggcgttcagcgcgacctgctaccgc

SEQ ID NO: 472878 - DNA, 75 bp, synthetic construct
  source 1..75: mol_type = other DNA
gtttaccgactccggtattaagcgcatcgcggaagcagcatggcaggtgaacgaatctaccgaaaacatcggtgc

SEQ ID NO: 472879 - DNA, 75 bp, synthetic construct
  source 1..75: mol_type = other DNA
ccaaattcaccgaagtcggttatgtgggtaaagaagtcgattctattatccgcgacctgaccgatgccgccgtga

SEQ ID NO: 472880 - DNA, 75 bp, synthetic construct
  source 1..75: mol_type = other DNA
ttgctgaaataatgctcggtcataaactgccaggggtatggcaagtttatgataagagcgattatctagaagaac

SEQ ID NO: 472881 - DNA, 75 bp, synthetic construct
  source 1..75: mol_type = other DNA
ctttttactaaggaaggaagcagggagccagttggtcggacatcattgcagtcgctgccttacaatttaatgcag

SEQ ID NO: 472882 - DNA, 75 bp, synthetic construct
  source 1..75: mol_type = other DNA
ggcctgagcggtgcctggtggtggcaagaccacaaagctcagcaggaagagatcaccactatggccgatcaatct

SEQ ID NO: 472883 - DNA, 75 bp, synthetic construct
  source 1..75: mol_type = other DNA
atggctattccaaaattacaggcttacgtactgccggagtctcacgatatccctaagaataaagtcgactgggcc

SEQ ID NO: 472884 - DNA, 75 bp, synthetic construct
  source 1..75: mol_type = other DNA
ggccaccaagccgtggcacaaatgggcaatttatccatcggtaaaatactataaaatagctttagaaagatcccc

SEQ ID NO: 472885 - DNA, 75 bp, synthetic construct
  source 1..75: mol_type = other DNA
acatcatattgccagcggtgctggagtgactgttcaggctgtttcgttatgggaaaatgactcagcaattcctac

SEQ ID NO: 472886 - DNA, 75 bp, synthetic construct
  source 1..75: mol_type = other DNA
cgcgtgcactgttagaaaatactgaactgagtgctcgtgaaattgctgaaaaggcgttggatattgcaggcgaca

SEQ ID NO: 472887 - DNA, 75 bp, synthetic construct
  source 1..75: mol_type = other DNA
attctgcgctggtcaccatgcacagtctggcctgtgaactgttgccggagtggcgtgcgttttttgatgctctgc

SEQ ID NO: 472888 - DNA, 75 bp, synthetic construct
  source 1..75: mol_type = other DNA
agccaatgcaggaaaaggcagtggccagattgtctgatcctgaattgcgagggcaatatttcaattctggtgttg

SEQ ID NO: 472889 - DNA, 75 bp, synthetic construct
  source 1..75: mol_type = other DNA
gcaatatatccatcggtgaaatactataaaatagcgttagaaaattccccctggaaagatgactctccgcgagat

SEQ ID NO: 472890 - DNA, 75 bp, synthetic construct
  source 1..75: mol_type = other DNA
aacgggccatgttaagcattggcgcatatccagaaatcagcattgcgggcgcgcgaaagataaaagacgaataca

SEQ ID NO: 472891 - DNA, 75 bp, synthetic construct
  source 1..75: mol_type = other DNA
cacccgcaacgataaaaagcctccagcgaaaagccagcaacgaaaaaaaggaccttttcatcactgacggcgaag

SEQ ID NO: 472892 - DNA, 75 bp, synthetic construct
  source 1..75: mol_type = other DNA
ggcgtggtgggggaattttgtagaggcagccgcaagcgggagcgtaagcgccacaggtggctatcgtgggttaaa

SEQ ID NO: 472893 - DNA, 75 bp, synthetic construct
  source 1..75: mol_type = other DNA
gcagtatcgttcacttacgtgaaaaagatggagaatggctcgtagtgcacattcttaatgacgacattgtatatg

SEQ ID NO: 472894 - DNA, 75 bp, synthetic construct
  source 1..75: mol_type = other DNA
gggcagtattttaattctggtgtcgtttacttagacctaaaaaaatggacagaagcaaaactaaccgaaaaagca

SEQ ID NO: 472895 - DNA, 75 bp, synthetic construct
  source 1..75: mol_type = other DNA
actgccaggggtatggcaagtttatgataagagcgattatctagaagaacagcgtaaagcttacctggcatggtg

SEQ ID NO: 472896 - DNA, 75 bp, synthetic construct
  source 1..75: mol_type = other DNA
cgtttctgcccgacaggtggtatttctccggctaactaccgtgactacctggcgctgaaaagcgtgctgtgcatc

SEQ ID NO: 472897 - DNA, 75 bp, synthetic construct
  source 1..75: mol_type = other DNA
atgaaaaaacgctgcctgttggcaagcacccgttgcaactttattcgctgggtacgccaaacggtcagaaagtaa

SEQ ID NO: 472898 - DNA, 75 bp, synthetic construct
  source 1..75: mol_type = other DNA
gacagacaatacttatcagcccgcgaaagtctggacgtgggataaatccgctggcggcgcgttcgccaatatcaa

SEQ ID NO: 472899 - DNA, 75 bp, synthetic construct
  source 1..75: mol_type = other DNA
gtgacctgctacactgcttcaacactaccactcagaaggcaactcactacgacagacaatacttatcagcccgcg

SEQ ID NO: 472900 - DNA, 75 bp, synthetic construct
  source 1..75: mol_type = other DNA
ttaaaacaatatactctggcaaaaggttctccattgcatcaagtaatggagcaaggtctttcatctattgcacag

SEQ ID NO: 472901 - DNA, 75 bp, synthetic construct
  source 1..75: mol_type = other DNA
cgaaagtctggacgtgggataaatctgctggcggcgcattcgccaatatcaatcgcccagtttctggcccgacgc

SEQ ID NO: 472902 - DNA, 75 bp, synthetic construct
  source 1..75: mol_type = other DNA
gcgggcgatgagtacaccattgcggatatggcgatttggccgtggtttggcaacgtggtgttaggcggcgtgtat

SEQ ID NO: 472903 - DNA, 75 bp, synthetic construct
  source 1..75: mol_type = other DNA
aacctgtcgatctgagtcgttttatcagaactaaccaggttgcgcgtctgaccctcaatgccgaacaatcaccgg

SEQ ID NO: 472904 - DNA, 75 bp, synthetic construct
  source 1..75: mol_type = other DNA
ggtgctttaccatctcggttcacgagggattgagtacgatctactcccctggtgccagcaacagcagatgccggt

SEQ ID NO: 472905 - DNA, 75 bp, synthetic construct
  source 1..75: mol_type = other DNA
cgtctcaatactgattatctcgatctttacttattacactggtctggcagtttcgcttttgaagagactgtcgca

SEQ ID NO: 472906 - DNA, 75 bp, synthetic construct
  source 1..75: mol_type = other DNA
aatcgcccggtttctggtccgacgcatgaaaaaacgctgccggtgggcaaacatccattacaactttattcgctg

SEQ ID NO: 472907 - DNA, 75 bp, synthetic construct
  source 1..75: mol_type = other DNA
tgtcgaagtgaacccgaattcgaagatcccggcattgcgcgatcatactcataatccaccgatccgcgtgtttga

SEQ ID NO: 472908 - DNA, 75 bp, synthetic construct
  source 1..75: mol_type = other DNA
atgccaacgaaaccaccttatcctcgtgaagcatatgttgtgacgattgaaaaaggaaaaccagggcagaccgta

SEQ ID NO: 472909 - DNA, 75 bp, synthetic construct
  source 1..75: mol_type = other DNA
actggcgctgctactggcgggcgtctggggggggctacaccactggctgaatgtactggtggatgaactgctgcc

SEQ ID NO: 472910 - DNA, 75 bp, synthetic construct
  source 1..75: mol_type = other DNA
ttctggcacgacctggcagcaccgatcctggcgggaattattaccgcagcgattgtcagctggtggcgtaaccgg

SEQ ID NO: 472911 - DNA, 75 bp, synthetic construct
  source 1..75: mol_type = other DNA
ccatgggaaatggctggtcaggccaaactacgctgcggcgaaagcgggcttgatcggcttcagtaaatcactggc

SEQ ID NO: 472912 - DNA, 75 bp, synthetic construct
  source 1..75: mol_type = other DNA
gtctgaattttctatgggtggggtatcaaccaccaataatatggaattgtgtgctgacgccaaaaaagtccaacg

SEQ ID NO: 472913 - DNA, 75 bp, synthetic construct
  source 1..75: mol_type = other DNA
cggcacacaacaagatacgcaagccgccattgcctggctgcaggaacaccatgtaaaagtagaggtactgggtta

SEQ ID NO: 472914 - DNA, 75 bp, synthetic construct
  source 1..75: mol_type = other DNA
gcagagctgggcatggccttctggcatgatttagcggctccggtcattgctggcattcttgccagtatgatcgtg

SEQ ID NO: 472915 - DNA, 75 bp, synthetic construct
  source 1..75: mol_type = other DNA
ccttctggcacgatttagcggctccggtcattgctggcattctcgccagcctgatcgtgaactggctgaatcagc

SEQ ID NO: 472916 - DNA, 75 bp, synthetic construct
  source 1..75: mol_type = other DNA
ctgagccgtggcggcatggacgacggtcaggccatctggatgaaggatccactccagtcgcatttcttcaacact

SEQ ID NO: 472917 - DNA, 75 bp, synthetic construct
  source 1..75: mol_type = other DNA
acgtggagcacataacttacgcgcagtgcgccctgctggacgaaacggtgctcagccgtagtggcatggacgacg

SEQ ID NO: 472918 - DNA, 75 bp, synthetic construct
  source 1..75: mol_type = other DNA
gctgacgctgctactggccggtgtctggtgggggctgcaccactggctgaacgtgctggtggatgaattgctgcc

SEQ ID NO: 472919 - DNA, 75 bp, synthetic construct
  source 1..75: mol_type = other DNA
catttaaaaaactcaatggcctggtgtctgaattttctatgggtggggtatcaaccaccaataatatggaattgt

SEQ ID NO: 472920 - DNA, 75 bp, synthetic construct
  source 1..75: mol_type = other DNA
gcggtgaagaaaaccctggctctatggatacccctgtatgcgtgtgtaaaggcggggcaatccctcgtattgggt

SEQ ID NO: 472921 - DNA, 75 bp, synthetic construct
  source 1..75: mol_type = other DNA
tccggcagccccggagcgcgaccagcttatttcgacgctcaacgggcaggtcgcgccatttggtgtgctgccgga

SEQ ID NO: 472922 - DNA, 75 bp, synthetic construct
  source 1..75: mol_type = other DNA
gcccagcgatggcgttgttgaaaaggcccgcaagattcatgatgattatgttcatgatttcgtcttcgacgatgg

SEQ ID NO: 472923 - DNA, 75 bp, synthetic construct
  source 1..75: mol_type = other DNA
acgtcatatttaaagagataggaaatcccccaccgcataaagccagaatagccgctgtcagtctgttatttaaag

SEQ ID NO: 472924 - DNA, 75 bp, synthetic construct
  source 1..75: mol_type = other DNA
cgtccggtagcgacgcaggtcgatgatctgctttcggagattcgtcagcgtgcggcgattaatgaacgcgtcctg

SEQ ID NO: 472925 - DNA, 75 bp, synthetic construct
  source 1..75: mol_type = other DNA
ggctactgttcggggattgagaactactcgcgcttcctctccggtcgtggaccgggtgagccaccgccgacgctg

SEQ ID NO: 472926 - DNA, 75 bp, synthetic construct
  source 1..75: mol_type = other DNA
gcgcccgcgtaaattcgacgaagaaggcgcattatggactgaagcgatgataaccgccgctcaccggatgcagat

SEQ ID NO: 472927 - DNA, 75 bp, synthetic construct
  source 1..75: mol_type = other DNA
ttgatggcgactactcaggccgtatgtctcctaacgactgggcgcaggcatcaatgaacgcctacaacatccatg

SEQ ID NO: 472928 - DNA, 75 bp, synthetic construct
  source 1..75: mol_type = other DNA
aagcaagggtaagttcgcccgtgctgaaccaatatctgcgctatatgcacaaggaagggtggcacacactggtga

SEQ ID NO: 472929 - DNA, 75 bp, synthetic construct
  source 1..75: mol_type = other DNA
gtgttcctgaaccctaacacgggcaaggttgaaaccacttaccctgttttccgtggggtagtcgattccatcggg

SEQ ID NO: 472930 - DNA, 75 bp, synthetic construct
  source 1..75: mol_type = other DNA
tttgctttattttttaccctacagctttcgcttatgcttgttataaaaagagatggctagagtggatttttctta

SEQ ID NO: 472931 - DNA, 75 bp, synthetic construct
  source 1..75: mol_type = other DNA
ctttggttgtcaatattgaaaaagtgtaataaagcatattgcttacctgaagttttggcatattatagaattgac

SEQ ID NO: 472932 - DNA, 75 bp, synthetic construct
  source 1..75: mol_type = other DNA
tggaaacgagaacgatctattcttctcaagggcgggtcgctggttatcggaaagcaagtggcattcgtctaaaaa

SEQ ID NO: 472933 - DNA, 75 bp, synthetic construct
  source 1..75: mol_type = other DNA
cggaaacgagaacgatctattcttctcccgtgccgggaagtggaatagcgaaagccgctggcattcatcgaagaa

SEQ ID NO: 472934 - DNA, 75 bp, synthetic construct
  source 1..75: mol_type = other DNA
tggaaacgagaacgatctattcttctctcgtgccgggaagtggaactcagaaagcaagtggcattcttctaaaaa

SEQ ID NO: 472935 - DNA, 75 bp, synthetic construct
  source 1..75: mol_type = other DNA
cagtaagggtaagtttgcccgcgcggaaccaatatccgcattgtatgcgcaaggcaaggtcgctcacactggcga

SEQ ID NO: 472936 - DNA, 75 bp, synthetic construct
  source 1..75: mol_type = other DNA
ccgcagccaccttcctgaccctggccggactgttcgccttctcgctgattaacctgaaactgctggagaaaggag

SEQ ID NO: 472937 - DNA, 75 bp, synthetic construct
  source 1..75: mol_type = other DNA
gatacccacgaccttggtaaagcctccgcagccaccttcctgaccctggccggactgttcgccttctcgctgatt

SEQ ID NO: 472938 - DNA, 75 bp, synthetic construct
  source 1..75: mol_type = other DNA
gcaatacgtcgggctggataactttgcccgcctgtttgccgataacgtcttctggcagtcgctgggcaataacct

SEQ ID NO: 472939 - DNA, 75 bp, synthetic construct
  source 1..75: mol_type = other DNA
aacgttactggacacggtcagccgactgaagatgacaccgtgctggtttatggtgccggcccgattggtctgact

SEQ ID NO: 472940 - DNA, 75 bp, synthetic construct
  source 1..75: mol_type = other DNA
gtattgatgggcttctccagtgaaccgtctgaagtgattcagcaaggaattaccggaaaagaactctctattttc

SEQ ID NO: 472941 - DNA, 75 bp, synthetic construct
  source 1..75: mol_type = other DNA
taaatgcaaataaatttccggtcgttatcgactggttaagtaaagggttaattaaaccagaaaaattaattaccc

SEQ ID NO: 472942 - DNA, 75 bp, synthetic construct
  source 1..75: mol_type = other DNA
tttgtcgaatacggtattcgtcacaatacactgggtactgaatttaaagcctggcttgaagaagagatgggcatt

SEQ ID NO: 472943 - DNA, 75 bp, synthetic construct
  source 1..75: mol_type = other DNA
aaggaagggtggcccacactggtgaactgtacacgctggaaaatcaaatgatggaatacgtgccagctaccgcca

SEQ ID NO: 472944 - DNA, 75 bp, synthetic construct
  source 1..75: mol_type = other DNA
aagcaagggtaaattcgcccgcgccgaaccaatatctgcactgtatgcacaaggaagggtggcccacactggtga

SEQ ID NO: 472945 - DNA, 75 bp, synthetic construct
  source 1..75: mol_type = other DNA
gtgaagatgaacccgcagaggaacgtctggcaatggttgataaatttgttcgtcgctgccgtagtgccgggctgg

SEQ ID NO: 472946 - DNA, 75 bp, synthetic construct
  source 1..75: mol_type = other DNA
ttgatggaactggtcatagccagatcatggttgaacctgttgctgatgtgacagcatatggtgttgtggattgca

SEQ ID NO: 472947 - DNA, 75 bp, synthetic construct
  source 1..75: mol_type = other DNA
tgaaagggaagagccatgactgcggtaataaattaggttacatgcaggccttcgttgaatacggtattcgtcata

SEQ ID NO: 472948 - DNA, 75 bp, synthetic construct
  source 1..75: mol_type = other DNA
cccaaattaatcctgtttctaaagttaattattctgaattattaaagactaatgtaataggttgcttgacagctg

SEQ ID NO: 472949 - DNA, 75 bp, synthetic construct
  source 1..75: mol_type = other DNA
attgagacgcgttatcgctataacccggacgtaaaaagcctgccagcgattgttccggcggtgatcccgcttctg

SEQ ID NO: 472950 - DNA, 75 bp, synthetic construct
  source 1..75: mol_type = other DNA
gttcgaacggctgcggtaaatccaccaccatgaaaatgcttaccggattgctgcccgccagcgaaggtgaggcgt

SEQ ID NO: 472951 - DNA, 75 bp, synthetic construct
  source 1..75: mol_type = other DNA
ccggtgctcgtgtcattgagcagggcaatgtgatcgtgctgggcggcgatatgcgcgacccgaagcatcgccgcg

SEQ ID NO: 472952 - DNA, 75 bp, synthetic construct
  source 1..75: mol_type = other DNA
cgggatgatcgatccggtagcttcactggaagggccgggacgttggattggcgaggtttatccgaccagccattt

SEQ ID NO: 472953 - DNA, 75 bp, synthetic construct
  source 1..75: mol_type = other DNA
cccgttactttatcgaacagccgccgctcaccagttacgatgagcttgagcgccggatgcgtgcaggagatgtga

SEQ ID NO: 472954 - DNA, 75 bp, synthetic construct
  source 1..75: mol_type = other DNA
ctgatgatgatcccgtcaatgctaagcgcccttagcgtggtgcgggaaaaagagctagggtcgattatcaacctt

SEQ ID NO: 472955 - DNA, 75 bp, synthetic construct
  source 1..75: mol_type = other DNA
aatttttactcggcaaacagctaccatacattgcgctggggatgctgaactttttcctgctctgcgccttgtcgg

SEQ ID NO: 472956 - DNA, 75 bp, synthetic construct
  source 1..75: mol_type = other DNA
ggagctggttgagaaacgcggggctgccagtctggaagaggcatttatcgcctatttgcaggaagcggcagggca

SEQ ID NO: 472957 - DNA, 75 bp, synthetic construct
  source 1..75: mol_type = other DNA
caaccgtaaattatgacgggaaaaaattcacgtatatggttattaatgagtggttcggatttcgagatgaagagt

SEQ ID NO: 472958 - DNA, 75 bp, synthetic construct
  source 1..75: mol_type = other DNA
cgggatgatcgatccggtagcttcgctggaaggtccaggacgttggatcggcgaggtttacccgaccagtcattt

SEQ ID NO: 472959 - DNA, 75 bp, synthetic construct
  source 1..75: mol_type = other DNA
tgcacgccggaaaagtgcttgccagcggtacaccgcaggaactggttgagaaacgcggagccgccagtctggaag

SEQ ID NO: 472960 - DNA, 75 bp, synthetic construct
  source 1..75: mol_type = other DNA
gcgtggacgctcaatctctccggttcccgttactttatcgaacaaccaccgctcaccagttatgacgagcttgat

SEQ ID NO: 472961 - DNA, 75 bp, synthetic construct
  source 1..75: mol_type = other DNA
gcaccgggttagcaccgtttcgcgatcgtccggcagggaaactctccggcgggatgaagcaaaaacttgggctgt

SEQ ID NO: 472962 - DNA, 75 bp, synthetic construct
  source 1..75: mol_type = other DNA
gttacaggctctggctaacgaactggccaaaaacctcaaaacccctgaagacctcagtcagtttgatcggctgct

SEQ ID NO: 472963 - DNA, 75 bp, synthetic construct
  source 1..75: mol_type = other DNA
ttctgaactgcatatcttccgcgactgtggtcactgggcgcagtgggaacatgccgacgctttcaatcaactggt

SEQ ID NO: 472964 - DNA, 75 bp, synthetic construct
  source 1..75: mol_type = other DNA
cctgaataacatgctgtcgcgtcgcgatcacctggaaaactttgtccagagtctggagggcactgttgcaaatag

SEQ ID NO: 472965 - DNA, 75 bp, synthetic construct
  source 1..75: mol_type = other DNA
acgtatgaatatcttttatctcttggtgatgaacgtataagagtttttagaaataagatcaactctggagccggt

SEQ ID NO: 472966 - DNA, 75 bp, synthetic construct
  source 1..75: mol_type = other DNA
ttaaagtttggtatattcagaagtgcatattacttttcgttttatgtttttaaggcattgaaaaagcataaaaca

SEQ ID NO: 472967 - DNA, 75 bp, synthetic construct
  source 1..75: mol_type = other DNA
aaaaaatagattatgcccactgcctaaataaaaacctagcattttatcgcgaaggtcatttaagtttatcatcga

SEQ ID NO: 472968 - DNA, 75 bp, synthetic construct
  source 1..75: mol_type = other DNA
ggcaacgcacgacgtgctggctggcctgaccgcgcgtgaagcaaaagttctgcgtatgcgtttcggtattgatat

SEQ ID NO: 472969 - DNA, 75 bp, synthetic construct
  source 1..75: mol_type = other DNA
ggttacaggatgtggcgagccgacaatcgacacccgccagccaaagcgggctgatgaatattgagacgcgctatc

SEQ ID NO: 472970 - DNA, 75 bp, synthetic construct
  source 1..75: mol_type = other DNA
acacccgtggaactcggtgtctggatcgacggtgcgatgcccagtcgtgccgaaacggtaaaaggttacgtgcag

SEQ ID NO: 472971 - DNA, 75 bp, synthetic construct
  source 1..75: mol_type = other DNA
acagtggttcgcgatcggatctcaatgcgcgcatcctgaaaagcgtggtggatcaactggatatcgccaaaatcc

SEQ ID NO: 472972 - DNA, 75 bp, synthetic construct
  source 1..75: mol_type = other DNA
gcaatgaccgctttgtgccgatggatgccggtctgcgcctgctttctgggattgccggttctgaactgcacatct

SEQ ID NO: 472973 - DNA, 75 bp, synthetic construct
  source 1..75: mol_type = other DNA
tctcgccagatgctgcaagagatgggccgtgaaccgacgccggaagaactggctgaacgtatgctgatgccggaa

SEQ ID NO: 472974 - DNA, 75 bp, synthetic construct
  source 1..75: mol_type = other DNA
tctgtcgctttgcgggccatctttcgcacttctacagggtcgcccaacatgcggtcctttgcagccagcttgtgc

SEQ ID NO: 472975 - DNA, 75 bp, synthetic construct
  source 1..75: mol_type = other DNA
tctgtcgctttgctggccatctttcgcacttctacagggtcgcccaacatgcggtgctttgcagccagctcgtgc

SEQ ID NO: 472976 - DNA, 75 bp, synthetic construct
  source 1..75: mol_type = other DNA
tcggcgtgtggtgcgcgtcgtggatgttgtatgttcgcccgcagcggaaagcaaaactgaaaaccgcaacggctt

SEQ ID NO: 472977 - DNA, 75 bp, synthetic construct
  source 1..75: mol_type = other DNA
tccggcagtattgtcaattatgagccctccaatgtgattatgctgaccgggcgagcctcggtggtgaaacgtctg

SEQ ID NO: 472978 - DNA, 75 bp, synthetic construct
  source 1..75: mol_type = other DNA
atgtcatttattaaaactttttccgggaagcatttttattatgacaggataaataaagacaacatcgatattaac

SEQ ID NO: 472979 - DNA, 75 bp, synthetic construct
  source 1..75: mol_type = other DNA
cagagatgttcaacgtgattccactggcaccgggccatgcctacgggatgtttatggaacgctttaacgagttat

SEQ ID NO: 472980 - DNA, 75 bp, synthetic construct
  source 1..75: mol_type = other DNA
gcggtgctttgcagccagctggtaccgcaggaatttgcttttgaagcattaatgcatgatgcaacagaagcgtat

SEQ ID NO: 472981 - DNA, 75 bp, synthetic construct
  source 1..75: mol_type = other DNA
tcttccggtgtcgacgaaaaactgttcccgcgtgccgtacgcgtggcaatgacggcgggcgcatcgggattcctg

SEQ ID NO: 472982 - DNA, 75 bp, synthetic construct
  source 1..75: mol_type = other DNA
caaagtcgaaatgccgctttacggcaaaggtccgcaacaagagcttcttaccgcttcacaacgtctgaacgagca

SEQ ID NO: 472983 - DNA, 75 bp, synthetic construct
  source 1..75: mol_type = other DNA
atgataaagttcatttttacgtatcgaatgcagcctatgaaaaagactctttgattgatgaacaagtatatgacg

SEQ ID NO: 472984 - DNA, 75 bp, synthetic construct
  source 1..75: mol_type = other DNA
ttgattgatgaacaagtatatgacgcatctctcgggtactacatcggctcacttacagtagaaaaagaatatacg

SEQ ID NO: 472985 - DNA, 75 bp, synthetic construct
  source 1..75: mol_type = other DNA
aacgtgattccactggctccaggccatgcctacgggatgtttatggaacgctttaacgaattatcggagttacac

SEQ ID NO: 472986 - DNA, 75 bp, synthetic construct
  source 1..75: mol_type = other DNA
ctatcaagcgagagcttaaggatattcttcgattgagatccttttactccaaaaaagatgatgatagttttgtat

SEQ ID NO: 472987 - DNA, 75 bp, synthetic construct
  source 1..75: mol_type = other DNA
cttacctcggcaaaccgaccggactggaagattacatcggttggctggccaataacttcgatccgtccatctcat

SEQ ID NO: 472988 - DNA, 75 bp, synthetic construct
  source 1..75: mol_type = other DNA
tgatggaattgtggtttctaaccacggtggccgccagctggacggtgtgctgtcttctgcccgtgcgttgcctgc

SEQ ID NO: 472989 - DNA, 75 bp, synthetic construct
  source 1..75: mol_type = other DNA
gcggctttatgcgtaacgcactggagcgagcaaaagcagcgggttgttcgacgctggttttcaccgtggatatgc

SEQ ID NO: 472990 - DNA, 75 bp, synthetic construct
  source 1..75: mol_type = other DNA
aagcggcctaacccgagcgacagtaaagataccgggcagatcgaacaagattgcgatgtctggattggcctctat

SEQ ID NO: 472991 - DNA, 75 bp, synthetic construct
  source 1..75: mol_type = other DNA
taccgggagatcaaaggattatttcaagctgataaaccaactgacctgataacactgaccgaactgatggaatcg

SEQ ID NO: 472992 - DNA, 75 bp, synthetic construct
  source 1..75: mol_type = other DNA
aaaattgttgcttcattaatcagcccaaccagcggaacgttgctgtttgaaggtgaggatgtcagtacactcaag

SEQ ID NO: 472993 - DNA, 75 bp, synthetic construct
  source 1..75: mol_type = other DNA
ggatggcattgtagtttctaaccacggcggtcgtcagttggatggcgtgctctcttccgcccgcgcactgcctgc

SEQ ID NO: 472994 - DNA, 75 bp, synthetic construct
  source 1..75: mol_type = other DNA
caacaccgggcgcgcgctatcgtgatgcgcactcaggtatgagcggcccgaacgccgcaatgcgccgctactggc

SEQ ID NO: 472995 - DNA, 75 bp, synthetic construct
  source 1..75: mol_type = other DNA
aataacttcgatccgtccatctcatggaaagaccttgagtggatccgcgatttctgggatggcccgatggtgatc

SEQ ID NO: 472996 - DNA, 75 bp, synthetic construct
  source 1..75: mol_type = other DNA
cggtgaaattacgcaagattcgctggtgcaggggttgggcaaagagttgccggcggcgctggctccgatggcgaa

SEQ ID NO: 472997 - DNA, 75 bp, synthetic construct
  source 1..75: mol_type = other DNA
tgacactgactggcgcgaaatcgatcggtgaaattacgcaagattcgctggtgcaggggttgggcaaagagttgc

SEQ ID NO: 472998 - DNA, 75 bp, synthetic construct
  source 1..75: mol_type = other DNA
tttctgggtatggcccgatggtgatcaaagggatcctcgatccggaagatgcgcgcgatgcagtacgttttggtg

SEQ ID NO: 472999 - DNA, 75 bp, synthetic construct
  source 1..75: mol_type = other DNA
ggaagcatttttattatgacaagataaataaagacgacatcgtgattaacgatatcgcagtttccctctcaaata

SEQ ID NO: 473000 - DNA, 75 bp, synthetic construct
  source 1..75: mol_type = other DNA
atcaaactgctgcggtgggataaacatggcgtctggctctgctcccgccgcctgcaccgggggcgtttcacctgg

SEQ ID NO: 473001 - DNA, 75 bp, synthetic construct
  source 1..75: mol_type = other DNA
tggggggattgaggtacttttagaagcaataagtaacctacctagtgatattagaaataaatttgttataacagg

SEQ ID NO: 473002 - DNA, 75 bp, synthetic construct
  source 1..75: mol_type = other DNA
aatattcatcccagcctccttactgcaatcagcggacttaaccatattgagcagcaccgggctgtcggcgtagtc

SEQ ID NO: 473003 - DNA, 75 bp, synthetic construct
  source 1..75: mol_type = other DNA
ggtggttacgacctgaccatcagcggtcaacatcgccgtctaagttctaacgacgctattgaactggttagtcat

SEQ ID NO: 473004 - DNA, 75 bp, synthetic construct
  source 1..75: mol_type = other DNA
gcgactttgaccagcttcttgaacagcgtacctgctgcggttttttcattcacaccgggcggaccggacacatga

SEQ ID NO: 473005 - DNA, 75 bp, synthetic construct
  source 1..75: mol_type = other DNA
tatgagtgagagtttgttaaagacaaaactgaaaaatgaagggcacatgttcagtcgcttgttgctggaagagcg

SEQ ID NO: 473006 - DNA, 75 bp, synthetic construct
  source 1..75: mol_type = other DNA
ttgcgtgaaggggaatataaaaatattcgtcagggccgtatgttcatggctgataaattttggacaggaaagctt

SEQ ID NO: 473007 - DNA, 75 bp, synthetic construct
  source 1..75: mol_type = other DNA
gtgctcaaaaatacgaagcagtttatctttcgggttcaggaactcaatgacggttcctatgaggtgatccagcaa

SEQ ID NO: 473008 - DNA, 75 bp, synthetic construct
  source 1..75: mol_type = other DNA
atgattatcgctttaaaatccctgcttaaaaccataaacggatgtaagcgtatgaaaacactatttgaagatatc

SEQ ID NO: 473009 - DNA, 75 bp, synthetic construct
  source 1..75: mol_type = other DNA
aatattcatcccagcctccttactgcaatcagcggacttaaccatgttgaacagcaccgggctgtcggcgtagtc

SEQ ID NO: 473010 - DNA, 75 bp, synthetic construct
  source 1..75: mol_type = other DNA
atggctctttctggcctgtactggaaggcatcccggcaacagagatgttcaacgtgattccactggcaccgggtc

SEQ ID NO: 473011 - DNA, 75 bp, synthetic construct
  source 1..75: mol_type = other DNA
ttaatgaagccgaagcgcgcgacactctcgacgccttacaaaacatgtttgacgttgagccggatgtcggtgcgc

SEQ ID NO: 473012 - DNA, 75 bp, synthetic construct
  source 1..75: mol_type = other DNA
ctttagcgccgcatacgcacagcaaagcggtcaggaagtgctgtatatcaccgaacgtgcggtattccagttaac

SEQ ID NO: 473013 - DNA, 75 bp, synthetic construct
  source 1..75: mol_type = other DNA
acgatatcgcggtttccctttcaaatatctgtcgctttgccggtcatctttcgcacttctacagcgtcgcccaac

SEQ ID NO: 473014 - DNA, 75 bp, synthetic construct
  source 1..75: mol_type = other DNA
tgaagcgttaatgcatgatgcaacagaagcgtattgccaggacatccccgcaccactgaaacgccttcttcctga

SEQ ID NO: 473015 - DNA, 75 bp, synthetic construct
  source 1..75: mol_type = other DNA
cttcctgactataaacggatggaagaaaaaatagacgccgtaatccgtgagaaatacgggttacctcctgttatg

SEQ ID NO: 473016 - DNA, 75 bp, synthetic construct
  source 1..75: mol_type = other DNA
gtaagcatttttattatgacaggataaataaagacgacatcgatattaacgatatcgcggtttccctttcaaata

SEQ ID NO: 473017 - DNA, 75 bp, synthetic construct
  source 1..75: mol_type = other DNA
aacgccttcttcctgattataaacggatggaagaaaaaatagacgccgtaatccgtgagaaatacgggttacccc

SEQ ID NO: 473018 - DNA, 75 bp, synthetic construct
  source 1..75: mol_type = other DNA
gcggtgctttgcagccagctggtaccgcaggaatttgcttttgaagcgttaatgcatgatgcaacagaagcatat

SEQ ID NO: 473019 - DNA, 75 bp, synthetic construct
  source 1..75: mol_type = other DNA
ggtgtgcataacggcatgatgctggatgatgctctgttcggctgcgcccgtaacgccgatgccattattccatca

SEQ ID NO: 473020 - DNA, 75 bp, synthetic construct
  source 1..75: mol_type = other DNA
cggtattccagttaacggcagaaggcgttgaattaattgagatcgcccctggcgtagagattgaccgcgacattc

SEQ ID NO: 473021 - DNA, 75 bp, synthetic construct
  source 1..75: mol_type = other DNA
ggcgtgcataacggtatgatgctggatgatgcgtttttcggctgcgcccgcaacgccgatgccattattccatca

SEQ ID NO: 473022 - DNA, 75 bp, synthetic construct
  source 1..75: mol_type = other DNA
cactgccagacgttatcttgaatattgcgccagccgccatctgattattgctgaaattgttcacggcaaagttgg

SEQ ID NO: 473023 - DNA, 75 bp, synthetic construct
  source 1..75: mol_type = other DNA
gaacgccgcgatctcgggcttgatgatggctctttctggccagtactggaaggtatcccggcaacagagatgttc

SEQ ID NO: 473024 - DNA, 75 bp, synthetic construct
  source 1..75: mol_type = other DNA
gatatcgcagtttccctttcaaatatctgtcgctttgcaggacatctttcacacttctacagcgtcgcccaacat

SEQ ID NO: 473025 - DNA, 75 bp, synthetic construct
  source 1..75: mol_type = other DNA
atgacacagggctggcgggaggataaatgcccgtctgtccgcgcggggaaaaaaccgcgcgtcggtggcgctgaa

SEQ ID NO: 473026 - DNA, 75 bp, synthetic construct
  source 1..75: mol_type = other DNA
atgacacagggctggcgggaggataaatgcccgtctgtccgcgctgggaaaataccgcgcgtcggtggcgctgaa

SEQ ID NO: 473027 - DNA, 75 bp, synthetic construct
  source 1..75: mol_type = other DNA
atgacacagggctggcgggaggataaatgcccgtctgtccgcgcagggaaaagaccgcgcgtcggtggcgctgaa

SEQ ID NO: 473028 - DNA, 75 bp, synthetic construct
  source 1..75: mol_type = other DNA
atgacacagggctggcgggaggataaatgcccgtctggccgcgctgggaaaagaccgcgcgtcggtggcgctgaa

SEQ ID NO: 473029 - DNA, 75 bp, synthetic construct
  source 1..75: mol_type = other DNA
atgacacagggctggcgggaggataaatgcccgtctgcccgcgccgggaaaataccgcgcgtcggtggcgctgaa

SEQ ID NO: 473030 - DNA, 75 bp, synthetic construct
  source 1..75: mol_type = other DNA
atgacacagggctggcgggaggataaatgcccgtctgcccgcgctgggaaaacaccgcgcgtcggtggcgctgaa

SEQ ID NO: 473031 - DNA, 75 bp, synthetic construct
  source 1..75: mol_type = other DNA
gtgccgatgcgccgtggaatagctatgaagaatttatgacttacgccaaagcgaatcccggaaaagtacgcattg

SEQ ID NO: 473032 - DNA, 75 bp, synthetic construct
  source 1..75: mol_type = other DNA
caactatgcatggcttgatggtgccagcttccagacccaaatcaacgagcaggaaaagtactttgacgagctgct

SEQ ID NO: 473033 - DNA, 75 bp, synthetic construct
  source 1..75: mol_type = other DNA
atgataaaacatcttaccttaccgaaaaaaatggctgcaatggtacttcttgccggcgctgccctcagcactgcg

SEQ ID NO: 473034 - DNA, 75 bp, synthetic construct
  source 1..75: mol_type = other DNA
atgacacagggctggcgggaggataaatgcccgtctgaccgcgctgggaaaaaaccgcgcgtcggtggcgctgaa

SEQ ID NO: 473035 - DNA, 75 bp, synthetic construct
  source 1..75: mol_type = other DNA
atgacacagggctggcgggaggataaatgcccgtctgaccgcgcagggaaaataccgcgcgtcggtggcgctgaa

SEQ ID NO: 473036 - DNA, 75 bp, synthetic construct
  source 1..75: mol_type = other DNA
acgggcgcagggggtagagatgtacgcagataacctcgacaacggagcagacgacgcagaacgaggtggttttga

SEQ ID NO: 473037 - DNA, 75 bp, synthetic construct
  source 1..75: mol_type = other DNA
atgacacagggctggcgggaggataaatgcccgtctggccgcgcggggaaaataccgcgcgtcggtggcgctgaa

SEQ ID NO: 473038 - DNA, 75 bp, synthetic construct
  source 1..75: mol_type = other DNA
tggtgtgggtcggtaaggatgtgacaggcatcgagccacgcaatgccagtgttattgaagttcctgatattaccg

SEQ ID NO: 473039 - DNA, 75 bp, synthetic construct
  source 1..75: mol_type = other DNA
tggtgtgggtcggtaaggatgtgacaggtatcgaacccactaacgtcagcatcattgaactcccggatattaccg

SEQ ID NO: 473040 - DNA, 75 bp, synthetic construct
  source 1..75: mol_type = other DNA
gattaatcagtgacgaagacagggagaagctgaaagcgtaccgcatttacgcgaaatcgctgcaggcgatggatt

SEQ ID NO: 473041 - DNA, 75 bp, synthetic construct
  source 1..75: mol_type = other DNA
caaagagcttgggctgaataaatcaaatgtttcacgtgcattcaaagagttatttggaaaaaaaatacttattcg

SEQ ID NO: 473042 - DNA, 75 bp, synthetic construct
  source 1..75: mol_type = other DNA
gcgaaatcgttgcaggcgatggatttcagtgccgttactgataaagtctcatataacgccattgaatggcccgtc

SEQ ID NO: 473043 - DNA, 75 bp, synthetic construct
  source 1..75: mol_type = other DNA
cggaagatgaacgcgatgccctgttacaacaggccagcatcatgaccagcgagtgggaaaaggatttattgctgg

SEQ ID NO: 473044 - DNA, 75 bp, synthetic construct
  source 1..75: mol_type = other DNA
catggatctgtttatgaacgccgccatgttgcgtgcggcacgttatttatggagcgaagcggtcagtggatttgg

SEQ ID NO: 473045 - DNA, 75 bp, synthetic construct
  source 1..75: mol_type = other DNA
ctgtgattattctctttttcttcctgctctgattctgactactgcagtgttgtcctgtctgccgggcgcatcttc

SEQ ID NO: 473046 - DNA, 75 bp, synthetic construct
  source 1..75: mol_type = other DNA
atggctgggtgcaagccttgtgatcgataatcagatgacaatagggatgtttgtggcatttggttcttttcgtgg

SEQ ID NO: 473047 - DNA, 75 bp, synthetic construct
  source 1..75: mol_type = other DNA
atgttgcatttaaaaaatattactgcgggtaatccgaaaaccgcggaacaatatcagctgacaaaacaatatgat

SEQ ID NO: 473048 - DNA, 75 bp, synthetic construct
  source 1..75: mol_type = other DNA
atcgctatctggaaaatgcgtccggcggacatattcaccacgatcttcagcaatatgctgaagcatcgtggcggt

SEQ ID NO: 473049 - DNA, 75 bp, synthetic construct
  source 1..75: mol_type = other DNA
gcatcgctatctggaaaatgcgtccggcggacatattcaccacgatcttagccacgtcttcgacttacaccgtaa

SEQ ID NO: 473050 - DNA, 75 bp, synthetic construct
  source 1..75: mol_type = other DNA
accgtgaaagcctgttctgggtgaatgttaaagctattcctgctatggaaaaagaccagaagaatgagaatacat

SEQ ID NO: 473051 - DNA, 75 bp, synthetic construct
  source 1..75: mol_type = other DNA
gctcagggatgtgctaaaacatgacgtgccgcaaccaaatcgacaccagcggagcagggaaccactaaaacagca

SEQ ID NO: 473052 - DNA, 75 bp, synthetic construct
  source 1..75: mol_type = other DNA
tgtggaaagttcaccggcggtgacgttccggttatgcaccctacaccgtctgagcatgccgcagcggtgttaaat

SEQ ID NO: 473053 - DNA, 75 bp, synthetic construct
  source 1..75: mol_type = other DNA
ttgctggcgctgcacgtgctttcaatatttccccgctctactggaaaaaataccgtaaaggacagatgaccacga

SEQ ID NO: 473054 - DNA, 75 bp, synthetic construct
  source 1..75: mol_type = other DNA
gaggagccgcgcgaaaccgttttcaggcaaaacaccttaaccggggcggtgctgcggggtatatcgcgaaataca

SEQ ID NO: 473055 - DNA, 75 bp, synthetic construct
  source 1..75: mol_type = other DNA
cgagccacaccacgacggaacgccgcactggcatatgatgcttttttgtaatccacgccagcgtaaccagattat

SEQ ID NO: 473056 - DNA, 75 bp, synthetic construct
  source 1..75: mol_type = other DNA
gtgaatcagcgccatgaaatgaacaccgacgcgtcgttgctgtttctggcagagcgtgaccactatgcgcgcctg

SEQ ID NO: 473057 - DNA, 75 bp, synthetic construct
  source 1..75: mol_type = other DNA
cagcaggttttggtgaatgcattactcgtcgttttattcaacagggccataaagttattgccacaggccgccgtc

SEQ ID NO: 473058 - DNA, 75 bp, synthetic construct
  source 1..75: mol_type = other DNA
gactgaatgtccaccgtcagtaatttttatacccggcgtaactgccgggttattgcttgtcacaaaaaagtggta

SEQ ID NO: 473059 - DNA, 75 bp, synthetic construct
  source 1..75: mol_type = other DNA
gcccagctcgatgttcgtaatcgcgccgctattgaagagatgatggaatcgcttcctgccgattggcgtgacatt

SEQ ID NO: 473060 - DNA, 75 bp, synthetic construct
  source 1..75: mol_type = other DNA
gatacccaagctaattgagttattgccagataattacaagttcattgttacgttaagttcttcgatggcggatat

SEQ ID NO: 473061 - DNA, 75 bp, synthetic construct
  source 1..75: mol_type = other DNA
ttcatacttcctatgaaaacgtgctcggtaaaaataacgttgatgtaatcaaaggctttgcccgcttcgttgatg

SEQ ID NO: 473062 - DNA, 75 bp, synthetic construct
  source 1..75: mol_type = other DNA
gcgccgctgcgcagcttcgacccgatgatctctgaaacgctggtcgaagtgatgaacgccgaaggcccgcagctg

SEQ ID NO: 473063 - DNA, 75 bp, synthetic construct
  source 1..75: mol_type = other DNA
ctactattagttatgagggacaaaagtttgcattctcgggtagtcatgaatggagtggttttgctgaacactttg

SEQ ID NO: 473064 - DNA, 75 bp, synthetic construct
  source 1..75: mol_type = other DNA
gtcaggtttcatgcgggtgataaaaaccatgaaacattattgcttcgtgccaacgaagggatgaattaccaggac

SEQ ID NO: 473065 - DNA, 75 bp, synthetic construct
  source 1..75: mol_type = other DNA
acttttattgctctttgcttgccatagcaccattgccaacgcagctgtcgcacttggtgcgacgcgggtaattta

SEQ ID NO: 473066 - DNA, 75 bp, synthetic construct
  source 1..75: mol_type = other DNA
ttgccgcatatcttggtgaaaataaagatgcctggttggattacgacccggtgagtcttatttcacaaggtcaac

SEQ ID NO: 473067 - DNA, 75 bp, synthetic construct
  source 1..75: mol_type = other DNA
cgacagagcggcgaatggttctcaacattggtggtatcgccaatttgtcgttgttgattccagggcagccggtgg

SEQ ID NO: 473068 - DNA, 75 bp, synthetic construct
  source 1..75: mol_type = other DNA
cggacgctggcgggattaccaggaaatctgccttccgtcactggcgcaagccaggagacggtactgggggctatt

SEQ ID NO: 473069 - DNA, 75 bp, synthetic construct
  source 1..75: mol_type = other DNA
aggggccgcgctcacgcgccgcccctttcattgcgcggacgttctgatgggggcttctgttttttcatgcctgtc

SEQ ID NO: 473070 - DNA, 75 bp, synthetic construct
  source 1..75: mol_type = other DNA
atcgctgtttacggatgaggcgcaggcgcatctgtatggtcatgttgctggcgctgcacgtgctttcaatatttc

SEQ ID NO: 473071 - DNA, 75 bp, synthetic construct
  source 1..75: mol_type = other DNA
ctgagaacgccaaatcgtcagcaaggaaacggaagcccgttaaaaccacatgaaatagcaccgtcgggcagattg

SEQ ID NO: 473072 - DNA, 75 bp, synthetic construct
  source 1..75: mol_type = other DNA
aagtaaaaccgtccagcttaatcacggctggaatgatgaggcatttaatccaaaggatgcgcagcgttatctctg

SEQ ID NO: 473073 - DNA, 75 bp, synthetic construct
  source 1..75: mol_type = other DNA
atggcacaagtgatttttaatgaagagtggatggttgaatacggtctgatgcttcgtactggtctgggggccaga

SEQ ID NO: 473074 - DNA, 75 bp, synthetic construct
  source 1..75: mol_type = other DNA
acgagtatctcctttaggtaagccagacagcaagcgagggattatctggtacaactatccaaagataaatcagtt

SEQ ID NO: 473075 - DNA, 75 bp, synthetic construct
  source 1..75: mol_type = other DNA
gcttcgcactggtctgggggccagacaaattgaagcataccgccagaactgttgggtggaaggcttccacttcaa

SEQ ID NO: 473076 - DNA, 75 bp, synthetic construct
  source 1..75: mol_type = other DNA
caacccggaacgccacctgcgcaaattaaccgaagagctggcgattgccgagaccaatcaaaaccactatcaact

SEQ ID NO: 473077 - DNA, 75 bp, synthetic construct
  source 1..75: mol_type = other DNA
tgatacggctaaacgttcaagacctcattatagaaaacaccaccgggaatggattaagaccgccaatgaacggct

SEQ ID NO: 473078 - DNA, 75 bp, synthetic construct
  source 1..75: mol_type = other DNA
tgccggatttagtgatgcatcattttccggcaacgaccaaaaagtctatctctggtcattctatgggcggactgg

SEQ ID NO: 473079 - DNA, 75 bp, synthetic construct
  source 1..75: mol_type = other DNA
tacgtaacgggcttgatgtcgtgcgtatgattgcgctcggtgccgacaccgtactgctggggcgtgctttcctgt

SEQ ID NO: 473080 - DNA, 75 bp, synthetic construct
  source 1..75: mol_type = other DNA
atcgcgccgcagcacaacgcattctgccgccgttcctgttccactatatggatgggggggcatattctgaataca

SEQ ID NO: 473081 - DNA, 75 bp, synthetic construct
  source 1..75: mol_type = other DNA
ttaccgtaccggacaagagcggtactggatttttatcattttctgttttccggtgattggttgcgtggcgtattt

SEQ ID NO: 473082 - DNA, 75 bp, synthetic construct
  source 1..75: mol_type = other DNA
accagactgcggcaatgtatgctcaggggacaggcactaaaattgataataaacaagcatggatgtggctaacaa

SEQ ID NO: 473083 - DNA, 75 bp, synthetic construct
  source 1..75: mol_type = other DNA
atgaactgctgggaaatattaggtttacaaccaggtgcggaagaacgagatattaagcgtcgttatgcgcaactg

SEQ ID NO: 473084 - DNA, 75 bp, synthetic construct
  source 1..75: mol_type = other DNA
aaatattatttaaccaacaatgatgatcctgaaaataacgcagaggctactcaatggcttactggtgcagcgcag

SEQ ID NO: 473085 - DNA, 75 bp, synthetic construct
  source 1..75: mol_type = other DNA
ctttcctatgacaccgaagcgtcaattgcgaaagcaaaacgcctgatcaaactctacaacgatgcaggtattagc

SEQ ID NO: 473086 - DNA, 75 bp, synthetic construct
  source 1..75: mol_type = other DNA
tttaaagccactcgagctggaaaaggtattgtcaataatgattactgcccttggtacttcattaggatttataat

SEQ ID NO: 473087 - DNA, 75 bp, synthetic construct
  source 1..75: mol_type = other DNA
tgaaatggtttgatatcgcagtattaaataaagttgctgaatttgaactatcagacaactatatggcattgttaa

SEQ ID NO: 473088 - DNA, 75 bp, synthetic construct
  source 1..75: mol_type = other DNA
gcggctttatgcgtaacgcgctggagcgagcaaaagcagcgggttgttcgacactggttttcaccgtggatatgc

SEQ ID NO: 473089 - DNA, 75 bp, synthetic construct
  source 1..75: mol_type = other DNA
aatcccaggttggtggggcgttaaaacggtttctgttgggtcaaaaggcgccattcttataaagcacatgcgtgg

SEQ ID NO: 473090 - DNA, 75 bp, synthetic construct
  source 1..75: mol_type = other DNA
gcggctttatgcgtaacgcgctggagcgagcaaaagcagcgggttgttcgacgctagttttcaccgtggatatgc

SEQ ID NO: 473091 - DNA, 75 bp, synthetic construct
  source 1..75: mol_type = other DNA
taaagatactgttgtcacccataagccaacaccggaacttaaccggaatacccctgaacaaccagcagtcccaga

SEQ ID NO: 473092 - DNA, 75 bp, synthetic construct
  source 1..75: mol_type = other DNA
gaaacggaagtccgttaaaaccgcatgaaatagcgccatcagccaggctgaccaggtcggagcgattgcaaatta

SEQ ID NO: 473093 - DNA, 75 bp, synthetic construct
  source 1..75: mol_type = other DNA
tttatttcctcacatccacttttcagcgtcgtttatggccgcgcattgagcgtgtgaatcagcgccatgaaatga

SEQ ID NO: 473094 - DNA, 75 bp, synthetic construct
  source 1..75: mol_type = other DNA
gctcacctgtacggtcatgttgctggcgcagctcgggcttttaatgttgccccgcttttctggaagaaataccgc

SEQ ID NO: 473095 - DNA, 75 bp, synthetic construct
  source 1..75: mol_type = other DNA
agacttcacctgaaagcgcattcgatgcaacgcagggaagacgcggagcgggaactgaaagcacagtacaaccga

SEQ ID NO: 473096 - DNA, 75 bp, synthetic construct
  source 1..75: mol_type = other DNA
tggtactgaatgaacttcctgtcatggatggcaaaattcaccgtgtatccacaacagaagatcggaaaggagaaa

SEQ ID NO: 473097 - DNA, 75 bp, synthetic construct
  source 1..75: mol_type = other DNA
atgccgtctgtatcccgctaccgcacctggcttgccgtgcctgcagatgaaatagaagatctcaaaaaagcacat

SEQ ID NO: 473098 - DNA, 75 bp, synthetic construct
  source 1..75: mol_type = other DNA
ctgcccccgccgcccctgaagacagcccctcatctgaaaccatgaatgaatcaaccgaaccatcaccttcccctg

SEQ ID NO: 473099 - DNA, 75 bp, synthetic construct
  source 1..75: mol_type = other DNA
ccgccgctatgtcaacaaatggccgcaggccacagcacatgaatacctgacccggaaaggcattcaggctgcacc

SEQ ID NO: 473100 - DNA, 75 bp, synthetic construct
  source 1..75: mol_type = other DNA
aaaaattacgcaaggaaatggctgtcagtaaggatgctgttgtcacccataagccaacaccggaacttaaccgga

SEQ ID NO: 473101 - DNA, 75 bp, synthetic construct
  source 1..75: mol_type = other DNA
agaagcattacggtggtatttatctgccgccacacaaggacatgagcgtgcccagtatgatttgggacaaatgta

SEQ ID NO: 473102 - DNA, 75 bp, synthetic construct
  source 1..75: mol_type = other DNA
agcaggttgtttagttttttcatctcgtagtggtatggctgaagatctattggatactcggtttctccttgatta

SEQ ID NO: 473103 - DNA, 75 bp, synthetic construct
  source 1..75: mol_type = other DNA
ctggcgtttcgcgcaatgctctcgccgtctgctgtgctggcactgctggatgagctggagcacgccagaaccacg

SEQ ID NO: 473104 - DNA, 75 bp, synthetic construct
  source 1..75: mol_type = other DNA
ttccttgacctgattcaggaaggtaacatcggcctgatgaaagcggtagataagttcgaatatcgccgtggttac

SEQ ID NO: 473105 - DNA, 75 bp, synthetic construct
  source 1..75: mol_type = other DNA
cgatcatctgcgtctgctgaccgagaagttaaaagccagccagccgtcgaacatcgcgtcgcaggctgaagaaac

SEQ ID NO: 473106 - DNA, 75 bp, synthetic construct
  source 1..75: mol_type = other DNA
cagcaaggtaaagaccagaagcaagacgatgctaacgggaaatctgatccgaaaggacagggcgaccaaggcaag

SEQ ID NO: 473107 - DNA, 75 bp, synthetic construct
  source 1..75: mol_type = other DNA
tcagggtgttgttgttcggctgaacgctttactgcgtaaggctgtgaacactaagtcaaccgcagaggtgacatc

SEQ ID NO: 473108 - DNA, 75 bp, synthetic construct
  source 1..75: mol_type = other DNA
ggacacggtgcgctggctggaacaggtgcgcgatggcaaaacagatcccggcgtggaaagcaggacggcagcctc

SEQ ID NO: 473109 - DNA, 75 bp, synthetic construct
  source 1..75: mol_type = other DNA
gcaaatgaataagtttaaaaattcaaaaacagaaacttcagagttcataaactcgtttaacttttacaaaacaaa

SEQ ID NO: 473110 - DNA, 75 bp, synthetic construct
  source 1..75: mol_type = other DNA
ctgaattctaatttgtgcgtaaaaggtattccccgtcgtttcaatgaagatctgatggataaattcaggaaatcc

SEQ ID NO: 473111 - DNA, 75 bp, synthetic construct
  source 1..75: mol_type = other DNA
ttaaagtaccggtgaccgccgaggggctggcagccatcaagatgttaaaggcggaagggatcccaacgttgggca

SEQ ID NO: 473112 - DNA, 75 bp, synthetic construct
  source 1..75: mol_type = other DNA
acagatgattagctatccggcagttgatgccgctgtggcgaagtttgaacaggactggctgggagcgtttggcag

SEQ ID NO: 473113 - DNA, 75 bp, synthetic construct
  source 1..75: mol_type = other DNA
acagatgattagctatccggcggttgatgccgcagtagtgaagtttgagcaggactggcagggggcttttggcaa

SEQ ID NO: 473114 - DNA, 75 bp, synthetic construct
  source 1..75: mol_type = other DNA
cctgatagattcggagaaaaccggtaactggtttgcgctgggcacaccgcgcaacggtcagccggtactgtttgc

SEQ ID NO: 473115 - DNA, 75 bp, synthetic construct
  source 1..75: mol_type = other DNA
gatgcaattgaggttctggctgacgctttgcgtattgagccttggcagttactagcttctgattcaaggaaacct

SEQ ID NO: 473116 - DNA, 75 bp, synthetic construct
  source 1..75: mol_type = other DNA
tcaccttcccctgatgcagtcaaagaggaaatgaccgtgatgacggagcctgatgacaaacaaagcaccggaata

SEQ ID NO: 473117 - DNA, 75 bp, synthetic construct
  source 1..75: mol_type = other DNA
gaagcaccggtaccgtcacaacccgctgctgtaccgccccaacagcccgctgaagctgcggcatcgccgacacag

SEQ ID NO: 473118 - DNA, 75 bp, synthetic construct
  source 1..75: mol_type = other DNA
actgtgaaaaacctccactactgtttccatttacagccttgacgtgcgatgaaactccagtttttagtggttcag

SEQ ID NO: 473119 - DNA, 75 bp, synthetic construct
  source 1..75: mol_type = other DNA
tgacgattcacagtcctcaaatggctgggggcaatcaaaccaacctcaaaaccaccagcaatacagtggtggcgg

SEQ ID NO: 473120 - DNA, 75 bp, synthetic construct
  source 1..75: mol_type = other DNA
accaccagcaatacagcggtggtagcaaacctcagagcagcgccaataacgaacctccaatggactttgaagacg

SEQ ID NO: 473121 - DNA, 75 bp, synthetic construct
  source 1..75: mol_type = other DNA
atgccgtctgtatcccgataccgcacctggcttgccgtgcctgcagatgaaatcgaagatctcaaaaaagcacat

SEQ ID NO: 473122 - DNA, 75 bp, synthetic construct
  source 1..75: mol_type = other DNA
gcagagaacacctcttccgccaccactgccctccggagttacgacacaccggaaacatccgtctccgacgcaacc

SEQ ID NO: 473123 - DNA, 75 bp, synthetic construct
  source 1..75: mol_type = other DNA
ccggcacagcagaaacagattcaccttctgaacctgcagagattcagccagtgcagcaggccagtcctgaaccat

SEQ ID NO: 473124 - DNA, 75 bp, synthetic construct
  source 1..75: mol_type = other DNA
cccgacacggcagaaacctccgcagaacatacggatgccactgcagcaccggcagaacagacagaacagcccccc

SEQ ID NO: 473125 - DNA, 75 bp, synthetic construct
  source 1..75: mol_type = other DNA
cgaacagtaacacccaggaaatccgggagacgctggtgatcggcaacctcgtctttacaccggtccacactgagg

SEQ ID NO: 473126 - DNA, 75 bp, synthetic construct
  source 1..75: mol_type = other DNA
ttatcttctgtgccgacaacgatcatgcacgccaggttaacaaaggtatcgtcagtgcaacaaaagccgctgagc

SEQ ID NO: 473127 - DNA, 75 bp, synthetic construct
  source 1..75: mol_type = other DNA
taccgcgattctggttgcttgtctggtggcgatttacggtctggcaatgcgtcagggcatgccaaaagacaaagt

SEQ ID NO: 473128 - DNA, 75 bp, synthetic construct
  source 1..75: mol_type = other DNA
cgggttaggtggtgtactgatgggcttcggtgccagtattgcaggtggtagtgatgatgccaacttactgattta

SEQ ID NO: 473129 - DNA, 75 bp, synthetic construct
  source 1..75: mol_type = other DNA
agtcgcgaccttaccgccgcgccgaaccgggatcgctcatattctgtttgaaaaacgctggcatccctttgtcac

SEQ ID NO: 473130 - DNA, 75 bp, synthetic construct
  source 1..75: mol_type = other DNA
aaagcgtgggggtttttgcgttaattcaggcgggcctactgacttacgaagccggggcgttcccgtggcttggta

SEQ ID NO: 473131 - DNA, 75 bp, synthetic construct
  source 1..75: mol_type = other DNA
cggatatcattctctcaccgcaactgtttggcagcgaaattctggcgcgagttttaaatggtgaagagattaata

SEQ ID NO: 473132 - DNA, 75 bp, synthetic construct
  source 1..75: mol_type = other DNA
atagcggaggagactatactaaaaatgaagataagcgtaggtctattgagtcagccattcaagatgtaaatagtc

SEQ ID NO: 473133 - DNA, 75 bp, synthetic construct
  source 1..75: mol_type = other DNA
ataaatgaaatcccttctgtagagaacacaagtcttgtgccaccagaagaaccgttagattgggataatatttag

SEQ ID NO: 473134 - DNA, 75 bp, synthetic construct
  source 1..75: mol_type = other DNA
taccgcgattctggttgcttgtctggtggcgatttatggtctggcgatgcgtcagggtatgccgaaagacaaagt

SEQ ID NO: 473135 - DNA, 75 bp, synthetic construct
  source 1..75: mol_type = other DNA
gcgcggcgatcccggggatgattattgcgggcccgctatggggtaacttcatcagccgttacgttgagctgcata

SEQ ID NO: 473136 - DNA, 75 bp, synthetic construct
  source 1..75: mol_type = other DNA
tgcagcgccgggtggcatggataaacccggaagagagtaaatcaaaccgcgcaatcggcgttgcgctgaatgata

SEQ ID NO: 473137 - DNA, 75 bp, synthetic construct
  source 1..75: mol_type = other DNA
gatgatgcagacgggcaggtagcattaccaccacgcggtgcaaagatatcggtggcgctgggctgggataatgat

SEQ ID NO: 473138 - DNA, 75 bp, synthetic construct
  source 1..75: mol_type = other DNA
ctctggttctggccttgtcgagtgcaactgcggcgcttgctgcaattccacaaaatatccgtattggtacggatc

SEQ ID NO: 473139 - DNA, 75 bp, synthetic construct
  source 1..75: mol_type = other DNA
aacgaactgcgcgaggcactgaacaaagcctttgccgaaatgcgcgctgacggtacttacgagaaattagcgaaa

SEQ ID NO: 473140 - DNA, 75 bp, synthetic construct
  source 1..75: mol_type = other DNA
gccgcacaacgtgcagcagctgcaaaatggcaacaactccagcgcggagctgctgagttctctttaaccctggct

SEQ ID NO: 473141 - DNA, 75 bp, synthetic construct
  source 1..75: mol_type = other DNA
attacatggaaggcgcggaagggaacgtctacgttctgcgcaggacttaccagaatgaagaaaccgcacgacgtg

SEQ ID NO: 473142 - DNA, 75 bp, synthetic construct
  source 1..75: mol_type = other DNA
ttcacatcaacagtgcactggataccgcagaagacacagtgcgggtaccggatttcagtatcacactggaagggc

SEQ ID NO: 473143 - DNA, 75 bp, synthetic construct
  source 1..75: mol_type = other DNA
tgtggggctgctgttttttattttgctgcgggcagcgacaggcatggtgcgttcttggtcatccttggtcatgag

SEQ ID NO: 473144 - DNA, 75 bp, synthetic construct
  source 1..75: mol_type = other DNA
cgggacccttcacccggatacaagcagaagcggtcaccaccacatacagcgatatcactatcgaagacgaccagg

SEQ ID NO: 473145 - DNA, 75 bp, synthetic construct
  source 1..75: mol_type = other DNA
cgtgctgcagaacgcgactggaagtggctggaaaaagcgcctgtcatcaagataccagcggtcagaaacaagcga

SEQ ID NO: 473146 - DNA, 75 bp, synthetic construct
  source 1..75: mol_type = other DNA
ccgacagtcgagtcgctgaaaggcaaacgggtaggcgtattgcagggcaccacccaggagacgttcggtaacgaa

SEQ ID NO: 473147 - DNA, 75 bp, synthetic construct
  source 1..75: mol_type = other DNA
tcaggatgcgataggcaaagatcatttctacctgagctgtaaaaaggcaatgtctcttgcggaaaagatagatca

SEQ ID NO: 473148 - DNA, 75 bp, synthetic construct
  source 1..75: mol_type = other DNA
tgtggttcagcgctctcccttaagacgaggcatggcaacatactggattctgaaaggagagaggcaggcgggcca

SEQ ID NO: 473149 - DNA, 75 bp, synthetic construct
  source 1..75: mol_type = other DNA
cggacgtggaactttgaaccggatgctggtgaaggtcttaaccgctatatctgcaggtcaggcatccgcactgac

SEQ ID NO: 473150 - DNA, 75 bp, synthetic construct
  source 1..75: mol_type = other DNA
tcattctttggtagcattggcataaacaacctaattgatcgctatgtttctaaagaggatagtaaaaaaagaaga

SEQ ID NO: 473151 - DNA, 75 bp, synthetic construct
  source 1..75: mol_type = other DNA
tgtggttcagcgctctcccttaagccgaggcatggcaacatactgggttctgaaaggagagaggcaggcggggca

SEQ ID NO: 473152 - DNA, 75 bp, synthetic construct
  source 1..75: mol_type = other DNA
tgtggttcagcgctctcccttaagccgaggcatggcaacatactggcttctgaaaggagagaggcaggcgggcca

SEQ ID NO: 473153 - DNA, 75 bp, synthetic construct
  source 1..75: mol_type = other DNA
tgtggttcagcgctctcccttaagccgaggcatggcaacatactggattctgaaaggagagaggcaggcgggaca

SEQ ID NO: 473154 - DNA, 75 bp, synthetic construct
  source 1..75: mol_type = other DNA
agcggagtggaaagagattaatgttgcgcgatccgatacctacggttggcaggatgactcaacctacattcggtt

SEQ ID NO: 473155 - DNA, 75 bp, synthetic construct
  source 1..75: mol_type = other DNA
gcgcggcacgtttgccaacattcgcattcgtaacgaaatggtgcctggtgttgaaggggggatgacgcggcattt

SEQ ID NO: 473156 - DNA, 75 bp, synthetic construct
  source 1..75: mol_type = other DNA
ggcaatcaaaaaaggcgatttaaccgtcggtgcagtgctgtccggcaaccgtaactttgaaggccgtatccatcc

SEQ ID NO: 473157 - DNA, 75 bp, synthetic construct
  source 1..75: mol_type = other DNA
agacagtcaaacttccgcaagatagttgaacaaatatcaagaaacgatcaattaagattactagtggcctcaagg

SEQ ID NO: 473158 - DNA, 75 bp, synthetic construct
  source 1..75: mol_type = other DNA
tatcttattgataaaattaatgaacttaaacctagtaacgataaaacaagatttttaaggttattttataacggt

SEQ ID NO: 473159 - DNA, 75 bp, synthetic construct
  source 1..75: mol_type = other DNA
gcgggtcgatatctacaaggtcggggtgttgagcgaaaagactttaactcctacggttcgcggcgtggtaaccat

SEQ ID NO: 473160 - DNA, 75 bp, synthetic construct
  source 1..75: mol_type = other DNA
tgtggttcagcgctctcccttaaggcgaggcatggcaacatactgggttctgaaaggagagaggcaggcgggcca

SEQ ID NO: 473161 - DNA, 75 bp, synthetic construct
  source 1..75: mol_type = other DNA
aagagcgcggtggcgcgcccgtgggagcggaagttcctcgggtacagtgtgacatggcacaaacaggcgaagctg

SEQ ID NO: 473162 - DNA, 75 bp, synthetic construct
  source 1..75: mol_type = other DNA
ggataaaagcttctcagactccagctacggcttccggccggggcgcaacgcatggcaggcggtgcaacaggcaca

SEQ ID NO: 473163 - DNA, 75 bp, synthetic construct
  source 1..75: mol_type = other DNA
ttgattgtagtcgtgattttagatttcttagagatggttctgatttctacacaaagagaacaaaaggtattactc

SEQ ID NO: 473164 - DNA, 75 bp, synthetic construct
  source 1..75: mol_type = other DNA
atgaatgaaatagacgttgacttagatttagggttaaatcctttttgctttgagacagagctaaagattgaaaca

SEQ ID NO: 473165 - DNA, 75 bp, synthetic construct
  source 1..75: mol_type = other DNA
accagggcggtcacaacgcaggccatactctcgtaatcaacggtgaaaaaccgttctccatcttattccatcagg

SEQ ID NO: 473166 - DNA, 75 bp, synthetic construct
  source 1..75: mol_type = other DNA
agcgcggtagcgcgtccgtgggagcgaaagttcctgggatacagcgtgacgtggcacaaacagacgaggctgaaa

SEQ ID NO: 473167 - DNA, 75 bp, synthetic construct
  source 1..75: mol_type = other DNA
attgcttgatccgattatcgaagtgcgtccggtagcgacccaggtcgatgatcttctttcggagattcgtcagcg

SEQ ID NO: 473168 - DNA, 75 bp, synthetic construct
  source 1..75: mol_type = other DNA
gaaaacaacaaactgctggaagagcagcggctgacccagcgtacccagtttgatctggagatgatgaacgagctg

SEQ ID NO: 473169 - DNA, 75 bp, synthetic construct
  source 1..75: mol_type = other DNA
tggaaaaagcaggtatggttcagcgctctccgttaagacggggcatggcaacatactggtttctgaaaggagaga

SEQ ID NO: 473170 - DNA, 75 bp, synthetic construct
  source 1..75: mol_type = other DNA
ggtgaccgccaaactgatgttggcaggtgttgacccgtttctcgcagcgatgattggcggtgtactggttggcgg

SEQ ID NO: 473171 - DNA, 75 bp, synthetic construct
  source 1..75: mol_type = other DNA
accagactctgctcggtgtgacggggtcggggaaaaccttcaccattgctaatgtcattgctgatctgcaacgcc

SEQ ID NO: 473172 - DNA, 75 bp, synthetic construct
  source 1..75: mol_type = other DNA
cgttaatccagactattggtcgtgcggcgcgtaacgttaacggtaaagcgattctctacggcgataagatcaccc

SEQ ID NO: 473173 - DNA, 75 bp, synthetic construct
  source 1..75: mol_type = other DNA
gcgctggtgatttatggctcggggggcgcagtagaagaagcgttatcacaaaccgtcagtggtttaggacgctta

SEQ ID NO: 473174 - DNA, 75 bp, synthetic construct
  source 1..75: mol_type = other DNA
cggttttctcgaccgttttagcggcgcgctggtgatttatggctcggtgggtgcagtagaagaagcgttatcaca

SEQ ID NO: 473175 - DNA, 75 bp, synthetic construct
  source 1..75: mol_type = other DNA
atggataaagaacgcatcattcaggaatttgtgcccggtaaacaggtcacactggcgcatctcatcgcgcatccc

SEQ ID NO: 473176 - DNA, 75 bp, synthetic construct
  source 1..75: mol_type = other DNA
ttgcgcgtgctgactttgaagcccgacaacgggcggcgcggacggatgaaaccacctatgtggtgcagggctggc

SEQ ID NO: 473177 - DNA, 75 bp, synthetic construct
  source 1..75: mol_type = other DNA
ctaggtggtgatccgtcaggggcatacactctttgcgccaatgtattccctcgcggtaaaccacctataaggctc

SEQ ID NO: 473178 - DNA, 75 bp, synthetic construct
  source 1..75: mol_type = other DNA
cgatggtgcggtctgtcgtgattgcgacattccggtgccggatctggattgttcctgggactgttcttctctaca

SEQ ID NO: 473179 - DNA, 75 bp, synthetic construct
  source 1..75: mol_type = other DNA
ctaagtgaactgcgcgctaacgaatctcgtctgcgcaatagcattgctcgtgcagaagcggcagcgaaagcgcgt

SEQ ID NO: 473180 - DNA, 75 bp, synthetic construct
  source 1..75: mol_type = other DNA
tctggctgactggctgcaaggttacggtctggtggtggtggttgagcacggtaaaggcgacatgagtctttacgg

SEQ ID NO: 473181 - DNA, 75 bp, synthetic construct
  source 1..75: mol_type = other DNA
cctgttcgtgggccaacactgcatcgctatggcgaacagctacagggcgagctgcgctggaaagggatggttatt

SEQ ID NO: 473182 - DNA, 75 bp, synthetic construct
  source 1..75: mol_type = other DNA
aaaaatttcctgtccgtgtgcacgatacatccctttatctgtcctgagtgcggctcctcgcatctgccccctgca

SEQ ID NO: 473183 - DNA, 75 bp, synthetic construct
  source 1..75: mol_type = other DNA
gcctgtttgaagaagatgccagcggcaattatgaaacaaccgtatggatagtcggtgagcccgacggtaatgtca

SEQ ID NO: 473184 - DNA, 75 bp, synthetic construct
  source 1..75: mol_type = other DNA
tgcagaagcggcagcgaaagcgcgtgctgaacgagaagcgcgtgaggctcaggctgttcgcgacaggcaaaaaga

SEQ ID NO: 473185 - DNA, 75 bp, synthetic construct
  source 1..75: mol_type = other DNA
ggtaaaatgccacttgctttgcggaaacaggttaatggagattgtaccctggaaactttcctcattaaaaacccc

SEQ ID NO: 473186 - DNA, 75 bp, synthetic construct
  source 1..75: mol_type = other DNA
ctgccgctgtatcccgacatcagcccggaaattattgcgattgctatcggttccggtgcgattggctgcacgatc

SEQ ID NO: 473187 - DNA, 75 bp, synthetic construct
  source 1..75: mol_type = other DNA
gcgcttcaggcgctggatttaagtggtgtgacggatgaggcgagctacaacgcgacagtctggccggacgaacct

SEQ ID NO: 473188 - DNA, 75 bp, synthetic construct
  source 1..75: mol_type = other DNA
gcgcttcaggcgctggatttaagtgatgtgacggatgaggagagttacaactcgacagtctggccggatgaaccg

SEQ ID NO: 473189 - DNA, 75 bp, synthetic construct
  source 1..75: mol_type = other DNA
attgaagcctggtgagaagctgctggagcctcaagccggacgtggggatcttctggcctatattaacgccgatct

SEQ ID NO: 473190 - DNA, 75 bp, synthetic construct
  source 1..75: mol_type = other DNA
atgaatacagccctttccatcatggacgatgccagctcaaacactgctatcgactatcgacaggaaatgaacgtc

SEQ ID NO: 473191 - DNA, 75 bp, synthetic construct
  source 1..75: mol_type = other DNA
ggtgctatcagctgcgtatcgggcaaacgactgccagactggtgactggatgaacgtcgatggaaatctgatgcg

SEQ ID NO: 473192 - DNA, 75 bp, synthetic construct
  source 1..75: mol_type = other DNA
ggtaaaatgccacttgctttgcggaaacaggttaatggagattgtaccctagaaactttcctcattgaaaacccc

SEQ ID NO: 473193 - DNA, 75 bp, synthetic construct
  source 1..75: mol_type = other DNA
gaagatgctgaacgaaaagcggctgaacgtaaggaactggaaactaaatgtcaacaggtatttgagtacatcgtt

SEQ ID NO: 473194 - DNA, 75 bp, synthetic construct
  source 1..75: mol_type = other DNA
aatattgccggaatacttcagttcaacagggcattaagtgcgctgcataatcatcctgctgcgcctctggctgaa

SEQ ID NO: 473195 - DNA, 75 bp, synthetic construct
  source 1..75: mol_type = other DNA
ccgtttcttttatgtccctccagtatttatacaaaataaaagaagaaaatctattgttgtacatattaataaaat

SEQ ID NO: 473196 - DNA, 75 bp, synthetic construct
  source 1..75: mol_type = other DNA
aaccgattgatgaagcgttgaaagccgggcgttctctggaagattttcgtatcaataagagtttgaacggagtaa

SEQ ID NO: 473197 - DNA, 75 bp, synthetic construct
  source 1..75: mol_type = other DNA
cgcaccgcgcggtcaggcattctggccggttcgcgggccaacgctgcatcgctatggcgagcagctacagggtga

SEQ ID NO: 473198 - DNA, 75 bp, synthetic construct
  source 1..75: mol_type = other DNA
aaaaaactgactggtcgggatgaacaggatatccggcgtctctggcaggagaaagtggatgcaatgcaggagtct

SEQ ID NO: 473199 - DNA, 75 bp, synthetic construct
  source 1..75: mol_type = other DNA
acggcattgataggcctgcaaaatctgtcagcccgttttaattctgccatggacattcccgctcaggggctgtgc

SEQ ID NO: 473200 - DNA, 75 bp, synthetic construct
  source 1..75: mol_type = other DNA
cttctcattatattgactcaactgcttcactcgttcgcgccggaataaaatggtatgaaaatcgtgtcggaaaac

SEQ ID NO: 473201 - DNA, 75 bp, synthetic construct
  source 1..75: mol_type = other DNA
tctattatcgcacctatcgcctgtggttacgcccaggaagagtacagctgggcgatgggctttggcctggcggcg

SEQ ID NO: 473202 - DNA, 75 bp, synthetic construct
  source 1..75: mol_type = other DNA
tgcctggatgactttccggggctggcggtgatagagcatgtgcatgatatagctgtgccggaaggtgtgtggtgt

SEQ ID NO: 473203 - DNA, 75 bp, synthetic construct
  source 1..75: mol_type = other DNA
tcgctctataggggtaattgatgatccaatgggagcgtttatggaggctcatttaccacaagacagagacaaaac

SEQ ID NO: 473204 - DNA, 75 bp, synthetic construct
  source 1..75: mol_type = other DNA
gtttcagccagaagcgcagattttcgggatgaatttaacgttaaacgtgaggtgtcctggcatgatgtgaccgtt

SEQ ID NO: 473205 - DNA, 75 bp, synthetic construct
  source 1..75: mol_type = other DNA
cttacattgttgatgaaatcgctcacgaaggaccgccggacaggctgactgtttcagccagaagcgcagattttc

SEQ ID NO: 473206 - DNA, 75 bp, synthetic construct
  source 1..75: mol_type = other DNA
ttccgcattgcagaccggcaggcgtacacgggggtacgcgcttactggctggacctggactttggcaaaaagaaa

SEQ ID NO: 473207 - DNA, 75 bp, synthetic construct
  source 1..75: mol_type = other DNA
aacccgcattggcctgttagccaccaatgctacgctgtatatgggattataccaaaaaggaattgagtcgctggg

SEQ ID NO: 473208 - DNA, 75 bp, synthetic construct
  source 1..75: mol_type = other DNA
taaaactgaatctgtgggaaaaaatcgcctatggtatgggcgacgttggttcgaatttaatgcttagcatcggta

SEQ ID NO: 473209 - DNA, 75 bp, synthetic construct
  source 1..75: mol_type = other DNA
ttgtgcgtaagtggctggaagagcgcaaactggatgaggtacgcaccagcgaacttttcgacgtttggtgggact

SEQ ID NO: 473210 - DNA, 75 bp, synthetic construct
  source 1..75: mol_type = other DNA
cactcatacccgcggcgttaataaaaaagtactgcgtgcgacaaactttctcctgcctaactggggatggctgct

SEQ ID NO: 473211 - DNA, 75 bp, synthetic construct
  source 1..75: mol_type = other DNA
gtgctggaaagcctgaccaaaaacagcggcgagaaccagcctgcaacgctgaaatcacagattgtcgccgatgaa

SEQ ID NO: 473212 - DNA, 75 bp, synthetic construct
  source 1..75: mol_type = other DNA
ccgaagaggtgatcccgctggataacgcttcagcctcggaaattgcccgcgtgctggaaagcctgacgaaaaaca

SEQ ID NO: 473213 - DNA, 75 bp, synthetic construct
  source 1..75: mol_type = other DNA
cctatcggtacgctgggcgcagcgatttctcaggcgaaaccgcagaaaggctcgacggtgatcagtgaaaacggc

SEQ ID NO: 473214 - DNA, 75 bp, synthetic construct
  source 1..75: mol_type = other DNA
aggcggttcgcgaccgccagaaagaagcgacgcgtaaaggcaccacctacaaaccgactgaaagcgaaaaatcgc

SEQ ID NO: 473215 - DNA, 75 bp, synthetic construct
  source 1..75: mol_type = other DNA
ggtgcctctgaaggtactgaagttaaagcgattgccgacggtcgggtgattctggctgactggctgcaaggctac

SEQ ID NO: 473216 - DNA, 75 bp, synthetic construct
  source 1..75: mol_type = other DNA
ctccacggtgatcagcgaaaacggtgccaccaccattaacccggacaccaacggcgatctctccacgctcgccca

SEQ ID NO: 473217 - DNA, 75 bp, synthetic construct
  source 1..75: mol_type = other DNA
actaaccctcatgtttaaccagctactaaaggaagccagagcatgcacaaagcctttgaacgatggatgcgccag

SEQ ID NO: 473218 - DNA, 75 bp, synthetic construct
  source 1..75: mol_type = other DNA
gtcatcaagataccagcggtcagaaacaagcgagtcagatggctggaaaaggaggaagcaaaacgccttattgat

SEQ ID NO: 473219 - DNA, 75 bp, synthetic construct
  source 1..75: mol_type = other DNA
gcaatgatctactcagttatcagcaaagcgtataaccgaaaaacaaaggagagatggaagttgcaggtggaggct

SEQ ID NO: 473220 - DNA, 75 bp, synthetic construct
  source 1..75: mol_type = other DNA
tccacgccgagcatcaccacgctggacaaccaggaagccttcttcatggtgggccaggacgttccggtattaacc

SEQ ID NO: 473221 - DNA, 75 bp, synthetic construct
  source 1..75: mol_type = other DNA
ttaccagttattccttaacctgctggaagcgcagggatatgccgtcgtaccaatggagaacgacgtgctgaaggt

SEQ ID NO: 473222 - DNA, 75 bp, synthetic construct
  source 1..75: mol_type = other DNA
gccaatccgggttgtagcggtggagaaatcgccgcagcactgaatacaccaaccacaaccattaatgcggagcta

SEQ ID NO: 473223 - DNA, 75 bp, synthetic construct
  source 1..75: mol_type = other DNA
ttcctcgccgtaaacagccgtttcaatgcttccggtgatggcgtggcgcaactgggccgctcgctggatgttgat

SEQ ID NO: 473224 - DNA, 75 bp, synthetic construct
  source 1..75: mol_type = other DNA
ttctggtcacaaaacaatggcctgcaactgcaaaacctgaccatcgaaaacacgctgggtgatagcgtagatgcg

SEQ ID NO: 473225 - DNA, 75 bp, synthetic construct
  source 1..75: mol_type = other DNA
atgacaaccaaaattaactatcaggcactgcgtgaggcggcagaagcaataaaaatagtagccacaccacaaaaa

SEQ ID NO: 473226 - DNA, 75 bp, synthetic construct
  source 1..75: mol_type = other DNA
cgatagcgacgaaatacagcgcaatctgaatgacactaactacaaccgcatgtgggaatacaataaccgcggcgt

SEQ ID NO: 473227 - DNA, 75 bp, synthetic construct
  source 1..75: mol_type = other DNA
ggaggtttaaaccgagaggccagaaagctcatgctttctctggaaaaatgcgcgccgtgtataggtgccggtgcc

SEQ ID NO: 473228 - DNA, 75 bp, synthetic construct
  source 1..75: mol_type = other DNA
gcgctgatcccctcactgaaagcgaaaaaaatcgacgccattatttcgtcgctttccattaccgataaacgtcag

SEQ ID NO: 473229 - DNA, 75 bp, synthetic construct
  source 1..75: mol_type = other DNA
gtcaccgcccgtggacgccgccagcgtccgcgtggctccgctggcgagcgccgttggctacgccgtcacgggctt

SEQ ID NO: 473230 - DNA, 75 bp, synthetic construct
  source 1..75: mol_type = other DNA
ctggtgacgatatttgaatcgttatatactgtgtatatgcgtagtaatgacgaggtgataaatggcacaggttaa

SEQ ID NO: 473231 - DNA, 75 bp, synthetic construct
  source 1..75: mol_type = other DNA
catgatacctaaagaaaatggctgctggatttatctggctgatttagagcacgtactacgtgttgctggtattcg

SEQ ID NO: 473232 - DNA, 75 bp, synthetic construct
  source 1..75: mol_type = other DNA
atatcgctgaactttctggcggtgaaaaacagcgtatctcgttgattcgtaatctccagtttctgccaaaggtat

SEQ ID NO: 473233 - DNA, 75 bp, synthetic construct
  source 1..75: mol_type = other DNA
ttgccggacagcattttgacgaagaatatcgccgagctatctggtggtgaaaaacaacgcatctcattgattcgt

SEQ ID NO: 473234 - DNA, 75 bp, synthetic construct
  source 1..75: mol_type = other DNA
agttacacaacgtcggatatctggcgggtgatacgaagattcttaataacattaatttttcgctgcgagctggcg

SEQ ID NO: 473235 - DNA, 75 bp, synthetic construct
  source 1..75: mol_type = other DNA
gcgggatactgattctgccaactggtctgaatgggcgcaggtctatacgtcaaaagattcaattcccggcgtcaa

SEQ ID NO: 473236 - DNA, 75 bp, synthetic construct
  source 1..75: mol_type = other DNA
gacaccgcgacgaaattgaaaacagccataaacattaatggcgtcaggttcgatggttctggtgacattaatatc

SEQ ID NO: 473237 - DNA, 75 bp, synthetic construct
  source 1..75: mol_type = other DNA
ttttatcgttcagcgcgtgatggttacggattcgaagctgactggtcagaattttacaccacaacacgcaagcca

SEQ ID NO: 473238 - DNA, 75 bp, synthetic construct
  source 1..75: mol_type = other DNA
tggtgcgtaacgcggtagacgcggctaaagcactgggcgttgatgctcgcgttggtaacctgttctccgctgacc

SEQ ID NO: 473239 - DNA, 75 bp, synthetic construct
  source 1..75: mol_type = other DNA
catcgttatatttatcaacacgtgacgctcaaggggcaatcctttagttataaaggtactggaggtgctattttt

SEQ ID NO: 473240 - DNA, 75 bp, synthetic construct
  source 1..75: mol_type = other DNA
ttgtggcgattcttgtttttgccagttatctctatgccacgttacgcggtctgtttctgaataatctgacactgg

SEQ ID NO: 473241 - DNA, 75 bp, synthetic construct
  source 1..75: mol_type = other DNA
gtttataatgcgactattggtggagcatcaacattgattcttcactttaatatgaatgcggggagttgccctgct

SEQ ID NO: 473242 - DNA, 75 bp, synthetic construct
  source 1..75: mol_type = other DNA
aacgctcaattcacctatattaatcatggtgatggttattctcctggctggcgacgagactacaacacgaaaaat

SEQ ID NO: 473243 - DNA, 75 bp, synthetic construct
  source 1..75: mol_type = other DNA
aatcatggtgatgcttatgctcctggctggcgacgagactacaacacgaaaaaccagcagcctgcatttgcttta

SEQ ID NO: 473244 - DNA, 75 bp, synthetic construct
  source 1..75: mol_type = other DNA
tataaaccatggcgcagattacgcaccaggctggcggcgtgactacagtaccaaaaatcagcagcctgcatttgc

SEQ ID NO: 473245 - DNA, 75 bp, synthetic construct
  source 1..75: mol_type = other DNA
aggtattcgcctgggcggtctgtcatctgttcagacatggaatggtcccggctggtctgacaggtcaggttatgt

SEQ ID NO: 473246 - DNA, 75 bp, synthetic construct
  source 1..75: mol_type = other DNA
cagattacgcaccaggctggcggcgtgactacagtaccaaaaatcagcagcctgcatttgctttagggcagacag

SEQ ID NO: 473247 - DNA, 75 bp, synthetic construct
  source 1..75: mol_type = other DNA
tggaggaacgcgttaaggagctggaggcgcgggaagttcaattaccgactcgctacggccttcaatatggacacc

SEQ ID NO: 473248 - DNA, 75 bp, synthetic construct
  source 1..75: mol_type = other DNA
gcctgattgcccgtcgggcagcacgcgaactggtagctggcgcttcaaccaactttggctttggtattcccggcg

SEQ ID NO: 473249 - DNA, 75 bp, synthetic construct
  source 1..75: mol_type = other DNA
tagatccgcgcaatggcggcggaaagtcgaatgaatgcaccatcgacgatctggtagaactgattgaaattgatg

SEQ ID NO: 473250 - DNA, 75 bp, synthetic construct
  source 1..75: mol_type = other DNA
ggaactggtgaaaaacaatgccattgaagcctactgcttcccgggcggcgtgattcaggcattgctgcgggaaat

SEQ ID NO: 473251 - DNA, 75 bp, synthetic construct
  source 1..75: mol_type = other DNA
gcgacattctgccatatatggccttccgtccaattatcaatcagccacgcctgatggaaagtagcctgtttacgc

SEQ ID NO: 473252 - DNA, 75 bp, synthetic construct
  source 1..75: mol_type = other DNA
tgccattattccatcactcgatcaatttgagttctacagtggcggagggatcgatatcaccttcctcggcatggg

SEQ ID NO: 473253 - DNA, 75 bp, synthetic construct
  source 1..75: mol_type = other DNA
cactaaccgcttcgctcatgcagatatgctcaaacgcatcattgccggacattttacctggtcgcccaagatgca

SEQ ID NO: 473254 - DNA, 75 bp, synthetic construct
  source 1..75: mol_type = other DNA
gtccatgccgaaaactatctcgttgcgggcggaccgcttcaccactatctgcaacgtattcgcagacactacccg

SEQ ID NO: 473255 - DNA, 75 bp, synthetic construct
  source 1..75: mol_type = other DNA
tgcaacagctgcgcaaatgaccatgcatgagttacaggatacccgcgagaacttcgtgcagggggtgcaaaatac

SEQ ID NO: 473256 - DNA, 75 bp, synthetic construct
  source 1..75: mol_type = other DNA
cgatgaggaggtttatcgccttaccaacgaccgctcagaaaaaaataaacgttattcccgtagcgataattctcg

SEQ ID NO: 473257 - DNA, 75 bp, synthetic construct
  source 1..75: mol_type = other DNA
gtcttatcgccatgataacagcaacagtagctctcacagcctgtaccccaaagggcagcgtggaactacataccc

SEQ ID NO: 473258 - DNA, 75 bp, synthetic construct
  source 1..75: mol_type = other DNA
atatgtatcttagcgccctgataactgtggcagcagccctcacggcctgtaccccaaaaaccagcctggaacaac

SEQ ID NO: 473259 - DNA, 75 bp, synthetic construct
  source 1..75: mol_type = other DNA
atctgtatcttatatccctgataactgtggctgcagccctcacggcctgtaccccgaaaggcagtgtggaacaac

SEQ ID NO: 473260 - DNA, 75 bp, synthetic construct
  source 1..75: mol_type = other DNA
gagcaaggcttaagcctgatgccgcacatcgcgcagccggtactgccagcgcaaaatcaggccttaccgccagaa

SEQ ID NO: 473261 - DNA, 75 bp, synthetic construct
  source 1..75: mol_type = other DNA
gctgccactgagtgcgaagcccgcgcccagctgccgcgcgcacatctgatttttgtcgcccgcattcgccagggg

SEQ ID NO: 473262 - DNA, 75 bp, synthetic construct
  source 1..75: mol_type = other DNA
ttggcatgcttacagagcttgggaaacacgatggcctgcaataattgcctcaaatagattaatgataaaaaacca

SEQ ID NO: 473263 - DNA, 75 bp, synthetic construct
  source 1..75: mol_type = other DNA
caaatcgattaataataaaaaaacgcatcgaagaaattggcgtactggaggatgctaattctatagtaaaagata

SEQ ID NO: 473264 - DNA, 75 bp, synthetic construct
  source 1..75: mol_type = other DNA
ccaatttgccagtctgctaaccctgttacgtctcgccaccacgtttagcagcgtagtagcgagactccttaacat

SEQ ID NO: 473265 - DNA, 75 bp, synthetic construct
  source 1..75: mol_type = other DNA
tactgtaggagcctttcacatggctgtatccgcacgcccttactttgtctggcgctttatgcagtgccaccacag

SEQ ID NO: 473266 - DNA, 75 bp, synthetic construct
  source 1..75: mol_type = other DNA
agcctttcacatggctgtattcgcacgcccttactttgtctggcgctttatgcagtgccaccacagcagcattga

SEQ ID NO: 473267 - DNA, 75 bp, synthetic construct
  source 1..75: mol_type = other DNA
gtgttttggcgtgatatgacgttgtcggtctggcgtaagaagacaactggcctcaaaacaaaaaagcgtttactg

SEQ ID NO: 473268 - DNA, 75 bp, synthetic construct
  source 1..75: mol_type = other DNA
gtgctggaaagcctgaccaaaaacagcggcgagaaccagccagcaacgctgaaatctcaaattgtcgccgatgaa

SEQ ID NO: 473269 - DNA, 75 bp, synthetic construct
  source 1..75: mol_type = other DNA
gcagtttgctaacggtacgcagatccctatcggtacgctgggcgcagccatttctcaggcgaaaccgcagaaagg

SEQ ID NO: 473270 - DNA, 75 bp, synthetic construct
  source 1..75: mol_type = other DNA
aactgaagcgatttagtcactatcgatctcatcaaatatggctcgctttgagatattcctcaagtaaaaaaactc

SEQ ID NO: 473271 - DNA, 75 bp, synthetic construct
  source 1..75: mol_type = other DNA
cggattatcacaatatgagcatttaatagacgatgctatcgcctggggtaaaaaaaatggtcaaacgcaggaaca

SEQ ID NO: 473272 - DNA, 75 bp, synthetic construct
  source 1..75: mol_type = other DNA
aaccatcattatggggccgggcgttcaggggaaagtgagtattcgcaccatgaccccgctcaatgaacgccagta

SEQ ID NO: 473273 - DNA, 75 bp, synthetic construct
  source 1..75: mol_type = other DNA
gaaaaatcgtgctgccgcgccgtggtgcggtgattacgctggcgctgggttggaaggggcagccgcttttcccga

SEQ ID NO: 473274 - DNA, 75 bp, synthetic construct
  source 1..75: mol_type = other DNA
gaaaaatcgtgctgccgcgccgtggtgcggccattacgctggcgctgggctggaaagggcagccgcttttcccga

SEQ ID NO: 473275 - DNA, 75 bp, synthetic construct
  source 1..75: mol_type = other DNA
actaataatccgacttccattactccatggatgaatatgctgacgggaggattagagtacggcgcccagtcatct

SEQ ID NO: 473276 - DNA, 75 bp, synthetic construct
  source 1..75: mol_type = other DNA
cggaagggcgggcagatctctacacggaaatgccagtgaaagtcagtggctttaaacagctgatagatgatgcgg

SEQ ID NO: 473277 - DNA, 75 bp, synthetic construct
  source 1..75: mol_type = other DNA
gggtaaaagtgctagcggtaaaccactgccggtgatcactatcacacgtaaggacggcgacagtcaccgctttac

SEQ ID NO: 473278 - DNA, 75 bp, synthetic construct
  source 1..75: mol_type = other DNA
ggcactgggtaaagatctgtctgataaacccgtagagcatatagaccagactaatgagagtgacggcagttttct

SEQ ID NO: 473279 - DNA, 75 bp, synthetic construct
  source 1..75: mol_type = other DNA
ggcttgccgccgcgccagcgagtgcgcacggcgtctcaactgaagaaatcaccaggtcgtcttgatttccagcgc

SEQ ID NO: 473280 - DNA, 75 bp, synthetic construct
  source 1..75: mol_type = other DNA
tatctctgcgggtgcggttgttttcccagcgggaacacgcctgactaccgcagagctgccagtgattgcttcgct

SEQ ID NO: 473281 - DNA, 75 bp, synthetic construct
  source 1..75: mol_type = other DNA
gggcacctgcattcgtattatgaccggcgcaccggtaccggaaggctgtgaagctgtggtcatgcaggaacagac

SEQ ID NO: 473282 - DNA, 75 bp, synthetic construct
  source 1..75: mol_type = other DNA
ctgccagtgatcactatcacacgcaaggacggcgacagtcaccgctttaccctggcagatcgcggagcctacacg

SEQ ID NO: 473283 - DNA, 75 bp, synthetic construct
  source 1..75: mol_type = other DNA
aaagagaaacacctgcgcgcactggagcacccgaaagcgaaaccggtcacgcagaagaaagcgccaaaagtaccg

SEQ ID NO: 473284 - DNA, 75 bp, synthetic construct
  source 1..75: mol_type = other DNA
ccagggtttgataactccgcaatggacggttacgcggtacgtttggccgatatcacctccggacaaccgctgccc

SEQ ID NO: 473285 - DNA, 75 bp, synthetic construct
  source 1..75: mol_type = other DNA
ccgtgaaaagtcgtggcacaagactacggtcggggaagtagtgaaggaaatagctgcgcgtcacaaactgaagat

SEQ ID NO: 473286 - DNA, 75 bp, synthetic construct
  source 1..75: mol_type = other DNA
gtcactgaagaacaccgattttggccttggtcgtaatgccacgctgaacaccatgcttgaggcaacagattcgac

SEQ ID NO: 473287 - DNA, 75 bp, synthetic construct
  source 1..75: mol_type = other DNA
tgaacaccggggcgctccggatgtggtcaccatccgcgcccggagtgcagattttcgcgggacgctcaattcccg

SEQ ID NO: 473288 - DNA, 75 bp, synthetic construct
  source 1..75: mol_type = other DNA
gggtacggatgaaaacgtgctggtacttaatcgcacttatgccaaccggagcaacgccgaacgagcggcgaaaat

SEQ ID NO: 473289 - DNA, 75 bp, synthetic construct
  source 1..75: mol_type = other DNA
atcaggactggattattgcaaaagccgagcacaccattgataacagcggctttaccacgcagcttgagcttgaag

SEQ ID NO: 473290 - DNA, 75 bp, synthetic construct
  source 1..75: mol_type = other DNA
actttctgaataatagcggcttcacgacgtccttagagcttgaggtcatgctttctgatgtggagtacgaaacag

SEQ ID NO: 473291 - DNA, 75 bp, synthetic construct
  source 1..75: mol_type = other DNA
atctggcggattaaatattgtcctgcaacgtctggttaagaaattacgctctgtaaccagcgtcgttctggctac

SEQ ID NO: 473292 - DNA, 75 bp, synthetic construct
  source 1..75: mol_type = other DNA
gcgcaggccatgcgcgccgctcaggcgaagtgggataaactgcaacggggtgtggcggagttctccatcagcctg

SEQ ID NO: 473293 - DNA, 75 bp, synthetic construct
  source 1..75: mol_type = other DNA
gcatgaccctgacggataaccggggctttgaggctgaccagcttgatattgaactgaacgatgccgacgggcagg

SEQ ID NO: 473294 - DNA, 75 bp, synthetic construct
  source 1..75: mol_type = other DNA
aatacatggccggtgaggctgacaacgtttttgccctgaccacggtatatgccacgaaagcgcaggccatgcgcg

SEQ ID NO: 473295 - DNA, 75 bp, synthetic construct
  source 1..75: mol_type = other DNA
gttaccatccgcgcccggagtgcagattttcgcgggacgctcaattcccgccgggaaggctcctggcatgacacc

SEQ ID NO: 473296 - DNA, 75 bp, synthetic construct
  source 1..75: mol_type = other DNA
tctgaataattccggcttcacgacgtccttagagcttgaggtcaggctttctgatgtggagtacgaaacagaaga

SEQ ID NO: 473297 - DNA, 75 bp, synthetic construct
  source 1..75: mol_type = other DNA
cgccgcgcccggcgttcagtattgagattgaaggtaagcagcttacggcgctggataaccggctgatctcccttt

SEQ ID NO: 473298 - DNA, 75 bp, synthetic construct
  source 1..75: mol_type = other DNA
ctggcgattaaaccgggtaaaccgttcgcgttcggtaaactcggcaatagctggttctgcggcctgccgggtaat

SEQ ID NO: 473299 - DNA, 75 bp, synthetic construct
  source 1..75: mol_type = other DNA
tattgattgctaaaggtgcaatgggctacccgcaaacaattatgctgcttaccgttgccgccagcctcggctgct

SEQ ID NO: 473300 - DNA, 75 bp, synthetic construct
  source 1..75: mol_type = other DNA
atggaacttttgacccaattactgcatgccttatgggcgcaggattttgaaacactggccaatccgtcgatgatt

SEQ ID NO: 473301 - DNA, 75 bp, synthetic construct
  source 1..75: mol_type = other DNA
tcaatcatgctggcaaatggtcgggaagatatttatcccgaaatgccggtcagggtctcgggcttcaaaagcgtc

SEQ ID NO: 473302 - DNA, 75 bp, synthetic construct
  source 1..75: mol_type = other DNA
ccaataagcgccagtatattgccgtgctgccaggtgagtatgaaggcacggtttacgttcctgcagctccgggtg

SEQ ID NO: 473303 - DNA, 75 bp, synthetic construct
  source 1..75: mol_type = other DNA
gatgctgctcccggtggtactgctggtgtttggtctggcaggttctttggttgtgttatggaaaaagaaatatgg

SEQ ID NO: 473304 - DNA, 75 bp, synthetic construct
  source 1..75: mol_type = other DNA
aactggctttctcacttgcctgcgcactatcaccaacgtgcacaccatctttttcataaacacggtttatcggcg

SEQ ID NO: 473305 - DNA, 75 bp, synthetic construct
  source 1..75: mol_type = other DNA
ttctgtcagcccggataatggatttacgaccagcatggagcttgaagtaaagattgatgatcttgaaattgaata

SEQ ID NO: 473306 - DNA, 75 bp, synthetic construct
  source 1..75: mol_type = other DNA
ctcacattctgagtaatagcggcttcacgacgggtttagagcttgaggttaagctttctgacgtggaatacagct

SEQ ID NO: 473307 - DNA, 75 bp, synthetic construct
  source 1..75: mol_type = other DNA
tggcgctgttctgccgcacgtaaaactgcgtgacgtagttatcggtatgggtgcctgcaccgattccaaagttaa

SEQ ID NO: 473308 - DNA, 75 bp, synthetic construct
  source 1..75: mol_type = other DNA
gtgccacgctgacgcccgactttatgctgacactggaaagcaaagatatcaccggcaatatcagtgaccggctga

SEQ ID NO: 473309 - DNA, 75 bp, synthetic construct
  source 1..75: mol_type = other DNA
taaactcaccagtaaatcaacttattgactggcctagttttgctggaatgatatatagaggaaacagatacacgt

SEQ ID NO: 473310 - DNA, 75 bp, synthetic construct
  source 1..75: mol_type = other DNA
atctgttattcgtccggcagggacagggcaaaagcgccagcggtaaacctctgccggtgatcactatcacacgca

SEQ ID NO: 473311 - DNA, 75 bp, synthetic construct
  source 1..75: mol_type = other DNA
tccgtgacagtgtgatcaacgaaggcttcaacactgtcaaaccgtgggccgatgcggtgatctctaatcgtccgt

SEQ ID NO: 473312 - DNA, 75 bp, synthetic construct
  source 1..75: mol_type = other DNA
tcgtactggagcgcgagcgcggcaatgtggaagtgggcgaatgggtggaagtagaaccgtttaacgcgttgttcg

SEQ ID NO: 473313 - DNA, 75 bp, synthetic construct
  source 1..75: mol_type = other DNA
ggcagtggatccatcatcaaaaaaacgttgagcaatggcaaaccggtgaccaaagccttgttccgccagatgctg

SEQ ID NO: 473314 - DNA, 75 bp, synthetic construct
  source 1..75: mol_type = other DNA
cgggggcgttttgacgatgccgcacgcttgatggaacagatcaccacttccgatgagttaattgatttcctgacc

SEQ ID NO: 473315 - DNA, 75 bp, synthetic construct
  source 1..75: mol_type = other DNA
tttaccgctgaagtaagtcgcgggcaaaatattcgtcgacgcggtgaggatatctccgcgggagcagttgttttc

SEQ ID NO: 473316 - DNA, 75 bp, synthetic construct
  source 1..75: mol_type = other DNA
tggcacctgtattcgcattatgaccggtgctccggtgccggaaggctgtgaagcggtggtgatgcaggaacagac

SEQ ID NO: 473317 - DNA, 75 bp, synthetic construct
  source 1..75: mol_type = other DNA
tcgtgctggaacgcgatcgcggcaatgttgaagcaggcgaatgggtggaagtcgaaccgtttaatgcgttgttcg

SEQ ID NO: 473318 - DNA, 75 bp, synthetic construct
  source 1..75: mol_type = other DNA
ttctggtcacaaaacaatggcctgcaactgcaaaatctgaccatcgaaaacacgctgggcgatagcgtagatgcg

SEQ ID NO: 473319 - DNA, 75 bp, synthetic construct
  source 1..75: mol_type = other DNA
ctttcccttgatgggggcatgagccctgccgactggcgtcatgacgtcaacccgcgcggcaaatatatgccaggt

SEQ ID NO: 473320 - DNA, 75 bp, synthetic construct
  source 1..75: mol_type = other DNA
gatgccaggtgagtatgaaggtacggtttatgtccctgcggcaccgggcggaatcaccgtttacggcatgggcga

SEQ ID NO: 473321 - DNA, 75 bp, synthetic construct
  source 1..75: mol_type = other DNA
tcttatattgcaatattacccgcagattatggcttcctatttcctgtattttgtggcgattcttgtttttgccag

SEQ ID NO: 473322 - DNA, 75 bp, synthetic construct
  source 1..75: mol_type = other DNA
gacgacatcgataggtgggttattctttaacttagtcgcattaagtttgctttctgccatcgggctaggtgttgt

SEQ ID NO: 473323 - DNA, 75 bp, synthetic construct
  source 1..75: mol_type = other DNA
atagagaacgaagacggctctcacgttcctgtttcgcaaccaataatcattaacgctgccggatatccggtatat

SEQ ID NO: 473324 - DNA, 75 bp, synthetic construct
  source 1..75: mol_type = other DNA
agatttatcgtggcaccagcgaaatttccgctggcaatgcggacctgtcatctcgcaccgaagaacaagcggcgg

SEQ ID NO: 473325 - DNA, 75 bp, synthetic construct
  source 1..75: mol_type = other DNA
acggtttccggtgtagttagaacgatgggagcaatctccacgagttcaaagaaaatttccgagatcactgccgtc

SEQ ID NO: 473326 - DNA, 75 bp, synthetic construct
  source 1..75: mol_type = other DNA
cgtgatgtgactgcggagattgagattcggaccgggttagcgaacagctcagattttttgcgttcggcccggatc

SEQ ID NO: 473327 - DNA, 75 bp, synthetic construct
  source 1..75: mol_type = other DNA
tgccggttccaagccatgccggatggatttatttaaaccggccatcgcgaaatttgatgatcttattgcgcaatc

SEQ ID NO: 473328 - DNA, 75 bp, synthetic construct
  source 1..75: mol_type = other DNA
agcgggacaaacggctggcctcgcagcaggggctggacagcacccgctggttcggacatgtcgccacggtgaatg

SEQ ID NO: 473329 - DNA, 75 bp, synthetic construct
  source 1..75: mol_type = other DNA
gataacatttatggtgctacgtcggatcgtcattcgtccactgcaacatgccgcacaacggattgaaaaaatcgc

SEQ ID NO: 473330 - DNA, 75 bp, synthetic construct
  source 1..75: mol_type = other DNA
ttcaggcttatataacaggtctgcaacccatgttgaaatatgccaaaaatggcatgttcgaagcgattattaatc

SEQ ID NO: 473331 - DNA, 69 bp, synthetic construct
  source 1..69: mol_type = other DNA
cgtctgtggtcagtctctgggggaagtgcgtgttccgcaccggggaaatgtggtggagaaagttattga

SEQ ID NO: 473332 - DNA, 75 bp, synthetic construct
  source 1..75: mol_type = other DNA
gcctttcatggcctctgcccgcaggtatgtcggagcgggaacttgatgcccgtctttacgggagtgcctccacag

SEQ ID NO: 473333 - DNA, 75 bp, synthetic construct
  source 1..75: mol_type = other DNA
ttgaagaacaggcggcacgattaactgaggcggtggacgtattccgtctgaacaaacattctgtgtcggcagaac

SEQ ID NO: 473334 - DNA, 75 bp, synthetic construct
  source 1..75: mol_type = other DNA
acagtttccggcgtggtgaaaacgatgggcgatatctccagtagctcgaaaaaaatttccgaaatcaccgccgtg

SEQ ID NO: 473335 - DNA, 75 bp, synthetic construct
  source 1..75: mol_type = other DNA
cgattgaacaaaccgctgccagcatggagcaactcactgtgacagtgaaacagaatgcggataatgcccactacg

SEQ ID NO: 473336 - DNA, 75 bp, synthetic construct
  source 1..75: mol_type = other DNA
gtgtgaatattgctctgcacaacattgacggttccactgttaagcaggtaaaaattaataatcctggcgatattt

SEQ ID NO: 473337 - DNA, 75 bp, synthetic construct
  source 1..75: mol_type = other DNA
cacagtgctagttgtcattgtctctcttctacgaaaggtggatttactaatggagaatatcagaaaatatgctca

SEQ ID NO: 473338 - DNA, 75 bp, synthetic construct
  source 1..75: mol_type = other DNA
tcctggtggtggggggagtggtggaacgtattctggggaaatggcgactcctgattgtctggctattctctggcg

SEQ ID NO: 473339 - DNA, 75 bp, synthetic construct
  source 1..75: mol_type = other DNA
ggtgcgggcacacaccataaaaaccagcggcgagtatttcctctgttgggtatggtggcgctgacactgttgtac

SEQ ID NO: 473340 - DNA, 75 bp, synthetic construct
  source 1..75: mol_type = other DNA
cgccatctattacgctgaattaccctcgtcagtctttcgataccgcgcatttcccggtggaagaaaaagcggcga

SEQ ID NO: 473341 - DNA, 75 bp, synthetic construct
  source 1..75: mol_type = other DNA
tgaatgggctacaaatcgcgctggcggaaaaaggcattcctttgctgtttcatgaagtggatgactttgccgcca

SEQ ID NO: 473342 - DNA, 75 bp, synthetic construct
  source 1..75: mol_type = other DNA
cgcatccggcaatcggcacaccatgcctgatgcgatgctggcgcgtcttatcaggcctacagtcggtgttggagc

SEQ ID NO: 473343 - DNA, 75 bp, synthetic construct
  source 1..75: mol_type = other DNA
ctacaagaaaagttattcatcattatgacggatgaaaaccaggtcaatcactcattcgtcactgataaaggcgtt

SEQ ID NO: 473344 - DNA, 75 bp, synthetic construct
  source 1..75: mol_type = other DNA
atgacggatgaaaaccaggttaatcactcattcgtcactgataagggattgacatatttgaagggggcgttatga

SEQ ID NO: 473345 - DNA, 75 bp, synthetic construct
  source 1..75: mol_type = other DNA
accaggcggcaactgctggttatgtaaaaaccaataccgcatataccgttacttatcagcaatattttaccgaat

SEQ ID NO: 473346 - DNA, 75 bp, synthetic construct
  source 1..75: mol_type = other DNA
ggatgagttatgaagaagtcgatcaatccgcacttatccatctcggcgctaacgttgcttctctcacgttgtcgg

SEQ ID NO: 473347 - DNA, 75 bp, synthetic construct
  source 1..75: mol_type = other DNA
cagagcaagtaacgccattcagagagccatcaatgccgctgcaggttgagcaggattatctatgtttaccagaaa

SEQ ID NO: 473348 - DNA, 75 bp, synthetic construct
  source 1..75: mol_type = other DNA
atgtacgggactaccaaattaagcactcaacaggccaccaatatggagtggtctatcgctaactgtaagattgtg

SEQ ID NO: 473349 - DNA, 75 bp, synthetic construct
  source 1..75: mol_type = other DNA
ggcaaaagatataacgtcaatttgtctgacagggcacaagaatggctgggagaagacgaactctcagctgtgccc

SEQ ID NO: 473350 - DNA, 75 bp, synthetic construct
  source 1..75: mol_type = other DNA
tatgccattgatgaacgttttttctggcaatttctgcaaaagacacaagaagtagagttggccaaactgcaaaag

SEQ ID NO: 473351 - DNA, 75 bp, synthetic construct
  source 1..75: mol_type = other DNA
atatctacatcgcattctggctaccgcaaaatatctgggtcaattttaaagtatttggtctgaccgccctcacct

SEQ ID NO: 473352 - DNA, 75 bp, synthetic construct
  source 1..75: mol_type = other DNA
gtgtttggtctgaccgccctcactttaatcttcacactgttaagcggtatctatatctatcgccacatgccacag

SEQ ID NO: 473353 - DNA, 75 bp, synthetic construct
  source 1..75: mol_type = other DNA
atgaacaccactatttccagcctaatagctcttgagatcggacacgtacaaaaattagctgatgagtgtgtagct

SEQ ID NO: 473354 - DNA, 75 bp, synthetic construct
  source 1..75: mol_type = other DNA
aagctcagggaaaagtcgcacgagcaacatataatggattaacctcctcaggaaaatctcgctatgttgcatcgc

SEQ ID NO: 473355 - DNA, 75 bp, synthetic construct
  source 1..75: mol_type = other DNA
cctgaagagcaaaaggttaagttcgtgaacatcgctgaaagtatccgcaatcaccctgacttcgaatcgaaatac

SEQ ID NO: 473356 - DNA, 75 bp, synthetic construct
  source 1..75: mol_type = other DNA
atgattgaagaggtagttattgacaaagtaggctcatataatggccctactcagcttttacatgggctttctaaa

SEQ ID NO: 473357 - DNA, 75 bp, synthetic construct
  source 1..75: mol_type = other DNA
tgcaggtgatgatctttatatgaatttagatacggagtctgtgcaaaaatatttaattgtttttcagaagatatt

SEQ ID NO: 473358 - DNA, 75 bp, synthetic construct
  source 1..75: mol_type = other DNA
aggaaatattaagcaaattatattccttactcataatatttattttcataaagagttgacttttaataccaaaag

SEQ ID NO: 473359 - DNA, 75 bp, synthetic construct
  source 1..75: mol_type = other DNA
gtgcgcgaatccacagcttaacgaactcgacaataccatcagcgaaatgctgaaagaaggtgcgcaagcagatct

SEQ ID NO: 473360 - DNA, 75 bp, synthetic construct
  source 1..75: mol_type = other DNA
atgaagaaagtagccgcgcttgttgcgttaagcctgctgatggcgggatgtgtaagtaatgacaaaattgctgtg

SEQ ID NO: 473361 - DNA, 75 bp, synthetic construct
  source 1..75: mol_type = other DNA
cgataccgagcatatcagccagagcatgcgcgacattctgctgacgccggtcggctcgcgggtgatgcgtcgtga

SEQ ID NO: 473362 - DNA, 75 bp, synthetic construct
  source 1..75: mol_type = other DNA
gcgtggatcaactggaagctggtggccgggcggttgcgtgtgcataccgaatacaacaataacgccttaacattg

SEQ ID NO: 473363 - DNA, 75 bp, synthetic construct
  source 1..75: mol_type = other DNA
gattatccgcaaccgatagttgatcacaaagaggcaaggctgcgaacgctggcagcgtacgaagaagcgaggaaa

SEQ ID NO: 473364 - DNA, 75 bp, synthetic construct
  source 1..75: mol_type = other DNA
cgtagtagcggatcgatagcgcccccgtcatccattacgctgaattatccctgtctgtctttcgacgcagcgcat

SEQ ID NO: 473365 - DNA, 75 bp, synthetic construct
  source 1..75: mol_type = other DNA
tgaggagaaccgcgtaacccatctgttttataactatcagtacgaggtgaacgagcgagcgcgggatgccctggt

SEQ ID NO: 473366 - DNA, 75 bp, synthetic construct
  source 1..75: mol_type = other DNA
cacgaaaagccattccatacggttattcgcgccgttgtcatcgcaacaaacaacgaacctatgcgtttcaccgaa

SEQ ID NO: 473367 - DNA, 75 bp, synthetic construct
  source 1..75: mol_type = other DNA
caatggggcgtggattgagcagggctaccgccttgcatctctcaaaggcaccgattttgaggacgacgcgcggca

SEQ ID NO: 473368 - DNA, 75 bp, synthetic construct
  source 1..75: mol_type = other DNA
aatcacagcacttgtacaggtgttccggcgatactcaatgctggtgtaccagacggccagctatacggcggatga

SEQ ID NO: 473369 - DNA, 75 bp, synthetic construct
  source 1..75: mol_type = other DNA
gttaaaagcaaacgattcactaccttttgggtatggtttttttttcctgttgtcgttaggtatctgtgtagcact

SEQ ID NO: 473370 - DNA, 75 bp, synthetic construct
  source 1..75: mol_type = other DNA
caaagccggtattgccgtactttcagtagaagcaacaaactggaatctgggaaataaagatggttatcagcaacg

SEQ ID NO: 473371 - DNA, 75 bp, synthetic construct
  source 1..75: mol_type = other DNA
gtggactgacgttacagggaatggatgataacgccgcaggtctgggagtcatgctggagttggctgaacgcctga

SEQ ID NO: 473372 - DNA, 75 bp, synthetic construct
  source 1..75: mol_type = other DNA
actggcgcgaaggggagcggtatttcatgtcgcagctgattgatggtgatttggcagccaataacggtggctggc

SEQ ID NO: 473373 - DNA, 75 bp, synthetic construct
  source 1..75: mol_type = other DNA
gcaccagccgtttgtccgcaagcctcgcaacgggaggattatcgcctcgccagtgtttgtattgcctgctggcgg

SEQ ID NO: 473374 - DNA, 75 bp, synthetic construct
  source 1..75: mol_type = other DNA
ggctgggtaatctggtcggttccatcttcgtagcgatgctctatagctggggcggcggtagcctgctaccggtgg

SEQ ID NO: 473375 - DNA, 75 bp, synthetic construct
  source 1..75: mol_type = other DNA
gccagggcgcggatgattttctcggcacccagggcgaccagtgggacacgcaatccgatatgttctgcgcgctgc

SEQ ID NO: 473376 - DNA, 75 bp, synthetic construct
  source 1..75: mol_type = other DNA
ttcttaacactggcgcactggcgctgacgttaatcctgatttacaccggaatttcggcccatgacaaactcacct

SEQ ID NO: 473377 - DNA, 75 bp, synthetic construct
  source 1..75: mol_type = other DNA
ttggcgcattaacgacggtgacactcctcgccggaacacactgtcgccaactacggcgctatggtttgataaccg

SEQ ID NO: 473378 - DNA, 75 bp, synthetic construct
  source 1..75: mol_type = other DNA
atggcgaattaccgtcttatatcactggcgctgacaatctcagccaccgcgaaaatgacatcaaaaacgccatta

SEQ ID NO: 473379 - DNA, 75 bp, synthetic construct
  source 1..75: mol_type = other DNA
atatgttctgcgcgctgcttggcgcattaacgacggtgatattcctcgctcgctttcattgccgccagctacggc

SEQ ID NO: 473380 - DNA, 75 bp, synthetic construct
  source 1..75: mol_type = other DNA
cctcgctcgctttcattgccgccagctacggcgctttggcttaatcaccagagcgccggaagcgattacccctta

SEQ ID NO: 473381 - DNA, 75 bp, synthetic construct
  source 1..75: mol_type = other DNA
tgtatatcgctacaccacgccagtgggcgacgcataacatgtcgccgcgtcaggctgaacttatcaatgctcaac

SEQ ID NO: 473382 - DNA, 75 bp, synthetic construct
  source 1..75: mol_type = other DNA
tttctggtgaaagatttgttgatcgactggcgcgaaggcgagcgatatttcatgtcgcagctgattgatggtgat

SEQ ID NO: 473383 - DNA, 75 bp, synthetic construct
  source 1..75: mol_type = other DNA
cttaatcctgtgtctgtcgctaagttggaaatgattcgcagcgaactctggctaaaagaagctgtgctggtgaga

SEQ ID NO: 473384 - DNA, 75 bp, synthetic construct
  source 1..75: mol_type = other DNA
atgacccgcacactcaagccgttaattcttaacaccggcgcactggcgctaacgttaatcctgatttataccggc

SEQ ID NO: 473385 - DNA, 75 bp, synthetic construct
  source 1..75: mol_type = other DNA
acagacggcgaccaccaccggaacctggatactggcccgtatgtcgaaagcgactattgtgccttttgttccgag

SEQ ID NO: 473386 - DNA, 75 bp, synthetic construct
  source 1..75: mol_type = other DNA
tgactcttgaactgggggcgcggatgtttggcatgtttacgccggggattggcgtttacaggcccaatgacaatc

SEQ ID NO: 473387 - DNA, 75 bp, synthetic construct
  source 1..75: mol_type = other DNA
tgctgctaatggttttaaaatgaccagcgaaatgcagcaaggggagtgggttaataatctactgaaaggcaccgt

SEQ ID NO: 473388 - DNA, 75 bp, synthetic construct
  source 1..75: mol_type = other DNA
ggttaccgcacggcacgtaaatataacggtgcctacatcaccatcactcaggggattgaagacttcgacggacag

SEQ ID NO: 473389 - DNA, 75 bp, synthetic construct
  source 1..75: mol_type = other DNA
ctgctggctgcagtgatgttctcgatgatgatttatgtcgagcaacggatgtatctctctgaccgtcagcagcca

SEQ ID NO: 473390 - DNA, 75 bp, synthetic construct
  source 1..75: mol_type = other DNA
ctgctggctgccgtgatgttctcgatgatgatttacgtcgagcagcggatgtatctctccgaccgtcagcaacac

SEQ ID NO: 473391 - DNA, 75 bp, synthetic construct
  source 1..75: mol_type = other DNA
gatattgatgaaaccatcagccactactggccgacaggcagcctccgtccaccgcgctatatgttgggcctgatg

SEQ ID NO: 473392 - DNA, 75 bp, synthetic construct
  source 1..75: mol_type = other DNA
tgctcggcaagcaactgccctacgtggccctggcgatgctcaatttcctttgcctgagcctgctggcggtcacgg

SEQ ID NO: 473393 - DNA, 75 bp, synthetic construct
  source 1..75: mol_type = other DNA
ggcgaattttcgccacggcaatattgagccaccgaatggcagtgttgcggagtttgagccgctgaacaccgaatg

SEQ ID NO: 473394 - DNA, 75 bp, synthetic construct
  source 1..75: mol_type = other DNA
tatattgaatacctgggcgtggatcggcaaatgagaacggccccttttgttaatcaggctgcataccttgaagga

SEQ ID NO: 473395 - DNA, 75 bp, synthetic construct
  source 1..75: mol_type = other DNA
acagtggcagatggactttcggaaggttaaaaaaggcgatgaatttgcggtattaatgtcacgtgaaatgcttga

SEQ ID NO: 473396 - DNA, 75 bp, synthetic construct
  source 1..75: mol_type = other DNA
ttaataatctactgaaaggcactgtagggccgagctttgttgccagcgccagaagtgctggtttaaccagtgctg

SEQ ID NO: 473397 - DNA, 75 bp, synthetic construct
  source 1..75: mol_type = other DNA
aagcaatagattatggttgtgctgtacaaaaaaaagatattgaagttaaagtaatttgccctgattgtcgaggaa

SEQ ID NO: 473398 - DNA, 75 bp, synthetic construct
  source 1..75: mol_type = other DNA
tggtgttttctatggctgcaatcgctatcgccgggacgaagctgactgttgttatgagaacatcacacttgagga

SEQ ID NO: 473399 - DNA, 75 bp, synthetic construct
  source 1..75: mol_type = other DNA
tcaccgatatgactacgtactggttgatgaattccaggatctttccggtggacgaggcaagttgttaaaagcatt

SEQ ID NO: 473400 - DNA, 75 bp, synthetic construct
  source 1..75: mol_type = other DNA
tttttgacaatcaacgctcgactaaacgcggagacttctcctccggtagcaactgcgtcactctacattctcatc

SEQ ID NO: 473401 - DNA, 75 bp, synthetic construct
  source 1..75: mol_type = other DNA
ttatcccacaggcgaccaacctccaggcgctgggcggcatcagctttaagaaaggctgctataccggacaagaga

SEQ ID NO: 473402 - DNA, 75 bp, synthetic construct
  source 1..75: mol_type = other DNA
gtgaattaccttcgaaggaaaagcaggttatcagagaaggtgcgactaccctgctatggtttgaacacccagcag

SEQ ID NO: 473403 - DNA, 75 bp, synthetic construct
  source 1..75: mol_type = other DNA
gaaccggacagcatcttccgcgtacgcgacgatgcgaatacactgcatatcgagccgctgccgtattcgctcgaa

SEQ ID NO: 473404 - DNA, 75 bp, synthetic construct
  source 1..75: mol_type = other DNA
acgtcaattgtctttcttctggcggccggaagaagttgatatttcgagcgatcgtatcgacttcaacacgaagct

SEQ ID NO: 473405 - DNA, 75 bp, synthetic construct
  source 1..75: mol_type = other DNA
gacagcatcttccgcgtacgcgacgatgcgaatacattgcatatcgagccgctgccgtattcgctcgaagagtaa

SEQ ID NO: 473406 - DNA, 75 bp, synthetic construct
  source 1..75: mol_type = other DNA
gaaccggacagcatcttccgcgtgcgcgacgatgcaaatacactgcatatcgagccgctgccgtattcgctcgaa

SEQ ID NO: 473407 - DNA, 75 bp, synthetic construct
  source 1..75: mol_type = other DNA
gacattaccgggttacttgcatatgcgagatctggtaggcgaacgtgacaacgttgcattttcttgcggtgtaca

SEQ ID NO: 473408 - DNA, 75 bp, synthetic construct
  source 1..75: mol_type = other DNA
cggcagaagagggcgttgttgcgctgggtgaaaccgggctggattattattacacgccggaaactaaagtacgtc

SEQ ID NO: 473409 - DNA, 75 bp, synthetic construct
  source 1..75: mol_type = other DNA
ctggcacccgtgccggtttccccggcaatcacggccccggtggcgcaacctgctaagggaggcttcctgaaaaaa

SEQ ID NO: 473410 - DNA, 75 bp, synthetic construct
  source 1..75: mol_type = other DNA
cagatgacggaagaccagcatctgctcgccgcccattgcgatgccaaaggtaagatgtggagcaatttacggctg

SEQ ID NO: 473411 - DNA, 75 bp, synthetic construct
  source 1..75: mol_type = other DNA
acaggtcgtcatgaataacgatatggaaccggacagcatcttccgcgtacgcgacgatgcgaatacattgcatat

SEQ ID NO: 473412 - DNA, 75 bp, synthetic construct
  source 1..75: mol_type = other DNA
ctggcgaaagccgctgcgcgcgatgtgaaattttgtctggcggtcgccacgacattgcccggttacctgcatatg

SEQ ID NO: 473413 - DNA, 75 bp, synthetic construct
  source 1..75: mol_type = other DNA
gaagcggcagcaaacaaaggggatgtagagacgtaccgcaagcttaaggcgcaactgaataaaggaattcgataa

SEQ ID NO: 473414 - DNA, 75 bp, synthetic construct
  source 1..75: mol_type = other DNA
atgaaatacctccagacattgcaggcgatagcatactggagaaagatagcgcattggcgctactactacgcctgt

SEQ ID NO: 473415 - DNA, 75 bp, synthetic construct
  source 1..75: mol_type = other DNA
atgctgcttattatttctgcaaaaatggcgcattcactctggcgctatttctccttttctgcggaatatacggtg

SEQ ID NO: 473416 - DNA, 75 bp, synthetic construct
  source 1..75: mol_type = other DNA
ttgcctgattcagaaatgtttttgctggggcgccctatgctgcaggcgcgattagaaaatttacaggccgtcggt

SEQ ID NO: 473417 - DNA, 75 bp, synthetic construct
  source 1..75: mol_type = other DNA
atggctttcattcaaccaaccatcgacgacgttagacattgctctaacgctttatctgtagaccctgccgaaacc

SEQ ID NO: 473418 - DNA, 75 bp, synthetic construct
  source 1..75: mol_type = other DNA
gtgagccggtcgtctgcgaaagcggcgaggacgcactaaaaaaggctgctcagtttgtgcgtggcgcactgctga

SEQ ID NO: 473419 - DNA, 75 bp, synthetic construct
  source 1..75: mol_type = other DNA
atgaatacccaacgtaaatacgggagaacctggcattaccccttctcccctggcaccaccagcgatgaccgcatt

SEQ ID NO: 473420 - DNA, 75 bp, synthetic construct
  source 1..75: mol_type = other DNA
cgattaccgatcgtccaacggtgaatatgctggggggatattactcgcagcagcaatttttgcgtaacctggatg

SEQ ID NO: 473421 - DNA, 75 bp, synthetic construct
  source 1..75: mol_type = other DNA
cgattaccgatcgtccaacggtcaatatgctgggcggatactactcgcaacagcagtttctacgtaacctggatg

SEQ ID NO: 473422 - DNA, 75 bp, synthetic construct
  source 1..75: mol_type = other DNA
aggccgcgacctcatccgctttttcaaactcaatacagccgagtgttagtagccgaaaagcgccaacagcaggtc

SEQ ID NO: 473423 - DNA, 75 bp, synthetic construct
  source 1..75: mol_type = other DNA
atgacgcaaccaatgcctgggaaaccagccgaagacgctgaaaatgaactggatattcgtgggttgtttcgtacc

SEQ ID NO: 473424 - DNA, 75 bp, synthetic construct
  source 1..75: mol_type = other DNA
tcgtgccttcctgatgattatgtggggcattgtcgggggactgatcggggctggtgtcgcattaacccgccgttg

SEQ ID NO: 473425 - DNA, 75 bp, synthetic construct
  source 1..75: mol_type = other DNA
ttggcatggggctggcgtttgcgttaatcgcgctggcgtatactttttttgctcgtcaggagtggagctcgacgg

SEQ ID NO: 473426 - DNA, 75 bp, synthetic construct
  source 1..75: mol_type = other DNA
gatgctgacgccgatgccaatctcggcgggctaacgttacaaggaatggatgataacgccgcaggtttaggtgtc

SEQ ID NO: 473427 - DNA, 75 bp, synthetic construct
  source 1..75: mol_type = other DNA
gtggaagcgactaactggaatcttggcaataaggatggttatcagcaacgcgcaaaaacagccgcattccctgca

SEQ ID NO: 473428 - DNA, 75 bp, synthetic construct
  source 1..75: mol_type = other DNA
tgtccggcagtcagtggcagtcgctgccggtgcttccggcagacggaacgcaggtgtcttttccgtatgccggtg

SEQ ID NO: 473429 - DNA, 75 bp, synthetic construct
  source 1..75: mol_type = other DNA
ggcaaaattttaaaatcggcgaattggacgctgaatcagacacacttctcttggaaaactgttttattgatagtg

SEQ ID NO: 473430 - DNA, 75 bp, synthetic construct
  source 1..75: mol_type = other DNA
ggcggcgtactgccgccgctcctggcctccgccattcagagactgaccggaaccggggcggaactggtactgtcc

SEQ ID NO: 473431 - DNA, 75 bp, synthetic construct
  source 1..75: mol_type = other DNA
gaacgtgatactaaggcttcgattggcacagaatacagtgctgtaaatcttagtgctgaatatgcaaaaaaacta

SEQ ID NO: 473432 - DNA, 75 bp, synthetic construct
  source 1..75: mol_type = other DNA
aattctgcgcagtggcgaggagataaaagcgcggaagtcattcatcaactggcgacgctactcaaagccgggtta

SEQ ID NO: 473433 - DNA, 75 bp, synthetic construct
  source 1..75: mol_type = other DNA
cagaagaagaattagagcgttactatcagtttcgctgggaaatgttgcgtaagcccctgcatcaaccaaaaggtt

SEQ ID NO: 473434 - DNA, 75 bp, synthetic construct
  source 1..75: mol_type = other DNA
ggctgatgtatgacagagcactccgtaacgctcaaccagaactgttttcgctgcacgaagatgacgcaaattacg

SEQ ID NO: 473435 - DNA, 75 bp, synthetic construct
  source 1..75: mol_type = other DNA
gacgacgaaaacctgcccgtggtgctcgatgccatcctgaaccggggagcacgtttttcggcggtggaaatgtat

SEQ ID NO: 473436 - DNA, 75 bp, synthetic construct
  source 1..75: mol_type = other DNA
tttactcactattaatagtttcagcgccaaagaagccgaagaaaaagtcggagcatggctggattatgctaccga

SEQ ID NO: 473437 - DNA, 75 bp, synthetic construct
  source 1..75: mol_type = other DNA
acagcgcttcgtggtgcgtgctgcacagaatagccggcaggaagaagcacccggcaagctcttcgaactgccgga

SEQ ID NO: 473438 - DNA, 75 bp, synthetic construct
  source 1..75: mol_type = other DNA
ctgctggctcgatgaggacgacgaaaacctgcccgtggtgctcgatgccatcctgaaccggggcgcacgtttttc

SEQ ID NO: 473439 - DNA, 75 bp, synthetic construct
  source 1..75: mol_type = other DNA
cgttcgctggcgtgctggcgctgtttatccacaccaccggcgtgctctccaagctgctttccgaagcggtagaag

SEQ ID NO: 473440 - DNA, 75 bp, synthetic construct
  source 1..75: mol_type = other DNA
atgccggatgcggtgcaagcaccttatccggcctacagaccggagccaaacatgcaaaccatcaccatcgcccca

SEQ ID NO: 473441 - DNA, 75 bp, synthetic construct
  source 1..75: mol_type = other DNA
cgttcgctggcgtgctggcgctatttatccacaccaccggcgtgctctccaagctgctttccgaagcggtggaag

SEQ ID NO: 473442 - DNA, 75 bp, synthetic construct
  source 1..75: mol_type = other DNA
gcacgtttttcgtcggtggaaatgtacctggtcagtgagtgtgtggaacatatcctggccagtggcctggtctgc

SEQ ID NO: 473443 - DNA, 75 bp, synthetic construct
  source 1..75: mol_type = other DNA
ttctgcgggaggtggtccgggaagcacgaaccgaaatccgcagcatggcggatgctctggcacaaatccggggct

SEQ ID NO: 473444 - DNA, 75 bp, synthetic construct
  source 1..75: mol_type = other DNA
ctgatggtgctgatcatcgtcacggtcagcctgctggatttcctctctcaacggttgcgtaagcactttatctga

SEQ ID NO: 473445 - DNA, 75 bp, synthetic construct
  source 1..75: mol_type = other DNA
gatgacgaaaatctgcccgtggtgctcgatgccatcctgaaccggggagcacgtttttcggcggtggaaatgtat

SEQ ID NO: 473446 - DNA, 75 bp, synthetic construct
  source 1..75: mol_type = other DNA
cccgcgataccccgtggccgacgcagcttggcgtcgaaagccccgaatacgccctgctccagctggcgaacctgt

SEQ ID NO: 473447 - DNA, 75 bp, synthetic construct
  source 1..75: mol_type = other DNA
ccagtgggctggcctgcgatgtgctgcgtataccggatgaaccgccccgccggtggtttgaccgtggtgttctgc

SEQ ID NO: 473448 - DNA, 75 bp, synthetic construct
  source 1..75: mol_type = other DNA
tggtgggtttaccagcccgttcgccgcctgatggacgcctgccgcgccattaacgaaatggtcttcgccatgctg

SEQ ID NO: 473449 - DNA, 75 bp, synthetic construct
  source 1..75: mol_type = other DNA
ggcctcagcgtcgtgtgcgggctgtgccgtgcctccatcgtagccgggcttctgcgggcgggttgcaaggtaagg

SEQ ID NO: 473450 - DNA, 75 bp, synthetic construct
  source 1..75: mol_type = other DNA
cgcagtgtcagttgccgggtggcagaagatgcgcggcgtatcagggcggcgctgaccacaaccggtcagacgttg

SEQ ID NO: 473451 - DNA, 75 bp, synthetic construct
  source 1..75: mol_type = other DNA
agacgcctggtgcggtgtttgaagggacgtatatcgttcttcccgctaagccatttggcccttatgaagagggcg

SEQ ID NO: 473452 - DNA, 75 bp, synthetic construct
  source 1..75: mol_type = other DNA
acgctgccgtttatggcgctgaccgccaccgccgacgacaccacgcggcaggatatcgtgcgcctgctggggctg

SEQ ID NO: 473453 - DNA, 75 bp, synthetic construct
  source 1..75: mol_type = other DNA
cgtggcgctcaaaccgaaagcgatgcagaaatccttcggcggcaactatgatcgcaaactgttcgccaaattacg

SEQ ID NO: 473454 - DNA, 75 bp, synthetic construct
  source 1..75: mol_type = other DNA
gaaagtagaagacaccgccgcgcgtctgcaaagcaagggtatcagcgcagcggcttatcacgccgggcttgaaaa

SEQ ID NO: 473455 - DNA, 75 bp, synthetic construct
  source 1..75: mol_type = other DNA
actcttatactttcggtgtaacttataatggggttgattatgattctacatctccactacctattgcagcacctg

SEQ ID NO: 473456 - DNA, 75 bp, synthetic construct
  source 1..75: mol_type = other DNA
taatgcactaccaggcccatctccaggagaagaatacccatctgcatgggcaaatataatgatgttgttagcatc

SEQ ID NO: 473457 - DNA, 75 bp, synthetic construct
  source 1..75: mol_type = other DNA
ccaaccaatgcaaaatgctttcaaaattcgtaaacgtgttgagaaagttaaacatgttgctgttaaaagtcttga

SEQ ID NO: 473458 - DNA, 75 bp, synthetic construct
  source 1..75: mol_type = other DNA
gaagtaatgacaggctgccgtaccgggcaaatccgcctgctgtatatcgcgccggaacgcctgatgctggataac

SEQ ID NO: 473459 - DNA, 75 bp, synthetic construct
  source 1..75: mol_type = other DNA
cgtcgttgtctggaagagaaaccgcaggggcagttacaggatatcgaacgtcataaactcaatgcgatgggcgcg

SEQ ID NO: 473460 - DNA, 75 bp, synthetic construct
  source 1..75: mol_type = other DNA
tggatatgcgcgtgcaacaactgccgctcggttccgatatctggctgcttggcgtgattggctttggcctgctgg

SEQ ID NO: 473461 - DNA, 75 bp, synthetic construct
  source 1..75: mol_type = other DNA
ccgcaggggcagttgcaggatatcgaacgtcataaactcaatgcgatgggcgcgtttgccgaagcgcaaacttgc

SEQ ID NO: 473462 - DNA, 75 bp, synthetic construct
  source 1..75: mol_type = other DNA
caaactgcgtaaatcgattgccgatgaaagcaatgtcccgccgtacgtggtatttaacgacgcgaccttgattga

SEQ ID NO: 473463 - DNA, 75 bp, synthetic construct
  source 1..75: mol_type = other DNA
aacggcgttgggatgcgcaagctggaacgctttggcaaaccgtttatggcacttatccgtgcgcatgtcgatggc

SEQ ID NO: 473464 - DNA, 75 bp, synthetic construct
  source 1..75: mol_type = other DNA
tacgtgtacagctgtatattaagctggctaaaaatgctaataaagtaaataaaaaacttgtattacctgacgaat

SEQ ID NO: 473465 - DNA, 75 bp, synthetic construct
  source 1..75: mol_type = other DNA
tgatgtatgcccccgacagcgccctgccagtcggtcttatcgaacagcagcgctggagtcgggccacggacacct

SEQ ID NO: 473466 - DNA, 75 bp, synthetic construct
  source 1..75: mol_type = other DNA
ggcgttaagcgcgtgacctgtagcgcccgtgaagacgcggtggagttttttgccaagctggggtttgttaatcag

SEQ ID NO: 473467 - DNA, 75 bp, synthetic construct
  source 1..75: mol_type = other DNA
atgattaaaaaattgccagtgttaaccctttttttgttcgtttcaggattgcttttggccggatgctatgttatt

SEQ ID NO: 473468 - DNA, 75 bp, synthetic construct
  source 1..75: mol_type = other DNA
ggatagggacgctgatggcgatgaccctggagtcggtagcacgccaggaaggcgttaagcgcgtgacctgtagcg

SEQ ID NO: 473469 - DNA, 75 bp, synthetic construct
  source 1..75: mol_type = other DNA
catacgttatttgccgggagtttattctcgctggcaacactcaccggttgggggcttatctggctgatgctgcgt

SEQ ID NO: 473470 - DNA, 75 bp, synthetic construct
  source 1..75: mol_type = other DNA
gtacacccggacgtgcaggacaaagggttggggacgctgatggcgatgacgcttgagtcggtggcgcgtcaggaa

SEQ ID NO: 473471 - DNA, 75 bp, synthetic construct
  source 1..75: mol_type = other DNA
gccatgagaaaacgccagatggtagcttgcgtcatccacgtctgaagtggcctaaatgtcttcgagataccgaag

SEQ ID NO: 473472 - DNA, 75 bp, synthetic construct
  source 1..75: mol_type = other DNA
ccaaatccaaaggccaagtggccaatgatcggcagtctcaaactcgatggtctccgggttatctgcgaagtcatc

SEQ ID NO: 473473 - DNA, 75 bp, synthetic construct
  source 1..75: mol_type = other DNA
atggaaaaactgatcgccctaaagcacaagctggatgctattaaaacgatgggaaccaacgccaagaaagaggcg

SEQ ID NO: 473474 - DNA, 75 bp, synthetic construct
  source 1..75: mol_type = other DNA
cgactggtctgcgccactggtacaaaaatactttggcctggaagggatctcattgccgacgctctcttcggtggt

SEQ ID NO: 473475 - DNA, 75 bp, synthetic construct
  source 1..75: mol_type = other DNA
tcacctgcatccgttctatatcatccatagccacgaagacttcatcgaacgcttcatgaaacgcctggacgataa

SEQ ID NO: 473476 - DNA, 75 bp, synthetic construct
  source 1..75: mol_type = other DNA
cgtggcgtcaatgtgcgccgatgggcaggacgtgttccgtcgtttcctcttaaaagacccgaaagcaggtgttgg

SEQ ID NO: 473477 - DNA, 75 bp, synthetic construct
  source 1..75: mol_type = other DNA
catcatggatgaacccacctcctcactcaccaataaagaggtggactatctgtttctgatcatgaatcagttgcg

SEQ ID NO: 473478 - DNA, 75 bp, synthetic construct
  source 1..75: mol_type = other DNA
gctgtttattgaactgggtgggcagaacttgcttatcactaacccgcgcgatattccggggttggtaaaagagtt

SEQ ID NO: 473479 - DNA, 75 bp, synthetic construct
  source 1..75: mol_type = other DNA
tgaagatgtggtcatgcagcaccctggcgtacaggaagtggcggctgttggcgtaccttctggctccagtggtga

SEQ ID NO: 473480 - DNA, 75 bp, synthetic construct
  source 1..75: mol_type = other DNA
gtggaaggtgattcaatgacggcaccggttgggttaagcattccagagggaacattcgttcttttcgataccgga

SEQ ID NO: 473481 - DNA, 75 bp, synthetic construct
  source 1..75: mol_type = other DNA
gcctcgttgcagcgcgagctggagaagctgtcgatccgcgcccgcagcagcggcgtgtttgtctacaccgacccg

SEQ ID NO: 473482 - DNA, 75 bp, synthetic construct
  source 1..75: mol_type = other DNA
ctccatcgacaccggcacaccatccgggcggttcttcttccacgtcatggcgagccttgccgaaatggagcgcga

SEQ ID NO: 473483 - DNA, 75 bp, synthetic construct
  source 1..75: mol_type = other DNA
acgctgccgtttatggcgctgactgccacagccgatgacaccacgcgccaggatatcgtgcgcctgctggggctg

SEQ ID NO: 473484 - DNA, 75 bp, synthetic construct
  source 1..75: mol_type = other DNA
cattgtatttcccaatgggggcacgatttccgcccggaatatgctgcgctcggtcagttacgccagcgtttcccg

SEQ ID NO: 473485 - DNA, 75 bp, synthetic construct
  source 1..75: mol_type = other DNA
cctttccaccattggtcgtgtgaatcagcggtttgggatgggttatgtggtggaagtgattcgcggtgctaataa

SEQ ID NO: 473486 - DNA, 75 bp, synthetic construct
  source 1..75: mol_type = other DNA
cgttgctgaacaataaagagttccagcaactggatttctccagtttgcatttgtccgcaggtggcgggatgcccg

SEQ ID NO: 473487 - DNA, 75 bp, synthetic construct
  source 1..75: mol_type = other DNA
gtttggcttaaccgttatcccgcggatgttccgacggagatcaaccctgaccgttatcaatctctggtagatatg

SEQ ID NO: 473488 - DNA, 75 bp, synthetic construct
  source 1..75: mol_type = other DNA
tgaatctggagtccggggctaaacaggttttacaagaaacctttggctaccaacagtttcgccccggccaggaag

SEQ ID NO: 473489 - DNA, 75 bp, synthetic construct
  source 1..75: mol_type = other DNA
cgtgtcgaacattattgcacccgtcttgctgccggagggttaaataaaaccgcacagtttagtatcgagcaaatt

SEQ ID NO: 473490 - DNA, 75 bp, synthetic construct
  source 1..75: mol_type = other DNA
ggtgtggagcggtttaatcaggcgatgatggatttaggcgcgatgatctgcacgcgctcgaagccaaagtgttcg

SEQ ID NO: 473491 - DNA, 75 bp, synthetic construct
  source 1..75: mol_type = other DNA
ggcacagcacgttgccaccttacacggcggtaagttcccggagacctttgaggaagtcgcggcactgcctggcgt

SEQ ID NO: 473492 - DNA, 75 bp, synthetic construct
  source 1..75: mol_type = other DNA
cccgcgcgcgcaatctgcataaagcggcacaacaagtggcgaccttacacggcggtaaattcccggaaacctttg

SEQ ID NO: 473493 - DNA, 75 bp, synthetic construct
  source 1..75: mol_type = other DNA
gttgaaataattaatactttttataatatcgttatgccttggattgacaagtcacataataataatcaaatagtc

SEQ ID NO: 473494 - DNA, 75 bp, synthetic construct
  source 1..75: mol_type = other DNA
cgccgccaaaattgtgcaggagaaagcgggcggtgcacacgctgcggttgttacagcagtagccaaagccgcatt

SEQ ID NO: 473495 - DNA, 75 bp, synthetic construct
  source 1..75: mol_type = other DNA
tcttggcggtctgggtaacctcgccctgcaatacgcgaagaatgtctttaacgccaaagtgatcgccattgatgt

SEQ ID NO: 473496 - DNA, 75 bp, synthetic construct
  source 1..75: mol_type = other DNA
gtatctgccgtctcttcatttttcggcatggtgatcctcgccgccctcatttattacttcactatgtggttaact

SEQ ID NO: 473497 - DNA, 75 bp, synthetic construct
  source 1..75: mol_type = other DNA
aggtgcatggaatgaggccgtagagccgtacaaccctcaggcagtggatgagtggtatgaatcagattgtcacgt

SEQ ID NO: 473498 - DNA, 75 bp, synthetic construct
  source 1..75: mol_type = other DNA
tcggttttgttagcgttaaaaacacgtctcactgtggcgcgttatcttattttgcagagatgatcaccaacaaag

SEQ ID NO: 473499 - DNA, 75 bp, synthetic construct
  source 1..75: mol_type = other DNA
atttacgtttctggcagaaataccatgcaatgccgcgtggcgcaaaaccacgggcgattttattgatactcgtga

SEQ ID NO: 473500 - DNA, 75 bp, synthetic construct
  source 1..75: mol_type = other DNA
cttcctcaatgtactagtgcgtaatctttcagccagcgactacgagcagatcgattacgatctgcgaactgtgtt

SEQ ID NO: 473501 - DNA, 75 bp, synthetic construct
  source 1..75: mol_type = other DNA
caccggggtcaatgctcaggcagatgtggttgtggcaacttcgtcgcttgaggtggggtataacgatcctctggt

SEQ ID NO: 473502 - DNA, 75 bp, synthetic construct
  source 1..75: mol_type = other DNA
gccagcgaaatgttgagtgtaaacggtgtcgggatgcgcaagctggaacgctttggtaaaccgtttatgacgctg

SEQ ID NO: 473503 - DNA, 75 bp, synthetic construct
  source 1..75: mol_type = other DNA
cagacgttgctgacccgccagacgcgccgctttcgcctggtcgtgaaggaaagcgatcacccctgctggctcgat

SEQ ID NO: 473504 - DNA, 75 bp, synthetic construct
  source 1..75: mol_type = other DNA
aaaacctgcccgtggtgctcgatgccatcgtgaaccggggagcacgtttttcgtcggtggaaatgtacctggtca

SEQ ID NO: 473505 - DNA, 75 bp, synthetic construct
  source 1..75: mol_type = other DNA
tgctggcgcagggctggccggaagagacggatgttgaccagcgaaatccgaactatccgggctggatcagcattt

SEQ ID NO: 473506 - DNA, 75 bp, synthetic construct
  source 1..75: mol_type = other DNA
tgtataacacttcagaaaaaccatcaaaaaattgcgattgctgtagcatcgatgtggaaaaagaaccttggcgta

SEQ ID NO: 473507 - DNA, 75 bp, synthetic construct
  source 1..75: mol_type = other DNA
gagtggacgaaacccggaaatctgatcggcaatggcgcttatgttcttaaagagcgcgtagtcaatgaaaaactg

SEQ ID NO: 473508 - DNA, 75 bp, synthetic construct
  source 1..75: mol_type = other DNA
ccgctggtttgaccgtggtgttctgcgggaggtggtccgggaagcccgggccgaaatccgcagcatggcggatgc

SEQ ID NO: 473509 - DNA, 75 bp, synthetic construct
  source 1..75: mol_type = other DNA
gaaacctggcgcgacaaacagacgggggagatgcgggagcagacggaatggcaccgcgtggtgctgttcggcaag

SEQ ID NO: 473510 - DNA, 75 bp, synthetic construct
  source 1..75: mol_type = other DNA
cctggcctccgccattcagaaactgaccggaaccggggcggaacttgtactgtccggcagtcagtggcagtcgct

SEQ ID NO: 473511 - DNA, 75 bp, synthetic construct
  source 1..75: mol_type = other DNA
agtatccgggctggatcagcatttatgttctgctggatgcgccccggctggcgacgttacttatcaaccgtcacg

SEQ ID NO: 473512 - DNA, 75 bp, synthetic construct
  source 1..75: mol_type = other DNA
accgtcccgtcgctggtttgaccgggatattctgcgggaggttgttctggaggcacgggatgaaatccgcagcat

SEQ ID NO: 473513 - DNA, 75 bp, synthetic construct
  source 1..75: mol_type = other DNA
ctgaacgcactgatttgtcgtcacgcccgcaacctgctgctggcgcagggctggccggaagagacggatgttgac

SEQ ID NO: 473514 - DNA, 75 bp, synthetic construct
  source 1..75: mol_type = other DNA
agtgggctggcctgcgatgtgctgcgtataccggatgaaccgccccgccgctggtttgaccgtggtgttctgcgg

SEQ ID NO: 473515 - DNA, 75 bp, synthetic construct
  source 1..75: mol_type = other DNA
acctgcccgtggtgctcgatgccatcctgaaccggggcgcacgtttttcggcggtggaaatgtatctggtcagcg

SEQ ID NO: 473516 - DNA, 75 bp, synthetic construct
  source 1..75: mol_type = other DNA
ctgacttccgcgaaagcgttaggtggtggctttccgattagcgccatgctgactacggcggagattgcttctgcg

SEQ ID NO: 473517 - DNA, 75 bp, synthetic construct
  source 1..75: mol_type = other DNA
tgcagtagcgggcgcggcgtttgatatcatcaatacccctgaagtgctggaaggcattcaggcgaaacgccagcg

SEQ ID NO: 473518 - DNA, 75 bp, synthetic construct
  source 1..75: mol_type = other DNA
ggagtatgtcgatttcgcgggggggattgcggttacggcgttaggtcattgccatccggcgctggtggaagcgtt

SEQ ID NO: 473519 - DNA, 75 bp, synthetic construct
  source 1..75: mol_type = other DNA
gtgttgggatgcgcaaactggaacggtttggtaaaccgtttatgacgcttatccgcgcgcatgtcgacggtgatg

SEQ ID NO: 473520 - DNA, 75 bp, synthetic construct
  source 1..75: mol_type = other DNA
cgtcaattgattcatctcggtttggtgacgcaaaacatcgcccagcattctgcattacaactgacagaagccgca

SEQ ID NO: 473521 - DNA, 75 bp, synthetic construct
  source 1..75: mol_type = other DNA
gtccgcgccgacgtgcaggagaaattccagcgcgatgacctgcaaattgtcgtggcgaccgtggcgttcggcatg

SEQ ID NO: 473522 - DNA, 75 bp, synthetic construct
  source 1..75: mol_type = other DNA
gctttcgtctggttgtgaaggaaagcgattacccctgctggcttgatgaagatgacgaaaatctgcccgtggtgc

SEQ ID NO: 473523 - DNA, 75 bp, synthetic construct
  source 1..75: mol_type = other DNA
tggattacgccggttacgagacggtggaagcgccgaacggcgtcgcgagctacctgctgcgcggcaccgtaaccg

SEQ ID NO: 473524 - DNA, 75 bp, synthetic construct
  source 1..75: mol_type = other DNA
tgaccgaagacgaaatcagggctgtacttgcggcggtgcgcgatgcggtacgaagcatctgttaccaggtggcag

SEQ ID NO: 473525 - DNA, 75 bp, synthetic construct
  source 1..75: mol_type = other DNA
atgcgggtgcagaggctggcgtaatggtgctgaatgccggaccggatgtgatgcgttttgcaccgtcgctggtgg

SEQ ID NO: 473526 - DNA, 75 bp, synthetic construct
  source 1..75: mol_type = other DNA
cgcgtggtgtttatgaactccggcacggaagctaacgaaaccgcctttaaactggcacgtcattacgcctgtgtg

SEQ ID NO: 473527 - DNA, 75 bp, synthetic construct
  source 1..75: mol_type = other DNA
gaaaacctgcccgtggtgctcgatgccatcgtgaaccggggagcacgtttttcgtcggtggaaatgtacctggtc

SEQ ID NO: 473528 - DNA, 75 bp, synthetic construct
  source 1..75: mol_type = other DNA
ggcccgcgcggcgtcagcttgcatccagtcaatgcaacaacgtccgtctgcaagccgattctcaccacgaaacaa

SEQ ID NO: 473529 - DNA, 75 bp, synthetic construct
  source 1..75: mol_type = other DNA
aagattttgattcccggtattcaaaattaaaggtaacaaaagatcagattatcccggtgctgttgcgcgatgctg

SEQ ID NO: 473530 - DNA, 75 bp, synthetic construct
  source 1..75: mol_type = other DNA
ggtaactttattagagcgataaaaccattagtttttgatggagtaccagttgtactgatagccattccacatcga

SEQ ID NO: 473531 - DNA, 75 bp, synthetic construct
  source 1..75: mol_type = other DNA
acggcaacattttaccatgcgaccaggcccgcgcggcgtccgcgtgtatccagtcaatgcaacaacgtcaggcga

SEQ ID NO: 473532 - DNA, 75 bp, synthetic construct
  source 1..75: mol_type = other DNA
caacctgaaaggatatgcgcaactactacaggaagaacaccagcggcggcaaatgctggaactaatggaagacat

SEQ ID NO: 473533 - DNA, 75 bp, synthetic construct
  source 1..75: mol_type = other DNA
aaagagttgcgcgtgccagtggcggcgctggcgcaattatcccgccgcgttgaagaacgaccgaacaagcgcccg

SEQ ID NO: 473534 - DNA, 75 bp, synthetic construct
  source 1..75: mol_type = other DNA
acgcttcttgagcctgtaataatggaactgcaagaaatagatctattgcacgatatatataaagaacagcacacc

SEQ ID NO: 473535 - DNA, 75 bp, synthetic construct
  source 1..75: mol_type = other DNA
tatagaaggatatacaaaaaaaattcgtgctacagcacgtgatggtatgaatgtattaagcaaagtaaggcctga

SEQ ID NO: 473536 - DNA, 75 bp, synthetic construct
  source 1..75: mol_type = other DNA
tccgaactggagacagcggtgaaagacctgggcaaagcggtgtcctataaggggatgtatctgagacacgcaaca

SEQ ID NO: 473537 - DNA, 75 bp, synthetic construct
  source 1..75: mol_type = other DNA
tctacccctaaacttaatgaagcgattcattacttcgaagagcatccccctaaaaaacagatttacggtgaaaaa

SEQ ID NO: 473538 - DNA, 75 bp, synthetic construct
  source 1..75: mol_type = other DNA
tcatactgtctggtataccgccagcaatgcagggcgtttttacggcatctgggatagagccagaggacgacagcg

SEQ ID NO: 473539 - DNA, 75 bp, synthetic construct
  source 1..75: mol_type = other DNA
atgaagaataaggctgataacaaaaaaaggaacttcctgacccatagtgaaatcgaatcactccttaaagcagca

SEQ ID NO: 473540 - DNA, 75 bp, synthetic construct
  source 1..75: mol_type = other DNA
ccgcgctgctgctgaacgcccttaccctggcagcaaggatcagcgggttggcgttttgttcttcacgcttgaaat

SEQ ID NO: 473541 - DNA, 75 bp, synthetic construct
  source 1..75: mol_type = other DNA
aagccatcgcaaagctgggaaaaggcgatgcatatctcgctggtgctgtacgccgaacacgagtttaacgcctcc

SEQ ID NO: 473542 - DNA, 75 bp, synthetic construct
  source 1..75: mol_type = other DNA
cgccggaggtgcagcttaccgtgagtggctgtcccagagtgacgcagtgccgtctggaaaggtcagcgccgcgca

SEQ ID NO: 473543 - DNA, 75 bp, synthetic construct
  source 1..75: mol_type = other DNA
acctgttcctccatggctgtggcgaaaagaaaataaaaatgacaacaaacagtgcataaatattgaatacattta

SEQ ID NO: 473544 - DNA, 75 bp, synthetic construct
  source 1..75: mol_type = other DNA
ctggagatccagcaacgctacgaaacgccggacgaagccgaagcagatatccgcaagcgcgtggaaaacaaagaa

SEQ ID NO: 473545 - DNA, 75 bp, synthetic construct
  source 1..75: mol_type = other DNA
gctggagatccagcaacgctacgaaacgccggacgaagccgaagcagatatccgcaagcgcgtggaaaacaaaga

SEQ ID NO: 473546 - DNA, 75 bp, synthetic construct
  source 1..75: mol_type = other DNA
actgtttaccagcggtttgatgacaacggcaatatcttaccatgcgaccaggcccgcgcggctgcggcgtgtatt

SEQ ID NO: 473547 - DNA, 75 bp, synthetic construct
  source 1..75: mol_type = other DNA
atcatggtcgttgaagatgatggcgaaagaattgcgcgtaccggtgttggcgctggcgcaattatcccgccgcgt

SEQ ID NO: 473548 - DNA, 75 bp, synthetic construct
  source 1..75: mol_type = other DNA
caacctgaagggatacgcacagctactacgtgaagagcaccagcggcggcagatgttggaactcatcgacgatat

SEQ ID NO: 473549 - DNA, 75 bp, synthetic construct
  source 1..75: mol_type = other DNA
gcaaatgatccgactgccaccagttgctgcgtgtgctgcaaggaaatcccgctcgatgccgccttcaccccggaa

SEQ ID NO: 473550 - DNA, 75 bp, synthetic construct
  source 1..75: mol_type = other DNA
ataacaaaaaaaggaacttcctgacccatagtgaaatcgaatcactccttaaagcagcaaataccgggcctcatg

SEQ ID NO: 473551 - DNA, 75 bp, synthetic construct
  source 1..75: mol_type = other DNA
ggcccgcgcggctgcggcgtgtattcagtctatgaatcatcgtacaagcagatttaaccaacgaaacaaccagaa

SEQ ID NO: 473552 - DNA, 75 bp, synthetic construct
  source 1..75: mol_type = other DNA
gtagtgtggccgctgaatcaaccaattttactgttgatctgatggaaaacgcggcgaagcaatttaacaacattg

SEQ ID NO: 473553 - DNA, 75 bp, synthetic construct
  source 1..75: mol_type = other DNA
gtaccggcgggcgattgcatcggcatggcggcagaaaatgctgaccgaaaccggcagtaatcggtgtggtccgca

SEQ ID NO: 473554 - DNA, 75 bp, synthetic construct
  source 1..75: mol_type = other DNA
ccacattggccatttttggcgaagtcgcggcggtgcatgaagccatgcgaatcattgaggaagacgataaccagt

SEQ ID NO: 473555 - DNA, 75 bp, synthetic construct
  source 1..75: mol_type = other DNA
ctgacggtgattgctgacctgggtggcagggatgctgctcctttttttgagggtatcaaccggcaggcaccggct

SEQ ID NO: 473556 - DNA, 75 bp, synthetic construct
  source 1..75: mol_type = other DNA
cggatgttgattttgaaattgagcaggctttcggcgatacctggcagcccgagtgtatcattgagtatgaaggtc

SEQ ID NO: 473557 - DNA, 75 bp, synthetic construct
  source 1..75: mol_type = other DNA
gttcaaccatcaatacgcaatgaaagataaagacaaggatatgccctttgatttactccgttgtaccacgccgaa

SEQ ID NO: 473558 - DNA, 75 bp, synthetic construct
  source 1..75: mol_type = other DNA
ggaccattgtctgtgccggtacggggagtggtaaaacactggcgttctatctcccggcactcacctcgctcctca

SEQ ID NO: 473559 - DNA, 75 bp, synthetic construct
  source 1..75: mol_type = other DNA
aacagctggcgcagaactgaaagtgattgcagacctgggcggcagggatgccagccccttttttgaggcgataaa

SEQ ID NO: 473560 - DNA, 75 bp, synthetic construct
  source 1..75: mol_type = other DNA
agtgaaacggtggattgcctgatttgggcgattggtcgcgagcctgccaatgacaacatcaacctggaagccgct

SEQ ID NO: 473561 - DNA, 75 bp, synthetic construct
  source 1..75: mol_type = other DNA
cgggcagccggcagcccctttttatgacgcaatcaataatgccccgaatgaatggacaacaaagccggcatcccg

SEQ ID NO: 473562 - DNA, 75 bp, synthetic construct
  source 1..75: mol_type = other DNA
ggactgctctccccagcttctggcaccgatttagctcaccgtcttcagttatcacattacccagttctgatcacg

SEQ ID NO: 473563 - DNA, 75 bp, synthetic construct
  source 1..75: mol_type = other DNA
agggagaggcggcaatgttaccggtcagtacgcctgaaatgtcacccggagaggttgtggcgcgccggcttcagt

SEQ ID NO: 473564 - DNA, 75 bp, synthetic construct
  source 1..75: mol_type = other DNA
agagaatatctttgaaaatagcgaggatggtgaagacgacgccgaaagccaggaactgcagcaacatttgcgcaa

SEQ ID NO: 473565 - DNA, 75 bp, synthetic construct
  source 1..75: mol_type = other DNA
atgaaaattaccgtattgggatgcggtgccttagggcaattatggcttacagcattttgcaaacaaggtcacgag

SEQ ID NO: 473566 - DNA, 75 bp, synthetic construct
  source 1..75: mol_type = other DNA
actggatacccgtcgcggctcaaattcacaactcgaaacggcagtgaaagacctgggggcggtggtgtccttcaa

SEQ ID NO: 473567 - DNA, 75 bp, synthetic construct
  source 1..75: mol_type = other DNA
aattctgctgattcacaacggcatgggcaccatcgaagagttgcagaatattgaacaacctctgttgatggggac

SEQ ID NO: 473568 - DNA, 75 bp, synthetic construct
  source 1..75: mol_type = other DNA
gtgccttagggcaattatggcttacagcactttgtaaacagggtcacgaagttcagggctggctgcgcgtaccgc

SEQ ID NO: 473569 - DNA, 75 bp, synthetic construct
  source 1..75: mol_type = other DNA
tgttgcctgacgttgcctggcataacaatattcgcgccgagctgtggcgcaagctggcggtaaactgtgtgatta

SEQ ID NO: 473570 - DNA, 75 bp, synthetic construct
  source 1..75: mol_type = other DNA
taaaccaaatacgttgaatttttacgcccggctaatggcgacacaggtgcctgtcactgcgggggcatatcaatg

SEQ ID NO: 473571 - DNA, 75 bp, synthetic construct
  source 1..75: mol_type = other DNA
gggataacggctgtagtgtggccgctgaatcaaccaattttactgttgatctgatggaaaacgcggcgaagcaat

SEQ ID NO: 473572 - DNA, 75 bp, synthetic construct
  source 1..75: mol_type = other DNA
aacgcctgatgaagacccgaagaatctggcagaccctgcttaccgccgccgtcgcatcatcctgcagaacatgcg

SEQ ID NO: 473573 - DNA, 75 bp, synthetic construct
  source 1..75: mol_type = other DNA
gctggcgcgtggggcaactgtaaattacgacgggagaagcttcagttatcctgttatatgtgattggagagcgta

SEQ ID NO: 473574 - DNA, 75 bp, synthetic construct
  source 1..75: mol_type = other DNA
gagctcgacgcgctggctcgtggggcagcggtgctttacggtaacaaaaagttcatttatgcgaccgataaggga

SEQ ID NO: 473575 - DNA, 75 bp, synthetic construct
  source 1..75: mol_type = other DNA
cgtctgccggggatgaatgacaaggagctgaaaaagtttgccgcccgtatctcatcgcagcttttcatgatgtat

SEQ ID NO: 473576 - DNA, 75 bp, synthetic construct
  source 1..75: mol_type = other DNA
gccaaagcgatcgagtgggatgaagcgttcaagaaaatggatgatccttctggtcgcgcggttggcgttcaccag

SEQ ID NO: 473577 - DNA, 75 bp, synthetic construct
  source 1..75: mol_type = other DNA
ccctgcatatgtatgactgcgcgcgcgccaacaaagcgatgtcagcctggggcgtggaagcacgcgttccgttcc

SEQ ID NO: 473578 - DNA, 75 bp, synthetic construct
  source 1..75: mol_type = other DNA
acatgctgaaaccgccagagtggctcatgaggccgccggagacgttcttaaacgtgctgaggctgctacggttag

SEQ ID NO: 473579 - DNA, 75 bp, synthetic construct
  source 1..75: mol_type = other DNA
acagtggtgattttgcgttgtatatcagcgcgcagggtggggcaaatgttccgcgtgattgccagactgtcagag

SEQ ID NO: 473580 - DNA, 75 bp, synthetic construct
  source 1..75: mol_type = other DNA
gaaatggaagcccgttaaaaccacatgaaatagcaccgtcggccagactgacccggtcggaacgattgcaaatta

SEQ ID NO: 473581 - DNA, 75 bp, synthetic construct
  source 1..75: mol_type = other DNA
atgtgcacgcgcgccgcttggctaatctcgaatacctgaaatcctgcgagctggaaaacaaagtcaccggtgaac

SEQ ID NO: 473582 - DNA, 75 bp, synthetic construct
  source 1..75: mol_type = other DNA
acatgtaacccgtacagcggaatggcgcatagttccaaaggttttggccgttgagcctttgaccttaaaaagcgg

SEQ ID NO: 473583 - DNA, 75 bp, synthetic construct
  source 1..75: mol_type = other DNA
gtcagaaaaggcgaaagtaaaaccgttcagcttaatcacggctggaacgatgaggcatttaatccaaaggatgcg

SEQ ID NO: 473584 - DNA, 75 bp, synthetic construct
  source 1..75: mol_type = other DNA
cgaccgtaaattatgacgggaaaaaattcacgtatccggtcgctgatgagtggagttggttttattgttattcag

SEQ ID NO: 473585 - DNA, 75 bp, synthetic construct
  source 1..75: mol_type = other DNA
cgcgtaagatcaaggcgatgggcattaagatggtgctgtcaggcgaaggttctgacgaagtatttggtggttatc

SEQ ID NO: 473586 - DNA, 75 bp, synthetic construct
  source 1..75: mol_type = other DNA
tcgcatcatggtttgcctcaaggcagtgacgacgcgctggcgtttgcgtgtattaatcgccagatgatcgctttg

SEQ ID NO: 473587 - DNA, 75 bp, synthetic construct
  source 1..75: mol_type = other DNA
cactctgaaggatcaagatacatagtcgcaattcgggcagttaataacacaacaccgtatgtaaatattaatggc

SEQ ID NO: 473588 - DNA, 75 bp, synthetic construct
  source 1..75: mol_type = other DNA
tatcgagctcaccagcgaagagatggacttcgactcgcctgcgacagtgaatacccgtgtggtggagagctgtat

SEQ ID NO: 473589 - DNA, 75 bp, synthetic construct
  source 1..75: mol_type = other DNA
caaggagcccttatagagaatggtctgaatacatctttttatgccttacataattacattgaattaattgaactg

SEQ ID NO: 473590 - DNA, 75 bp, synthetic construct
  source 1..75: mol_type = other DNA
tcgaaccgtcttatattaatgctttcttttttggcgctggggcttgcgtttggtttctggctccagtctggaaag

SEQ ID NO: 473591 - DNA, 75 bp, synthetic construct
  source 1..75: mol_type = other DNA
tttctttaccaaaggtacactttggcattgtcaaatatggtgataacgttaattcaattactgttgataaatgga

SEQ ID NO: 473592 - DNA, 75 bp, synthetic construct
  source 1..75: mol_type = other DNA
ggtccgcgtggggagaaaggtgagcagggagagcgcggacctcagggcataccgggccagaaaggtgatacagga

SEQ ID NO: 473593 - DNA, 75 bp, synthetic construct
  source 1..75: mol_type = other DNA
atcagatgcgaacattacgctgacggcgctgactgtttcaccggatgcactcagtggcaccagcgcgtcggcagt

SEQ ID NO: 473594 - DNA, 75 bp, synthetic construct
  source 1..75: mol_type = other DNA
tgattggtcgcgaccatctggggatcatcccactgtatatgggctatgacgaacacggtcagctgtatgtggcct

SEQ ID NO: 473595 - DNA, 75 bp, synthetic construct
  source 1..75: mol_type = other DNA
gtccactcagaaagatgtgcctgagccaggagagtttcgtgtacgcagtcgcccggccactttcggcggtcgtga

SEQ ID NO: 473596 - DNA, 75 bp, synthetic construct
  source 1..75: mol_type = other DNA
aatgtgacggttgtggacagctgtgttcgctacgccggggagttgattgatgcgcaccttcgtggccgctatacc

SEQ ID NO: 473597 - DNA, 75 bp, synthetic construct
  source 1..75: mol_type = other DNA
cagtatcaacagttagttggcaatttaaatcagcgaatcgaagctatgttaaaatctgatggttttaataacgta

SEQ ID NO: 473598 - DNA, 75 bp, synthetic construct
  source 1..75: mol_type = other DNA
tcctggtttgcgggttctggtacaccgaaaatcattaccagtcccgcatcaggcaagcaagaagtaatggttgga

SEQ ID NO: 473599 - DNA, 75 bp, synthetic construct
  source 1..75: mol_type = other DNA
cactcttaaatccatctccatacctgaacttgatttaataattgatggcgaatcattgtctgtagggaggccgtg

SEQ ID NO: 473600 - DNA, 75 bp, synthetic construct
  source 1..75: mol_type = other DNA
acttcacactattcagtctgaacgattgaatacagattgttctttattcaaaagacaaccgtctattgaaagtgc

SEQ ID NO: 473601 - DNA, 75 bp, synthetic construct
  source 1..75: mol_type = other DNA
atgctgaaaggcagaaaatcagttaatggtcttattttgcaaacagaaaaaaaattaagatggtttactaccaga

SEQ ID NO: 473602 - DNA, 75 bp, synthetic construct
  source 1..75: mol_type = other DNA
aaatccaccagcaacgatggcctttcagttactcgcaccaccgataaagattctgaaaaaacttttgttcaggag

SEQ ID NO: 473603 - DNA, 75 bp, synthetic construct
  source 1..75: mol_type = other DNA
caagcacgatgagttgatcatcggcaaccaggcaagcgaagttcgcgccgcgccgatcttcccggaatatactgt

SEQ ID NO: 473604 - DNA, 75 bp, synthetic construct
  source 1..75: mol_type = other DNA
tcagcgaccgcattaaagcgcacaaaaatgcgctggtgcatattgtgaaaccgccggtttgtaccgagcgcgcgc

SEQ ID NO: 473605 - DNA, 75 bp, synthetic construct
  source 1..75: mol_type = other DNA
gatactcctttgcctgctgacattatccggctgcggaaacgtccggcattcaccggaggtgcagcttaccgtcag

SEQ ID NO: 473606 - DNA, 75 bp, synthetic construct
  source 1..75: mol_type = other DNA
gctctatgccgacgcagaacagaccagcgcgcagctgagacaacgacaacaccgaattgaggaactgaagcgtga

SEQ ID NO: 473607 - DNA, 75 bp, synthetic construct
  source 1..75: mol_type = other DNA
aaaccaataaccgggagcaggcgcgactctatgccgaagcagaacagaccagcgcgctgctgagacaacgacaac

SEQ ID NO: 473608 - DNA, 75 bp, synthetic construct
  source 1..75: mol_type = other DNA
ttttacttcacactattcagtctgaacgattgagtacagattgctctttattcaaaagacaaccgtctattgaaa

SEQ ID NO: 473609 - DNA, 75 bp, synthetic construct
  source 1..75: mol_type = other DNA
atacctatatagaagatgataattttgatatggtttcacaggaaattcttttaaatggttcttttgataagtgga

SEQ ID NO: 473610 - DNA, 75 bp, synthetic construct
  source 1..75: mol_type = other DNA
gctctatgccgaagcagaacagaccaacgcgctgctgagacaacgacaacatcggattgaggaactgaaacgtga

SEQ ID NO: 473611 - DNA, 75 bp, synthetic construct
  source 1..75: mol_type = other DNA
aaatatgcggttggttcttatgtttttggcgtgtcctctgtctatgctgacggcgaaggcttattttcatcaggg

SEQ ID NO: 473612 - DNA, 75 bp, synthetic construct
  source 1..75: mol_type = other DNA
gatacagatattgcagaaatccgtatatttagtcgtgatgaaaaaaacaagatgatatgcggaaaaaatacaata

SEQ ID NO: 473613 - DNA, 75 bp, synthetic construct
  source 1..75: mol_type = other DNA
cgatgaagtcactgaagcctattacacaaccggccactacagcatctttataaaagtgatgtgccgttcgatcga

SEQ ID NO: 473614 - DNA, 75 bp, synthetic construct
  source 1..75: mol_type = other DNA
atggaaaattatctgatcgacaatctggaccgcggcatcctggaagcattaatgggtaatgcgcgtaccgcttac

SEQ ID NO: 473615 - DNA, 75 bp, synthetic construct
  source 1..75: mol_type = other DNA
ggatgaccgcccggggcttgcaggtgcgctggcagacatcacccacaaaaccgcgctggcaggccgggtgaaggg

SEQ ID NO: 473616 - DNA, 75 bp, synthetic construct
  source 1..75: mol_type = other DNA
cagccggacacatgccgggatgggattacatcagcccaatggtgaggcattcaggaaataccaaaaaaagaacaa

SEQ ID NO: 473617 - DNA, 75 bp, synthetic construct
  source 1..75: mol_type = other DNA
cagccaggcacatgctggtatgggattacatcagcccaatggtaaggcattcaggaaataccccggggcaaaaaa

SEQ ID NO: 473618 - DNA, 75 bp, synthetic construct
  source 1..75: mol_type = other DNA
ctactattgatagcttaaatattgaaaatcctaaaattcccaagctaataaaggaatttaatgctcttcttacat

SEQ ID NO: 473619 - DNA, 75 bp, synthetic construct
  source 1..75: mol_type = other DNA
tagagcagcttcaatccatgtggacacgattcaaacgtaaaggcctcggtgataatctatcctcatttaggaatg

SEQ ID NO: 473620 - DNA, 75 bp, synthetic construct
  source 1..75: mol_type = other DNA
gccgtcgataaagaatcagcacaggaattcgttcaggaaacgctgcaggaagtctgggaaacagcggatgactgg

SEQ ID NO: 473621 - DNA, 75 bp, synthetic construct
  source 1..75: mol_type = other DNA
cgtaggctgctttatcggcattatattaaagagcgccaaagactatccttccgcgctggcaaagctggaaagcct

SEQ ID NO: 473622 - DNA, 75 bp, synthetic construct
  source 1..75: mol_type = other DNA
tagtggtgaagctaaagaaatcacatgggagcaagcagacgatatgctgtctagtccaggaaaacccccattaaa

SEQ ID NO: 473623 - DNA, 75 bp, synthetic construct
  source 1..75: mol_type = other DNA
ttaataagttcgctgctgtgatttcttctcgtatagttgagcaaccatcatcgtgttattaccttcatgatagtg

SEQ ID NO: 473624 - DNA, 75 bp, synthetic construct
  source 1..75: mol_type = other DNA
gaatacagtaatatacatttttattccttaagtgagaatatcggtttagcggctgctcaaaatcttgcaatatca

SEQ ID NO: 473625 - DNA, 75 bp, synthetic construct
  source 1..75: mol_type = other DNA
gctggggttaaccgcaggcgcactgctttgtggcccgttgtccgatcgctttggtcgcaagcgggtgattgagct

SEQ ID NO: 473626 - DNA, 75 bp, synthetic construct
  source 1..75: mol_type = other DNA
gtggttctcagaaatctgattgagcaggcgtggggaaaagtattgggtgaagataactccattacacatctggtt

SEQ ID NO: 473627 - DNA, 75 bp, synthetic construct
  source 1..75: mol_type = other DNA
tgacgtcggaatatctgccagctcgtcgtcgaggtgcgctggtaacgctgatgttttgcggtttcacgctggggt

SEQ ID NO: 473628 - DNA, 75 bp, synthetic construct
  source 1..75: mol_type = other DNA
gtgcgtctttttgtttggcgcgttaagcctcgcctcggctttctcactggatctgcaaacgctagtattcctccg

SEQ ID NO: 473629 - DNA, 75 bp, synthetic construct
  source 1..75: mol_type = other DNA
taattcgagccattctctctttgttattaaataataataaaaaattaacattaaaaatgatttttcgcgggataa

SEQ ID NO: 473630 - DNA, 75 bp, synthetic construct
  source 1..75: mol_type = other DNA
tttcacgcctaccttatggcaaacaaggatgctctacacacctacgttaaggctaacaagattgctttcatccag

SEQ ID NO: 473631 - DNA, 75 bp, synthetic construct
  source 1..75: mol_type = other DNA
cagccgatatcacaaaagaaatcatggctctggttgaaaaagaacatctggtttttagtcagttaccgaaagtgg

SEQ ID NO: 473632 - DNA, 75 bp, synthetic construct
  source 1..75: mol_type = other DNA
caaggctaaaagtagattttatccttgattttgaaaaaaatcatcagcgagtttttcagggatgtaatattgaag

SEQ ID NO: 473633 - DNA, 75 bp, synthetic construct
  source 1..75: mol_type = other DNA
tcaatgtgacgatccactaccccgccgataaagcgcgcactagcgaagatatcaacgatgcgctgaattatcgca

SEQ ID NO: 473634 - DNA, 75 bp, synthetic construct
  source 1..75: mol_type = other DNA
gaagatgtattgccggagtcattgccgctcggcattcgccagcggctatcgctggcggtggcggtgattcatcgc

SEQ ID NO: 473635 - DNA, 75 bp, synthetic construct
  source 1..75: mol_type = other DNA
gccatcgaagcgcgcgatctgaccatgcgttttggttccttcgttgccgttgatcacgtcaattttcgcattcca

SEQ ID NO: 473636 - DNA, 75 bp, synthetic construct
  source 1..75: mol_type = other DNA
ctgggtcaccgccgcgttccagattggtggtacgttaggcgcgctggcgctgggcgtgctgatggataagttcaa

SEQ ID NO: 473637 - DNA, 75 bp, synthetic construct
  source 1..75: mol_type = other DNA
ccttttgccgggatgccaggagcgcaggtcacggcgcgacagaggcggcgcgaccggaacggtcgctgcaagcca

SEQ ID NO: 473638 - DNA, 75 bp, synthetic construct
  source 1..75: mol_type = other DNA
tggttctctgccgtttcctacaacatgatgggcgtccccactgagatgttcactccgctgtttgtcatcgctcgc

SEQ ID NO: 473639 - DNA, 75 bp, synthetic construct
  source 1..75: mol_type = other DNA
tgccccttacatcccggcggccttttgccgggatgccaggagcgcaggccacggcgcgacaagggtggcgcgacc

SEQ ID NO: 473640 - DNA, 75 bp, synthetic construct
  source 1..75: mol_type = other DNA
ccggaacggtcgctgcaagcccggggttttcacgcatcggaccgtagcgacagcccgaaaccgcgccagcgggtt

SEQ ID NO: 473641 - DNA, 75 bp, synthetic construct
  source 1..75: mol_type = other DNA
ttttcacgcatcggaccgtagcgacagcccgaaaccgcgccagcgggttcggcggagactggcgggtgcgccagc

SEQ ID NO: 473642 - DNA, 75 bp, synthetic construct
  source 1..75: mol_type = other DNA
cccggaaatgagcgaacaagaacgccgtaaaatggtggtgaagaatttcgaatccgttggcatgggcctgatgga

SEQ ID NO: 473643 - DNA, 75 bp, synthetic construct
  source 1..75: mol_type = other DNA
tttaccgttaaatcagttggttcggtggcggcaaggaagaacaacctgactgcaaaggtttttgtccgcgatacc

SEQ ID NO: 473644 - DNA, 75 bp, synthetic construct
  source 1..75: mol_type = other DNA
ctcaacgaagttcaaaaggcattttctgctatcgaggcagacggtgtccacgccgctattaactgtttatcagga

SEQ ID NO: 473645 - DNA, 75 bp, synthetic construct
  source 1..75: mol_type = other DNA
ttcaccgtcaactcagtgggctctgctggcgccagaaagaacaacctccgcgcaaaagtctttgtgcgcgatgtc

SEQ ID NO: 473646 - DNA, 75 bp, synthetic construct
  source 1..75: mol_type = other DNA
gtgagaaaaattgaagcggcagagaaagaaaaccttcgccggaagctggagaatccgacaccgttcacagtgaac

SEQ ID NO: 473647 - DNA, 75 bp, synthetic construct
  source 1..75: mol_type = other DNA
aagtgatcggcatggaacacattcgtgacgtgcaggcgcaaaaacgcggcatcctgttagttggcatccattttc

SEQ ID NO: 473648 - DNA, 75 bp, synthetic construct
  source 1..75: mol_type = other DNA
agccatatctttgacatagagaaggtagtggaagcagatcttcaaaaggcagcagaagccaaccctaatctaacg

SEQ ID NO: 473649 - DNA, 75 bp, synthetic construct
  source 1..75: mol_type = other DNA
aacgtgggaaatcaaatgctgacgatgcaaatcacgctgcctgctgacgatcagcaaaaagcgcagaccaccgca

SEQ ID NO: 473650 - DNA, 75 bp, synthetic construct
  source 1..75: mol_type = other DNA
agtgatattgatgaaagtctcagtgattactgggcgaccggcagtatccatcctccccgttacatgctggggctg

SEQ ID NO: 473651 - DNA, 75 bp, synthetic construct
  source 1..75: mol_type = other DNA
cccagaagctgatgcaggcctataacatcacccaggctgacctcgcactcagcgatattgatgaaagcgtcagtc

SEQ ID NO: 473652 - DNA, 75 bp, synthetic construct
  source 1..75: mol_type = other DNA
tacgctgaccgaatttgctgaacaatgccgttacgaagaagacgttgcacaactgcgccagttactgaaacagct

SEQ ID NO: 473653 - DNA, 75 bp, synthetic construct
  source 1..75: mol_type = other DNA
atcgtgacgatgtcgctgaagccgcagaatatcctctgtcaccgcatcagtgagtcagaggttatcccggtcgtc

SEQ ID NO: 473654 - DNA, 75 bp, synthetic construct
  source 1..75: mol_type = other DNA
aaatgccttggataaaccttaccctcggggtgaaagaattattgccgatgcattgggagttgagccacgagacct

SEQ ID NO: 473655 - DNA, 75 bp, synthetic construct
  source 1..75: mol_type = other DNA
atttcccagagcggccagacctgtgcgctgctttccaaagtcttcccgacccgttcccatactgtttctgcgcaa

SEQ ID NO: 473656 - DNA, 75 bp, synthetic construct
  source 1..75: mol_type = other DNA
gatggcgcggtggtgggttgtaccgcactgtgcatcgaaaccggtgaagtggtttatttcaaagcccgcgctacc

SEQ ID NO: 473657 - DNA, 75 bp, synthetic construct
  source 1..75: mol_type = other DNA
cgcggctgtgatggtccgtgggggccacacgcaaaactgaaacttgaccacctgggtaaagaagttctcgaatcc

SEQ ID NO: 473658 - DNA, 75 bp, synthetic construct
  source 1..75: mol_type = other DNA
cgtaacggtgaagatccggtggcgatccgtaaagcactgcaagaatgtatgcagcataacttctcggtcttccgt

SEQ ID NO: 473659 - DNA, 75 bp, synthetic construct
  source 1..75: mol_type = other DNA
tggtatttggacgagcggcgggtctgcatctgcaagaatctatcagtgaacagggtgcactgcgcgatgccagcg

SEQ ID NO: 473660 - DNA, 75 bp, synthetic construct
  source 1..75: mol_type = other DNA
gaagatgtggttgttccggggctgttcgcggtaggtgaaattgcctgcgtatcggtacacggcgctaaccgtctg

SEQ ID NO: 473661 - DNA, 75 bp, synthetic construct
  source 1..75: mol_type = other DNA
gaatttgctgaacaatgccgttacgaagaagacattgcacaactgcgccagctactgaaacagctgaagcgttat

SEQ ID NO: 473662 - DNA, 75 bp, synthetic construct
  source 1..75: mol_type = other DNA
aatctttaccgctcaataccgtcagtaccaggaaatctgggacgagatttgcgctgcactgcaaccactgatact

SEQ ID NO: 473663 - DNA, 75 bp, synthetic construct
  source 1..75: mol_type = other DNA
tattgactgggatgtgacgcaaattaaagcgtcattgcttcctgaatatatccccggcgtttatgacaacctcga

SEQ ID NO: 473664 - DNA, 75 bp, synthetic construct
  source 1..75: mol_type = other DNA
taatggatacggcgctgaaaggcgggacggagaacgacgggacaggcgtggtttacttcgcgtatgagtccacgt

SEQ ID NO: 473665 - DNA, 75 bp, synthetic construct
  source 1..75: mol_type = other DNA
ttgggcgtgaaaagggcttcatccgggaaaccagtaatgaacagttctttggctacatgatggcaaacaaggacg

SEQ ID NO: 473666 - DNA, 75 bp, synthetic construct
  source 1..75: mol_type = other DNA
tactctttcgctgattccaagcaaaacccgctggttcaggtcagtgatgttgtagctggctttatgcagcactat

SEQ ID NO: 473667 - DNA, 75 bp, synthetic construct
  source 1..75: mol_type = other DNA
tggtgttgtgtctcggttctgctgtgggtggggccgtaatgactagcgtcgtcatttcttcgggcgaagaatgtt

SEQ ID NO: 473668 - DNA, 75 bp, synthetic construct
  source 1..75: mol_type = other DNA
gaggattcaaaaaagctgaggcaagtctgaaacttgaaggcatggacccaagcggaacccctctgtacgaaggta

SEQ ID NO: 473669 - DNA, 75 bp, synthetic construct
  source 1..75: mol_type = other DNA
cgagtcagaaattattcccgtcgtctgtgacaacattggtgaaagcacgtggattccgctggcgacctggtcgaa

SEQ ID NO: 473670 - DNA, 75 bp, synthetic construct
  source 1..75: mol_type = other DNA
accgtggcgacggtggtgataaagagatccgccgtgagttaaagtactatgcgcaccttggtcgtcgtttgaaag

SEQ ID NO: 473671 - DNA, 75 bp, synthetic construct
  source 1..75: mol_type = other DNA
ggggcaatgccttgcttcagcgcggtgaggcgctgacggcagaaaatcaatatcgcaatattgccagtgctgtac

SEQ ID NO: 473672 - DNA, 75 bp, synthetic construct
  source 1..75: mol_type = other DNA
ttgcgccgggtggtggcgtctccgcaaccgcgtaaaattctcgacagcgaagccatcgagttgttgctcaaagag

SEQ ID NO: 473673 - DNA, 75 bp, synthetic construct
  source 1..75: mol_type = other DNA
actggtgatcctcaccgatgctgacgcggtttatgaaaactggggaacgccgcagcaacgcgccattcgccatgc

SEQ ID NO: 473674 - DNA, 75 bp, synthetic construct
  source 1..75: mol_type = other DNA
tgcgattttgtggtgaatcagcaggcggttttcctcggtggtcactacatccttcagggcagcagaaacaggtga

SEQ ID NO: 473675 - DNA, 75 bp, synthetic construct
  source 1..75: mol_type = other DNA
gcaggtccagcaggtccggaagggccgcagggaccgaagggagacacaggagcccccgggcaaggaacagaactg

SEQ ID NO: 473676 - DNA, 75 bp, synthetic construct
  source 1..75: mol_type = other DNA
atgcccaatataatttaggtcagatttattactacggtcagggtgtgactcagagctatcgacaggcgaaagact

SEQ ID NO: 473677 - DNA, 75 bp, synthetic construct
  source 1..75: mol_type = other DNA
cagcgcctgggctatgatgaattcctcggcaaaggcaccctcaccgtttctgaaatcttcttcacatccccaagc

SEQ ID NO: 473678 - DNA, 75 bp, synthetic construct
  source 1..75: mol_type = other DNA
tgcgacggtctgtgctggcagtacattattgaacaatccggcattcgcccggaatttgtggtcagtactgaaccg

SEQ ID NO: 473679 - DNA, 75 bp, synthetic construct
  source 1..75: mol_type = other DNA
aaattgttgatgaaatctgcgattttgtggcgaatcagcaggcggttttcctcggcggtcactacatctttcagg

SEQ ID NO: 473680 - DNA, 75 bp, synthetic construct
  source 1..75: mol_type = other DNA
gcagctctcgcaggaaggcggctcgctgaagatgtacaacatcgccgatcgcctggaaacagtgatgtgggagag

SEQ ID NO: 473681 - DNA, 75 bp, synthetic construct
  source 1..75: mol_type = other DNA
ttcgggcattgtggctggcgcgcgtctgtttgaaagcaccttcggcatgagctacgaaacggctctgtgggcggg

SEQ ID NO: 473682 - DNA, 75 bp, synthetic construct
  source 1..75: mol_type = other DNA
gcgcggcgtttggtccggtggtgctgttctcggtgatgtggtcacgcatgacgcgtaacggtgcactggcgggga

SEQ ID NO: 473683 - DNA, 75 bp, synthetic construct
  source 1..75: mol_type = other DNA
gggcagaaaccgctcaccacggcgcagattgttgatgaaatctgcgattttgtggcgaatcagcaggcggttttc

SEQ ID NO: 473684 - DNA, 75 bp, synthetic construct
  source 1..75: mol_type = other DNA
tccgcagcacggtttgctgctgtcgaaatcggaatccttaatgcgcgaagcgatgcaggcgggggcgcattacgt

SEQ ID NO: 473685 - DNA, 75 bp, synthetic construct
  source 1..75: mol_type = other DNA
gcctggaaacagtgatgtgggagagcaaaaagatgttccccaatctcgactggttctccgctgtttcctacaaca

SEQ ID NO: 473686 - DNA, 75 bp, synthetic construct
  source 1..75: mol_type = other DNA
gtcgcggtacttctgaccaggaaggcggcatggcgtctatggtttatgccggtaaaatcatcaaagatctggggc

SEQ ID NO: 473687 - DNA, 75 bp, synthetic construct
  source 1..75: mol_type = other DNA
ggggatacgggagccgcaggcccggcaggaccgcagggacctaaaggggatacgggagccgcaggcccggcagga

SEQ ID NO: 473688 - DNA, 75 bp, synthetic construct
  source 1..75: mol_type = other DNA
gatgaacgccgaaggcccgcagttgcacaccaacgccatcccgaaagcggtagtgaaaaatgccgatggtagcct

SEQ ID NO: 473689 - DNA, 75 bp, synthetic construct
  source 1..75: mol_type = other DNA
ggtgcaaccaaaaaagacttcgacaacacggttgccattcacccgacagcggcagaagagttcgtgacaatgcgt

SEQ ID NO: 473690 - DNA, 75 bp, synthetic construct
  source 1..75: mol_type = other DNA
gccagggctggtgaatttgtaccgcgcgattgtgaaagcagataaccgtctgccagaaaatctcaagccaaaaga

SEQ ID NO: 473691 - DNA, 75 bp, synthetic construct
  source 1..75: mol_type = other DNA
agattgttgatgaaatctgcgattttgtgatgaatcagcaggcggttttcctcggtggtcactatatccttcagg

SEQ ID NO: 473692 - DNA, 75 bp, synthetic construct
  source 1..75: mol_type = other DNA
atgaatatcagcacggaaacccgcgaaatcctgcgcaattacaaagacgtgattaatgcgcggcgtcgtgaaatg

SEQ ID NO: 473693 - DNA, 75 bp, synthetic construct
  source 1..75: mol_type = other DNA
ggccgcgtaagcctgcgttatctaatgtacaaaactgatcaggtccgtgaatccctcggtcattctaacttccgc

SEQ ID NO: 473694 - DNA, 75 bp, synthetic construct
  source 1..75: mol_type = other DNA
ggccgcgtaagcctgcgttatctgatgtacaaaaccgatcaggtccgtgaatccctcggtcattccaacttccga

SEQ ID NO: 473695 - DNA, 75 bp, synthetic construct
  source 1..75: mol_type = other DNA
ttttcttgagtttttcaaagcttccggtttccgtgccgcttttgaagataaaggccgctttaaagaatatatcca

SEQ ID NO: 473696 - DNA, 75 bp, synthetic construct
  source 1..75: mol_type = other DNA
ccgtcagcggcgatgcaaaaacgctttgccgaagcagatgcgcattatcattcggcgccgccgtcacggttgcag

SEQ ID NO: 473697 - DNA, 75 bp, synthetic construct
  source 1..75: mol_type = other DNA
caattaatcagccagcaaaactggtttggcaaatatcagcccgtcgccgcaccggtaaaacaacctgaacctgtg

SEQ ID NO: 473698 - DNA, 75 bp, synthetic construct
  source 1..75: mol_type = other DNA
agtgcgccagtggagatcccggctgccgtgcgtcaggcactggcgaaagatccgcagaaaatttttaactatatc

SEQ ID NO: 473699 - DNA, 75 bp, synthetic construct
  source 1..75: mol_type = other DNA
aacgtggtgctgcgcgggatcgcctttggtgccagacccggtgcggttattgaagaaggcggcaaacagcaggtc

SEQ ID NO: 473700 - DNA, 75 bp, synthetic construct
  source 1..75: mol_type = other DNA
gccgaatgtctggcacatggatttgctgatcaggtgacgccagccgttaaggcaatggcatgtattcagtcaaaa

SEQ ID NO: 473701 - DNA, 75 bp, synthetic construct
  source 1..75: mol_type = other DNA
atacgccatatattgatcagatggagggcttcagtgtggatggcgtgacaacgaaagtgcgtattgacgccggtg

SEQ ID NO: 473702 - DNA, 75 bp, synthetic construct
  source 1..75: mol_type = other DNA
gaggaaattaaccgcgaccatgtgatgctgcgctatcagggaaaaatagagcgcctgagcctggctgaagaggag

SEQ ID NO: 473703 - DNA, 75 bp, synthetic construct
  source 1..75: mol_type = other DNA
acggagagcgcgtgcgcgaaacggcgttgcgccttacattccggcggccttttgccgggatgccgggagcgcagg

SEQ ID NO: 473704 - DNA, 75 bp, synthetic construct
  source 1..75: mol_type = other DNA
gttcggcggagactggcaggtgcgcccggcagacaggacaacactgcagtagtcagaatcagagcaggaagaaaa

SEQ ID NO: 473705 - DNA, 75 bp, synthetic construct
  source 1..75: mol_type = other DNA
taatggcaatttgacggtgaccggaaacggctcatttaacgatgttcagatccgttcggataaacgcaacaagcg

SEQ ID NO: 473706 - DNA, 75 bp, synthetic construct
  source 1..75: mol_type = other DNA
ttggcgcgggttgtttttcgtgacgcacgaatttatctcattcaatggctgactaaaattcgtcacactcttagc

SEQ ID NO: 473707 - DNA, 75 bp, synthetic construct
  source 1..75: mol_type = other DNA
aatcgcaattcgccttactggaaactaaaaccggttatgccgatccctgcgggatcgtctgcgaatcatttcgtc

SEQ ID NO: 473708 - DNA, 75 bp, synthetic construct
  source 1..75: mol_type = other DNA
gcaaccgtaacgttgcacaccgtaccgggcaaatagccatggacggttcacaaaagcttccccagcgtgcactga

SEQ ID NO: 473709 - DNA, 75 bp, synthetic construct
  source 1..75: mol_type = other DNA
cgaaaatatccacagataatgtaagtctgttcgataaagcgaaacatgcaaacgtactggagagcgcagcaatgg

SEQ ID NO: 473710 - DNA, 75 bp, synthetic construct
  source 1..75: mol_type = other DNA
gggctgggggctgggttacttcgggcagccgcacatcctggcgcgttttatggcggcagactctcaccacagcat

SEQ ID NO: 473711 - DNA, 75 bp, synthetic construct
  source 1..75: mol_type = other DNA
ggaaggtttcaccactgacggtattgccacaaaaatccgtattgatgccggagtggcaccacttgactggcgcgg

SEQ ID NO: 473712 - DNA, 75 bp, synthetic construct
  source 1..75: mol_type = other DNA
ccgtcagatgatgcgcctgcagaaagaaggcgatcgcgccctgaatatccgtccggcctttatgctggtaccggt

SEQ ID NO: 473713 - DNA, 75 bp, synthetic construct
  source 1..75: mol_type = other DNA
aacatgccagccagaaagagctggtgtgggtagggcgtgtgatggtgctggtggtggcgctggtggcgattgcgc

SEQ ID NO: 473714 - DNA, 75 bp, synthetic construct
  source 1..75: mol_type = other DNA
gcggtagcaggtgcggtaaaccagaacgccgagcgcgtgtttatcgaactggcgcaaattctgtttaacccgtgg

SEQ ID NO: 473715 - DNA, 75 bp, synthetic construct
  source 1..75: mol_type = other DNA
cgtgtgatggtgctggtggtggcgctggtggccattgcgctggcggcaaacccggaaaaccgtgtgctggggcta

SEQ ID NO: 473716 - DNA, 75 bp, synthetic construct
  source 1..75: mol_type = other DNA
ccgcactggtgcgcaatggcgatgaagtgatttgttttgatcccagctatgacagttacgcccccgccatcgcgc

SEQ ID NO: 473717 - DNA, 75 bp, synthetic construct
  source 1..75: mol_type = other DNA
ccgggtattaatgattttatgatagatgtaccggggctattgttaccttctgccggtcatggagaagcaagtgat

SEQ ID NO: 473718 - DNA, 75 bp, synthetic construct
  source 1..75: mol_type = other DNA
aggaggtatctgcccttgataaacgtacccgcactatcagcagaagcggtatcgttttacttatctcagggctgg

SEQ ID NO: 473719 - DNA, 75 bp, synthetic construct
  source 1..75: mol_type = other DNA
tataacgaaaacacgaatgtaaaactcatcccacaaatgaattatctgatggtcgttgtggctttgtttttcctt

SEQ ID NO: 473720 - DNA, 75 bp, synthetic construct
  source 1..75: mol_type = other DNA
ttattttcagcttattgctgacgttaattttattttgcattactaccttatataacgaaaacacgaatgtaaaac

SEQ ID NO: 473721 - DNA, 75 bp, synthetic construct
  source 1..75: mol_type = other DNA
cggttttagtaatagatataatgtccctgaacaaatgaccatcagcattggctgtgttttttccactggcgacac

SEQ ID NO: 473722 - DNA, 75 bp, synthetic construct
  source 1..75: mol_type = other DNA
gcagcggcactggttttctggggtatcaagaaactgaaaaaagggcggggcagttcctggctacgcgacctgatt

SEQ ID NO: 473723 - DNA, 75 bp, synthetic construct
  source 1..75: mol_type = other DNA
tttatcagtctgctgattatcacgttgtcgtttatcccgatcttcaccctggaagggcaggaagggcgtctgttt

SEQ ID NO: 473724 - DNA, 75 bp, synthetic construct
  source 1..75: mol_type = other DNA
atgcctaaaaaaatgagaacaacccgtaatataattttaatggctacgctattaggtagcgccctatttgccagg

SEQ ID NO: 473725 - DNA, 75 bp, synthetic construct
  source 1..75: mol_type = other DNA
ggggccaacaaagcctggtttggtcgcccgacgcatccgggtaatgtcataggtcactggatttgcccgcagggt

SEQ ID NO: 473726 - DNA, 75 bp, synthetic construct
  source 1..75: mol_type = other DNA
tcaatacgctttatcagttgcgtgcgctgacggagcaacaacctgaacttattccacacattgctcacgctctgc

SEQ ID NO: 473727 - DNA, 75 bp, synthetic construct
  source 1..75: mol_type = other DNA
ccattcgccttggattaaacaaggtgtgcgaggaagggattcgtatcgatagcattggtattgatacctggggcg

SEQ ID NO: 473728 - DNA, 75 bp, synthetic construct
  source 1..75: mol_type = other DNA
cagggctaaattaacagatgaggaactaattaataagctccacgaaatcgctgaaatgctaaatattcagttttc

SEQ ID NO: 473729 - DNA, 75 bp, synthetic construct
  source 1..75: mol_type = other DNA
atgagttcatttgctgccttatctttaaaaatactcaatgaatctcctgcagcacaacgatatataaaagcgaga

SEQ ID NO: 473730 - DNA, 75 bp, synthetic construct
  source 1..75: mol_type = other DNA
taaaagtatggtaataacagcatgccctggtagcggtaaaactacagttataaaagagaaaattagaaatattac

SEQ ID NO: 473731 - DNA, 75 bp, synthetic construct
  source 1..75: mol_type = other DNA
ctgtcggtgaaaaactgattatctccacgccggatctcaacgccattatgggggaatcgggcggtgcgacactcg

SEQ ID NO: 473732 - DNA, 75 bp, synthetic construct
  source 1..75: mol_type = other DNA
gggactgttttagataaagcgatttctgtcggtgaaaaactgattatctccacgccggatctcaacgccattatg

SEQ ID NO: 473733 - DNA, 75 bp, synthetic construct
  source 1..75: mol_type = other DNA
agagggacatagcccggctcgcgctaccgtacaggctgagatggcccgcccggagattttggttgaagtgatgat

SEQ ID NO: 473734 - DNA, 75 bp, synthetic construct
  source 1..75: mol_type = other DNA
cgatcccggaaagtgatgctgaactggcgcgctgcattttcgacagtctggcgggcgctgctgtatgccgatgtg

SEQ ID NO: 473735 - DNA, 75 bp, synthetic construct
  source 1..75: mol_type = other DNA
aaagtccgcttcgctgaactgaagcgacgcatcattattagcgaagaacaaggctccaactctcattcccgccat

SEQ ID NO: 473736 - DNA, 75 bp, synthetic construct
  source 1..75: mol_type = other DNA
tgacactgatttagtgcagttcctgaaagatgattacacctatctggcggtggaaattatccgtggcgataccat

SEQ ID NO: 473737 - DNA, 75 bp, synthetic construct
  source 1..75: mol_type = other DNA
ataaacttaagaaatatcgtttcccggaaacactgaccaaccagagccgctggtttggcctgccactggatgaac

SEQ ID NO: 473738 - DNA, 75 bp, synthetic construct
  source 1..75: mol_type = other DNA
cggtaagaaagtcaccgtggtggttgagttacaggcgcgtttcgacgaagaagcaacattcactgggcgaagcgc

SEQ ID NO: 473739 - DNA, 75 bp, synthetic construct
  source 1..75: mol_type = other DNA
ggcggcgataaaaaggtctacctttcttccgccgactggatgacgcgcaatattgattatcgtattgaagtggcg

SEQ ID NO: 473740 - DNA, 75 bp, synthetic construct
  source 1..75: mol_type = other DNA
taatgaagagttcgaaatagaggtgtcaggtaagtatatttctaatgatgacgaaagcatgatacgaatggcgct

SEQ ID NO: 473741 - DNA, 75 bp, synthetic construct
  source 1..75: mol_type = other DNA
ctggtggtgttgactgcgtttatttcaccacaccgcgccgaacgccagatggttcgtgaacgtgtaggagaaggg

SEQ ID NO: 473742 - DNA, 75 bp, synthetic construct
  source 1..75: mol_type = other DNA
cgtatttgctggacggcgacaacgttcgccacggtttatgcagcgatctcggttttagcgatgccgatcgtaaag

SEQ ID NO: 473743 - DNA, 75 bp, synthetic construct
  source 1..75: mol_type = other DNA
tactggtatttgcccactgaattattccgggttgtctaccgcgttattcccgattccagtttcaggaaatggata

SEQ ID NO: 473744 - DNA, 75 bp, synthetic construct
  source 1..75: mol_type = other DNA
gtgttgaaaaaaagcatgggctgggaagttaattttgatatgtccttgcgcgatccattaatgctggctttcttc

SEQ ID NO: 473745 - DNA, 75 bp, synthetic construct
  source 1..75: mol_type = other DNA
gattgaaaccatcgctcttatcgcgatttgtctgacggtggggaaaattgttgcgcaacttttggctggcacagc

SEQ ID NO: 473746 - DNA, 75 bp, synthetic construct
  source 1..75: mol_type = other DNA
gagctgagagtcagcagtgcactttcaaaagatgaacaaatcagaaaagaagcacgcatcagtgagattgcatat

SEQ ID NO: 473747 - DNA, 75 bp, synthetic construct
  source 1..75: mol_type = other DNA
gtgtctggcagcacttttatgacgataacttctccggcacggattttaccactcactatgtggtgctcggttttc

SEQ ID NO: 473748 - DNA, 75 bp, synthetic construct
  source 1..75: mol_type = other DNA
atgatgcagtctgactggcatcctgccgacattatcgccgggctgaaaaaacgtggcacttcgctgtcagcactt

SEQ ID NO: 473749 - DNA, 75 bp, synthetic construct
  source 1..75: mol_type = other DNA
cgttttgttgcggcaaaaggccatcagaaagcgattattgttttccaggatacgttgcagacaggaaaatatgac

SEQ ID NO: 473750 - DNA, 75 bp, synthetic construct
  source 1..75: mol_type = other DNA
aggaaaatatgactctgcgctgaaatcaacagtatggtccgactataaaaatgaaaaactcaccgacgctatctc

SEQ ID NO: 473751 - DNA, 75 bp, synthetic construct
  source 1..75: mol_type = other DNA
atactagttttagatgagaaatataatcgcggatttggagaaaataataatatcgtattcaactattgtagggaa

SEQ ID NO: 473752 - DNA, 75 bp, synthetic construct
  source 1..75: mol_type = other DNA
gcagggttactggtttgtgccgggagggcgcgtgcagaaagacgaaatgctggaagccgcatttgagcggctgac

SEQ ID NO: 473753 - DNA, 75 bp, synthetic construct
  source 1..75: mol_type = other DNA
ggcgagcgtcaattctcgactctgaaaagcacggtagaggcgatctgggcgggaattaaagcaaccgaagctgcg

SEQ ID NO: 473754 - DNA, 75 bp, synthetic construct
  source 1..75: mol_type = other DNA
gatgagtattcaaaaataaaaggtaagcgatttgtaaaatatcttaaaggaaagtgtggggaaattaagaaaaca

SEQ ID NO: 473755 - DNA, 75 bp, synthetic construct
  source 1..75: mol_type = other DNA
ttttctcccgataatgtgattcaacaggttgattgtctcagaaaattatcggaattgcgctctcagctctgtgac

SEQ ID NO: 473756 - DNA, 75 bp, synthetic construct
  source 1..75: mol_type = other DNA
ctgatatgacagagcagcaaatcatacaacttaagcaaaagacctataaagcgatggtaaaagatttggttaacc

SEQ ID NO: 473757 - DNA, 75 bp, synthetic construct
  source 1..75: mol_type = other DNA
cgcagggttactggtttgtgccgggagggcgcgtgcagtaaagacgaaacgctggaggccgcatttgagcggctg

SEQ ID NO: 473758 - DNA, 75 bp, synthetic construct
  source 1..75: mol_type = other DNA
tactggcgtcggacaacgttcatgaaaacagccgcgcctatttccgggtcgacaaattggccgaggtgcagggcc

SEQ ID NO: 473759 - DNA, 75 bp, synthetic construct
  source 1..75: mol_type = other DNA
gtacgtttcacgctggtggatgtggcaacaggtgagtgggctacctggtcgccggtgaattatgaatataaagtg

SEQ ID NO: 473760 - DNA, 75 bp, synthetic construct
  source 1..75: mol_type = other DNA
tcacgctaacagccgagcttattttaatcatgatccaagtgctgtttttggtttagataaaaaggatgtcaaaaa

SEQ ID NO: 473761 - DNA, 75 bp, synthetic construct
  source 1..75: mol_type = other DNA
attaattagttgggctaatcactgtgctgaatacatagaaattttcgatgagtctattgcttttacatgtctctc

SEQ ID NO: 473762 - DNA, 75 bp, synthetic construct
  source 1..75: mol_type = other DNA
catttctacagcgcgtttgtcaacatgcgggatttttacccatgattgttcgcgaagcggtagagccgcaaacgg

SEQ ID NO: 473763 - DNA, 75 bp, synthetic construct
  source 1..75: mol_type = other DNA
tgggcctggttacagagcaggaagggcgagcggcagcagatgttgccagtagggtgagtggcgtgaagcgggtca

SEQ ID NO: 473764 - DNA, 75 bp, synthetic construct
  source 1..75: mol_type = other DNA
ttgaagaacgaatgatgatggcgcaaagattattgatctacagtaaccatactgtcggcaaggtggcgggaatat

SEQ ID NO: 473765 - DNA, 75 bp, synthetic construct
  source 1..75: mol_type = other DNA
gattaccgctggttgacggcggacgcgctgctggccagtgacgatgttcatgcgaacagccgcgcctattttctc

SEQ ID NO: 473766 - DNA, 75 bp, synthetic construct
  source 1..75: mol_type = other DNA
agataaggtttcagtgagctatgacgtgtccggggtaatcaatccggatgccggtttctggaacagcaccgccta

SEQ ID NO: 473767 - DNA, 75 bp, synthetic construct
  source 1..75: mol_type = other DNA
gtctgaatctggccgatgaactgctgagcgaaaacgtcaccgggaaaaagttgtttccgtactttgccgggttgt

SEQ ID NO: 473768 - DNA, 75 bp, synthetic construct
  source 1..75: mol_type = other DNA
tatcccgaagcgcaaatccagtttcgtctgaatctggccgatgaactgctgagcgaaaacgtcaccgggaaaaag

SEQ ID NO: 473769 - DNA, 75 bp, synthetic construct
  source 1..75: mol_type = other DNA
ataccggaagatcatcatctggcttgcgaaagcgctatcccgttaatggcattacgcaatgaatactttgtgacg

SEQ ID NO: 473770 - DNA, 75 bp, synthetic construct
  source 1..75: mol_type = other DNA
gtccggatgatgacatttcgggtgataatcatatcaatctggaacacctccctcctgagctaaaacaggttgcta

SEQ ID NO: 473771 - DNA, 75 bp, synthetic construct
  source 1..75: mol_type = other DNA
ataaccgtcaaagaagccggtttggtgttggtcattggggttatcctgtggatctatggtataatcttaaccaag

SEQ ID NO: 473772 - DNA, 75 bp, synthetic construct
  source 1..75: mol_type = other DNA
gtacgctgaatgattttctcggtgccatgacggaggatgatgcccgtccggaggctctgcgtcgttttgaacaga

SEQ ID NO: 473773 - DNA, 75 bp, synthetic construct
  source 1..75: mol_type = other DNA
gaggatgacgtccggccggaggcactgcgtcgctttgaacaaatggtggaagaggcagcgcgtcacgccggggag

SEQ ID NO: 473774 - DNA, 75 bp, synthetic construct
  source 1..75: mol_type = other DNA
cgtaaacagaatccccaccgtggtggggcctcccgggccaaagggggaaccgggtcccgcgggtcctcaggggcc

SEQ ID NO: 473775 - DNA, 75 bp, synthetic construct
  source 1..75: mol_type = other DNA
agcgagcgccgcaaatgctgacacttcagcaggggatgcatcggagtcagcccggcaggcggcagaaagtgcagc

SEQ ID NO: 473776 - DNA, 75 bp, synthetic construct
  source 1..75: mol_type = other DNA
tggtggaagaagcagcgcgtcacgcagaggaggcgaagaagaatgccggagaagcagagacgtccgcgaggaatg

SEQ ID NO: 473777 - DNA, 75 bp, synthetic construct
  source 1..75: mol_type = other DNA
ccgggccaaagggggaacaggggcccgctggccctcaggggccgaagggtgataagggagagcgtggtgacaccg

SEQ ID NO: 473778 - DNA, 75 bp, synthetic construct
  source 1..75: mol_type = other DNA
tgctgaaagatggtgcgggaaaaccggtacagaactgcacaatccagctgaaagcaaaacgtaacagtaccacgg

SEQ ID NO: 473779 - DNA, 75 bp, synthetic construct
  source 1..75: mol_type = other DNA
tccggatgaagccggtcgttacagcatggacgttgagtacggtcagtacagcgtcattctgttggtggagggatt

SEQ ID NO: 473780 - DNA, 75 bp, synthetic construct
  source 1..75: mol_type = other DNA
ggtgaattatctgacgaaaaacatgataaaatgttcaaaatacccggaggtgatttttgtcactgtcattttgta

SEQ ID NO: 473781 - DNA, 75 bp, synthetic construct
  source 1..75: mol_type = other DNA
tcctcgtcctcggcttctgcggccgctcaaaaagccagtgagtcattacaaagtgcaacagatgctgagttgtca

SEQ ID NO: 473782 - DNA, 75 bp, synthetic construct
  source 1..75: mol_type = other DNA
ttggtggaagtcggggttgccgtcaacgcctggtatgcaccgttctatgatctgattcaaaccgcgctgttcgcc

SEQ ID NO: 473783 - DNA, 75 bp, synthetic construct
  source 1..75: mol_type = other DNA
ccggaggcattgcgtcgttttgaggaaatggtggaagaagcggcacgcaacgctgaagccgcctctcagagcgca

SEQ ID NO: 473784 - DNA, 75 bp, synthetic construct
  source 1..75: mol_type = other DNA
aactgcatcggcaaattccgcgacagcagccaaaaaatcagaaaccaacgcgaaaaatagtgagtcagcagcaaa

SEQ ID NO: 473785 - DNA, 75 bp, synthetic construct
  source 1..75: mol_type = other DNA
cccgccgtcacatgccgggaccatcaccgtgtatgaagattctcaacccggtacgctgaatgattttctggtgcc

SEQ ID NO: 473786 - DNA, 75 bp, synthetic construct
  source 1..75: mol_type = other DNA
agcaggtgggattttcaccggttgttattcgcgaagttaatgaaccgcaaacggtactcgccatggtcagtatgg

SEQ ID NO: 473787 - DNA, 75 bp, synthetic construct
  source 1..75: mol_type = other DNA
cttctggcgtgaggatacaaaactatccggggattgctaccataagcgctaacttaagggttgtggtattacgcc

SEQ ID NO: 473788 - DNA, 75 bp, synthetic construct
  source 1..75: mol_type = other DNA
atgattatggcggcagttccgggacagaaactcgtccactgcaataaaaaatataaaaacacagatcatcaggga

SEQ ID NO: 473789 - DNA, 75 bp, synthetic construct
  source 1..75: mol_type = other DNA
gtcagcgtcttccagcgcaggaacggcatcaacaaaggccagtgaagcatcgaaaagtgctgctgctgcagagtc

SEQ ID NO: 473790 - DNA, 75 bp, synthetic construct
  source 1..75: mol_type = other DNA
tcacgctgaggaggcgaagaagaatgccggagaggcggagacgtcagcgaggaatgccggcatatcagccagtca

SEQ ID NO: 473791 - DNA, 75 bp, synthetic construct
  source 1..75: mol_type = other DNA
agagaactgcaccattcaactgaaagccagacggaccagcagcacggtggtggtgaacacggtggcttcagaaaa

SEQ ID NO: 473792 - DNA, 75 bp, synthetic construct
  source 1..75: mol_type = other DNA
atggacgttgagtatggccagtacagcgtcaccctgctggttgaaggttttcctccttcgcatgccgggaccatc

SEQ ID NO: 473793 - DNA, 75 bp, synthetic construct
  source 1..75: mol_type = other DNA
atgtggggacggatgcgcccggttatgcggcgattcctcagggaaaatcctaacgttgacgttctttttcgcgaa

SEQ ID NO: 473794 - DNA, 75 bp, synthetic construct
  source 1..75: mol_type = other DNA
gcatgaatcggcgtttctggtggcgatgcctgaagagcatcatctctcatcattttccaccgtcccgctggaagc

SEQ ID NO: 473795 - DNA, 75 bp, synthetic construct
  source 1..75: mol_type = other DNA
gaaggggagtaaggagagcgtggtgacaccggccctgtcggggcaaccggcgaacggggaccggcaggtgatgct

SEQ ID NO: 473796 - DNA, 75 bp, synthetic construct
  source 1..75: mol_type = other DNA
agaccggtctgacgggagatgcaggtccacagggtccaaagggagataccggtgcggcaggcccggcaggcctac

SEQ ID NO: 473797 - DNA, 75 bp, synthetic construct
  source 1..75: mol_type = other DNA
agcaggggaggcatcggagtcagcccggcaggcggcagaaagtgcagccgctgcaaagcagtcagaggaagcgtc

SEQ ID NO: 473798 - DNA, 75 bp, synthetic construct
  source 1..75: mol_type = other DNA
ggcagcgttacggcaaggcaaaatctggcgcgaccaggttgccacgctcgaatttaatgatgccgcgttgcaggc

SEQ ID NO: 473799 - DNA, 75 bp, synthetic construct
  source 1..75: mol_type = other DNA
ccagccacgtgattgtgcgcgccgaagatcataacaatcagcacgcgccgctgttcctgcaacagttgcgaaatc

SEQ ID NO: 473800 - DNA, 75 bp, synthetic construct
  source 1..75: mol_type = other DNA
gtacacgcacatgaaagcccttcgccctgatgaagaccgtctttccccgttgcactcggtctatgtagaccagtg

SEQ ID NO: 473801 - DNA, 75 bp, synthetic construct
  source 1..75: mol_type = other DNA
acgtccgcgaggaatgccggcatatcagccagtcaggcagaagagagcgctgcaaatgctgacacttcagcaggg

SEQ ID NO: 473802 - DNA, 75 bp, synthetic construct
  source 1..75: mol_type = other DNA
gggagacacaaatccgttttcgtctggggccggcgagcattattgagacaaacagcaatggctggttcccgggta

SEQ ID NO: 473803 - DNA, 75 bp, synthetic construct
  source 1..75: mol_type = other DNA
ccgttccgcttcctcgtacctttgactatctgctaccagaaggcatgacagtaaaagccgggtgtcgcgtacgcg

SEQ ID NO: 473804 - DNA, 75 bp, synthetic construct
  source 1..75: mol_type = other DNA
gtatcgcgcgcatagcgagcaaatcccaattattcttggctccgcaacgcccgcactggaaacgttatgcaacgt

SEQ ID NO: 473805 - DNA, 75 bp, synthetic construct
  source 1..75: mol_type = other DNA
ggtatcacaacatcgaaatatctgttcggtattggtgcagcggttctggtttatttcgggattaaaaaactgaaa

SEQ ID NO: 473806 - DNA, 75 bp, synthetic construct
  source 1..75: mol_type = other DNA
gtggctgaaagcgaaaaatggtgaggcggcgattgtgatcggcacccgctccgcgctgtttacgccgtttaaaaa

SEQ ID NO: 473807 - DNA, 75 bp, synthetic construct
  source 1..75: mol_type = other DNA
gttcgccaaagcaacaacaggcactggcagcattgcgacaagggaaaatctggcgcgatcaggtcgccacgctcg

SEQ ID NO: 473808 - DNA, 75 bp, synthetic construct
  source 1..75: mol_type = other DNA
caattcatagcgcggccgattctttttctgcctggctgctggcgggcgtcaccggttccggtaaaacggaagtct

SEQ ID NO: 473809 - DNA, 75 bp, synthetic construct
  source 1..75: mol_type = other DNA
attggcggcaagctgagcgatggtcatcgtcacgacgtgcgcgcaccggattatgatgactggagcaccccgtca

SEQ ID NO: 473810 - DNA, 75 bp, synthetic construct
  source 1..75: mol_type = other DNA
gcgtcactctgttggtggagggattccctccatcacatgccgggaccatcaccgtgtatgaagattctcaaccgg

SEQ ID NO: 473811 - DNA, 75 bp, synthetic construct
  source 1..75: mol_type = other DNA
gatgctggtcctgcaggcccgcaggggccgaaaggtgacaggggagagcggggagagaccggtctgacgggaaat

SEQ ID NO: 473812 - DNA, 75 bp, synthetic construct
  source 1..75: mol_type = other DNA
gaatgccggcatatcagccagtcaggcagaaaagagcgctgcacatgctgacacttcagcaggatatgcatcgga

SEQ ID NO: 473813 - DNA, 75 bp, synthetic construct
  source 1..75: mol_type = other DNA
gcagaaagcgcacagtcagcggaacaaagcaggatagcggcggaagaagccgtaaaccgcatccccaccgtggtg

SEQ ID NO: 473814 - DNA, 75 bp, synthetic construct
  source 1..75: mol_type = other DNA
tcaggatgcacaaaaagcattgcctgaactggtaactgaagacgcagacgttatatctggtgaaaaacgtctgcg

SEQ ID NO: 473815 - DNA, 75 bp, synthetic construct
  source 1..75: mol_type = other DNA
aaaggcgacaggggagagaccggtctgacgggaaatgcaggtccacagggggcaaagggagatacgggagctgca

SEQ ID NO: 473816 - DNA, 75 bp, synthetic construct
  source 1..75: mol_type = other DNA
accatgctgttgctgcaactaccgcatatcggccaggttcagtgtggtgtatggccagctgctgtccgcgagagc

SEQ ID NO: 473817 - DNA, 75 bp, synthetic construct
  source 1..75: mol_type = other DNA
gcggcgaaatgccacagactatcggcggcggtatcggtcagtctcgtttaaccatgttgttgctgcaactgccac

SEQ ID NO: 473818 - DNA, 75 bp, synthetic construct
  source 1..75: mol_type = other DNA
tggcacgcaggataacttgtcgggctgtgaaaaagcggtacaggtaaaagtgaaagctctgcctgatgcccagtt

SEQ ID NO: 473819 - DNA, 75 bp, synthetic construct
  source 1..75: mol_type = other DNA
atggaagtaaaggaattatagatgtaccaatattcaatactaaagatatgaagttagggctcggattatacctga

SEQ ID NO: 473820 - DNA, 75 bp, synthetic construct
  source 1..75: mol_type = other DNA
cgggtatatcagccggtcaggcggaaaagagtgcagtaaatgctgacacttcagcaggggaggcatcggagtcag

SEQ ID NO: 473821 - DNA, 75 bp, synthetic construct
  source 1..75: mol_type = other DNA
tatttttagaatgttttaagctgtgctcacaagaaatcattacaaacgcagaaataattagtgattataattttt

SEQ ID NO: 473822 - DNA, 75 bp, synthetic construct
  source 1..75: mol_type = other DNA
gatggttgtcgcggcgtgaatatccagccacaggacagcgcgaacgcgtttatggagatgtcagttgcaggtgca

SEQ ID NO: 473823 - DNA, 75 bp, synthetic construct
  source 1..75: mol_type = other DNA
gatcgcagcggtgttccataaaggcgaaaatcctttagttgacagttacagtgccttttttgataacggccgtcg

SEQ ID NO: 473824 - DNA, 75 bp, synthetic construct
  source 1..75: mol_type = other DNA
ctggctactgactattgtgtgaagtttaccgtgctggacgcgttgcagttaggttatagcgtgagcgtgattacc

SEQ ID NO: 473825 - DNA, 75 bp, synthetic construct
  source 1..75: mol_type = other DNA
atttacaggatatgcattttaaattatcaaataaggatttgaatgctaagaatttttttaataacaatagtttaa

SEQ ID NO: 473826 - DNA, 75 bp, synthetic construct
  source 1..75: mol_type = other DNA
agagcgtgggattttatggagcgacaaaagtataaatatagaatggccggttcaaaatcctaacgaaagactatt

SEQ ID NO: 473827 - DNA, 75 bp, synthetic construct
  source 1..75: mol_type = other DNA
gaacagtgaaggcgcacaattacatccgttactgaagcaaaaagcgatcgcagcggtgttccataaaggcgaaaa

SEQ ID NO: 473828 - DNA, 75 bp, synthetic construct
  source 1..75: mol_type = other DNA
gtgtgacgctgaacacagaggggtatccaccggtgcacgtgggaaacatcaccgtcagtgctgaatcagcaccgg

SEQ ID NO: 473829 - DNA, 75 bp, synthetic construct
  source 1..75: mol_type = other DNA
ccggaatggttaatgaaaatgatctgatcttctttgataatggccaggagataccactcgttataagcatgatcc

SEQ ID NO: 473830 - DNA, 75 bp, synthetic construct
  source 1..75: mol_type = other DNA
agcagcgtctgtatattctgcaagagcgcattaatcagcaagcgatggcgtggagccgccggatgctcggcacca

SEQ ID NO: 473831 - DNA, 75 bp, synthetic construct
  source 1..75: mol_type = other DNA
acagcaacaaagctgcaaacgccaagacgggtttctggtgttgagtttgatggttccagagatattactttaacc

SEQ ID NO: 473832 - DNA, 75 bp, synthetic construct
  source 1..75: mol_type = other DNA
acgaacgcctccacaagcgccagcagtgcagcctcctcggcaacggcggcaggaaattccgcgaaggcggcaaag

SEQ ID NO: 473833 - DNA, 75 bp, synthetic construct
  source 1..75: mol_type = other DNA
gtgctccgggaagtggatcacctgattattctaaatacagtgttaacacttcttctgcaggcgctcatacgcact

SEQ ID NO: 473834 - DNA, 75 bp, synthetic construct
  source 1..75: mol_type = other DNA
aaccatgtgttccctgttattggtaaacgaaacattaccgacctcaaaacccgtgacctacttcaaccaattaag

SEQ ID NO: 473835 - DNA, 75 bp, synthetic construct
  source 1..75: mol_type = other DNA
gctttacttaacatagattggcaattatacaaagaacctcttttatcacaaaaagattgtttgggcactccattt

SEQ ID NO: 473836 - DNA, 75 bp, synthetic construct
  source 1..75: mol_type = other DNA
cgatgaatcccggacgtttaaatatatcgccacgttgtggcataccgattgtctcaaaatctggtcggaaggcca

SEQ ID NO: 473837 - DNA, 75 bp, synthetic construct
  source 1..75: mol_type = other DNA
caactaattattatgcgccaaaaacagagcgttgtatcaagtgggatgacccggatctaaatattgaatggccaa

SEQ ID NO: 473838 - DNA, 75 bp, synthetic construct
  source 1..75: mol_type = other DNA
gtattatcaacgtattcagacacagtcagcaggtgctcatacccactcgctgtctggtactgcagcaagttctgg

SEQ ID NO: 473839 - DNA, 75 bp, synthetic construct
  source 1..75: mol_type = other DNA
ctgatgtgctaatttttgaaccaaaagtatttggtgatgaacgtggtttcttttttgagagctttaaccagaaag

SEQ ID NO: 473840 - DNA, 75 bp, synthetic construct
  source 1..75: mol_type = other DNA
tcgaagtctggtaaaggtgttttacgcgggctgcattatcagttagaaccttatgcgcaagggaaattggtacgt

SEQ ID NO: 473841 - DNA, 75 bp, synthetic construct
  source 1..75: mol_type = other DNA
gctatacagaaaggcattatatattacaatcctgcttttgatttggagggcgtcatccccccggcaaatacccgt

SEQ ID NO: 473842 - DNA, 75 bp, synthetic construct
  source 1..75: mol_type = other DNA
ctatggcgtgtagctcgctaattgaatctggattgtggtcaagagatgcggtagaacggcagatgagccatatgg

SEQ ID NO: 473843 - DNA, 75 bp, synthetic construct
  source 1..75: mol_type = other DNA
aaggcgctgcgcgttatgggttatgacactagggtagaggtttgtgggcatggtttcaggactatggcatgtagc

SEQ ID NO: 473844 - DNA, 75 bp, synthetic construct
  source 1..75: mol_type = other DNA
cagaagttattatatttgaacccaaagtttttggggattctcgaggcttttttcttgagagttataataagaaaa

SEQ ID NO: 473845 - DNA, 75 bp, synthetic construct
  source 1..75: mol_type = other DNA
gaaaagcggcaatacgtttgaagaggtcgcccgtcagtggctggcgggcaatatccgctggacggagcaccacgc

SEQ ID NO: 473846 - DNA, 75 bp, synthetic construct
  source 1..75: mol_type = other DNA
gtgcaggagagcctgatcgccagcaatccggccaacgatcttacaggcgctatcgcgccgccgccgaaaaaccac

SEQ ID NO: 473847 - DNA, 75 bp, synthetic construct
  source 1..75: mol_type = other DNA
ctgatggggcgtacccacacggcgctggagtacaaagcgatcatccgtaaactgcgtgcggcgcgtccggatatt

SEQ ID NO: 473848 - DNA, 75 bp, synthetic construct
  source 1..75: mol_type = other DNA
cagcgccagcgcatccagtacggatttggggacgaaaaccacatcgtcgtttgattacggcactaaatccacgaa

SEQ ID NO: 473849 - DNA, 75 bp, synthetic construct
  source 1..75: mol_type = other DNA
gctctggcgacagctatattctggttaacttctataccggagtcggaagttgccggactttgcagatgaaggcgc

SEQ ID NO: 473850 - DNA, 75 bp, synthetic construct
  source 1..75: mol_type = other DNA
acatccgaaacgaacgcgaaagcgtcggaaaccagcgcagaatcctcaaaaacggctgccgcatcgtcagccagt

SEQ ID NO: 473851 - DNA, 75 bp, synthetic construct
  source 1..75: mol_type = other DNA
atcaaacaactgatgccgcaaatcaaagtgatcgccgtggaagcggaagattccgcctgcctgaaagcggcgctg

SEQ ID NO: 473852 - DNA, 75 bp, synthetic construct
  source 1..75: mol_type = other DNA
acgatttatgaccagccttaatgcggagctgcaggactggcaggtccgtcataatgcactgatcctggttacgcc

SEQ ID NO: 473853 - DNA, 75 bp, synthetic construct
  source 1..75: mol_type = other DNA
ttgctattgagcttgagcaaatttgcccgacgcaacctcatgacagcgatatcgattgctgccgttgggtcagcg

SEQ ID NO: 473854 - DNA, 75 bp, synthetic construct
  source 1..75: mol_type = other DNA
tctataccggagtcggaagttgccggaccctgcagatgaaggcgcattacagaaatggaggtctgttctaccgtt

SEQ ID NO: 473855 - DNA, 75 bp, synthetic construct
  source 1..75: mol_type = other DNA
gctgagaaacgtctgcagaaagaccagaacggtggcgatattccagataagggcactttcctgaacaacattaac

SEQ ID NO: 473856 - DNA, 75 bp, synthetic construct
  source 1..75: mol_type = other DNA
aactcaggcccaggcagaagcagacagtaaactggcggcagctaaagcagaagcggaaactattcgcgtaagagg

SEQ ID NO: 473857 - DNA, 75 bp, synthetic construct
  source 1..75: mol_type = other DNA
aagcggtagtggccagactcgtaatgcagggaagacatcatcagatggtgctcatacccactcgctgtccggcac

SEQ ID NO: 473858 - DNA, 75 bp, synthetic construct
  source 1..75: mol_type = other DNA
ccgggatgaagcccgtaagttgttagctaacggcgtcgatcctagtgagaacaagaaagctgttaaggtagagca

SEQ ID NO: 473859 - DNA, 75 bp, synthetic construct
  source 1..75: mol_type = other DNA
cgtggagaaaatttccacgcgtaatcaggctgtggtctatcagggattacaggcctacagccgcgaccagcaacc

SEQ ID NO: 473860 - DNA, 75 bp, synthetic construct
  source 1..75: mol_type = other DNA
cggtggcggaaccctctggcgcgctggcactggcgggaatgaaaaaatatatcgcccagcacaacattcgcggtg

SEQ ID NO: 473861 - DNA, 75 bp, synthetic construct
  source 1..75: mol_type = other DNA
aacgtctggcgcatgtactttcgggggcgaacgtcaatttccacggtctgcgctacgtctcggaacggtgtgaac

SEQ ID NO: 473862 - DNA, 75 bp, synthetic construct
  source 1..75: mol_type = other DNA
accacccgatggtgatcgctgggcaaggcacgctggcgctggagctgctccagcaggacgctcatctcgatcgcg

SEQ ID NO: 473863 - DNA, 75 bp, synthetic construct
  source 1..75: mol_type = other DNA
atggctgactcgcaacccctgtccggtgcccctgaaggtgccgaatatttaagagcggtgctacgtgcgccggtc

SEQ ID NO: 473864 - DNA, 75 bp, synthetic construct
  source 1..75: mol_type = other DNA
gtttgccgatctgctgcgtttggttgccgccatcgacgggatcgatcgtattcgctttaccaccagccatccgat

SEQ ID NO: 473865 - DNA, 75 bp, synthetic construct
  source 1..75: mol_type = other DNA
ctacgggcgcgtactggcggcgttcgaacttggcgaccatgaaccggatttcgaaacccggctgaatgagctggg

SEQ ID NO: 473866 - DNA, 75 bp, synthetic construct
  source 1..75: mol_type = other DNA
ggtagcttcctcaaattctgccaactgcttggcggacgttcggtcaccgaattcaactaccgctttgccgatgcc

SEQ ID NO: 473867 - DNA, 75 bp, synthetic construct
  source 1..75: mol_type = other DNA
gattgaactgtcgcagcagcagggcttcacctgggttccgccatttgatcatccgatggtgattgccggacaggg

SEQ ID NO: 473868 - DNA, 75 bp, synthetic construct
  source 1..75: mol_type = other DNA
ggcgctggcggggatgaaaaaatacatcgcccagcacaacattcgcggtgaacggctggcgcatattctttccgg

SEQ ID NO: 473869 - DNA, 75 bp, synthetic construct
  source 1..75: mol_type = other DNA
actacgggcgcgtactggcggcgttcgagcttggcgatcatgaaccggattttgaaacccggctgaatgaactgg

SEQ ID NO: 473870 - DNA, 75 bp, synthetic construct
  source 1..75: mol_type = other DNA
aacgtctctacagcttcgaatttccggaatcgccgggtgcgctgctgcgcttcctcaacacgctgggtacgcact

SEQ ID NO: 473871 - DNA, 75 bp, synthetic construct
  source 1..75: mol_type = other DNA
cgaactttgacgaagcgaaagccaaagcaatcgaactgtcgcagcagcagggcttcacctgggtgccgccgttcg

SEQ ID NO: 473872 - DNA, 75 bp, synthetic construct
  source 1..75: mol_type = other DNA
aagtgatcgccgtagaagcggaagactccgcctgcctgaaagcagcgctggatgcgggtcatcccgttgatctgc

SEQ ID NO: 473873 - DNA, 75 bp, synthetic construct
  source 1..75: mol_type = other DNA
tggaaagtagggcgcgggtggaaaaagtgggcctttggtcaatgcccggagctgtagaaccctggcgttatcgtg

SEQ ID NO: 473874 - DNA, 75 bp, synthetic construct
  source 1..75: mol_type = other DNA
ggatcgtggtgatactgtttctccctgtccttacaagggctgcaactgtaacacgcatcctcgatggcgatacgc

SEQ ID NO: 473875 - DNA, 75 bp, synthetic construct
  source 1..75: mol_type = other DNA
tcattgttgtatgcttcctcccttccctctcgctggctgcaactgtgacacgcatcctcgatggcgatacgttag

SEQ ID NO: 473876 - DNA, 75 bp, synthetic construct
  source 1..75: mol_type = other DNA
tatcgataaccgcgcccgctttttctctattgattcacgctttaaattcttggctgtctgtctggttaaagcagg

SEQ ID NO: 473877 - DNA, 75 bp, synthetic construct
  source 1..75: mol_type = other DNA
ttggctgcttttcacttggctttcggtataaaaagtgtaataccttcggaggagctcttagagctttcagctccc

SEQ ID NO: 473878 - DNA, 75 bp, synthetic construct
  source 1..75: mol_type = other DNA
ccggtaaagatcgttatggacgtaccttagcgaaggtctatgtgaaaaaatgccagccagcatgtctttcttatt

SEQ ID NO: 473879 - DNA, 75 bp, synthetic construct
  source 1..75: mol_type = other DNA
ttgaacattctttgatcagagcaaggaagattgcgaagcgggagtcaagaaagctttctggtggaagacggatgc

SEQ ID NO: 473880 - DNA, 75 bp, synthetic construct
  source 1..75: mol_type = other DNA
gagcggagctgcgccaaccgtaggtggcgcatttgtggtgaagcttgcagcgacgatctgtggcctgatactggg

SEQ ID NO: 473881 - DNA, 75 bp, synthetic construct
  source 1..75: mol_type = other DNA
ccttacggcatcgatcagcaatttctcggttatcaattattgccgccgtcatggtcgcgctatggcgaagtttct

SEQ ID NO: 473882 - DNA, 75 bp, synthetic construct
  source 1..75: mol_type = other DNA
gtggagtgaattgcaggacggtgaatggattgcttatccggatacactcgttggtactgactcgcacaccactat

SEQ ID NO: 473883 - DNA, 75 bp, synthetic construct
  source 1..75: mol_type = other DNA
gaaaaacccgatggcgacagtcagcgccggtgatggtttcccggtcgctatcctgaatcgtaatcagcctgcttt

SEQ ID NO: 473884 - DNA, 75 bp, synthetic construct
  source 1..75: mol_type = other DNA
gccgctggggatgtttattatcctaccaatattttcaacaggtgttttgctcagtaactttattcgcaactcaat

SEQ ID NO: 473885 - DNA, 75 bp, synthetic construct
  source 1..75: mol_type = other DNA
tgttcctttcttcgatcgttgtggccgacaccactgtttatcagtgtgaaatgtctgtagccgacgttaagaatg

SEQ ID NO: 473886 - DNA, 75 bp, synthetic construct
  source 1..75: mol_type = other DNA
tctatgcaaccggaaaacgaaacattcgggaaaccagcagatcctgggtctctatgccggagcgttcggcatccg

SEQ ID NO: 473887 - DNA, 75 bp, synthetic construct
  source 1..75: mol_type = other DNA
gtcaccatggcgctgggtacagtgcagaatgccctttctcaggggatttcagaggctcaggtttctctgatggcg

SEQ ID NO: 473888 - DNA, 75 bp, synthetic construct
  source 1..75: mol_type = other DNA
attatgcggagctggccgctgccaagttggccggaacgcaggagggcattgagcaggctaacaaaattcaggccg

SEQ ID NO: 473889 - DNA, 75 bp, synthetic construct
  source 1..75: mol_type = other DNA
tggcctcggtgcaacgccaacagcaatcgccaacatgcaggcgatcactgaacgctttggcccgtcgcacatggc

SEQ ID NO: 473890 - DNA, 75 bp, synthetic construct
  source 1..75: mol_type = other DNA
gcaacggtctgtcaatgatgggcttttaccgcgtctttgagcgtgcggtatccgtgctgggtaacgtaagcctgt

SEQ ID NO: 473891 - DNA, 75 bp, synthetic construct
  source 1..75: mol_type = other DNA
gatgacaatctgcataccgtcatccttcgtgcccaccctcggcactacggggaatgggtaaacgttgaagtcgtt

SEQ ID NO: 473892 - DNA, 75 bp, synthetic construct
  source 1..75: mol_type = other DNA
tctgatcgtacggtcgttaatcataacaaaacgataaagaccgaagatggggagataacgattaatcgtacacag

SEQ ID NO: 473893 - DNA, 75 bp, synthetic construct
  source 1..75: mol_type = other DNA
taaaggctatgatggcgtcattgccgagctatgcagggcggggagacgatgttgccgtataccatcgccttgctc

SEQ ID NO: 473894 - DNA, 75 bp, synthetic construct
  source 1..75: mol_type = other DNA
tcgtttacaacaaatcgggtgatgtatacggcgttcacgcgaagaacgacagctaccttttcgatgactgcaagg

SEQ ID NO: 473895 - DNA, 75 bp, synthetic construct
  source 1..75: mol_type = other DNA
tgaaaaatccctcagatctccgggaactggctatgaaaaggatcgaagacgaagaggccagtaaaagggggggcg

SEQ ID NO: 473896 - DNA, 75 bp, synthetic construct
  source 1..75: mol_type = other DNA
atatcgatcgccttgaacgatttcattctctgctggcagggcagtattggtctgcgctcgtcgatattccggctg

SEQ ID NO: 473897 - DNA, 75 bp, synthetic construct
  source 1..75: mol_type = other DNA
ttaccctaataatcaaaatgcggacggcttaatggcatggtgcaaaacgtgctgggatgagcacaaagcgaaacg

SEQ ID NO: 473898 - DNA, 75 bp, synthetic construct
  source 1..75: mol_type = other DNA
ccagagttaaatatttcttggcctaatacatctgaactaattatttcagaaaaggacaaaaaggcattatctttc

SEQ ID NO: 473899 - DNA, 75 bp, synthetic construct
  source 1..75: mol_type = other DNA
gcagcgcacaaccttccaccaaaccttacaagctcaccgactctctgggcctgtaccttcttgttaaacctaacg

SEQ ID NO: 473900 - DNA, 75 bp, synthetic construct
  source 1..75: mol_type = other DNA
tcttctgcaggcgctcatacgcactctgtatcgggtactgctgcaagcgcaggtgcacacgcacatactgtcggt

SEQ ID NO: 473901 - DNA, 75 bp, synthetic construct
  source 1..75: mol_type = other DNA
tgatgttatcaaggaagcactgagaaatgactacaacggcgtgaatattttttctgaaaacgttgcgcctcgcgc

SEQ ID NO: 473902 - DNA, 75 bp, synthetic construct
  source 1..75: mol_type = other DNA
cgagaaaaagaggaaaagggttttatcgtgctggtggaagaggaaaacagctttattactggtcgagttggcctg

SEQ ID NO: 473903 - DNA, 75 bp, synthetic construct
  source 1..75: mol_type = other DNA
taagtatccataaaccgattttatctataaaagatgaaaaacaaaagatgtttaaagaaatgatagcgttggaga

SEQ ID NO: 473904 - DNA, 75 bp, synthetic construct
  source 1..75: mol_type = other DNA
ccagtggtgctccgggaagtggatcacctgattattctaaatacagtgttaacacttcttctgcaggcgctcata

SEQ ID NO: 473905 - DNA, 75 bp, synthetic construct
  source 1..75: mol_type = other DNA
aggcaattccgcgaaagcggcaaaaacgtccgagacgaacgctaagtcttctgaaacggcagtggaacagagtgc

SEQ ID NO: 473906 - DNA, 75 bp, synthetic construct
  source 1..75: mol_type = other DNA
cctcgaaaaatcttccaccagaaagctacccagtcggcgcacaatcccgtggccatcagataccgttccgtctgg

SEQ ID NO: 473907 - DNA, 75 bp, synthetic construct
  source 1..75: mol_type = other DNA
gagcgccagcagcgcagcttcctcggcaacggcggcaggaaattccgcgaaggcggcaaaaacgtccgagacgaa

SEQ ID NO: 473908 - DNA, 75 bp, synthetic construct
  source 1..75: mol_type = other DNA
cagctacgaaacttcagacagcaataaaaatatctggtgtttcgtttgatggttctactgatatcactttaaccg

SEQ ID NO: 473909 - DNA, 75 bp, synthetic construct
  source 1..75: mol_type = other DNA
tgcttacccgaaacttgcagccgcttatccgtcaggcgtgatccctgatatgcgtggctggacgattaagggcaa

SEQ ID NO: 473910 - DNA, 75 bp, synthetic construct
  source 1..75: mol_type = other DNA
cgcccgattactgtctatgagttgctgtttattcgccatgaaggcaatgaactggagctggaaattcactgctca

SEQ ID NO: 473911 - DNA, 75 bp, synthetic construct
  source 1..75: mol_type = other DNA
tacaatctttacgaacaatggcaggacgctgaagggaagaaagaccatatagctgtaatacggatttctggcgag

SEQ ID NO: 473912 - DNA, 75 bp, synthetic construct
  source 1..75: mol_type = other DNA
tttaatatttacgataagtatcaggaatccgaaggacgaatggatcatatcgccgtcgtgcgtatctcgggagaa

SEQ ID NO: 473913 - DNA, 75 bp, synthetic construct
  source 1..75: mol_type = other DNA
gcaaaatttcagatacacaccccacgcagcaccgggcgtgaccgtggcgggcgttttggttcaggaggatggtaa

SEQ ID NO: 473914 - DNA, 75 bp, synthetic construct
  source 1..75: mol_type = other DNA
gggatagtacagctcagcagtgcgaccaacagtacgtctgaaacgctggcggcaacgccaaaggcagtaaaatca

SEQ ID NO: 473915 - DNA, 75 bp, synthetic construct
  source 1..75: mol_type = other DNA
acccgaaacttgcagccgcttatccgtcaggcgtgatccctgatatgcgtggctggacgattaagggcaaacctg

SEQ ID NO: 473916 - DNA, 75 bp, synthetic construct
  source 1..75: mol_type = other DNA
tgccaaagcttacaataatccccatgccaaagcagttattatcgaggcagagtcaggtggtggtggtccctctga

SEQ ID NO: 473917 - DNA, 75 bp, synthetic construct
  source 1..75: mol_type = other DNA
aaaggcacctatatccgcaccatcattgatgacctgggtgaaaaacttggctgtggcgcacatgtgatttatctg

SEQ ID NO: 473918 - DNA, 75 bp, synthetic construct
  source 1..75: mol_type = other DNA
ctgtggcgcgcatgttatttacctgcgtcgcctggctgtaagtaaatatccggttgaacggatggtgactctgga

SEQ ID NO: 473919 - DNA, 75 bp, synthetic construct
  source 1..75: mol_type = other DNA
gcataccggtgcgctggacccgctggcgaccggcatgctgccgatttgcctcggggaagccaccaagttttccca

SEQ ID NO: 473920 - DNA, 75 bp, synthetic construct
  source 1..75: mol_type = other DNA
ttgtaaaaaatataggttgtataggtcctgagggagttaaggtaaaacttgatgatattctttgtctggttggtc

SEQ ID NO: 473921 - DNA, 75 bp, synthetic construct
  source 1..75: mol_type = other DNA
attattgttgaaggtgatactgaacatgcggcatttatttcagcaatcactaaagaaaaacatgagatgtcaggt

SEQ ID NO: 473922 - DNA, 75 bp, synthetic construct
  source 1..75: mol_type = other DNA
tgaaatattttttgggagttatccaattattgttgaaggtgatactgaacatgcggcatttatttcagcaatcac

SEQ ID NO: 473923 - DNA, 75 bp, synthetic construct
  source 1..75: mol_type = other DNA
ggttacgttttgtcgacctgcttaagaatgcctacgaaaacgatctccatttaccgttgttaaacctgatgctga

SEQ ID NO: 473924 - DNA, 75 bp, synthetic construct
  source 1..75: mol_type = other DNA
ttgttgcgcggtgaaatgagccagcgtgagttaaaaaacgaactcggcgcgggcattgcgaccattactcgtgga

SEQ ID NO: 473925 - DNA, 75 bp, synthetic construct
  source 1..75: mol_type = other DNA
agatatgtttaatgcatatattatatcgtgcgagagtttaatattcaatgttgaagaagaaaaaaaacttgaaaa

SEQ ID NO: 473926 - DNA, 75 bp, synthetic construct
  source 1..75: mol_type = other DNA
acaatgggttaccgccgccagaaaagggctcggtactcctggttcccgcacggtggctgaactggatgaggtagc

SEQ ID NO: 473927 - DNA, 75 bp, synthetic construct
  source 1..75: mol_type = other DNA
cgtatttttctgctggagacgggaatgcggctgggcgaatatattcgtcgcaggcgactgagtcgggctgccctg

SEQ ID NO: 473928 - DNA, 75 bp, synthetic construct
  source 1..75: mol_type = other DNA
cagcagctgcacctgcaccaactaaagaagaagtattactgaccgagatccgtgatttgctgaaagagcagaata

SEQ ID NO: 473929 - DNA, 75 bp, synthetic construct
  source 1..75: mol_type = other DNA
ctggctaattcagcatattccgcaaacaactgagaaatttttaattcgtgctgaaactgatggcgtagaagcgaa

SEQ ID NO: 473930 - DNA, 75 bp, synthetic construct
  source 1..75: mol_type = other DNA
aattgtcaaaggttccattagcggctatgtcttcgagcaatttgaaatcgcctgctatacctcactattagctgc

SEQ ID NO: 473931 - DNA, 75 bp, synthetic construct
  source 1..75: mol_type = other DNA
tttatgccgcgccgcgtgatgtgcgggagcgtacctggcagttggatacgccgctgtttacgctgcgcttttttt

SEQ ID NO: 473932 - DNA, 75 bp, synthetic construct
  source 1..75: mol_type = other DNA
gatgtttaaccgcaacgccgaacgctacgaaaaggggtggcgaaaattctccaccgcagcctgcgctggattgtg

SEQ ID NO: 473933 - DNA, 75 bp, synthetic construct
  source 1..75: mol_type = other DNA
aaaatggccgcgtttgggcaatctattggtggaatttttccatctgatgaaattgtcaaaggttcgatcagtggc

SEQ ID NO: 473934 - DNA, 75 bp, synthetic construct
  source 1..75: mol_type = other DNA
tagataattatcctgaactacgcgctcgtattgaacaacatcttagtgaaaccaaaaaccagattgttcaactgg

SEQ ID NO: 473935 - DNA, 75 bp, synthetic construct
  source 1..75: mol_type = other DNA
gggctcggtactcctggttcccgcacggtggctgaactggaatctgaaattctgcaacttgtagattcaatctgt

SEQ ID NO: 473936 - DNA, 75 bp, synthetic construct
  source 1..75: mol_type = other DNA
cgattgcccttgtcggtagtcagaaagagttagctaaacgctgtggaaaggctcaatcaacgatctgtgattggt

SEQ ID NO: 473937 - DNA, 75 bp, synthetic construct
  source 1..75: mol_type = other DNA
tacaggttgaagagcagcgcgaacaggaagaagtacatgtgcagccgatggtgactgaggtccctgtcgccgccg

SEQ ID NO: 473938 - DNA, 75 bp, synthetic construct
  source 1..75: mol_type = other DNA
gaaagaatatttaacgaaggcggcgcgggtgtaaaaaatcatgctatcgttgatttaggtaacggcagaattgaa

SEQ ID NO: 473939 - DNA, 75 bp, synthetic construct
  source 1..75: mol_type = other DNA
atggcaaaaaacactatcaacgacaaatcaaaacagatttcaattcgtatcccacatgatgcttttgaaggcatg

SEQ ID NO: 473940 - DNA, 75 bp, synthetic construct
  source 1..75: mol_type = other DNA
ttggtgctgcggtgttcctttcttcaaaagcctctgatttcgtaaacggccacctgttgtttgttgatggcggca

SEQ ID NO: 473941 - DNA, 75 bp, synthetic construct
  source 1..75: mol_type = other DNA
ctcggcgcggtcggaattgtcggatttatcgcctggtatctgatggctcgcgcagaaaaacagcggatacgcgac

SEQ ID NO: 473942 - DNA, 75 bp, synthetic construct
  source 1..75: mol_type = other DNA
tgttttaagttcacgctgctcgcgttcagtcatctctttttgggtaatacgggggagtgccatgatggtgccctc

SEQ ID NO: 473943 - DNA, 75 bp, synthetic construct
  source 1..75: mol_type = other DNA
atgaatgaccgtgattttatgcgttatagccgtcaaatcctgctcgacgatatcgctcttgacgggcagcaaaaa

SEQ ID NO: 473944 - DNA, 75 bp, synthetic construct
  source 1..75: mol_type = other DNA
aaagcaactgtagattcaatctgtcaatgcaacacccctttcaattatctctttcggtgttttgaacttcagtaa

SEQ ID NO: 473945 - DNA, 75 bp, synthetic construct
  source 1..75: mol_type = other DNA
gaagctcgccttgagcgagatatattaaaaaaagcaacagcgtattttggtaagcgtaaactgaccgccgtatgt

SEQ ID NO: 473946 - DNA, 75 bp, synthetic construct
  source 1..75: mol_type = other DNA
aatctgaaattctgcaactgcgtaaggcgttaaatgaagctcgccttgagcgagatatattaaaaaaagcaactg

SEQ ID NO: 473947 - DNA, 75 bp, synthetic construct
  source 1..75: mol_type = other DNA
tatgtcttcgagcaatttgaaatcgcctgttatacctcactattagcagcagcaaaaaatgccggtgatacagcc

SEQ ID NO: 473948 - DNA, 75 bp, synthetic construct
  source 1..75: mol_type = other DNA
ctgcgtctggattaacccctatattgggcagaaatctccagtctttaaggagttacaagagaaaggctatttact

SEQ ID NO: 473949 - DNA, 75 bp, synthetic construct
  source 1..75: mol_type = other DNA
ccgcgtgatggtcgtgactacgatccggatgtactgcagaaggcggtgaaggaggcggtgagtgccctgccggct

SEQ ID NO: 473950 - DNA, 75 bp, synthetic construct
  source 1..75: mol_type = other DNA
tccgatgcttgagcagatggtgaaagaggctgtaagccatatccctgctccgcgtgacggtcgtgattacgatcc

SEQ ID NO: 473951 - DNA, 75 bp, synthetic construct
  source 1..75: mol_type = other DNA
aaagtatcacccccgatgatgtgcgtccgatgcttgagcagatggtgaaagaggccgtaagccatatccctgctc

SEQ ID NO: 473952 - DNA, 75 bp, synthetic construct
  source 1..75: mol_type = other DNA
acgatcaaaaatcctttccccggggcacgtatgccacacacctggggggactctggcgggcgtatgaaaaaacgc

SEQ ID NO: 473953 - DNA, 75 bp, synthetic construct
  source 1..75: mol_type = other DNA
ccgatgcttgaacagatggtgaaggaggcggtaagccatatccctgttccgcgtgacggtcgtgactacgatccg

SEQ ID NO: 473954 - DNA, 75 bp, synthetic construct
  source 1..75: mol_type = other DNA
gagcggttgttctctgtggtgatccggcacagcagtggccagcgtacggaaaaaacattttccctgccggtgatg

SEQ ID NO: 473955 - DNA, 75 bp, synthetic construct
  source 1..75: mol_type = other DNA
acatttgaggggaagatggcctcgcaggcacaagcgtttgaagagaaactggcttccctgtcggcggtattacag

SEQ ID NO: 473956 - DNA, 75 bp, synthetic construct
  source 1..75: mol_type = other DNA
aagctaggagattccggtttttacaacaaaaggacaaaaagtctcgagggagcctatggccttaggcatatatgg

SEQ ID NO: 473957 - DNA, 75 bp, synthetic construct
  source 1..75: mol_type = other DNA
gcagtggccagcgtacggaaaaaacattttccctgccggtgatgctctaccgcggtgtgttcagagccggtgaaa

SEQ ID NO: 473958 - DNA, 75 bp, synthetic construct
  source 1..75: mol_type = other DNA
tgatgctctaccgtggtgtgttcagaatcggcgaaacttaccaccccggcgatacggtgacgtggggggctcgtt

SEQ ID NO: 473959 - DNA, 75 bp, synthetic construct
  source 1..75: mol_type = other DNA
tttccacagtgctggcggatttacagcgcacatttgaggggaagatggcctcgcaggcacaagcgtttgaagaga

SEQ ID NO: 473960 - DNA, 75 bp, synthetic construct
  source 1..75: mol_type = other DNA
atgaccggtgataaacccggagaagctcattcatcaggctggaccctggctgccaaacgtggacgggatgcagga

SEQ ID NO: 473961 - DNA, 75 bp, synthetic construct
  source 1..75: mol_type = other DNA
acgatcaaaaatcctttccccggggcacgtatgccacacaccggggtggactctggcgggcgtatgaaaaaacgc

SEQ ID NO: 473962 - DNA, 75 bp, synthetic construct
  source 1..75: mol_type = other DNA
gctggattatctggaagcactggaactggtggatacttccagtgcgccagatattgaatggcctacccctccggc

SEQ ID NO: 473963 - DNA, 75 bp, synthetic construct
  source 1..75: mol_type = other DNA
gctggattacctggacgcactggagctggttgatacctccagtgtgccagatattgaatggcctacgcctccggc

SEQ ID NO: 473964 - DNA, 75 bp, synthetic construct
  source 1..75: mol_type = other DNA
aactaccctgtacttactgaatatccagcgaagacacaggaacaggaaatagctgaagcggagggaatgagaagt

SEQ ID NO: 473965 - DNA, 75 bp, synthetic construct
  source 1..75: mol_type = other DNA
gattgacccaaggacaccagaaggccgtaaggcgttacgcctgatggtgatacccaccaaggcactgatagctac

SEQ ID NO: 473966 - DNA, 75 bp, synthetic construct
  source 1..75: mol_type = other DNA
gctggattatctggaagcactggagctggtggatacgtccagtgcgccagatattgaatggcctactcctccggc

SEQ ID NO: 473967 - DNA, 75 bp, synthetic construct
  source 1..75: mol_type = other DNA
gctggattatctggaagcactggatctggtggatacatccagtgcgccagatattgaatggcctacccctccggc

SEQ ID NO: 473968 - DNA, 75 bp, synthetic construct
  source 1..75: mol_type = other DNA
tccccggggctcgtatgccacacaccagggtggactctggcgggcgtatgaaaaacgtacgggatgcggggatgg

SEQ ID NO: 473969 - DNA, 75 bp, synthetic construct
  source 1..75: mol_type = other DNA
ggcagagcagtggccagcgtacggaaaaaacattttccctgccggtgatgctctaccgtggtgtgttcagagccg

SEQ ID NO: 473970 - DNA, 75 bp, synthetic construct
  source 1..75: mol_type = other DNA
tggccagtgtacggaaaaaacattttccctgccggtgatgctctaccgcggtgtgttcagagccggtgaaaccta

SEQ ID NO: 473971 - DNA, 75 bp, synthetic construct
  source 1..75: mol_type = other DNA
ggcaaatgaagcgaaaacaaaggcagaagaggctgcagcaggaggtggtgttcccggtccgaaaggagagaaagg

SEQ ID NO: 473972 - DNA, 75 bp, synthetic construct
  source 1..75: mol_type = other DNA
gatgcctttatcagcaagatgttgtcgattacctgataaagacaggtaatgagcagcacctgaaagaaaatgcag

SEQ ID NO: 473973 - DNA, 75 bp, synthetic construct
  source 1..75: mol_type = other DNA
aacggaagtatgtggacatggtttcagaacgatggcgtgtagctcattgattgaatcgggattgtggtcgaggaa

SEQ ID NO: 473974 - DNA, 75 bp, synthetic construct
  source 1..75: mol_type = other DNA
gcgggataaaaacagctttgatttcaccatgaactgggcgaagtcggataacactctgattaaggacctgaagga

SEQ ID NO: 473975 - DNA, 75 bp, synthetic construct
  source 1..75: mol_type = other DNA
tctggaaaatcaacagctcttttaaagcgaagaactggtcaaaacccgaaagcggcggatttatctggcatacca

SEQ ID NO: 473976 - DNA, 75 bp, synthetic construct
  source 1..75: mol_type = other DNA
ctgaaagccctgcagaaggttgatattagtgacccggaagcggtagaaacctttaaagcagagcactatgtggat

SEQ ID NO: 473977 - DNA, 75 bp, synthetic construct
  source 1..75: mol_type = other DNA
acatcctcgaatatgccaggcagcagaagcatactggtcagcattgtaaaattccaccaggggatatggttgaaa

SEQ ID NO: 473978 - DNA, 75 bp, synthetic construct
  source 1..75: mol_type = other DNA
accatgaactgggcgaaatcagacaacacgctgattaaagacctcaaagactttaccgctacctttttccagaaa

SEQ ID NO: 473979 - DNA, 75 bp, synthetic construct
  source 1..75: mol_type = other DNA
aggaattcctggattcagctattgatgactataacaaccactttaaaaccaatttcagtaccgacagtaacggct

SEQ ID NO: 473980 - DNA, 75 bp, synthetic construct
  source 1..75: mol_type = other DNA
agttgtaaatcagatgaatataaaaattaaaaatatgacattagatgaaataaacaatacttactgtaataacga

SEQ ID NO: 473981 - DNA, 75 bp, synthetic construct
  source 1..75: mol_type = other DNA
cagcacaggagggacgtgttaaagctggcagggaatacgggcatgatgttactggggatagtctttctcctgttt

SEQ ID NO: 473982 - DNA, 75 bp, synthetic construct
  source 1..75: mol_type = other DNA
gggtttaatgaactgaagtttgacgatgcgacagggaaagaacaggtctacatccacgcgcagaagaacatgaac

SEQ ID NO: 473983 - DNA, 75 bp, synthetic construct
  source 1..75: mol_type = other DNA
ggacctgcgaaatcagggctatgaatttatatccgtaaaatcacagtcggcgatgctggccaacgttcgggaaca

SEQ ID NO: 473984 - DNA, 75 bp, synthetic construct
  source 1..75: mol_type = other DNA
accgtgagtggcgggacgctctggtatcttggcgggcagatacaggcgaacctggaagaaatcaggatacaggaa

SEQ ID NO: 473985 - DNA, 75 bp, synthetic construct
  source 1..75: mol_type = other DNA
caccgaaaatggcacagaattaaacgagacattaccaaaacttagtccgttaaacccgcaatataaaacgaaaaa

SEQ ID NO: 473986 - DNA, 75 bp, synthetic construct
  source 1..75: mol_type = other DNA
tgataagtacatcaaagctgagccaacaggcgacagctaccagagcgaatcggacctggaacgtgaactgattca

SEQ ID NO: 473987 - DNA, 75 bp, synthetic construct
  source 1..75: mol_type = other DNA
ccgggaaaacagtttcagcacaactgcctgacggcgcatctgacggtaataaggcaatcagtgaaacagagcatg

SEQ ID NO: 473988 - DNA, 75 bp, synthetic construct
  source 1..75: mol_type = other DNA
aaggtggactataacgatgtccgcccacagtttaagtctcttgaaacggaaactgacgaaaaaaaactcaacgcg

SEQ ID NO: 473989 - DNA, 75 bp, synthetic construct
  source 1..75: mol_type = other DNA
gcttcagagcctcaatggtgtgatgtttaatgacagcgagtggcggcgtttcacggagcagtatctggacaaccc

SEQ ID NO: 473990 - DNA, 75 bp, synthetic construct
  source 1..75: mol_type = other DNA
aaataaaaccacaatccatacagcaactcccagaaaaaaatgaacttaactggatgcgcgaattaaatcaatgga

SEQ ID NO: 473991 - DNA, 75 bp, synthetic construct
  source 1..75: mol_type = other DNA
gctgaaattgtctgttcggtgttccgtgtcccggcctacaagattggcgttggccacccgccttccagtgacaac

SEQ ID NO: 473992 - DNA, 75 bp, synthetic construct
  source 1..75: mol_type = other DNA
tgcactgtatcttcagcagcagaactacagtctggaggcgctgtcccgtcgtgatgcccgtgaagatccgttcgc

SEQ ID NO: 473993 - DNA, 75 bp, synthetic construct
  source 1..75: mol_type = other DNA
ctatgttggcagtgagcagcgtggatgccgcgaaagcctattatgcgacgtttaaacggttacaagaagaagccg

SEQ ID NO: 473994 - DNA, 75 bp, synthetic construct
  source 1..75: mol_type = other DNA
gccagcgtatttggtcgtgaattgcattcgtatgtaattaccgatgcgattcgagatgaaaaagtgcttaaattc

SEQ ID NO: 473995 - DNA, 75 bp, synthetic construct
  source 1..75: mol_type = other DNA
aaaaagaatctcatacgaaataaggtgcagattatccagcagtttgaacaggcgggttctcatgccaaccgttat

SEQ ID NO: 473996 - DNA, 75 bp, synthetic construct
  source 1..75: mol_type = other DNA
gttgcgacaatcttctcctttgccgctaatgaagaacaaaatgccattggtgaaatttccgatgaaacttttgat

SEQ ID NO: 473997 - DNA, 75 bp, synthetic construct
  source 1..75: mol_type = other DNA
taaacccgcaatataaaacgaaaaaacagacggttttccagaaaatcgtcacgtttattgaaaagttcaaaggag

SEQ ID NO: 473998 - DNA, 75 bp, synthetic construct
  source 1..75: mol_type = other DNA
cgtaaaatccatatcgactatatctgcgactttatttttgacgacgggcgtcttgagaacatctatttgatagat

SEQ ID NO: 473999 - DNA, 75 bp, synthetic construct
  source 1..75: mol_type = other DNA
gctcaaaaggttttaatgctatgttggcagtgagcagcgtggatgccgcgaaagcctattatgcgacgtttaaac

SEQ ID NO: 474000 - DNA, 75 bp, synthetic construct
  source 1..75: mol_type = other DNA
ctgcgtctggattaacccctatatcgggcaaaaatcccccgtctttaaagagttacaagagaaaggctatttact

SEQ ID NO: 474001 - DNA, 75 bp, synthetic construct
  source 1..75: mol_type = other DNA
tgcccgtttatgtgcgtgatagcaccctactggcgctgggcaacaacgatcaacgtcccgattacgcgtggcacg

SEQ ID NO: 474002 - DNA, 75 bp, synthetic construct
  source 1..75: mol_type = other DNA
gattattatggggcgtacctaccaccaggaaaaccgcacacccggcagcctgccggggacgaagacgcagatgac

SEQ ID NO: 474003 - DNA, 75 bp, synthetic construct
  source 1..75: mol_type = other DNA
ggcggctggtggacgacccgcaggtaaaacagaccagcaagggcacaccaatgacgctggcacgtatggcggtcc

SEQ ID NO: 474004 - DNA, 75 bp, synthetic construct
  source 1..75: mol_type = other DNA
aaaacagaccagcaagggcacaccgatgacgctggcgcgtatggcggtatctttgccatgcagccaggcacagga

SEQ ID NO: 474005 - DNA, 75 bp, synthetic construct
  source 1..75: mol_type = other DNA
gtgcagttctacttgccggaaggtcgctggacacatctgtggcacaacgatgaactcgatggtagtcgctggcat

SEQ ID NO: 474006 - DNA, 75 bp, synthetic construct
  source 1..75: mol_type = other DNA
ggaagagacgctggagcccgtcaccgtcggtggcaggcaatggcttcagggctcgctgtgtgagcaggggaactg

SEQ ID NO: 474007 - DNA, 75 bp, synthetic construct
  source 1..75: mol_type = other DNA
tgtacgcggtgagatcgcccgccgccaggcagaaggaagcggagaaaatcccctggtttcttcgctcgatgcact

SEQ ID NO: 474008 - DNA, 75 bp, synthetic construct
  source 1..75: mol_type = other DNA
gaatccgtaaaactggacggcgaaagcaacgccggattcatagtaaccgccatgcgcggtgagatcgcccgccgc

SEQ ID NO: 474009 - DNA, 75 bp, synthetic construct
  source 1..75: mol_type = other DNA
aggtgcagcggctatgggggttattggtggaggatttgctgctgccagagctacttcaggtgctggaggaatcgt

SEQ ID NO: 474010 - DNA, 75 bp, synthetic construct
  source 1..75: mol_type = other DNA
gcctaaccctcttaaaatgtacgcggtcgatgctgttgccgctattgcagaggtgagaggctggaatgcctgccg

SEQ ID NO: 474011 - DNA, 75 bp, synthetic construct
  source 1..75: mol_type = other DNA
ctggtctggcaacgactgtttctgtcgctgcgcttcctgcatctgccgcagttcaggttccgtcttttatttctg

SEQ ID NO: 474012 - DNA, 75 bp, synthetic construct
  source 1..75: mol_type = other DNA
ggcggctggtggctgacccgcagttaaagaccaccagcaagggcacacaaatgacgatggcgagtatggcggtcc

SEQ ID NO: 474013 - DNA, 75 bp, synthetic construct
  source 1..75: mol_type = other DNA
atactgaaaccggtaagaacggagacatatccgccttatccagggctggtcagtcacggtgccggctcaacaact

SEQ ID NO: 474014 - DNA, 75 bp, synthetic construct
  source 1..75: mol_type = other DNA
aacacaggaaatatcacagataagtgttttaatcatcgctgcattctggaaatatgcccatacgggcgaaaataa

SEQ ID NO: 474015 - DNA, 75 bp, synthetic construct
  source 1..75: mol_type = other DNA
atggctatggcaagcatggcggtccccctgccgtgcaatcaggcagatgacggacaggcgacgatgtggttatcc

SEQ ID NO: 474016 - DNA, 75 bp, synthetic construct
  source 1..75: mol_type = other DNA
cagcgtttttcgccagacagcgtcaacggctcggaaaataccgcaggccttaaacgaaatctggataaggacgat

SEQ ID NO: 474017 - DNA, 75 bp, synthetic construct
  source 1..75: mol_type = other DNA
tttatacccgtaaaatcacagtcagcgatgctggccaacgttcgggaacagcttcagagcctcaatggtgtggta

SEQ ID NO: 474018 - DNA, 75 bp, synthetic construct
  source 1..75: mol_type = other DNA
gctgtttctggcaggcgtggaacgtcgtatccgccctgtcagagcccgtgagcgggctcagtggttacgactgct

SEQ ID NO: 474019 - DNA, 75 bp, synthetic construct
  source 1..75: mol_type = other DNA
agtgcgcgaacggcgcgaccgggcggcaaaaaaggccagcagggccaggctactgacgcactgaacagggcaaaa

SEQ ID NO: 474020 - DNA, 75 bp, synthetic construct
  source 1..75: mol_type = other DNA
cgaactggtgagcgtggcgggtaacatgcaggtgagccagtggacaggccagaacggcgaaacgcggcagggctg

SEQ ID NO: 474021 - DNA, 75 bp, synthetic construct
  source 1..75: mol_type = other DNA
atacaggttagccagtggacaagccagaacggtgaaactcggcagggctggcaggttatcgcagacagcgtaatc

SEQ ID NO: 474022 - DNA, 75 bp, synthetic construct
  source 1..75: mol_type = other DNA
atgacagcacagatagcggcttacggtcggctggtggctgacccgcagttaaagaccaccagcaaagggacacaa

SEQ ID NO: 474023 - DNA, 75 bp, synthetic construct
  source 1..75: mol_type = other DNA
cagactattcaggtgattgtgggcgcgaaagcagaatccatcggcgatgcgatgaagaaagtcgttgcccgtggt

SEQ ID NO: 474024 - DNA, 75 bp, synthetic construct
  source 1..75: mol_type = other DNA
tcaggttattgcagacagcgtaatcagtgcccgtgcggcacttcctggcgggaacagacgcaaaaccacaggcac

SEQ ID NO: 474025 - DNA, 75 bp, synthetic construct
  source 1..75: mol_type = other DNA
acttcctgcagaaaatggcaagtgacattaacagtatgaacctcagttcctgtcaggtggcacaggggcttgtgg

SEQ ID NO: 474026 - DNA, 75 bp, synthetic construct
  source 1..75: mol_type = other DNA
gcaggatgcgctgctggttgtcgatcgtcagatgagctacatgcgtcagcagctttccgcccgcatgctcagtcg

SEQ ID NO: 474027 - DNA, 75 bp, synthetic construct
  source 1..75: mol_type = other DNA
tttagcgccgccgccgacgtgaatggcgatatgaacaacttcttcaataagctgggctttgcgtccaataccagc

SEQ ID NO: 474028 - DNA, 75 bp, synthetic construct
  source 1..75: mol_type = other DNA
atatcatgtgggaggcactgaaaaagaacaagatgtttgacggcaacaaagagctgaaagaattcatcatgacac

SEQ ID NO: 474029 - DNA, 75 bp, synthetic construct
  source 1..75: mol_type = other DNA
tatatgggagtcattgctcaagcattaactgcatctgtaaatagatttttaattgaggattttattaaaggagca

SEQ ID NO: 474030 - DNA, 75 bp, synthetic construct
  source 1..75: mol_type = other DNA
acttcctgcagaaaatggcaagcgacattaacagtatgaacctcagttcctgccaggctgcacaggggattatcg

SEQ ID NO: 474031 - DNA, 75 bp, synthetic construct
  source 1..75: mol_type = other DNA
ttgtcattgccgacgatgtaggggatggcactgatgacgggaagcggacggcgtttgtctgggattcaggtaaac

SEQ ID NO: 474032 - DNA, 75 bp, synthetic construct
  source 1..75: mol_type = other DNA
agccagacggaccaacgaacctttccgcatgggtaaggcttaagaacaaagagttgccgccttcactgcatcgct

SEQ ID NO: 474033 - DNA, 75 bp, synthetic construct
  source 1..75: mol_type = other DNA
gaaaaactggaagactgctatttcaggcagtgcaagaaaaatactggcaaacaagagaagagcaccagagagttt

SEQ ID NO: 474034 - DNA, 75 bp, synthetic construct
  source 1..75: mol_type = other DNA
tgcgaattaaacttctgtcactcttctgcggtgccgtgcttggcctgtcatttagcgccgccgccgacgtgaatg

SEQ ID NO: 474035 - DNA, 75 bp, synthetic construct
  source 1..75: mol_type = other DNA
tcactggcatgttactgttcaaacctcagcagacgacggtacatgatccgctgcccgtttcaatacggcgtcgcg

SEQ ID NO: 474036 - DNA, 75 bp, synthetic construct
  source 1..75: mol_type = other DNA
cattgtgtgtctgctggctatcttcgcgccctcgttcttgctggtcgtcggatcaatgccattttgggagcgttt

SEQ ID NO: 474037 - DNA, 75 bp, synthetic construct
  source 1..75: mol_type = other DNA
gagaatctgaatcaggcacagcaacagattgctgtcttccagagtcaggtgcaggtccagcaggatgctctgctg

SEQ ID NO: 474038 - DNA, 75 bp, synthetic construct
  source 1..75: mol_type = other DNA
cacatctcactgccgaactggacgccctgcataacgaccggttgctggtttccccgcacgtcgataaaaaacaga

SEQ ID NO: 474039 - DNA, 75 bp, synthetic construct
  source 1..75: mol_type = other DNA
tgtgctcattcagatgctcgccatgccacgcagtgacctgcgggttattacccgccagggcgatattggcatgga

SEQ ID NO: 474040 - DNA, 75 bp, synthetic construct
  source 1..75: mol_type = other DNA
aggcgcaggcacactgacggacgctgctgacaccctgcttgcccgctacgccaaaaacatgaccgcagacgcccg

SEQ ID NO: 474041 - DNA, 75 bp, synthetic construct
  source 1..75: mol_type = other DNA
ccccggtacagcggctggcccagctcactgccgaactggacgccctgcataacgaccggttgctggtctccccgc

SEQ ID NO: 474042 - DNA, 75 bp, synthetic construct
  source 1..75: mol_type = other DNA
cgactgattgactgtaagaatatcgttttcttcctcacctccaaccttggttaccaggtgattgttgaacacgcg

SEQ ID NO: 474043 - DNA, 75 bp, synthetic construct
  source 1..75: mol_type = other DNA
aaaaccatcgccgccaccacctggagcgagtacaaaaaatatttcgagaaagatgcagctttgtcgcgccgcttc

SEQ ID NO: 474044 - DNA, 75 bp, synthetic construct
  source 1..75: mol_type = other DNA
tatcgaacatattaacgacaacatgaatgatgccacccggcagattgcggcgtttcagtcacaggtgcaggtaca

SEQ ID NO: 474045 - DNA, 75 bp, synthetic construct
  source 1..75: mol_type = other DNA
ctctggctggtaaaaactatccggaggaagcggccgccaaactccgcgacaacgttgtacatgcgcagggactac

SEQ ID NO: 474046 - DNA, 75 bp, synthetic construct
  source 1..75: mol_type = other DNA
agattgccattttccagagccaggtgcaggtccagcaggatgcattgctggtcgttgaccgtcagatgagctaca

SEQ ID NO: 474047 - DNA, 75 bp, synthetic construct
  source 1..75: mol_type = other DNA
aaaatctgtcaggacattgccggtgaaaccaatatgttctctgactgggccgcctcgaggcagggatgcacggtg

SEQ ID NO: 474048 - DNA, 75 bp, synthetic construct
  source 1..75: mol_type = other DNA
gttgtcgatcgccagatgagttacatgcgtcagcaggtatcagcaaggatgatgacccgctaccagaacaattac

SEQ ID NO: 474049 - DNA, 75 bp, synthetic construct
  source 1..75: mol_type = other DNA
gcctcggataaggcgctgaagaaccagatttcgaaactactcaacagtatccagaacaaggccgttgctgatgaa

SEQ ID NO: 474050 - DNA, 75 bp, synthetic construct
  source 1..75: mol_type = other DNA
acgaaatcatgagccgcgtcacccgcgcggaaaacggcgcgaggatgctggaatcggttatcgacggcgacatgc

SEQ ID NO: 474051 - DNA, 75 bp, synthetic construct
  source 1..75: mol_type = other DNA
cgctgcaaagcagtcagaggaagcgtcctcgtcctcggcctctgcggccgctcaaaaagccagtgagtcatcaca

SEQ ID NO: 474052 - DNA, 75 bp, synthetic construct
  source 1..75: mol_type = other DNA
ggggtgaccaaaaggcggttttgtgtggggccggggaggtttttctgaatcaaccacgaaaggtggttcgcggat

SEQ ID NO: 474053 - DNA, 75 bp, synthetic construct
  source 1..75: mol_type = other DNA
ccgaagggcgacccgggggagacacaaatccgttttcgtctggggccggcgagcattattgagacaaacagcaat

SEQ ID NO: 474054 - DNA, 75 bp, synthetic construct
  source 1..75: mol_type = other DNA
tggggccggaaacattattgagacaaacagccatggctggttcccggatacagatggcgcactcatcaccggact

SEQ ID NO: 474055 - DNA, 75 bp, synthetic construct
  source 1..75: mol_type = other DNA
agcatggacgtcgagtatggtcagtacagcgtcactctgttggtggagggattcccgccatcacatgccgggacc

SEQ ID NO: 474056 - DNA, 75 bp, synthetic construct
  source 1..75: mol_type = other DNA
tgagtacggtcagtacagcgtcattctgttggtggaaggattcccgccgtcacatgccgggaccatcaccgtgta

SEQ ID NO: 474057 - DNA, 75 bp, synthetic construct
  source 1..75: mol_type = other DNA
tttcacagaaaaaaattacatttaccgccaatgccgagcaacttctgcagccacagtttacggttgaacaactac

SEQ ID NO: 474058 - DNA, 75 bp, synthetic construct
  source 1..75: mol_type = other DNA
tcgtcgatgagggcggcatactatatctctctgggatatcgagtaaatcacaaagctggactgtacgctggggaa

SEQ ID NO: 474059 - DNA, 75 bp, synthetic construct
  source 1..75: mol_type = other DNA
tggcgtgcatgtggtccgatgctatggacatcatctccgggtatcagacaggcaggattatttcagcgcatatca

SEQ ID NO: 474060 - DNA, 75 bp, synthetic construct
  source 1..75: mol_type = other DNA
aaagcaggatagcggcggaagaggccgtaaaccgaatccccaccgtggtggggcctcccgggccaaagggggaac

SEQ ID NO: 474061 - DNA, 75 bp, synthetic construct
  source 1..75: mol_type = other DNA
aacctgctgcgaaaaaaatggatcagtgcaggggaattatatcaaccgtgtggcgaagcgccacaattgccggat

SEQ ID NO: 474062 - DNA, 75 bp, synthetic construct
  source 1..75: mol_type = other DNA
agataaaaagctgatacagtgtgtggtaagaccgctgcaaatcctgcgtgctgacgggacgtgggaaaatattgg

SEQ ID NO: 474063 - DNA, 75 bp, synthetic construct
  source 1..75: mol_type = other DNA
cgtgaacacgtgcagtcgcttacagcacaactgcgactggggccggcagacatcctggagtcagatgagaatggc

SEQ ID NO: 474064 - DNA, 75 bp, synthetic construct
  source 1..75: mol_type = other DNA
gtgccggacaagctgaaaaacaccgatatcatgacccttgacctgggcgcattgcaggccggggcgtcggtgaag

SEQ ID NO: 474065 - DNA, 75 bp, synthetic construct
  source 1..75: mol_type = other DNA
gtgctgccagcggggcgctttatgccaatgagagcggtgcagtgtgagcgggtgtcgggtgctgccagcggggcg

SEQ ID NO: 474066 - DNA, 75 bp, synthetic construct
  source 1..75: mol_type = other DNA
agaacggcagaacattaccgtaataaaattgctgtctacctgcgctggtatcagacgcggggcttcccggatgac

SEQ ID NO: 474067 - DNA, 75 bp, synthetic construct
  source 1..75: mol_type = other DNA
cggcaggcccacagggaccgaaaggagaaacaggtgcggctggcccggtgggggcaaccggacctcagggaccga

SEQ ID NO: 474068 - DNA, 75 bp, synthetic construct
  source 1..75: mol_type = other DNA
ggtgggcaatgtgatcagtcagatttggttcgttccaaggtttgcaacgagagctttttcctgtgctctttaagg

SEQ ID NO: 474069 - DNA, 75 bp, synthetic construct
  source 1..75: mol_type = other DNA
aggtttctacaaactaataaaaacaaaaagcgccccgttgccggagcgcctttgtgaacaattaacctactgcgc

SEQ ID NO: 474070 - DNA, 75 bp, synthetic construct
  source 1..75: mol_type = other DNA
ctttttaatttccgttgccgctctgcgggctttttttaccaaaaataccaaacatcgtgacgttcctttgggtgg

SEQ ID NO: 474071 - DNA, 75 bp, synthetic construct
  source 1..75: mol_type = other DNA
ggtcagtacagcgtcattctgttggtggagggattcccgccgtcacatgccgggaccatcaccgtgtatgaagat

SEQ ID NO: 474072 - DNA, 75 bp, synthetic construct
  source 1..75: mol_type = other DNA
aagcgcacagtcagcggaacaaagcaggatagcggcggaagaggccgtaaaccgaatccccaccgtggtgggacc

SEQ ID NO: 474073 - DNA, 75 bp, synthetic construct
  source 1..75: mol_type = other DNA
acacaggggaaccgcctgattaaccgtgatacggtttcccgtggcggtatctctgctgccggtgaggcgatcatt

SEQ ID NO: 474074 - DNA, 75 bp, synthetic construct
  source 1..75: mol_type = other DNA
tgaaaatatctgtgggtttgcagaagaaacagacgacgaatggatgacagaatgtgccagagcaagtcatattca

SEQ ID NO: 474075 - DNA, 75 bp, synthetic construct
  source 1..75: mol_type = other DNA
ccgctgatatggcgctgaatgaggctaaagccatcctgattgctgattgtgaaaatggcgggggcgattatgcga

SEQ ID NO: 474076 - DNA, 75 bp, synthetic construct
  source 1..75: mol_type = other DNA
cggttgagaataattatctgagtagttctcagtccgtcgaatttgataaagagctgacaaactgccggaaatccg

SEQ ID NO: 474077 - DNA, 75 bp, synthetic construct
  source 1..75: mol_type = other DNA
gccgggaaaagcctggttattgacacaaataaccggcaactgagtaaccgtgaaggcgggcagatactggccggt

SEQ ID NO: 474078 - DNA, 75 bp, synthetic construct
  source 1..75: mol_type = other DNA
ccggacaggatgtcaccgtcggcacaggtgcggcaaaacttcacaacaccaggggaaatattgcggcccgggata

SEQ ID NO: 474079 - DNA, 75 bp, synthetic construct
  source 1..75: mol_type = other DNA
tagaaattatccgtggcgacactattcgttacgcgctgctggagatcccctcagataaagtgccgcgctttgtga

SEQ ID NO: 474080 - DNA, 75 bp, synthetic construct
  source 1..75: mol_type = other DNA
ttatactgactattcgttgctgaccgcagatgcgcgtatcaccaacgaagtacggcggggatttaactttattga

SEQ ID NO: 474081 - DNA, 75 bp, synthetic construct
  source 1..75: mol_type = other DNA
gccgatgcgcgcatcaccaacgaagtacggcgggtgttcaactttattgaaaacccataccgcccggtgacattt

SEQ ID NO: 474082 - DNA, 75 bp, synthetic construct
  source 1..75: mol_type = other DNA
gcctacgcacagcttaccgctgatatggcactgaatgaggctaaagccatcctaattgctgattgtgaaaatggg

SEQ ID NO: 474083 - DNA, 75 bp, synthetic construct
  source 1..75: mol_type = other DNA
gcctacgcacagcttaccgctgatatggcactgaatgaggccagggctatcctgattgctgattgtgaaaatggg

SEQ ID NO: 474084 - DNA, 75 bp, synthetic construct
  source 1..75: mol_type = other DNA
aagccaacattcactgggcaaaacggctgactgaagcgggcgtacacgtgattttctctgcgccggggctgaaaa

SEQ ID NO: 474085 - DNA, 75 bp, synthetic construct
  source 1..75: mol_type = other DNA
aatgaccgggatggtgacaaagccccggtaatcgcatcccgtgatcgtctggatattgcggccggaacggttaat

SEQ ID NO: 474086 - DNA, 75 bp, synthetic construct
  source 1..75: mol_type = other DNA
ccgcgtgatggtcgtgattatgatccggatgtactgcagcaggcggtgaatgatgcggtcgggagaattccggta

SEQ ID NO: 474087 - DNA, 75 bp, synthetic construct
  source 1..75: mol_type = other DNA
tgacggggtggcggatattgacgtcagcatgacgggtgaacggttgttctctgtggtggtccggcagagcagtgg

SEQ ID NO: 474088 - DNA, 75 bp, synthetic construct
  source 1..75: mol_type = other DNA
tatgaccggtgataagcccggagaagctcattcatcaggctggactctggctgcaaaacgtgggcgggatgcagg

SEQ ID NO: 474089 - DNA, 75 bp, synthetic construct
  source 1..75: mol_type = other DNA
aggcacaagcgtttgaagagaaactgacttccctgtcggcggtattacagaagcatgtgacggtggatgaggtac

SEQ ID NO: 474090 - DNA, 75 bp, synthetic construct
  source 1..75: mol_type = other DNA
cgatgatgtgcgtccgatgcttgagcagatggtgaaagaggctgtaagccatatccctgctccgcgtgatggtcg

SEQ ID NO: 474091 - DNA, 75 bp, synthetic construct
  source 1..75: mol_type = other DNA
gtgatgccacggctctggaagtgctccccgctattgacgatcaaaaatcctttccccggggcacgtatgccacac

SEQ ID NO: 474092 - DNA, 75 bp, synthetic construct
  source 1..75: mol_type = other DNA
ggaagtatcaccagtgccggacgaattcatctgaaagcggatgtgctggacaaccgctctggtacgcttgcggct

SEQ ID NO: 474093 - DNA, 75 bp, synthetic construct
  source 1..75: mol_type = other DNA
ggattaagtttaggggccgggccttcttggggatggagtggtatatctaagagtataggcggcgaatctattgat

SEQ ID NO: 474094 - DNA, 75 bp, synthetic construct
  source 1..75: mol_type = other DNA
ccggcacggacagccactacctggtggaaacggatccccgttttgtgaataaaaaacagtggttgtccagtgact

SEQ ID NO: 474095 - DNA, 75 bp, synthetic construct
  source 1..75: mol_type = other DNA
tgactatgatcccgatgttctgcagaaggcggttctggatgcggtgagtgccctgccggctccgcaggacgggcg

SEQ ID NO: 474096 - DNA, 75 bp, synthetic construct
  source 1..75: mol_type = other DNA
actctcttgttgcctttaggccattctcaatctgaaaatatcggtcatttgttacaaattggtttttatatgcca

SEQ ID NO: 474097 - DNA, 75 bp, synthetic construct
  source 1..75: mol_type = other DNA
tatttccgtggtatgaaaaattaaatgattcaatatcgataaccctatcatttgtatatattatcttttgtacaa

SEQ ID NO: 474098 - DNA, 75 bp, synthetic construct
  source 1..75: mol_type = other DNA
gtggtggcatcgatgcctatctcggctcattcagttttattaatggcgagcagctgcagcgttttgttaagcaga

SEQ ID NO: 474099 - DNA, 75 bp, synthetic construct
  source 1..75: mol_type = other DNA
cagcggatgtgaacagcgacatgaatcagttctttaacaagctgggcttcgcctccaataccacacagccgggcg

SEQ ID NO: 474100 - DNA, 75 bp, synthetic construct
  source 1..75: mol_type = other DNA
catcaatatcatctgggactcgctgtccaaaaacaggatgcttgatggtaacaaagagctgaaagaattcatcat

SEQ ID NO: 474101 - DNA, 75 bp, synthetic construct
  source 1..75: mol_type = other DNA
cattaacagtatgaacctcagttcctgccaggcggcacaggggattatcggcgggcttttcccccggacgcaggt

SEQ ID NO: 474102 - DNA, 75 bp, synthetic construct
  source 1..75: mol_type = other DNA
acaaagaactgaaagaatttatcatgacgctcaccggtacgctgatttttggggaagacagcgagattacccccc

SEQ ID NO: 474103 - DNA, 75 bp, synthetic construct
  source 1..75: mol_type = other DNA
cgaagcagttatcgaacatattaacgacaacatgaatgatgccacccggcagattgcggcgtttcagtcacaggt

SEQ ID NO: 474104 - DNA, 75 bp, synthetic construct
  source 1..75: mol_type = other DNA
cgaagcggttatcgagcatattaacgacaacatgaatgatgccacccggcagattgcggcgtttcagtcacaggt

SEQ ID NO: 474105 - DNA, 75 bp, synthetic construct
  source 1..75: mol_type = other DNA
gcgaggatgctcgaatcggtcattgacggcgacatgctgccgccgctctccctgctgctgttgcagaaaatggcg

SEQ ID NO: 474106 - DNA, 75 bp, synthetic construct
  source 1..75: mol_type = other DNA
tcaaaggccaggacctggcgattgccagcctgcataaacacctgctgaccgcacgcgccgacctgcgccgtccgg

SEQ ID NO: 474107 - DNA, 75 bp, synthetic construct
  source 1..75: mol_type = other DNA
tgaccggcacactcatttttggggaggacagtgaaatcacaccgctgccggcacgcaccactgaccgtgacatta

SEQ ID NO: 474108 - DNA, 75 bp, synthetic construct
  source 1..75: mol_type = other DNA
ggatgaaaaggaaaaaaaattcattcagagcaccaccattcccgtctttaaatacctggtcgacccgcagatgct

SEQ ID NO: 474109 - DNA, 75 bp, synthetic construct
  source 1..75: mol_type = other DNA
agtgtctgaaggtggtggcggatgcaaatgtgaccatcgcccgggataaagccctgaagtcacagattacaaaac

SEQ ID NO: 474110 - DNA, 75 bp, synthetic construct
  source 1..75: mol_type = other DNA
tggagcaacgttacctgccctcgctgtttaacgggctggtcaaagcgatgaacgccgcgccgccggagagtgaag

SEQ ID NO: 474111 - DNA, 75 bp, synthetic construct
  source 1..75: mol_type = other DNA
gcttctctatatataaatgaacctcatcttcgtaaaattgtaactccttttattattaagtattataaacggcat

SEQ ID NO: 474112 - DNA, 75 bp, synthetic construct
  source 1..75: mol_type = other DNA
aaaacccggtgccgggctggcctgcctgctgtcaattctggtcggcctctgccttgccgtcgtaccggaactgat

SEQ ID NO: 474113 - DNA, 75 bp, synthetic construct
  source 1..75: mol_type = other DNA
agcctgagttcacagataaaacactctccaggaaacccggggcggttcactggtgcttcaatagttgctggagca

SEQ ID NO: 474114 - DNA, 75 bp, synthetic construct
  source 1..75: mol_type = other DNA
ctgaataacggtcctcattacccactcaatattttgcaggacgtgaaggtcacaatcgaaaacacagagcgttat

SEQ ID NO: 474115 - DNA, 75 bp, synthetic construct
  source 1..75: mol_type = other DNA
tgcgcttcttcacgcaactgaaatgccgcatgatgccgtatctgtatcgtgaagctgctcgtgcgaacgcgcggg

SEQ ID NO: 474116 - DNA, 75 bp, synthetic construct
  source 1..75: mol_type = other DNA
cgatgatgagtcctgtgatgtggtgcgcttcttcacgcaactgaaatgccgcatgatgccgtatctgtatcgtga

SEQ ID NO: 474117 - DNA, 75 bp, synthetic construct
  source 1..75: mol_type = other DNA
cccgccagtagcgaatgatgatgtttatatgggcgtgctggcacaggcagagaattttaaagaacatcatatgag

SEQ ID NO: 474118 - DNA, 75 bp, synthetic construct
  source 1..75: mol_type = other DNA
tggttgacaacacatcgaaatatcctgactggagtaaacgcgatgatattaaagcgaaactgaaagttgaactta

SEQ ID NO: 474119 - DNA, 75 bp, synthetic construct
  source 1..75: mol_type = other DNA
cagacgctggatgtcccgtcgattcacttcgattctgcctgggtgccgtacacccattttcatccaatctactag

SEQ ID NO: 474120 - DNA, 75 bp, synthetic construct
  source 1..75: mol_type = other DNA
tgcgcagaatacgatgaatggggcaacctgctgaatgaagagaacccgcatcagctgcagcagcttatccgcctg

SEQ ID NO: 474121 - DNA, 75 bp, synthetic construct
  source 1..75: mol_type = other DNA
ggtcgcagtcaggatactgatttacgggtatgtatgaattgtcttgagcggcttaattataaaggaagtattgac

SEQ ID NO: 474122 - DNA, 75 bp, synthetic construct
  source 1..75: mol_type = other DNA
ctggatgaatcccctattgactttgatcctatagatattgagttatccacgggtaaagaagttagtatcgaagat

SEQ ID NO: 474123 - DNA, 75 bp, synthetic construct
  source 1..75: mol_type = other DNA
tttttcgccgttctgaagagtgcctgcaccttatccctactagtgaaggtcagggcgagaatggagatattggtc

SEQ ID NO: 474124 - DNA, 75 bp, synthetic construct
  source 1..75: mol_type = other DNA
gtgtgacggctatcgacattagctcagaaaaactggcactggcaaaatctttcggtgcgatgcaaacatttaaca

SEQ ID NO: 474125 - DNA, 75 bp, synthetic construct
  source 1..75: mol_type = other DNA
tcggcagataacatcggcggcgtgtattaccgaccgcttcagaaactgattaacggcacctggtataacgtggcg

SEQ ID NO: 474126 - DNA, 75 bp, synthetic construct
  source 1..75: mol_type = other DNA
gctgctgaccagcgatggtgaactttatgccgtcggaagttgtgcagccattgagaaaccggtaaatggcgttac

SEQ ID NO: 474127 - DNA, 75 bp, synthetic construct
  source 1..75: mol_type = other DNA
gaaaaacccttcgtgaactggggattatcagcgacagaggtacgcttatcgcgtacggacgttatccggacacct

SEQ ID NO: 474128 - DNA, 75 bp, synthetic construct
  source 1..75: mol_type = other DNA
cagggcgaaaacggcgatattggcccactgcgaccgttcagcattaacctgcggacgggtgaagtttcaatgtct

SEQ ID NO: 474129 - DNA, 75 bp, synthetic construct
  source 1..75: mol_type = other DNA
tcgaactggcggtagagattgccggtcctcatgcccaactggcgctggtgggcacgttgcatcaggatctgcatt

SEQ ID NO: 474130 - DNA, 75 bp, synthetic construct
  source 1..75: mol_type = other DNA
tacagtcagaggaatacggataacagcataacgtttgccgtaaacgggcagatggttccatcaaactacggaaac

SEQ ID NO: 474131 - DNA, 75 bp, synthetic construct
  source 1..75: mol_type = other DNA
attgaccaggaaaccgcccggcaggtttcgcccgtcgcggaggcggtcgccaatatgttcaccatcctttactac

SEQ ID NO: 474132 - DNA, 75 bp, synthetic construct
  source 1..75: mol_type = other DNA
ggaagacaaagatgaggctgttgaaaatctcgggttaaaacccacggtgggcaaggcaaaaaatgccgttcagcg

SEQ ID NO: 474133 - DNA, 75 bp, synthetic construct
  source 1..75: mol_type = other DNA
gggcgaagagtgtgacggctatcgacattagcccagaaaaactggcactggcaaaatcctttggtgtcacgcaaa

SEQ ID NO: 474134 - DNA, 75 bp, synthetic construct
  source 1..75: mol_type = other DNA
atggtattgtccgcgtggaagaacacaagttacccgaaattcttcatcaggatgatgtgcgagttaaaattgcca

SEQ ID NO: 474135 - DNA, 75 bp, synthetic construct
  source 1..75: mol_type = other DNA
taccagtgaaggtcagggcgagaatggcgatattggtccacttcgaccgttcactattaatctgcggacgggtga

SEQ ID NO: 474136 - DNA, 75 bp, synthetic construct
  source 1..75: mol_type = other DNA
ccttcgacccgcaatatcttattgctgctggtgatcctgccttcgtggacctcatttttgatccgcgtttacgcc

SEQ ID NO: 474137 - DNA, 75 bp, synthetic construct
  source 1..75: mol_type = other DNA
cggaactgctcggcggtccggatagcatcatgattggccgcgtactgtggcaggagttcttcaataaccgtgact

SEQ ID NO: 474138 - DNA, 75 bp, synthetic construct
  source 1..75: mol_type = other DNA
cgtcgcattactctgcggaagaactggcgaaagtgaaaaaaagaaagacgggtaaccggtcaaaacgatgccggg

SEQ ID NO: 474139 - DNA, 75 bp, synthetic construct
  source 1..75: mol_type = other DNA
tggatgggaatattaaaaaacaacggtgtgctgaataattttctgctgtggctgggggttatcgatcaaccgctg

SEQ ID NO: 474140 - DNA, 75 bp, synthetic construct
  source 1..75: mol_type = other DNA
atgagtacacttgaacctgctgcccagtcgaaaccgccgggcggatttaagctgtggttgtcgcagttgcaaatg

SEQ ID NO: 474141 - DNA, 75 bp, synthetic construct
  source 1..75: mol_type = other DNA
cgcaaactggtcattgcgttgccatatatctggttgatcttgctgtttctgctgccatttctgatcgtctttaaa

SEQ ID NO: 474142 - DNA, 75 bp, synthetic construct
  source 1..75: mol_type = other DNA
cgcaactgcccacccgcccccgcgtccaggtaaggcggaaagtggccaaaagagccagccctcccgggaaaaaca

SEQ ID NO: 474143 - DNA, 75 bp, synthetic construct
  source 1..75: mol_type = other DNA
ggccataccatcaccgtcacgccgggaaggtatagtcgctctgtgaaccttaaggtctgtgggggcggggtgcca

SEQ ID NO: 474144 - DNA, 75 bp, synthetic construct
  source 1..75: mol_type = other DNA
caggctctattgttaactgggccagacggtaaaaaccgacggataagcactgttagccttggggaacttttaaaa

SEQ ID NO: 474145 - DNA, 75 bp, synthetic construct
  source 1..75: mol_type = other DNA
tcgatctgatctttgccgacccaccatataacatcggtaaaaattttgatggtctgatcgaagcctggaaagaag

SEQ ID NO: 474146 - DNA, 75 bp, synthetic construct
  source 1..75: mol_type = other DNA
gaggcggcatatagtctctccagggatcaaaagcgtatgctgtatctgttcgttgaccagatcagaaaatccgac

SEQ ID NO: 474147 - DNA, 75 bp, synthetic construct
  source 1..75: mol_type = other DNA
gactgctgcaggtgccgttgcattgcatgtgtccggtagtttcccggacctgaatatgcaactgtgggcgataag

SEQ ID NO: 474148 - DNA, 75 bp, synthetic construct
  source 1..75: mol_type = other DNA
gtagccagtttggcgttgggccacagacggctgcaacactgctggcagttgcgggtgataaccccgaacgtttaa

SEQ ID NO: 474149 - DNA, 75 bp, synthetic construct
  source 1..75: mol_type = other DNA
gactataaagcgtcgggtaataacaagagtacatatgtacgttttaacagcgggttaaatttactggggtggcaa

SEQ ID NO: 474150 - DNA, 75 bp, synthetic construct
  source 1..75: mol_type = other DNA
ttccgaaacgtttgctgtgatgaatgcgccaggaattaaagatgcttattgtcaatgggcaaaaatatcgcacaa

SEQ ID NO: 474151 - DNA, 75 bp, synthetic construct
  source 1..75: mol_type = other DNA
ttatcatggggaattccttgtatcagtgccgattgtgtctccggacctgctgacattattcaatctgatgttaat

SEQ ID NO: 474152 - DNA, 75 bp, synthetic construct
  source 1..75: mol_type = other DNA
ttcagatgccagttttagcaaaacggataataatcctggtgagtggaaaagcaacacgctgtatctggagcatgg

SEQ ID NO: 474153 - DNA, 75 bp, synthetic construct
  source 1..75: mol_type = other DNA
cagtaaagattatcagttgagttattccaataatttgcaacggataagctataccctcgcggcaagtcaggcata

SEQ ID NO: 474154 - DNA, 75 bp, synthetic construct
  source 1..75: mol_type = other DNA
aatatatatgtctaactcaacgacgtttgatgatcaggggtttgcctcaaataatacgggattatcaggaaccgt

SEQ ID NO: 474155 - DNA, 75 bp, synthetic construct
  source 1..75: mol_type = other DNA
ccagaccgtggtaaaaggcattgcacaaatgcagactttacgcccggatgtggttatcggttttggcggcggctc

SEQ ID NO: 474156 - DNA, 75 bp, synthetic construct
  source 1..75: mol_type = other DNA
tcttgccacccgtggcaaaatgcataatgcatcgacgcttgcaggaatggcctttagccaggccggactcggttt

SEQ ID NO: 474157 - DNA, 75 bp, synthetic construct
  source 1..75: mol_type = other DNA
gcctggcgaatgcactcctgctcacgacggttattcgttttaatgctggcgatccgcgtgctgccaaacgctatg

SEQ ID NO: 474158 - DNA, 75 bp, synthetic construct
  source 1..75: mol_type = other DNA
cggtttctggatttggtggcatggaaacggttatccgcgatgtcattaataccttcaggcaacaacacatccaaa

SEQ ID NO: 474159 - DNA, 75 bp, synthetic construct
  source 1..75: mol_type = other DNA
ttttccaatgaccttacttgaatcgatgtcatgggggattccgtgtatcagtgccgattgtgtctccggtcctgg

SEQ ID NO: 474160 - DNA, 75 bp, synthetic construct
  source 1..75: mol_type = other DNA
tggaatttatgccgtttgttccgcacatccgctggtgctggaggctgcaatccgctacgccagtgcaaaccaaac

SEQ ID NO: 474161 - DNA, 75 bp, synthetic construct
  source 1..75: mol_type = other DNA
atcgcggcgcggtcgttctggtcaatttcgacaccgatcaacgcaaaccctggtttataaaagcattaagagtgg

SEQ ID NO: 474162 - DNA, 75 bp, synthetic construct
  source 1..75: mol_type = other DNA
acggacgcgggattgatgtcggacgtaccctactttcagggcaatcacacacaattatggatcatgcacacaata

SEQ ID NO: 474163 - DNA, 75 bp, synthetic construct
  source 1..75: mol_type = other DNA
agtggcaccgctgcggcttttaatgtaccaggcggcaccgaaacacgcccacgtaacattgcattcaacttttta

SEQ ID NO: 474164 - DNA, 75 bp, synthetic construct
  source 1..75: mol_type = other DNA
cgaatgcagctcctttatataccaacggaatcagtcagccgatagggggagctttacctgcattccaaaatcctg

SEQ ID NO: 474165 - DNA, 75 bp, synthetic construct
  source 1..75: mol_type = other DNA
gtggcagtcgccatggataatgcaattttagaaaatatcttgcggcaaatacgtccgctaattggtcagggtaaa

SEQ ID NO: 474166 - DNA, 75 bp, synthetic construct
  source 1..75: mol_type = other DNA
aaaggctctcgaaaaccttggtttgggagaaggtgctccagctattggcgttccgttcttctggccgtccgccgc

SEQ ID NO: 474167 - DNA, 75 bp, synthetic construct
  source 1..75: mol_type = other DNA
tgagggttatggcgcttataactggacattcgacgcatctcgctcagttcgcacagcatctgaaacccgctcccg

SEQ ID NO: 474168 - DNA, 75 bp, synthetic construct
  source 1..75: mol_type = other DNA
ccaatatgagccagtcattgccagaaggttgggggtctgtgtcattaagtacgttatggcgagattactgggggc

SEQ ID NO: 474169 - DNA, 75 bp, synthetic construct
  source 1..75: mol_type = other DNA
agggaaatgaaacgacagctggagcgaatttaacctggaacgcgccggttgcgacagtgaatggcagttatagtc

SEQ ID NO: 474170 - DNA, 75 bp, synthetic construct
  source 1..75: mol_type = other DNA
cacgttttggtctggcggcctggcgttattcgtcgcgtgattaccgcacatttaacgattatgtgtgggcaaata

SEQ ID NO: 474171 - DNA, 75 bp, synthetic construct
  source 1..75: mol_type = other DNA
aaaattttaccccacgagtgcaggggattgcgcagagtaacgcgctggtaaccattgaacaaaacggttttattg

SEQ ID NO: 474172 - DNA, 75 bp, synthetic construct
  source 1..75: mol_type = other DNA
acctatgttcgtttcaacagtgggttaaatttagtggggtggcaactgcattctgatgccagttttagcaaaaca

SEQ ID NO: 474173 - DNA, 75 bp, synthetic construct
  source 1..75: mol_type = other DNA
tgggaaatacgaggttatcgttaaggataatcccgaagaaacatgcctggcgagagaaattataaagcggttagg

SEQ ID NO: 474174 - DNA, 75 bp, synthetic construct
  source 1..75: mol_type = other DNA
ctattgccgttgacctggttgcagctcagctggtcatgagctggtggttcccggatacaccgggctggatctgga

SEQ ID NO: 474175 - DNA, 75 bp, synthetic construct
  source 1..75: mol_type = other DNA
attgccattagccactatcgcttccgtcgcggttacgtattgcagggacacgacattaacgatctgccgtaccgt

SEQ ID NO: 474176 - DNA, 75 bp, synthetic construct
  source 1..75: mol_type = other DNA
cggtgtaccacgtaatgcgctatatgccacgacggtgattgccggtctgtgcttcctgacctccatgtttggtaa

SEQ ID NO: 474177 - DNA, 75 bp, synthetic construct
  source 1..75: mol_type = other DNA
ctcagttcgtggctttggtgaagcggaatactggttctcactgatcaaagtcacgacagttattgtctttatcat

SEQ ID NO: 474178 - DNA, 75 bp, synthetic construct
  source 1..75: mol_type = other DNA
atctgccgtatcgctcgggcttcttcccgctgggaccgattttcgcctttgtgctgtgcctgattatcactctgg

SEQ ID NO: 474179 - DNA, 75 bp, synthetic construct
  source 1..75: mol_type = other DNA
gccagaactacgaagcgttcctgaaagacaccattgactggggcggcgtagcggcaacatatattggtatcccgc

SEQ ID NO: 474180 - DNA, 75 bp, synthetic construct
  source 1..75: mol_type = other DNA
aagcgccgggcttacgccgtgaattaaaggcgcgtcacctgacgatgattgccattggtggctccatcggtacgg

SEQ ID NO: 474181 - DNA, 75 bp, synthetic construct
  source 1..75: mol_type = other DNA
cagtcttggcgaactggcggcgtatatgccggtttctggttcgtttgcgacttacggtcagaactatgtggaaga

SEQ ID NO: 474182 - DNA, 75 bp, synthetic construct
  source 1..75: mol_type = other DNA
tggcgtctttccctttgatcgcgagcgccggagatttacaagttaagtgcggtcggtttgatataaaaatctatc

SEQ ID NO: 474183 - DNA, 75 bp, synthetic construct
  source 1..75: mol_type = other DNA
cgcgtctacccgtatgctgtacaccctggcgtgcgatggcaaagcgccgcgtattttctctaaactgtcgcgcgg

SEQ ID NO: 474184 - DNA, 75 bp, synthetic construct
  source 1..75: mol_type = other DNA
tctgctctctgcggcggcggtgatgaacgcagttattctgacggcggtgctgtcagcgggtaactccggtatgta

SEQ ID NO: 474185 - DNA, 75 bp, synthetic construct
  source 1..75: mol_type = other DNA
gcctgatggtttacttcctgatgaccagtctcggtgaattggctgcatatatgccggtttccggttcgtttgcca

SEQ ID NO: 474186 - DNA, 75 bp, synthetic construct
  source 1..75: mol_type = other DNA
ttaatcaacgcggatacggacgaggttaacgaactggcagttgccatgacgaacgcgctgtttctgtatcagacg

SEQ ID NO: 474187 - DNA, 75 bp, synthetic construct
  source 1..75: mol_type = other DNA
cccttactgatggatggaaatcagagtgcggaacatgcgcctggcccgcaattgccctccgtccgggcaagacag

SEQ ID NO: 474188 - DNA, 75 bp, synthetic construct
  source 1..75: mol_type = other DNA
catcgcaccgtctctgtctcagtggcgtgaggggcgtgaaagactgaactggctggttgtccggctgataccgtc

SEQ ID NO: 474189 - DNA, 75 bp, synthetic construct
  source 1..75: mol_type = other DNA
atgggcaggagcaacagaacacctcaattatgataactggacaacagaagataaagagcaatctccagagttctt

SEQ ID NO: 474190 - DNA, 75 bp, synthetic construct
  source 1..75: mol_type = other DNA
aaccgattgttatatggatgaaacaacgctgccgtctggcaaggtggttttacgccgtaataatgaatcaattat

SEQ ID NO: 474191 - DNA, 75 bp, synthetic construct
  source 1..75: mol_type = other DNA
agagaatctgcggggcattatgtggatactcttaatgatacccaactggctggcctggatgcggatgcactcaag

SEQ ID NO: 474192 - DNA, 75 bp, synthetic construct
  source 1..75: mol_type = other DNA
ctggattttcggtgcgccgccggcgggtgaaatcacggtagatgaaggggcaactgccgccattctggaacgcgg

SEQ ID NO: 474193 - DNA, 75 bp, synthetic construct
  source 1..75: mol_type = other DNA
gtgaaatcgatgattaaagccggtgcggcaggattgcatattgaagatcaggttggtgcgaaacgctgcggtcat

SEQ ID NO: 474194 - DNA, 75 bp, synthetic construct
  source 1..75: mol_type = other DNA
cacatgtatgaccagacctttcagcgcgccttcaaacgtgccgtagaacaagcaggcatcacgaagggcactgtt

SEQ ID NO: 474195 - DNA, 75 bp, synthetic construct
  source 1..75: mol_type = other DNA
cactgttgcaaagttagcgatgaggcagccttttgtcttattcaaaggccttacatttcaaaaactctgcttacc

SEQ ID NO: 474196 - DNA, 75 bp, synthetic construct
  source 1..75: mol_type = other DNA
gcggcgttgcgcttcccgacgcccttgagcggaagtatccgcgcgccgggcattcctggccgtggttctgggttt

SEQ ID NO: 474197 - DNA, 75 bp, synthetic construct
  source 1..75: mol_type = other DNA
gaccccggatgaagtggttcgcatcctcggttttctggaaggcgagcatcgtttgttcgcccagcttctgtatgg

SEQ ID NO: 474198 - DNA, 75 bp, synthetic construct
  source 1..75: mol_type = other DNA
ttctgcttttaacgttgcgcgtacggtgaaatcgatgattaaagccggtgcggcgggattgcatattgaagatca

SEQ ID NO: 474199 - DNA, 75 bp, synthetic construct
  source 1..75: mol_type = other DNA
gccagaaagaggtgatcgattcagtattgtcttgccctgcttgtggcaaacaactgaaaaaacttaaacgttcat

SEQ ID NO: 474200 - DNA, 75 bp, synthetic construct
  source 1..75: mol_type = other DNA
catgattctgtcagcgaaagaagagttggctaatgaaccgtacccgattgatggcctgtccggtgaatatgcgga

SEQ ID NO: 474201 - DNA, 75 bp, synthetic construct
  source 1..75: mol_type = other DNA
ggctgaaacacgcaatggctgtaactcttgatcatgtgtcggtcacggatgcagggcaggccggagttgctgcaa

SEQ ID NO: 474202 - DNA, 75 bp, synthetic construct
  source 1..75: mol_type = other DNA
ttattgcttctcgctcgtttatttcagggattatctgttggcggagaatatggcaccagcgccacctatatgagt

SEQ ID NO: 474203 - DNA, 75 bp, synthetic construct
  source 1..75: mol_type = other DNA
attggcagcattccgggagcgatgattgtcgggctgattctggtgctgctggtgatgccgaccggtattctgggt

SEQ ID NO: 474204 - DNA, 75 bp, synthetic construct
  source 1..75: mol_type = other DNA
catgctggcgctgacgattttcattcgctattcccgtatggggcgcgcgtgtcgtgcctgcgcggaagatctgaa

SEQ ID NO: 474205 - DNA, 75 bp, synthetic construct
  source 1..75: mol_type = other DNA
accgaccgggtgattgcgctgacctttgtgattggcgcggcaatggcggcggtggcgggcgtactgctcggtcag

SEQ ID NO: 474206 - DNA, 75 bp, synthetic construct
  source 1..75: mol_type = other DNA
gtccgcgcctggtttttagcaaatcgcgcgggtgaacctgccgatctggtggactgtattgctggcaccatcgtc

SEQ ID NO: 474207 - DNA, 75 bp, synthetic construct
  source 1..75: mol_type = other DNA
tactggagctgctggtacgcacgttccgcgatctgcgggccaacggtgagaagaaaacgtcaatggataccctga

SEQ ID NO: 474208 - DNA, 75 bp, synthetic construct
  source 1..75: mol_type = other DNA
catcatgttgctgctgctaattgtgccgataatgtggttccacaagcatcagcaaaaaagtgtgggagaacacgg

SEQ ID NO: 474209 - DNA, 75 bp, synthetic construct
  source 1..75: mol_type = other DNA
actgccagtaaagatatgctggttaaaatttccgtgacacctgatgatggacgtcagttaaaagggacactggaa

SEQ ID NO: 474210 - DNA, 75 bp, synthetic construct
  source 1..75: mol_type = other DNA
atcgcagtctggagcccggaactggatgatgccggtaactcgcttgcgggcattgctgtccttgaacaattgcga

SEQ ID NO: 474211 - DNA, 75 bp, synthetic construct
  source 1..75: mol_type = other DNA
acgtatgttagtcactcttgctaccggccgcggtttgatgttggtgggggaaccgggtaccgcaaaatctcttct

SEQ ID NO: 474212 - DNA, 75 bp, synthetic construct
  source 1..75: mol_type = other DNA
ggaaatatttcagccaccgatgcttttctggctgaaattcgtgcggaagcacgcaacgaggggattaactatacc

SEQ ID NO: 474213 - DNA, 75 bp, synthetic construct
  source 1..75: mol_type = other DNA
ccacaacagccacaacagccacaacagccacaacagccacaacagccacaacagccgcaacagccggtgtctcct

SEQ ID NO: 474214 - DNA, 75 bp, synthetic construct
  source 1..75: mol_type = other DNA
agtcagattcaggtgtgaatgttccggcaggggggatcgagcaggagctgaaaatgaaaccggaagaagagatgg

SEQ ID NO: 474215 - DNA, 75 bp, synthetic construct
  source 1..75: mol_type = other DNA
ggatatccagcagaagatgcagcgtcgtgaagaggtgaacatcaatgtgcaccgggagcgcggggagaatgttga

SEQ ID NO: 474216 - DNA, 75 bp, synthetic construct
  source 1..75: mol_type = other DNA
aagaacagttactcccaaaacgcacgatggtatgattgaatccctgcgggtactaaaaacttgccgcaaaacagc

SEQ ID NO: 474217 - DNA, 75 bp, synthetic construct
  source 1..75: mol_type = other DNA
ggagcctgtatttctccacaacacgacaaggttaccagcggatgctggcctggatgacctcatttggggcattaa

SEQ ID NO: 474218 - DNA, 75 bp, synthetic construct
  source 1..75: mol_type = other DNA
tgctgaatgtgccgctcacgccgcattctccggaataagaaccgtcacacccaaaacgcgcaatggcatgattga

SEQ ID NO: 474219 - DNA, 75 bp, synthetic construct
  source 1..75: mol_type = other DNA
atgccaatgaccgaaagaataagagcaggcaagctatttaccgatatgtgcgaaggcttaccggaaaaaagactt

SEQ ID NO: 474220 - DNA, 75 bp, synthetic construct
  source 1..75: mol_type = other DNA
atttaccgatatgtgcgaaggcttacctgaaaaaagacttcgtgggaaaacgttaatgtatgagtttaatcactc

SEQ ID NO: 474221 - DNA, 75 bp, synthetic construct
  source 1..75: mol_type = other DNA
gcaggctggtgttgctgcaatgattatcaatgatgccctacaccacagcgaaactccagctaccgatgcttttct

SEQ ID NO: 474222 - DNA, 75 bp, synthetic construct
  source 1..75: mol_type = other DNA
atgcctttagcagccagattaaacgacaaaggcactcagcacgacggttattacgagactgtcatcaccgccggg

SEQ ID NO: 474223 - DNA, 75 bp, synthetic construct
  source 1..75: mol_type = other DNA
ccacaacagccacaacagccacaacagccagtgtcttctgtcatcaatgataagaagtcagatgcaggtgtgagt

SEQ ID NO: 474224 - DNA, 75 bp, synthetic construct
  source 1..75: mol_type = other DNA
atgtctcgacaactgaagattagcctcttacgtgccgaaaggcaaggagaagcaggctatgaagcagcaaaaggc

SEQ ID NO: 474225 - DNA, 75 bp, synthetic construct
  source 1..75: mol_type = other DNA
agtgacagcgaacttgatgcggcattttattcaatagttgttatgcttgatgaggttatattgtgttctgaactt

SEQ ID NO: 474226 - DNA, 75 bp, synthetic construct
  source 1..75: mol_type = other DNA
tccgatgatcgagatcaacggaaactgcaaaatcatcggcgtagttgtcgatgcaaaactagcaaaccttccata

SEQ ID NO: 474227 - DNA, 75 bp, synthetic construct
  source 1..75: mol_type = other DNA
cctgaagtagaacctcgtaatgggaagctggtagtggcaaagctcgaaggagaaaacgaggcaactttcaagaag

SEQ ID NO: 474228 - DNA, 75 bp, synthetic construct
  source 1..75: mol_type = other DNA
gcattctactggtggaacagagtttttcaatatccttaataaagttattgagtctaaaagtcaggcaggatgggt

SEQ ID NO: 474229 - DNA, 75 bp, synthetic construct
  source 1..75: mol_type = other DNA
caatatttaaactcatatcatctattaaagtatttcctgaggagtatggaaactatgatactacaagaaagtata

SEQ ID NO: 474230 - DNA, 75 bp, synthetic construct
  source 1..75: mol_type = other DNA
tcatctgttaaagtctttccagaagaatatggtgattacgacagtaccagaaagcagataattgatactgttgaa

SEQ ID NO: 474231 - DNA, 75 bp, synthetic construct
  source 1..75: mol_type = other DNA
tcggcacaccgtttgatgtcaccggtaaaacggtgatggccactattctgtttatgctttacggactgtttttca

SEQ ID NO: 474232 - DNA, 75 bp, synthetic construct
  source 1..75: mol_type = other DNA
tcaagtacaaccgagacagcaaaggcgagcgtcatgtaatagttaacggcgtcctgatggtgaaacagggcaaga

SEQ ID NO: 474233 - DNA, 75 bp, synthetic construct
  source 1..75: mol_type = other DNA
gtacagacgtttgcgaccgattctgaaccgcccgcgaaaaaagcggcacaggattttctgactcgctttgcgcag

SEQ ID NO: 474234 - DNA, 75 bp, synthetic construct
  source 1..75: mol_type = other DNA
tcggtacgccgttcgatgtcaccggtaaaacggtgatggccactatcctgtttatgctttatggactgtttttca

SEQ ID NO: 474235 - DNA, 75 bp, synthetic construct
  source 1..75: mol_type = other DNA
gcgccaactgatcttcatctacccaagcgcactggcagtagtcaccattgtggcaatgggttgcttctacagtct

SEQ ID NO: 474236 - DNA, 75 bp, synthetic construct
  source 1..75: mol_type = other DNA
aggccgaccataccatcgaaggtttgcgtcagttgatcttcatctacccaagcgcgctggcggtaataaccattg

SEQ ID NO: 474237 - DNA, 75 bp, synthetic construct
  source 1..75: mol_type = other DNA
tggatacactgacagcgattatgtccaccgctgaagccgttaacgtggcccatgctgtgggtgtccgcgcctggt

SEQ ID NO: 474238 - DNA, 75 bp, synthetic construct
  source 1..75: mol_type = other DNA
agttcggtattaaaaaaagcgggaatcgatcactgtcgggctattctggcgctcagtgataacgatgcagataac

SEQ ID NO: 474239 - DNA, 75 bp, synthetic construct
  source 1..75: mol_type = other DNA
gcattaccgttttcgccacctccatgacctctatttttggtcctcttatccgaggaggattcaataaacttgtga

SEQ ID NO: 474240 - DNA, 75 bp, synthetic construct
  source 1..75: mol_type = other DNA
atttatgctcggcgtctttcttgtcctgaactccattggcttactgttccgggcaaagctcgcatgggcaatcag

SEQ ID NO: 474241 - DNA, 75 bp, synthetic construct
  source 1..75: mol_type = other DNA
cgttcgtgttgcagaaggaatttggctttagtccaatgcaatttagcctggtgtttggccttaacggcatcggac

SEQ ID NO: 474242 - DNA, 75 bp, synthetic construct
  source 1..75: mol_type = other DNA
aatttactttctggcgacggaagagattatttatttgattatggcctatccgaaaaatgccaaagatagtctgac

SEQ ID NO: 474243 - DNA, 75 bp, synthetic construct
  source 1..75: mol_type = other DNA
ttaaaggaattgcaaaaagaactcatcggaactcccgataaaggtgatctcattcagcagactggtggattgcgt

SEQ ID NO: 474244 - DNA, 75 bp, synthetic construct
  source 1..75: mol_type = other DNA
gcaacttcccaggccctgcagcagaccctgcacagtcgggtaattctgaagctgatgataaaattaatcaacgcg

SEQ ID NO: 474245 - DNA, 75 bp, synthetic construct
  source 1..75: mol_type = other DNA
attccgcataaagtgcctgacgcggtactggagttactggtacgcaccttccgcgatctgcgtgccaacggcgaa

SEQ ID NO: 474246 - DNA, 75 bp, synthetic construct
  source 1..75: mol_type = other DNA
actgccaatacccgcgatcgcggcgtcaatgaaatgagtgctgcgctaaagcgtcgcttcgattttgaaactgtc

SEQ ID NO: 474247 - DNA, 75 bp, synthetic construct
  source 1..75: mol_type = other DNA
gagcaaaactggcatgggcaatcagtattattttgttgttgattacgctgatctacaccttgcatttttatccct

SEQ ID NO: 474248 - DNA, 75 bp, synthetic construct
  source 1..75: mol_type = other DNA
tggcaaaaatggtttaacaccaacttttaacgagaaaggtatgtatgctgccttttcaacatcattacaatcagc

SEQ ID NO: 474249 - DNA, 75 bp, synthetic construct
  source 1..75: mol_type = other DNA
cccctcactttgaagggatcggagctataaaaatggtgttatccggcttcctgcattgcgggttttcgaaagaat

SEQ ID NO: 474250 - DNA, 75 bp, synthetic construct
  source 1..75: mol_type = other DNA
ctcttggtaatatggacgataaagaactctctgcctttggggataaagcccgccgtctgaaccttgatattcata

SEQ ID NO: 474251 - DNA, 75 bp, synthetic construct
  source 1..75: mol_type = other DNA
atgacgactgtaacatcagcccaggcgaataagctgtatcaggtggcgctttttactgctgccaaccgcaaccgc

SEQ ID NO: 474252 - DNA, 75 bp, synthetic construct
  source 1..75: mol_type = other DNA
accagcgcgggtgcgccggttgtccgtatcacagaccttaacaaacaggccggtgatgaagtgaccttcagcatc

SEQ ID NO: 474253 - DNA, 75 bp, synthetic construct
  source 1..75: mol_type = other DNA
cgtgtttcatctgtcgtcctccagtacactgctggcctgggatcttctgtgccttggacgtccggtcatcggaga

SEQ ID NO: 474254 - DNA, 75 bp, synthetic construct
  source 1..75: mol_type = other DNA
agcggcacttaggtcgttttcctaccggtattggccttacttcagaggctaaatttgatcgtttggagatcctct

SEQ ID NO: 474255 - DNA, 75 bp, synthetic construct
  source 1..75: mol_type = other DNA
caagtataagtgctattgccagggaattccgaaccacacggcaaacaattctgagagttagatcgaaacagaaaa

SEQ ID NO: 474256 - DNA, 75 bp, synthetic construct
  source 1..75: mol_type = other DNA
gttaacgtggtcatcctttatccgcgcggcaaaatcagcccactgcaagaaaaactgttttgtacgctggggggc

SEQ ID NO: 474257 - DNA, 75 bp, synthetic construct
  source 1..75: mol_type = other DNA
cagattttccggagaacgtggtgacggcagttgaaaccaatgtgttgaggttgcacggtcggttaagccgagaat

SEQ ID NO: 474258 - DNA, 75 bp, synthetic construct
  source 1..75: mol_type = other DNA
tctacgccaaaggtaagtcgttcacaggcgagtttgatgacacggggataactgtcagtgtatacgttttcaaac

SEQ ID NO: 474259 - DNA, 75 bp, synthetic construct
  source 1..75: mol_type = other DNA
gcatctctcttcgctgatatcctgcgtggaaaagggtatacgaacacgatttgctgcgacttcataaagtggtct

SEQ ID NO: 474260 - DNA, 75 bp, synthetic construct
  source 1..75: mol_type = other DNA
ccgttacagccggtgcgtctgtccggagatgaactgcatggcgaagatccgtattacgtcctgtacgttacgccg

SEQ ID NO: 474261 - DNA, 75 bp, synthetic construct
  source 1..75: mol_type = other DNA
catgtccttcaggtgttgcccatacttatatggcggcagaggcgctggaaagcgccgcgaaagcgaaaggctggg

SEQ ID NO: 474262 - DNA, 75 bp, synthetic construct
  source 1..75: mol_type = other DNA
cgtagcaacccgtttaatcagtacaaggcgacacagacgcgcccagcgtctttttttgtgtcatgccatcgcgca

SEQ ID NO: 474263 - DNA, 75 bp, synthetic construct
  source 1..75: mol_type = other DNA
gatgatggttcgggccgtgaaccgtgcaaaaggttttaatcatccgctgttcaaaggtgaatgtgcgatgtggcg

SEQ ID NO: 474264 - DNA, 75 bp, synthetic construct
  source 1..75: mol_type = other DNA
caatcagaccgaagtggcgaggatgctttcctgcgcaagaggaacagtgctcaagtacaaccgagacagcaaagg

SEQ ID NO: 474265 - DNA, 75 bp, synthetic construct
  source 1..75: mol_type = other DNA
tttctgcgacccgcctatcggcacaggttacggtgccaaaacaggtgcagatgctgttacaacccggcagtgata

SEQ ID NO: 474266 - DNA, 75 bp, synthetic construct
  source 1..75: mol_type = other DNA
ggcagataaagaactctctgcctttggcgataaagctcgccgtctgaaccttgatattcatattgaaaccagtgc

SEQ ID NO: 474267 - DNA, 75 bp, synthetic construct
  source 1..75: mol_type = other DNA
tgcgcggttacgtaaagaaaaagaagatgcaattaatcagataaatcatgtgcgtaacgtactacaacaaatcaa

SEQ ID NO: 474268 - DNA, 75 bp, synthetic construct
  source 1..75: mol_type = other DNA
gggccataaagcctgtatttcaggtcagggagatatgcccttcaaagcgttattaacgcaccttatctgcctggg

SEQ ID NO: 474269 - DNA, 75 bp, synthetic construct
  source 1..75: mol_type = other DNA
tttgcgatgaataactggtccttcctgcagtcaggaagtattggtatcgatcgcaaagatattgaaaaagtattt

SEQ ID NO: 474270 - DNA, 75 bp, synthetic construct
  source 1..75: mol_type = other DNA
ggatcactgacctcaacaaacaggccggtgatgaagtgacgttcagcatcatgcacaaactctctaaacgtccga

SEQ ID NO: 474271 - DNA, 75 bp, synthetic construct
  source 1..75: mol_type = other DNA
ttctcagggagtttagtctccaggatttccggggcggttcaggtgatgaagtgaccttcagcatcatgcacaaac

SEQ ID NO: 474272 - DNA, 75 bp, synthetic construct
  source 1..75: mol_type = other DNA
aacgcactggtggctaccatggcggacgctctgcagccgtacacagcgatgacgaacgaactgccggagtatccg

SEQ ID NO: 474273 - DNA, 75 bp, synthetic construct
  source 1..75: mol_type = other DNA
ctgtagatcgttacaggaaacatcttccggtacaaaatgatggcaccacgaacctcaaatcacgtagccgcttca

SEQ ID NO: 474274 - DNA, 75 bp, synthetic construct
  source 1..75: mol_type = other DNA
ggcagttaaaaacgatggaacaccaaacctcaaatcacgtagccgcttcacgcaatatcatttcaggctggcccg

SEQ ID NO: 474275 - DNA, 75 bp, synthetic construct
  source 1..75: mol_type = other DNA
gtgcagcgggtgattttcgtcactggctactacggtctgacgcaggggctgctatctgtcctgcgtcttttctgg

SEQ ID NO: 474276 - DNA, 75 bp, synthetic construct
  source 1..75: mol_type = other DNA
tttcgatgcaatcactattactcaaagcaggtttaaacactgaacaggttgcacaactggagtccgaaaatgaag

SEQ ID NO: 474277 - DNA, 75 bp, synthetic construct
  source 1..75: mol_type = other DNA
ctggcggcaatatgtgccgcatcagttcctgttcgcagaaatactgaccacgctcggtcatattaatcgttcagc

SEQ ID NO: 474278 - DNA, 75 bp, synthetic construct
  source 1..75: mol_type = other DNA
accgctatttttattgcggcgattatctctatcttcatcctcggcgtgggcatcaagaaagggattggcgtcttt

SEQ ID NO: 474279 - DNA, 75 bp, synthetic construct
  source 1..75: mol_type = other DNA
gcaggcgaaaaaacactacggctccatgtacgaacccatcctgatgatggtgaaagacgcaaagaactacacatt

SEQ ID NO: 474280 - DNA, 75 bp, synthetic construct
  source 1..75: mol_type = other DNA
ggctaaactttggcttgatggttaaccgcatcgtgcagcgggtgattttcgtcactggctactacggtctgacgc

SEQ ID NO: 474281 - DNA, 75 bp, synthetic construct
  source 1..75: mol_type = other DNA
aaacactcactgctgtgttagccggaggatggcttggacttattattctgtttattgtggcaaggattagaatgt

SEQ ID NO: 474282 - DNA, 75 bp, synthetic construct
  source 1..75: mol_type = other DNA
ccatgtaaaggatgaccctcgatggcaatggaaagggatcattcagaatattcaggaagacgtgcaggaagttat

SEQ ID NO: 474283 - DNA, 75 bp, synthetic construct
  source 1..75: mol_type = other DNA
attggtacggcgcatggcctgtacaggaaaataccgaaaattgattttcagcggctggcggaaattcgtgaaatg

SEQ ID NO: 474284 - DNA, 75 bp, synthetic construct
  source 1..75: mol_type = other DNA
cgaagctgaacgtgaattgagcagtcgctttggtattcgcagtattccgacgatcatgattttcaaaaatggtca

SEQ ID NO: 474285 - DNA, 75 bp, synthetic construct
  source 1..75: mol_type = other DNA
gatgatctacctgtggtgatcgacttctgggcaccgtggtgcggcccctgccgtaatttcgcaccaatttttgaa

SEQ ID NO: 474286 - DNA, 75 bp, synthetic construct
  source 1..75: mol_type = other DNA
tttccgtcgatctttcccggctttctgcctatcgcctgcgtgaagcccagggtgaaggccaatattgcaccgccg

SEQ ID NO: 474287 - DNA, 75 bp, synthetic construct
  source 1..75: mol_type = other DNA
gctggcgttcgccttcgtcaccaactattccggtatgtccaccacgctggagctggtactggcaggtacaggcgt

SEQ ID NO: 474288 - DNA, 75 bp, synthetic construct
  source 1..75: mol_type = other DNA
gcgatcctgaaaaagggattaaatatccccttttcgataatacgctttacccggatatcgcaattctcgatccct

SEQ ID NO: 474289 - DNA, 75 bp, synthetic construct
  source 1..75: mol_type = other DNA
ttttcttatgtggcaatcgtcatttcacacatacccgcggcgttaacaaaaaagtactgcgtgcgacaaactttc

SEQ ID NO: 474290 - DNA, 75 bp, synthetic construct
  source 1..75: mol_type = other DNA
cacgtcgtgatggcggtttctcgctgatgtatgcggcgggtaacgtggggtctattatcgcacctatcgcctgtg

SEQ ID NO: 474291 - DNA, 75 bp, synthetic construct
  source 1..75: mol_type = other DNA
ccggatatagcggttcttgatccctcgctggtcgtcagtgtgccagccgcgataactgccaataccggaatggat

SEQ ID NO: 474292 - DNA, 75 bp, synthetic construct
  source 1..75: mol_type = other DNA
gataacggccaataccggaatggatgttttaactcatgcgcttgaagcttatgtatccccacgtgccagcgactt

SEQ ID NO: 474293 - DNA, 75 bp, synthetic construct
  source 1..75: mol_type = other DNA
aaatcatgcaattgctcatcaactcggtgggcagtttcatctgccacacggcctggcgaatgcgctcctgctcac

SEQ ID NO: 474294 - DNA, 75 bp, synthetic construct
  source 1..75: mol_type = other DNA
cttatattgtcttattcagacactcatgaagatggtgtcaacaatattaaaatgagatatatttataacaataag

SEQ ID NO: 474295 - DNA, 75 bp, synthetic construct
  source 1..75: mol_type = other DNA
attgcacaattacatacaattttgcctaaagacaatgttgccactgttgttacagttgacgaaatgaaggttgtc

SEQ ID NO: 474296 - DNA, 75 bp, synthetic construct
  source 1..75: mol_type = other DNA
ttggcactctccataatgacctgaagcttcccgaaaaaatatttggttttattctgcgtaaggaactccgtatac

SEQ ID NO: 474297 - DNA, 75 bp, synthetic construct
  source 1..75: mol_type = other DNA
gacctgaaagagcagatacgccagggtaatgttatcgccgggcagcagctggcactggcggcacgacagtattac

SEQ ID NO: 474298 - DNA, 75 bp, synthetic construct
  source 1..75: mol_type = other DNA
tctctcaaaacccggaagccatgacatttatctggcgctgcctgtcatcagcgatattacctgtgaaattgaggg

SEQ ID NO: 474299 - DNA, 75 bp, synthetic construct
  source 1..75: mol_type = other DNA
gactcgccggcctcggcctattcaatggcaaaagcgggtctgcatgccctgacgcgtaatctggcgattgagctg

SEQ ID NO: 474300 - DNA, 75 bp, synthetic construct
  source 1..75: mol_type = other DNA
atgagcattatctccaccaaatatctgttacaagacgcccaggccaatggctacgcggtgcctgcgtttaacatc

SEQ ID NO: 474301 - DNA, 75 bp, synthetic construct
  source 1..75: mol_type = other DNA
attttatgatgcggggcggaaatattcttgtgttgcaaaaaatactggggcatagcgatataaaaatgactatgc

SEQ ID NO: 474302 - DNA, 75 bp, synthetic construct
  source 1..75: mol_type = other DNA
caagtgttgcaaaagccatcgctgaaatattaggcgcaacgaataaaaaggacggttacattgagtgcggtagtg

SEQ ID NO: 474303 - DNA, 75 bp, synthetic construct
  source 1..75: mol_type = other DNA
gcgagaagatgaactgccaattatccccgaaaaatggattattaatcctcgtgaagatgctgagaaacagctgaa

SEQ ID NO: 474304 - DNA, 75 bp, synthetic construct
  source 1..75: mol_type = other DNA
ccattggtattcctgtgctgttcgtgggtacacctaaagctagagacatctttgatcttgatctacgttccagtc

SEQ ID NO: 474305 - DNA, 75 bp, synthetic construct
  source 1..75: mol_type = other DNA
atgacgttgtttgccgtactgttggcaacgcttattcatcattttggcgagcaaattattgatttcgtcgcgggt

SEQ ID NO: 474306 - DNA, 75 bp, synthetic construct
  source 1..75: mol_type = other DNA
aatgactatgcgttatgcgcattttgctccaggtcatttagaggctgctgttgaattgaacccttttgacaatag

SEQ ID NO: 474307 - DNA, 75 bp, synthetic construct
  source 1..75: mol_type = other DNA
taagaacatacctggctcagttttatccagtgcatgaatataaagcgacgacaattgttattgatgttaatggtg

SEQ ID NO: 474308 - DNA, 75 bp, synthetic construct
  source 1..75: mol_type = other DNA
tatctgcctgtcatcattcacactcaacaagaggcgatgatttcaggctgcaatggtttttattttggcaacgag

SEQ ID NO: 474309 - DNA, 75 bp, synthetic construct
  source 1..75: mol_type = other DNA
aaatcacatgatgtaagaatgaaggaattaaaaacatttttaaacaaagatataaccagttgctttgaaaaaact

SEQ ID NO: 474310 - DNA, 75 bp, synthetic construct
  source 1..75: mol_type = other DNA
ctgctcgcgctgaattgatggcgattaatccagcctggccgaaagcggcattattcaccaccgtgatgcctttta

SEQ ID NO: 474311 - DNA, 75 bp, synthetic construct
  source 1..75: mol_type = other DNA
atgagagtgtttattgcagaaaagccaaatgttgcgaaagcgattgccgctgtgttaggcgcaaccaacaaaaaa

SEQ ID NO: 474312 - DNA, 75 bp, synthetic construct
  source 1..75: mol_type = other DNA
gaaaaatttgtacgagagcagattaaggttattaatgccggagctatcaaagttgccggtggtgtgcaaatttct

SEQ ID NO: 474313 - DNA, 75 bp, synthetic construct
  source 1..75: mol_type = other DNA
atcccgcgataggctatatcttccagaatgatattttggcgttaaagcaggcattttcactgcctgatattgatt

SEQ ID NO: 474314 - DNA, 75 bp, synthetic construct
  source 1..75: mol_type = other DNA
agaccttgccagaaaataaaaggggctcatcattgctattaaccggacgaagcgtggtgcagaaccgccgtttta

SEQ ID NO: 474315 - DNA, 75 bp, synthetic construct
  source 1..75: mol_type = other DNA
tggcgttttattcaagggatcgcgggggcgggtggttcggtgctctctcgttctattgctcgtgacaaatatcag

SEQ ID NO: 474316 - DNA, 75 bp, synthetic construct
  source 1..75: mol_type = other DNA
tttcttccattttgtgcgcgacaacgaacaatatttactggctggtggtctggcgttttattcaagggatcgcgg

SEQ ID NO: 474317 - DNA, 75 bp, synthetic construct
  source 1..75: mol_type = other DNA
tgttacaggacgcccaggccaatggttacgcggtgcctgcatttaacatccataacgccgagacgatccaggcga

SEQ ID NO: 474318 - DNA, 75 bp, synthetic construct
  source 1..75: mol_type = other DNA
aaactctgttaaaaatgagcctggcaattacggtgtgttacacgctggcattgctggttgcactcaccagaatcg

SEQ ID NO: 474319 - DNA, 75 bp, synthetic construct
  source 1..75: mol_type = other DNA
cgcttttaatgacggtgaatggcctggcaccggtgttgtcgccagtgctgggcggttacattgtcagcgcctttg

SEQ ID NO: 474320 - DNA, 75 bp, synthetic construct
  source 1..75: mol_type = other DNA
tgctgacgatccggcgacgacccgcgatatccctgggttttgtacctttatggaacacgaactggttgccaaaga

SEQ ID NO: 474321 - DNA, 75 bp, synthetic construct
  source 1..75: mol_type = other DNA
cattgattcttggtcttttagccggtatcggcccgatgtgtactgacctttatttgcccgcattacctgagatgt

SEQ ID NO: 474322 - DNA, 75 bp, synthetic construct
  source 1..75: mol_type = other DNA
gaagctcagatggagcgtaaagagtccgcgtttaatcaaattgagtttaataaattacttcttgaatgcgttgta

SEQ ID NO: 474323 - DNA, 75 bp, synthetic construct
  source 1..75: mol_type = other DNA
acccgcggcacgaccaacttctcatgctgattgcggagcgtgggtatatgaatatcgatgagctggcaaatctgt

SEQ ID NO: 474324 - DNA, 75 bp, synthetic construct
  source 1..75: mol_type = other DNA
ctagatctggttgctgctcagctaaacaacagaccgagaaagacactgaagttcaaaatgtcaacgacggatgaa

SEQ ID NO: 474325 - DNA, 75 bp, synthetic construct
  source 1..75: mol_type = other DNA
gccaagcgtctacgctctaatgtacgtgagctggaaggggcgctgaatcgcgtcattgccaacgctaattttacc

SEQ ID NO: 474326 - DNA, 75 bp, synthetic construct
  source 1..75: mol_type = other DNA
aattcacgaacgttcccgaaatgtcgataacagacgctctctggggcattgggagggcgatttagtctcaggtac

SEQ ID NO: 474327 - DNA, 75 bp, synthetic construct
  source 1..75: mol_type = other DNA
catgggacagaggaatggaactggccagacatctagaatttactgtcagcaccggcgttaaagtttacttctgcg

SEQ ID NO: 474328 - DNA, 75 bp, synthetic construct
  source 1..75: mol_type = other DNA
ctgagacaatttataaaacgctgtactttcgtagccgtgaagcgctacaccacctgaatatacagcatctgcgac

SEQ ID NO: 474329 - DNA, 75 bp, synthetic construct
  source 1..75: mol_type = other DNA
ttgttctggaaaagctggagatgcaatggtctccagagcaaatatcaggatggttaaggcgaacaaaaccacgtc

SEQ ID NO: 474330 - DNA, 75 bp, synthetic construct
  source 1..75: mol_type = other DNA
cgtgcgatagctactgcgctgaatcgcagtccttcgacgatctcacgtgaagttcagcgtaatcggggcagacgc

SEQ ID NO: 474331 - DNA, 75 bp, synthetic construct
  source 1..75: mol_type = other DNA
cctgattaccactataaaaaggctgctattgagtatgttgctcagatgctcatatcaaatatcggtaatcttgag

SEQ ID NO: 474332 - DNA, 75 bp, synthetic construct
  source 1..75: mol_type = other DNA
cggtatacgttgctattcgaatcgttcgttctctcatggctgaaaatcagcaccgttgatgctgtcaggaagcaa

SEQ ID NO: 474333 - DNA, 75 bp, synthetic construct
  source 1..75: mol_type = other DNA
aacatgaactagatctggttgctgctcagctaaaggtaactgttacgacaacgctccgatggaaagcttctgggg

SEQ ID NO: 474334 - DNA, 75 bp, synthetic construct
  source 1..75: mol_type = other DNA
ctctacttgccgagcggattgagcaagggctgtatcgtcacggggagaaattgccgtcggtgcgcagcttaagcc

SEQ ID NO: 474335 - DNA, 75 bp, synthetic construct
  source 1..75: mol_type = other DNA
accgacaaattcctgagtttaccgtcagaactcagaaaatcactgacccgcctgggattaagattactgcattcc

SEQ ID NO: 474336 - DNA, 75 bp, synthetic construct
  source 1..75: mol_type = other DNA
acaacagaccgagaaagacactgaagctcaaaacaccgaaagagataattgaaaggggtgttgcattgacagatt

SEQ ID NO: 474337 - DNA, 75 bp, synthetic construct
  source 1..75: mol_type = other DNA
ctgaaccttttaccctcggtattgaactggaaatgcaggtggttaatccgccgggctatgacttaagccaggact

SEQ ID NO: 474338 - DNA, 75 bp, synthetic construct
  source 1..75: mol_type = other DNA
gaccaaggtgacccgctcggccctgcagcacgccgcttccgtcgccggccttgcgatcacgaccgaagtggtcgt

SEQ ID NO: 474339 - DNA, 75 bp, synthetic construct
  source 1..75: mol_type = other DNA
caggtgcagttgtgcatatcggattgcctatcaccgctgaattcgaaacactggacatcaatatcaatgggcagg

SEQ ID NO: 474340 - DNA, 75 bp, synthetic construct
  source 1..75: mol_type = other DNA
tacatcgccaggtcgccagcggtctgaatgaagcacagttgatgcgtgatttcgttgccgatggcggctcgctga

SEQ ID NO: 474341 - DNA, 75 bp, synthetic construct
  source 1..75: mol_type = other DNA
ctcattcaacaggcgaccgtttttggtcagcatgtccatgttggttgcgccagtggcgatgacgccatttatttg

SEQ ID NO: 474342 - DNA, 75 bp, synthetic construct
  source 1..75: mol_type = other DNA
ccgtttcagaaatggcagcgtcaggaggtatgcgacaacgaacgctatcaacgaacgctggaaaactttggttat

SEQ ID NO: 474343 - DNA, 75 bp, synthetic construct
  source 1..75: mol_type = other DNA
cggtctgagctatgacggacgcaatacctcaacacgtactatgaccatcagcggaggcagtggtgactggagcta

SEQ ID NO: 474344 - DNA, 75 bp, synthetic construct
  source 1..75: mol_type = other DNA
ggtgcgcgatctggcctattccttcgacgtcgacggataccaaggtactgacctgaccatactggcaaaccacct

SEQ ID NO: 474345 - DNA, 75 bp, synthetic construct
  source 1..75: mol_type = other DNA
caacggctacccgagcacggttgtttactatcagcagcgcctgtatttcgccgcgtccaccgcgtatccacaaac

SEQ ID NO: 474346 - DNA, 75 bp, synthetic construct
  source 1..75: mol_type = other DNA
cagtaatactgcggtagtcgtgcgcttcaatcgtaatgttccggcggtactgcgcaatgcggccacaactaactg

SEQ ID NO: 474347 - DNA, 75 bp, synthetic construct
  source 1..75: mol_type = other DNA
gttaaggttcgccaacttgatcctttgccgctgtcagtgcttgctgttcttcctcgacttaccgtcggaggcttc

SEQ ID NO: 474348 - DNA, 75 bp, synthetic construct
  source 1..75: mol_type = other DNA
tacgacgatccggttgatgacgctaccgggaaggtggaagtgaagctcgacagcaactgggacaagaacggacgc

SEQ ID NO: 474349 - DNA, 75 bp, synthetic construct
  source 1..75: mol_type = other DNA
agactcgcacgcctaatccccacgataacaaaatgaaaaaagcattacgctatattgatgcgcatttatcagacg

SEQ ID NO: 474350 - DNA, 75 bp, synthetic construct
  source 1..75: mol_type = other DNA
cgtcccggaatgcgtcacccgccgtcaggcggtggttaatcaggcccgcagcctgctgaaaaacaacacgcacga

SEQ ID NO: 474351 - DNA, 75 bp, synthetic construct
  source 1..75: mol_type = other DNA
cgtcccggaattcgtcacccgccgtcaggcggtggttaatcaggcccgcatcctgctgaaaaacaacacgcacga

SEQ ID NO: 474352 - DNA, 75 bp, synthetic construct
  source 1..75: mol_type = other DNA
cggaagaccagcggactgaatccggtgtttcttccggtgcggcgatggagattatcaaatacgtgagtgaaaacc

SEQ ID NO: 474353 - DNA, 75 bp, synthetic construct
  source 1..75: mol_type = other DNA
gagggataggcacggcgacgtttggggcgattttactcaatgcgttgttaagcaaaaagcaggtaaaagttcctc

SEQ ID NO: 474354 - DNA, 75 bp, synthetic construct
  source 1..75: mol_type = other DNA
gtctggtccccggaagagattcaggcactggctgacggtatggaaatttctctgaccgatcatgaaatcaggact

SEQ ID NO: 474355 - DNA, 75 bp, synthetic construct
  source 1..75: mol_type = other DNA
attatcagcaacgtgagcgaaaaccgccaggtggccgttcctgctgaactgctggcgtccctgattcagaccgct

SEQ ID NO: 474356 - DNA, 75 bp, synthetic construct
  source 1..75: mol_type = other DNA
atgtacggaacatgcgaaacgctatgccggtagctggcagcaaagtatacgggagacacgccgctgatgctggtt

SEQ ID NO: 474357 - DNA, 75 bp, synthetic construct
  source 1..75: mol_type = other DNA
ccttgtcaaagccacaacggaggctgccacgcgtggccttgacacgctgggtaaccgctacacggcgatgattgc

SEQ ID NO: 474358 - DNA, 75 bp, synthetic construct
  source 1..75: mol_type = other DNA
gtcctggcgcgcctggaggacatcccggaagaccagcggactgaatccggtatttcttccgccgctgcgatggag

SEQ ID NO: 474359 - DNA, 75 bp, synthetic construct
  source 1..75: mol_type = other DNA
ttggcacagacctagaagcaattacaaaaaaaataagagatagattatccttatataaatttgaatgttctgaag

SEQ ID NO: 474360 - DNA, 75 bp, synthetic construct
  source 1..75: mol_type = other DNA
atgtacggaacatgcgaaacgctatgccgggagctggcagcaaagtatacgggagacacgcctctgatgctggtt

SEQ ID NO: 474361 - DNA, 75 bp, synthetic construct
  source 1..75: mol_type = other DNA
atgtacggaacatgcgaaacgctatgccggcagctggcagcaaagtattcgggagacacgcccctgatgctggtt

SEQ ID NO: 474362 - DNA, 75 bp, synthetic construct
  source 1..75: mol_type = other DNA
tggcgcgattttactcaatgcgttgttaagcagaaggttggttgacgttccaccgccagaagttgttcatcagga

SEQ ID NO: 474363 - DNA, 75 bp, synthetic construct
  source 1..75: mol_type = other DNA
caaatggcaattttattgttgatgaaaaccagcagattgttcgtcgttccgcgcatgaacggaaacaactgagtg

SEQ ID NO: 474364 - DNA, 75 bp, synthetic construct
  source 1..75: mol_type = other DNA
aggaggcactgaaaggagacaaaactgcgatttccgcgctcaggggaatggcctatcgtgaaaaacggggcaaga

SEQ ID NO: 474365 - DNA, 75 bp, synthetic construct
  source 1..75: mol_type = other DNA
ctatgagttgaatatagtatttgaaggaaacgctgatttaaaaatagctcactcgcaaagagtgacatcagaata

SEQ ID NO: 474366 - DNA, 75 bp, synthetic construct
  source 1..75: mol_type = other DNA
gttatggcctctgctgatttgttgaagttgattgtggaaaattgcctcaaaaaacaactcaattttgttgttatt

SEQ ID NO: 474367 - DNA, 75 bp, synthetic construct
  source 1..75: mol_type = other DNA
atttgcgtctggaagatgttgcctcgcatgtttatctaagcccttattatttcagtaagttgtttaagaaatatc

SEQ ID NO: 474368 - DNA, 75 bp, synthetic construct
  source 1..75: mol_type = other DNA
ggatgcgtggcggagtattccaacaccggtgcgtgcaacggccattcatcctgacctgtcactgcagattgcgga

SEQ ID NO: 474369 - DNA, 75 bp, synthetic construct
  source 1..75: mol_type = other DNA
tgacgccagcgagaaaatgcttgatgaatgggaccagcgccatcaggcatttcatactgcaattgtggcgggctg

SEQ ID NO: 474370 - DNA, 75 bp, synthetic construct
  source 1..75: mol_type = other DNA
tgcgtcccccgccgtcaggaggtggttaatcaggcccgcaccctgctgaaaaacaacacacacgaaaacgactga

SEQ ID NO: 474371 - DNA, 75 bp, synthetic construct
  source 1..75: mol_type = other DNA
tcgccgtcccggaatgcgttacccgccgtcaggcggtggttaatcaggcccgcagcctgctgaaaaacaacacac

SEQ ID NO: 474372 - DNA, 75 bp, synthetic construct
  source 1..75: mol_type = other DNA
tcatctaagaccaatagtatctgcgagcagttccataaaacgatactgaacgagttttatcaggtgacgttccgc

SEQ ID NO: 474373 - DNA, 75 bp, synthetic construct
  source 1..75: mol_type = other DNA
tcgggggccggttgcattatccatgccggaggtgccggtggcttcacgcacggtaccggagcaggtggcgttgat

SEQ ID NO: 474374 - DNA, 75 bp, synthetic construct
  source 1..75: mol_type = other DNA
gtgtgcatcgtttttgattatccccgcacactcacgcagataaggtggctgcggtctctgttaatgcgggaatac

SEQ ID NO: 474375 - DNA, 75 bp, synthetic construct
  source 1..75: mol_type = other DNA
aaagccatgttgaccgttctattgacggcccggcagcgtttattgaaaccaacattgtcgggacttatacactgc

SEQ ID NO: 474376 - DNA, 75 bp, synthetic construct
  source 1..75: mol_type = other DNA
tggcaacgggcagcaaatccgtgactggttatatgttgaagatcatgcccgcgcgctgtattgcgtggtgaccac

SEQ ID NO: 474377 - DNA, 75 bp, synthetic construct
  source 1..75: mol_type = other DNA
ccgacgaagtgtatggcgacctgcactctacggatgatttcttcaccgaaaccacgccgtatgcgccgagtagtc

SEQ ID NO: 474378 - DNA, 75 bp, synthetic construct
  source 1..75: mol_type = other DNA
gattatctggatgcgaatagaatggcggctatcactccatttgactatgcaaagattaatagttcttttcgataa

SEQ ID NO: 474379 - DNA, 75 bp, synthetic construct
  source 1..75: mol_type = other DNA
cgtattgatatttactgagagctcagatcaactttccagggcaacagatcgcgtacccggtttgccggccagtcc

SEQ ID NO: 474380 - DNA, 75 bp, synthetic construct
  source 1..75: mol_type = other DNA
cctggtcattgatgggcttcgaaagccagacgccatttaccaatgacacggcgctggcagccaacataaccaatg

SEQ ID NO: 474381 - DNA, 75 bp, synthetic construct
  source 1..75: mol_type = other DNA
cgcgtcatccgcgtggttttatgcaggggcggtatctggaaagccagcgtgatgtcgaagccgcagataaaccat

SEQ ID NO: 474382 - DNA, 75 bp, synthetic construct
  source 1..75: mol_type = other DNA
ctggcgagcggtttagggttacgtagctttaacctcgatttgatgcatgggctaccggatcaatcactggaagag

SEQ ID NO: 474383 - DNA, 75 bp, synthetic construct
  source 1..75: mol_type = other DNA
agcagtatgaaacatccgcttacgccaaaccaggttatcagtgccagcacaatctcaactactggcgatttggcg

SEQ ID NO: 474384 - DNA, 75 bp, synthetic construct
  source 1..75: mol_type = other DNA
gtgccgggtttattggctcggcgctggtgcgttatatcatcaacgaaacgagcgatgcggtggtagtggtcgata

SEQ ID NO: 474385 - DNA, 75 bp, synthetic construct
  source 1..75: mol_type = other DNA
gtcagcaccggcgttaaagtttacttctgcgatcctcagagtccttggcagcggggaacaaatgagaacacaaat

SEQ ID NO: 474386 - DNA, 75 bp, synthetic construct
  source 1..75: mol_type = other DNA
gcgatgcaaacgctgctggacggcgtgcgtgcgcgtttgccgctgacagcggatgcagaaattactatggaagcg

SEQ ID NO: 474387 - DNA, 75 bp, synthetic construct
  source 1..75: mol_type = other DNA
ttctcgattgtcccttactccagtgccttctgcattcgtgatgacggtaaattactggtgatgacctatttgcgt

SEQ ID NO: 474388 - DNA, 75 bp, synthetic construct
  source 1..75: mol_type = other DNA
actcggcaaacgcgatatttatcagcgtagcggcatccagtttctgcccttcaatacgctttatcagttgcgtgc

SEQ ID NO: 474389 - DNA, 75 bp, synthetic construct
  source 1..75: mol_type = other DNA
atgccgcaggcaagttctgttgtttcaattacgttgattggtggcgcgggatttaacgtggagtcacctcaacag

SEQ ID NO: 474390 - DNA, 75 bp, synthetic construct
  source 1..75: mol_type = other DNA
aacccggatttttcaccgcctggagcaatctcaagcgattgctcaagcagcgcaatgcggcgctgcgccaggtga

SEQ ID NO: 474391 - DNA, 75 bp, synthetic construct
  source 1..75: mol_type = other DNA
gctgagcggtgggacggtaagctacccgataccatgatccccggcagtacagttccgtttatctctactaagtaa

SEQ ID NO: 474392 - DNA, 75 bp, synthetic construct
  source 1..75: mol_type = other DNA
cttttgccagaagagcaacggatacgtatgccgatgcggatgggggcgttccctggaatgccgaatcaggcgctt

SEQ ID NO: 474393 - DNA, 75 bp, synthetic construct
  source 1..75: mol_type = other DNA
gattactttagttatcgcctgaccggcaagatgaactgggaatataccaacgccacgaccacgcaactggtcaat

SEQ ID NO: 474394 - DNA, 75 bp, synthetic construct
  source 1..75: mol_type = other DNA
caccacagtccagtaccggaaaatatgaaagcacatgcagtatcagcgaaggcaatgaagatgcggtgtatttcg

SEQ ID NO: 474395 - DNA, 75 bp, synthetic construct
  source 1..75: mol_type = other DNA
agcacagcattgttgactggtgcttctcgattgtcccttactccagcgccttctgcattcgtgatgacggtaaat

SEQ ID NO: 474396 - DNA, 75 bp, synthetic construct
  source 1..75: mol_type = other DNA
ggcgcgccggacatttggcggcttgtctcatcttgaaggccagaccgtaaacattctctctgatgcgaacgtgga

SEQ ID NO: 474397 - DNA, 75 bp, synthetic construct
  source 1..75: mol_type = other DNA
caggtctttgtcagcgcgatcagtgctgaacacgttatagacatgtcggacgaaaattcgaagatgtttaccgtg

SEQ ID NO: 474398 - DNA, 75 bp, synthetic construct
  source 1..75: mol_type = other DNA
gacgggcataaagtcgcggagctggcgcacctgatgccaatgcagttgataacgccagaagggtttactttactc

SEQ ID NO: 474399 - DNA, 75 bp, synthetic construct
  source 1..75: mol_type = other DNA
gcgtcattcgtcatgaacaggaggcgtttgtgctccacgggcgtttgcagggtgaagagcgcgagacggcaattg

SEQ ID NO: 474400 - DNA, 75 bp, synthetic construct
  source 1..75: mol_type = other DNA
gatgtcgaagccgcagataagccgtttgagttctttatgaaccgctttcgcttgctggaggccgcgccacgcgca

SEQ ID NO: 474401 - DNA, 75 bp, synthetic construct
  source 1..75: mol_type = other DNA
ccgacatcattgcagccatccgggatgactggatggggcgtaccccggaggcacagcagcagacgctgattatgg

SEQ ID NO: 474402 - DNA, 75 bp, synthetic construct
  source 1..75: mol_type = other DNA
agatgcgtgaagcaggcgtggatgcccgcacactggccagttttctgagcgaaacccgccaggccattcaggccg

SEQ ID NO: 474403 - DNA, 75 bp, synthetic construct
  source 1..75: mol_type = other DNA
gggcaggctgcgcgtaaagtggagagcgtgtctgccgtccggcttgccagtgaccagctccgccagtcgaccggc

SEQ ID NO: 474404 - DNA, 75 bp, synthetic construct
  source 1..75: mol_type = other DNA
tctgttcctgaccgatgagagctcgatggtgggcaaccgtgatatggctgagctctaccagctggttgccgccgg

SEQ ID NO: 474405 - DNA, 75 bp, synthetic construct
  source 1..75: mol_type = other DNA
gcccggcatgagaaaggtgataccggcgcagaagaacgtacgttcaccgtgctggagccgctacgggtgccggac

SEQ ID NO: 474406 - DNA, 75 bp, synthetic construct
  source 1..75: mol_type = other DNA
gcggaggtaaacacgcaggatgccgtcgtcacgctgcgtaatgctgacggggagtcggtactgatttccccccag

SEQ ID NO: 474407 - DNA, 75 bp, synthetic construct
  source 1..75: mol_type = other DNA
ccgcagttgcatacccacgctctggtctttaacgccacgtttgccgatgaaaaatggcggtcgctggccagtgat

SEQ ID NO: 474408 - DNA, 75 bp, synthetic construct
  source 1..75: mol_type = other DNA
actggcgatcgtcggtcactaacggaagccaccttgcgtttactggaaaaaatcgccccttctgcacataaaatt

SEQ ID NO: 474409 - DNA, 75 bp, synthetic construct
  source 1..75: mol_type = other DNA
aagcacgatatcaccgaaagtatgctggagctggcgacggatgtttgccgtgatatcaaccaggctgccgggcaa

SEQ ID NO: 474410 - DNA, 75 bp, synthetic construct
  source 1..75: mol_type = other DNA
gacagcaaaaaccgccatcagcgcgataactaccgggccgggatggtgatggagcggtgggacgctgaaaagaaa

SEQ ID NO: 474411 - DNA, 75 bp, synthetic construct
  source 1..75: mol_type = other DNA
acacgatttcggcgttgtcggagaaaaaggtccagttcacctggtcggagatgctggccggtacggtcaaccgtc

SEQ ID NO: 474412 - DNA, 75 bp, synthetic construct
  source 1..75: mol_type = other DNA
ggggaccgcgtcagggcgctgggtcgtgagctgaaaggggccatcaaagcgaaggagcagttcacggtgacggct

SEQ ID NO: 474413 - DNA, 75 bp, synthetic construct
  source 1..75: mol_type = other DNA
gcagtaccggttttatggcacccaactaccggaggtacgactggtcagcgaggcggacaagcgaagccgttacag

SEQ ID NO: 474414 - DNA, 75 bp, synthetic construct
  source 1..75: mol_type = other DNA
cgaaggataatgttcttaaagggtcaaaaaagaatctggaaaatatatcatgcaacaaaaataataatgatatca

SEQ ID NO: 474415 - DNA, 75 bp, synthetic construct
  source 1..75: mol_type = other DNA
tatcctaccaacaaccaagtagagcattccacttggttgttgtagtattgcttatgtctacagcctggtttatcg

SEQ ID NO: 474416 - DNA, 75 bp, synthetic construct
  source 1..75: mol_type = other DNA
tcatttaagtggtgggctgacttatagtgaaattcccgcctcaattaaaaatatggtggttgatacccacgatat

SEQ ID NO: 474417 - DNA, 75 bp, synthetic construct
  source 1..75: mol_type = other DNA
ctggtatcaactgaccatcgaacctaatacgttgtttggctcgcgccctcctgtactgccggacgacgatgcatt

SEQ ID NO: 474418 - DNA, 75 bp, synthetic construct
  source 1..75: mol_type = other DNA
gcggattactggcagataacggaacatgggaagttgtttttaaattcgctgctggagctttttctggctgagtaa

SEQ ID NO: 474419 - DNA, 75 bp, synthetic construct
  source 1..75: mol_type = other DNA
gggcgcattctgcgtaccaccaaaacgcgtcatccgcgtggttttatgcaggggcggtatctggaaagccagcgt

SEQ ID NO: 474420 - DNA, 75 bp, synthetic construct
  source 1..75: mol_type = other DNA
ctgggccgccgggtgctggcggaaaacggtctggagggtgaaacgatggcccgatttattgccgccggcaaaaag

SEQ ID NO: 474421 - DNA, 75 bp, synthetic construct
  source 1..75: mol_type = other DNA
tggcccaggtgaccggcacccgggaacagcagcagctgacggaggttatccgggatacgcggcgtgatgcgggtg

SEQ ID NO: 474422 - DNA, 75 bp, synthetic construct
  source 1..75: mol_type = other DNA
cgcctgaccgggggacgaatcacggagcctgatgaggtggcacggacggtgcgcagtgtggcggaggctgaatcg

SEQ ID NO: 474423 - DNA, 75 bp, synthetic construct
  source 1..75: mol_type = other DNA
tggtcacgctgcgtaatgctgacggggagtcagtgctgctctctcctcagcagaacactgcacaggatatttccc

SEQ ID NO: 474424 - DNA, 75 bp, synthetic construct
  source 1..75: mol_type = other DNA
aaaacgggtttctccgagaatctgtatgccaccaagatagcgctgggaaacctgtatcgttctgctttacgtgaa

SEQ ID NO: 474425 - DNA, 75 bp, synthetic construct
  source 1..75: mol_type = other DNA
gtcgggcattgcgtaacgtggcggacgccgaaacggcggcaaaagcggaagaccccattacgctgcctccggatg

SEQ ID NO: 474426 - DNA, 75 bp, synthetic construct
  source 1..75: mol_type = other DNA
atggtgaattactgtcttatatcattggcgctgacaatgatggttatacgcgcattgcaaatgagttgctggaag

SEQ ID NO: 474427 - DNA, 75 bp, synthetic construct
  source 1..75: mol_type = other DNA
tgagttcacagataaaacactctccaggaaacccggggcggttcagtttggaccaaataaaaacacctcagaatg

SEQ ID NO: 474428 - DNA, 75 bp, synthetic construct
  source 1..75: mol_type = other DNA
atgaacaaaattaaaattctggcacttagtatgctgaccattatatcacttaatattgcccatgctgaaagttca

SEQ ID NO: 474429 - DNA, 75 bp, synthetic construct
  source 1..75: mol_type = other DNA
gatttttattcagagcgggcggaataccggcattaataatgtggtcagtgaatggtcaacattacccgaatcagg

SEQ ID NO: 474430 - DNA, 75 bp, synthetic construct
  source 1..75: mol_type = other DNA
tggtccggtaatgtgctgagcccggccaaactccgcgacaagtggacccagctcgaaatcaaccgtaaccatcgc

SEQ ID NO: 474431 - DNA, 75 bp, synthetic construct
  source 1..75: mol_type = other DNA
atgaagtcagtaactatagaagcaaaaacttttgctgaaatgttaggaataacagaaggtgagttaatcttcgcc

SEQ ID NO: 474432 - DNA, 75 bp, synthetic construct
  source 1..75: mol_type = other DNA
gaacgttggcaaatccacattgctgaacaaactgttggggcagaaaatctccatcacttcccgcaaagcgcagac

SEQ ID NO: 474433 - DNA, 75 bp, synthetic construct
  source 1..75: mol_type = other DNA
gtggacaacgtgcaggagaaagccgatctgctgccgcacctgcagttcctggcaagccagatgaacttcctcgat

SEQ ID NO: 474434 - DNA, 75 bp, synthetic construct
  source 1..75: mol_type = other DNA
ggctgaatgtcgacactatcgcagcaatcgtgcgtaagcatctgcctgaagcgacccatcacttcccggaagatt

SEQ ID NO: 474435 - DNA, 75 bp, synthetic construct
  source 1..75: mol_type = other DNA
atattatccggcttttcattattgatgatctgaaacaaagccaaggaactacagggctaaaagaaaaggatgttg

SEQ ID NO: 474436 - DNA, 75 bp, synthetic construct
  source 1..75: mol_type = other DNA
caaccggtactggtaaaacaacaatatttaatgagttgttatttaagagcatcatccgaggaagcaaaaatattg

SEQ ID NO: 474437 - DNA, 75 bp, synthetic construct
  source 1..75: mol_type = other DNA
tacagagcttgttcgcgccagaactctcgctgataaaacacgtgaaagaggtgtcaaccaattaactgttgctaa

SEQ ID NO: 474438 - DNA, 75 bp, synthetic construct
  source 1..75: mol_type = other DNA
ctgcccagggctcgtcaaaatgtagttctagaaatggggatgttgttatcatcactcggccgcagtaacgtggtc

SEQ ID NO: 474439 - DNA, 75 bp, synthetic construct
  source 1..75: mol_type = other DNA
gacttacgataattgaagaactggagcgtgaaattggtcaagggcagacagcgactcgtttcggcattgttcttc

SEQ ID NO: 474440 - DNA, 75 bp, synthetic construct
  source 1..75: mol_type = other DNA
caatggaaacaagattgattatattatcatgttaggcttggggggggtcattgtaacgctatcaattgtaggatg

SEQ ID NO: 474441 - DNA, 75 bp, synthetic construct
  source 1..75: mol_type = other DNA
cgtttttataaaaaaggcgataagattttaaatccctatgatgccagaacagaagggtgggtatttttcaacgaa

SEQ ID NO: 474442 - DNA, 75 bp, synthetic construct
  source 1..75: mol_type = other DNA
cggtaacggtactggtgctgctaacctcgcgagcttaattcaacaacgaaaaactgtcggtgggtactttgacag

SEQ ID NO: 474443 - DNA, 75 bp, synthetic construct
  source 1..75: mol_type = other DNA
ccgcggtaaaaccgttgttgttgaaggttgcgaagaaaaactcgctcctctggacttgattcgtctcggcatgaa

SEQ ID NO: 474444 - DNA, 75 bp, synthetic construct
  source 1..75: mol_type = other DNA
atgagattgaaaaacgtgcgttactggctacattccattctaatgtagaagagtatcataagcttttcaataatg

SEQ ID NO: 474445 - DNA, 75 bp, synthetic construct
  source 1..75: mol_type = other DNA
atgcaaataatcattgattatctttgccatgctgcaaatacgctttttggtttttatcaacaaccattcctcaaa

SEQ ID NO: 474446 - DNA, 75 bp, synthetic construct
  source 1..75: mol_type = other DNA
atgcagataatcattgattacctttgccacgctgcaaatacaattttcggtatgtatcaacgaccgtttctcaaa

SEQ ID NO: 474447 - DNA, 75 bp, synthetic construct
  source 1..75: mol_type = other DNA
gtactatagatctggaggagatatctcaagtagatcaaaagataagccagcatttgatatctcaaactaatagtc

SEQ ID NO: 474448 - DNA, 75 bp, synthetic construct
  source 1..75: mol_type = other DNA
gtattaagtgaacctggtttatatagtgaagtagaaataacaaatgccaacaaactgttaacaagcttggctaaa

SEQ ID NO: 474449 - DNA, 75 bp, synthetic construct
  source 1..75: mol_type = other DNA
gtgacggatatggaggtcgttgtgatccgttgtctattttggttcttactgcaaaacaccttgaaaaccaatctt

SEQ ID NO: 474450 - DNA, 75 bp, synthetic construct
  source 1..75: mol_type = other DNA
atggctggcaaacggaacaaaaatcatgggcggcattgtgccgattctgcggtgatttacattgcaaaacgcaga

SEQ ID NO: 474451 - DNA, 75 bp, synthetic construct
  source 1..75: mol_type = other DNA
aggcattgatgggtgtgatggccgtggcgctggttgcgggcatgagcgttaaaagttttgcagatgaaggtctgc

SEQ ID NO: 474452 - DNA, 75 bp, synthetic construct
  source 1..75: mol_type = other DNA
acgatgccatcgcagaaatgcaaaaagatggaaccttgcaagctctttccgaaaaatggtttggtgctgatgtga

SEQ ID NO: 474453 - DNA, 75 bp, synthetic construct
  source 1..75: mol_type = other DNA
gccacgctgcaaatacgcttttcggtttttatcagcaaccattcctgaaagaatgggacgaaatgcttaatgaca

SEQ ID NO: 474454 - DNA, 75 bp, synthetic construct
  source 1..75: mol_type = other DNA
aattatgagggtgaaatttatctaatttgggtcgggaatagatggtattcatacggtcatatttattcaattggc

SEQ ID NO: 474455 - DNA, 75 bp, synthetic construct
  source 1..75: mol_type = other DNA
gaagctgcgaaacatgatccactgaaatggacggcacaggaccggattaccgcgttatggtggatatttactggc

SEQ ID NO: 474456 - DNA, 75 bp, synthetic construct
  source 1..75: mol_type = other DNA
aagcatcttacactccctattgaaaataagatacattattttatgtcagatatccataaacattttaaagataat

SEQ ID NO: 474457 - DNA, 75 bp, synthetic construct
  source 1..75: mol_type = other DNA
ttcctgagccgttcagtttctgtttttccggccacaccatcaccttcacgaacacgaaaagggattacaacgggg

SEQ ID NO: 474458 - DNA, 75 bp, synthetic construct
  source 1..75: mol_type = other DNA
tctcattgccgtaaaacatggcaactacagttcacttacaccgtctctcagcccggtacgcaccagaaaatcatt

SEQ ID NO: 474459 - DNA, 75 bp, synthetic construct
  source 1..75: mol_type = other DNA
ggtgcactcgcgtaaaggcaaaattatcacccgtgcgcaggtcagcgatcgtccgaacaaaggggcgatttacat

SEQ ID NO: 474460 - DNA, 75 bp, synthetic construct
  source 1..75: mol_type = other DNA
gcttttacacattacgatgatggacttgaacactctctatggctttgcttgatcagagatcggttagaattatta

SEQ ID NO: 474461 - DNA, 75 bp, synthetic construct
  source 1..75: mol_type = other DNA
cgcggcatgatgaccccggaactgaaagccgaacacagtcagcgagtggccggtcgggagctggcggaggaattc

SEQ ID NO: 474462 - DNA, 75 bp, synthetic construct
  source 1..75: mol_type = other DNA
tacgtaaagcctttgaagatctggaactggtcatcgtccaggacatctttatgaccaaaactgcgtcagcggcgg

SEQ ID NO: 474463 - DNA, 75 bp, synthetic construct
  source 1..75: mol_type = other DNA
caatcgacaagctcaccgacgagtacccaatggtactgtcaacggtgcgtgaagtcggtcactactcttgtcgtt

SEQ ID NO: 474464 - DNA, 75 bp, synthetic construct
  source 1..75: mol_type = other DNA
cgtgatgaatttaatccgccgtatatctttttacgggattatttaggcatcgatccaacacaaacggtgtataca

SEQ ID NO: 474465 - DNA, 75 bp, synthetic construct
  source 1..75: mol_type = other DNA
gcggctgaccgtggcttccagcgtttcttcaaagcggttgaaccgaagtgggatctgaaaacggactggcaaatc

SEQ ID NO: 474466 - DNA, 75 bp, synthetic construct
  source 1..75: mol_type = other DNA
acgctaaacgtaacggggcgaaaatcatcgtctgcgatccgcgtaaaattgaaaccgcgcgcattgctgacatgc

SEQ ID NO: 474467 - DNA, 75 bp, synthetic construct
  source 1..75: mol_type = other DNA
gaagttggtcactactcttgtcgttcgatgactggtaactgtgcggcgctggcggcgctggctgatgaacctggc

SEQ ID NO: 474468 - DNA, 75 bp, synthetic construct
  source 1..75: mol_type = other DNA
aaagccatgcagcaggcacaaaaggccattaacgccctgactcagggggctaagtctgatgcgctgtcagaatag

SEQ ID NO: 474469 - DNA, 75 bp, synthetic construct
  source 1..75: mol_type = other DNA
ggatatgggacggcaatgaaccctgcaacaactggagcagcagtaagctacggacttcttgctcgcgcctatgag

SEQ ID NO: 474470 - DNA, 75 bp, synthetic construct
  source 1..75: mol_type = other DNA
actccacaaacgacagagggaagggtatttgctgaagcattgccttacctcactcctgctggcattgagagagcg

SEQ ID NO: 474471 - DNA, 75 bp, synthetic construct
  source 1..75: mol_type = other DNA
atcgactggagcaggttcagaatgctatggcgggaataaacattcagcctgcaagagcaattcagcagattgata

SEQ ID NO: 474472 - DNA, 75 bp, synthetic construct
  source 1..75: mol_type = other DNA
cgcttatctgaaaggattgaaaaactaccttcagtccactcagcaggcagcaaaagcggcagtaacaacaccaac

SEQ ID NO: 474473 - DNA, 75 bp, synthetic construct
  source 1..75: mol_type = other DNA
cgagcaattcagcagattgatacagaaatatctaatctgcagaagcttggtaaggtagctgataacgagacaatt

SEQ ID NO: 474474 - DNA, 75 bp, synthetic construct
  source 1..75: mol_type = other DNA
ttgcaacattatccgctgttttggctggatgtgctcatgactccccctgcgtccccgtatacgatgatcagggcc

SEQ ID NO: 474475 - DNA, 75 bp, synthetic construct
  source 1..75: mol_type = other DNA
gtggtcataacgagcgtaaaaacatcgacgtcgtgaaaacaatctgcgccattctggacaaaatcattgccgata

SEQ ID NO: 474476 - DNA, 75 bp, synthetic construct
  source 1..75: mol_type = other DNA
catttagtgcgtgcttggcgccgtacctacggtctgccgacgctcgtgaccaactgctcaaataactatggcccg

SEQ ID NO: 474477 - DNA, 75 bp, synthetic construct
  source 1..75: mol_type = other DNA
aacgcggatcaacagcgtttgagaaagccttgcagcaggcaaaaaaggcaattaacgccctgacgcagggggcta

SEQ ID NO: 474478 - DNA, 75 bp, synthetic construct
  source 1..75: mol_type = other DNA
aaactacctgcaatccacgcagcaggctgcaaaagcggcagtaacaacaccaacagggcagcaaaccatcccgtt

SEQ ID NO: 474479 - DNA, 75 bp, synthetic construct
  source 1..75: mol_type = other DNA
ctattaacgctgctggacgtggattaggtgctgcttatcgtggcgttcgtggtgctatcgcgccagaagcgcagc

SEQ ID NO: 474480 - DNA, 75 bp, synthetic construct
  source 1..75: mol_type = other DNA
atagttatttatcagttagtgttcgcgggtgttcgccgtggtgtatctgtctcatttattgctatgattataaag

SEQ ID NO: 474481 - DNA, 75 bp, synthetic construct
  source 1..75: mol_type = other DNA
atgattgcttttatggcattgactatgagttaaaaataaaagcgatgaagattataaaaagaccattaccgatga

SEQ ID NO: 474482 - DNA, 75 bp, synthetic construct
  source 1..75: mol_type = other DNA
tggtgatacgtttaacgcttttatttacttcattaaattcaaattaaataagtataaaagaaaactatttgggca

SEQ ID NO: 474483 - DNA, 75 bp, synthetic construct
  source 1..75: mol_type = other DNA
aagccattgctatgctggcaagtgacccgcagcacacgaagtataaatgccttgatcaggatattttaaatattc

SEQ ID NO: 474484 - DNA, 75 bp, synthetic construct
  source 1..75: mol_type = other DNA
cggaagaccagcggactgaatccggtatttcttccggcgtggcgatggagatcatcaataacgtgagcgaaaacc

SEQ ID NO: 474485 - DNA, 75 bp, synthetic construct
  source 1..75: mol_type = other DNA
gccgtgagctggcagcaaagtatccgggagacacgccgctgatgctgcttatctggtccccggaagagattcagg

SEQ ID NO: 474486 - DNA, 75 bp, synthetic construct
  source 1..75: mol_type = other DNA
tattggcaaagggatagctaaacaatttgctgatcgtggtgcacatactgttattgttgactataacgaagagaa

SEQ ID NO: 474487 - DNA, 75 bp, synthetic construct
  source 1..75: mol_type = other DNA
agaaaaacggcaaagaagaagccagactcacaggtaaaaatatcgcgctcatcttcgaaaaagactcgacccgta

SEQ ID NO: 474488 - DNA, 75 bp, synthetic construct
  source 1..75: mol_type = other DNA
ggcaaaggaatacccggcggcattacggatgttttcggctccggcgtgatgccggtttatgtggtcaatatgggc

SEQ ID NO: 474489 - DNA, 75 bp, synthetic construct
  source 1..75: mol_type = other DNA
gtgccgggcaggcctcagccagtgccaccgccgccggaaaatcggcagaaagtgccgcatcgtctgcttcaccag

SEQ ID NO: 474490 - DNA, 75 bp, synthetic construct
  source 1..75: mol_type = other DNA
atggcgggaatattacgctgacagaagatatcgcagcaggcgttaaaggagccgactttatttacaccgatgtgt

SEQ ID NO: 474491 - DNA, 75 bp, synthetic construct
  source 1..75: mol_type = other DNA
gctgactttatctataccgatgtatgggtgtcgatgggtgaagcaaaagagaaatgggctgaacgcattgcattg

SEQ ID NO: 474492 - DNA, 75 bp, synthetic construct
  source 1..75: mol_type = other DNA
atggcgggaatataacgctgacagaagatatcgcagcaggcgttaaaggtgccgactttatttacaccgatgtgt

SEQ ID NO: 474493 - DNA, 75 bp, synthetic construct
  source 1..75: mol_type = other DNA
taattgctcgaacaactatggtccttatcatttcccggaaaagcttattccactggttattcttaatgcactggg

SEQ ID NO: 474494 - DNA, 75 bp, synthetic construct
  source 1..75: mol_type = other DNA
ttagttattgatggaaagctcgtgtacttagccccccttaacccacgctatcaatcatccttacttacaccggaa

SEQ ID NO: 474495 - DNA, 75 bp, synthetic construct
  source 1..75: mol_type = other DNA
atggaaagccttggcatcaggcttaagaaactcagaaaagataagggactcacccaagtagaactgggtaagctt

SEQ ID NO: 474496 - DNA, 75 bp, synthetic construct
  source 1..75: mol_type = other DNA
agagactcagaaaagacaagggactgacccaagtcgaactgggcaagctttctggcgtaacaggggtaactatag

SEQ ID NO: 474497 - DNA, 75 bp, synthetic construct
  source 1..75: mol_type = other DNA
gttagaatcattgaagaaacaattcagtgaatgtgaaaatattcattttttgggtgaggtcaataatttttataa

SEQ ID NO: 474498 - DNA, 75 bp, synthetic construct
  source 1..75: mol_type = other DNA
tgccaggttagttcgattactagtcgactttaaatgtatttatgtttcgcatggatggtcttgtttatataatgg

SEQ ID NO: 474499 - DNA, 75 bp, synthetic construct
  source 1..75: mol_type = other DNA
ggagtttttgtcataccaggtattaaaaaatattttgacttccttacattgtttaaattgagaaaaattttaaaa

SEQ ID NO: 474500 - DNA, 75 bp, synthetic construct
  source 1..75: mol_type = other DNA
gattagaaggattccttcatggtgtattgaccgtgttccggctgatgctcaattaattggtgagtctggttctta

SEQ ID NO: 474501 - DNA, 75 bp, synthetic construct
  source 1..75: mol_type = other DNA
atgattgattttcagcaacgctacaaagttattaagtctgtttgtgaaaaattaaagtcacagccaaataaacca

SEQ ID NO: 474502 - DNA, 75 bp, synthetic construct
  source 1..75: mol_type = other DNA
tgaccgccgtcggagtatttatcgacgtggcggttatcactgttgcgccgattgccctgtctattgcccgtcgtg

SEQ ID NO: 474503 - DNA, 75 bp, synthetic construct
  source 1..75: mol_type = other DNA
agtcctatctcctatatggagtatcgtctcctgaattatcttttgtacaaagtacctcaggcaccaagatcccct

SEQ ID NO: 474504 - DNA, 75 bp, synthetic construct
  source 1..75: mol_type = other DNA
atgattgttattttttatgttcacaagctgataaaaataaatttgagttcaaaaactatattgaaaaatataaag

SEQ ID NO: 474505 - DNA, 75 bp, synthetic construct
  source 1..75: mol_type = other DNA
atcttagggatgctgttcagcaacggatggatagtgataaaaaatatgcggaagaattattaggtcaaataagct

SEQ ID NO: 474506 - DNA, 75 bp, synthetic construct
  source 1..75: mol_type = other DNA
atattagcatcaaacttcaaggcggtggggaaataacgggaaaagagataaaattatccggaaaaattagcgttg

SEQ ID NO: 474507 - DNA, 75 bp, synthetic construct
  source 1..75: mol_type = other DNA
gggtgccgatcccgtctggtggtttggcggtggcttcgacttaaccccattctatggttttgaagaagatgctat

SEQ ID NO: 474508 - DNA, 75 bp, synthetic construct
  source 1..75: mol_type = other DNA
tatgattatcagccaaaagatggcagcccggaagcggctttaagtgagtttattaaggtcagggattgggtgtaa

SEQ ID NO: 474509 - DNA, 75 bp, synthetic construct
  source 1..75: mol_type = other DNA
gagtacgattatcagccagaagcaggcagcccggaagcggcgttgagtgagtttattaaggtcagggattgggtg

SEQ ID NO: 474510 - DNA, 75 bp, synthetic construct
  source 1..75: mol_type = other DNA
gtggacataacgaaaagaaaaacatcgacgtagtgctcactatttgtgatttgttggatgagattgtaccgaaag

SEQ ID NO: 474511 - DNA, 75 bp, synthetic construct
  source 1..75: mol_type = other DNA
atgaagtttatggtgacttaccccatccggatgaagcaaataataacgaagcgttaccgctatttacggaaacga

SEQ ID NO: 474512 - DNA, 75 bp, synthetic construct
  source 1..75: mol_type = other DNA
gcggacacaacgaaaagaaaaacatcgatgttgtgctgactatttgtgatttgttggatgagattgtaccgaaag

SEQ ID NO: 474513 - DNA, 75 bp, synthetic construct
  source 1..75: mol_type = other DNA
tggtgatggtacctaccagccagcacctcgagtttctactcagggcctggaacaagatttcgggctgcaacgagg

SEQ ID NO: 474514 - DNA, 75 bp, synthetic construct
  source 1..75: mol_type = other DNA
ttcccaccaggccgtctctctggcgaaaaaacatcgtacccgattacatgtcctgcatatcaccaccgcagatga

SEQ ID NO: 474515 - DNA, 75 bp, synthetic construct
  source 1..75: mol_type = other DNA
gcaacacattgcgagcataccccgacaataaagcataatgaggagacatggcgggctcgtttgggggacgctatt

SEQ ID NO: 474516 - DNA, 75 bp, synthetic construct
  source 1..75: mol_type = other DNA
ccgtatgttcccaccagccacgcgaatgtgcgcttttttattgccgaaaaaccgggtgcagagcccgtctggtgg

SEQ ID NO: 474517 - DNA, 75 bp, synthetic construct
  source 1..75: mol_type = other DNA
ataaaacgcgatccacaaacgagcaggttcaaaacgcccctcattcagtaatttctgaggctttggccgtgttgc

SEQ ID NO: 474518 - DNA, 75 bp, synthetic construct
  source 1..75: mol_type = other DNA
gcagtcagcaggttaccgacgcgtgtcataaactcggcggcttctacctcggtagcatcggcggtccggcggcgg

SEQ ID NO: 474519 - DNA, 75 bp, synthetic construct
  source 1..75: mol_type = other DNA
cgatcccacatggacggacagcagtctgaccaccattctcaatccggaagcggttatttttgccaacccgatagc

SEQ ID NO: 474520 - DNA, 75 bp, synthetic construct
  source 1..75: mol_type = other DNA
gtccaggctccttgcgtaaagcccccatcacctccggcgtggataatgcaaccggtccccgactggcagaagccg

SEQ ID NO: 474521 - DNA, 75 bp, synthetic construct
  source 1..75: mol_type = other DNA
tgccctgacggatgtgacgcgttcaccgtactgcatggtaaatcttgggggcttcaatattccggtcggaaaagt

SEQ ID NO: 474522 - DNA, 75 bp, synthetic construct
  source 1..75: mol_type = other DNA
cgaagaaagaagtgaagaacgcccgcgaagagggggccaacttcgaatttaacgtccagccggtggcgcttgagc

SEQ ID NO: 474523 - DNA, 75 bp, synthetic construct
  source 1..75: mol_type = other DNA
acgtcaacctcgtaaagatccttctcaagaaagcctcatacgccgataaattccgcctggctgaaataatcgagc

SEQ ID NO: 474524 - DNA, 75 bp, synthetic construct
  source 1..75: mol_type = other DNA
aattatagggcaaggtttaaagatgacacttttcgtgacatttttcgaagttttttattatatcttttagattca

SEQ ID NO: 474525 - DNA, 75 bp, synthetic construct
  source 1..75: mol_type = other DNA
cagcagccgcagtatcagcagccgcaacagccagttgcgccacagccgcaggataccctgcttcatccgctgttg

SEQ ID NO: 474526 - DNA, 75 bp, synthetic construct
  source 1..75: mol_type = other DNA
cggtgcgtggttggcagatacgctgttctttatttttggcgtgatggcttacaccattcccgtcattattgtcgg

SEQ ID NO: 474527 - DNA, 75 bp, synthetic construct
  source 1..75: mol_type = other DNA
atgcaagtgaaaacacagtcctgcgttgttgcaggcaagaaaactgttgccgttaccgagcagacgatagattgg

SEQ ID NO: 474528 - DNA, 75 bp, synthetic construct
  source 1..75: mol_type = other DNA
cactggttatcctggggctgatgtctgccagtttgcaggcagaagacaaggataaaatgtgtgacgggaattttg

SEQ ID NO: 474529 - DNA, 75 bp, synthetic construct
  source 1..75: mol_type = other DNA
tttatcaacgcatcaaacagagaacacagtcgcacagactatactcgtaaaattctcatttcggatgtgaatgat

SEQ ID NO: 474530 - DNA, 75 bp, synthetic construct
  source 1..75: mol_type = other DNA
cagcagcaatatcagcagccgcaacaaccggttgcaccgcagccgcaatatcagcagccgcaacagccagttgcg

SEQ ID NO: 474531 - DNA, 75 bp, synthetic construct
  source 1..75: mol_type = other DNA
tttggacgtatattgtgtgctctcctataagacattattatcaatttaggaattctctccttcttttgtcaagag

SEQ ID NO: 474532 - DNA, 75 bp, synthetic construct
  source 1..75: mol_type = other DNA
aaagtatctgatatccgcagccaggagacactaccaaaagaagaaaatcgctaggagcgaaagtggtgaaagtta

SEQ ID NO: 474533 - DNA, 75 bp, synthetic construct
  source 1..75: mol_type = other DNA
gacaccatagaaaaacaggtcaacaacgccttagcccgcgtcaacaatctgacgcaatccatcctggcaaaagca

SEQ ID NO: 474534 - DNA, 75 bp, synthetic construct
  source 1..75: mol_type = other DNA
acgaagcaatgggaaatatacttattaaaaaatatttgtacaagtatttcagatggtgatcatcaggctcctcca

SEQ ID NO: 474535 - DNA, 75 bp, synthetic construct
  source 1..75: mol_type = other DNA
ctctggttttcaccggcagtttccgccaggcgctggagcagctctttgcactctataccccggctgaaaaaccgc

SEQ ID NO: 474536 - DNA, 75 bp, synthetic construct
  source 1..75: mol_type = other DNA
tagctggttgatgaatgtgttaattctgagtgtgaccggggtaatgtatgtggcgctgtctgttgtaatggtaat

SEQ ID NO: 474537 - DNA, 75 bp, synthetic construct
  source 1..75: mol_type = other DNA
gacgtttgaacttttttatcaggagtatcagtccctggtattaaaatctgtttttaaactggaaccgggatttga

SEQ ID NO: 474538 - DNA, 75 bp, synthetic construct
  source 1..75: mol_type = other DNA
agcgtctttatcgaagacagcgatttaccgtccggcccgctgttaaccgaagtgaactatgaggaaagcgagtga

SEQ ID NO: 474539 - DNA, 75 bp, synthetic construct
  source 1..75: mol_type = other DNA
cccataaatactggcggacactggatattagtttcgctacagaaaatagtaaataaaaaaataataaactacaaa

SEQ ID NO: 474540 - DNA, 75 bp, synthetic construct
  source 1..75: mol_type = other DNA
aagcatttcaggacttcttacagatgcttcctgagcttggtatcgtcaatgatgctacagcccgcaatctccgtg

SEQ ID NO: 474541 - DNA, 75 bp, synthetic construct
  source 1..75: mol_type = other DNA
tgccgatgaatcccgcctaccccaccctctacccggaggaactgcagatattcggcgtggtgatggcattcatcc

SEQ ID NO: 474542 - DNA, 75 bp, synthetic construct
  source 1..75: mol_type = other DNA
ggttttccgtcacctgccgcggactataccgaagacgaactggatctgaatgcctattgtatccgtcgccccagc

SEQ ID NO: 474543 - DNA, 75 bp, synthetic construct
  source 1..75: mol_type = other DNA
cggtgctgacccggttgcgcgagaagctgcctcaactgcaggtggagtacttcccggaaaagccgtccgaatatc

SEQ ID NO: 474544 - DNA, 75 bp, synthetic construct
  source 1..75: mol_type = other DNA
tacaacccaggaaaccgatgacaaaataacatggtcactgacaggctataacacggtagcaaataaggaagcaac

SEQ ID NO: 474545 - DNA, 75 bp, synthetic construct
  source 1..75: mol_type = other DNA
gatgctgcgcgtcttgccagttatcagcgcggcagtcgtaaaccggttgctgaccctgcgccggtttatccgcaa

SEQ ID NO: 474546 - DNA, 75 bp, synthetic construct
  source 1..75: mol_type = other DNA
tccgccaggggccggtggaatggctctggcgtcagttaactttgcgtgcagctgggccggcaagatctaaaacat

SEQ ID NO: 474547 - DNA, 75 bp, synthetic construct
  source 1..75: mol_type = other DNA
ctgctggcggctggtgcgcgatgcgccatcggtaaaaagcctgtttaataccggcgtcatgctttatctggtggg

SEQ ID NO: 474548 - DNA, 75 bp, synthetic construct
  source 1..75: mol_type = other DNA
agcccggcacgcgatgccgccattgcccgcgaagctattttgcacggcgccgatgccgtttatatcggtggccct

SEQ ID NO: 474549 - DNA, 75 bp, synthetic construct
  source 1..75: mol_type = other DNA
gttaacgcgcgtaaaggcgatattggcgcgttcgattcaccgaaatttatcggcctgccggtgggtgaagtattg

SEQ ID NO: 474550 - DNA, 75 bp, synthetic construct
  source 1..75: mol_type = other DNA
gcctttaatctgtgcccgaaacaggcgaaaggcaatatcaaaagctggaaggctacgccaatgcaactggttaac

SEQ ID NO: 474551 - DNA, 75 bp, synthetic construct
  source 1..75: mol_type = other DNA
gaaagcgtggtgcaatgtctggtgcaggccggtttaattattcctgtcgcgcggctgcgtccggtgctaacgctc

SEQ ID NO: 474552 - DNA, 75 bp, synthetic construct
  source 1..75: mol_type = other DNA
acgccggatgacaacggtctggtgattattcccggttcacgcggcgattactcctggctggttaaacctgttgcg

SEQ ID NO: 474553 - DNA, 75 bp, synthetic construct
  source 1..75: mol_type = other DNA
tctgcgctggatgacgttgctgaagaaagctggctggaggaaaacctgccgtcagcgtttgcacagcatccgtgg

SEQ ID NO: 474554 - DNA, 75 bp, synthetic construct
  source 1..75: mol_type = other DNA
ctcctggtatgccggagcggaaacgggttaccgttatcacctgacggaagacacatttattgagcctcaggccga

SEQ ID NO: 474555 - DNA, 75 bp, synthetic construct
  source 1..75: mol_type = other DNA
tgttggccgactggataaagctccagtgaccgatttcagcagcgtaagctccaatggagttgccacgctggtgtc

SEQ ID NO: 474556 - DNA, 75 bp, synthetic construct
  source 1..75: mol_type = other DNA
agtgcagcgaataaagcattccatacactgacggttgatgagctgacgacgaatggcactgcgtatgccatgcgt

SEQ ID NO: 474557 - DNA, 75 bp, synthetic construct
  source 1..75: mol_type = other DNA
cagattgtactggcgcgtgaactgaatctggagcagatccgcgcgatccatcaggccacggacgcaaccatcgaa

SEQ ID NO: 474558 - DNA, 75 bp, synthetic construct
  source 1..75: mol_type = other DNA
tggcctggggctacgccggtaatgcgggcaatattaccaacccgttttgccgggtgagcgataaatattgccatc

SEQ ID NO: 474559 - DNA, 75 bp, synthetic construct
  source 1..75: mol_type = other DNA
ttgagtatcaaacgccgtggaatcccctgcgtctgaaactcgaatacgatggaaacaattaccagaatgatttcg

SEQ ID NO: 474560 - DNA, 75 bp, synthetic construct
  source 1..75: mol_type = other DNA
ggcgatcagtcatacaaagacaaatcattcgattttaaacttcgcctgtgggaagaaggttactggctaccgcaa

SEQ ID NO: 474561 - DNA, 75 bp, synthetic construct
  source 1..75: mol_type = other DNA
agttgataataatcttgctggtatagatttttctgccccacgattaaataagcttgttacagaagtaattcccgc

SEQ ID NO: 474562 - DNA, 75 bp, synthetic construct
  source 1..75: mol_type = other DNA
tcaacctgcgccggaatctgaaggattgcagtacaccacagtagcgaaccaacttaccgcgctgaagtacaacgc

SEQ ID NO: 474563 - DNA, 75 bp, synthetic construct
  source 1..75: mol_type = other DNA
cgtgcgcacgcatatccgtgattacgttcgcaatgacgtttatctcaacaacttgcaggcgaactactttgccga

SEQ ID NO: 474564 - DNA, 75 bp, synthetic construct
  source 1..75: mol_type = other DNA
aatgccgttgccaggaagcgtcgtcgcatccatcagcccggatgagctgctgaaaacattaccgaagcgcaaagg

SEQ ID NO: 474565 - DNA, 75 bp, synthetic construct
  source 1..75: mol_type = other DNA
cagaaagcgagagagttttatcaccgctatggcgtacaactgattgatgcagcttatgaagcgcatgaggagaag

SEQ ID NO: 474566 - DNA, 75 bp, synthetic construct
  source 1..75: mol_type = other DNA
acgcccgtaatgtgcaaattaacttaccgggggcattgtttgtgccaaacggactgttaaatcaattccgccgtg

SEQ ID NO: 474567 - DNA, 75 bp, synthetic construct
  source 1..75: mol_type = other DNA
acttacaggcgaactactttgccgatctgggcaatggattctacggccaggtatatggcggctatctggaaacca

SEQ ID NO: 474568 - DNA, 75 bp, synthetic construct
  source 1..75: mol_type = other DNA
gtacgtaatgatgtctatctcaacaacttacaggcgaactactttgccgatctgggcaatggattctacggccag

SEQ ID NO: 474569 - DNA, 75 bp, synthetic construct
  source 1..75: mol_type = other DNA
actggtgccatttgctcatcgttatggcgcaaaagttttcgtcacccttaataccattttgcatgacgaagaact

SEQ ID NO: 474570 - DNA, 75 bp, synthetic construct
  source 1..75: mol_type = other DNA
cgattgcaccgcagcaacagtatcagcagccgcagcaaccagttgcgccgcagccgcagtatcagcagccgcaac

SEQ ID NO: 474571 - DNA, 75 bp, synthetic construct
  source 1..75: mol_type = other DNA
aatattcagtaggaaaatgacttatgcagagagaaaagcggctctttcagtcgccgtttttaacaaattaaggca

SEQ ID NO: 474572 - DNA, 75 bp, synthetic construct
  source 1..75: mol_type = other DNA
aatcatacttcaaggaacgtgctgaaatattcagtaggaaaatgacttatgcagagagaaaagcggctctttcag

SEQ ID NO: 474573 - DNA, 75 bp, synthetic construct
  source 1..75: mol_type = other DNA
tgccgctgtttctccgctggcatctggcgtgaaaaaagcgacactggcgacgggggctgccgcaaccgttgccgc

SEQ ID NO: 474574 - DNA, 75 bp, synthetic construct
  source 1..75: mol_type = other DNA
cagccgcaacaaccggttgcgccacagccgcaatatcagcagccgcaacaaccagttgcgccgcagccgcagtat

SEQ ID NO: 474575 - DNA, 75 bp, synthetic construct
  source 1..75: mol_type = other DNA
gatggaagcgcaggggattgtcagcgaacaggggcacaacggtaatcgtgaagtgctggccccaccgccgtttga

SEQ ID NO: 474576 - DNA, 75 bp, synthetic construct
  source 1..75: mol_type = other DNA
ggcagcagacataaaatatgcccgtcagttgactataaaaaagaatgatacacagtatgctctgcgatggctgtt

SEQ ID NO: 474577 - DNA, 75 bp, synthetic construct
  source 1..75: mol_type = other DNA
gctgtgccggatgccatccgttgtgtgaactgccagaacatcatggaggcccgtcatgtgggtcagcatcgttaa

SEQ ID NO: 474578 - DNA, 75 bp, synthetic construct
  source 1..75: mol_type = other DNA
ggcaagtgaaacgcgtttacgcgagatggaacgttatgtcacttccgatactttcacgctacgtagccgtttccg

SEQ ID NO: 474579 - DNA, 75 bp, synthetic construct
  source 1..75: mol_type = other DNA
aaccccgcaacgggaaaagcatacgcaagaccaagccaaaccatcacaacagcccaaaatatcctttgatcgtta

SEQ ID NO: 474580 - DNA, 75 bp, synthetic construct
  source 1..75: mol_type = other DNA
tcatccaggagattgctaataaacctgcaagtgagcgcgcagctactggccttgagcttaatgtaaccacacatt

SEQ ID NO: 474581 - DNA, 75 bp, synthetic construct
  source 1..75: mol_type = other DNA
attcttgatgttaatcattattaatatcataccaatgtttcactctatatctatagtttgcataatactttttat

SEQ ID NO: 474582 - DNA, 75 bp, synthetic construct
  source 1..75: mol_type = other DNA
ctggcgatcagtataacgatgatgaaatcgatgcgatgcagcaggatgaactggcacgtcagttcgcccagacac

SEQ ID NO: 474583 - DNA, 75 bp, synthetic construct
  source 1..75: mol_type = other DNA
atgacaattatcggtgatgaaattcctcttatatctgaaaaacagtcgctttcaaaggtgcttttaaatgatgag

SEQ ID NO: 474584 - DNA, 75 bp, synthetic construct
  source 1..75: mol_type = other DNA
catgttcgagattgatttggcaagtggcacagacgaagagattgcagagtcgcttaaagctgcattaccgcaatg

SEQ ID NO: 474585 - DNA, 75 bp, synthetic construct
  source 1..75: mol_type = other DNA
gataagaacataggttttgaaaagggtaagatctttataacaaccaacctcaatacatatgaatttgatttgcca

SEQ ID NO: 474586 - DNA, 75 bp, synthetic construct
  source 1..75: mol_type = other DNA
gatgctacgtcccgaaaaaggacatgaatttatgctgcgtgtattgtatcagctgaagatggaagggaaatcatt

SEQ ID NO: 474587 - DNA, 75 bp, synthetic construct
  source 1..75: mol_type = other DNA
ctttcaggaacagccttcaccttccttccatcctcagacttcgacggattatcggggaatttaaacctgatctgg

SEQ ID NO: 474588 - DNA, 75 bp, synthetic construct
  source 1..75: mol_type = other DNA
ttttacttgcctgcagagaaaaaagtaaaattgctccggaagccagaaaaagagggcatgatgtcacttttattc

SEQ ID NO: 474589 - DNA, 75 bp, synthetic construct
  source 1..75: mol_type = other DNA
cagaccccttgctctgaaggccgcgagtataccgttcatccgtcagtttcatctgttcatcaacaaaaacgacca

SEQ ID NO: 474590 - DNA, 75 bp, synthetic construct
  source 1..75: mol_type = other DNA
ccgcagcagcagtatcagcagccacaacagccagttgcgccacaaccgcaggataccctgcttcatccgctgttg

SEQ ID NO: 474591 - DNA, 75 bp, synthetic construct
  source 1..75: mol_type = other DNA
tgatgcgtccgattccagacccgtactggaagccgggtgacagtatggatgcccagcatccggtgctgaaaaaag

SEQ ID NO: 474592 - DNA, 75 bp, synthetic construct
  source 1..75: mol_type = other DNA
tggagtaagtatgagtgtcactcatgacaatgagttaagttgtaatctcattattcagaacttgagaaatatgaa

SEQ ID NO: 474593 - DNA, 75 bp, synthetic construct
  source 1..75: mol_type = other DNA
gtacagccactcaaaaacatctgaaatccgaaggtgttcacacaccggtgaccgttattcctcctggatttgatt

SEQ ID NO: 474594 - DNA, 75 bp, synthetic construct
  source 1..75: mol_type = other DNA
cataatatcacagggactcttttagaggtaggagatgtaactgcatggacaaacgtgctgaacgattttttatcc

SEQ ID NO: 474595 - DNA, 75 bp, synthetic construct
  source 1..75: mol_type = other DNA
gaagggtcaggatttccgtcatgtaggcggtgatgagctggataaactgctggcagaaaaagatagcgataaata

SEQ ID NO: 474596 - DNA, 75 bp, synthetic construct
  source 1..75: mol_type = other DNA
cttcatttcatgcgtggagttatcccaacgacggaaatgaaaaaatattgtagcgaaatatgtgccgaaaaagac

SEQ ID NO: 474597 - DNA, 75 bp, synthetic construct
  source 1..75: mol_type = other DNA
tggcttttggcctttcacttccggcaatggcaggtgaaaaagtaatagacatgtacaagtctgaaaactgtggtt

SEQ ID NO: 474598 - DNA, 75 bp, synthetic construct
  source 1..75: mol_type = other DNA
gatggcgagtgaaaaagtgattgatatgtacaaatctgaaaactgtggctgttgttccctgtggggcaaagcgat

SEQ ID NO: 474599 - DNA, 75 bp, synthetic construct
  source 1..75: mol_type = other DNA
atcccaacgacggaaatgaaaaaatattgtagtgaaaattgtgccgaaaaagaccagatggcacacgaactttaa

SEQ ID NO: 474600 - DNA, 75 bp, synthetic construct
  source 1..75: mol_type = other DNA
gtgcttaccacctttgcaaaaaagacgttgaagaaagcaaaactatagaaagaatgcttcacttcatgcacggga

SEQ ID NO: 474601 - DNA, 75 bp, synthetic construct
  source 1..75: mol_type = other DNA
ttataccaacgacggaaatgaaaaaatattgtagtgaaatctgtgccgaaaaagaccagatggcacacgaacttt

SEQ ID NO: 474602 - DNA, 75 bp, synthetic construct
  source 1..75: mol_type = other DNA
ttgtcgcgggtcatgcgccggtgcgctgcacggtacaagcgggtttgatgaacccgaagtataaagttgaaatta

SEQ ID NO: 474603 - DNA, 75 bp, synthetic construct
  source 1..75: mol_type = other DNA
gggttgtcgcgggtcatgctccggtacgctgcacggtgcaagcgggactgatgaatccgcagtataaagttgaaa

SEQ ID NO: 474604 - DNA, 75 bp, synthetic construct
  source 1..75: mol_type = other DNA
gggttgtcgcgggtcatgcgccggtgcgctgcacagtgcaagcaggtctgatgaatccgcagtataaggttgaaa

SEQ ID NO: 474605 - DNA, 75 bp, synthetic construct
  source 1..75: mol_type = other DNA
atctattcactccttatttcaaatctatccatatcagtaattgtgatatttattacgaaaattttagtcggagca

SEQ ID NO: 474606 - DNA, 75 bp, synthetic construct
  source 1..75: mol_type = other DNA
gtgcgctgcacggtacaagcggggttgatgaacccgaagtataaagttgaaattaagattgtggctgcggtgtaa

SEQ ID NO: 474607 - DNA, 75 bp, synthetic construct
  source 1..75: mol_type = other DNA
gggttgtcgcgggtcatgcgccggtgcgctgcacggtacaagcgggtttgatgggtgatgctgccaacttactga

SEQ ID NO: 474608 - DNA, 75 bp, synthetic construct
  source 1..75: mol_type = other DNA
atggacagtctcaatcttaataaacatatttccggtcagttcaacgccgaactggaaagtatccgcacgcaggtg

SEQ ID NO: 474609 - DNA, 75 bp, synthetic construct
  source 1..75: mol_type = other DNA
gaaagagacagaagcactgttccgccagaaggccagtgcccgtcgcgatgcggtaaaccgttacctctgggatga

SEQ ID NO: 474610 - DNA, 75 bp, synthetic construct
  source 1..75: mol_type = other DNA
gtctggcaaatgccgtgcgtagccgattactgacgcctggcggcattctggcgagcgagtatgaaacgggcgaac

SEQ ID NO: 474611 - DNA, 75 bp, synthetic construct
  source 1..75: mol_type = other DNA
agaaataccatattgccgatggtgttccccgcgaaggcggcggtggcgagtatccgttgcaggatgggtttggct

SEQ ID NO: 474612 - DNA, 75 bp, synthetic construct
  source 1..75: mol_type = other DNA
ctcccagcagcatcagccattgttagtcagtctggagtcgctggggcgtcacaccatccaaatgctgcacgacgt

SEQ ID NO: 474613 - DNA, 75 bp, synthetic construct
  source 1..75: mol_type = other DNA
ccgctatcgtaaagtgcgccgtcatcgtaatttcgatttgcgcaagtttgttgaaaatcacttctggttaccgga

SEQ ID NO: 474614 - DNA, 75 bp, synthetic construct
  source 1..75: mol_type = other DNA
ccggacggttcgctgcttaaccgctactgggatgaccgtgacacaccgcgcgacgaatcctggcttgaggacgta

SEQ ID NO: 474615 - DNA, 75 bp, synthetic construct
  source 1..75: mol_type = other DNA
atggaatatgccttctggatggacggagcagaatcgctgatccctaatcaggcctatcgccatgtagtgcggatg

SEQ ID NO: 474616 - DNA, 75 bp, synthetic construct
  source 1..75: mol_type = other DNA
ccagccagcacagtgctgcgcgcccttgatattgtaaaacgtgattatgaaaagaaattacagaacgatgatgag

SEQ ID NO: 474617 - DNA, 75 bp, synthetic construct
  source 1..75: mol_type = other DNA
gtttttgcgctgatggtggaactgtttgaagaagatggcgtacgcggcgcgcgccgttatctttcccatctgaaa

SEQ ID NO: 474618 - DNA, 75 bp, synthetic construct
  source 1..75: mol_type = other DNA
aacaacaggctctcttttccgctgcggccatcgtgccgttatatgtcggcatggcaaaccacgaacaggccgatc

SEQ ID NO: 474619 - DNA, 75 bp, synthetic construct
  source 1..75: mol_type = other DNA
atatcgaccagctatggccggtattaacccgcgagccacagacccatatcccgtggtcgtctctgctggcgctgc

SEQ ID NO: 474620 - DNA, 75 bp, synthetic construct
  source 1..75: mol_type = other DNA
tacggacgcggctgtgatatcccgcttcatcaatgccctgaaagcccgaatcgacgcttaccagaagcgtaagcg

SEQ ID NO: 474621 - DNA, 75 bp, synthetic construct
  source 1..75: mol_type = other DNA
acaccggctttcagcaggtgctggcgcgtgctgactatctggcgaaggagagtaccaaagcttacggcaccggtg

SEQ ID NO: 474622 - DNA, 75 bp, synthetic construct
  source 1..75: mol_type = other DNA
tgggaagcgttactgaacacccgtggtacaacctggcgtaaactggacgaaaccacccgcaataaaatcaccgat

SEQ ID NO: 474623 - DNA, 75 bp, synthetic construct
  source 1..75: mol_type = other DNA
tggtcgcaaacggcctggcatgagcctatccataatttaggtggggctcctggtgcgtggctggccgataccctg

SEQ ID NO: 474624 - DNA, 75 bp, synthetic construct
  source 1..75: mol_type = other DNA
aaaacgctcccgccgttgccggaacaaagtggtgttgaactcaatatgccgccgatgaatggtgccgagtggctg

SEQ ID NO: 474625 - DNA, 75 bp, synthetic construct
  source 1..75: mol_type = other DNA
gcaccgttgtactgattaagatgaagcgcacccaatacatctgggtaactgttgttccggctgtatggctgctta

SEQ ID NO: 474626 - DNA, 75 bp, synthetic construct
  source 1..75: mol_type = other DNA
ccggcgattaccgcgctccgggatcactggccgggatgattaaacaggcgtggtgcagtgccctgggagtggatg

SEQ ID NO: 474627 - DNA, 75 bp, synthetic construct
  source 1..75: mol_type = other DNA
tacgggatatgctgaaccgtgctgactatctcgcgaaagagtacaccaaagtcaacggtaccggtgagcgtaatt

SEQ ID NO: 474628 - DNA, 75 bp, synthetic construct
  source 1..75: mol_type = other DNA
ttttccggcctggccggcggtgtggctggaacgcggtgatgacactggctttcagcaggtgctggaacgtgctga

SEQ ID NO: 474629 - DNA, 75 bp, synthetic construct
  source 1..75: mol_type = other DNA
ctggaactcgatgatgatgctggtttacgggatatgctgaagcgtgctgactatctcgcgaaagaatacaccaaa

SEQ ID NO: 474630 - DNA, 75 bp, synthetic construct
  source 1..75: mol_type = other DNA
ctggcgcgccaatatccggcaaaccaaaagtatgggttgttgtctggcggcaacgatgtatccactcgcccactg

SEQ ID NO: 474631 - DNA, 75 bp, synthetic construct
  source 1..75: mol_type = other DNA
tacgggatatgctgaagcgtgctgactatctcgcgaaagagtacaccaaagttaatggcaccggtgagcgcaatt

SEQ ID NO: 474632 - DNA, 75 bp, synthetic construct
  source 1..75: mol_type = other DNA
aactggatccgttgttcgatcaggcggtgcagtttgtcactgaaaaacgcaaagcgtcaatttcaggcgtacagc

SEQ ID NO: 474633 - DNA, 75 bp, synthetic construct
  source 1..75: mol_type = other DNA
acaacgcatgaatactcaagatttagatgctttgcttgatgttttttacaacatcggtatcaaaggagtcctaga

SEQ ID NO: 474634 - DNA, 75 bp, synthetic construct
  source 1..75: mol_type = other DNA
gacgctggcggtaggtatcgctcacgtgttccacaaagtgctgccgatggctgacatgggcttctggtatcactt

SEQ ID NO: 474635 - DNA, 75 bp, synthetic construct
  source 1..75: mol_type = other DNA
ttgcgcttgaacaaatggctcgcctggtggaagcgcgtctggctgatttccgtattaaagccgatgtcgtcaatt

SEQ ID NO: 474636 - DNA, 75 bp, synthetic construct
  source 1..75: mol_type = other DNA
gctacaacaaagccattactttatggcaacgttgcgtagagatgtcgccggagtttgccgatggctggcgcgggt

SEQ ID NO: 474637 - DNA, 75 bp, synthetic construct
  source 1..75: mol_type = other DNA
gaaaatcacggcaaacagcatgaatcacgccgtgcccgtattcttcgcggcgcgctagcgcgtcgtaaacggttg

SEQ ID NO: 474638 - DNA, 75 bp, synthetic construct
  source 1..75: mol_type = other DNA
atgaacaggagaatgccatcagaagcctgaacatcagggaatcgcttaaagacgctatgtgtatggctctggatg

SEQ ID NO: 474639 - DNA, 75 bp, synthetic construct
  source 1..75: mol_type = other DNA
gcagtatcaacagccgcaacaaccggttgcaccgcagcagcaggataccctgcttcatccgctgttgatgcgtaa

SEQ ID NO: 474640 - DNA, 75 bp, synthetic construct
  source 1..75: mol_type = other DNA
cggtattctgttcgaagcactgttcatcctgaccgcgctggatgcgggtacccgttctggccgctttatgctgca

SEQ ID NO: 474641 - DNA, 75 bp, synthetic construct
  source 1..75: mol_type = other DNA
gccggtccgctggtgggtccggttctcgccgcgcagatgggttacctgccaggtacgctgtggctgctggcgggc

SEQ ID NO: 474642 - DNA, 75 bp, synthetic construct
  source 1..75: mol_type = other DNA
gccgcaacaaccagttgcgccacagccgcaatatcaacagccgcaacaaccggttgcaccgcagcagcaatatca

SEQ ID NO: 474643 - DNA, 75 bp, synthetic construct
  source 1..75: mol_type = other DNA
aacttgcggcctggtatcaaccgattccagaaccggttaaagaaccagaaccgatcaaatcttcgctgaaagcac

SEQ ID NO: 474644 - DNA, 75 bp, synthetic construct
  source 1..75: mol_type = other DNA
gctgggtgtgcgtaatctggcgggttataacgaaaaaattgctgaagccgatcgcatgatgcgtccgattccaga

SEQ ID NO: 474645 - DNA, 75 bp, synthetic construct
  source 1..75: mol_type = other DNA
atgattaaacaggcgtggtgcagtgccctgggagtggatgtcggagatcatgccacgctggtgcattttccggcc

SEQ ID NO: 474646 - DNA, 75 bp, synthetic construct
  source 1..75: mol_type = other DNA
tcgcgacgatatgtatctgggcgcaggcaacgcctatatgcgtgaagttggcgctgcacttgatgacggttacaa

SEQ ID NO: 474647 - DNA, 75 bp, synthetic construct
  source 1..75: mol_type = other DNA
tggttcgttgctctctactcaacaaggtttatgggccaaagatggtgacaactttgtctatattgagcgagtaaa

SEQ ID NO: 474648 - DNA, 75 bp, synthetic construct
  source 1..75: mol_type = other DNA
cggctcgttgctctctacccagcaaggcttatgggcgaaagatggcaacaacttcgtctacattgagcgggttaa

SEQ ID NO: 474649 - DNA, 75 bp, synthetic construct
  source 1..75: mol_type = other DNA
tgctgactatctggcgaaggagagtaccaaagcttacggcaccggtgagcgcaactttggctgcagtcgtggctg

SEQ ID NO: 474650 - DNA, 75 bp, synthetic construct
  source 1..75: mol_type = other DNA
tcagcggcgtatcctgcaaagaaggtgaagtgactgaaggcgtattcgaaaaataccgtatcgcgacctacaaag

SEQ ID NO: 474651 - DNA, 75 bp, synthetic construct
  source 1..75: mol_type = other DNA
ttacgtgaacactttggttcactggaaaacctgaaaggtaaaaaaatcgccatgacctgggcctactccccaagc

SEQ ID NO: 474652 - DNA, 75 bp, synthetic construct
  source 1..75: mol_type = other DNA
ctgctgatgctgacagataagcaaatcgccgatttccagaaacattatcagactgaagcggagcgttttcatatt

SEQ ID NO: 474653 - DNA, 75 bp, synthetic construct
  source 1..75: mol_type = other DNA
tcgggaaggtaaacgcgtgcatcccacaaccctgcattacgtctgggcccgggagtttggggagtgcaaggtaaa

SEQ ID NO: 474654 - DNA, 75 bp, synthetic construct
  source 1..75: mol_type = other DNA
gctgactatctggcgaaggaacataccaaagctcactgcaccggtgagcgcaattttggctgtagccggagttga

SEQ ID NO: 474655 - DNA, 75 bp, synthetic construct
  source 1..75: mol_type = other DNA
acaggaagtcggacagacctctctgaaagaagcattagttgatattgctggcaatatagagtcaaaaactagaag

SEQ ID NO: 474656 - DNA, 75 bp, synthetic construct
  source 1..75: mol_type = other DNA
ccgggccttatgccacgttggcgcattttcctgacacgtcggcggtgtggctggcgcgtaatgatgacaccggct

SEQ ID NO: 474657 - DNA, 75 bp, synthetic construct
  source 1..75: mol_type = other DNA
tcgtggtttcatttgcttatgtgctggtcaacctggtggtggatttgctctatttgtggattgatccgcgtatcg

SEQ ID NO: 474658 - DNA, 75 bp, synthetic construct
  source 1..75: mol_type = other DNA
aatgttcatccccgcctgacggcattgcgggttgacctgcgtttcccggatgtaccggcagcaacggacgcagct

SEQ ID NO: 474659 - DNA, 75 bp, synthetic construct
  source 1..75: mol_type = other DNA
caacggacgcagctgtgatatcccgcttcatcaatgccctgaaagcccgaatcgacgcttaccagaatcgtaagc

SEQ ID NO: 474660 - DNA, 75 bp, synthetic construct
  source 1..75: mol_type = other DNA
aacggacgcagctgtgatatcccgcttcatcaatgccctgaaagcccgaatccacgcttaccagaatcgtaagca

SEQ ID NO: 474661 - DNA, 75 bp, synthetic construct
  source 1..75: mol_type = other DNA
aacggacgcagctgtgatatcccgcttcatcaatgccctgaaagcccgaatccacgcttaccagaaacgtaagct

SEQ ID NO: 474662 - DNA, 75 bp, synthetic construct
  source 1..75: mol_type = other DNA
ccggatgctatgccacactggcgaattttccgtccaggccagcggtgtggctggatcgtggtgatgacgttggtt

SEQ ID NO: 474663 - DNA, 75 bp, synthetic construct
  source 1..75: mol_type = other DNA
acgtgctgactatctggcgaaggagtataccaaagctcactgcaccggtgagcgcaattttggctgtagccggag

SEQ ID NO: 474664 - DNA, 75 bp, synthetic construct
  source 1..75: mol_type = other DNA
aaggtaaaaaacactatcacctgatgctgctggtcaaccgggatacctggtgtcgtgccggcgattaccgcgctc

SEQ ID NO: 474665 - DNA, 75 bp, synthetic construct
  source 1..75: mol_type = other DNA
tccgggttcactggccggaatgattcaacaggcctggtgcagtgccctgggggtggatgccgggccttatgccac

SEQ ID NO: 474666 - DNA, 75 bp, synthetic construct
  source 1..75: mol_type = other DNA
tccgggatcactggccggtatgattcaacaggcctggtgcagtgccctgggggtggatgccgggccttatgccac

SEQ ID NO: 474667 - DNA, 75 bp, synthetic construct
  source 1..75: mol_type = other DNA
ccggtgattaccgtgctccgggatcactggccgggatgattaaacaggcgtggtgcagtgccctgggagtggatg

SEQ ID NO: 474668 - DNA, 75 bp, synthetic construct
  source 1..75: mol_type = other DNA
aacggacgcagctgtgatatcccgcttcatcaatgccctgaaagcccgaatctacgcttaccagaagcgtaagcg

SEQ ID NO: 474669 - DNA, 75 bp, synthetic construct
  source 1..75: mol_type = other DNA
tccgggctcactggccggtatgattaaacaggcctggtgcagtgccctgggggtggatgccgggccttatgccac

SEQ ID NO: 474670 - DNA, 75 bp, synthetic construct
  source 1..75: mol_type = other DNA
tccgggttcactggccggcatgattaaacaggcctggtgcagtgccctgggggtggatgccgggccttatgccac

SEQ ID NO: 474671 - DNA, 75 bp, synthetic construct
  source 1..75: mol_type = other DNA
cagcagaagcacagcgccagtcgctgattgatcctgcaatggcttccattagtctgattcaactgaaattgcagg

SEQ ID NO: 474672 - DNA, 75 bp, synthetic construct
  source 1..75: mol_type = other DNA
tgagaaatgggtgacggatactgatgcacagcatagcggcgcagtagaagcggcagaagcacagcgccagtcact

SEQ ID NO: 474673 - DNA, 75 bp, synthetic construct
  source 1..75: mol_type = other DNA
tgagaaatgggtgacggatactgatgcacagcatagcgccgcagtagaagccgcagaagcacagcgccagtcact

SEQ ID NO: 474674 - DNA, 75 bp, synthetic construct
  source 1..75: mol_type = other DNA
tggtaacacgttctggtgtatgctggtggtgatatccctggcagggagcgcaggaatatgcgtttatatgctcaa

SEQ ID NO: 474675 - DNA, 75 bp, synthetic construct
  source 1..75: mol_type = other DNA
cggcagaagcacagcgccagtcgctgattgatcctgcaatggcttccattagtctgattcaactgaaattacagg

SEQ ID NO: 474676 - DNA, 75 bp, synthetic construct
  source 1..75: mol_type = other DNA
ccgcagaagcacagcgccagtcgctgattgatactgcaatggcttccattagtctgattcaactgaaattccagg

SEQ ID NO: 474677 - DNA, 75 bp, synthetic construct
  source 1..75: mol_type = other DNA
atgcgtcccgcgactatcgcccccttaccgccatacgataaatgggatggtgagaaatgggtgactgatactgaa

SEQ ID NO: 474678 - DNA, 75 bp, synthetic construct
  source 1..75: mol_type = other DNA
atgcgtcccgcgactatcgcccctttagcgccatacgataaatgggatggtgagaaatgggtgacagatactgaa

SEQ ID NO: 474679 - DNA, 75 bp, synthetic construct
  source 1..75: mol_type = other DNA
aattgccagatacagaaggcgcagctacgaacgccgatacagcgcgctttatttcaggtgcaaacagaagacccg

SEQ ID NO: 474680 - DNA, 75 bp, synthetic construct
  source 1..75: mol_type = other DNA
tgagaaatgggtgacggatactgatgcacagcatagcgtcgcagtagaagctgcagaagcacagcgccagtcact

SEQ ID NO: 474681 - DNA, 75 bp, synthetic construct
  source 1..75: mol_type = other DNA
tgagaaatgggtgacggatactgatgcacagcatagcgacgcagtagaagcagcagaagcacagcgccagtcact

SEQ ID NO: 474682 - DNA, 75 bp, synthetic construct
  source 1..75: mol_type = other DNA
atgcgtcccgcgactatcgccccgttatcgccatacgataaatgggatggtgagaaatgggtgacagatactgaa

SEQ ID NO: 474683 - DNA, 75 bp, synthetic construct
  source 1..75: mol_type = other DNA
gatggctggccgctgtatgaatcacgcctgagggaaagctgcacgttatcagcaagcgttacactcagcgcattg

SEQ ID NO: 474684 - DNA, 75 bp, synthetic construct
  source 1..75: mol_type = other DNA
tgtggggatgccagatttacatcccggacgcggctacccgattggcgcagcgttcttctctgttggtcgttttta

SEQ ID NO: 474685 - DNA, 75 bp, synthetic construct
  source 1..75: mol_type = other DNA
acactggcgcgtcttctgagcctgctgtcggcctttgaggtcgtggtatgggacggatggctggccgctgtatga

SEQ ID NO: 474686 - DNA, 75 bp, synthetic construct
  source 1..75: mol_type = other DNA
ctacccgacaggacgtcgcggtaacggtgctggaaacagaaacgggtcgctactctgacacactgcgttcggcgc

SEQ ID NO: 474687 - DNA, 75 bp, synthetic construct
  source 1..75: mol_type = other DNA
gggcgcaccgagtgtaaagggcgtctggcagcgaaatacacggcgacgcaactctcgcgtactgaacttggcagt

SEQ ID NO: 474688 - DNA, 75 bp, synthetic construct
  source 1..75: mol_type = other DNA
ggacgcggctacccgattggcgcagcgttcttctctgttggtcgtttttacccggcactggtcggcaatgatatc

SEQ ID NO: 474689 - DNA, 75 bp, synthetic construct
  source 1..75: mol_type = other DNA
ttcgcactgtatgccgatatccacttattcactcaactgaccttaattctgcaacccacaggaaagtgcctgcaa

SEQ ID NO: 474690 - DNA, 75 bp, synthetic construct
  source 1..75: mol_type = other DNA
atttatcccgcctgccgctctatctcaatgccgacagcccggtagcctgtgcgttgcaccgggctttaacgcttg

SEQ ID NO: 474691 - DNA, 75 bp, synthetic construct
  source 1..75: mol_type = other DNA
atgcatccggtgctacaggcggatgaaacgccactacagatactgagcactctgaaacgcgtattgcgtgggcta

SEQ ID NO: 474692 - DNA, 75 bp, synthetic construct
  source 1..75: mol_type = other DNA
gggaatgccggtaatgcgggactagtttttcatcacctgttgctgtcagaagaagtcattacactgacttttttg

SEQ ID NO: 474693 - DNA, 75 bp, synthetic construct
  source 1..75: mol_type = other DNA
gtatacccacaggaatgcaacagcccgcgtgaggaatggcgtcgctggcggcgttggattgtgggctacgcggtc

SEQ ID NO: 474694 - DNA, 75 bp, synthetic construct
  source 1..75: mol_type = other DNA
attgatagcaaaagcaagagtactgaatttccggctaaccgaagtctataaagaaatcctggaagccgaagcgag

SEQ ID NO: 474695 - DNA, 75 bp, synthetic construct
  source 1..75: mol_type = other DNA
gtctggcggcgactggcgatcgcaccattaacattcacagttattacaacgatcagccggttgattatctcttct

SEQ ID NO: 474696 - DNA, 75 bp, synthetic construct
  source 1..75: mol_type = other DNA
cacggtatcaatcctgaaaggctgaccattgagctctccgatgccgacggcaatattgtactgagttatcaggaa

SEQ ID NO: 474697 - DNA, 75 bp, synthetic construct
  source 1..75: mol_type = other DNA
agcgttacttaacgatgccgtggccctgacgccagcgaccgccatccagggcgtgttgcacggtattgagccgga

SEQ ID NO: 474698 - DNA, 75 bp, synthetic construct
  source 1..75: mol_type = other DNA
actactccgccggagtggacatttctcgctataaaaatgtgcctgttccaacctcatatatggctgaaaaatcac

SEQ ID NO: 474699 - DNA, 75 bp, synthetic construct
  source 1..75: mol_type = other DNA
gccaccggaacctattacaaagtggactactccgccggagtggacatttctcgttataaaaatgtacccgttcca

SEQ ID NO: 474700 - DNA, 75 bp, synthetic construct
  source 1..75: mol_type = other DNA
tccggcggtgaaaggtggtgaagggcatcagagtgttttcccaccggatgtgactgcggtattcgatcatggcaa

SEQ ID NO: 474701 - DNA, 75 bp, synthetic construct
  source 1..75: mol_type = other DNA
ccaacaaagtcttcgtgcctgcccaaccaatcaggaagtgctttgcctgcataatctgctgctggtgttaagtgg

SEQ ID NO: 474702 - DNA, 75 bp, synthetic construct
  source 1..75: mol_type = other DNA
tcgtcaggacaacgcgcgtttgcagcgcgcgaaactgctgcgtgattatccgctgaacgccaactctgtggtggc

SEQ ID NO: 474703 - DNA, 75 bp, synthetic construct
  source 1..75: mol_type = other DNA
tatttttgccgataaccagcccgattttacctggcttgatgcttacgaagagaagcgttttgagcagtatttcct

SEQ ID NO: 474704 - DNA, 75 bp, synthetic construct
  source 1..75: mol_type = other DNA
ccctcgaagcccatgaagacggcgcacaaaccgtgtgggtcggcgaaacggagccgatgcacggtttacaggtga

SEQ ID NO: 474705 - DNA, 75 bp, synthetic construct
  source 1..75: mol_type = other DNA
caacctgacctgttgtcgctgtatggcgatttacaacagcagcataaagaaaaatgcctgatggtggcgatgctg

SEQ ID NO: 474706 - DNA, 75 bp, synthetic construct
  source 1..75: mol_type = other DNA
attgatggcgattaatccagcctggccgaaagcggcattattcaccaccgtgatgccttttatttttagctacgt

SEQ ID NO: 474707 - DNA, 75 bp, synthetic construct
  source 1..75: mol_type = other DNA
cgtggatttcgggcgggattgagtttaactggccacaacaccatcgcccaaccacctttatgcccgttgatttca

SEQ ID NO: 474708 - DNA, 75 bp, synthetic construct
  source 1..75: mol_type = other DNA
ccattttgcgctatcacatttcgggtccgctggacgatccgcaaatcaacgaagtgttgcgccaaccgcgtaaag

SEQ ID NO: 474709 - DNA, 75 bp, synthetic construct
  source 1..75: mol_type = other DNA
tgggccgtcctgttcagtatctggaaaccatgccggatgcggaggcaggtaaagcattcctcgcggtaggcgact

SEQ ID NO: 474710 - DNA, 75 bp, synthetic construct
  source 1..75: mol_type = other DNA
tgcaaaagctgaaaaacggcaacggggattacatctggcgtgatcgtctcgtcgctgactctcccgataccctcc

SEQ ID NO: 474711 - DNA, 75 bp, synthetic construct
  source 1..75: mol_type = other DNA
caggattcatcaaaattttcacgcaaaaatatttaggcggtggcgtggtggattcgaacgcgatcaagattctgg

SEQ ID NO: 474712 - DNA, 75 bp, synthetic construct
  source 1..75: mol_type = other DNA
ccattgcagacgaagagcgcagcaagccaggtaaaagcagccagaccactgaccccgcagaactacgcaactaca

SEQ ID NO: 474713 - DNA, 75 bp, synthetic construct
  source 1..75: mol_type = other DNA
acgctgctcgataggccagttcatgcctcacagaacgtcctgcgggtgcgcaacctgtgcgccccaacgcagccc

SEQ ID NO: 474714 - DNA, 75 bp, synthetic construct
  source 1..75: mol_type = other DNA
ccattgaagcgcatgacgatggcgcacagaccgtatgggtcggtgaaacagagccgatgcatggtcttcaggtga

SEQ ID NO: 474715 - DNA, 75 bp, synthetic construct
  source 1..75: mol_type = other DNA
ctaataatttagcgtccaattctgggctttttggttgcgctctctccgcccagaattgtgcaccaattagcccag

SEQ ID NO: 474716 - DNA, 75 bp, synthetic construct
  source 1..75: mol_type = other DNA
gtacagatgaagcctggtttatcggtcaacatctggagcaatatcatcacgcgagccgttcaccgttcgattact

SEQ ID NO: 474717 - DNA, 75 bp, synthetic construct
  source 1..75: mol_type = other DNA
ccagcgataaaacccgtccgttcggcacgctggagaagatggaggctgctgccgtttcctctgatggtcttatcg

SEQ ID NO: 474718 - DNA, 75 bp, synthetic construct
  source 1..75: mol_type = other DNA
aatcaaatgagtttcagaaactggtttccactggcggcgcaactgtaggacgaggcacagaaggcagcgcacgca

SEQ ID NO: 474719 - DNA, 75 bp, synthetic construct
  source 1..75: mol_type = other DNA
gcaacgttgcgttgagatgtcgccggagtttgccgacggctggcgtgggctggcaatccatgcgtggaataagca

SEQ ID NO: 474720 - DNA, 75 bp, synthetic construct
  source 1..75: mol_type = other DNA
gcatagccatgacctgcatgctgtcatccggcattgtctgtgcttcgcaggacagtgcggcttttattgaatccc

SEQ ID NO: 474721 - DNA, 75 bp, synthetic construct
  source 1..75: mol_type = other DNA
accggaagaaggtctgattcgcatgctgccggaggccagggcgctgggtatccccgcactggttaacggactcat

SEQ ID NO: 474722 - DNA, 75 bp, synthetic construct
  source 1..75: mol_type = other DNA
aggctttggctgccgatattgtaattaaaaggatttttgatgcagcatctaaaatagaggctgatgatgaaacaa

SEQ ID NO: 474723 - DNA, 75 bp, synthetic construct
  source 1..75: mol_type = other DNA
gcgaagcggtagagcaatatctggagcgtcagcaatttccggtgcgtagggtaaaaggcggcaagcaaaggagtg

SEQ ID NO: 474724 - DNA, 75 bp, synthetic construct
  source 1..75: mol_type = other DNA
tcgctaccatgatccgctgacccatgagtttatcgacagaacgcagttgatacgtagctacactaaaccgaaaaa

SEQ ID NO: 474725 - DNA, 75 bp, synthetic construct
  source 1..75: mol_type = other DNA
tgcgaattattacgctgttaattgatggcgaccggaatgagttgtcgaatctattagatactgcatttgagatta

SEQ ID NO: 474726 - DNA, 75 bp, synthetic construct
  source 1..75: mol_type = other DNA
gcgttagttgaaaactatgagcaagtggatatagagactaagctattggtgccgcttaagaaaacgtatttgcca

SEQ ID NO: 474727 - DNA, 75 bp, synthetic construct
  source 1..75: mol_type = other DNA
tatgtgaaacctggatgctcaagagagcagttgtttacccggtatcaggagcttgagccacagactaagccaggc

SEQ ID NO: 474728 - DNA, 75 bp, synthetic construct
  source 1..75: mol_type = other DNA
atgaatgtttttattgatacaaatctatatttagaattttatcgaatgggtaaggataaactagatgagctagat

SEQ ID NO: 474729 - DNA, 75 bp, synthetic construct
  source 1..75: mol_type = other DNA
agatatcgttctttagttgattcattcactggttctgccacaattttaaaacaagtcgcgcatacaaaccagatg

SEQ ID NO: 474730 - DNA, 75 bp, synthetic construct
  source 1..75: mol_type = other DNA
gcgatagctgactttttcaatattgtaaagaagaacaaacacggtttccgcccaggcaaaacatctgacgctcgt

SEQ ID NO: 474731 - DNA, 75 bp, synthetic construct
  source 1..75: mol_type = other DNA
ttgatttaattccggatgaacatgagcggatattcagaaaacagaagcctttgtatatggcgccgggaaatggct

SEQ ID NO: 474732 - DNA, 75 bp, synthetic construct
  source 1..75: mol_type = other DNA
tgcgccgccgcgccgaaaggtcactgggtggtgattgacggcggtagtgcaccggaaaacgacatcgtcgccatc

SEQ ID NO: 474733 - DNA, 75 bp, synthetic construct
  source 1..75: mol_type = other DNA
aagtcacctttaaagaagataacagcttgccggtgcgtaagccgtcatttctgatcaccaatccaggttccaacc

SEQ ID NO: 474734 - DNA, 75 bp, synthetic construct
  source 1..75: mol_type = other DNA
cggaaaaacgtgcggcagaagagctgaacaagcgtgatgcttatgacgtattaatcgtcggttccggcccggcgg

SEQ ID NO: 474735 - DNA, 75 bp, synthetic construct
  source 1..75: mol_type = other DNA
aagcactttcgcacgttagtgcgtttggcaaaacgctggaagcatttccacgatatcccgggtctgaagtccttc

SEQ ID NO: 474736 - DNA, 75 bp, synthetic construct
  source 1..75: mol_type = other DNA
aaagacttcagaacgcttgttcgactggctaaaaagtggcgaaaccatgccgggttaacacatctgaaatcattt

SEQ ID NO: 474737 - DNA, 75 bp, synthetic construct
  source 1..75: mol_type = other DNA
gcaatagcatgatgggcgatgatggcgcaggcccgctgctggcggaaaagtgcgccgccgcgccgaaaggtaact

SEQ ID NO: 474738 - DNA, 75 bp, synthetic construct
  source 1..75: mol_type = other DNA
cactaccggaattgaataacctgtccattatatatcaaataaaagcggtcagtgctctgggtgatgctgccaact

SEQ ID NO: 474739 - DNA, 75 bp, synthetic construct
  source 1..75: mol_type = other DNA
ttggtggcgacatcacttaacaccttctccacctttatggtgcatgacaaaatcaactacaacattgatgaaccg

SEQ ID NO: 474740 - DNA, 75 bp, synthetic construct
  source 1..75: mol_type = other DNA
cctacgcgagagcagaaaaagcattagttgatatcgtgcgccattctcaacatcctttagatgaaaaacaattag

SEQ ID NO: 474741 - DNA, 75 bp, synthetic construct
  source 1..75: mol_type = other DNA
gctgaaatcgctgaactgtcagacaaagtcacctttaaagaagataacagcttgccggtgcgtaagccgtctttc

SEQ ID NO: 474742 - DNA, 75 bp, synthetic construct
  source 1..75: mol_type = other DNA
gggcctctgtaaaagcgaatgcagattttatctgtgttgaaacttattctggttacagtagtaatcgatgtgatc

SEQ ID NO: 474743 - DNA, 75 bp, synthetic construct
  source 1..75: mol_type = other DNA
ttgcgtttgttaatcagggtaatgactccaacttactgatagtgttttatgttcagataatgcccgatgaccttg

SEQ ID NO: 474744 - DNA, 75 bp, synthetic construct
  source 1..75: mol_type = other DNA
aggggatgggaatcgctcgacaggttaaatggaatactgaagaaatcgatcgcgatcgattgtctgttgctacca

SEQ ID NO: 474745 - DNA, 75 bp, synthetic construct
  source 1..75: mol_type = other DNA
acagcttccggctttgccagacgagttaaaagcgcaggctaaagagattgccggatgcgaaaaccgcgtctggct

SEQ ID NO: 474746 - DNA, 75 bp, synthetic construct
  source 1..75: mol_type = other DNA
ttggcagaaaagaaacagctgactcgccgtattgaacaagcgtcggcgcgtgaagttgaatggcaggaaaaagcc

SEQ ID NO: 474747 - DNA, 75 bp, synthetic construct
  source 1..75: mol_type = other DNA
gtgctgatgaagagttagatggtgaaaatgttatatggggtgagcccgcttattattggtttgttccctctttaa

SEQ ID NO: 474748 - DNA, 75 bp, synthetic construct
  source 1..75: mol_type = other DNA
aaccatttacgacctcatcagccgcgaggctttcccgaaacaaatcagcctgggcggaaaaaacgtggcgtgggc

SEQ ID NO: 474749 - DNA, 75 bp, synthetic construct
  source 1..75: mol_type = other DNA
cttctgcccctgccgccccgctgatgccggtttctgataccgttcacgagcgctttatccgtctgcccgaagtga

SEQ ID NO: 474750 - DNA, 75 bp, synthetic construct
  source 1..75: mol_type = other DNA
tagttacaccggagctccctaattctaaagctgttcttgaatccgaacgtattgccatttttgatggtggcttgg

SEQ ID NO: 474751 - DNA, 75 bp, synthetic construct
  source 1..75: mol_type = other DNA
ttgtacgctggatgcggcgcagccttataagctggagattgctttcttgtctgcggtgaaagccgctatcagtaa

SEQ ID NO: 474752 - DNA, 75 bp, synthetic construct
  source 1..75: mol_type = other DNA
cacgaagtgaaaagccggatagtctgtcagaaacccgctggaaaatgctgaccgacgcaggtaaaacgcttggat

SEQ ID NO: 474753 - DNA, 75 bp, synthetic construct
  source 1..75: mol_type = other DNA
gccacacatctacaacaagcagactaaaaagcgccttgaaactcggtttaaagatttaaacgatccgctcaaatt

SEQ ID NO: 474754 - DNA, 75 bp, synthetic construct
  source 1..75: mol_type = other DNA
gcaagatggcgacattatgtggcaggttgagtttctcgccgatgaaggcgaagaaggtgaatgcctgccaatgtt

SEQ ID NO: 474755 - DNA, 75 bp, synthetic construct
  source 1..75: mol_type = other DNA
agccagccggagggcatgacaagctgaaactctatcgggtgactgacattctgacctgttttcttgatcttcccg

SEQ ID NO: 474756 - DNA, 75 bp, synthetic construct
  source 1..75: mol_type = other DNA
ggcttttcatgcgcaccttgaggaaactcatggacagatagaacgtattgatcaagtcgtagaatccgaatcaaa

SEQ ID NO: 474757 - DNA, 75 bp, synthetic construct
  source 1..75: mol_type = other DNA
gtgagatctaccggatcatgaacgagatggcgcgcaaggacgtggcgatcctgatgatctccagcgaactgccgg

SEQ ID NO: 474758 - DNA, 75 bp, synthetic construct
  source 1..75: mol_type = other DNA
gaagaggcgctggtggatgtgattgccgccgacccgattcatcagcggatctgtaaagagctgggtaaaaatctg

SEQ ID NO: 474759 - DNA, 75 bp, synthetic construct
  source 1..75: mol_type = other DNA
ctgggggatattttaagccagctctacctcgcctctgccgtgctgaagcgttatgacgacgaaggccgtaatgaa

SEQ ID NO: 474760 - DNA, 75 bp, synthetic construct
  source 1..75: mol_type = other DNA
gatgcggcggtgtacgatctgggcaatggcaccagcgttatcagtaccaccgacttctttatgccgatcgttgat

SEQ ID NO: 474761 - DNA, 75 bp, synthetic construct
  source 1..75: mol_type = other DNA
ttgcttcacctgatggattcggttttgaaaatccacgtattatcgttgaggtaaaacatcgcagggagcaaatgg

SEQ ID NO: 474762 - DNA, 75 bp, synthetic construct
  source 1..75: mol_type = other DNA
ggcagccagagaacgagcgatcgctcggcaacgggagaagttggctgatccggtctggcgagaatctcaatatca

SEQ ID NO: 474763 - DNA, 75 bp, synthetic construct
  source 1..75: mol_type = other DNA
gtggtcggcgtgggtactggtgcctctggccattatcctcgtgccatttaactttgcgcctatgcgtaagtcgat

SEQ ID NO: 474764 - DNA, 75 bp, synthetic construct
  source 1..75: mol_type = other DNA
gcagaacagtaattttttctctgaacgcaatattttcaacatcctgaccgaagtctccatctacgggatcatggc

SEQ ID NO: 474765 - DNA, 75 bp, synthetic construct
  source 1..75: mol_type = other DNA
atggaggttagagaactggcggagaaaactaacactcctcttttacaatcaggatcacttgcgataagtaaactg

SEQ ID NO: 474766 - DNA, 75 bp, synthetic construct
  source 1..75: mol_type = other DNA
atgtctaaggaaaaaaaatctaagcaaaataaagaactttgtctggagtttcatacgctgcccacttttgcacag

SEQ ID NO: 474767 - DNA, 75 bp, synthetic construct
  source 1..75: mol_type = other DNA
accacggagtttaaactgagttggctggatcggttcccgccacacaaaccaacgccaccaacgccaaccggcgca

SEQ ID NO: 474768 - DNA, 75 bp, synthetic construct
  source 1..75: mol_type = other DNA
cacgcatgacggcacaggagcccccggaacgttatgctaccgcatgtcatttgcaaaaatgacagatagatatac

SEQ ID NO: 474769 - DNA, 75 bp, synthetic construct
  source 1..75: mol_type = other DNA
tgggttttcgcggtatcaaccgtttgtcgttgatgctggaacaaaacaacgtcctgattggggagaacgcgtggg

SEQ ID NO: 474770 - DNA, 75 bp, synthetic construct
  source 1..75: mol_type = other DNA
gatatgctcaggttcacccgggcggcgtaccggcattgtccggtaccggtgcgcgtgcaggtgatttaaaaggga

SEQ ID NO: 474771 - DNA, 75 bp, synthetic construct
  source 1..75: mol_type = other DNA
gcagcattcccccgccactccggcgaagttttattacaattgcgcacccgcgcatacgacgtatcccaccaaaaa

SEQ ID NO: 474772 - DNA, 75 bp, synthetic construct
  source 1..75: mol_type = other DNA
caactggcggcaccaaaacgcccgttgggaccaacgccaattgagttgctgaaacaggagtatgaacgccggaaa

SEQ ID NO: 474773 - DNA, 75 bp, synthetic construct
  source 1..75: mol_type = other DNA
gctgggattgatcctgttcgtattgtttatgggcgacacttcgttcctgcttaatgcactggtgctgaatgttgg

SEQ ID NO: 474774 - DNA, 75 bp, synthetic construct
  source 1..75: mol_type = other DNA
aagcggcactgatcgccttgtcggtgatcatcgccactatctcggtgacatccggtgtcgataagggcattcgcg

SEQ ID NO: 474775 - DNA, 75 bp, synthetic construct
  source 1..75: mol_type = other DNA
gtaatggcggggccgtctgtgcgcgtgaatgaatggttcagcgcgtatgcgatggcgggtgtggcttacagccgt

SEQ ID NO: 474776 - DNA, 75 bp, synthetic construct
  source 1..75: mol_type = other DNA
caacggtgaagagttcgatacattcaccaagcaaatggccgacatgatctacgacattaagaccgagatgatgtc

SEQ ID NO: 474777 - DNA, 75 bp, synthetic construct
  source 1..75: mol_type = other DNA
atggaccgctgccgggcgggtgaaacatggcctcctgacctggctgagtttgtggcgttgatttcagaaagtgga

SEQ ID NO: 474778 - DNA, 75 bp, synthetic construct
  source 1..75: mol_type = other DNA
taaaacggcttgcagaacggcagctgacgaaatgggcaaagcatgttagtaacggcctgagtgttccgccagtcc

SEQ ID NO: 474779 - DNA, 75 bp, synthetic construct
  source 1..75: mol_type = other DNA
gctgtatcacatttgcctcgagatgcgttcaaaggggattgagcgccagatgaccgaaggggaattaaaacggct

SEQ ID NO: 474780 - DNA, 75 bp, synthetic construct
  source 1..75: mol_type = other DNA
ggacctggctgagtttgtggcgctgatttcggaaagcggggccaatccatttggcctgacggtggatgctgtgat

SEQ ID NO: 474781 - DNA, 75 bp, synthetic construct
  source 1..75: mol_type = other DNA
tgtggcgctgatttcggaaagcggagccaatccattcggtctgacggtggatgccgtgatggaggagtaccgccg

SEQ ID NO: 474782 - DNA, 75 bp, synthetic construct
  source 1..75: mol_type = other DNA
aaaaatctgaaagctgaagatgcagttatggatgcttcacatttacgcgatcaattggtttctgcaattgatatg

SEQ ID NO: 474783 - DNA, 75 bp, synthetic construct
  source 1..75: mol_type = other DNA
ccatccgcgtacataaatacgcagatggcgatgccaacgtgcaaaaaatgcgcttcgacttactgcctgcatatg

SEQ ID NO: 474784 - DNA, 75 bp, synthetic construct
  source 1..75: mol_type = other DNA
acaacacttccacatcaaccgtcagtgcagcaactgtttgcgcatctgacagcaatacgctgaccttcagcactg

SEQ ID NO: 474785 - DNA, 75 bp, synthetic construct
  source 1..75: mol_type = other DNA
caatgtcctgacagtgattgccaacatgaaatcactgaaattccaggggcgttatactgacagtaactatattaa

SEQ ID NO: 474786 - DNA, 75 bp, synthetic construct
  source 1..75: mol_type = other DNA
aatcaccaaatggtctgatgttgcgcagacggcatctttcctgaaagacctcggcgttaatgaaggtgaaaacta

SEQ ID NO: 474787 - DNA, 75 bp, synthetic construct
  source 1..75: mol_type = other DNA
gccgaaactgcacagtattgattctgctgttgcaacatatgaaggtttctccatccgcgtacataaatacgcaga

SEQ ID NO: 474788 - DNA, 75 bp, synthetic construct
  source 1..75: mol_type = other DNA
agactcataccagttcactgtaacattgaccggagcgacagccagcgttacaggttttctgaaagctggtgatca

SEQ ID NO: 474789 - DNA, 75 bp, synthetic construct
  source 1..75: mol_type = other DNA
gggctgttgaaaaatgtttaggaagctatgcgaaaatagtaacaaaatctgaacaaaaaaataagatagtagcaa

SEQ ID NO: 474790 - DNA, 75 bp, synthetic construct
  source 1..75: mol_type = other DNA
cagtggaaactaaatctcagaattacgggatgtgtgtttgaaggtaaacgattgggatgggtatcgtacttctca

SEQ ID NO: 474791 - DNA, 75 bp, synthetic construct
  source 1..75: mol_type = other DNA
atttttgaaaaggttaattgtggaaattataaatttacagcatataaagaaaaattaatatctaaaggggctaac

SEQ ID NO: 474792 - DNA, 75 bp, synthetic construct
  source 1..75: mol_type = other DNA
cctgacagtaattgccaacatgaaatcactgaaattccaggggcgttatactgacagtaactatattaagactct

SEQ ID NO: 474793 - DNA, 75 bp, synthetic construct
  source 1..75: mol_type = other DNA
gttggatgtcttctcaacaccatttgattttgattcaatcgattttcttgcatccagaaatcaaaaagtttggaa

SEQ ID NO: 474794 - DNA, 75 bp, synthetic construct
  source 1..75: mol_type = other DNA
aaattggttgtaatcataacggagatttcgagttagctaagaaaatggtaaaagaggcaaaatctgccggggtag

SEQ ID NO: 474795 - DNA, 75 bp, synthetic construct
  source 1..75: mol_type = other DNA
aaaagcaatccagagatatatacctcaggcgcaagatggggaagactttaggagtcatttacaatataagttgcc

SEQ ID NO: 474796 - DNA, 75 bp, synthetic construct
  source 1..75: mol_type = other DNA
tgcgacgtctgcgaatccgcaaataacctttcagccgcgactggaaaacgttgagattggcactatcctgaaggc

SEQ ID NO: 474797 - DNA, 75 bp, synthetic construct
  source 1..75: mol_type = other DNA
tttattgttaaatggatacgaattaaccgcaccaggcgatgaagttgtggagatggctgaggggctggcctgtaa

SEQ ID NO: 474798 - DNA, 75 bp, synthetic construct
  source 1..75: mol_type = other DNA
agaccggtatttcttcaggcgcacaggagacttcaggccgagctgttgcatcagttttcgcactgttttgccact

SEQ ID NO: 474799 - DNA, 75 bp, synthetic construct
  source 1..75: mol_type = other DNA
taaacgacatgcaaggtcaatcgcccatgctggcgctttccggggctggtacgttgaatctggcggagcaaacct

SEQ ID NO: 474800 - DNA, 75 bp, synthetic construct
  source 1..75: mol_type = other DNA
gggccgctgcgttggcacgtctggccgcaactgagtatcctctctgggcgaatgtccctcaccgcccctggtgcc

SEQ ID NO: 474801 - DNA, 75 bp, synthetic construct
  source 1..75: mol_type = other DNA
gccgttattgagtcatcaactgagcgttaagcaggtgatgctgaaaggcgcggtaattcaacttacgccacagtc

SEQ ID NO: 474802 - DNA, 75 bp, synthetic construct
  source 1..75: mol_type = other DNA
atagcgctaataaaacgctcgctaacgaagtagaaggatcaacggatgctgacaacagcggcaatgcgggggcga

SEQ ID NO: 474803 - DNA, 75 bp, synthetic construct
  source 1..75: mol_type = other DNA
gcacccggcgatgcagcacaatttggtggagcggatactgactggagcaccgttgattatcccaggctcactgat

SEQ ID NO: 474804 - DNA, 75 bp, synthetic construct
  source 1..75: mol_type = other DNA
gtggtgccgatacagactggagcaccgttgattatccgaaacttaccgatatggatgacaacaccgatgcgatgg

SEQ ID NO: 474805 - DNA, 75 bp, synthetic construct
  source 1..75: mol_type = other DNA
gatcattgttgatgaaggcattcctgcggatagtctggaaggcttgcgaaaggctgggattgaagtgattctggt

SEQ ID NO: 474806 - DNA, 75 bp, synthetic construct
  source 1..75: mol_type = other DNA
gatctggcgtttctggaaaagcagggaatcgctgtgcgtgcctatggtggcgcgttgatctgcgatagcacgacg

SEQ ID NO: 474807 - DNA, 75 bp, synthetic construct
  source 1..75: mol_type = other DNA
caggttatgctcaaaacggtagcactgttgcacctggtgtagttaagtcaacagcaagttttgtggtgctgtacg

SEQ ID NO: 474808 - DNA, 75 bp, synthetic construct
  source 1..75: mol_type = other DNA
aactggttgtgttattggtctcgtgcgtatgacagccgggaattatgtaaaacaggcgcaactattgttttgtat

SEQ ID NO: 474809 - DNA, 75 bp, synthetic construct
  source 1..75: mol_type = other DNA
cagccggggccgcactgtcgatttttatctctcctcccgtcgtaacagcaaagctgcataccggtttctgggtaa

SEQ ID NO: 474810 - DNA, 75 bp, synthetic construct
  source 1..75: mol_type = other DNA
gcgcctgaaatggaaaaacggctgcgctggtactggcgtaacccttccgatctttgcccgtggcacatggatgaa

SEQ ID NO: 474811 - DNA, 75 bp, synthetic construct
  source 1..75: mol_type = other DNA
ccgcaccgattgctggatattcgcgatccgtcgcaggcttattcggctgctgattttcgccgcgatgcgctggcg

SEQ ID NO: 474812 - DNA, 75 bp, synthetic construct
  source 1..75: mol_type = other DNA
tatcctggtcaattagagaagattcagtctggtatgaagtgggcagacgaagaacagcgcaactctatcggcaca

SEQ ID NO: 474813 - DNA, 75 bp, synthetic construct
  source 1..75: mol_type = other DNA
ttcttcccagaactggatatgtgcaatgttgattgcagcctagtaagtgagtcacggttaagagtcgctgaaagt

SEQ ID NO: 474814 - DNA, 75 bp, synthetic construct
  source 1..75: mol_type = other DNA
cttaagtaactacagattgagcaagactaaaccagatactttaggggggctgggcttttatcagttcgattgggt

SEQ ID NO: 474815 - DNA, 75 bp, synthetic construct
  source 1..75: mol_type = other DNA
aatggttaaggcaagaataccaaatgataacggtgaaacattccgtatcattcaacagttaatagaggaattaaa

SEQ ID NO: 474816 - DNA, 75 bp, synthetic construct
  source 1..75: mol_type = other DNA
actacctctcggttgatgatcttactgaaatcaatcgccttttaattgagcttcaaacaccagatgaacctgttg

SEQ ID NO: 474817 - DNA, 75 bp, synthetic construct
  source 1..75: mol_type = other DNA
acgatatgtttcgcctgtctgctgttcttattgaaagcctgatccagaatcatccattcgcaaatgcaaacaaac

SEQ ID NO: 474818 - DNA, 75 bp, synthetic construct
  source 1..75: mol_type = other DNA
atcccgctgttagtgggcggtactatgttgtatttcaaggcgttactggagggattgtcgccgctaccgtcggcg

SEQ ID NO: 474819 - DNA, 75 bp, synthetic construct
  source 1..75: mol_type = other DNA
gcaaacaattaaatgcagcaatagaaaactgctcattctatctttctcctggtatgttcaattgctcagagagtt

SEQ ID NO: 474820 - DNA, 75 bp, synthetic construct
  source 1..75: mol_type = other DNA
gctgctggacatcaaagtgctgccgaagaccatgacccacgattacgcctcctggtggcgaaccggcgatgcgca

SEQ ID NO: 474821 - DNA, 75 bp, synthetic construct
  source 1..75: mol_type = other DNA
aggggtgaagaaaattatgctttccgatttattagtctgatgtgtgaaaaagaaccggagttgaaaatagcgcag

SEQ ID NO: 474822 - DNA, 75 bp, synthetic construct
  source 1..75: mol_type = other DNA
agcgcatctacagaggtgaaaacgtattttgccttgcagaatgatggctctttcaccagtgatactattatgatt

SEQ ID NO: 474823 - DNA, 75 bp, synthetic construct
  source 1..75: mol_type = other DNA
acagagcgcatcgacagaggtgaaaacgtattttgccttgcagaatgatggctctttcaccagtgatatcatcat

SEQ ID NO: 474824 - DNA, 75 bp, synthetic construct
  source 1..75: mol_type = other DNA
tggctcgtggtcgcattcacgcaccaaaaccatgccgcgttatccgctgatgaatctgatcccgaccgactggca

SEQ ID NO: 474825 - DNA, 75 bp, synthetic construct
  source 1..75: mol_type = other DNA
atggtggcccagggggggacaggcagtgaaaccatcgtcagggatactgttgccaaatggcgtaaaggctggaac

SEQ ID NO: 474826 - DNA, 75 bp, synthetic construct
  source 1..75: mol_type = other DNA
accagtcagtgagttgtgggttgatgcaaattataaagaaaaccaaatagcgggaatgaagccaggaatgaaggc

SEQ ID NO: 474827 - DNA, 75 bp, synthetic construct
  source 1..75: mol_type = other DNA
gcagccgcaacagccggttgcaccgcagcagcaatatcagcagccgcaacagcctgttgcaccacagccgcaata

SEQ ID NO: 474828 - DNA, 75 bp, synthetic construct
  source 1..75: mol_type = other DNA
tggacgaatttgccgacctgatgatgacggtaggtaaaaaagtggaagagctgatagcacgtctggcgcaaaaag

SEQ ID NO: 474829 - DNA, 75 bp, synthetic construct
  source 1..75: mol_type = other DNA
cgcgcaacggtgagaattatttcgcccgcctgcgtctgactcgtgccaaagaaggtgcaatcgacatgctgtccg

SEQ ID NO: 474830 - DNA, 75 bp, synthetic construct
  source 1..75: mol_type = other DNA
atgttcaattccagaccgttcaacgagatggtctactgtggttgtctgccccccaaatagccagcgcgttacaat

SEQ ID NO: 474831 - DNA, 75 bp, synthetic construct
  source 1..75: mol_type = other DNA
tccagtagccaaagagttccgtcgctgggtattggatattctggaccgtgaagctgaaaaaagcgctataccgct

SEQ ID NO: 474832 - DNA, 75 bp, synthetic construct
  source 1..75: mol_type = other DNA
acgcccctgcgccggaacagtctgcgcaacagccgtattacgcccctgcgccagaacaatcggtggcaggtaacg

SEQ ID NO: 474833 - DNA, 75 bp, synthetic construct
  source 1..75: mol_type = other DNA
atgacttactccgttaagaataaatggaaagctggcggtttgtctcttggctggacggcagtgcctaccgtattg

SEQ ID NO: 474834 - DNA, 75 bp, synthetic construct
  source 1..75: mol_type = other DNA
tatcgtcggcctggcgctgggtatcgtggtgctgaacccggaactgaaaatgcctgcgatgactcagtacattga

SEQ ID NO: 474835 - DNA, 75 bp, synthetic construct
  source 1..75: mol_type = other DNA
gtcgtgctggccggtgcggttcaggactttatggtgctgtttatctcctctcgccgtaatggcgcatctcttggt

SEQ ID NO: 474836 - DNA, 75 bp, synthetic construct
  source 1..75: mol_type = other DNA
gaaactgttcagcaccacccgcagatggaaggcttcttctacatggaaagccagtacaaagagaagattgctaac

SEQ ID NO: 474837 - DNA, 75 bp, synthetic construct
  source 1..75: mol_type = other DNA
aacaaacgctacattacgctggcaccgattgcgaccgtgctcggactggcgtttaagctctctgatccagaaaaa

SEQ ID NO: 474838 - DNA, 75 bp, synthetic construct
  source 1..75: mol_type = other DNA
gcagtgccgaatcggtgggcgacaacctgtatcgtattgatatagagaggatccatagcggccttaatttccgca

SEQ ID NO: 474839 - DNA, 75 bp, synthetic construct
  source 1..75: mol_type = other DNA
gagctgaccgtccctgatgatagccaacctggttggccaagacaggaggagtgggaagccagcggtattaactgt

SEQ ID NO: 474840 - DNA, 75 bp, synthetic construct
  source 1..75: mol_type = other DNA
acagcgactttggacccacactggccgcagaaaaactcagagagcgtcatgatatccggctttcaatcgagactg

SEQ ID NO: 474841 - DNA, 75 bp, synthetic construct
  source 1..75: mol_type = other DNA
cagctctgaagctaaaggccgcgtggaacgtgcgaatcagacacttcaggatcggctgatcaaagaaatgcgtct

SEQ ID NO: 474842 - DNA, 75 bp, synthetic construct
  source 1..75: mol_type = other DNA
caatggaaagtctagccatacgtatgggggtttctgtacggactgttcagagagctatcaatgatcttgaaaaag

SEQ ID NO: 474843 - DNA, 75 bp, synthetic construct
  source 1..75: mol_type = other DNA
ggctacctgcctggcacgctgtggctgctggcgggggtagtgctggccggtgcggtacaggactttatggtgctg

SEQ ID NO: 474844 - DNA, 75 bp, synthetic construct
  source 1..75: mol_type = other DNA
cgcactgcgccagatatttgacgccgaagatgtcccgttgcaacaggctgcggaactcccgccttcctatattaa

SEQ ID NO: 474845 - DNA, 75 bp, synthetic construct
  source 1..75: mol_type = other DNA
aaacgctcagaaaatggatgacggctgatggactctgggtcccatactcgcgtcgtaagccacgtgttcatcaac

SEQ ID NO: 474846 - DNA, 75 bp, synthetic construct
  source 1..75: mol_type = other DNA
tctctgcatgagtataaacgtcaacatggtcattacccggcaagtgacatcctggcgaacgcacacatggctctt

SEQ ID NO: 474847 - DNA, 75 bp, synthetic construct
  source 1..75: mol_type = other DNA
aagaagaggacgattcgcctgatacgcaagatgaaagccaggccttactgctgcgtgccacccgcatggataaca

SEQ ID NO: 474848 - DNA, 75 bp, synthetic construct
  source 1..75: mol_type = other DNA
tttgatgttggtcagcaacatctgtcactctccgttccgcaaatttatgttggcagaatggctcgcggctatgtt

SEQ ID NO: 474849 - DNA, 75 bp, synthetic construct
  source 1..75: mol_type = other DNA
atctgacagcaataaatggcagcatatcaatacgtcggctgaacgcgacattattcccttacgctcacggttaac

SEQ ID NO: 474850 - DNA, 75 bp, synthetic construct
  source 1..75: mol_type = other DNA
tcatggataccacaccagaggatatcgccgatccagaatctgattttgaagagaaactcgaagaaatcagcgaac

SEQ ID NO: 474851 - DNA, 75 bp, synthetic construct
  source 1..75: mol_type = other DNA
gtggctcagcttgcgaaaaaacttcatgatatggctcaaaaaggacaacgaatgccttcctgtatcaatataatt

SEQ ID NO: 474852 - DNA, 75 bp, synthetic construct
  source 1..75: mol_type = other DNA
ggctattctgagagcactatccacacgatgaaggctgcgttccggatgaattacgcctcctatatcgactcttcc

SEQ ID NO: 474853 - DNA, 75 bp, synthetic construct
  source 1..75: mol_type = other DNA
catcagaggttttctcccgggaaacttccccatcctgttttgaaccaaaagcggaaaagttgatcgcttttcatg

SEQ ID NO: 474854 - DNA, 75 bp, synthetic construct
  source 1..75: mol_type = other DNA
aaaccgccaccaaagaatcttccgaaagatgggttatgtccggcgctgaacctattgctgcaaaggtactggcat

SEQ ID NO: 474855 - DNA, 75 bp, synthetic construct
  source 1..75: mol_type = other DNA
tcgctggcttgtagtgggggccgggcgtgaggaatacgaagcacgtctgcgtcagcagacagaatacctgggaat

SEQ ID NO: 474856 - DNA, 75 bp, synthetic construct
  source 1..75: mol_type = other DNA
acagaacggatacgatgtttatcagactactgttccacccggcccttttactattgatgatatcaactctgcggc

SEQ ID NO: 474857 - DNA, 75 bp, synthetic construct
  source 1..75: mol_type = other DNA
aatgattgcagaagcgctaaaagctgatggcgtagaagaaatttattttcttggcgataaaaaagcggaatccat

SEQ ID NO: 474858 - DNA, 75 bp, synthetic construct
  source 1..75: mol_type = other DNA
gtcgaagtatttaaattccaatattgtagaaaaagttgatgatgaccgtattgaggccgttaaggctgtgttgcg

SEQ ID NO: 474859 - DNA, 75 bp, synthetic construct
  source 1..75: mol_type = other DNA
tcagcgccgaaatggaatggacgaattatatcagtggacgcaacctaagccccagtacaacgggcatattgtaaa

SEQ ID NO: 474860 - DNA, 75 bp, synthetic construct
  source 1..75: mol_type = other DNA
cgacgaatgccatcgcggcagcgcatccgaagacagcgcctggcgagagatccttgattatttcagttccgccac

SEQ ID NO: 474861 - DNA, 75 bp, synthetic construct
  source 1..75: mol_type = other DNA
tctgctggtcatggcgaccggaacagggaaaacctacaccgcattccagatcatctggcgcctgtggaaatcaaa

SEQ ID NO: 474862 - DNA, 75 bp, synthetic construct
  source 1..75: mol_type = other DNA
gaacgcaatccgagcctgataccagtcattaaccagtccatgcgcaattacgccctgcgcccgtcgcagtacgtg

SEQ ID NO: 474863 - DNA, 75 bp, synthetic construct
  source 1..75: mol_type = other DNA
cggcattctctatatcaacggtctgccactggtcgtctttgaatttaaaagtgcggtgcgcgagcaggaagccag

SEQ ID NO: 474864 - DNA, 75 bp, synthetic construct
  source 1..75: mol_type = other DNA
tgatctgcaaggctggcgcccaaccaaagggcaaactgacttaaacggcgaagtgatcgacgatcgtatctataa

SEQ ID NO: 474865 - DNA, 75 bp, synthetic construct
  source 1..75: mol_type = other DNA
cgtctactcactaaaagaagggatcgaagacggcttcctcgccccttataaagttgtccgtgttgatattgatgt

SEQ ID NO: 474866 - DNA, 75 bp, synthetic construct
  source 1..75: mol_type = other DNA
atgaagccaatttttagccgtggcccgtcgctacagattcgccttattctgacggtgctggtggcgctcggcatt

SEQ ID NO: 474867 - DNA, 75 bp, synthetic construct
  source 1..75: mol_type = other DNA
tgctggatggcgtatcgcagacgctggcctcgcgtgaccaactagaacttgaaaaccgggcgttacgtcaggaac

SEQ ID NO: 474868 - DNA, 75 bp, synthetic construct
  source 1..75: mol_type = other DNA
aaacggttattcgtgttgcgaaccacttcctgaaacgtgttggtattgagcgtccgcgtattgccgtggcgggtg

SEQ ID NO: 474869 - DNA, 75 bp, synthetic construct
  source 1..75: mol_type = other DNA
aaagtttcttttgctggaaaagaatattctctggaacctattgatgaaaaaaaaacctattctttttcagtggtt

SEQ ID NO: 474870 - DNA, 75 bp, synthetic construct
  source 1..75: mol_type = other DNA
gatgatttacaacttgagcacctgccagcgaatactgatattcgtgttggtgatgtattggtgacatctggtctt

SEQ ID NO: 474871 - DNA, 75 bp, synthetic construct
  source 1..75: mol_type = other DNA
taacggagtttatgaaggccagccggtcatcagcgacaaaggtgttgttggccaggtggtggcggtcgccaaact

SEQ ID NO: 474872 - DNA, 75 bp, synthetic construct
  source 1..75: mol_type = other DNA
cttcggtattaacacagttgacctcaggggagagggtttccggcgtattgcccaggaaggccagctgatcagcac

SEQ ID NO: 474873 - DNA, 75 bp, synthetic construct
  source 1..75: mol_type = other DNA
tcttctgaccatttagcgatgaacaacacggcgtggaaataccttaataagcaggatcgcaataacctgtttttt

SEQ ID NO: 474874 - DNA, 75 bp, synthetic construct
  source 1..75: mol_type = other DNA
tttcgagaacccaaccgatgccgacaccctggtgattgtgccgccggaacccgtcgcaaccaacgaagggaatat

SEQ ID NO: 474875 - DNA, 75 bp, synthetic construct
  source 1..75: mol_type = other DNA
tccgtacgtgctggaagagatggaagcggcgaagaacaatgacgtcaacgcgttcgataaactgctgttcaaaca

SEQ ID NO: 474876 - DNA, 75 bp, synthetic construct
  source 1..75: mol_type = other DNA
gtcagacatttatgcgccagtaagcggtgaaatcgtggcggtaaacgacgcactgagcgactccccggaactggt

SEQ ID NO: 474877 - DNA, 75 bp, synthetic construct
  source 1..75: mol_type = other DNA
aaagccagcgatgaaagcgaactggaatcactgctggatgcgaccgcatacgaagcattgttagaagacgagtaa

SEQ ID NO: 474878 - DNA, 75 bp, synthetic construct
  source 1..75: mol_type = other DNA
tttgctccatttgaaggcaacgcatctgcatccgtttccagcttcttcccgcagaacatctgtctgggcgatatt

SEQ ID NO: 474879 - DNA, 75 bp, synthetic construct
  source 1..75: mol_type = other DNA
cgttgtcagaactattctctttcgccctgtttctcgcttccgtgctgatctacgcatggaaagcgggacgtaata

SEQ ID NO: 474880 - DNA, 75 bp, synthetic construct
  source 1..75: mol_type = other DNA
gtttagcgggatttcccgtccggagtcgtggggccgctggtccaacgctcagctgggcgatgaagtaaaaatcga

SEQ ID NO: 474881 - DNA, 75 bp, synthetic construct
  source 1..75: mol_type = other DNA
gctttctaccgactggtgtgtttcacaggggcaacttggcgggaaacaaacagtgcagcatgtcgataagccaga

SEQ ID NO: 474882 - DNA, 75 bp, synthetic construct
  source 1..75: mol_type = other DNA
ttgtgctggcactgacggcggtgttcggcgcgctgggatggatccttcgccgccgccgacatcatcctcaccatt

SEQ ID NO: 474883 - DNA, 75 bp, synthetic construct
  source 1..75: mol_type = other DNA
gtctcaaccaacgaagggaatatcctcggacactcgccgcgtaagctcgggatcggcatggtggaaattaaagtg

SEQ ID NO: 474884 - DNA, 75 bp, synthetic construct
  source 1..75: mol_type = other DNA
gactttgatccagaagagctggcgacgaagccggtaaagttgccggagaaagtgcggaaagttgaagccgcgtaa

SEQ ID NO: 474885 - DNA, 75 bp, synthetic construct
  source 1..75: mol_type = other DNA
ttacctttcgtcagctgcatgacgaagtgaacgcggtggcctcaatgttgcgctcgctgggcgtgcagcgtggcg

SEQ ID NO: 474886 - DNA, 75 bp, synthetic construct
  source 1..75: mol_type = other DNA
ttatcgatgaagcgcaggatgttgcacacatcagaccggaccagataagaacagcctcccgtgtctggaccatcc

SEQ ID NO: 474887 - DNA, 75 bp, synthetic construct
  source 1..75: mol_type = other DNA
cgattatctacatcagccaccgcatggcagaagtgtatgagctttccgatcgcgtcagcgtgctgcgtgacgggc

SEQ ID NO: 474888 - DNA, 75 bp, synthetic construct
  source 1..75: mol_type = other DNA
ctgaaacaggcgctgaaaacttataccgattcaaaaggtaaaggacagacgacagtcgatgctcatgaagcgttc

SEQ ID NO: 474889 - DNA, 75 bp, synthetic construct
  source 1..75: mol_type = other DNA
cgattgatgctaatgccgatatctgggcggcatttaatcagttgcagacctataaaaacgaactcagcgatctgt

SEQ ID NO: 474890 - DNA, 75 bp, synthetic construct
  source 1..75: mol_type = other DNA
acgatgcgctggcggaaaacgaaagcgcagtacgggagctgggtgatgacgtccttaagaaactggctatcgaag

SEQ ID NO: 474891 - DNA, 75 bp, synthetic construct
  source 1..75: mol_type = other DNA
ataccagatggaacaacaatcgcagtagacacaaacaacaaacgtattgttgacggcaaactctacgccatcgca

SEQ ID NO: 474892 - DNA, 75 bp, synthetic construct
  source 1..75: mol_type = other DNA
cgagcataacccggttggtttactggaagaggcgttggtggatgtgattgccgccgacccgattcatcagcggat

SEQ ID NO: 474893 - DNA, 75 bp, synthetic construct
  source 1..75: mol_type = other DNA
cccggaagcgggttccgatgcaggcgctatcccggataccgggattgtctgcatgggcgaatggcagggccagca

SEQ ID NO: 474894 - DNA, 75 bp, synthetic construct
  source 1..75: mol_type = other DNA
aagttcatgttgatgaatacgacgttgatgtgatcgacagccagagcgcgagcaaactgatcccggcagcggttg

SEQ ID NO: 474895 - DNA, 75 bp, synthetic construct
  source 1..75: mol_type = other DNA
tacgccagtggtgagaaaggatatagcaactgggagctttctgccgatcgggccaatgcatcccgccgcgaactg

SEQ ID NO: 474896 - DNA, 75 bp, synthetic construct
  source 1..75: mol_type = other DNA
gagtcagggagaagtgaataagcagccggacattgaagaactgaaaaaacgcatggagcaaagtcggttgcggaa

SEQ ID NO: 474897 - DNA, 75 bp, synthetic construct
  source 1..75: mol_type = other DNA
acggcgtggaaatacctcaataagcaggatcgcaataacctgtttttgtcattcgtggcgacaagccgcagcaag

SEQ ID NO: 474898 - DNA, 75 bp, synthetic construct
  source 1..75: mol_type = other DNA
ggggattgcgctggtgattggcgcgggaatggtttggtggatcaaccgctccattgcccgactcacccgctatgc

SEQ ID NO: 474899 - DNA, 75 bp, synthetic construct
  source 1..75: mol_type = other DNA
ccccgaaagttctgtaatgtatgttgccgcgccgattatggacggctcgcggctaattggtgttttgagcgtagg

SEQ ID NO: 474900 - DNA, 75 bp, synthetic construct
  source 1..75: mol_type = other DNA
ggcgcggcggaaatcttacgcgaaggaccgccaccggaagtggtagcccgttttaccgacaatattttgacacaa

SEQ ID NO: 474901 - DNA, 75 bp, synthetic construct
  source 1..75: mol_type = other DNA
cagtgaggttgcccgtttgcttaatggcgaagtcacactgtgtaacgtgccacaaggcggtgtgctggcttcgct

SEQ ID NO: 474902 - DNA, 75 bp, synthetic construct
  source 1..75: mol_type = other DNA
acgcttaaggtgcaggataccggcagtggcattcctgactacgcgctgtcgcgcatttttgaacgcttttactct

SEQ ID NO: 474903 - DNA, 75 bp, synthetic construct
  source 1..75: mol_type = other DNA
tctgcggttgacgtagcggcattatttaaccgcatcagcgaagcgcgcaccgtgcagttggcagaaaaaaatatc

SEQ ID NO: 474904 - DNA, 75 bp, synthetic construct
  source 1..75: mol_type = other DNA
ccgccgatccgattcatcagcggatctgtaaagaactgggtaaaaatctgccatttacccgtctggatgaactgg

SEQ ID NO: 474905 - DNA, 75 bp, synthetic construct
  source 1..75: mol_type = other DNA
caccacgccgggcgtggaaattggtcgtcgccacttcccgctgaacgtgccatttcagaacggaccgacacgcgg

SEQ ID NO: 474906 - DNA, 75 bp, synthetic construct
  source 1..75: mol_type = other DNA
tatcggtcacgtcggtagtaacaaagttcgtagcttctggctcggtttgacgcgcggtttaaccagtagcacacc

SEQ ID NO: 474907 - DNA, 75 bp, synthetic construct
  source 1..75: mol_type = other DNA
cgtttgtgtaaagagctgggagatcagtcggtcgtggtgagtggcgacaagcgactggaggagctggggatcagt

SEQ ID NO: 474908 - DNA, 75 bp, synthetic construct
  source 1..75: mol_type = other DNA
ctgaatatggcttaacagagtcgggaggcgtggtacttttttccgctgccgagcgcgggcgttcgttgagcctgc

SEQ ID NO: 474909 - DNA, 75 bp, synthetic construct
  source 1..75: mol_type = other DNA
gcggcaaaaaacaatgacgtcaacgcgttcgataaactgttgttcaaacatatcggtcacgtcggtagtaacaaa

SEQ ID NO: 474910 - DNA, 75 bp, synthetic construct
  source 1..75: mol_type = other DNA
aatgcgcgtatgcaggcattggtagaaacgttactacgccaggcaagactggagaatcgtcaggaagtccgttct

SEQ ID NO: 474911 - DNA, 75 bp, synthetic construct
  source 1..75: mol_type = other DNA
gaagatcttgaacttgcttgtttggttgccagtgaggctatcaacaaatatcacggacaatatgcgaaggttgta

SEQ ID NO: 474912 - DNA, 75 bp, synthetic construct
  source 1..75: mol_type = other DNA
tgcaatgaaccaaacagagcattacagtggaaaacgccctctgagataatggactcagaagagggggcgttgaaa

SEQ ID NO: 474913 - DNA, 75 bp, synthetic construct
  source 1..75: mol_type = other DNA
aaataccggtgcggaaatcatcgacttacgcataggtgcaaagttaaacggcacgaggataatggccagaggcac

SEQ ID NO: 474914 - DNA, 75 bp, synthetic construct
  source 1..75: mol_type = other DNA
tggtgaaatcccagtcacgcgacggcgacccggactttgcggcttattataaagagccgtcgaaaactatccctg

SEQ ID NO: 474915 - DNA, 75 bp, synthetic construct
  source 1..75: mol_type = other DNA
ggcgctgggttcagtggatgccagcccggcatttcgtcagataacggaactggtgaaatcccagtcacgcgacgg

SEQ ID NO: 474916 - DNA, 75 bp, synthetic construct
  source 1..75: mol_type = other DNA
cgcatggaaagcgggacgtaacacctggtggtttgcagccacattaacggtgctggggctatttgtcgttttaaa

SEQ ID NO: 474917 - DNA, 75 bp, synthetic construct
  source 1..75: mol_type = other DNA
aacaaacgctacattacgctcgcgccaattgcgaccgtgcttgggctggcgtttaaactttccgacccggaaaaa

SEQ ID NO: 474918 - DNA, 75 bp, synthetic construct
  source 1..75: mol_type = other DNA
ccatttacccgtctggatgaactggcgcacaacgcgctggcgaaggggctgattgataaagatgaagccgctatt

SEQ ID NO: 474919 - DNA, 75 bp, synthetic construct
  source 1..75: mol_type = other DNA
ggctaccgctatctgaatctgtcgggtaaagacggccaccgcgacaacgcggtggctgacggcccttatgtcggg

SEQ ID NO: 474920 - DNA, 75 bp, synthetic construct
  source 1..75: mol_type = other DNA
ggcagcagtcgattattgatgcgatggatatcactggtggcaaaggcattatgctcgggcaaagcaacttcctgg

SEQ ID NO: 474921 - DNA, 75 bp, synthetic construct
  source 1..75: mol_type = other DNA
ccgccgacccgattcatcagcggatctgtaaagagctgggtaaaaacctgccgtttacccgtctggatgaactgg

SEQ ID NO: 474922 - DNA, 75 bp, synthetic construct
  source 1..75: mol_type = other DNA
aacgggcgcgtatgcgcacattcgccgtcagttcaaaatctctatcggtaagatggaagggattgaagagccgct

SEQ ID NO: 474923 - DNA, 75 bp, synthetic construct
  source 1..75: mol_type = other DNA
ataactcaggcagccagaacacagacagtccggatgccaacgtctgcaatgatgcgggtccttttgagctgttac

SEQ ID NO: 474924 - DNA, 75 bp, synthetic construct
  source 1..75: mol_type = other DNA
atgaaatctgccacctctgcgcaaagaccttaccaggaagtcggggcgatgatccgcgatctgatcataaagaca

SEQ ID NO: 474925 - DNA, 75 bp, synthetic construct
  source 1..75: mol_type = other DNA
cgtggtgccggtatctatgttcttgacagttccaccagtaagagtgcggacagcgcagatgttaacgcctgcaac

SEQ ID NO: 474926 - DNA, 75 bp, synthetic construct
  source 1..75: mol_type = other DNA
agtagcatctttcaatgatgagggtctatccggttacaaaggtaagcacttgtcagggcaatttggggatatgct

SEQ ID NO: 474927 - DNA, 75 bp, synthetic construct
  source 1..75: mol_type = other DNA
atcgtaaaggccgtacacctgcaagtgataacccattaacgattaacatcttcaagggattattccggtgtcagt

SEQ ID NO: 474928 - DNA, 75 bp, synthetic construct
  source 1..75: mol_type = other DNA
gtcatgtgaatctgtggggtaagccaggtctggtcgtgttctgcggcggggagcattgcgagaaggccgaacttc

SEQ ID NO: 474929 - DNA, 75 bp, synthetic construct
  source 1..75: mol_type = other DNA
catcgccgagtttgccgccctgcaggctacccgcgaagatatcgtcaaaatgcgtcaggcattgcaactggaaga

SEQ ID NO: 474930 - DNA, 75 bp, synthetic construct
  source 1..75: mol_type = other DNA
gtgatgttcctccgttgaagcgtaaaccgtttgataagtggatgattgataattttctggggatgattgacgtgg

SEQ ID NO: 474931 - DNA, 75 bp, synthetic construct
  source 1..75: mol_type = other DNA
tataaagtcgtttagtcgccgtaaagatgctaatgggttctctgttcactctgtacgcaccattctaaggtcaga

SEQ ID NO: 474932 - DNA, 75 bp, synthetic construct
  source 1..75: mol_type = other DNA
tacacagccatctggatgacagcttatatcgcaaagagtggttgggcgatcataaacagatccttgcagcattaa

SEQ ID NO: 474933 - DNA, 75 bp, synthetic construct
  source 1..75: mol_type = other DNA
tcaaaaaagacgcccgtgcggcgaagctggcaatgtggcagcatctggaaaatgtgaaacagcgcctgctggaat

SEQ ID NO: 474934 - DNA, 75 bp, synthetic construct
  source 1..75: mol_type = other DNA
gcgcgtcagttactggaaagtaacatcgcggaatttgccgctttgcaggccacccgcgaagatatcgtcaaaatg

SEQ ID NO: 474935 - DNA, 75 bp, synthetic construct
  source 1..75: mol_type = other DNA
gcatcaggaatctaagcagaagtctttccgtgttagtcagaagtgggaacaacgtgcaaaacttgcccttgctgg

SEQ ID NO: 474936 - DNA, 75 bp, synthetic construct
  source 1..75: mol_type = other DNA
ctacgtttgaaattgagcaacagttactggaacaatttctgcgtaatacctggaagaaaatggacgaggaacata

SEQ ID NO: 474937 - DNA, 75 bp, synthetic construct
  source 1..75: mol_type = other DNA
tcgatcccggcgcatttgcctcacgccagagctatgttgccgcgcctgcgctgcgcagtgcggcactgttattaa

SEQ ID NO: 474938 - DNA, 75 bp, synthetic construct
  source 1..75: mol_type = other DNA
cgtataccacagctcctctatcaaaaattaaagaaatcagaacatgggacacaaacaaatacttaatgaaactat

SEQ ID NO: 474939 - DNA, 75 bp, synthetic construct
  source 1..75: mol_type = other DNA
aagcacaaaatcatattgagaatcatattcaggattgtgaattactaggcctaatggatgtaaacaaaatgctca

SEQ ID NO: 474940 - DNA, 75 bp, synthetic construct
  source 1..75: mol_type = other DNA
ttagagatttcataaaaaataaccgagagcatgagttcaatatttatgaaacacttgcgcgagatataattgtac

SEQ ID NO: 474941 - DNA, 75 bp, synthetic construct
  source 1..75: mol_type = other DNA
ggtagtttttatcaggcagaaggattaaaaggaggcggggtcatccgacatacggataaaccatattcagaattg

SEQ ID NO: 474942 - DNA, 75 bp, synthetic construct
  source 1..75: mol_type = other DNA
gacaacgataggcacgttaccagcatcacaacgtaatgaccgccccgctataccgaactactacgaagccgctat

SEQ ID NO: 474943 - DNA, 75 bp, synthetic construct
  source 1..75: mol_type = other DNA
gataatccattaacgattaacatcttcaaaggtctgtttaggtgtcagtgcggggctagtgttcaccctacaggg

SEQ ID NO: 474944 - DNA, 75 bp, synthetic construct
  source 1..75: mol_type = other DNA
gattgcagcgttacagcatgaggttgaaattgtcacagccagaatcaagaaagctaccgccctacttcttgagat

SEQ ID NO: 474945 - DNA, 75 bp, synthetic construct
  source 1..75: mol_type = other DNA
aaaaaacaatgaattgtcgccacacttaaaatcagtgatatcaagtttagatagaaattatttcaatccatggct

SEQ ID NO: 474946 - DNA, 75 bp, synthetic construct
  source 1..75: mol_type = other DNA
taccggtcttcgttttattgaagaaaaaattaataaaaatataatcgagccccctttacaacgaggatcttcctt

SEQ ID NO: 474947 - DNA, 75 bp, synthetic construct
  source 1..75: mol_type = other DNA
cccggatggattgaccctgagacttttaaactcaatgaacacgctgagactgtaagactgattttcaaactgctg

SEQ ID NO: 474948 - DNA, 75 bp, synthetic construct
  source 1..75: mol_type = other DNA
ctgttattgtgcaggcgacgcggctcgatacatcaatccttccacgcaatatattcagccagtcttacctgctgt

SEQ ID NO: 474949 - DNA, 75 bp, synthetic construct
  source 1..75: mol_type = other DNA
tctttttcggccatattaatgccgatcatcaccagaaccgccagtgccgcgcccgcagaaacatcgtcaatggcc

SEQ ID NO: 474950 - DNA, 75 bp, synthetic construct
  source 1..75: mol_type = other DNA
ccacgttacaggccatgcagtcctgccgccaggagacggcggcgctggagcggcttgactgttatgaccgcattc

SEQ ID NO: 474951 - DNA, 75 bp, synthetic construct
  source 1..75: mol_type = other DNA
tagaggccatgcagtcctgtcgccgcaagtcagcggcgctggagcggcttgattgttatgaccgcatcctttcgc

SEQ ID NO: 474952 - DNA, 75 bp, synthetic construct
  source 1..75: mol_type = other DNA
ctctcgtcattgaagagtccctaaaagattcaggggaagttatacaactctttcccacattaaaacagaccattc

SEQ ID NO: 474953 - DNA, 75 bp, synthetic construct
  source 1..75: mol_type = other DNA
tgttcttggtggcagaattgttcttaatgttcaagtttgcacgcctcggcccaagcagcctgaaaaccggtcgct

SEQ ID NO: 474954 - DNA, 75 bp, synthetic construct
  source 1..75: mol_type = other DNA
gggcatcattgcaacgcgttccgtggatactccagttatcggcctgaaagaactgatggtgcagcatgaagaacg

SEQ ID NO: 474955 - DNA, 75 bp, synthetic construct
  source 1..75: mol_type = other DNA
gttgggcgcaacaccggtgatggtggacgttgatcgcgatacgctgatggtcacgcctgaagcgatcgaagcggc

SEQ ID NO: 474956 - DNA, 75 bp, synthetic construct
  source 1..75: mol_type = other DNA
aagcggcgcgacggaaatcggtcagggtgccgacaccgtcttctcgcaaatggtggcagaaaccgtgggggttcc

SEQ ID NO: 474957 - DNA, 75 bp, synthetic construct
  source 1..75: mol_type = other DNA
gcttttttagggaagatggaactatcacaagccgaaaaacataaggccgtagttttgcttacagagcgtttaagg

SEQ ID NO: 474958 - DNA, 75 bp, synthetic construct
  source 1..75: mol_type = other DNA
gactgaagcgcagattcaacaggcaaccaaagactccattccacgtgtagcgccgctgtacttcgcgttccgtat

SEQ ID NO: 474959 - DNA, 75 bp, synthetic construct
  source 1..75: mol_type = other DNA
gtaccacttcctttttgtgccgctgacgctcggtatggcgttcctgctggccatcatggaaacggtttacgtcct

SEQ ID NO: 474960 - DNA, 75 bp, synthetic construct
  source 1..75: mol_type = other DNA
gccatcgcagtcagctcggccactgctggaatgcatatcacgctgatggcgctggggattggcgctgatgatgaa

SEQ ID NO: 474961 - DNA, 75 bp, synthetic construct
  source 1..75: mol_type = other DNA
ccgtatcgggttcgaccgtttgcgcgaacgcctgcaactgtcatcacacctcggcaaccagaatgccacggtgaa

SEQ ID NO: 474962 - DNA, 75 bp, synthetic construct
  source 1..75: mol_type = other DNA
gaaaacagcaacagcaacacaatcgctggcatcccccctcaacgtaacaacatcctattcagtcggcggcaccaa

SEQ ID NO: 474963 - DNA, 75 bp, synthetic construct
  source 1..75: mol_type = other DNA
cgtcgaactggcagatcacgacgcaagaatcaccgcaaacacaaaagcgataaatctccttgaggtcaggttaac

SEQ ID NO: 474964 - DNA, 75 bp, synthetic construct
  source 1..75: mol_type = other DNA
atggcggattcgaatctcaatgtgccggtaatcatccaagctacgcggctcgatacatcaatccttccacgcaat

SEQ ID NO: 474965 - DNA, 75 bp, synthetic construct
  source 1..75: mol_type = other DNA
atggcggattcatcactgaataatcctgtcgcggttcaggctacgcgccttgatgcttcaattttgccacgcaat

SEQ ID NO: 474966 - DNA, 75 bp, synthetic construct
  source 1..75: mol_type = other DNA
atggctgattcgaatctcaatgagcaggtaatcatccaagctacgcggctcgatacatcaatccttccacgcaat

SEQ ID NO: 474967 - DNA, 75 bp, synthetic construct
  source 1..75: mol_type = other DNA
ggttatcggtgctcgtcagacaggatggacagcggcaaccggaacggcactcctcggcgcattcaacgctaacca

SEQ ID NO: 474968 - DNA, 75 bp, synthetic construct
  source 1..75: mol_type = other DNA
aactgaccattccggtggatatggcaactgagtttatgactcaggtagcgaagctggaaggttatcaggaagatc

SEQ ID NO: 474969 - DNA, 75 bp, synthetic construct
  source 1..75: mol_type = other DNA
ctggaagatttcgtggggatgtttgcgatgccggcattaaacgttccggctgtacccgctattccgcagcagtaa

SEQ ID NO: 474970 - DNA, 75 bp, synthetic construct
  source 1..75: mol_type = other DNA
atcggttttctggaatactccatagacaaagaaaacggcgattacgtactgaatatattgaagagaaacatgaag

SEQ ID NO: 474971 - DNA, 75 bp, synthetic construct
  source 1..75: mol_type = other DNA
aaaatgccactggaagatttcgttggtatgtttgcaatgccggcattaaacgttccggtcgtacccgctattccg

SEQ ID NO: 474972 - DNA, 75 bp, synthetic construct
  source 1..75: mol_type = other DNA
aaaatgccgctggaagattttgttggtatgtttgcaatgccagcattaaacgttccggctgtaccagccattccg

SEQ ID NO: 474973 - DNA, 75 bp, synthetic construct
  source 1..75: mol_type = other DNA
ctgttcctgaaagatccggcaacgactaaagaagcgccgcagacactggctcaggaagttgatcgctcggttaag

SEQ ID NO: 474974 - DNA, 75 bp, synthetic construct
  source 1..75: mol_type = other DNA
attgcgctttatgagcatttgggctttgagcatatcaactatgcgcttggctgcacgggccatgtcgattgtgaa

SEQ ID NO: 474975 - DNA, 75 bp, synthetic construct
  source 1..75: mol_type = other DNA
tccaggtcagccggataacacgccgccaggtggtgaactggtgtttgaacgctggcgtcggctaagcgataacag

SEQ ID NO: 474976 - DNA, 75 bp, synthetic construct
  source 1..75: mol_type = other DNA
atggcattattaatatttgctggttcacttttgtcatcgatgtttatcggtttacctatcgccttctcactaatt

SEQ ID NO: 474977 - DNA, 75 bp, synthetic construct
  source 1..75: mol_type = other DNA
ggtaagttttcaaaaaaagggtatgtcgacgcgggtaaatataatttacgtgtatttataaataaacaatccctt

SEQ ID NO: 474978 - DNA, 75 bp, synthetic construct
  source 1..75: mol_type = other DNA
ctttaatggcgatggatcacgcacacgagatgggcttcaaacgctgttacctggaaacaacggcttttctgacag

SEQ ID NO: 474979 - DNA, 75 bp, synthetic construct
  source 1..75: mol_type = other DNA
ccttaatggcgatggagcaggcacgagagatgggcttcaaacgctgctatctggaaacgtaccgcttttttaaag

SEQ ID NO: 474980 - DNA, 75 bp, synthetic construct
  source 1..75: mol_type = other DNA
cggcgcaatttaaccgcccgggccacgacattgtcgatcacttcacatatacctttatgggcgacggttgcatga

SEQ ID NO: 474981 - DNA, 75 bp, synthetic construct
  source 1..75: mol_type = other DNA
catcgaacctgaccttgtggtccggctctaaagcgattaacgaagacagcgccgggaactacattcactacggcg

SEQ ID NO: 474982 - DNA, 75 bp, synthetic construct
  source 1..75: mol_type = other DNA
taaagtagacaactcaccatttcgagctacttatcataattacttaaatactgctaaaatatttttatttggctc

SEQ ID NO: 474983 - DNA, 75 bp, synthetic construct
  source 1..75: mol_type = other DNA
aacggtgctatcgtcggcatgaccaccttcggtgaatctgcaccggcagagcaactgtttgaagagttcggcttc

SEQ ID NO: 474984 - DNA, 75 bp, synthetic construct
  source 1..75: mol_type = other DNA
cctttggtgaatctgctccggcagagcaactgttcgaagagttcggcttcaccgttgaaaacgtggtagcgaaag

SEQ ID NO: 474985 - DNA, 75 bp, synthetic construct
  source 1..75: mol_type = other DNA
cgaagacggcccgactcaccagccggttgagcaggttgcttctctgcgcgtgaccccgaacatgtctacatggcg

SEQ ID NO: 474986 - DNA, 75 bp, synthetic construct
  source 1..75: mol_type = other DNA
aaactgaaagccgataaagagatgtctacctttgaaattgagcaacagttactcgaacattttctgcgcaacacc

SEQ ID NO: 474987 - DNA, 75 bp, synthetic construct
  source 1..75: mol_type = other DNA
ttcgatgagtggcgcaagatttttaccgttgatgtcgatggtgcatttttatgctcacaaattgcggcccgcaga

SEQ ID NO: 474988 - DNA, 75 bp, synthetic construct
  source 1..75: mol_type = other DNA
tgttctcctacggcatgttagaagtgaatcgtctggcgggacgcgagctgccggtcgatggcgggtttgatgatg

SEQ ID NO: 474989 - DNA, 75 bp, synthetic construct
  source 1..75: mol_type = other DNA
tcatggattacgttaccaccgccgagcgtgctgacgaaaaccaggcaattcgtttaccaggccacgaatttacca

SEQ ID NO: 474990 - DNA, 75 bp, synthetic construct
  source 1..75: mol_type = other DNA
tgatgagcttcttgattatactgaagaattggataaactgtatgacatagttttcttgattatcaagaaagttag

SEQ ID NO: 474991 - DNA, 75 bp, synthetic construct
  source 1..75: mol_type = other DNA
tagataggtttgcagaaaaaattggtgttggatctatttcctttaatgaaaatagattgtgttcttttgctattg

SEQ ID NO: 474992 - DNA, 75 bp, synthetic construct
  source 1..75: mol_type = other DNA
gtattacataatcagggcataacattagaaaatgaacatatgagaatagaggaaattagttcaagcgataataaa

SEQ ID NO: 474993 - DNA, 75 bp, synthetic construct
  source 1..75: mol_type = other DNA
aagctgaaagccgacaaagagatgtctacgtttgagattgagcaacagttactggaacaatttctgcgtaatacc

SEQ ID NO: 474994 - DNA, 75 bp, synthetic construct
  source 1..75: mol_type = other DNA
ccatcagcggtagcgcttaccgcgtcactattcctgccgtgttgcaaattgcctgcctgcgccggatggttatcg

SEQ ID NO: 474995 - DNA, 75 bp, synthetic construct
  source 1..75: mol_type = other DNA
aagcggtcagcggcagcgcctatcgcgtgacgattccagccgtactgcaaatcgcctgcctgcgccggatggtta

SEQ ID NO: 474996 - DNA, 75 bp, synthetic construct
  source 1..75: mol_type = other DNA
gcgatatcattcctgatgcccaacccaaacgtataaccagcctcggcgcaattgaacagtgggacgcccagcgtt

SEQ ID NO: 474997 - DNA, 75 bp, synthetic construct
  source 1..75: mol_type = other DNA
aaacagcctttaatcgggtattaatttcacgtggcgttgacagtgaaacggccgatgcctgtgcagagatgttcg

SEQ ID NO: 474998 - DNA, 75 bp, synthetic construct
  source 1..75: mol_type = other DNA
gcatcggttgccgaagtcacccaggacaacagcgacgaatacggcatttcacaaatttttattgccattgaagtg

SEQ ID NO: 474999 - DNA, 75 bp, synthetic construct
  source 1..75: mol_type = other DNA
ctggctgctgctgaaaaataccggacaggatatggcaacggataacagaaccgaacctgtccatccaactcattg

SEQ ID NO: 475000 - DNA, 75 bp, synthetic construct
  source 1..75: mol_type = other DNA
ggaaccgttatcgcgtgtttcatggtttgtcggcgtcatcgtcgcctttgcggcctacgccttattaaagaaacg

SEQ ID NO: 475001 - DNA, 75 bp, synthetic construct
  source 1..75: mol_type = other DNA
gttcagccagcctgtcagccagttactggccgctgcccgtatggatgtgtacgtcattcgtgatggggagggcaa

SEQ ID NO: 475002 - DNA, 75 bp, synthetic construct
  source 1..75: mol_type = other DNA
aatctggaaatgatgttatctttaaatgatatgtatagtatgttatcttctgattcttcaacatactggaaatca

SEQ ID NO: 475003 - DNA, 75 bp, synthetic construct
  source 1..75: mol_type = other DNA
gtatagctattttgccgttgcgctggcgcaggctggtttgcgggtgatcatgccggatgcgcccgatcacggtag

SEQ ID NO: 475004 - DNA, 75 bp, synthetic construct
  source 1..75: mol_type = other DNA
agtcttccccctacgaggccacgctggtttccctgagccagcatctgctgggcgggcagcttccgtccggctggc

SEQ ID NO: 475005 - DNA, 75 bp, synthetic construct
  source 1..75: mol_type = other DNA
tgctggcgttgctgatgctcgcttccggtcagacggtcgccgcacccgctgcgctttctgccacgattgtcccgt

SEQ ID NO: 475006 - DNA, 75 bp, synthetic construct
  source 1..75: mol_type = other DNA
tccaattttcagtattccttatcataaatcttgttcacagaatttcgtttctggtattctggatatactcatttc

SEQ ID NO: 475007 - DNA, 75 bp, synthetic construct
  source 1..75: mol_type = other DNA
taaattctggagtaatatcttttgaaagtcctgtaggttcaccatctaacgaggatgttaaagttgcactcgaaa

SEQ ID NO: 475008 - DNA, 75 bp, synthetic construct
  source 1..75: mol_type = other DNA
tacaaatggctgcctatggtatgcagtacgaaggcgcaaaaaatcagttcatggaattatatgataaatatctgc

SEQ ID NO: 475009 - DNA, 75 bp, synthetic construct
  source 1..75: mol_type = other DNA
ttatctttatgccattgtagttctttgaaacatatagatggttcctttcctgagacgctcaggaattccgtatat

SEQ ID NO: 475010 - DNA, 75 bp, synthetic construct
  source 1..75: mol_type = other DNA
tatgttaagatgtctttggctgattcatttagtattcatccttatttgaataacacatatatacaacaatggcta

SEQ ID NO: 475011 - DNA, 75 bp, synthetic construct
  source 1..75: mol_type = other DNA
gatatgtctccaagaaaacaggctgagatattattttgtttaggcggtgttttctgtaaatactcatcgagcgat

SEQ ID NO: 475012 - DNA, 75 bp, synthetic construct
  source 1..75: mol_type = other DNA
cattgtcgcgccgctggcagagtgggaagcgacaaaccatctgacagagttggggaacagaccgctgctcttatg

SEQ ID NO: 475013 - DNA, 75 bp, synthetic construct
  source 1..75: mol_type = other DNA
cttcattaaagaacagagcgtcattaaccattgttacaccgaaattgatctgaagattttccgtcagtacctcgc

SEQ ID NO: 475014 - DNA, 75 bp, synthetic construct
  source 1..75: mol_type = other DNA
gtcaaagaagattcttcacgcttcccctatgaagaccggctggatctggtgttaaaaggcaccgccgatattcca

SEQ ID NO: 475015 - DNA, 75 bp, synthetic construct
  source 1..75: mol_type = other DNA
gattggctgcattgtgatgaacgccaatccctttacgaatggtcaccgttatctgattcaacaggctgcggcaca

SEQ ID NO: 475016 - DNA, 75 bp, synthetic construct
  source 1..75: mol_type = other DNA
ggatcgatttacgggccgaaggcagtaaaactcacagagagtggcgtattccggttgcgcgacagttacagccac

SEQ ID NO: 475017 - DNA, 75 bp, synthetic construct
  source 1..75: mol_type = other DNA
gactatctttttcaccacaagcgttttgttgtgccggtgtcagaagcaaaacgtataaccggtttgccagatgag

SEQ ID NO: 475018 - DNA, 75 bp, synthetic construct
  source 1..75: mol_type = other DNA
aaccaaaccctagaacaaatggcgcaagccctgttcaaaagctggtttgttaattttgaacccgtaaaggccaaa

SEQ ID NO: 475019 - DNA, 75 bp, synthetic construct
  source 1..75: mol_type = other DNA
tggcggttggtggcgcatcgatgggcgcgatgacggcgctggggattgccgctcgccaccccacggtgaaatgta

SEQ ID NO: 475020 - DNA, 75 bp, synthetic construct
  source 1..75: mol_type = other DNA
gaagcgacaaaccacctggaagagttgggaaacagacctctgctcttatggcatggccttgacgatgatgtcgtc

SEQ ID NO: 475021 - DNA, 75 bp, synthetic construct
  source 1..75: mol_type = other DNA
ccgttttaggggcgacgcagcgcggcggttaaatcaattttggcaaattttgctacaaagtatgcaggaattcac

SEQ ID NO: 475022 - DNA, 75 bp, synthetic construct
  source 1..75: mol_type = other DNA
tctcacggctatcgcgccgctggtccctgcagtcacgctgcattatttgcagaacctgcttgagcactcccgcca

SEQ ID NO: 475023 - DNA, 75 bp, synthetic construct
  source 1..75: mol_type = other DNA
gccatgcgtattgggtggttgaataccatggcgaagtggtcggcggcggcggaattgcaccattaaccggaagtg

SEQ ID NO: 475024 - DNA, 75 bp, synthetic construct
  source 1..75: mol_type = other DNA
aagccattgcgctttatgagcatttgggctttgagcatatcgactatgcgcttggctgcacgggtcatgtcgatt

SEQ ID NO: 475025 - DNA, 75 bp, synthetic construct
  source 1..75: mol_type = other DNA
accgccgacggcgttttatcccggtaatggagtcacgccaccaccacaggtgacgtaccagtctgtgccggtgcc

SEQ ID NO: 475026 - DNA, 75 bp, synthetic construct
  source 1..75: mol_type = other DNA
gtggaaatgccgaacagcaaaacgtatgacgcaacgggatgttttgtgggtctggaagcctggggggatgtgtcc

SEQ ID NO: 475027 - DNA, 75 bp, synthetic construct
  source 1..75: mol_type = other DNA
tgaaaaccgtggaggaaatggcgctggagcagtcacagagtacagcggaagagggtaacccggaaagcccggtgc

SEQ ID NO: 475028 - DNA, 75 bp, synthetic construct
  source 1..75: mol_type = other DNA
taaactaatacaaatgggcaaagttgtatccggtggaacacctgatacaaacatggccatgtattgggaaggcga

SEQ ID NO: 475029 - DNA, 75 bp, synthetic construct
  source 1..75: mol_type = other DNA
tttctagaattaacctttctgatattagagcgttaaacataaaaactcctgctatttgtgaacaagataaaatat

SEQ ID NO: 475030 - DNA, 75 bp, synthetic construct
  source 1..75: mol_type = other DNA
taggtgctgcaaaggttgatagggacagtgttaacggactggataagtttaagttaagggtcggtgactttgttt

SEQ ID NO: 475031 - DNA, 75 bp, synthetic construct
  source 1..75: mol_type = other DNA
atctgactgaattaggattgaacagttcatccgcaagaatatatccaaaaaactcggttctttatgctatgtatg

SEQ ID NO: 475032 - DNA, 75 bp, synthetic construct
  source 1..75: mol_type = other DNA
caatttccctgtaacgagtgttgaacaacaaaagatcgccgccgtcctgtccgctgccgacgacgaaatcgccac

SEQ ID NO: 475033 - DNA, 75 bp, synthetic construct
  source 1..75: mol_type = other DNA
accgttggcctgtacaacagtggagaattcattaacaacctgccatcggcactgggagagaacgcggttgttatc

SEQ ID NO: 475034 - DNA, 75 bp, synthetic construct
  source 1..75: mol_type = other DNA
ctgattgaaggggcggatgccaatgcctctgtcaccggtaatgaatccacggtgccgatgcagctgcgtatcacc

SEQ ID NO: 475035 - DNA, 75 bp, synthetic construct
  source 1..75: mol_type = other DNA
tctggaagcctggggggatgtgtccagtgagcgtgccattgtacgcacccgcaatatcagttgcctgaaggacgg

SEQ ID NO: 475036 - DNA, 75 bp, synthetic construct
  source 1..75: mol_type = other DNA
gtgatgcgtaacggcaaaatcctcggctgggcatggggcgcgggatttgttgacggtatcggtcagggaatggag

SEQ ID NO: 475037 - DNA, 75 bp, synthetic construct
  source 1..75: mol_type = other DNA
gaaagacgagaaaaaagccctgatgcagcaactactgaccggtaaacgtcgggtgaaaatcgatgaggctgttgc

SEQ ID NO: 475038 - DNA, 75 bp, synthetic construct
  source 1..75: mol_type = other DNA
cagaccatcaaccgcttcattgtccgcccggtcacgccggacgaactggcagaacgcctgcatgaaaaacaggaa

SEQ ID NO: 475039 - DNA, 75 bp, synthetic construct
  source 1..75: mol_type = other DNA
ccactccgcctgcatccacagcggcgagttcttccacggtccgtttgaaatcaccgatgccaacacgccgttctt

SEQ ID NO: 475040 - DNA, 75 bp, synthetic construct
  source 1..75: mol_type = other DNA
gagagtaaaactgggtgcgatagccgatatgaacagtggaggtactccgaaatcaacggttgaagagtattatgg

SEQ ID NO: 475041 - DNA, 75 bp, synthetic construct
  source 1..75: mol_type = other DNA
gtcgctacggcgcaatctcacaaaccgacatattcagcttattgccattggcggtgccattggtacagggctgtt

SEQ ID NO: 475042 - DNA, 75 bp, synthetic construct
  source 1..75: mol_type = other DNA
attgctctgcgacatttgaagcgagtgaaagctttttctctgactgtaaagattcaggaatggaatacatttcag

SEQ ID NO: 475043 - DNA, 75 bp, synthetic construct
  source 1..75: mol_type = other DNA
atggcagtatcaaaatcaacttctgaccagcgagcaaaacgcaactcgcttgaacggatgaaaactaacaatgtg

SEQ ID NO: 475044 - DNA, 75 bp, synthetic construct
  source 1..75: mol_type = other DNA
ggggatttattgcagagcaacatgtacgaagtatgtttacaggtaccagccagatttgtaccaggactgcggagg

SEQ ID NO: 475045 - DNA, 75 bp, synthetic construct
  source 1..75: mol_type = other DNA
tgggcaatgtctggatgtggtgctctcgttaattccaaccttaaaggctttttttcagcgtcattccttgcttta

SEQ ID NO: 475046 - DNA, 75 bp, synthetic construct
  source 1..75: mol_type = other DNA
catttccaggtggaacgaagcaagctaacttatcagctaaacagctacaggagataccagtacttattccccccg

SEQ ID NO: 475047 - DNA, 75 bp, synthetic construct
  source 1..75: mol_type = other DNA
gaaagactttaggttgccattagatatcaaagaacaacaaaaaatcgccgccgtcctttccgctgccgacgctga

SEQ ID NO: 475048 - DNA, 75 bp, synthetic construct
  source 1..75: mol_type = other DNA
ttcaatgacgcagttggtggatggaaaatgtacagttaataaccatgctcatattattgaaggaactaaagaggc

SEQ ID NO: 475049 - DNA, 75 bp, synthetic construct
  source 1..75: mol_type = other DNA
cggcttgctggcgggcgggatcggcattctggttgcgcttgcggtgttgatcgttggtaaaccacttatttcgct

SEQ ID NO: 475050 - DNA, 75 bp, synthetic construct
  source 1..75: mol_type = other DNA
tctggtatttcagtggacagatttaatgaaaaaattgcatttgcgttaagcagtcatttaccactatgtatgaac

SEQ ID NO: 475051 - DNA, 75 bp, synthetic construct
  source 1..75: mol_type = other DNA
atcaagattgctgggttgcgagattagcgatctcgtgaatttaggtgttactaaaaaaatagctttatgcctaaa

SEQ ID NO: 475052 - DNA, 75 bp, synthetic construct
  source 1..75: mol_type = other DNA
tatagaaattgatggggaaggtcgcattattgcctcagatgtgtcgcataatgatgcaacagctgagttaggaaa

SEQ ID NO: 475053 - DNA, 75 bp, synthetic construct
  source 1..75: mol_type = other DNA
agaatctagtttagagtacgacattgaaggattctctagagcaactggccaaaagattattggcgaagctaaagc

SEQ ID NO: 475054 - DNA, 75 bp, synthetic construct
  source 1..75: mol_type = other DNA
acaaggtgtattatcgcattgtgtatgacttccatgaagtggctgtattttgtgaacgcgaaggcagtaaaccgg

SEQ ID NO: 475055 - DNA, 75 bp, synthetic construct
  source 1..75: mol_type = other DNA
tggcattgtcgataccgtggtggcattttctgcgttggcagtatttacctggtttggcagtatttacctggtttg

SEQ ID NO: 475056 - DNA, 75 bp, synthetic construct
  source 1..75: mol_type = other DNA
aaaattttggagagtacgccataagtggttttgaattaactccttgccatcccgaaaaagataatcccgccgtac

SEQ ID NO: 475057 - DNA, 75 bp, synthetic construct
  source 1..75: mol_type = other DNA
ggcggaattgccggaaatattattaaatgcgttgctatcagtgaatccgttcgcggtgaaggtctggcgctgaca

SEQ ID NO: 475058 - DNA, 75 bp, synthetic construct
  source 1..75: mol_type = other DNA
gcgaaggttatccagaccagtgccaccacctggcaggaaaccgcgcagaccggtgacgccatcacccattacatc

SEQ ID NO: 475059 - DNA, 75 bp, synthetic construct
  source 1..75: mol_type = other DNA
ccgaactgcttgtctcggaagtcacgtttactcaggaccagaacggcaccctgacggaaatccgtgtcggcccac

SEQ ID NO: 475060 - DNA, 75 bp, synthetic construct
  source 1..75: mol_type = other DNA
ggaaagcgatgaagaacgtaagcccgatctgtttatcgccccatcccctgaaaacagtgccgcaatcaccttaca

SEQ ID NO: 475061 - DNA, 75 bp, synthetic construct
  source 1..75: mol_type = other DNA
ctgggcctttcagacacgcagcccgccgatctccggcatacggagtatcaccatctgtgggccgatattcaggtg

SEQ ID NO: 475062 - DNA, 75 bp, synthetic construct
  source 1..75: mol_type = other DNA
ctgtttttagttaaagaagattcttcacgcttcccctatgaagaccggctggatctggtattaaaaggcaccgcc

SEQ ID NO: 475063 - DNA, 75 bp, synthetic construct
  source 1..75: mol_type = other DNA
ccctctctggatgcaattaccctggtgcccatgttcccgcatacgttgtcagcgcgaccgctggtgataaacagc

SEQ ID NO: 475064 - DNA, 75 bp, synthetic construct
  source 1..75: mol_type = other DNA
tttttgcaagctatcttgtatgttatttagcaaaaactaaaggtctagatgctgttgttcgtgggggtaacggtg

SEQ ID NO: 475065 - DNA, 75 bp, synthetic construct
  source 1..75: mol_type = other DNA
aaactggacccgaatgaagcttattaccgggtactggttaccaccagtaataattatctgacagacaggaacgga

SEQ ID NO: 475066 - DNA, 75 bp, synthetic construct
  source 1..75: mol_type = other DNA
atgacagaaaaaacggaacggaataaagcgtcgtcagaggtggtcaggcagtcagacctggcgctgttgacagat

SEQ ID NO: 475067 - DNA, 75 bp, synthetic construct
  source 1..75: mol_type = other DNA
atgtcccgttttatcctgggtgactgcgtgcgtgttatggccacgattcctgataacgccattgatttcatgtcg

SEQ ID NO: 475068 - DNA, 75 bp, synthetic construct
  source 1..75: mol_type = other DNA
aaccccactggataccgcgctttcgctggctgaaactatccgcgtaagcgtggcaaaagtgagtatttcgagctt

SEQ ID NO: 475069 - DNA, 75 bp, synthetic construct
  source 1..75: mol_type = other DNA
tgattgccagcgtggatattaagactggtcagaaaagtgtgtttcagtacctgataaaacccattacccggatga

SEQ ID NO: 475070 - DNA, 75 bp, synthetic construct
  source 1..75: mol_type = other DNA
tgattgagttcgaagtgtacatcgacgagatctttgcgttttctcagcgatctgatgggctgattatttcgacac

SEQ ID NO: 475071 - DNA, 75 bp, synthetic construct
  source 1..75: mol_type = other DNA
atgctgggcgcggcgcgcacactcgcgcgctacgacattaaagtcatcggcatcaaccgtggcaacctgggtttc

SEQ ID NO: 475072 - DNA, 75 bp, synthetic construct
  source 1..75: mol_type = other DNA
gaatctaattcatccgaaagattacagttatttcaatacattaagcaccaaactcggctggtcaaaaaaattatt

SEQ ID NO: 475073 - DNA, 75 bp, synthetic construct
  source 1..75: mol_type = other DNA
taattatcttacagacaggaatggaaaaaaattaccagttattcccggaatgatagccagcgtagatataaaaac

SEQ ID NO: 475074 - DNA, 75 bp, synthetic construct
  source 1..75: mol_type = other DNA
caaacgtgagctatatgaaattgaacgtgacggtaacaccatcgaatatgacggcatgacaatggaacgcgtaaa

SEQ ID NO: 475075 - DNA, 75 bp, synthetic construct
  source 1..75: mol_type = other DNA
atgcgtttttctcctgatgtttctttatgcttaacggaacttgtgacgttgaataataaggtccctcagggtggg

SEQ ID NO: 475076 - DNA, 75 bp, synthetic construct
  source 1..75: mol_type = other DNA
cattccggtgggcaaggcaaccgggctggatattaatttgctgattgccatttccggtttactgatgaccgtcac

SEQ ID NO: 475077 - DNA, 75 bp, synthetic construct
  source 1..75: mol_type = other DNA
acgtattttgtttatccgaaatatagcaaatctttaaaggctgtcgtagattttatcatttatatacctacatct

SEQ ID NO: 475078 - DNA, 75 bp, synthetic construct
  source 1..75: mol_type = other DNA
caccggcgcttatgcctctcacggtcactccatcgcttccgcaggcggtaataaagtcgcttacctttatcctcg

SEQ ID NO: 475079 - DNA, 75 bp, synthetic construct
  source 1..75: mol_type = other DNA
ttccctggtcatgcgtacgagtcatcaaaccgtttgtcggtggcggttttggtaataaacaggatgtactggaag

SEQ ID NO: 475080 - DNA, 75 bp, synthetic construct
  source 1..75: mol_type = other DNA
agtgggagcgtcgcggatttaacatcaaaatggaagacggcgatctcgatgtactgcgtgaaggcacctgcgatt

SEQ ID NO: 475081 - DNA, 75 bp, synthetic construct
  source 1..75: mol_type = other DNA
ggtactggcgatatgtcgcgttcacgtaagaagagctttgactggtacaaagaggtgattaccagcaacggcgag

SEQ ID NO: 475082 - DNA, 75 bp, synthetic construct
  source 1..75: mol_type = other DNA
tgcacaatttacggcgatcttccccgatcttgccgcagaaactcgccaacagctgttgtcttatcttcagggcgc

SEQ ID NO: 475083 - DNA, 75 bp, synthetic construct
  source 1..75: mol_type = other DNA
cctaagttttataacctgtttcatgataccaactttgcggcccttgaagcgtcgttccgggaacgcaacagtttt

SEQ ID NO: 475084 - DNA, 75 bp, synthetic construct
  source 1..75: mol_type = other DNA
gagacattaccgctggatgcgttcgcggcgcgtgtttgccaacaaacgcgtgaacgttcaccggacgatgctcat

SEQ ID NO: 475085 - DNA, 75 bp, synthetic construct
  source 1..75: mol_type = other DNA
aacgcatttacagtgccggattacctgagtgtctggaaaaagggcgggaaatctttgaatgggaaaaacgacgtg

SEQ ID NO: 475086 - DNA, 75 bp, synthetic construct
  source 1..75: mol_type = other DNA
ttgcgcctacgcttacagctcaaagacctgctataccaatctaccctcggctggcgcaatgcgtggttatggcgc

SEQ ID NO: 475087 - DNA, 75 bp, synthetic construct
  source 1..75: mol_type = other DNA
tggtatcagcattggatcaatcgcacgctgagtaacggcaataatctgtttatcagtagcgttgcggaaacagtg

SEQ ID NO: 475088 - DNA, 75 bp, synthetic construct
  source 1..75: mol_type = other DNA
tctgatgacgaccatttccactaacgccaccggtaatattattccggcggttatcagattgccgctattgcaccg

SEQ ID NO: 475089 - DNA, 75 bp, synthetic construct
  source 1..75: mol_type = other DNA
cgacggaaatcggccagggtgccgacaccgtgttctcgcaaatggtggcagaaaccgtgggagttccggtcagcg

SEQ ID NO: 475090 - DNA, 75 bp, synthetic construct
  source 1..75: mol_type = other DNA
ctattcgtaacgcggtgaagatggctaccggtgttgcaatcaatacactgccgctaacgccaaaacgattatatg

SEQ ID NO: 475091 - DNA, 75 bp, synthetic construct
  source 1..75: mol_type = other DNA
tttgtggtgctgacctctgcggcgtcttccgctaacagcggcgtcttctctaccagtcgtatgctgtttggtctg

SEQ ID NO: 475092 - DNA, 75 bp, synthetic construct
  source 1..75: mol_type = other DNA
aaaaataccgggttttctatgaagacgccattgctgaattgttcaaggaagaggcgcgggctgataacgaaatta

SEQ ID NO: 475093 - DNA, 75 bp, synthetic construct
  source 1..75: mol_type = other DNA
atcgcgcgtagagcttggatatagcgcttttttagggaagatggaactatcacaagccgaaaaacacagggccgt

SEQ ID NO: 475094 - DNA, 75 bp, synthetic construct
  source 1..75: mol_type = other DNA
ccttcattcgcgctaccacctgcgacagcgaaggctacgccacttttgaagatgaggtgatgtatctcgacgcat

SEQ ID NO: 475095 - DNA, 75 bp, synthetic construct
  source 1..75: mol_type = other DNA
tgctcgccgtgtgtgccacggtgttgtgtttttcactgatattcagggaacgcttatgtgaactgaatattcaca

SEQ ID NO: 475096 - DNA, 75 bp, synthetic construct
  source 1..75: mol_type = other DNA
attgggttgctcgccgtgtgcgccacggtgttgtgtttttcactgatattcagggaacggttatgtgaactgaat

SEQ ID NO: 475097 - DNA, 75 bp, synthetic construct
  source 1..75: mol_type = other DNA
gtgtttttcactgatattcagggaacggttatgtgaactgaatattcacagaggaaatacagtggtgcaggtaac

SEQ ID NO: 475098 - DNA, 75 bp, synthetic construct
  source 1..75: mol_type = other DNA
caaaatcgtcgccattgtgtcgctgattgtcgtcggcctggtcatggtggcgatgcactttcagtcaccgaccgg

SEQ ID NO: 475099 - DNA, 75 bp, synthetic construct
  source 1..75: mol_type = other DNA
gcctgctgccgcaagcgtgatcaactttgtggtgctgacctctgcggcgtcttccgctaacagcggcgtcttctc

SEQ ID NO: 475100 - DNA, 75 bp, synthetic construct
  source 1..75: mol_type = other DNA
agatggagttctggtttgcgatgatcaaaattgtcgccatcgtgtcgctgattgtcgttggtctgatcatggtca

SEQ ID NO: 475101 - DNA, 75 bp, synthetic construct
  source 1..75: mol_type = other DNA
ctgaaagggccgtatctttccgctcagctgccgtttcgtaaaagtgacttaccgctgaatttcttccctaatctg

SEQ ID NO: 475102 - DNA, 75 bp, synthetic construct
  source 1..75: mol_type = other DNA
aaattccggagaagatatcaatatcacttccctgacgtttaaaaatagtcttctggcagcccggacactgatggt

SEQ ID NO: 475103 - DNA, 75 bp, synthetic construct
  source 1..75: mol_type = other DNA
tgaactggaaagcgcggttggcctgccgatgaataaagaaaccagccatgtgatgctgtgcggcaatccacagat

SEQ ID NO: 475104 - DNA, 75 bp, synthetic construct
  source 1..75: mol_type = other DNA
tgtgcccgtaaccagcggaggcaattttgcccgcactgccggctttgcggtgtcgttggatggtgttggcatacg

SEQ ID NO: 475105 - DNA, 75 bp, synthetic construct
  source 1..75: mol_type = other DNA
ggcaaataccactttgcaaatgaggacacactggcgctctcgtactatgaccgcacacgcttcccaacgctgaaa

SEQ ID NO: 475106 - DNA, 75 bp, synthetic construct
  source 1..75: mol_type = other DNA
gggggcagtcgaagtttccaaagggtattcgtcgctgcttcaggggcctaatcagatgggcggagccattaatat

SEQ ID NO: 475107 - DNA, 75 bp, synthetic construct
  source 1..75: mol_type = other DNA
gctgctggttaccccgctgtggtttatcgcgctggggctgggctggctgtttattggtaagaagcaggctgctga

SEQ ID NO: 475108 - DNA, 75 bp, synthetic construct
  source 1..75: mol_type = other DNA
gatggtccaaccataattgaactgaattctttgaaatcagtttcaatgctggctcaaaagctttctgctttttct

SEQ ID NO: 475109 - DNA, 75 bp, synthetic construct
  source 1..75: mol_type = other DNA
tgaccttattgttattatgaatgaagatggtccaaccataattgaactgaattctttgaaatcagtttcaatgct

SEQ ID NO: 475110 - DNA, 75 bp, synthetic construct
  source 1..75: mol_type = other DNA
atgaacaaagaaaaaatcgaagccttaatgagcgtaatattaaaagaagctgaccccaaaaaatttcctgagaag

SEQ ID NO: 475111 - DNA, 75 bp, synthetic construct
  source 1..75: mol_type = other DNA
cgatatgcgccagcagccaacgcagttagttgaagttccgtggaatgagcaaacgccagaacagcgccagcaaac

SEQ ID NO: 475112 - DNA, 75 bp, synthetic construct
  source 1..75: mol_type = other DNA
ctggttgaagttccgtggaatgaacagacgccggaacagcgtcagcaaacgctacaacgccagcgtcaggcgcag

SEQ ID NO: 475113 - DNA, 75 bp, synthetic construct
  source 1..75: mol_type = other DNA
tttgcccgcgcagccgggtttaccgtctcactggacggggcgggaaccaaaacaacgggtgtgatccgttgcgac

SEQ ID NO: 475114 - DNA, 75 bp, synthetic construct
  source 1..75: mol_type = other DNA
tcgtacctggtcgctcgccagtgaatatcaatgggctgctgccgataatgtcgatgtcgtggctggaatcagcta

SEQ ID NO: 475115 - DNA, 75 bp, synthetic construct
  source 1..75: mol_type = other DNA
acaaccgcgtaccgcgcaagcgcagcaaccaccgcgccagacgcagcagactcgccaggcggctcagcagccgta

SEQ ID NO: 475116 - DNA, 75 bp, synthetic construct
  source 1..75: mol_type = other DNA
ggatggtacagtgcggttcgttccgaggcgcggaacaggcagagacggtacgtgctcagctggcgttcgaaggct

SEQ ID NO: 475117 - DNA, 75 bp, synthetic construct
  source 1..75: mol_type = other DNA
caaaggtacagtcatttgaatcctttgatgaaaggacggactctaaatttataaagagtggtaatgtttattcca

SEQ ID NO: 475118 - DNA, 75 bp, synthetic construct
  source 1..75: mol_type = other DNA
tttccgtataacttactgcgatatatcgaacagcatcatgcggagattgctgcacaatttacggcgatcttcccc

SEQ ID NO: 475119 - DNA, 75 bp, synthetic construct
  source 1..75: mol_type = other DNA
cgtatcgaagaagcgttaaaactgctggtggaagatcgcaaatctctgcgttcacgcatcgataaactcaagcgc

SEQ ID NO: 475120 - DNA, 75 bp, synthetic construct
  source 1..75: mol_type = other DNA
aattaggtatttgctcagatagtttggtttatcataagataggtgcaagtactgatgggggaaagagtatgatag

SEQ ID NO: 475121 - DNA, 75 bp, synthetic construct
  source 1..75: mol_type = other DNA
gtgcttaccgccagtctctggtttctgtgtggtgcaattatgaatcagggcgcagcaatggttgttccaatggct

SEQ ID NO: 475122 - DNA, 75 bp, synthetic construct
  source 1..75: mol_type = other DNA
agttccatctcgccattgccgaagcaacgcataacagcatgctggtggagttattccgtcagtcctggcagtggc

SEQ ID NO: 475123 - DNA, 75 bp, synthetic construct
  source 1..75: mol_type = other DNA
atcagcaatatactggatgtaggattgagctacgccctgatccacgctgatgccaaacgcaaagacatcggcaag

SEQ ID NO: 475124 - DNA, 75 bp, synthetic construct
  source 1..75: mol_type = other DNA
atgatgttcagtttcattcaacaagccatggcggatggtttgcgtaatgtgctgattattcatggtaaagggcgg

SEQ ID NO: 475125 - DNA, 75 bp, synthetic construct
  source 1..75: mol_type = other DNA
aacgttaagcaacgtctgctggaattctcgaacgttgacgatatttattttgatggctatctgtttgattcatgg

SEQ ID NO: 475126 - DNA, 75 bp, synthetic construct
  source 1..75: mol_type = other DNA
agctcaggcagccacaacacagacagtccggatgccaacgtctgcaacgatgccggtccttttgagctgttacag

SEQ ID NO: 475127 - DNA, 75 bp, synthetic construct
  source 1..75: mol_type = other DNA
tgcactgcgtgcaatggaagctccgctgcgtcagatcgtcctgaactgcggcgaagaaccgtctgttgttgctaa

SEQ ID NO: 475128 - DNA, 75 bp, synthetic construct
  source 1..75: mol_type = other DNA
gcgcggcgtaaacgtactggcagatgcagggaaagttaccctcggtccgaaaggccgtaacgtagttctggataa

SEQ ID NO: 475129 - DNA, 75 bp, synthetic construct
  source 1..75: mol_type = other DNA
gtaaactgatcgctgaagcgatggacaaagtcggtaaagaaggtgttatcaccgttgaagacggtaccggtctgc

SEQ ID NO: 475130 - DNA, 75 bp, synthetic construct
  source 1..75: mol_type = other DNA
aagaaaaaggttttttatatcgtctaacatcacgttatcgtcattatgccgcatttgagcgagcgactttcgagc

SEQ ID NO: 475131 - DNA, 75 bp, synthetic construct
  source 1..75: mol_type = other DNA
ctgcaggcgacggtaccaccactgcaaccgtactggctcaggctatcatcactgagggtctgaaagctgttgctg

SEQ ID NO: 475132 - DNA, 75 bp, synthetic construct
  source 1..75: mol_type = other DNA
gttgttgctaacaccgttaaaggcggcgacggcaactacggttacaacgcagcaaccgaagaatacggcaacatg

SEQ ID NO: 475133 - DNA, 75 bp, synthetic construct
  source 1..75: mol_type = other DNA
atgtcgcaggtcactcgtctttcttcgctttcattattggtagttctggttttagcggggtgtagtagtcaggct

SEQ ID NO: 475134 - DNA, 75 bp, synthetic construct
  source 1..75: mol_type = other DNA
tccattaatattttttgaaaatgcatggtatccagaacaatatccaagaacaataagagatttattcaatttaat

SEQ ID NO: 475135 - DNA, 75 bp, synthetic construct
  source 1..75: mol_type = other DNA
ggataccgtttttacgccacgttccagcaatctttctttgccaaagcattttacagaccttgataaagatcgtgc

SEQ ID NO: 475136 - DNA, 75 bp, synthetic construct
  source 1..75: mol_type = other DNA
ccgaacagcataccaaagggtatccgtggaaaatggacggtacagtccgtcaggaagtcttcagtcgccgcggcg

SEQ ID NO: 475137 - DNA, 75 bp, synthetic construct
  source 1..75: mol_type = other DNA
attgaattatccggctaattacagcgcgccaatttaccgttttgctgattttaatgcaggctggtacgccagtcg

SEQ ID NO: 475138 - DNA, 75 bp, synthetic construct
  source 1..75: mol_type = other DNA
aagcgatagatgtggcgagcgtcgtgcggcagaagatgcctgcgagcgtgaaagaccgcgatgcctgggcgaaag

SEQ ID NO: 475139 - DNA, 75 bp, synthetic construct
  source 1..75: mol_type = other DNA
tcgttgggtttaataagatgcctgggctggatgtctattttgccgccgatgtctgttatgccgagaaagtggcgc

SEQ ID NO: 475140 - DNA, 75 bp, synthetic construct
  source 1..75: mol_type = other DNA
tgttgtatgccgatttggtgattctggatgagctgggatatttgccttttagccaaaccggtggggcactgctgt

SEQ ID NO: 475141 - DNA, 75 bp, synthetic construct
  source 1..75: mol_type = other DNA
cgacgttagagctggtgaatgcactggagctggaaaaacgcaaagaccaaaccggcagaatagcctcacgactga

SEQ ID NO: 475142 - DNA, 75 bp, synthetic construct
  source 1..75: mol_type = other DNA
gaaaatatgagccttatcttctcaatgataattccatactctccagaattgcccttcttgaacttggtattttcg

SEQ ID NO: 475143 - DNA, 75 bp, synthetic construct
  source 1..75: mol_type = other DNA
tatttatgatcaggtcgctggtgatcttgaacctatatatgccaacattcaacatggtgcaggagatgttcctga

SEQ ID NO: 475144 - DNA, 75 bp, synthetic construct
  source 1..75: mol_type = other DNA
cctctactactaccactacaacaacagcgacacatacgacagccgggaataaacctgcggataatacacctgcgt

SEQ ID NO: 475145 - DNA, 75 bp, synthetic construct
  source 1..75: mol_type = other DNA
ccgcttattcccacccttctgtcacaggaactgaaaaactatctgaagcttaatgttaaagagaaaaatattcag

SEQ ID NO: 475146 - DNA, 75 bp, synthetic construct
  source 1..75: mol_type = other DNA
gaattgtgctgctggaagcgataactgcaggattaccggtactaacaacagccgtttgtggctatgcgcattata

SEQ ID NO: 475147 - DNA, 75 bp, synthetic construct
  source 1..75: mol_type = other DNA
gcagtaaatacggcgtaccgtttgccatgatcctgcgtgcttcttacggcgtacgtggcgcactgtttcccggat

SEQ ID NO: 475148 - DNA, 75 bp, synthetic construct
  source 1..75: mol_type = other DNA
ggcttgggcggagaatgctcggtattacgccgatactcaggatttgtatagcttgccggagaaagcggcagatat

SEQ ID NO: 475149 - DNA, 75 bp, synthetic construct
  source 1..75: mol_type = other DNA
atgcgtgtcaaacatgcagtagttctactcatgcttatttcaccattaagttgggcaggaaatatgactttccag

SEQ ID NO: 475150 - DNA, 75 bp, synthetic construct
  source 1..75: mol_type = other DNA
ttggccaggataaaccgcgtaaatttgaagtgctggcagaaaaactcggtgtgcgtagtaaagtgcatttctttt

SEQ ID NO: 475151 - DNA, 75 bp, synthetic construct
  source 1..75: mol_type = other DNA
atgatcgtggcattttgcttatataaatattttccatttggtgggctacagcgtgactttatgcgtattgcctca

SEQ ID NO: 475152 - DNA, 75 bp, synthetic construct
  source 1..75: mol_type = other DNA
gaatgataaatggattgcacaattcggaaacccaggaaagggtgattgtattatacctttgatttttgaaaattc

SEQ ID NO: 475153 - DNA, 75 bp, synthetic construct
  source 1..75: mol_type = other DNA
ttgatctctcgcgcctcagcgcggatgagctgaaggtttatcagcttattcgacagcattattttgcccagtttt

SEQ ID NO: 475154 - DNA, 75 bp, synthetic construct
  source 1..75: mol_type = other DNA
cgtcgccaaatccgatccgtcagttgcaccggtgctgacccaactggaccgcgggtttgtctcccgggtctggaa

SEQ ID NO: 475155 - DNA, 75 bp, synthetic construct
  source 1..75: mol_type = other DNA
agtacgattttgtcggcgcgtggtgtcacgatgaagatggcggtttgctgcacgttgccaaccaccatattgcgc

SEQ ID NO: 475156 - DNA, 75 bp, synthetic construct
  source 1..75: mol_type = other DNA
tgccccagcaggaatctgatatcaccgatgcaacactgacagtcggcgggcaacggttcagggcccgcggaaaag

SEQ ID NO: 475157 - DNA, 75 bp, synthetic construct
  source 1..75: mol_type = other DNA
cagttgtttggaacgcgggggcgagtggaggttgtcaggggatggcgtgcgctttttgtgtcagattcggcggga

SEQ ID NO: 475158 - DNA, 75 bp, synthetic construct
  source 1..75: mol_type = other DNA
gcgttacccggagtgtaaaggcgtgatttcagagcagaaaacgtcacacagtaaacgcggcggcagaaaaattaa

SEQ ID NO: 475159 - DNA, 75 bp, synthetic construct
  source 1..75: mol_type = other DNA
gccaccggcacttactacaaagtggactactccgccggagtggacatttctcgctataaaaatgtgcctgttcca

SEQ ID NO: 475160 - DNA, 75 bp, synthetic construct
  source 1..75: mol_type = other DNA
tcacgatgaagatggtggtttgctacacgttgccaaccaccatattgcgccaggtaaaaaacagtggagctgggg

SEQ ID NO: 475161 - DNA, 75 bp, synthetic construct
  source 1..75: mol_type = other DNA
gtacccgtaatgctagatatcctccagatcctgactggctttaggtgtgagtttaacggttttcaccggaagccc

SEQ ID NO: 475162 - DNA, 75 bp, synthetic construct
  source 1..75: mol_type = other DNA
acgggccgtctccgctttccccatcgccaccggcacttactacaaagtggactactccgccggagtggacatttc

SEQ ID NO: 475163 - DNA, 75 bp, synthetic construct
  source 1..75: mol_type = other DNA
ccactggcagcacaagacattaccagtacagatgaagcctggtttatcggtcagcatctggagcaatatcatcac

SEQ ID NO: 475164 - DNA, 75 bp, synthetic construct
  source 1..75: mol_type = other DNA
tctccgttgaacggataccgcctggcgatccgcgaaatcggcaaatgcaacgcgttacttgatgatgccgtggca

SEQ ID NO: 475165 - DNA, 75 bp, synthetic construct
  source 1..75: mol_type = other DNA
gggtggcggcagagcagtactgcgatgaagagaaacggtgcgtgaacgttcaggcggcccgggctgttcttcagt

SEQ ID NO: 475166 - DNA, 75 bp, synthetic construct
  source 1..75: mol_type = other DNA
tcgccgatgctgtctcccgagccattgccaatttggaagcgaaaaagccgcagcagattgtgcacgccccagctc

SEQ ID NO: 475167 - DNA, 75 bp, synthetic construct
  source 1..75: mol_type = other DNA
actctcaaagctcgtaactcaggtgtgtcagaagtgctgtccgtcggtcgggtacagacgccgacgcttgctatg

SEQ ID NO: 475168 - DNA, 75 bp, synthetic construct
  source 1..75: mol_type = other DNA
gcctatggtgagcaatatggcaggccatggcgtgccgatgttctgcctgtgctgcctgaggcctggaaaatggtc

SEQ ID NO: 475169 - DNA, 75 bp, synthetic construct
  source 1..75: mol_type = other DNA
tcgtttttcaaataaatcttttgcatatagttacataggaagagaagcagagcttttagaacttggtggtaactg

SEQ ID NO: 475170 - DNA, 75 bp, synthetic construct
  source 1..75: mol_type = other DNA
cttgtgctaatatgttcaatgtcaagccaataattctaatttcattcccaactccttctgggatgaatattatag

SEQ ID NO: 475171 - DNA, 75 bp, synthetic construct
  source 1..75: mol_type = other DNA
agaaactgacaagaaaaaactcatcgagcgttatcagcgtgactggcaattaatggctggaaacgaggaggcgca

SEQ ID NO: 475172 - DNA, 75 bp, synthetic construct
  source 1..75: mol_type = other DNA
aacgcattgtggcatatgtttataaatcatcacggaatacggtttttgaaaatcctgacattgtaaaaacctgta

SEQ ID NO: 475173 - DNA, 75 bp, synthetic construct
  source 1..75: mol_type = other DNA
tcatcgcccgggaactgctggcgtactgccggtatcgcgggccagtccgccggctgtggttgtcggccctggatg

SEQ ID NO: 475174 - DNA, 75 bp, synthetic construct
  source 1..75: mol_type = other DNA
gctgctgaaggcgaagatgaacagacgacggaaatggcgttgccgacgcttgaacggggtgaacactgccggatt

SEQ ID NO: 475175 - DNA, 75 bp, synthetic construct
  source 1..75: mol_type = other DNA
gcaggtgattgtctggctggaaaaggaggggctccgtttccgcagtaactgggtggcagctgagcagtactgcga

SEQ ID NO: 475176 - DNA, 75 bp, synthetic construct
  source 1..75: mol_type = other DNA
ggatgtgtttatgcaaaagcaaatcagctggctgtctcatctcattaaaaaaggcggggaaatgccgctggcgct

SEQ ID NO: 475177 - DNA, 75 bp, synthetic construct
  source 1..75: mol_type = other DNA
gcctacggtgaacagttcggcgttccctggcgtactgacgtgttgccggtattgccgacaatgtggcaaatgcgg

SEQ ID NO: 475178 - DNA, 75 bp, synthetic construct
  source 1..75: mol_type = other DNA
ttagccgaaacacaatcacagtttgctggttttggtgcaagtgctaaagaatctcttgggcttgataattctgaa

SEQ ID NO: 475179 - DNA, 75 bp, synthetic construct
  source 1..75: mol_type = other DNA
gtcacatggtgtcgatagtctgaccgatattagttacaaggtgagagcgttctttgatgaggtgacattagctta

SEQ ID NO: 475180 - DNA, 75 bp, synthetic construct
  source 1..75: mol_type = other DNA
gtcaggtgatggctgaggagctgaaaggtcaattagctgaagctgttcctggtatggttcaggtatttgctaaag

SEQ ID NO: 475181 - DNA, 75 bp, synthetic construct
  source 1..75: mol_type = other DNA
gcgaactatcacgcaaagtagacgctttaacagcagaaactaagaagcccttgtcaattaatgtcactggtgaag

SEQ ID NO: 475182 - DNA, 75 bp, synthetic construct
  source 1..75: mol_type = other DNA
tgcagctaataaagttgctaatcttcaggaaccaatgaataactttgtgaataacactcagacaactccaccagc

SEQ ID NO: 475183 - DNA, 75 bp, synthetic construct
  source 1..75: mol_type = other DNA
tttaaacacccttggtggaagtggtaaaacattaggtgagtctcttggtagcttgatgactgatatgtcacatgg

SEQ ID NO: 475184 - DNA, 75 bp, synthetic construct
  source 1..75: mol_type = other DNA
ttgcagaaatacatcaaatctcagttttacgggctatccgctaaagctgggtcaatggataattcaaaattcaat

SEQ ID NO: 475185 - DNA, 75 bp, synthetic construct
  source 1..75: mol_type = other DNA
tttatttcaatgcaagctgtgattaactcatacaggcagattatggaggttggtttacagcgtgcatcatcggaa

SEQ ID NO: 475186 - DNA, 75 bp, synthetic construct
  source 1..75: mol_type = other DNA
gaattatttaaaaacttaactggatatgcccgtctaatggggcgttcagatgagcagattcaaagagcattaacc

SEQ ID NO: 475187 - DNA, 75 bp, synthetic construct
  source 1..75: mol_type = other DNA
atggcacagtttaaagttgatgattttttgattgagctaagttttagctctcagcgagttttaaaaggcttggaa

SEQ ID NO: 475188 - DNA, 75 bp, synthetic construct
  source 1..75: mol_type = other DNA
acgcctttaaatgattctctcaaactaatggaaaagaatgtcgataagactgtttccaagattgagcagcgtctt

SEQ ID NO: 475189 - DNA, 75 bp, synthetic construct
  source 1..75: mol_type = other DNA
cagcggcttattcagcgaatatgtctaagctgaaaggtcttaacccaattgtcgagaaatacattaagagtcagt

SEQ ID NO: 475190 - DNA, 75 bp, synthetic construct
  source 1..75: mol_type = other DNA
caaaggtttcagaattaatacaaagcaacttgatagcaatctgacaagttctttaggacaacttgaaagaaagtt

SEQ ID NO: 475191 - DNA, 75 bp, synthetic construct
  source 1..75: mol_type = other DNA
atattaagaaaatatgagcaagagcctgcaattgagatatattcacgtgatataaataaaggattagcaacttcc

SEQ ID NO: 475192 - DNA, 75 bp, synthetic construct
  source 1..75: mol_type = other DNA
tgttggcagtaaaaacgccggatgatttattgcggcagttacgccgtgcggtcaaattattaaacggttccgtca

SEQ ID NO: 475193 - DNA, 75 bp, synthetic construct
  source 1..75: mol_type = other DNA
ggcagcaacgtattcgtgagacggtgctgcacgcactggatgttcatccccgtctgacggcattgcgggttgatc

SEQ ID NO: 475194 - DNA, 75 bp, synthetic construct
  source 1..75: mol_type = other DNA
ttcagcaggtgctggagcgtgctgactatctggcgaaggagagtaccaaagcttacggcaccggtgaacgcaact

SEQ ID NO: 475195 - DNA, 75 bp, synthetic construct
  source 1..75: mol_type = other DNA
ttattaggggggtattcctctaatagaaatatttttatttttgaatctgaaattaatcatggattggcttatggc

SEQ ID NO: 475196 - DNA, 75 bp, synthetic construct
  source 1..75: mol_type = other DNA
cgcctctgcgaagtttgatcccgagcataaagtctggcgcctgtcgcaggttgatgaatctgatctgactaatcc

SEQ ID NO: 475197 - DNA, 75 bp, synthetic construct
  source 1..75: mol_type = other DNA
ttaggtggtcaatctaaaaatcttggtgaacattttggcgacctgatgaaaagcatgtcaaacggtattgatgac

SEQ ID NO: 475198 - DNA, 75 bp, synthetic construct
  source 1..75: mol_type = other DNA
aatctcagttttacgggctatctgctaaagccggttcaatggattcttcaaaattcaatgagaagctgtctcagt

SEQ ID NO: 475199 - DNA, 75 bp, synthetic construct
  source 1..75: mol_type = other DNA
aacgggattttaaaagcttttgagcagatggcgagcaagggcaagattcaagctgaagagctacgcggtcaatta

SEQ ID NO: 475200 - DNA, 75 bp, synthetic construct
  source 1..75: mol_type = other DNA
gtacggtaagagggtttatcgcagggatcgcctgttcagtggctgtcgcctcagcattgtggtggtggcaagtct

SEQ ID NO: 475201 - DNA, 75 bp, synthetic construct
  source 1..75: mol_type = other DNA
atcgtgcagagatcacgccgcttggcagtaacaaagtgctgaaagggactgttgatagtgttgccgcaggggtca

SEQ ID NO: 475202 - DNA, 75 bp, synthetic construct
  source 1..75: mol_type = other DNA
actggcccggagagcaaaacggtcattgattaccatgacggtcagccagttgtgaccaaagtggaggccttcaaa

SEQ ID NO: 475203 - DNA, 75 bp, synthetic construct
  source 1..75: mol_type = other DNA
attttgcagaaatacatcaaatctcagttttacgggctatctgctaaagctgggtcaatggataattcaaaattc

SEQ ID NO: 475204 - DNA, 75 bp, synthetic construct
  source 1..75: mol_type = other DNA
gattggcttaaatggcatgatgagttggagctgcctgtcaaacaagtcgattttgaacgctggcagcacatcgat

SEQ ID NO: 475205 - DNA, 75 bp, synthetic construct
  source 1..75: mol_type = other DNA
atcctgtcgatcggcgccgggcccgatgcagtcaccgcgctccattatgccgaagcggtggcgcggatcgagggc

SEQ ID NO: 475206 - DNA, 75 bp, synthetic construct
  source 1..75: mol_type = other DNA
ttcggcatcgaatggctcgaggcgcgccacgccgcgccagcggcggcagcgctgaagccgaaacaacgccgcgac

SEQ ID NO: 475207 - DNA, 75 bp, synthetic construct
  source 1..75: mol_type = other DNA
actgacaggtatgctggattgcctctggtatttctgactgccggaattgttttatggacagctatgaatattatt

SEQ ID NO: 475208 - DNA, 75 bp, synthetic construct
  source 1..75: mol_type = other DNA
ataatatttgggggtgtccggatattcctgctgaaacgccgtatgcgccgggagaacgaattaagggagggcggc

SEQ ID NO: 475209 - DNA, 75 bp, synthetic construct
  source 1..75: mol_type = other DNA
ttgcatcgttagcatacgttattttgttgtttatgttttgtcatctgtttggcgtaatgggggctgcatttgctt

SEQ ID NO: 475210 - DNA, 75 bp, synthetic construct
  source 1..75: mol_type = other DNA
gtccattgatcctgaaggtaaagacaaatttgtatttactggaggccgtggtggtgctgggcatgctatggtcac

SEQ ID NO: 475211 - DNA, 75 bp, synthetic construct
  source 1..75: mol_type = other DNA
cggattgcgtttaggtatgggaggattaacgagtggtggcgagagcgcagtaaatactgcaaatgcctcaccaac

SEQ ID NO: 475212 - DNA, 75 bp, synthetic construct
  source 1..75: mol_type = other DNA
ggctgggtggaaatcgacaacaacatcgctgaaaatgccttacggggagtggccgtaggccggaaaaactggctc

SEQ ID NO: 475213 - DNA, 75 bp, synthetic construct
  source 1..75: mol_type = other DNA
aagggcatactgatgtttatggacggctttcttgggacaaaccagcaagtggattaacaactagatgtataagct

SEQ ID NO: 475214 - DNA, 75 bp, synthetic construct
  source 1..75: mol_type = other DNA
gccagcctcgcatcgaacgggtctgacacctccagtacgggcacggtagagaatccgtatgctgacgttggaatg

SEQ ID NO: 475215 - DNA, 75 bp, synthetic construct
  source 1..75: mol_type = other DNA
ggcaatgtagatacccctgggtcagaagataccatggagagcagacgtagctcgatggctagcacctcgtcgact

SEQ ID NO: 475216 - DNA, 75 bp, synthetic construct
  source 1..75: mol_type = other DNA
tttgatgactgtattgattcgtggaaggctgaccctgaattaaataacgtacgtgatatgtggaaaatcctgatg

SEQ ID NO: 475217 - DNA, 75 bp, synthetic construct
  source 1..75: mol_type = other DNA
tcgcatcaagaattgaaaaacgactaaataaagcttttaaagttaatcctacgcctttaaatgattctctcaagg

SEQ ID NO: 475218 - DNA, 75 bp, synthetic construct
  source 1..75: mol_type = other DNA
gaaaaactcttggaataccacgcttgatagtatcttcagaggttctgaagatggtctgcaagatttcacaagaag

SEQ ID NO: 475219 - DNA, 75 bp, synthetic construct
  source 1..75: mol_type = other DNA
cagggttctgaagaactttttagaaatatgattggctattctcgtctgatggggagaagtgaagaagagattaag

SEQ ID NO: 475220 - DNA, 75 bp, synthetic construct
  source 1..75: mol_type = other DNA
gttgaaaaggcagctttgcagtcagcacaaagaattgaaaagagcctaaatagaggtttcaggattgatacaaaa

SEQ ID NO: 475221 - DNA, 75 bp, synthetic construct
  source 1..75: mol_type = other DNA
ggctggaaagccatttcagaaagtactcaggcacaactagggaacttgaaaaactcttggaataccacgcttgat

SEQ ID NO: 475222 - DNA, 75 bp, synthetic construct
  source 1..75: mol_type = other DNA
ttgataatttgtcttcagcagcaattaaagcagcaggtgcatttatcagctttcaggctgtattagccagttatc

SEQ ID NO: 475223 - DNA, 75 bp, synthetic construct
  source 1..75: mol_type = other DNA
tcgcatcaagaattgagaaacgactaaataaggcattcagagttaaccctatgcctttaaatgattctctcaagg

SEQ ID NO: 475224 - DNA, 75 bp, synthetic construct
  source 1..75: mol_type = other DNA
aaggaagatgaaaactatcgtatcttctcgttactggaaaacgccgaagaagaaaaagaacggcaaatagcataa

SEQ ID NO: 475225 - DNA, 75 bp, synthetic construct
  source 1..75: mol_type = other DNA
ggaaagcgaacccggaattaaataatttgatttatatgtggaacatcctgatgtatgccattccgtatacgttat

SEQ ID NO: 475226 - DNA, 75 bp, synthetic construct
  source 1..75: mol_type = other DNA
ctttctttaatttcaatcaatcggctaatgaccagttcacgcaggatatgctcttaagttcaagctatccagaag

SEQ ID NO: 475227 - DNA, 75 bp, synthetic construct
  source 1..75: mol_type = other DNA
ggaactggtaaaacattaggtgaaagtcttggtaatctcatgacttctatgtcacacggtgtcgataacctgact

SEQ ID NO: 475228 - DNA, 75 bp, synthetic construct
  source 1..75: mol_type = other DNA
tttgaatagtttaggtggaagtggtaaaagtcttggtgaatctcttggtagcttgatgagcgatatgtcgcatgg

SEQ ID NO: 475229 - DNA, 75 bp, synthetic construct
  source 1..75: mol_type = other DNA
gccgggtgtcgggcttgggctggcaatttgtcgggcgattgtggatgtacacggcggcaccattaccgcgttcaa

SEQ ID NO: 475230 - DNA, 75 bp, synthetic construct
  source 1..75: mol_type = other DNA
gcccatattgaagagatgaaaaaagcggtaacttacgatggtgtggatctgatgggctacacgccgtggggctgc

SEQ ID NO: 475231 - DNA, 75 bp, synthetic construct
  source 1..75: mol_type = other DNA
gagcatgacaacccggaagagacgatgtaccaggtgctgcatcaccagtttgtcgccagcgccctggcggtgaaa

SEQ ID NO: 475232 - DNA, 75 bp, synthetic construct
  source 1..75: mol_type = other DNA
atatgaaatgtcgaaagctctggcggtgggccgcagtccgcaggacatcgccgccaccagcgaacaatttattgc

SEQ ID NO: 475233 - DNA, 75 bp, synthetic construct
  source 1..75: mol_type = other DNA
ggggaatctgcgccagttgatgatcccggaacagcagcgcctgctggagacgtttacgctgttagtcgccaatgc

SEQ ID NO: 475234 - DNA, 75 bp, synthetic construct
  source 1..75: mol_type = other DNA
aacaacgcgccggatagccgctcttttaaagacaagtggcgggtacagattcagggatgcgtggttgccgccgcg

SEQ ID NO: 475235 - DNA, 75 bp, synthetic construct
  source 1..75: mol_type = other DNA
aaatgccgctgcatctggtgcagcaatacggtagctggaccaaccgtaaagtggttgatttctttgtccgtttcg

SEQ ID NO: 475236 - DNA, 75 bp, synthetic construct
  source 1..75: mol_type = other DNA
atgtttaaggcaataacgacagtcgccgctctggtcatcgccaccagtgcaatggcgcaggatgatttaaccatt

SEQ ID NO: 475237 - DNA, 75 bp, synthetic construct
  source 1..75: mol_type = other DNA
ggacagcgacctggatcgcatcgctgccgctgtgatgcaggctaaacaaccgctgctgctggtcggctccgctgg

SEQ ID NO: 475238 - DNA, 75 bp, synthetic construct
  source 1..75: mol_type = other DNA
aacggttttggcgcttacgataaagtagaagaggacggcagcatcaacgatgactaccgcattgattacctgcgc

SEQ ID NO: 475239 - DNA, 75 bp, synthetic construct
  source 1..75: mol_type = other DNA
ggcagtacagcaaacgctacggctttatctatgtgaataaacatgacgacggtactggcgatatgtcgcgttcac

SEQ ID NO: 475240 - DNA, 75 bp, synthetic construct
  source 1..75: mol_type = other DNA
tgtcgccagcgccctggcggtgaaagccgcgcgtcgcattaacccggagatgaaagtcggctgtatgctggcgat

SEQ ID NO: 475241 - DNA, 75 bp, synthetic construct
  source 1..75: mol_type = other DNA
ttacctgatgacaacggtatattactgccgctaacacatccgcaggggatgacgccgtgggacgatgctatcgcc

SEQ ID NO: 475242 - DNA, 75 bp, synthetic construct
  source 1..75: mol_type = other DNA
gtggcgcgctggatatgctggaagaaaacccgcttccggcagtggcggtggtgatcccgaaactcgattttcagg

SEQ ID NO: 475243 - DNA, 75 bp, synthetic construct
  source 1..75: mol_type = other DNA
cattgctgtcattaattttgtcggaaattctggtcctgcgtttgtcttcggcggttgcggaagtggcacaggttt

SEQ ID NO: 475244 - DNA, 75 bp, synthetic construct
  source 1..75: mol_type = other DNA
tatggtgtacaaaaacgttaaccaggcggcgacgcaatattatccgtcaccgcaaatcactgtttatctgcaaaa

SEQ ID NO: 475245 - DNA, 75 bp, synthetic construct
  source 1..75: mol_type = other DNA
taggcgaagagcatcgcgccgcagaacaagccaatctcgccagccgcttcgttggtgaagctcaggcattcgccg

SEQ ID NO: 475246 - DNA, 75 bp, synthetic construct
  source 1..75: mol_type = other DNA
gcagccggatattattctggttcaggaggccgttactgcagattttattcgtcgtgatcctctctggcagggcgt

SEQ ID NO: 475247 - DNA, 75 bp, synthetic construct
  source 1..75: mol_type = other DNA
cgcaggctcttgcgtccactttgcttctacaccctctaccgtcctttgcacaatctgttaaattttgggcttcgc

SEQ ID NO: 475248 - DNA, 75 bp, synthetic construct
  source 1..75: mol_type = other DNA
ttagcagaatcttctttaaattaattttattatgtcttcttttaacgttctttaaccaacttttttttaagagtg

SEQ ID NO: 475249 - DNA, 75 bp, synthetic construct
  source 1..75: mol_type = other DNA
tggcgtgcgttatcaggcgcgggtagcccgttaccgcgagcaacgcacacggcacttatatgaaatgtcgaaagc

SEQ ID NO: 475250 - DNA, 75 bp, synthetic construct
  source 1..75: mol_type = other DNA
ttacgctgttagtggccaatgctcttgagcgcctgatgctgaccgccagcgaagaacaggcgcggatggccagcg

SEQ ID NO: 475251 - DNA, 75 bp, synthetic construct
  source 1..75: mol_type = other DNA
atccttgaaggttgccttaaacaggctgagttcctgaatgatgcctatgatgatgtgaacttatacgcgcgtatt

SEQ ID NO: 475252 - DNA, 75 bp, synthetic construct
  source 1..75: mol_type = other DNA
tatttgaagactgtcaggacgacagtgttctggaatatctccacgattatcaggaaaaatatgcttacccggcgc

SEQ ID NO: 475253 - DNA, 75 bp, synthetic construct
  source 1..75: mol_type = other DNA
atgggcaggataagcccgggaggaatgatgtttaaggcaataacgacagtcgccgctctggtcatcgccaccagt

SEQ ID NO: 475254 - DNA, 75 bp, synthetic construct
  source 1..75: mol_type = other DNA
cagcgatccgaaaaccccggtattgagtgcccgaattgcggacatcatccggttgcagacggccattccatgcca

SEQ ID NO: 475255 - DNA, 75 bp, synthetic construct
  source 1..75: mol_type = other DNA
gttgagcaggtcgcttctctgcgcgtaaccccgaacatgtctacatggcgtccgtgtgaccaggttgaatccgcg

SEQ ID NO: 475256 - DNA, 75 bp, synthetic construct
  source 1..75: mol_type = other DNA
gtgaaggcgcgcgtggtttccatgccgtctaccgacgcattcgacaagcaggatgcggcttaccgtgaatccgta

SEQ ID NO: 475257 - DNA, 75 bp, synthetic construct
  source 1..75: mol_type = other DNA
agaaactggctattgcgagcatgggtttctgattataattctaaaaacaaaaatggtaatttcataataacgccg

SEQ ID NO: 475258 - DNA, 75 bp, synthetic construct
  source 1..75: mol_type = other DNA
cggcgttgacgccaaacaacccgcaaaaatcgaactatggaattacgctgccgacttcactgttgtttattgccg

SEQ ID NO: 475259 - DNA, 75 bp, synthetic construct
  source 1..75: mol_type = other DNA
ggtttcctgccgtatacctcaaccttcctgatgttcgtggaatacgcacgtaatgccgtacgtatggctgcgctg

SEQ ID NO: 475260 - DNA, 75 bp, synthetic construct
  source 1..75: mol_type = other DNA
ccctgctgatgtgcaaaaccatcatcggtttcggttccccgaacaaagccggtacccacgactcccacggtgcgc

SEQ ID NO: 475261 - DNA, 75 bp, synthetic construct
  source 1..75: mol_type = other DNA
cagaagttgaactggctgttgctgcctacgaaaaactgattgccgaaggcgtgaaagcgcgcgtggtgtccatgc

SEQ ID NO: 475262 - DNA, 75 bp, synthetic construct
  source 1..75: mol_type = other DNA
agagtttatcgctaaactgcaggctaatccggcgaaaatcgccagccgtaaagcgtcgcagaatgctatcgaagc

SEQ ID NO: 475263 - DNA, 75 bp, synthetic construct
  source 1..75: mol_type = other DNA
atattattgaacctatcaatttaaagtatacagacaaatacatatccaccgggcatattcacatgctatgcaatc

SEQ ID NO: 475264 - DNA, 75 bp, synthetic construct
  source 1..75: mol_type = other DNA
ttgatagtaatgacttaagtactaaagtaaagttcaataataacacagataaaaactggctattgcgagcatggg

SEQ ID NO: 475265 - DNA, 75 bp, synthetic construct
  source 1..75: mol_type = other DNA
gtgagtgccgacaatgtttcactaaccggtgcggtaagcctcgcatccatgttaacggagatatttctcctgcaa

SEQ ID NO: 475266 - DNA, 75 bp, synthetic construct
  source 1..75: mol_type = other DNA
accgcaatgcgtttcgaggcttacggctggcacgttattcgcgacatcgacggccatgacgcggcatctatcaaa

SEQ ID NO: 475267 - DNA, 75 bp, synthetic construct
  source 1..75: mol_type = other DNA
ggccaggctggccggtgaaactgggttggctgacaccacgaggcggtgagctgatctcttatctcggacattacc

SEQ ID NO: 475268 - DNA, 75 bp, synthetic construct
  source 1..75: mol_type = other DNA
gatggcgtagtaacactgaatacagcaaatgttactgatacatttcctgaagttagcgacacttcagtgggtttg

SEQ ID NO: 475269 - DNA, 75 bp, synthetic construct
  source 1..75: mol_type = other DNA
cctggctgtagatggtggtcatatcgactttaacggtatggtacagtccggtacctgtaaagtgggtgtggtaga

SEQ ID NO: 475270 - DNA, 75 bp, synthetic construct
  source 1..75: mol_type = other DNA
atgaaaaaagcacttctcgcagccgctctggttatggcttctggttccgccctggctgtagatggtggtcatatc

SEQ ID NO: 475271 - DNA, 75 bp, synthetic construct
  source 1..75: mol_type = other DNA
ttctcgactattgatgagaaaacgtcgcaagagaaactcacctggctgaatgtgaacgatgcgctttcgattgat

SEQ ID NO: 475272 - DNA, 75 bp, synthetic construct
  source 1..75: mol_type = other DNA
gtggtttggcctgcaatgttacgcggggtcactggcctgcttgattctgattggcaaaatctggccgggattttt

SEQ ID NO: 475273 - DNA, 75 bp, synthetic construct
  source 1..75: mol_type = other DNA
attgccgaaaacgcaaagtcagcggacctggaaaacatttaactattttaccttatggatgggttcggttcataa

SEQ ID NO: 475274 - DNA, 75 bp, synthetic construct
  source 1..75: mol_type = other DNA
ttcattgcaggaagaagacaatgagcgcggcgtggctcattttgtagaacatatgatgtttaacggcacaaaaac

SEQ ID NO: 475275 - DNA, 75 bp, synthetic construct
  source 1..75: mol_type = other DNA
agtggaagcgttatgattcccggacacctgttaatctggcgacgcgtatggcgctcgatgcttttaacgtcgcac

SEQ ID NO: 475276 - DNA, 75 bp, synthetic construct
  source 1..75: mol_type = other DNA
aatgaacctgtggcacaggtttcacagtggaagcgttatgattcccggacacctgtaaatctggcgacgcgtatg

SEQ ID NO: 475277 - DNA, 75 bp, synthetic construct
  source 1..75: mol_type = other DNA
caaaaaaaagaataattggaaacacattgcttctagcagataacagcctcaagagcgatatatctgattttaaga

SEQ ID NO: 475278 - DNA, 75 bp, synthetic construct
  source 1..75: mol_type = other DNA
aaacagattgcacagttttctgccgcagacgcattggctgccgatcgtcagttgttttcttccccagcagatatc

SEQ ID NO: 475279 - DNA, 75 bp, synthetic construct
  source 1..75: mol_type = other DNA
tgtttaacggcacaaaaacatggccgggtaataaagtcatcgaaacatttgagtcaatgggcctgcgttttggtc

SEQ ID NO: 475280 - DNA, 75 bp, synthetic construct
  source 1..75: mol_type = other DNA
tccgaagtcatgggcaccttacaaagtgatggaagagcgtactgaattgctgcgtgcgaacgatcacgaaggctt

SEQ ID NO: 475281 - DNA, 75 bp, synthetic construct
  source 1..75: mol_type = other DNA
agcctggaaggttgcctgaaacaggctgagttcctgaatgatgtctatgatgatgtgaatttatacgcgcgcatt

SEQ ID NO: 475282 - DNA, 75 bp, synthetic construct
  source 1..75: mol_type = other DNA
gcgccattgagctttatttcaaatatggtaagaagctggctcccgtcgtatgcgaactgggctacccttcgaaaa

SEQ ID NO: 475283 - DNA, 75 bp, synthetic construct
  source 1..75: mol_type = other DNA
ggaatccggcaacctgtccggtcagtttcctgccttatatcgcctgggcgttctctgtagatcgctgggacgagg

SEQ ID NO: 475284 - DNA, 75 bp, synthetic construct
  source 1..75: mol_type = other DNA
tcttggcgaagaaatcacgatctatccgtatatcaacgaaacaattatttccggcggcaccgcgcatgaaggcgg

SEQ ID NO: 475285 - DNA, 75 bp, synthetic construct
  source 1..75: mol_type = other DNA
actgaagatacctatctggaacttgagcggctgataagcgatgccaaaccatgtagccgtcacatgatcggcatg

SEQ ID NO: 475286 - DNA, 75 bp, synthetic construct
  source 1..75: mol_type = other DNA
atgcggtgatgcggctggttaaggatggagttacagacggcgtccagatcgacccgacgctttactcacaataca

SEQ ID NO: 475287 - DNA, 75 bp, synthetic construct
  source 1..75: mol_type = other DNA
aggcgggaggataaatgcctgtctgcccgcgccgggaaaagacagcacgccggtggcgctgaaaggggccgcgct

SEQ ID NO: 475288 - DNA, 75 bp, synthetic construct
  source 1..75: mol_type = other DNA
gatgacgatacgctgatggcgaaggctgcaggtatttcaggaggcgtgcgctatggcccagacggcagtgggtga

SEQ ID NO: 475289 - DNA, 75 bp, synthetic construct
  source 1..75: mol_type = other DNA
attgatacgcactggatttggcaggaaggcaatcagcgcctgaccaaagaaccgtttgagatcaaaggcgggctg

SEQ ID NO: 475290 - DNA, 75 bp, synthetic construct
  source 1..75: mol_type = other DNA
aaatgtgccatgaatttggcctgacctggggttcacactcaaacaaccacttcgatatttccctggcgatgttta

SEQ ID NO: 475291 - DNA, 75 bp, synthetic construct
  source 1..75: mol_type = other DNA
ggaacatgcactgccgctaattgctgaacagttgcagggtcgccgctcagcggtgtttatccctttcgctggcgt

SEQ ID NO: 475292 - DNA, 75 bp, synthetic construct
  source 1..75: mol_type = other DNA
gggcacattccggctggatataggtgtgcaggaccaggggatcacagaggaaacctatctggagcttgagcgcct

SEQ ID NO: 475293 - DNA, 75 bp, synthetic construct
  source 1..75: mol_type = other DNA
agcagtcttcttttccttcatactttccccacccagcatgcatacctttatgccataactgaagtttatgtctgt

SEQ ID NO: 475294 - DNA, 75 bp, synthetic construct
  source 1..75: mol_type = other DNA
cggactggtcactggcaacacaggatttcatgcgcgtggcacgccatcctgcggcacgccggtggctgaaagagc

SEQ ID NO: 475295 - DNA, 75 bp, synthetic construct
  source 1..75: mol_type = other DNA
acagacaccccaggcctttgttaaaaagtacagactggtttccggcagaattctggatgaaaggaagacggcaga

SEQ ID NO: 475296 - DNA, 75 bp, synthetic construct
  source 1..75: mol_type = other DNA
tatcgttttcggcggtatggcgatttgggcgatttcgctggtcgggctcggtccaatctttgactacattccgag

SEQ ID NO: 475297 - DNA, 75 bp, synthetic construct
  source 1..75: mol_type = other DNA
gtattacgacttgcatagccaatgaagataaacgtgacgacaaacggctcagcagtcttcttttctttcacactt

SEQ ID NO: 475298 - DNA, 75 bp, synthetic construct
  source 1..75: mol_type = other DNA
tgccataactgaagtttatgtctgttatgagcgaaaagcagacattacactaaattatttaggtttacttttatc

SEQ ID NO: 475299 - DNA, 75 bp, synthetic construct
  source 1..75: mol_type = other DNA
ccaaacaacccaaaattcatgcagttatatcaaagactcattcgcaaaaggactcagccagaaagcatttgctta

SEQ ID NO: 475300 - DNA, 75 bp, synthetic construct
  source 1..75: mol_type = other DNA
ccgtatatcaacgaaacaattatttccggcggcaccgcgcatgaaggcgggcggtccatgttattgacacaatag

SEQ ID NO: 475301 - DNA, 75 bp, synthetic construct
  source 1..75: mol_type = other DNA
atctgcaaaccagtggcccgtattacctcggagccgcgacctataccggcgaagaaattacgatttacccgtata

SEQ ID NO: 475302 - DNA, 75 bp, synthetic construct
  source 1..75: mol_type = other DNA
ggttgccatgatcatcatttcgatcattctctttctggttgtctggctgaaaggcacggtatatgccacctgtgc

SEQ ID NO: 475303 - DNA, 75 bp, synthetic construct
  source 1..75: mol_type = other DNA
gtattgtggccatcgccagaaacgaagggctggcgaaaagtctgcaccttccggttccggagcctgacgtcagca

SEQ ID NO: 475304 - DNA, 75 bp, synthetic construct
  source 1..75: mol_type = other DNA
atcggttggcaattctcccgcagaacgcctcctgaattaaaaacagactgcattgctggctggtcttttcgccgg

SEQ ID NO: 475305 - DNA, 75 bp, synthetic construct
  source 1..75: mol_type = other DNA
atcaacgaaacgattatttccggtggcaccgcgcatgaaggcggggcggtccatgttattgacacaatgagagtg

SEQ ID NO: 475306 - DNA, 75 bp, synthetic construct
  source 1..75: mol_type = other DNA
tgctgattagcccgtttgtgagcgccctgaccctggacgatcttcagcaacgctttaccgaacagccggtgatcc

SEQ ID NO: 475307 - DNA, 75 bp, synthetic construct
  source 1..75: mol_type = other DNA
ctgctgttaatcggtcgcgcctgtctggggctggcgctgggcgggttctgggcgggttctgggcgatgtcggcgt

SEQ ID NO: 475308 - DNA, 75 bp, synthetic construct
  source 1..75: mol_type = other DNA
gtctggagcgcctggaaagctggcagcatgtcactttcatggcctgcttatgcgaacgcatgtaccccaattacg

SEQ ID NO: 475309 - DNA, 75 bp, synthetic construct
  source 1..75: mol_type = other DNA
agggcatctgaaagaagcaacgcttgcgccgttatttaaacacgtaaaagatgtggcagaaggaagagtcagata

SEQ ID NO: 475310 - DNA, 75 bp, synthetic construct
  source 1..75: mol_type = other DNA
ctattgctggacgataaacgcatggtgcaggtgatcaacggtcagccgccacaaatcatcactgcggaaaataac

SEQ ID NO: 475311 - DNA, 75 bp, synthetic construct
  source 1..75: mol_type = other DNA
cccgcgaccaggggctgttgtgggatcaaacttcaccattccccatgcagctattgctcgacgataaacgcatgg

SEQ ID NO: 475312 - DNA, 75 bp, synthetic construct
  source 1..75: mol_type = other DNA
caggaaaaatatgtttatccggcgctactttcagagctgaatgctctgttgcgacaggaactgataaggcttggg

SEQ ID NO: 475313 - DNA, 75 bp, synthetic construct
  source 1..75: mol_type = other DNA
ttgcatgcctggctcgatcccgtagtcaacagccagtttaaaaatgatatgcagcgttacgcccaactgttctgg

SEQ ID NO: 475314 - DNA, 75 bp, synthetic construct
  source 1..75: mol_type = other DNA
cgggaaactggaacaatcagcagaacagttaacaacgcttggcaaaacgttaggcgaagagcaccgcgccgcaga

SEQ ID NO: 475315 - DNA, 75 bp, synthetic construct
  source 1..75: mol_type = other DNA
gaatttagtgatgattccatcgaagcgcgtcagcgtgaaatcgccgcaaaacatggcattcgcctgactaaccac

SEQ ID NO: 475316 - DNA, 75 bp, synthetic construct
  source 1..75: mol_type = other DNA
aaaatgccttcggagcaaaacccacatatgtagccaaacaattttcagatattttgtctttttttgaatttacca

SEQ ID NO: 475317 - DNA, 75 bp, synthetic construct
  source 1..75: mol_type = other DNA
cgtggcgttcggcctgcaactggcaggtatagagaaaatgcagcgactggaaatcgcgcaccagatgctgaaaaa

SEQ ID NO: 475318 - DNA, 75 bp, synthetic construct
  source 1..75: mol_type = other DNA
gaacgtaggtgtaaaccaggcagatgatgatctcaaatatctgtctcaggcaccccgggcaaaaagagagaaacg

SEQ ID NO: 475319 - DNA, 75 bp, synthetic construct
  source 1..75: mol_type = other DNA
gtggccgttattttatctcttggcggtaagtttattccctttatggaaccgttatcgcgtgtttcatggtttgtc

SEQ ID NO: 475320 - DNA, 75 bp, synthetic construct
  source 1..75: mol_type = other DNA
ttattttatctctcggtggtaaatttattccgttcatggagcctttatcacgcgtttcatggtttgtcggcgtta

SEQ ID NO: 475321 - DNA, 75 bp, synthetic construct
  source 1..75: mol_type = other DNA
gaaccggtgtaccggaaggtcatgccgcttgcggacgcgctcgcgctcctgaagcgttgctggccagccctggtg

SEQ ID NO: 475322 - DNA, 75 bp, synthetic construct
  source 1..75: mol_type = other DNA
tgggcgatttcgctggtcgggctcggtccaatctttgactacattccgagcggtattcagaaagcagaaaacagt

SEQ ID NO: 475323 - DNA, 75 bp, synthetic construct
  source 1..75: mol_type = other DNA
taagcgatgccaaaccatgtagccggcacatgatcggcatgtccatcaagctgcagaccagcggcccgcattggg

SEQ ID NO: 475324 - DNA, 75 bp, synthetic construct
  source 1..75: mol_type = other DNA
tggaatatggtctgccgccaaccgctggtctgggtattggtatcgaccgaatgattatgctgtttacaaacagtc

SEQ ID NO: 475325 - DNA, 75 bp, synthetic construct
  source 1..75: mol_type = other DNA
gctgaatctatcggcatccacgttgagaaaagctggggtctgggccgtatcgttaccgagatcttcgaagaagtg

SEQ ID NO: 475326 - DNA, 75 bp, synthetic construct
  source 1..75: mol_type = other DNA
gtaacgaaggtatttccgtacgtcataacccagagttcaccatgatggaactctatatggcttacgcagattaca

SEQ ID NO: 475327 - DNA, 75 bp, synthetic construct
  source 1..75: mol_type = other DNA
atgaaagagcaggggcgccccacgctgacgctgcgccgcaaagcggagccagaaggtcagcgtgccgtaaacaac

SEQ ID NO: 475328 - DNA, 75 bp, synthetic construct
  source 1..75: mol_type = other DNA
gccggagttcatagcaaggagtattcagagattctgatcgaggtcaaaaaggccgcacagaaactgcaacaggag

SEQ ID NO: 475329 - DNA, 75 bp, synthetic construct
  source 1..75: mol_type = other DNA
gcgatcaagaaatatcgcccggaaactgacatggcggatctggacaacttcgactctgcgaaagcgattgctgaa

SEQ ID NO: 475330 - DNA, 75 bp, synthetic construct
  source 1..75: mol_type = other DNA
gtgcacaacgttgttttaactatagaaatgtcaattaatatgcagaacaatgagcagacggaatacaaaaccgtg

SEQ ID NO: 475331 - DNA, 75 bp, synthetic construct
  source 1..75: mol_type = other DNA
gtgctgccggtaaagggcgcgtctgtctatggcaagccggtgatcaccatgccgaaaacccgcaatcagcggggc

SEQ ID NO: 475332 - DNA, 75 bp, synthetic construct
  source 1..75: mol_type = other DNA
agaggcgcagcaactggtcgcggaagagcttgtggagaagtgggaaaaaggaaagatgcgtctgctgtgggataa

SEQ ID NO: 475333 - DNA, 75 bp, synthetic construct
  source 1..75: mol_type = other DNA
attctggcgcgcgcacgcaaagagggttacggacagaactatcgtggctgggatcaggaagagaagatcgcctcc

SEQ ID NO: 475334 - DNA, 75 bp, synthetic construct
  source 1..75: mol_type = other DNA
cgtttcagccgcttatcctttcaccgggcaatggtcgggcgacggttaccgcttctgaaaaccgcctcgggcctg

SEQ ID NO: 475335 - DNA, 75 bp, synthetic construct
  source 1..75: mol_type = other DNA
atgtgtccacgctggatgttgatgcaatggtggtacgcgaaaccacccaccgtttcagccgcttatcctttcacc

SEQ ID NO: 475336 - DNA, 75 bp, synthetic construct
  source 1..75: mol_type = other DNA
tttggcgatgatgcgacgccgtttggcctgaaatgggagaagggtaaaccggagacggtgtattacctgtgtgaa

SEQ ID NO: 475337 - DNA, 75 bp, synthetic construct
  source 1..75: mol_type = other DNA
tcacgtggaggcgacgattcgggatgttccctgcctgaaaaaactttctccatggctggggcgtaaacatcgtga

SEQ ID NO: 475338 - DNA, 75 bp, synthetic construct
  source 1..75: mol_type = other DNA
aaatacgccgggaatatgatgaatggggcaacctgctgaatgatgagaacccgcatcatctgcagcagctcattc

SEQ ID NO: 475339 - DNA, 75 bp, synthetic construct
  source 1..75: mol_type = other DNA
aaaaatccgtggacgtggtctgctatgacgaactttcctcgttcgaaccggatgtcgaaaaagaggggtcgccaa

SEQ ID NO: 475340 - DNA, 75 bp, synthetic construct
  source 1..75: mol_type = other DNA
gtgcgcatcggtgccccaaccggtgtggcctgttcggtgtgccccggcggggtgacgtccggccatccggtcaat

SEQ ID NO: 475341 - DNA, 75 bp, synthetic construct
  source 1..75: mol_type = other DNA
atgattttttattgtgcgctcagtataggaagggtgtttccggctacaatcaaaacatgcccgaatgtgcaccag

SEQ ID NO: 475342 - DNA, 75 bp, synthetic construct
  source 1..75: mol_type = other DNA
atcccgggaagaagagacgacccggccaacccttaaagaactggcagcgaagctgtccggaggagtgaatggtta

SEQ ID NO: 475343 - DNA, 75 bp, synthetic construct
  source 1..75: mol_type = other DNA
agtggggacggacaccgcaaaagaaattctctatgcccgtatgaaagccgatcccacgcctgtggatgaagccac

SEQ ID NO: 475344 - DNA, 75 bp, synthetic construct
  source 1..75: mol_type = other DNA
tgattctggataatctgcctccccgcccctttaacatccggatggtccgggagacggcggacagcaccacggacc

SEQ ID NO: 475345 - DNA, 75 bp, synthetic construct
  source 1..75: mol_type = other DNA
atcaccatgccaaaaacccgcaatcagcggggcgtgtatctgtgtgaagtggggacggacaccgcaaaagaaatt

SEQ ID NO: 475346 - DNA, 75 bp, synthetic construct
  source 1..75: mol_type = other DNA
cgcatctgtctatggcaagccggtgatcaccatgccaaaaacccgcaatcagcggggcgtgtatctgtgtgaagt

SEQ ID NO: 475347 - DNA, 75 bp, synthetic construct
  source 1..75: mol_type = other DNA
gggcaatggtcgggcggcgtttaccgcttctgaaaaccgcctcgggcctgacctggctggccttttgcccggaac

SEQ ID NO: 475348 - DNA, 75 bp, synthetic construct
  source 1..75: mol_type = other DNA
aaacagatcgaagaaggggttgaatcgcaggctattctggtggccggacggcgaagcggcgtgcatttacgctag

SEQ ID NO: 475349 - DNA, 75 bp, synthetic construct
  source 1..75: mol_type = other DNA
cagatcgacactattaccttccgaaagagtcatcttacaccccggggcggtgggaaacactgccgtttcaggtag

SEQ ID NO: 475350 - DNA, 75 bp, synthetic construct
  source 1..75: mol_type = other DNA
tgccatccgttttcctgatgatccggagattttttcgcagacagaggcgcagcaactggtcgcggaagagcttgt

SEQ ID NO: 475351 - DNA, 75 bp, synthetic construct
  source 1..75: mol_type = other DNA
ctcggtgagacatgggaagcgaaaatcggcgaacgtccggatgctgaggtgatggcggagcggaaagagcattat

SEQ ID NO: 475352 - DNA, 75 bp, synthetic construct
  source 1..75: mol_type = other DNA
tcattatggggcgtcccgatgaggaagagacgctgttacgtgtggatgtggcgatcaacaaaaaataccgccatg

SEQ ID NO: 475353 - DNA, 75 bp, synthetic construct
  source 1..75: mol_type = other DNA
tggacacgtgacggcctgatattttacagcgcgggtgatgaggagatgccgccaccgcgctccatcactttccac

SEQ ID NO: 475354 - DNA, 75 bp, synthetic construct
  source 1..75: mol_type = other DNA
gcctgaaatgggagaagggtaaaccagaaacggtgtattacctgtgtgagcataatggctgtgtgatccgtcagt

SEQ ID NO: 475355 - DNA, 75 bp, synthetic construct
  source 1..75: mol_type = other DNA
ggctcctgccagatcgaaaaagctgctaacgagtcggcgcatttcatgcggttttatgtgccctgtccgcattgc

SEQ ID NO: 475356 - DNA, 75 bp, synthetic construct
  source 1..75: mol_type = other DNA
gaccgcatcccggcgggtgtgatacggacggacgacgagcggacccaccactacgacagccagcaccgcctggtg

SEQ ID NO: 475357 - DNA, 75 bp, synthetic construct
  source 1..75: mol_type = other DNA
catccgtaaaaataaacggctacaacgtaaatgatctggataagcttggagtacccagtttgattcgagcttctt

SEQ ID NO: 475358 - DNA, 75 bp, synthetic construct
  source 1..75: mol_type = other DNA
tcacgtggaggcgacgattcgggatgtgccatgtctgaaagacctttctccatggctggggcgtaaacatcgtga

SEQ ID NO: 475359 - DNA, 75 bp, synthetic construct
  source 1..75: mol_type = other DNA
tgggtggtgctgccgccaaaaactaccgtgaaaaatcagtggatgtggtctgctatgacgaactttcctcattcg

SEQ ID NO: 475360 - DNA, 75 bp, synthetic construct
  source 1..75: mol_type = other DNA
gagctagattcactcgatgccattgcacgggtgcgtcactatttagataggttcgagttgctacaaggtcattat

SEQ ID NO: 475361 - DNA, 75 bp, synthetic construct
  source 1..75: mol_type = other DNA
ttgtaccttcctatgaatatgtcgaaacgattgagtcaagcgctgaagtggcgtctgactcaattgattctctta

SEQ ID NO: 475362 - DNA, 75 bp, synthetic construct
  source 1..75: mol_type = other DNA
cggataaccgtatcgcccgtgacgcgcactatctttaccggtatgaccgtcacggcaggctgacagagaaaaccg

SEQ ID NO: 475363 - DNA, 75 bp, synthetic construct
  source 1..75: mol_type = other DNA
ctaatgcagccggtgcgatagcaacagggcttttatctctcattattcctgttccactgacgacagttcagtggg

SEQ ID NO: 475364 - DNA, 75 bp, synthetic construct
  source 1..75: mol_type = other DNA
caatactctcacgctgaaacgcttttcatcgggcgtcggtttctggtgcctgggcggcgctgccgccaaaaacta

SEQ ID NO: 475365 - DNA, 75 bp, synthetic construct
  source 1..75: mol_type = other DNA
ccatacgcggttcaacgccaaaaattaaaggctcctgtcagattgagaaagccgcgaatgaatctgcgcatttca

SEQ ID NO: 475366 - DNA, 75 bp, synthetic construct
  source 1..75: mol_type = other DNA
cagcaggcaacctcaccttacgtgctgtgggttgtgccattgttgatagaaaactcactgcataaaaaagcgaat

SEQ ID NO: 475367 - DNA, 75 bp, synthetic construct
  source 1..75: mol_type = other DNA
gttaactgatggcacaaccgctccaaatggttcttataacgtggcgattagcgccaataatggtggtacgcagtt

SEQ ID NO: 475368 - DNA, 75 bp, synthetic construct
  source 1..75: mol_type = other DNA
ccctgacacaggctccggtcattctgttaactcatccacgtatgggagaacagttgtttcagtttgaacccaggg

SEQ ID NO: 475369 - DNA, 75 bp, synthetic construct
  source 1..75: mol_type = other DNA
atgtttttcagcgcccggggtgatgaaattccgccgccgcgctccatcactttccatatctggacggcgtacagt

SEQ ID NO: 475370 - DNA, 75 bp, synthetic construct
  source 1..75: mol_type = other DNA
ataaaatcatcattatgggacgtcccgatgaggaagagacgctgttacgtgtggatgcggcgatcaacaaaaaat

SEQ ID NO: 475371 - DNA, 75 bp, synthetic construct
  source 1..75: mol_type = other DNA
atgagcgaaatgatttacggcatccatgcagtgcaggccctgctggagcgcacccctgaacgttttcaggaagtc

SEQ ID NO: 475372 - DNA, 75 bp, synthetic construct
  source 1..75: mol_type = other DNA
ggtcgtcttgacagagatagcgaagggttattggtgctgaccaataatggtgcactacaggcgcgtttaacccag

SEQ ID NO: 475373 - DNA, 75 bp, synthetic construct
  source 1..75: mol_type = other DNA
tgcctgaaagacctttccccatggctgggtcgtaaacatcgtgacaatactctcacgctgaaacgcttttcatcg

SEQ ID NO: 475374 - DNA, 75 bp, synthetic construct
  source 1..75: mol_type = other DNA
gtacgaaatccgttacgaacttactggccagactatttatgtattgcgtctgtggcatacgcgggaaaacagata

SEQ ID NO: 475375 - DNA, 75 bp, synthetic construct
  source 1..75: mol_type = other DNA
atggaactgaagtggaccagtaaggcactttctgatttgacgcggttatatgattttctggtactggtcagtaaa

SEQ ID NO: 475376 - DNA, 75 bp, synthetic construct
  source 1..75: mol_type = other DNA
cgcccctgaacgttttcaggaagtctttattttaaaaagccgtgaagataaacgtctgttaccgctgattcacgc

SEQ ID NO: 475377 - DNA, 75 bp, synthetic construct
  source 1..75: mol_type = other DNA
cggggctgctacatatggccttgtggttccgtgcgcgagtgatcaaccaacaggaagactggagtgaactggagt

SEQ ID NO: 475378 - DNA, 75 bp, synthetic construct
  source 1..75: mol_type = other DNA
ccaaaagagcagaagaggcattggcgtacctggatcggcaaatcgacgcggttaaagcatccggtgacgatgata

SEQ ID NO: 475379 - DNA, 75 bp, synthetic construct
  source 1..75: mol_type = other DNA
caattggtcaacaattgctgaaaaacgcaaaagggcgtgagtggccaggcgcttatcgtatgtgctcctgggcgg

SEQ ID NO: 475380 - DNA, 75 bp, synthetic construct
  source 1..75: mol_type = other DNA
acttccccgtcatccacaaagaaacaactggcaactggcgcgcatcatccagaaaatgctggagcaacgttcaca

SEQ ID NO: 475381 - DNA, 75 bp, synthetic construct
  source 1..75: mol_type = other DNA
ctcgtccggttgtagaagtacctgaaaatagcgatgaagaaacgcagccagatccagaaaaagacgtcgaaacat

SEQ ID NO: 475382 - DNA, 75 bp, synthetic construct
  source 1..75: mol_type = other DNA
ctggggccgcgaccgcattagtaatcacctcaaaaaactgtacatcatggcgttatgcgggcaggacgaagaagt

SEQ ID NO: 475383 - DNA, 75 bp, synthetic construct
  source 1..75: mol_type = other DNA
aaaaaatgctggagcaccgttcacaggctggggcgcaccgcaaagtggttgatctggcgaaactgcaaattactc

SEQ ID NO: 475384 - DNA, 75 bp, synthetic construct
  source 1..75: mol_type = other DNA
ccgacagcggcagtgccacggtgattggctttgatccgatcaaaaacgacgctgcgctgcacgccgtgctcggct

SEQ ID NO: 475385 - DNA, 75 bp, synthetic construct
  source 1..75: mol_type = other DNA
ctggagtacctcgtatctcgacgaagccgagcagtgccgtgacgtgttactgatgaacgaaggcgagctgctgta

SEQ ID NO: 475386 - DNA, 75 bp, synthetic construct
  source 1..75: mol_type = other DNA
acatgttgatgaaattgtcgttttcgatgcggaaatgttgaatacccggcctgaagatgaggaagagcagaagaa

SEQ ID NO: 475387 - DNA, 75 bp, synthetic construct
  source 1..75: mol_type = other DNA
cggagttactacatatggcgttgtggttccgtgcgcgggtgatcaaccaacaggaagactggagcgggcttgagg

SEQ ID NO: 475388 - DNA, 75 bp, synthetic construct
  source 1..75: mol_type = other DNA
ctcgaccggttgtagaaatacctgaaaacagtgatgaagaaacgcagcccgatccggaaaaagacgtcgaaatat

SEQ ID NO: 475389 - DNA, 75 bp, synthetic construct
  source 1..75: mol_type = other DNA
ctggtcaatgcgttaaacgcctgtaatgcgcttaatgagtcgattgaacttctgcaacgctacgttgaaagccac

SEQ ID NO: 475390 - DNA, 75 bp, synthetic construct
  source 1..75: mol_type = other DNA
atggttgccgtaaatcatactccacgactagcacacacacaaacggcctttgtgtggcgttttctggccctgagt

SEQ ID NO: 475391 - DNA, 75 bp, synthetic construct
  source 1..75: mol_type = other DNA
gtctggcgcacacacaaacggcctttgtgtggcgttttctggccctgagtgccggagaatctcaaatcatcaacg

SEQ ID NO: 475392 - DNA, 75 bp, synthetic construct
  source 1..75: mol_type = other DNA
tttgtaaatgcttgctctgacaaaacggccatttgtgcccagcatgatattgagattagtagctcagactggccg

SEQ ID NO: 475393 - DNA, 75 bp, synthetic construct
  source 1..75: mol_type = other DNA
acgttaatggcgacctcagcgcgatgtacaacatcaaggttggcgtttccagcaacggtcagtattacgccgcgg

SEQ ID NO: 475394 - DNA, 75 bp, synthetic construct
  source 1..75: mol_type = other DNA
cgcccgcattgataaaatcaaggactggttaggagatggcgtcattgccgacttcgacgacaaacagatcgagca

SEQ ID NO: 475395 - DNA, 75 bp, synthetic construct
  source 1..75: mol_type = other DNA
agatgacaaacatgatctcatatcagggacttgttcgcaccttccctaaacgtcaccgcatcacattactgttca

SEQ ID NO: 475396 - DNA, 75 bp, synthetic construct
  source 1..75: mol_type = other DNA
gtctcatgaaaagaattacaccctgaatgtgattgtctgcgattttgtcggcgaccctgacctgattttcgtgcc

SEQ ID NO: 475397 - DNA, 75 bp, synthetic construct
  source 1..75: mol_type = other DNA
ggctggcacacaacgataaaaaactgaaaacactggctgcccaactggccgacaacggggtggagcactttgatc

SEQ ID NO: 475398 - DNA, 75 bp, synthetic construct
  source 1..75: mol_type = other DNA
cgcctttttgccgacaacggccataccgattcccgactggcgagctcgctgtcgtttgaaaaggtgtacgtgctt

SEQ ID NO: 475399 - DNA, 75 bp, synthetic construct
  source 1..75: mol_type = other DNA
tacagtttataagttgttacgccgttactggcagcgtggtcaaacgcctaatgcattaattcctgactacaaaaa

SEQ ID NO: 475400 - DNA, 75 bp, synthetic construct
  source 1..75: mol_type = other DNA
ttccagaagcgcgaggaggattatcgaaaaattcttcctattattaatagtaaggatcgtttcgaccctaaagtc

SEQ ID NO: 475401 - DNA, 75 bp, synthetic construct
  source 1..75: mol_type = other DNA
cagcccgatgccatcaataacccggcgttacgggaaaagctattcacctttgaggtggatattttgcgcaacgat

SEQ ID NO: 475402 - DNA, 75 bp, synthetic construct
  source 1..75: mol_type = other DNA
tcgggcagattaaagggtattcccaggacggtgtggtgctgggtggtctgattatctccgccattgggtttattg

SEQ ID NO: 475403 - DNA, 75 bp, synthetic construct
  source 1..75: mol_type = other DNA
acaaaggcgacaacatcaacggcgcttacaaagctcagggcgttcagctgaccgctaaactgggttacccaatca

SEQ ID NO: 475404 - DNA, 75 bp, synthetic construct
  source 1..75: mol_type = other DNA
gggcgttattcagggctctggcgttatcttaattcaaccgggggtattaactggtattttttgtttcttgcgatg

SEQ ID NO: 475405 - DNA, 75 bp, synthetic construct
  source 1..75: mol_type = other DNA
cacacggtaaataatctgcactatggaaaactggatccaaacagcattgtctgtagtgccgttgttgctgataac

SEQ ID NO: 475406 - DNA, 75 bp, synthetic construct
  source 1..75: mol_type = other DNA
ccggcgcacactacgcggtgtgctctatgtcgattcctgagcacagaaaacggcccggtaccgacgtatatcgac

SEQ ID NO: 475407 - DNA, 75 bp, synthetic construct
  source 1..75: mol_type = other DNA
tatgactggttaggtcgtatgccatacaaaggcagcgttgaaaacggtgcatatggtgcatataaagctcagggc

SEQ ID NO: 475408 - DNA, 75 bp, synthetic construct
  source 1..75: mol_type = other DNA
acaacggcctgctgagcctgggtgtttcctaccgtttcggtcagggcgaagcagctccggtagttgctccggctc

SEQ ID NO: 475409 - DNA, 75 bp, synthetic construct
  source 1..75: mol_type = other DNA
tcatgtggagtcaacattacgggatgttccctgtctgaaaattctttccccctggctgggacgtaagcaccggga

SEQ ID NO: 475410 - DNA, 75 bp, synthetic construct
  source 1..75: mol_type = other DNA
tctgtgaacatcatggctgcgtgatccatcagtctgaactggaccagagcaacgggcggtggatctgtgaaaaca

SEQ ID NO: 475411 - DNA, 75 bp, synthetic construct
  source 1..75: mol_type = other DNA
ttgaagacctgagcacgattgcggaatacatgcgcggcgatgatcctgatcgtcctgtcgtcgttgatatgaaaa

SEQ ID NO: 475412 - DNA, 75 bp, synthetic construct
  source 1..75: mol_type = other DNA
ccaatggaatgaatctggaattgtggttccagcgcttttaccagcatctcaatggtgttccagaagtgattgtct

SEQ ID NO: 475413 - DNA, 75 bp, synthetic construct
  source 1..75: mol_type = other DNA
taccgctgacattgattgtcttttttgccgcccgcaaactggcagcgcggtataaatttccattgctcaatccgt

SEQ ID NO: 475414 - DNA, 75 bp, synthetic construct
  source 1..75: mol_type = other DNA
agttgaatgggctgatcaaaattattatctgcctaaagaatcttcatatggtgagggcgaatggaaaacgctgcc

SEQ ID NO: 475415 - DNA, 75 bp, synthetic construct
  source 1..75: mol_type = other DNA
caccggcaacttatgccagccctcatcagttgccggaagacaatacagtgatacagagcgtgatgccattaacca

SEQ ID NO: 475416 - DNA, 75 bp, synthetic construct
  source 1..75: mol_type = other DNA
aacgtcctgtttctctgccgcgcacaatgctgttgcgtctgtggcaggctgtgttctcactgtgtctgttgctcc

SEQ ID NO: 475417 - DNA, 75 bp, synthetic construct
  source 1..75: mol_type = other DNA
acgcacctgggatctgatcccgctgtgtcacccgctgatgctcagcaaagttgaagtcaatttacaggccgagcc

SEQ ID NO: 475418 - DNA, 75 bp, synthetic construct
  source 1..75: mol_type = other DNA
atgtcgcaactgacccatatcaacgccgctggcgaagcgcacatggtggatgtctccgccaaagcggaaaccgtg

SEQ ID NO: 475419 - DNA, 75 bp, synthetic construct
  source 1..75: mol_type = other DNA
ctgctgggcagtctgacaccggcactggccgatctgccgcagattgaaccgccgtcgtccggtggtggtggcgga

SEQ ID NO: 475420 - DNA, 75 bp, synthetic construct
  source 1..75: mol_type = other DNA
gttgcctttatcaacgttgccattgccgccctgcacaccttcaccgaagtccgcaatgagaaagccacctggacc

SEQ ID NO: 475421 - DNA, 75 bp, synthetic construct
  source 1..75: mol_type = other DNA
tgtttggtcttgtgctcagtgcagttgcttttgtgaaggtggcggaagcggcgctttccaccttctcagaggttc

SEQ ID NO: 475422 - DNA, 75 bp, synthetic construct
  source 1..75: mol_type = other DNA
ctttatcaaaatgtaccgaaaattcataaataccggctgtatgttttgttattgactttgcttgcgtgcacgggg

SEQ ID NO: 475423 - DNA, 75 bp, synthetic construct
  source 1..75: mol_type = other DNA
gaacatggggcgaatcgtcgttgacgtcgatggcattgagctcgctgaactgcttaacaaagtcgctgaaaacgg

SEQ ID NO: 475424 - DNA, 75 bp, synthetic construct
  source 1..75: mol_type = other DNA
atacagagcgtgatgccattaaccactgaaacagcgctggatatcctcattgcgtggctgcaggacaatatcgac

SEQ ID NO: 475425 - DNA, 75 bp, synthetic construct
  source 1..75: mol_type = other DNA
atacggattttaatgaacttcttgatgacaaaaatttcaataatgaaactttaagcaaagtcaaatatgtctatt

SEQ ID NO: 475426 - DNA, 75 bp, synthetic construct
  source 1..75: mol_type = other DNA
acgacttggtatcgcatttaaccagatggcggacaatatcaacgccttgattgccagcaaaaacagcttattgac

SEQ ID NO: 475427 - DNA, 75 bp, synthetic construct
  source 1..75: mol_type = other DNA
tttccggtgtttatctggatgcgtccgcactggcaggatatgttaaaactggaagcagcggcgcaacgatttggc

SEQ ID NO: 475428 - DNA, 75 bp, synthetic construct
  source 1..75: mol_type = other DNA
tcgtaatctgagcattggcgtacatgcgtactgctcgtggacataccttaatggctcgccttttggtggttttca

SEQ ID NO: 475429 - DNA, 75 bp, synthetic construct
  source 1..75: mol_type = other DNA
atttacagctggataaaacagccaccgcaggtacttcctgctcaccggacggacttgtaggccgcgacagtacag

SEQ ID NO: 475430 - DNA, 75 bp, synthetic construct
  source 1..75: mol_type = other DNA
atttacagctaaacggaatcgccaacgcaggcactcattgctcaccagacgggcttgtaggccgcgacaacagcg

SEQ ID NO: 475431 - DNA, 75 bp, synthetic construct
  source 1..75: mol_type = other DNA
tgatgacatcagcctggtgccgacctttgtgttaacgccactcacttatttgggcggggtattttactccctgac

SEQ ID NO: 475432 - DNA, 75 bp, synthetic construct
  source 1..75: mol_type = other DNA
ggcgatatgcatggctttagctatatgcagtttatcgtgccggggctgatcatgatgtcggtgatcaccaatgcc

SEQ ID NO: 475433 - DNA, 75 bp, synthetic construct
  source 1..75: mol_type = other DNA
cagctggataaaacagccgtagcaaatacaaagtgttcaccagatggacttgtaggccgcaccagtacaggggcc

SEQ ID NO: 475434 - DNA, 75 bp, synthetic construct
  source 1..75: mol_type = other DNA
gatgacgtgtcgcagatccagtccaaactgggtgcgtctattaaccgtctgaacgacaccgctaataacctgacc

SEQ ID NO: 475435 - DNA, 75 bp, synthetic construct
  source 1..75: mol_type = other DNA
gaacgacaccgccaacaacctgaccagtatgcaggacaacaccgaagtcgctatcggtaacatcatggataccga

SEQ ID NO: 475436 - DNA, 75 bp, synthetic construct
  source 1..75: mol_type = other DNA
accatcatacactaaatcagtaagttggcagcatcaccttaacaccaataacgcctcaatggccgccgttaatgc

SEQ ID NO: 475437 - DNA, 75 bp, synthetic construct
  source 1..75: mol_type = other DNA
cagcaaaagcagctcttctctgtctacatctatggaacgcctggcaacgggtaaccggattaactcttctgccga

SEQ ID NO: 475438 - DNA, 75 bp, synthetic construct
  source 1..75: mol_type = other DNA
ttccagagcgcggtgactttccaggtgggcgcggaatcttccgacaccatgaccgtgaacatttcaagccaactg

SEQ ID NO: 475439 - DNA, 75 bp, synthetic construct
  source 1..75: mol_type = other DNA
gtatgggcgtggcgctgagcaacattaatgatgcaaccgcgatgctgcaaaccgctgacagcatgttcgacgaaa

SEQ ID NO: 475440 - DNA, 75 bp, synthetic construct
  source 1..75: mol_type = other DNA
tacgccaacgttgcttcatcattttttggtgccaagttccagcgtaatattgaagagttgctggtcgctccggtt

SEQ ID NO: 475441 - DNA, 75 bp, synthetic construct
  source 1..75: mol_type = other DNA
atggttacgctttggggaaattatgaggggatctctcaggactttggcataaacatgaacaacgtcacaaattca

SEQ ID NO: 475442 - DNA, 75 bp, synthetic construct
  source 1..75: mol_type = other DNA
ttacgccactggtcaacgagccgtttgtgctggcctgtcggcgtgaccacccattagccaaaaagcagctggtgg

SEQ ID NO: 475443 - DNA, 75 bp, synthetic construct
  source 1..75: mol_type = other DNA
gctatatcccaatattaaagtgcgaattctggaacaaggcacgaataattgcatggaatcggtgctgtgcaacga

SEQ ID NO: 475444 - DNA, 75 bp, synthetic construct
  source 1..75: mol_type = other DNA
acgcagtgcaggccctgctggagcgcgcccctgaacgttttcaggaagtctttattttaaaaggccgtgaagata

SEQ ID NO: 475445 - DNA, 75 bp, synthetic construct
  source 1..75: mol_type = other DNA
cagcagaacgcttttttgccttgctgattaatttgtggactgacgataaagacaatttgtggaccaatatcgtcg

SEQ ID NO: 475446 - DNA, 75 bp, synthetic construct
  source 1..75: mol_type = other DNA
gattaatttgtggactgacgataaagacaatttgtggaccaatatcgtcgaacgccagagacatgcgttacagga

SEQ ID NO: 475447 - DNA, 75 bp, synthetic construct
  source 1..75: mol_type = other DNA
taccaccaggaaaaccgcacccccggcagcctgccggggacgaagacgcagatgacgatccgctcgaaaacctat

SEQ ID NO: 475448 - DNA, 75 bp, synthetic construct
  source 1..75: mol_type = other DNA
aaattactttttttaggctcaagctgtatttatcctaaattcgcagagcagccgatgaacgagtctgcgctttta

SEQ ID NO: 475449 - DNA, 75 bp, synthetic construct
  source 1..75: mol_type = other DNA
aatagatctcaaatcttataactcaaatggtgcggctaaacaggtagttactggcattcatttttgtaagtggct

SEQ ID NO: 475450 - DNA, 75 bp, synthetic construct
  source 1..75: mol_type = other DNA
gcttggctggtatcacgaaatctcactggaagcggggcttgccagcacttaccagtggttccttgagaatcgaga

SEQ ID NO: 475451 - DNA, 75 bp, synthetic construct
  source 1..75: mol_type = other DNA
atgctgttaggctcgcatgctcccggggtacgccaacgtgcgcactaccacctgaaacgggcgggagtgcaagtg

SEQ ID NO: 475452 - DNA, 75 bp, synthetic construct
  source 1..75: mol_type = other DNA
aaattcatttgcagggtaaggagcaggttaatggtgactcactgttgattaactggaactgtgcagcctcgaaat

SEQ ID NO: 475453 - DNA, 75 bp, synthetic construct
  source 1..75: mol_type = other DNA
ccgtgaacatctccagccaactgaacacgctggtgaccgatctttctgctatcagcaactcctttagcgcggatc

SEQ ID NO: 475454 - DNA, 75 bp, synthetic construct
  source 1..75: mol_type = other DNA
gttccatatccacggtacgcagttccgtatcttgtcagaaaatggcaaaccgccagcgacgcatcgtgcaggctg

SEQ ID NO: 475455 - DNA, 75 bp, synthetic construct
  source 1..75: mol_type = other DNA
cgggtgaagtcgacggcggcccgcagggaattattccgccaggtggcaagcgctcggtgacgttgaacgttgatc

SEQ ID NO: 475456 - DNA, 75 bp, synthetic construct
  source 1..75: mol_type = other DNA
attccgtcgcgttgggcgtggcttctgctttaccactatggagccgcgcggtttttgctgctgaacgcccaacat

SEQ ID NO: 475457 - DNA, 75 bp, synthetic construct
  source 1..75: mol_type = other DNA
gcgccgcgtggctggctgcgtttgcgtttgctcaatggctgtaatgcccgctcgctcaatttcgctaccagcgac

SEQ ID NO: 475458 - DNA, 75 bp, synthetic construct
  source 1..75: mol_type = other DNA
gatgatgctgaaactcttgcctgccaacgatactcgccgtgtggtgattgagcgcagtattgcgcaggcaatgca

SEQ ID NO: 475459 - DNA, 75 bp, synthetic construct
  source 1..75: mol_type = other DNA
gcgaagagtaccctgatgaagtaatggatagagatgagtttcatgaaacagtaaggattattggcagagtattct

SEQ ID NO: 475460 - DNA, 75 bp, synthetic construct
  source 1..75: mol_type = other DNA
cgctgggtaacgccagtattgccaccgatgcatacgctactgcatatcgcctcgatccgaagaacagtgatgctg

SEQ ID NO: 475461 - DNA, 75 bp, synthetic construct
  source 1..75: mol_type = other DNA
gctgaccgtgctgctgtgggtgctgccagtagtggctattggcattggcggttgggtcatatacgcccgctcgcg

SEQ ID NO: 475462 - DNA, 75 bp, synthetic construct
  source 1..75: mol_type = other DNA
gtgatcccaaagtctggcacgaagaaggctcctggtggatggtcattggtgcccgggacgcttctgacaatgggc

SEQ ID NO: 475463 - DNA, 75 bp, synthetic construct
  source 1..75: mol_type = other DNA
tgcactaaatgggtataataacgttctatttattgacccatacgattatctttgcaaagatggtaaatgcataac

SEQ ID NO: 475464 - DNA, 75 bp, synthetic construct
  source 1..75: mol_type = other DNA
ctgcaaagccattttgcgattgggctggtggtgggtgggctgtatctgggatttatcttccacgctggctatggc

SEQ ID NO: 475465 - DNA, 75 bp, synthetic construct
  source 1..75: mol_type = other DNA
caatgatgccaccgcgatgctgcaaaccgctgacagcatgttcgacgaaatgtctgacgtgctgggtcgtatgaa

SEQ ID NO: 475466 - DNA, 75 bp, synthetic construct
  source 1..75: mol_type = other DNA
ctgttcgagttacgtgttggtcgcaaggacataaccagaacgttttttgcttatgctaaaggacgcaggatctac

SEQ ID NO: 475467 - DNA, 75 bp, synthetic construct
  source 1..75: mol_type = other DNA
aatgcactcaagtgttctgccacatggctgctttttggtgacgaagaccaggcgccaactccggtagacgaatta

SEQ ID NO: 475468 - DNA, 75 bp, synthetic construct
  source 1..75: mol_type = other DNA
ctgaaacgggatatcatcaaagccatgaacaaagcagccgcgctggatgaactgataccagaagctgtgggatcg

SEQ ID NO: 475469 - DNA, 75 bp, synthetic construct
  source 1..75: mol_type = other DNA
aacgcattcagcctggcgtcaccgccactggcacgtatctgccttcacggggatttacaacgatttggccgccgc

SEQ ID NO: 475470 - DNA, 75 bp, synthetic construct
  source 1..75: mol_type = other DNA
atgtatgtaaatctaacgcctgtaaattcacgaacatatggcacgaaaaaccaaacaagaaggcaagaaacgcgc

SEQ ID NO: 475471 - DNA, 75 bp, synthetic construct
  source 1..75: mol_type = other DNA
ggttataagcttgggcatcattacaaaaaattgccaattagtttaacaaaaaaaatgagtatgcataaaaagtat

SEQ ID NO: 475472 - DNA, 75 bp, synthetic construct
  source 1..75: mol_type = other DNA
gaatatatcagatcttatttttggtgataagcgtttggataaaactgactatattgcccctttttctacttctga

SEQ ID NO: 475473 - DNA, 75 bp, synthetic construct
  source 1..75: mol_type = other DNA
actatccagctaagagtgttgttaacacaaaagaaaatattcctgagtatggcataaagacagcgttcacttcaa

SEQ ID NO: 475474 - DNA, 75 bp, synthetic construct
  source 1..75: mol_type = other DNA
atcctgctgagagttatattgccagtagagaaacagtcaaagaaatgggactgaaagctgtttttatgtctaatt

SEQ ID NO: 475475 - DNA, 75 bp, synthetic construct
  source 1..75: mol_type = other DNA
aaacaactggaatcttacgggatttcgactaaaggtattgcatttgatgtatcagacaaaaagcaggttgtaaat

SEQ ID NO: 475476 - DNA, 75 bp, synthetic construct
  source 1..75: mol_type = other DNA
tccctgactggctaccgctacgagtatgacaaccgggcggataagggcatgtacatttcgctcagtatgccgtgg

SEQ ID NO: 475477 - DNA, 75 bp, synthetic construct
  source 1..75: mol_type = other DNA
agggcaatacacctctgcgggcttgtcgttacagggcggcgcaacgcttactacccacggcggcgcacttcaccg

SEQ ID NO: 475478 - DNA, 75 bp, synthetic construct
  source 1..75: mol_type = other DNA
taagagatattttgatattggtgtgtttcatgagatggagccttggatacgcgaagccacaggtggagctggagg

SEQ ID NO: 475479 - DNA, 75 bp, synthetic construct
  source 1..75: mol_type = other DNA
tttcatggggcggtgtggcccactgcgacattcatctgccagacccgctgccagccgatctgttcaatggcctgt

SEQ ID NO: 475480 - DNA, 75 bp, synthetic construct
  source 1..75: mol_type = other DNA
agaactcaactataatacaggttgcgggaagtttaaatcaaggaatcagctttgccgactgcgaaagattattca

SEQ ID NO: 475481 - DNA, 75 bp, synthetic construct
  source 1..75: mol_type = other DNA
aaccgcttatttttgccattgtcgggcagggcggcggcaaagcgcggcttgaaaaaatggcgcagcagcgtggac

SEQ ID NO: 475482 - DNA, 75 bp, synthetic construct
  source 1..75: mol_type = other DNA
gcatgtggaagcaacgctccgggatgtccccagccttaaagcgttatcgccatggctgggcagaaaacatcgtga

SEQ ID NO: 475483 - DNA, 75 bp, synthetic construct
  source 1..75: mol_type = other DNA
tatcaaaggtgtgcatttaatcgagaaatcgcagattagctcaagattaatgactttggttaaacgggtcgagca

SEQ ID NO: 475484 - DNA, 75 bp, synthetic construct
  source 1..75: mol_type = other DNA
agaatcctcatacggtgagggcgaatggaaaacgctgccattccagatcgccattatgaactgtatgggtaacga

SEQ ID NO: 475485 - DNA, 75 bp, synthetic construct
  source 1..75: mol_type = other DNA
tcctccggcgtggggttctggtgcctggggggtgccgctgctaaaaactaccgtgaaaaatcagtggatgtggtc

SEQ ID NO: 475486 - DNA, 75 bp, synthetic construct
  source 1..75: mol_type = other DNA
actgatggataccaccgggttgctttgccacctggggattatcgataacggcagtgcttattacattctgaaagt

SEQ ID NO: 475487 - DNA, 75 bp, synthetic construct
  source 1..75: mol_type = other DNA
cggcgaagattacgccgatgtccgttgtgtcgctgcgccggtgtttaacgccaataacgagcttaccgctgcgat

SEQ ID NO: 475488 - DNA, 75 bp, synthetic construct
  source 1..75: mol_type = other DNA
atctggcgggcaaggccattgcctgcgccagggatatttcacgtctgttgggatggaaaagtccctttgacttac

SEQ ID NO: 475489 - DNA, 75 bp, synthetic construct
  source 1..75: mol_type = other DNA
gtgcgttcccatgaaggaaaaagcctttcgctttatcgctccggaataggtaaatgcctgcttgcctggcaacct

SEQ ID NO: 475490 - DNA, 75 bp, synthetic construct
  source 1..75: mol_type = other DNA
tggcggggaaggccattgcctgcgccaaagatatttcacgcctgctgggatggaaaagtccctttgacttactgg

SEQ ID NO: 475491 - DNA, 75 bp, synthetic construct
  source 1..75: mol_type = other DNA
tatgacaacggcgaagattacgccgatgtccgttgtgtcgctgcgccggtgtttaacgccaataacgagcttacc

SEQ ID NO: 475492 - DNA, 75 bp, synthetic construct
  source 1..75: mol_type = other DNA
atactctaactgctgctattactcaggaagatgtacaaggtgctctaggtaaactagctgctgcaaacgttcgta

SEQ ID NO: 475493 - DNA, 75 bp, synthetic construct
  source 1..75: mol_type = other DNA
ttatgggctgtatgatgcacacctgaaagcctgtaacgttctcgacttcgatgatctgattttattgccgacgtt

SEQ ID NO: 475494 - DNA, 75 bp, synthetic construct
  source 1..75: mol_type = other DNA
tccacacgctggggctggatatcatcaagcgtgagtatgcggcgttggggatgaaagcgaacttttcgctgtttg

SEQ ID NO: 475495 - DNA, 75 bp, synthetic construct
  source 1..75: mol_type = other DNA
aactaccgctcttccggacgtattctgaaagcggcgaacatcctgatcgccaataacccgcacgtctttgaaaag

SEQ ID NO: 475496 - DNA, 75 bp, synthetic construct
  source 1..75: mol_type = other DNA
tgctgctgagccaggattttcctgcgctgaaggtgattaagcttgagcagaactaccgctcttccggacgtattt

SEQ ID NO: 475497 - DNA, 75 bp, synthetic construct
  source 1..75: mol_type = other DNA
gctgaaaaaactgggcgagtgggcgatgacgcgtaataaaagcttgttcaccgccagttttgatatgggtctgag

SEQ ID NO: 475498 - DNA, 75 bp, synthetic construct
  source 1..75: mol_type = other DNA
atgatctgattttattgccgacgttgctgctgcaacgcaatgaagaagtccgcgagcgctggcagaacaaaattc

SEQ ID NO: 475499 - DNA, 75 bp, synthetic construct
  source 1..75: mol_type = other DNA
atgcccctgaccacctggcaatggatgtggaggagcagtagcaatcagtgcgggtgtcacaataaaccggaccac

SEQ ID NO: 475500 - DNA, 75 bp, synthetic construct
  source 1..75: mol_type = other DNA
aacgtctgttaccgctgattcacgccctcgaatctcatggcgtggttatccagttggcaaatcgtcaatatctcg

SEQ ID NO: 475501 - DNA, 75 bp, synthetic construct
  source 1..75: mol_type = other DNA
tcagggcattatcgcccgcgtgaagccaggtcgtcagtatcaggaaaacgatctgccagatctgattgcttcgct

SEQ ID NO: 475502 - DNA, 75 bp, synthetic construct
  source 1..75: mol_type = other DNA
atgcccctgaccacctggcaatggatgtggaggggctgtagcaatcaatgcaggtgccacaataaaccggaccac

SEQ ID NO: 475503 - DNA, 75 bp, synthetic construct
  source 1..75: mol_type = other DNA
agagtcgtaatggtccattccgcatcatctatcagctgtttaaagccactgactttcactggcatttccgtgtag

SEQ ID NO: 475504 - DNA, 75 bp, synthetic construct
  source 1..75: mol_type = other DNA
ttcacttcgagttcaatactggttgtaaaaccgttatccgggctgacggtatgtgtcagagtcgtaatggtccat

SEQ ID NO: 475505 - DNA, 75 bp, synthetic construct
  source 1..75: mol_type = other DNA
caataacccgcacgtctttgaaaagcgtctgttctccgaactgggctatggcgcggagctaaaagttttaagcgc

SEQ ID NO: 475506 - DNA, 75 bp, synthetic construct
  source 1..75: mol_type = other DNA
caaacgcgagtatgcggcgcttgggatgaaagcgaacttttcgttgtttgacgataccgatcagcttgctttgct

SEQ ID NO: 475507 - DNA, 75 bp, synthetic construct
  source 1..75: mol_type = other DNA
ggagcgcaaagtggtcagcgccgaagaacggatgctgaaagggcaaagtcatttggcaaatctgaaagcgatgat

SEQ ID NO: 475508 - DNA, 75 bp, synthetic construct
  source 1..75: mol_type = other DNA
gttatctgctggtggatgagtatcaggacaccaataccagccagtacgaactggttaagctgttggtaggaaagc

SEQ ID NO: 475509 - DNA, 75 bp, synthetic construct
  source 1..75: mol_type = other DNA
ccaaaaatggctacagctcggaattgaggagaatggctctatttctgattttgtagttgaggaacttgaagaagc

SEQ ID NO: 475510 - DNA, 75 bp, synthetic construct
  source 1..75: mol_type = other DNA
ggtcgtcttgaccgcgatagcgaagggttactggtgctgaccaataacggcgcgttgcaggcgcgtttaacccag

SEQ ID NO: 475511 - DNA, 75 bp, synthetic construct
  source 1..75: mol_type = other DNA
ggtcgtctcgaccgcgacagcgaagggttactggtgctgaccaataacggcgcgttgcaggcgcgtttaacccag

SEQ ID NO: 475512 - DNA, 75 bp, synthetic construct
  source 1..75: mol_type = other DNA
aggtgaaagcgaggaagaactggatcaggtgcaactgatgactctccacgcatcgaaagggctggagtttcccta

SEQ ID NO: 475513 - DNA, 75 bp, synthetic construct
  source 1..75: mol_type = other DNA
agggcagacgctggggcgcaaagaggcgcgtgggctgatgatctccactttccatacgttggggctggatatcat

SEQ ID NO: 475514 - DNA, 75 bp, synthetic construct
  source 1..75: mol_type = other DNA
gatttgggaacaggagcgcaaagtggtcagcgccgaagaacggatgcagaaagggcaaagccatctggcgaatct

SEQ ID NO: 475515 - DNA, 75 bp, synthetic construct
  source 1..75: mol_type = other DNA
ctgcctggtgctggcgggcgcgggttccggtaagacgcgagtgatcaccaataaaatcgctcacctgattcgtgg

SEQ ID NO: 475516 - DNA, 75 bp, synthetic construct
  source 1..75: mol_type = other DNA
cgcgaacgctggcaaaacaagattcgctacctgctggtggatgagtatcaggacaccaacaccagccagtatgaa

SEQ ID NO: 475517 - DNA, 75 bp, synthetic construct
  source 1..75: mol_type = other DNA
ggacaccaacaccagccagtatgaactggtgaaactgctggtgggcagccgcgcgcgctttaccgtggtgggcga

SEQ ID NO: 475518 - DNA, 75 bp, synthetic construct
  source 1..75: mol_type = other DNA
tagtggcaagtctcgttgatcctgctgcctttggcaatcattcggtgctgggcttcgagaaccacatgaacctgt

SEQ ID NO: 475519 - DNA, 75 bp, synthetic construct
  source 1..75: mol_type = other DNA
aatcgcaccggccgtttcgactacctcgaaccagcctggggacagcgtcaggtgcagacctcagaactgctggcg

SEQ ID NO: 475520 - DNA, 75 bp, synthetic construct
  source 1..75: mol_type = other DNA
cgctaacggttggatcggcacgctcaacggcatgattggctttaccagctcgataaacgtgaagaacgcaccttg

SEQ ID NO: 475521 - DNA, 75 bp, synthetic construct
  source 1..75: mol_type = other DNA
agaaccagggcttcggaaaagtacgtttaccagccggagatacggtatccccggatgttaagaaagaggtgatcc

SEQ ID NO: 475522 - DNA, 75 bp, synthetic construct
  source 1..75: mol_type = other DNA
aaaattgtattcacgaacattacatttaaatcaattgagctgttgtcgttacttataaagcaaaaaaatgaattt

SEQ ID NO: 475523 - DNA, 75 bp, synthetic construct
  source 1..75: mol_type = other DNA
aaaattgtattcaagaacattacatttaaatcaattgagctgttgtcattgcttataaaacaaaaaaatgaattt

SEQ ID NO: 475524 - DNA, 75 bp, synthetic construct
  source 1..75: mol_type = other DNA
gcgccgcagaatccgcaggcgggcatcttgatccacaaaatactggtaagcatgaagggccagaaggtgcaggac

SEQ ID NO: 475525 - DNA, 75 bp, synthetic construct
  source 1..75: mol_type = other DNA
cttttgctatggcgaacattgcctcgcgtgcaaaaagttctgctcggcgtcagttcactggtcgccgcttgttat

SEQ ID NO: 475526 - DNA, 75 bp, synthetic construct
  source 1..75: mol_type = other DNA
aaagatggtgattttgaagcggataagaacaccagagatgaaacgttactgaaaatgaccgctcaagtgttggcg

SEQ ID NO: 475527 - DNA, 75 bp, synthetic construct
  source 1..75: mol_type = other DNA
agatgaaggtggcagcgaaagataatcaatcctgcatcgactgtcataaaggtattgcccaccagttaccggata

SEQ ID NO: 475528 - DNA, 75 bp, synthetic construct
  source 1..75: mol_type = other DNA
aacatgcctaagctcgctgaatcattcctcgaacactggcaagaccgctggaatcgggggagagactaccgttcc

SEQ ID NO: 475529 - DNA, 75 bp, synthetic construct
  source 1..75: mol_type = other DNA
aatcactcgacgaagttaaagacaaggcgctgatgatccacgttggcggcgataatatgtccgatcaaccaaaac

SEQ ID NO: 475530 - DNA, 75 bp, synthetic construct
  source 1..75: mol_type = other DNA
ccatggcgcagaacagccaaccacaatgtggctttaccttatcacattcgggaagcagcacgaagaactggcaaa

SEQ ID NO: 475531 - DNA, 75 bp, synthetic construct
  source 1..75: mol_type = other DNA
aaagcctacgggaacggaaagcaaatcatctctgagcctgtcactctgggagagactggcacctggaaaaatatt

SEQ ID NO: 475532 - DNA, 75 bp, synthetic construct
  source 1..75: mol_type = other DNA
tatgttttttttatcacttgtagttacatttttatcgttgtggttaaacgtaaatttttactttttcacaaatct

SEQ ID NO: 475533 - DNA, 75 bp, synthetic construct
  source 1..75: mol_type = other DNA
ggatgtttatggcagatttaggccgcgtggtggccgaacattgtggaggtctggtaaacagcgtcgtcttgccag

SEQ ID NO: 475534 - DNA, 75 bp, synthetic construct
  source 1..75: mol_type = other DNA
tcggtatcgcgatgatcgcgaataccagtttcgctgccccccaggtagttgataaagtcgcagccgtcgtcaata

SEQ ID NO: 475535 - DNA, 75 bp, synthetic construct
  source 1..75: mol_type = other DNA
cgaaagagttctctcaggatccaggctctgctaaccagggcggtgatctcggctgggctacaccagatattttcg

SEQ ID NO: 475536 - DNA, 75 bp, synthetic construct
  source 1..75: mol_type = other DNA
gatgctctggccaaccatctgattacagagcttattgctgagcagtttcgtgaagatcctcgtctggttgtactg

SEQ ID NO: 475537 - DNA, 75 bp, synthetic construct
  source 1..75: mol_type = other DNA
accacctttaactacccgacgatggcggaagcctatcgggtagcagcactaaacggcttaaaccgcctgttttaa

SEQ ID NO: 475538 - DNA, 75 bp, synthetic construct
  source 1..75: mol_type = other DNA
cgtcagggattttacgaacgtaatcactgtgaaatattgcaggggaacgctcgctttgttgatgagcatacgttg

SEQ ID NO: 475539 - DNA, 75 bp, synthetic construct
  source 1..75: mol_type = other DNA
accgcacagccgcatgtttatgccgtgggcgacgtgattggttatccgagcctggcgtcggcggcctatgaccag

SEQ ID NO: 475540 - DNA, 75 bp, synthetic construct
  source 1..75: mol_type = other DNA
agaccgatggtacggctgctgaaggcgcgttgcagaatggccagcccgtccgctatctggaaaccaaagaaagct

SEQ ID NO: 475541 - DNA, 75 bp, synthetic construct
  source 1..75: mol_type = other DNA
aagcagtcactgcaacggcaagaaaactggcaatactgttctacaatgcccttaaatacggtcagaaatatgtcg

SEQ ID NO: 475542 - DNA, 75 bp, synthetic construct
  source 1..75: mol_type = other DNA
cgcaaaaaatgttcccggtcgcaagactgatgtcaacgacgcacagtggttgcagagacgacatgcatttggtct

SEQ ID NO: 475543 - DNA, 75 bp, synthetic construct
  source 1..75: mol_type = other DNA
acgtgcagatgaagtgtacttcctgaaagaaggtaattttgaagcagataaaaacaccaaagacgaagcgttact

SEQ ID NO: 475544 - DNA, 75 bp, synthetic construct
  source 1..75: mol_type = other DNA
tgctacgtgtgctgcaggaaagaagcatcgaaagattaggcgccaatcaattaattcccgttaattgtcgtgtca

SEQ ID NO: 475545 - DNA, 75 bp, synthetic construct
  source 1..75: mol_type = other DNA
agcgctgatggtccacgttggcggcgataatatgtccgatcaacccaaaccgctgggcggtggcggtgaacgcta

SEQ ID NO: 475546 - DNA, 75 bp, synthetic construct
  source 1..75: mol_type = other DNA
caaatcgaccacctttaagatgatgtgcggtttgctggtaccgacctctggccaggcgctggtgctgggcatgga

SEQ ID NO: 475547 - DNA, 75 bp, synthetic construct
  source 1..75: mol_type = other DNA
ccgaagtgaactatcccatcaactggaccaagggcgatgtggacggaaatacatccccgtttgactgggaagaat

SEQ ID NO: 475548 - DNA, 75 bp, synthetic construct
  source 1..75: mol_type = other DNA
aaggccttgaaatgtagcccagactggctactgaacggtaaaaatattatgcctctcgcggagataagtaccaga

SEQ ID NO: 475549 - DNA, 75 bp, synthetic construct
  source 1..75: mol_type = other DNA
cagtaccgatgacacagcaagaagaaagcggccttaccgcctgccttgacgcattcgagaaaaagttaatcgaag

SEQ ID NO: 475550 - DNA, 75 bp, synthetic construct
  source 1..75: mol_type = other DNA
acgcgcgctggcgcacgaaatcgggtagcaaatgcccgccgtttacttccagaggctgatttttgggtggcgatt

SEQ ID NO: 475551 - DNA, 75 bp, synthetic construct
  source 1..75: mol_type = other DNA
tcaagaataaatatcgctcaccatataaatgcatattatataatcttactatcttttataggttattttgttatc

SEQ ID NO: 475552 - DNA, 75 bp, synthetic construct
  source 1..75: mol_type = other DNA
tcgagaaaaaaaactggatagcgtactggaacagagctctcgtattcttattcattaccacctattttttgggtg

SEQ ID NO: 475553 - DNA, 75 bp, synthetic construct
  source 1..75: mol_type = other DNA
cggtgcgggtaaaaccacgctgatgcggatgctggcgggattactgaaacccgacagcggcagtgccacggtgat

SEQ ID NO: 475554 - DNA, 75 bp, synthetic construct
  source 1..75: mol_type = other DNA
gcgggaaattaatcgccagcggcacgccggacgatttgaaagcacagtcggctaacgatgagcaacccgatccca

SEQ ID NO: 475555 - DNA, 75 bp, synthetic construct
  source 1..75: mol_type = other DNA
ccttcagttgggtggtgattgaaaacgccagccagcgtggtgaagcgcgttcagcaactttgccgttgcctgcgg

SEQ ID NO: 475556 - DNA, 75 bp, synthetic construct
  source 1..75: mol_type = other DNA
cgtaacgattatgaacagcgagtgctggagtttaaacaactactttataaggcaatgagcagcatagaagacgcg

SEQ ID NO: 475557 - DNA, 75 bp, synthetic construct
  source 1..75: mol_type = other DNA
gaaatagcacggcttccgggcgtgtggcgctggttacagagaattgaggaggagggcgaggacgcgcgtctgcac

SEQ ID NO: 475558 - DNA, 75 bp, synthetic construct
  source 1..75: mol_type = other DNA
gcatgtgaagtcgtcagaagcaacattgaagcacaacaaatccatgaactggcgctggctcttgagtttgcaaga

SEQ ID NO: 475559 - DNA, 75 bp, synthetic construct
  source 1..75: mol_type = other DNA
aacaccaagcccatatattcatgctgcacgtgaagtcgtcagaagcaacattggagcacaacaaatccatacact

SEQ ID NO: 475560 - DNA, 75 bp, synthetic construct
  source 1..75: mol_type = other DNA
atatgggtcaatgattcgcctttgacatcacgtaaggttactttcaaagctgatgagcagaatcagttgatcccc

SEQ ID NO: 475561 - DNA, 75 bp, synthetic construct
  source 1..75: mol_type = other DNA
tcgtatcgatgccttcgcaactcttcactatggcgcgttcttttaaagccgtagccaatggcaaaatttatatcg

SEQ ID NO: 475562 - DNA, 75 bp, synthetic construct
  source 1..75: mol_type = other DNA
cggggtagctaaccaggctcaatccgacagggaagcgcgtaagtcgccggtaattcaggcggcgatcaagctggc

SEQ ID NO: 475563 - DNA, 75 bp, synthetic construct
  source 1..75: mol_type = other DNA
gcttcgggcatctgtagccgagcctaagacaaccgaccgtattcgcgcagcagcggcgaatgatgacgccagtga

SEQ ID NO: 475564 - DNA, 75 bp, synthetic construct
  source 1..75: mol_type = other DNA
gacagtggatgaatgcctgcgtatgccaggacctaagaagaatgctgaaggtctgattaccgagcgcggcgacat

SEQ ID NO: 475565 - DNA, 75 bp, synthetic construct
  source 1..75: mol_type = other DNA
cacctttctaagttgaccggacaaacaacggttatcaaagagcagatcacaaccagcgggaaacgtgccagtgcg

SEQ ID NO: 475566 - DNA, 75 bp, synthetic construct
  source 1..75: mol_type = other DNA
atgattaaagacgcgatttttcaccgtgcggtcaatatcgctactcgttatcacgagtctgggacgaatcaaaac

SEQ ID NO: 475567 - DNA, 75 bp, synthetic construct
  source 1..75: mol_type = other DNA
actgaccggtattcgcgtaccgccgcaaacagaacgtaagcacatcattctcgataacgattcgccggaggccat

SEQ ID NO: 475568 - DNA, 75 bp, synthetic construct
  source 1..75: mol_type = other DNA
catgggatggaaagagtattttaaacattccatttgtgacagatggaacatctattacaatacctttcagggctt

SEQ ID NO: 475569 - DNA, 75 bp, synthetic construct
  source 1..75: mol_type = other DNA
gcttaaccgggcgatcaatgatgcggagtcggtactggggacaacccgccgtcgccgttgtccgctgggagtgag

SEQ ID NO: 475570 - DNA, 75 bp, synthetic construct
  source 1..75: mol_type = other DNA
ataccgaacattacaaggtaaagtcgtatggctatggatattgccatttgttattgaatggttaagtgtgcgcac

SEQ ID NO: 475571 - DNA, 75 bp, synthetic construct
  source 1..75: mol_type = other DNA
gcttaaccgtgcgatcaatgatgcggagtcagttctggggacaacccaccgccgccgtcgtccgctgggagtgag

SEQ ID NO: 475572 - DNA, 75 bp, synthetic construct
  source 1..75: mol_type = other DNA
ggcacttcgccacagcgataacccactgaatggttattccatttgcgcattcccagacgccgcagacaaacaaac

SEQ ID NO: 475573 - DNA, 75 bp, synthetic construct
  source 1..75: mol_type = other DNA
acccggctggctaacggacgctggagaccgccgccggtggtactggccgtgtccgcactgcggggaatattttca

SEQ ID NO: 475574 - DNA, 75 bp, synthetic construct
  source 1..75: mol_type = other DNA
gcttaaccgtgcgatcaatgatgcggagtcggtactggggacaacccgccgtcgtccgctgggagtgaggttatg

SEQ ID NO: 475575 - DNA, 75 bp, synthetic construct
  source 1..75: mol_type = other DNA
gcattattgttgccatccgtcgcgatgattcgatcctcctcgcccagcatacccgccatcgtaacggtgtccata

SEQ ID NO: 475576 - DNA, 75 bp, synthetic construct
  source 1..75: mol_type = other DNA
caaatttcgatcttgtgggtcagcgcgcactacaaatcggcgaatggcagggggaacctgtttggttagtacaac

SEQ ID NO: 475577 - DNA, 75 bp, synthetic construct
  source 1..75: mol_type = other DNA
acggttggcctcttgcgtatagtgattatgctgaaggctggaacgactgccgcgaagccatgcttcagggagata

SEQ ID NO: 475578 - DNA, 75 bp, synthetic construct
  source 1..75: mol_type = other DNA
tgcagcagcattaaagtgctggtgctggtggctgcgccggaaggtatcgctgcgctggaaaaagcgcacccggat

SEQ ID NO: 475579 - DNA, 75 bp, synthetic construct
  source 1..75: mol_type = other DNA
aaacagaatgggcgatgctgtgcagtcactgccgtgagcgttactatccgcaaatcgccccctgcattatcgttg

SEQ ID NO: 475580 - DNA, 75 bp, synthetic construct
  source 1..75: mol_type = other DNA
tatcgctatgacgatttgccgttactcccgccgcccggcaccgtagcgcgccgtctgatagaagatacggtggcg

SEQ ID NO: 475581 - DNA, 75 bp, synthetic construct
  source 1..75: mol_type = other DNA
acccggctggaaaatggccggtggcatgtgatgcagcgtatgccgtgggcatcatcgtccaccggcgcggacagc

SEQ ID NO: 475582 - DNA, 75 bp, synthetic construct
  source 1..75: mol_type = other DNA
ccgtaccgaatgatccgactaacctcggccgttcactgctgctgctgcaaaaagtggggttgatcaagctgaaag

SEQ ID NO: 475583 - DNA, 75 bp, synthetic construct
  source 1..75: mol_type = other DNA
cacctatgccagccagattggcctgactccagcgaaagacggtatctttgtcgaagataaagagtccccgtacgt

SEQ ID NO: 475584 - DNA, 75 bp, synthetic construct
  source 1..75: mol_type = other DNA
accgcacagccgcacgtttacgcggtgggcgacgtgattggttatccgagcctggcatcagcggcctatgaccag

SEQ ID NO: 475585 - DNA, 75 bp, synthetic construct
  source 1..75: mol_type = other DNA
aacaaccctttggacgctggtcaactaatcaacttaaagccattcttgcaggacaattcgttaccgtctcttata

SEQ ID NO: 475586 - DNA, 75 bp, synthetic construct
  source 1..75: mol_type = other DNA
acgggaagcgcaggaacaaaaacgaggtttatgggctgacagtaatccggttccaccgtgggaatggcgacataa

SEQ ID NO: 475587 - DNA, 75 bp, synthetic construct
  source 1..75: mol_type = other DNA
cgacgcgcaaatcgctctggcagttatcaacaccacctatgccagccagattggcctgactccggcgaaagacgg

SEQ ID NO: 475588 - DNA, 75 bp, synthetic construct
  source 1..75: mol_type = other DNA
cctggtgggttatctgcaagagaaagagaagcaggctacagaagcggcgatgcaactggcgcaggattatccggc

SEQ ID NO: 475589 - DNA, 75 bp, synthetic construct
  source 1..75: mol_type = other DNA
ttgtcattaatgatctgcaaaaactgaaagagactaagttcccggaattaagctggaaagtggacgacagaaaag

SEQ ID NO: 475590 - DNA, 75 bp, synthetic construct
  source 1..75: mol_type = other DNA
gtatcgcctacggagctgggcaaagagaaatttccttttctctcgtttctttcccagtcgtcatcaaactatttg

SEQ ID NO: 475591 - DNA, 75 bp, synthetic construct
  source 1..75: mol_type = other DNA
ttatcgtgatcgggtttatgaacaaacggccaaactaatagatgcgccacaaactcccgttgtgcgtcaacctac

SEQ ID NO: 475592 - DNA, 75 bp, synthetic construct
  source 1..75: mol_type = other DNA
tgtttcagcgcgttcacccggaactcgctgtagcgcttgatatcaccgacgaacagccggtgacctggtttagcc

SEQ ID NO: 475593 - DNA, 75 bp, synthetic construct
  source 1..75: mol_type = other DNA
gattacctcggcgtaaaactgaaagtgaccgtgcggcaaaatatcagccagctttttgacgatctcgataacggt

SEQ ID NO: 475594 - DNA, 75 bp, synthetic construct
  source 1..75: mol_type = other DNA
ttctggtgtggctgctggtatgtcgcctgttatttcttatagtggtgatggtttttacattaaacatgtgtcgga

SEQ ID NO: 475595 - DNA, 75 bp, synthetic construct
  source 1..75: mol_type = other DNA
ccggacaccaaagcgccgggcctcacccaggcgctaaataccaaagatggcgcagtgatggtgatgagttacggg

SEQ ID NO: 475596 - DNA, 75 bp, synthetic construct
  source 1..75: mol_type = other DNA
atcgacaagcccgcagttacctgtacgcctaatccgcaacgtaatgacagcgtaccgaccctggcgcagatgacc

SEQ ID NO: 475597 - DNA, 75 bp, synthetic construct
  source 1..75: mol_type = other DNA
cagaccgccgctctgcgtgattctcttagcgataaacctgccaaaaatattattttgctgattggcgatgggatg

SEQ ID NO: 475598 - DNA, 75 bp, synthetic construct
  source 1..75: mol_type = other DNA
agggttcggtggtgtactcgatcccgccaaaagcagcggctacttgatcgtcgatatttataatgaaatcctgcg

SEQ ID NO: 475599 - DNA, 75 bp, synthetic construct
  source 1..75: mol_type = other DNA
ccagcgatattctccggtgagattgatgtgttcccaggggataggagaagtcgcttgatatctagtatgacgggc

SEQ ID NO: 475600 - DNA, 75 bp, synthetic construct
  source 1..75: mol_type = other DNA
tcagcgatacagcatcgttgaatgcggtgatggaagctaatcagcaaaaaccgctactgggattatttgccgatg

SEQ ID NO: 475601 - DNA, 75 bp, synthetic construct
  source 1..75: mol_type = other DNA
gctattgtcgatcaggcgcgtaatggcgctgatttcggtaaactggcgattgctcactctgccgaccagcaggcg

SEQ ID NO: 475602 - DNA, 75 bp, synthetic construct
  source 1..75: mol_type = other DNA
aaaaccatcgccgatcatgactgacgagcaagctcgcgtgaaactggaacagattgctgcggatatcaagagcgg

SEQ ID NO: 475603 - DNA, 75 bp, synthetic construct
  source 1..75: mol_type = other DNA
gcagaaagatcgtgcataccgcatgctgatgaaccgtaagttctcggaagaagcagcaagctggatgcaggaaca

SEQ ID NO: 475604 - DNA, 75 bp, synthetic construct
  source 1..75: mol_type = other DNA
aaaggcggaaaaggatcgattaccgaacagctgcttaacgctcgtgccgacgttacgcttggcggcggcgcaaaa

SEQ ID NO: 475605 - DNA, 75 bp, synthetic construct
  source 1..75: mol_type = other DNA
aggaccgaaagcaacgtaccacggtaatatagataagcccgcagtcacctgtacgcctaatccgcaacgtaatga

SEQ ID NO: 475606 - DNA, 75 bp, synthetic construct
  source 1..75: mol_type = other DNA
cactggttgtggtaacggcagaccatgctcacgccagtcagattgtcgcgccggatactaaagctccgggcttga

SEQ ID NO: 475607 - DNA, 75 bp, synthetic construct
  source 1..75: mol_type = other DNA
agtctgggagtaagtcgtctctctgcggtggcggttatcgcaaccacgatgtccattgagtgggggattctggaa

SEQ ID NO: 475608 - DNA, 75 bp, synthetic construct
  source 1..75: mol_type = other DNA
aaaaagcagttaagccgtgacgatatcgtctggacctactccggtgtgcgcccgctttgtgatgatgaatccgac

SEQ ID NO: 475609 - DNA, 75 bp, synthetic construct
  source 1..75: mol_type = other DNA
tacccgtactcgtgccacgtctgcccgccgcgaaaacggtttgtggattgtggaagcggaagatatcgataccgg

SEQ ID NO: 475610 - DNA, 75 bp, synthetic construct
  source 1..75: mol_type = other DNA
aaaactgacgccatattatcagggcattggtccggcgtggacgaaagagagcgtgctgccgggcggtgccattga

SEQ ID NO: 475611 - DNA, 75 bp, synthetic construct
  source 1..75: mol_type = other DNA
tggtggaaatatatgaccgacgttatgccagctaacccggataacagcccggtgagtagcgagctgcaagaagtg

SEQ ID NO: 475612 - DNA, 75 bp, synthetic construct
  source 1..75: mol_type = other DNA
gtatcagcgtcggcataatcccatctggccggaactggaagcagtgttgaaatctcacggtgcgcataactacgc

SEQ ID NO: 475613 - DNA, 75 bp, synthetic construct
  source 1..75: mol_type = other DNA
gtaaactggcggaacatgcgctggaaaaactaacgccgtattatcaggggattggcccggcatggacgaaagaga

SEQ ID NO: 475614 - DNA, 75 bp, synthetic construct
  source 1..75: mol_type = other DNA
gcaaactggcggaacacgcgctggaaaaactgacgccatattatcagggcattggcccagcgtggacgaaagaga

SEQ ID NO: 475615 - DNA, 75 bp, synthetic construct
  source 1..75: mol_type = other DNA
gaagcaggcctacattctgcaaaacgaagataaacgtattgtgttcgtgatcccgtggatggacgagttttccat

SEQ ID NO: 475616 - DNA, 75 bp, synthetic construct
  source 1..75: mol_type = other DNA
ctgctatttgccacgatagagattgaatctgaagagcggtggaatgcggttgccagtacagatgtttgccaacgt

SEQ ID NO: 475617 - DNA, 75 bp, synthetic construct
  source 1..75: mol_type = other DNA
cgccgcgaaaacggcctgtggattgtggaagcggaagatatcgataccggcaaaaaatatatctggcaagcgcgc

SEQ ID NO: 475618 - DNA, 75 bp, synthetic construct
  source 1..75: mol_type = other DNA
cctgtggcgtcgcacaaaacaaggcatgtggctaaatgcggatcaacaatctcgtgtgagtcagtggctggtgga

SEQ ID NO: 475619 - DNA, 75 bp, synthetic construct
  source 1..75: mol_type = other DNA
gggtgaaacagttcttcgacgacgggatgcatctgccttcgccttatggcattcgcctgatcaaaggcagccata

SEQ ID NO: 475620 - DNA, 75 bp, synthetic construct
  source 1..75: mol_type = other DNA
ttcccagtcgtcatcaaactatttgacccactctccctctctgctgttttccagaaaagggagtgaagagaaaca

SEQ ID NO: 475621 - DNA, 75 bp, synthetic construct
  source 1..75: mol_type = other DNA
ctattgcttatcaggaatcgcactgggatgcacaggccacttcaccgacgggtgtgcgcggcatgatgatgttaa

SEQ ID NO: 475622 - DNA, 75 bp, synthetic construct
  source 1..75: mol_type = other DNA
acgctgccgaaaattgccccggcgggtatggaagtcaacgcgttgccttccattgccgatattcccctgtatgac

SEQ ID NO: 475623 - DNA, 75 bp, synthetic construct
  source 1..75: mol_type = other DNA
tcttgctgacatatttgggactgatgaggatttctggagtaatctgcagaagttgcaagatcggaagaaacgacg

SEQ ID NO: 475624 - DNA, 75 bp, synthetic construct
  source 1..75: mol_type = other DNA
atgtccagaactccagattcacggttacgccatgagggctttcgcaaagcagaggcttccctgagacttgaagga

SEQ ID NO: 475625 - DNA, 75 bp, synthetic construct
  source 1..75: mol_type = other DNA
accaaagggaatcctgacagttgggctgacgtaaaacagcgtctgcctttacttagccagaaaccctattacagc

SEQ ID NO: 475626 - DNA, 75 bp, synthetic construct
  source 1..75: mol_type = other DNA
atggttcatcagcactacggtacacagacggtaaaccgcggcgcagttcagccggggatgctcgtcaaacacaaa

SEQ ID NO: 475627 - DNA, 75 bp, synthetic construct
  source 1..75: mol_type = other DNA
tcgcggcatcgagcgcacttatacccgtgacttgctcgtggaagtttttctcgacgggcgcggcaacggtctgaa

SEQ ID NO: 475628 - DNA, 75 bp, synthetic construct
  source 1..75: mol_type = other DNA
gatggtacctggactgcatcagctaatttacgcggacgactttatctgcatcgcggcattgagcgcacttatacc

SEQ ID NO: 475629 - DNA, 75 bp, synthetic construct
  source 1..75: mol_type = other DNA
aaatgccatcgactggctttcccgcctgccggaccagccattagccggtaaaccggtgttgattcagacctgttc

SEQ ID NO: 475630 - DNA, 75 bp, synthetic construct
  source 1..75: mol_type = other DNA
gctgacgtacagcaggaagacggttttccagcgacagttgaagctctggcggaacagatacgtcaggccgatggt

SEQ ID NO: 475631 - DNA, 75 bp, synthetic construct
  source 1..75: mol_type = other DNA
aaaccggagaagtgattgatcagggtacgctggaccacctgaccgggcaattgaccgcatttggtgagtttattc

SEQ ID NO: 475632 - DNA, 75 bp, synthetic construct
  source 1..75: mol_type = other DNA
acacaaaagcagataccgccggacctgtgacagtgggagaaatgctgacagaggaatttttaaaaccgttgagta

SEQ ID NO: 475633 - DNA, 75 bp, synthetic construct
  source 1..75: mol_type = other DNA
ttagcaagaaaaacacaccagatgtatcttaaagggacttttagtacagatgaaagtagtcaggctacgttagaa

SEQ ID NO: 475634 - DNA, 75 bp, synthetic construct
  source 1..75: mol_type = other DNA
gagattccatatcaacacgtatgcgaaattattagcgaagctgaaaaagcacgtcaggttaatggcaataaaccc

SEQ ID NO: 475635 - DNA, 75 bp, synthetic construct
  source 1..75: mol_type = other DNA
atgactaaagaccatgcacaaggtgtatttatccgctttattgattttcgcggtgagttgttgttacgcgcatca

SEQ ID NO: 475636 - DNA, 75 bp, synthetic construct
  source 1..75: mol_type = other DNA
gaactgccagctggcgcaggtagcagagcgggtaaactggctcggattagggccgcaagaaaactatcccgaccg

SEQ ID NO: 475637 - DNA, 75 bp, synthetic construct
  source 1..75: mol_type = other DNA
aatcaatcaactttcaatgccgctgatatcagtgatgctggtgttttatctattggtgcatctacaaccgcgcca

SEQ ID NO: 475638 - DNA, 75 bp, synthetic construct
  source 1..75: mol_type = other DNA
ggtgcgaccggtgttgacgttctggcgaacagcggtgttgcagctccaactacagctgttgatatcggtactctg

SEQ ID NO: 475639 - DNA, 75 bp, synthetic construct
  source 1..75: mol_type = other DNA
tttcaacgctggcgctggtggcggcaatggatatgaccaacggcgggctttacgcttcgatcatgcaacagtatg

SEQ ID NO: 475640 - DNA, 75 bp, synthetic construct
  source 1..75: mol_type = other DNA
gcctcactgttgtcgaagcgtccaagctggctgttatcttcggaaccgacgaggatttctggagcaatcttcagg

SEQ ID NO: 475641 - DNA, 75 bp, synthetic construct
  source 1..75: mol_type = other DNA
tacgcgcagaagggtttcgtaaggccgaagcttccctgaaacttgagggaatggacccttgtgggactccgttat

SEQ ID NO: 475642 - DNA, 75 bp, synthetic construct
  source 1..75: mol_type = other DNA
gtgcggtattaccgttcctcgtcggctttgcgttagggaaccttgaccctgagctgcgagaatttttcagcaaag

SEQ ID NO: 475643 - DNA, 75 bp, synthetic construct
  source 1..75: mol_type = other DNA
cgtgattgctcagactggtttgctggggatcttgctgggtgtggcggtgattgtcgtgaccggtattccattgat

SEQ ID NO: 475644 - DNA, 75 bp, synthetic construct
  source 1..75: mol_type = other DNA
gatggatatgaccaacggcggactttacgcttccatcatgcagcagtacggcacaaaagaagaagctggggcatt

SEQ ID NO: 475645 - DNA, 75 bp, synthetic construct
  source 1..75: mol_type = other DNA
ggcggtatgacgttatctataggtgacggatatcttaatacttcttttgccgtaacagcttttgtgtggatgctt

SEQ ID NO: 475646 - DNA, 75 bp, synthetic construct
  source 1..75: mol_type = other DNA
gcagcacctggacaatacgtctgcgtaagattacctctgatgccaacagcgcgaagatcggcgacacgatgacgc

SEQ ID NO: 475647 - DNA, 75 bp, synthetic construct
  source 1..75: mol_type = other DNA
ttgataagagtggaacgttcgaaattaacggcgtggccgggggcgggaggatgctgataaccagcactctcattc

SEQ ID NO: 475648 - DNA, 75 bp, synthetic construct
  source 1..75: mol_type = other DNA
cgccggtggaaacacggcgaatgttaccgatctgtctaagacgcttgctgatttcactcaagtatcagctacgca

SEQ ID NO: 475649 - DNA, 75 bp, synthetic construct
  source 1..75: mol_type = other DNA
cgaaaacgagatcagcgtaggaactgaggtatcaagtgccacagcctggacgcgcacgtttaccaatacgcagct

SEQ ID NO: 475650 - DNA, 75 bp, synthetic construct
  source 1..75: mol_type = other DNA
tcaggacggcactatcagcaacgcaaagattggtaattttatccagtcgaacaattatgttgctggttctgctgg

SEQ ID NO: 475651 - DNA, 75 bp, synthetic construct
  source 1..75: mol_type = other DNA
gccgcaagggcggcagctcaagttcccgaactcctaccgaacagcctgatgatctgcaatctgtagcgaaggcaa

SEQ ID NO: 475652 - DNA, 75 bp, synthetic construct
  source 1..75: mol_type = other DNA
gcgcgtgagctgggaccaggcgcagaatgctatcgcctatgaagcgcaatggcgccgcaacgacgggaactgggt

SEQ ID NO: 475653 - DNA, 75 bp, synthetic construct
  source 1..75: mol_type = other DNA
aaccgaaaggggcgctggggtattctcaccaacaacaaggatcgcgttgtttcgttcgatgtcgggctggacgga

SEQ ID NO: 475654 - DNA, 75 bp, synthetic construct
  source 1..75: mol_type = other DNA
agcaacaagcggtaaattcaaagggactgtggaagcccaaagttttatcggggacattgcaaatatgcacaccgg

SEQ ID NO: 475655 - DNA, 75 bp, synthetic construct
  source 1..75: mol_type = other DNA
gaggtatcaagcgctacagcatggacgcgcacctttaccaatacgcagctttcagcagttcgcctgcgtctgaaa

SEQ ID NO: 475656 - DNA, 75 bp, synthetic construct
  source 1..75: mol_type = other DNA
tctgcatcggtcgccggcaacagcgcgaatctggaccgtattgatgaggtgattgtcaacgacagggaggcaacg

SEQ ID NO: 475657 - DNA, 75 bp, synthetic construct
  source 1..75: mol_type = other DNA
ttccgacatcacagatgtgatcctggaggacatgaaaggctccgatacgttcaaagacctgatcgagaacgctgt

SEQ ID NO: 475658 - DNA, 75 bp, synthetic construct
  source 1..75: mol_type = other DNA
agtttaactgcatatacatcaaatcaggcaagtcgtataattgtgactgctaacataggggggacatcaattaca

SEQ ID NO: 475659 - DNA, 75 bp, synthetic construct
  source 1..75: mol_type = other DNA
caggaagagttaatcgctcgtgagcgcacccatggtttaagtaatgaagaacgcctggaactctggacattaaac

SEQ ID NO: 475660 - DNA, 75 bp, synthetic construct
  source 1..75: mol_type = other DNA
cgtaaagagggtaaagaggcttttgaagcccggatggaacaagcccaaccgctatctatgtttttatttaataac

SEQ ID NO: 475661 - DNA, 75 bp, synthetic construct
  source 1..75: mol_type = other DNA
cgcgagcgggtgatgttccctattcgcgataaacgcggtcgggtgattggttttggcgggcgcgtgctgggcaac

SEQ ID NO: 475662 - DNA, 75 bp, synthetic construct
  source 1..75: mol_type = other DNA
ttgaccgcctgcggttaccctcggggtgcagtcactggtgcagaccacgtcaaagggcgaccgtaatccttcctc

SEQ ID NO: 475663 - DNA, 75 bp, synthetic construct
  source 1..75: mol_type = other DNA
tagtgcgggtctggtgtattccccggtctaccatatcgccattcagaatgacgggactaatggccagatagggcc

SEQ ID NO: 475664 - DNA, 75 bp, synthetic construct
  source 1..75: mol_type = other DNA
accaacaatgtcatttgctgttatgacggcgaccgtgcaggtcgcgatgccgcctggcgagcgctggaaacggcg

SEQ ID NO: 475665 - DNA, 75 bp, synthetic construct
  source 1..75: mol_type = other DNA
accacgtcattcgacgtctcggggatttatgccgggcgctacttggtgcgcgtgcgcgcaatcaatgccgcagaa

SEQ ID NO: 475666 - DNA, 75 bp, synthetic construct
  source 1..75: mol_type = other DNA
aaatcacgatccggataaatatgcccgaatcgatacgggtgccatcattgatcagcggccggtaagtgtcatccc

SEQ ID NO: 475667 - DNA, 75 bp, synthetic construct
  source 1..75: mol_type = other DNA
acaatggcgatctggttggttactcggttaattatgcgattgacctgcagacagatggcggcacctggcagacag

SEQ ID NO: 475668 - DNA, 75 bp, synthetic construct
  source 1..75: mol_type = other DNA
accaacaatgtcatttgctgttatgacggcgaccgtgcaggtcgcgatgctgcctggcgagcgttggaaacggcg

SEQ ID NO: 475669 - DNA, 75 bp, synthetic construct
  source 1..75: mol_type = other DNA
acttgctgatttcacacaggcatcggcgacaaaaattaactccctgacggttaaatctggcgaaaacagtgccgc

SEQ ID NO: 475670 - DNA, 75 bp, synthetic construct
  source 1..75: mol_type = other DNA
acgagatttctgtgtctatggacggcatgacgggaggcgtgaaaaactcggcaatcgcgattatccagaatgggc

SEQ ID NO: 475671 - DNA, 75 bp, synthetic construct
  source 1..75: mol_type = other DNA
atttatcaaatctctcgtgcacccaaaacattcacagcactctataaaaacaatcttttttatagtgtcatagca

SEQ ID NO: 475672 - DNA, 75 bp, synthetic construct
  source 1..75: mol_type = other DNA
gtaatagagaaaactggaaaccatactggaataaggcgttggtatttctttttctgacaacctttttccttgatg

SEQ ID NO: 475673 - DNA, 75 bp, synthetic construct
  source 1..75: mol_type = other DNA
gtaataaagagaattggaaaccatactggaatagagtgttggtattcctttttattgcgacctttttccttgatg

SEQ ID NO: 475674 - DNA, 75 bp, synthetic construct
  source 1..75: mol_type = other DNA
gcagaagcgcaagacgccgttcccggaccagctgccggcggatgcgcagccgtttgacctgctggtgatcaacat

SEQ ID NO: 475675 - DNA, 75 bp, synthetic construct
  source 1..75: mol_type = other DNA
cgtcccgacggcggtgaaattcttcggtatgaaggcgccgcatgaaggggcgccgattatcatcgatcagcccag

SEQ ID NO: 475676 - DNA, 75 bp, synthetic construct
  source 1..75: mol_type = other DNA
accgagctggagaaatcggggcggaaagtgatggtggtggtagtgccggaacacggcggcgcgctgaagggcgat

SEQ ID NO: 475677 - DNA, 75 bp, synthetic construct
  source 1..75: mol_type = other DNA
aggtatccatattcgtcgtttgaatacgccacccgccccgcacggtgaaggggaattgatcgttcatccaatcac

SEQ ID NO: 475678 - DNA, 75 bp, synthetic construct
  source 1..75: mol_type = other DNA
atttatccagggatttctgctgacgtcgtgcgtaatttcctccgtcaaccagtgaaagcgttgatactgcgctct

SEQ ID NO: 475679 - DNA, 75 bp, synthetic construct
  source 1..75: mol_type = other DNA
cccgatcaacgaagtaacactcttttttaataaccgtctgtatcgcggtaaccgcaccaccaaagcccatgccga

SEQ ID NO: 475680 - DNA, 75 bp, synthetic construct
  source 1..75: mol_type = other DNA
atctatcaagtttctcgtgctccgggaacatttaaagtactctataaaaataatcttttttatagtgtcctggca

SEQ ID NO: 475681 - DNA, 75 bp, synthetic construct
  source 1..75: mol_type = other DNA
cggcagtgctggcacgtgatgctgggttaaacgtagtgatggatcgctgcccggcgattgagatccctcgtctgg

SEQ ID NO: 475682 - DNA, 75 bp, synthetic construct
  source 1..75: mol_type = other DNA
gaagggacttaacggctttaaaattgatattgcccgtctattgagtcttaagattcacaagctgtctctggaggt

SEQ ID NO: 475683 - DNA, 75 bp, synthetic construct
  source 1..75: mol_type = other DNA
actcggtggccagtttttgttgaccacttcaaaaaagagctggaagcgcgcaccgccgacaacttaacgcccatt

SEQ ID NO: 475684 - DNA, 75 bp, synthetic construct
  source 1..75: mol_type = other DNA
gagagtaaatgcggggagttgagtaaagcgtttgtacgtatggacagccgttatggcgggattggtctggggtta

SEQ ID NO: 475685 - DNA, 75 bp, synthetic construct
  source 1..75: mol_type = other DNA
aaaccgggaagaggcttccggcacgcgcgcctgggtacggctgaaaaaagatcagtacgtggcaaaccagatata

SEQ ID NO: 475686 - DNA, 75 bp, synthetic construct
  source 1..75: mol_type = other DNA
tccgcgatgaaaccgttatacgggcagatagcgcgcaggagctgacagaagcgacgttccccgccttccaggata

SEQ ID NO: 475687 - DNA, 75 bp, synthetic construct
  source 1..75: mol_type = other DNA
cagggcgatgcaaccctgctgcggatgttattgcgtaatctggtagaaaacgcccatcgctatagtccagcaggc

SEQ ID NO: 475688 - DNA, 75 bp, synthetic construct
  source 1..75: mol_type = other DNA
ggaagatgtgatcctgccctcgtatgacgaactcagcaccatgctcgaccagcgtcaacaaaccttgctgttgcc

SEQ ID NO: 475689 - DNA, 75 bp, synthetic construct
  source 1..75: mol_type = other DNA
tctgaaatctttaaatgcttttggactggatttagcaaggttactaagtatcaaaattcacaaactgtctctgga

SEQ ID NO: 475690 - DNA, 75 bp, synthetic construct
  source 1..75: mol_type = other DNA
tctgaaatctttaaatgattttggactggatttagcaaggttactaagtatcaaaattcacaaaataacaatgga

SEQ ID NO: 475691 - DNA, 75 bp, synthetic construct
  source 1..75: mol_type = other DNA
attaagcaagatgaccttgatagcctgaaggctctaaatgcctttggactggatttagcaagattgctaagtatc

SEQ ID NO: 475692 - DNA, 75 bp, synthetic construct
  source 1..75: mol_type = other DNA
agtatgctcggtggtgtgctggcgctgttttccagcgtggtggccccggacacggtatttgttgcgctgtcggca

SEQ ID NO: 475693 - DNA, 75 bp, synthetic construct
  source 1..75: mol_type = other DNA
ctgcagcgaactccgggttatatgcctccgggcgcatgctgtggtcgttgtcgaatgaacgtacgctaccggcct

SEQ ID NO: 475694 - DNA, 75 bp, synthetic construct
  source 1..75: mol_type = other DNA
gcctgaatcagttgcacaatccgatcgagagaatctcagcagaaggctacgaagaagaaaaaatcgtgagctaac

SEQ ID NO: 475695 - DNA, 75 bp, synthetic construct
  source 1..75: mol_type = other DNA
tggttttgatgcctttgcatccccgaatcttcctccattgctggaagcgggtattcacatccgtcgtttaaatac

SEQ ID NO: 475696 - DNA, 75 bp, synthetic construct
  source 1..75: mol_type = other DNA
caaacggcgcatatgagcgccaggaaggacgcaatcccggtaaaaccggtatttcttcgtaacaaaggcggaatc

SEQ ID NO: 475697 - DNA, 75 bp, synthetic construct
  source 1..75: mol_type = other DNA
taagcgccgcgctggggcgcatggagcgcggtatcgatctcaccgcgatgatggcgcagggcattacgatgggcg

SEQ ID NO: 475698 - DNA, 75 bp, synthetic construct
  source 1..75: mol_type = other DNA
taagcgcggcgctggggcgcatggagcgcggtatcgatctcaccgcgatgatggcgcagggcattaccatgggcg

SEQ ID NO: 475699 - DNA, 75 bp, synthetic construct
  source 1..75: mol_type = other DNA
gttttggcgctgctggtactggcgcaaatccgaacggtaaaaactgggtaggcaaagactccactgctattgctg

SEQ ID NO: 475700 - DNA, 75 bp, synthetic construct
  source 1..75: mol_type = other DNA
atgttgtgcgaagaaaccccaaaagtaatgaatactattcaagagcgttttgcaatatttgttgccattacggga

SEQ ID NO: 475701 - DNA, 75 bp, synthetic construct
  source 1..75: mol_type = other DNA
gccgaaagagccaatcggctgatgcaggagcaatttaccgcatgggcaacatcgcgcgagcagcagcaggcgatt

SEQ ID NO: 475702 - DNA, 75 bp, synthetic construct
  source 1..75: mol_type = other DNA
cctgacggccaggctgttcatgcgctgcgccacaccttcgccagtcatttcatgatgaacggcggcaatattctg

SEQ ID NO: 475703 - DNA, 75 bp, synthetic construct
  source 1..75: mol_type = other DNA
catcacgctggatgatgcagatggtcagttgcagctaccgccacggggcgcgcgcctgacggttctcattggctg

SEQ ID NO: 475704 - DNA, 75 bp, synthetic construct
  source 1..75: mol_type = other DNA
gtttttcgatatctggcaaccgccgcaggtggatgaagccgaatgctggcccgttgcgcctggcgaacagtggca

SEQ ID NO: 475705 - DNA, 75 bp, synthetic construct
  source 1..75: mol_type = other DNA
agcgcctggcgtaacgcgctttgtcggtgcgggtggcatggaagcggccagaaccgtttctgaagagatggcgga

SEQ ID NO: 475706 - DNA, 75 bp, synthetic construct
  source 1..75: mol_type = other DNA
attgacttgtggtggaaataccacggccagctaatgaagtcagggcataacacgcgccttaaattgctgcgcttg

SEQ ID NO: 475707 - DNA, 75 bp, synthetic construct
  source 1..75: mol_type = other DNA
atacgcccggaggggcgtaaaggcaaacgcattcgtaaaaaatttaaaacgaaatcggatgcagttttatatgag

SEQ ID NO: 475708 - DNA, 75 bp, synthetic construct
  source 1..75: mol_type = other DNA
tggcgagcaaaaaggtttcctctgcagggaatatctctgtgctggaatacgtgaagattaacaccatcgcgtttc

SEQ ID NO: 475709 - DNA, 75 bp, synthetic construct
  source 1..75: mol_type = other DNA
aggagaggccggggcggtggaaaccttgctacaggccgttaatgcctgccttcagtataccaactggtacgggct

SEQ ID NO: 475710 - DNA, 75 bp, synthetic construct
  source 1..75: mol_type = other DNA
tattcccatctgctgaccgctcaggaagttagcaaagagcaaatgcagatccgcgatattctggcgcgtccggcg

SEQ ID NO: 475711 - DNA, 75 bp, synthetic construct
  source 1..75: mol_type = other DNA
gggtaacgccaacgctaaaaccggtaatacgatgccgtgggtgtttgactgcggcaagattgaccaggttctcgg

SEQ ID NO: 475712 - DNA, 75 bp, synthetic construct
  source 1..75: mol_type = other DNA
ggaggccagcgatcgcggtatcgtggtggttaatctgacgcaatgtatgtccggtaaagtgaatatggggggata

SEQ ID NO: 475713 - DNA, 75 bp, synthetic construct
  source 1..75: mol_type = other DNA
aatgcaggactgtcagttgaggatatcaagcgccaggtgatggaaaacagtgaagaggaaattgattatcagata

SEQ ID NO: 475714 - DNA, 75 bp, synthetic construct
  source 1..75: mol_type = other DNA
agtattgcaatgggtaacggttctcagaccacccgtggtgcacagactggctacaccgcctacaacatggacgca

SEQ ID NO: 475715 - DNA, 75 bp, synthetic construct
  source 1..75: mol_type = other DNA
attctcggggatgtaaaccttgtgctgtctcaggcatgggtaaattcaggttatgccatttgtcctgcaaaaatc

SEQ ID NO: 475716 - DNA, 75 bp, synthetic construct
  source 1..75: mol_type = other DNA
tagcgtacacccaggatgagaaattcattcgcttcccgctggtgccgctgctgaataccccgctggaataccgcg

SEQ ID NO: 475717 - DNA, 75 bp, synthetic construct
  source 1..75: mol_type = other DNA
cgtggcgctggtggcgcgcatcgtatcgttgcttacacccaggacgaaaaatacgttcgcttccctatggttcct

SEQ ID NO: 475718 - DNA, 75 bp, synthetic construct
  source 1..75: mol_type = other DNA
tggcgattccgcattaaacctgaaaggtcttgttaccctggacggtgtgcctgtcaacaacgctgccaaaacgtg

SEQ ID NO: 475719 - DNA, 75 bp, synthetic construct
  source 1..75: mol_type = other DNA
ggcaacctcaacaccggacgaaatccgcgcgagcattaaccaggtactgtctgatgcgtgggccgcttccggtta

SEQ ID NO: 475720 - DNA, 75 bp, synthetic construct
  source 1..75: mol_type = other DNA
gagatcagctctttcactaacaccacttttgctgctgccggtacaccgaatgctaacggcaaaaactggcttagc

SEQ ID NO: 475721 - DNA, 75 bp, synthetic construct
  source 1..75: mol_type = other DNA
aaaacctcatcagcacacagatcatcagtaaactcgaaatcgctcatggcctgacagtgaccaaaactgcatctc

SEQ ID NO: 475722 - DNA, 75 bp, synthetic construct
  source 1..75: mol_type = other DNA
gaaaaaattgctgaaatagaacagcgactcagagaagacagacgaaacgagatcgttgagaagattcttcaaaag

SEQ ID NO: 475723 - DNA, 75 bp, synthetic construct
  source 1..75: mol_type = other DNA
agaagacgagcagatccatctacgctgtttcgaatcgacgcacgagatgctgttagagcagttgagtcagcataa

SEQ ID NO: 475724 - DNA, 75 bp, synthetic construct
  source 1..75: mol_type = other DNA
cgataatgtattagccaatcacccagatttgttatccttcattcagcaactggaacaagagggggtaacctgtca

SEQ ID NO: 475725 - DNA, 75 bp, synthetic construct
  source 1..75: mol_type = other DNA
cgataatgtgttatccaatcacccagatttgttatcgttcattcagcaactggaacaagtgggtgtaacctgcca

SEQ ID NO: 475726 - DNA, 75 bp, synthetic construct
  source 1..75: mol_type = other DNA
atgaaaggtatgcagaaaatcaagagaggtaagcaatttacaggagtagttgtctatgcacttgaaccggcttca

SEQ ID NO: 475727 - DNA, 75 bp, synthetic construct
  source 1..75: mol_type = other DNA
tttaccgcacgggttgcaggtggatctgccggacattccggcatcaaccacggcgcagaccgtccagctatggga

SEQ ID NO: 475728 - DNA, 75 bp, synthetic construct
  source 1..75: mol_type = other DNA
actatatctaaaacaatgttatcgaatgcctccggtaaaggtgtgccacagagtaatctaattttttttcctaac

SEQ ID NO: 475729 - DNA, 75 bp, synthetic construct
  source 1..75: mol_type = other DNA
tggtcaattatgcaaaaataatcctggtattgcacaatgtgttgagcctgaatctgttgatgctctcatttctgg

SEQ ID NO: 475730 - DNA, 75 bp, synthetic construct
  source 1..75: mol_type = other DNA
gaggcgctttatttaacaccacaaaccattaccggacagattcgggcgctggaagagcgcctgcaaggcaaatta

SEQ ID NO: 475731 - DNA, 75 bp, synthetic construct
  source 1..75: mol_type = other DNA
gcgttgatgaaagcttttggtgcgatgcacaatgcaatcttcgttgccccaacgctttatgcatatgacttttat

SEQ ID NO: 475732 - DNA, 75 bp, synthetic construct
  source 1..75: mol_type = other DNA
atgcgcgcgatcggtaaattgcctaaaagcgtgttgatactggaatttctcggaatgatgttactggcggcggcg

SEQ ID NO: 475733 - DNA, 75 bp, synthetic construct
  source 1..75: mol_type = other DNA
acaacccagaccatctagaagctctgcgaaccggcataccaccagaagaaccccctgctcctgctcctgctcctg

SEQ ID NO: 475734 - DNA, 75 bp, synthetic construct
  source 1..75: mol_type = other DNA
aaccgggaaacgattctggagaaaatccatcagcttgaagaaaaaattcgtctggaaagacaacaggagacagtg

SEQ ID NO: 475735 - DNA, 75 bp, synthetic construct
  source 1..75: mol_type = other DNA
caccacaaaatcacgccttatgttatcggtggcaacatgacgggcagcactgctgctgaactaatcagtgaattt

SEQ ID NO: 475736 - DNA, 75 bp, synthetic construct
  source 1..75: mol_type = other DNA
acctaataagtacccgcataatcagtgaactcgaaattgctcacgatctgacagtgactaagacagcccattcca

SEQ ID NO: 475737 - DNA, 75 bp, synthetic construct
  source 1..75: mol_type = other DNA
gaaagtcgtctgacggggaataatttagcaacgataacaccgaccgatcaccctttgccctttagcggttggtgg

SEQ ID NO: 475738 - DNA, 75 bp, synthetic construct
  source 1..75: mol_type = other DNA
aagctggggagtactcacaacattactctgcttcgccacaccgtttctggcagttgccatcgcttttaccccctt

SEQ ID NO: 475739 - DNA, 75 bp, synthetic construct
  source 1..75: mol_type = other DNA
tagcaacgataacaccgaccgatcaccctttaccctttagcggttggtgggctttgttggcctgggcgatagtac

SEQ ID NO: 475740 - DNA, 75 bp, synthetic construct
  source 1..75: mol_type = other DNA
gctatgttagaagacagaactagcgagaaatgtccaaagacaatcatacaggaagctatagatacactgatcacg

SEQ ID NO: 475741 - DNA, 75 bp, synthetic construct
  source 1..75: mol_type = other DNA
attgggtaaaaaatatggctggccttccctgcaagcactgattgattttacgccagagcatcttactgtactgaa

SEQ ID NO: 475742 - DNA, 75 bp, synthetic construct
  source 1..75: mol_type = other DNA
tgccagtgccatcatgcgagtctgaagagcaggctgcaaaccgggaaacgattctggagaaaatccatcagcttg

SEQ ID NO: 475743 - DNA, 75 bp, synthetic construct
  source 1..75: mol_type = other DNA
gctgctcctgctcctgctccgattttagggtcaacagaaagaagagaaagtatcagcgaaaaaatcgctgaactc

SEQ ID NO: 475744 - DNA, 75 bp, synthetic construct
  source 1..75: mol_type = other DNA
aacatttcattcaaggcttctcagcttggtaaaaagtattcatggaaaaacttagagccgttcatactcattgat

SEQ ID NO: 475745 - DNA, 75 bp, synthetic construct
  source 1..75: mol_type = other DNA
atacgctcataaccagcaagatttccgaagaaaggtttgtgcagcagcttgcagctcagaagataaaagcaattc

SEQ ID NO: 475746 - DNA, 75 bp, synthetic construct
  source 1..75: mol_type = other DNA
gctggtacagtgcctgtctgagaaagacgcagcggcatttggcagccagttcaccggctttaccattccgcaggc

SEQ ID NO: 475747 - DNA, 75 bp, synthetic construct
  source 1..75: mol_type = other DNA
gtatgggcggtgctacgcttccggcaatgagtaactccggttctggcaatcaggggatcaccgcaacaatgcctg

SEQ ID NO: 475748 - DNA, 75 bp, synthetic construct
  source 1..75: mol_type = other DNA
aatgagtaactccggctcgggtaaccaggggatcaccgcaacaatgcctgtggtggtggtagcagaacacttcgg

SEQ ID NO: 475749 - DNA, 75 bp, synthetic construct
  source 1..75: mol_type = other DNA
ttaggacgcaaattgcttaactggtttaactcccagggattaaacgtagaaatccttggcgagtttgatgatgcc

SEQ ID NO: 475750 - DNA, 75 bp, synthetic construct
  source 1..75: mol_type = other DNA
atggctgagcttcgtacactccagagcagaatcaaaacactgaatacccgacgggtgaatattctgaatggtgaa

SEQ ID NO: 475751 - DNA, 75 bp, synthetic construct
  source 1..75: mol_type = other DNA
cgaagcaaatgtcatcatccacgatcgtcattttaaccagacgctgcgcgataatctgaacggcattattgccgc

SEQ ID NO: 475752 - DNA, 75 bp, synthetic construct
  source 1..75: mol_type = other DNA
gcgtttgctctataactatctggttaaaggcggcgttcaagtgtttgagtatcgccgccgcccgctccacggcaa

SEQ ID NO: 475753 - DNA, 75 bp, synthetic construct
  source 1..75: mol_type = other DNA
ccgaccattggcgtagcgaaaaagcggttatgcggtaaattcgagccgctctccagcgaaccgggcgcgctggca

SEQ ID NO: 475754 - DNA, 75 bp, synthetic construct
  source 1..75: mol_type = other DNA
ttatcgcttaaatcttctcttgaagatatcctgctggaaataaccacgctggtagataacgctttggatcttgct

SEQ ID NO: 475755 - DNA, 75 bp, synthetic construct
  source 1..75: mol_type = other DNA
tttaagcgcaagggacgtggcctcgagcccagcgagctgggagagctggtctatcgctatgccgataaaatgttc

SEQ ID NO: 475756 - DNA, 75 bp, synthetic construct
  source 1..75: mol_type = other DNA
ccaacgataggcgtggcgaaaaaacggctctgcggtaaattcgaaccgctctccagcgaaccgggcgcgctggcc

SEQ ID NO: 475757 - DNA, 75 bp, synthetic construct
  source 1..75: mol_type = other DNA
catgaaaggctatcgtctgccggagccaacgcgctgggcggacgcggtggcctcggaacgtccggcgttcgtgcg

SEQ ID NO: 475758 - DNA, 75 bp, synthetic construct
  source 1..75: mol_type = other DNA
ctgcgctgctggcagcgtgggagatgctgtcgcaaaagccggatttagtgtttgtcgatggtcatgggatctcgc

SEQ ID NO: 475759 - DNA, 75 bp, synthetic construct
  source 1..75: mol_type = other DNA
gaatgccatcgacaaaagtctgctcgtgaagcggcgggtggtatgccggacccgacgctgccggaggtgtccgga

SEQ ID NO: 475760 - DNA, 75 bp, synthetic construct
  source 1..75: mol_type = other DNA
ccatctggctcaatttatcctcccatgaaaaaatattatggaccacacaaaatgatgactaaaacccaaataaat

SEQ ID NO: 475761 - DNA, 75 bp, synthetic construct
  source 1..75: mol_type = other DNA
atctggatatgccgattaaccaggcgttaattgatgcgctcactgagtcggtcaacgcctatggccgcaagctga

SEQ ID NO: 475762 - DNA, 75 bp, synthetic construct
  source 1..75: mol_type = other DNA
aacggcattaccacagttttcaatagttacggctctggtctgcgtttatggggcaaccgcactgcggcatggcct

SEQ ID NO: 475763 - DNA, 75 bp, synthetic construct
  source 1..75: mol_type = other DNA
cacggtggcagacgaaaaagtgacttttgacaaagcgaccgggaaagcctggctggctcatccggttgtgtccca

SEQ ID NO: 475764 - DNA, 75 bp, synthetic construct
  source 1..75: mol_type = other DNA
tattagtaggtgaaagcaaaatcactccctgggccattccatctggctcaatttatcctcccatgaaaaatatta

SEQ ID NO: 475765 - DNA, 75 bp, synthetic construct
  source 1..75: mol_type = other DNA
tacagaaataaatagttacttaggcaaacttagaggtcaacaaaaacttcttgatggtatagacataatagaaat

SEQ ID NO: 475766 - DNA, 75 bp, synthetic construct
  source 1..75: mol_type = other DNA
agtggtatgccggacccgacgttgccggaagtgtccggaggtcatggcagggcagacgatatcatcggactgtga

SEQ ID NO: 475767 - DNA, 75 bp, synthetic construct
  source 1..75: mol_type = other DNA
gtaccgaatgccatcgccagaagtcagtcagtgaaacggcgagtggtatgccggacccgacgctgccggaggtgt

SEQ ID NO: 475768 - DNA, 75 bp, synthetic construct
  source 1..75: mol_type = other DNA
gctcagggatgccgggcagtgctgtctctgtggtcgtgtggttgacctctgtgacagtgaactcgatcaccgcat

SEQ ID NO: 475769 - DNA, 75 bp, synthetic construct
  source 1..75: mol_type = other DNA
ggcctaccgtgacccatatgcgtaactttgaaaacgtccgccggacaggcgatgtaattaatgagtcaatccgtt

SEQ ID NO: 475770 - DNA, 75 bp, synthetic construct
  source 1..75: mol_type = other DNA
gcaccacgttcagccaggtgcttgcaggtcgtggcgcatccgggacgatcaattttaacaccagctccgaacgcg

SEQ ID NO: 475771 - DNA, 75 bp, synthetic construct
  source 1..75: mol_type = other DNA
cagcgtcgggtcagtggcagtgcacgtgtttccctcaagcgtcatatctggctcagggatgccgggcagtgctgt

SEQ ID NO: 475772 - DNA, 75 bp, synthetic construct
  source 1..75: mol_type = other DNA
cgggcagtggatgaacgactgcataagctgatttcggcaaaacccaatggctacatgacgccgcaggaattctgg

SEQ ID NO: 475773 - DNA, 75 bp, synthetic construct
  source 1..75: mol_type = other DNA
gtggggctgaatcccattgcgtatgcgcgtgaggccatttcactggcagcggcaactgaggagcacggtgccagg

SEQ ID NO: 475774 - DNA, 75 bp, synthetic construct
  source 1..75: mol_type = other DNA
gaagaacgcgaactagaagaagctaaacgctcacttgataaagctcgtcgtaaaatggaagttgaaaaagaacta

SEQ ID NO: 475775 - DNA, 75 bp, synthetic construct
  source 1..75: mol_type = other DNA
tcgagcgtgcctctggcattacatggcggtagcggtacgccgttcgatcagctccagctctgtacgactctgggg

SEQ ID NO: 475776 - DNA, 75 bp, synthetic construct
  source 1..75: mol_type = other DNA
ggcggtggtggaactcgccgccagcgcgcagctctgcgtggaaggcgaactgggccatctggcagatgcgccgcg

SEQ ID NO: 475777 - DNA, 75 bp, synthetic construct
  source 1..75: mol_type = other DNA
gtttatcggcgatgaatgtgctgtgccgccatatcgtagcgcatgggttgagggcgcaacggaagcggaagtgcg

SEQ ID NO: 475778 - DNA, 75 bp, synthetic construct
  source 1..75: mol_type = other DNA
gatgccgacggtctgctgagtgtaaccgcgatggagaaatccactggcgttgaggcgtctatccaggtcaaacct

SEQ ID NO: 475779 - DNA, 75 bp, synthetic construct
  source 1..75: mol_type = other DNA
ctacgggctggattccggtcaggaaggcgtgatcgctgtttatgacctcggtggcgggacgtttgatatttccat

SEQ ID NO: 475780 - DNA, 75 bp, synthetic construct
  source 1..75: mol_type = other DNA
aaagcagaatgacccggttaaaacggtacaggatttcgtctttgcacttctcaaatgcaaatacctttttgatca

SEQ ID NO: 475781 - DNA, 75 bp, synthetic construct
  source 1..75: mol_type = other DNA
attctggtgggtaacaagccggatagcgaaatgctgctgctcgacgtaattccactgtcgctggggcttgaaacc

SEQ ID NO: 475782 - DNA, 75 bp, synthetic construct
  source 1..75: mol_type = other DNA
gagctatgccgagcaggacgtaaaagcccgtatgctggcagaacaaaaagtagaagcggcgcgtgtgctggaaag

SEQ ID NO: 475783 - DNA, 75 bp, synthetic construct
  source 1..75: mol_type = other DNA
gcgataaccgcgttcagcgtgaactgctggatgccgccattgcggccaaaatcgcgctgagcgatgcggactctg

SEQ ID NO: 475784 - DNA, 75 bp, synthetic construct
  source 1..75: mol_type = other DNA
gccagcagagctggcggatgctatcgggctgtcatacgacacctataccggaaagcagatcagcagccagcgggc

SEQ ID NO: 475785 - DNA, 75 bp, synthetic construct
  source 1..75: mol_type = other DNA
tgcgggggaatttttacgcctacaaggtaaaggcactgggggaagtggtggagcttcttccgatagatccgggct

SEQ ID NO: 475786 - DNA, 75 bp, synthetic construct
  source 1..75: mol_type = other DNA
gatctctaccactatcgctttcgttcgtgccctgaacgtaatgctgaagaataagtcgatcaaagatcgtctggt

SEQ ID NO: 475787 - DNA, 75 bp, synthetic construct
  source 1..75: mol_type = other DNA
tgctgtcattatgcatgacggtctggagcgtatgtacggtgaaaaacaagagaacgtttactactacatcactac

SEQ ID NO: 475788 - DNA, 75 bp, synthetic construct
  source 1..75: mol_type = other DNA
gtgttcttttcgggattatttcaacgaaaaagtgacgcgtcggtgacgacgccagcagagctggcagacgctatc

SEQ ID NO: 475789 - DNA, 75 bp, synthetic construct
  source 1..75: mol_type = other DNA
cgaagcggaatttccgggcactgtccatgtggcaggccctgtacccgacgatatcgcgccgggatcggttttgaa

SEQ ID NO: 475790 - DNA, 75 bp, synthetic construct
  source 1..75: mol_type = other DNA
gacctgggacctacgtgcgcccgcaccgacaccctcacaccttcgagctactgttgccattaaggggtcgtttcg

SEQ ID NO: 475791 - DNA, 75 bp, synthetic construct
  source 1..75: mol_type = other DNA
tccgacagccgtgagaacctgcgtcaccacttcgaagttgatgcttcctacgtggttgtagcggcgctgggctaa

SEQ ID NO: 475792 - DNA, 75 bp, synthetic construct
  source 1..75: mol_type = other DNA
gtcagattggtatctacagcccgaacggtcagcagtacaccccgcaggatcgcgagcaggttgcgtactataaag

SEQ ID NO: 475793 - DNA, 75 bp, synthetic construct
  source 1..75: mol_type = other DNA
taaaacacgggcggtggatgaacggctgcataagctgatttcggcaaaacccaatggctacatgacgccgcagga

SEQ ID NO: 475794 - DNA, 75 bp, synthetic construct
  source 1..75: mol_type = other DNA
tggatccgatcgaaactcgcgactggctccaggcgatcgaatcggtaatccgtgaagaaggtgttgagcgtgctc

SEQ ID NO: 475795 - DNA, 75 bp, synthetic construct
  source 1..75: mol_type = other DNA
tgccggaattttggcagttcccgaccgtatctatgggtctgggtccgattggtgctatttgccaagctaaattcc

SEQ ID NO: 475796 - DNA, 75 bp, synthetic construct
  source 1..75: mol_type = other DNA
gatgaacgacgcaccggcagtggcttccaccgactatatgaaactgttcgccgagcaggtccgtacttatgtacc

SEQ ID NO: 475797 - DNA, 75 bp, synthetic construct
  source 1..75: mol_type = other DNA
tcgaccagttcgaacttcggttattaaagcagaatgacccggttaaaacggtacaggatttcgtctttgcacttc

SEQ ID NO: 475798 - DNA, 75 bp, synthetic construct
  source 1..75: mol_type = other DNA
ttttaaaaaagaaacacgcaggcatgaaattacacagatggtttgctgtgctgacacgctattaccgttaaccat

SEQ ID NO: 475799 - DNA, 75 bp, synthetic construct
  source 1..75: mol_type = other DNA
aggcacatttacagcaataaccactgtcatgaaatccgtattcttcatcgtgcagttaaataccttccaccagca

SEQ ID NO: 475800 - DNA, 75 bp, synthetic construct
  source 1..75: mol_type = other DNA
tgcatgagattcgaacgttacaccgagcagtcaaataccttccaccagcagggaagaaaggtgttgtagcgcgtt

SEQ ID NO: 475801 - DNA, 75 bp, synthetic construct
  source 1..75: mol_type = other DNA
gggttagtgaaaaggtcttctgtaacccgccgtacagcgatattccgtcgttcctcttaaaagcgtctgaagcgg

SEQ ID NO: 475802 - DNA, 75 bp, synthetic construct
  source 1..75: mol_type = other DNA
atgtcaattgagcatattttaatcgggaaacatcatgggggttctgattgctggagaactccatctcttatattc

SEQ ID NO: 475803 - DNA, 75 bp, synthetic construct
  source 1..75: mol_type = other DNA
gcacgatacgttattaccccgctttacggatgatattcacaatcagtcatgggatggtgaacgggtattctgtaa

SEQ ID NO: 475804 - DNA, 75 bp, synthetic construct
  source 1..75: mol_type = other DNA
attcgcaacagtattattccggcatttaaaaatggcgaccttgctggcggcttgcaaaagggaataagcgatatt

SEQ ID NO: 475805 - DNA, 75 bp, synthetic construct
  source 1..75: mol_type = other DNA
tcctcttcatcctcttttgacaatgataatttcagcggcggcggcggttcatcaggtggcggcggcgcatcaggg

SEQ ID NO: 475806 - DNA, 75 bp, synthetic construct
  source 1..75: mol_type = other DNA
tcctcttcatcctcttttgacaatgataattttagcggtggtggcggttcatctggtggcggtggcgcttccggg

SEQ ID NO: 475807 - DNA, 75 bp, synthetic construct
  source 1..75: mol_type = other DNA
cgctggctattcgccattgaaggtattccggctattgtacttggcgtactggttctgtggcgtttgccgcaatcc

SEQ ID NO: 475808 - DNA, 75 bp, synthetic construct
  source 1..75: mol_type = other DNA
ttctacaaatgggcaggtgttgagcatttacgttcgaccaaatacacccgccagaatttataatagagaagatag

SEQ ID NO: 475809 - DNA, 75 bp, synthetic construct
  source 1..75: mol_type = other DNA
ctattcatcatcgtcatcctcttcattcaacaatgacaatttcagcggtggtggcggttcatctggtggcggtgg

SEQ ID NO: 475810 - DNA, 75 bp, synthetic construct
  source 1..75: mol_type = other DNA
taatgccaattgctttgtgcagaaagtggttgtggcaaatggctacgagaacatttttccggtgtacggaacata

SEQ ID NO: 475811 - DNA, 75 bp, synthetic construct
  source 1..75: mol_type = other DNA
cgtcacttgaaggcgatggtaactggttcgactcggtctcattgagggaattttatctttccgataagaacaccg

SEQ ID NO: 475812 - DNA, 75 bp, synthetic construct
  source 1..75: mol_type = other DNA
tcgtaggtggccccacagctgataacgttgagcttacgtggtcaccggcaggcaaagatacatacatgcctgagt

SEQ ID NO: 475813 - DNA, 75 bp, synthetic construct
  source 1..75: mol_type = other DNA
tgacggtagtgagttctacggcaaaaaagtaactttgcctgctttgggtgaaggcaaatttgtcgttcagataaa

SEQ ID NO: 475814 - DNA, 75 bp, synthetic construct
  source 1..75: mol_type = other DNA
tgcctgccgataccgacctcaatcatttttttgaggtgatgaacaatcgaggcgagcaacttgaaaaacatgaag

SEQ ID NO: 475815 - DNA, 75 bp, synthetic construct
  source 1..75: mol_type = other DNA
aaaccgattaacgatcgtcgttcgcgccagcaggaagtgactccggcgggcaccagtatgcgctatgaggcgagc

SEQ ID NO: 475816 - DNA, 75 bp, synthetic construct
  source 1..75: mol_type = other DNA
ttcaaaccgcaaagcggcggactggagcagaccttccgccttgatgctcagcagtaccacgccctgacggtgggg

SEQ ID NO: 475817 - DNA, 75 bp, synthetic construct
  source 1..75: mol_type = other DNA
taaaaaggtaatacggtatgagaggaaaactgatatccgccattcatgtggcaaagcgcgagcttgccctggatg

SEQ ID NO: 475818 - DNA, 75 bp, synthetic construct
  source 1..75: mol_type = other DNA
caggtatggattaatgccaatctggttagtgcttttgccaacctgttcaccaataaccagtcttacccgttcaat

SEQ ID NO: 475819 - DNA, 75 bp, synthetic construct
  source 1..75: mol_type = other DNA
tctgttattcctggtgaactgctgatgtatcgtattgttacttcaccagtggctgggtatcttctgtccggcaac

SEQ ID NO: 475820 - DNA, 75 bp, synthetic construct
  source 1..75: mol_type = other DNA
attagcctgggcgctggtggagctggtaaagcgtctgccctatatcattgagctgaacaccgggcatgaaactat

SEQ ID NO: 475821 - DNA, 75 bp, synthetic construct
  source 1..75: mol_type = other DNA
gagcattactcctcctggcgctaccgccgggaagagggcgccgcgacggtatggcgttgcccgctctatgttccg

SEQ ID NO: 475822 - DNA, 75 bp, synthetic construct
  source 1..75: mol_type = other DNA
gtcatcgttatgcccgggaagaagggcttggcaatgtgttcattggcaaaattgatgggcgacaaacctgcgtca

SEQ ID NO: 475823 - DNA, 75 bp, synthetic construct
  source 1..75: mol_type = other DNA
atggataatgccgcccgcgcaccggtgctggatgtatcagtcacaacaaccggcatcgccagtggtgccagcagc

SEQ ID NO: 475824 - DNA, 75 bp, synthetic construct
  source 1..75: mol_type = other DNA
cggcaaaatgcgcagcaataaggaaattgtgatcgataataacggcgaaatgcagatgctgccgggagctgggcc

SEQ ID NO: 475825 - DNA, 75 bp, synthetic construct
  source 1..75: mol_type = other DNA
tgattctgatggggcgtgctggcaaagatgcagaagtgcgttacaccccaaacggaacggccattgcgagcctga

SEQ ID NO: 475826 - DNA, 75 bp, synthetic construct
  source 1..75: mol_type = other DNA
catgtatatattattggcggcgcaattgttggttcccagcataaatggaaagaattctataaactggttctggaa

SEQ ID NO: 475827 - DNA, 75 bp, synthetic construct
  source 1..75: mol_type = other DNA
aatacagcacacttcgaaaatacgctccacgaatgttgtcagcattgcagtttgtagcgacacctgcggcgcagc

SEQ ID NO: 475828 - DNA, 75 bp, synthetic construct
  source 1..75: mol_type = other DNA
cgtttgtatgggcatttcctgtggtggtactgatagggttgtctctttcgctgactgacgacagtggacttaagg

SEQ ID NO: 475829 - DNA, 75 bp, synthetic construct
  source 1..75: mol_type = other DNA
gctgtgtacacaggaatgcgtcatggtgaactggtctccctggcctgggaagatatcgatctgaaagcaggaaca

SEQ ID NO: 475830 - DNA, 75 bp, synthetic construct
  source 1..75: mol_type = other DNA
agttccctaattcccctaacctgaaacactttggtctgggaaaaagagagataaccgttaaggcactttcggaaa

SEQ ID NO: 475831 - DNA, 75 bp, synthetic construct
  source 1..75: mol_type = other DNA
atgttcctaccgtccgataaccatttggcttacttccgtacattcccttgcgtagatgttcagaattgtacgatt

SEQ ID NO: 475832 - DNA, 75 bp, synthetic construct
  source 1..75: mol_type = other DNA
ttctaatgtggatagatatgaattatttttctccttaaggatcatccgttatttggggcgttttctgctaaaatc

SEQ ID NO: 475833 - DNA, 75 bp, synthetic construct
  source 1..75: mol_type = other DNA
aaatcttttgtagatcttctggatcgctcgcaaatcgtcatgtggataactttgtgcataaattatttacatcgc

SEQ ID NO: 475834 - DNA, 75 bp, synthetic construct
  source 1..75: mol_type = other DNA
ctgtatgccagcgatggccgtacccgcaaagatccgtcaaaaaaatacggttccggcggcctggtacagggcaaa

SEQ ID NO: 475835 - DNA, 75 bp, synthetic construct
  source 1..75: mol_type = other DNA
gatagaagtcggcacgatgacaaccattcatgcctataccggcacccagtcactggtggatggcccacgtggtaa

SEQ ID NO: 475836 - DNA, 75 bp, synthetic construct
  source 1..75: mol_type = other DNA
ggacgccgggttctgctgatcgataatggtaaaaaaccagggcgcaaaatccttatgtctggcggtgggcgctgc

SEQ ID NO: 475837 - DNA, 75 bp, synthetic construct
  source 1..75: mol_type = other DNA
gcgtggcggtgccttccgtgattaccgctgaaaacggcaccgttttccgtgagaacttactcttcacccaccgcg

SEQ ID NO: 475838 - DNA, 75 bp, synthetic construct
  source 1..75: mol_type = other DNA
gcagccatttcggttcggtgtttgatgccacgcaaaccgaaattaccgccgtgggcgatttacaactggtgaaaa

SEQ ID NO: 475839 - DNA, 75 bp, synthetic construct
  source 1..75: mol_type = other DNA
ccgcgtcatttctctgaagacctccgtcgggcagtttgcatctgccatgcgtcctatcttcacgctgattgacac

SEQ ID NO: 475840 - DNA, 75 bp, synthetic construct
  source 1..75: mol_type = other DNA
tgcggcagtcgaagcggatattgccctgaccaaactgcatctggaaatggcgaccgttcgcgcgccgtttgatgg

SEQ ID NO: 475841 - DNA, 75 bp, synthetic construct
  source 1..75: mol_type = other DNA
gcttgaactgaacggcatgactgtcggttgcgaaaagctggtcatcgcgaccggtgggctgtcaatgccggggct

SEQ ID NO: 475842 - DNA, 75 bp, synthetic construct
  source 1..75: mol_type = other DNA
gatcactctggcgcagtctctatcggcaatctggaacgctatattactgatactgcgctggcgatgggctggcgt

SEQ ID NO: 475843 - DNA, 75 bp, synthetic construct
  source 1..75: mol_type = other DNA
gcgcaaagaggtggtcaatgcgcgcgaggaaggtgtcgagtttcagttcaatgttcagccgcaatatatcgcttg

SEQ ID NO: 475844 - DNA, 75 bp, synthetic construct
  source 1..75: mol_type = other DNA
gcctgattcaaaccggtgacgtcgggtatttacctacccagacgcatctgaaaaaagtctttgctggtggtgatg

SEQ ID NO: 475845 - DNA, 75 bp, synthetic construct
  source 1..75: mol_type = other DNA
cgatgggaaaagcattgcggtttacgccgaaaaagaggcgaaaaatattccgtggaaagcgaaaggtgcagaaat

SEQ ID NO: 475846 - DNA, 75 bp, synthetic construct
  source 1..75: mol_type = other DNA
atgtcgcaggctgctctgaacacgcgaaatagcgaagaagaggtttcttctcgccgcaataatggaacgcgtctg

SEQ ID NO: 475847 - DNA, 75 bp, synthetic construct
  source 1..75: mol_type = other DNA
cgggtacctttatgacccaggatgtcaacatcatccagacgcaaatagaacaacgcctgccgtggattaagcagg

SEQ ID NO: 475848 - DNA, 75 bp, synthetic construct
  source 1..75: mol_type = other DNA
taaatatctacacgactcgctgcctaacgctacctatgttggctttaccggcacccctatcgacgccactctgga

SEQ ID NO: 475849 - DNA, 75 bp, synthetic construct
  source 1..75: mol_type = other DNA
ttacgcattccatcacgcactgtcagattcatcgccaggtgctgatgaggtagaggaaattaaggccgggttgcg

SEQ ID NO: 475850 - DNA, 75 bp, synthetic construct
  source 1..75: mol_type = other DNA
aatttggaaaaattccgttgatgccacacacgattttcttacagcccatgaccggcaggagattgaaaaagaagt

SEQ ID NO: 475851 - DNA, 75 bp, synthetic construct
  source 1..75: mol_type = other DNA
tactaaaagtttctttttcagtgacatacaaagaaaaaaaagctatgagatgaattataaaaatatattttcccg

SEQ ID NO: 475852 - DNA, 75 bp, synthetic construct
  source 1..75: mol_type = other DNA
ggctggctgcggctgatgagggggcagtactcacaagccgggcgggttctgccacagttcgtctggatttcagcc

SEQ ID NO: 475853 - DNA, 75 bp, synthetic construct
  source 1..75: mol_type = other DNA
ttggtctggagtttgagaaatcagcctttggtaagtacaacgttgataatgctgtcaacgtcgggttccgttatt

SEQ ID NO: 475854 - DNA, 75 bp, synthetic construct
  source 1..75: mol_type = other DNA
gttttgcacgatacgccaaacattctgtacttcatcaaaaccgccggtaacggtcagttcaaagcggtaggtgac

SEQ ID NO: 475855 - DNA, 75 bp, synthetic construct
  source 1..75: mol_type = other DNA
aaatagtacaacgtcttgacaccagctttctgaaagatattcatgaagatgacgtaatttctgcttatgaagcaa

SEQ ID NO: 475856 - DNA, 75 bp, synthetic construct
  source 1..75: mol_type = other DNA
atgagcagagaagatccacaactaaggatcagacttcccgttgaagtaaaagaaaaaatagaaatttctgcaaaa

SEQ ID NO: 475857 - DNA, 75 bp, synthetic construct
  source 1..75: mol_type = other DNA
tgacccggcccgcctgactccacagatccttctggtaaaagatcatggcgtctatctgattaccaatgcatctct

SEQ ID NO: 475858 - DNA, 75 bp, synthetic construct
  source 1..75: mol_type = other DNA
aagagcacttgctcactggtgcgaaaagcaccctgataaattttaccgacatgagctttgcccaacagttgatga

SEQ ID NO: 475859 - DNA, 75 bp, synthetic construct
  source 1..75: mol_type = other DNA
aaccacggcatctattaaatacaatagctcactatggtgaaatgtctgaacttgatatagctaaatggtctggtc

SEQ ID NO: 475860 - DNA, 75 bp, synthetic construct
  source 1..75: mol_type = other DNA
ctttctgaaagatattcatgaagatgacgtaatttctgcttatgaagcaaaaattattgcaaacaatgcacgaca

SEQ ID NO: 475861 - DNA, 75 bp, synthetic construct
  source 1..75: mol_type = other DNA
gacctgaaaaatgcggataagctggtagtaaaccaaaagctgtcaggtaaggacaatattctgctggttgatttt

SEQ ID NO: 475862 - DNA, 75 bp, synthetic construct
  source 1..75: mol_type = other DNA
acgttaggcgataacctcaccagtaaccgtcgcacgattaacaaatattttgtcccggatgtgctggaaacctgc

SEQ ID NO: 475863 - DNA, 75 bp, synthetic construct
  source 1..75: mol_type = other DNA
gtctatccattctggcgtaggaaccaaagcttatacctttatctggggcatggtcggtgaaaaccaggtctttga

SEQ ID NO: 475864 - DNA, 75 bp, synthetic construct
  source 1..75: mol_type = other DNA
ccgggaaacagttcagctggaaggaccagggaatgaacctcaccatgaaggataaggactttaatccgctgattg

SEQ ID NO: 475865 - DNA, 75 bp, synthetic construct
  source 1..75: mol_type = other DNA
atcaacgtgcaattgcgtgaatatggtcgaacaacgcagcacagctgtacatttgtctttaaccctaagatagtc

SEQ ID NO: 475866 - DNA, 75 bp, synthetic construct
  source 1..75: mol_type = other DNA
gcgttgaaaaccatggcggctcactccgcatatggtttcactataacggcaaacgtgtcagagaaaacctccgta

SEQ ID NO: 475867 - DNA, 75 bp, synthetic construct
  source 1..75: mol_type = other DNA
gcgagagcgaattcatttccatttggccgtgcgttctatcgtcttcaagctgactaagggcgatgcgccagacac

SEQ ID NO: 475868 - DNA, 75 bp, synthetic construct
  source 1..75: mol_type = other DNA
atgaacaaaatatactcactcagagttaatgacagaaaagaactggttgctgtaccggaaacggtggggggcagg

SEQ ID NO: 475869 - DNA, 75 bp, synthetic construct
  source 1..75: mol_type = other DNA
gttgaccgtaatgagcactggcgtgattttcatactccccggctgaacaaactggtgacagaagttgccccggtg

SEQ ID NO: 475870 - DNA, 75 bp, synthetic construct
  source 1..75: mol_type = other DNA
gtgttgtggaccagatactgggggtggcaacactgatttctccgcagtatgtggcgggggttaagcataacggca

SEQ ID NO: 475871 - DNA, 75 bp, synthetic construct
  source 1..75: mol_type = other DNA
gttatgccggtgagaacgggaagacgaactggtttacggtgattcctgcaggggatgtgaataacacgataaagc

SEQ ID NO: 475872 - DNA, 75 bp, synthetic construct
  source 1..75: mol_type = other DNA
gggacggtgggaagtccggtcatttctgactggagtctggtgtcaaacccgggaaatctttaccagggtgttaat

SEQ ID NO: 475873 - DNA, 75 bp, synthetic construct
  source 1..75: mol_type = other DNA
agcggatatgtccggcagttttacacagcagggcgggggactgtatatccaggggcatccggttgttcatgccgt

SEQ ID NO: 475874 - DNA, 75 bp, synthetic construct
  source 1..75: mol_type = other DNA
tcctgttgaaatctggcagatactgctggcccggttgctggaccagcactacggcctcacgctgaatgacacacc

SEQ ID NO: 475875 - DNA, 75 bp, synthetic construct
  source 1..75: mol_type = other DNA
atctactttcgtaattttaaaggcgctgccgagacaattcgcgaaaataatgccctcggtgccgtttgtgccaga

SEQ ID NO: 475876 - DNA, 75 bp, synthetic construct
  source 1..75: mol_type = other DNA
cgccattctggcgattcctgaaagtcctttggctaaaaaatagtcttaacgtggtttattttccgaattccaaac

SEQ ID NO: 475877 - DNA, 75 bp, synthetic construct
  source 1..75: mol_type = other DNA
gtggaaaggtttgatgccattattataggcgctggtgcggcaggtatgttctgttctgcgctggcaggtcaggca

SEQ ID NO: 475878 - DNA, 75 bp, synthetic construct
  source 1..75: mol_type = other DNA
ctggcacgagaaaacgttaggacaactcttctgcgatgactccgcgcagcagattgtcgacatgctggtggatga

SEQ ID NO: 475879 - DNA, 75 bp, synthetic construct
  source 1..75: mol_type = other DNA
ctcacccggttactggaccagtattacagccttacgctgaatgacacaccgttcgtggatgaacgcgtgattgag

SEQ ID NO: 475880 - DNA, 75 bp, synthetic construct
  source 1..75: mol_type = other DNA
acaagtcgatcaaagaccgactggtgccgatcatcgccgacgaagcacgtactttcggtatggaaggtctgttcc

SEQ ID NO: 475881 - DNA, 75 bp, synthetic construct
  source 1..75: mol_type = other DNA
cacaagatcaactggataacttccgtcaggaagttcacggtaatggcctctcttcctacccgcacccgaaactga

SEQ ID NO: 475882 - DNA, 75 bp, synthetic construct
  source 1..75: mol_type = other DNA
agaacgtttactactacatcactacgctgaacgaaaactaccatatgccggcaatgccggaaggtgctgaggaag

SEQ ID NO: 475883 - DNA, 75 bp, synthetic construct
  source 1..75: mol_type = other DNA
gaaactacctaaaaacaattgtaacatcttatctgctatcagatttaggaatcaataacattattattgaaaaat

SEQ ID NO: 475884 - DNA, 75 bp, synthetic construct
  source 1..75: mol_type = other DNA
taaaatcatctaatgatttaggaatagaagaccatatatcaaagtgctgggatatttccgggttattttcaattc

SEQ ID NO: 475885 - DNA, 75 bp, synthetic construct
  source 1..75: mol_type = other DNA
cgttttacccggctataatgttaggccattggaaatgagtggtgcaataggcatagaacaattaaaaaaattgcc

SEQ ID NO: 475886 - DNA, 75 bp, synthetic construct
  source 1..75: mol_type = other DNA
gcgttgcagtaccttcagtgatcaccgctgaaaacggcacggtgttccgtgaaaatttactcttcacgcatcgtg

SEQ ID NO: 475887 - DNA, 75 bp, synthetic construct
  source 1..75: mol_type = other DNA
atgacgttgaattctcttgcgaagatgccgggcgtacaccgattgcagatctggcacgggtagtagaggcggcga

SEQ ID NO: 475888 - DNA, 75 bp, synthetic construct
  source 1..75: mol_type = other DNA
gaaggtgcaatgaatgggatcggcgagcgtgccggtaactgttcgctggaagaagtgatcatggcgatcaaagtt

SEQ ID NO: 475889 - DNA, 75 bp, synthetic construct
  source 1..75: mol_type = other DNA
tgcgtggaaaaagatattgacgtggcagccgaatccctgaaagtcgccgaagccttccgtattcatacctttatt

SEQ ID NO: 475890 - DNA, 75 bp, synthetic construct
  source 1..75: mol_type = other DNA
tataatttagacaacctgtacgacgcgttcctgaaactggcagataagaaaggtcaggtgtttgattacgacctg

SEQ ID NO: 475891 - DNA, 75 bp, synthetic construct
  source 1..75: mol_type = other DNA
tgatgacccaggcgctgaaagtgctggatgccgtgcgcaaccgctttgcgatgcgcatcaccaccagccattacg

SEQ ID NO: 475892 - DNA, 75 bp, synthetic construct
  source 1..75: mol_type = other DNA
tctggattacttcagcgtgcagtctggttctaacgatattgccactgccgccgtcaaactggcctgtggcgaaga

SEQ ID NO: 475893 - DNA, 75 bp, synthetic construct
  source 1..75: mol_type = other DNA
aacaaaccccgtatatttccgtagtggatattctgcgagcaaggcgctctaccggcttgctaaaaaataacgtga

SEQ ID NO: 475894 - DNA, 75 bp, synthetic construct
  source 1..75: mol_type = other DNA
cgcgggcggcgaagccctgtctgtcgcctgttgcagtctggcaaatgctacttacacgcctgctggaaaaacact

SEQ ID NO: 475895 - DNA, 75 bp, synthetic construct
  source 1..75: mol_type = other DNA
actaggtcagttaacaactaactatcctggtattgcagtacgagttgaaccagagagtgatgtttcacttacgga

SEQ ID NO: 475896 - DNA, 75 bp, synthetic construct
  source 1..75: mol_type = other DNA
cccttgagcgtatgggtgttgacgtgatggaagtcggtttccccgtctcttcgccgggtgattttgaatcagtgc

SEQ ID NO: 475897 - DNA, 75 bp, synthetic construct
  source 1..75: mol_type = other DNA
ataccacattgcgcgacggtgaacaggcgttacaggcaagcttgagtgtgaaagaaaaactgcaaattgcgctgg

SEQ ID NO: 475898 - DNA, 75 bp, synthetic construct
  source 1..75: mol_type = other DNA
ctcactgccagagacaacccgcttacgaccgggcatgagtcaaaatgtccgtttttgtctgagaagggaacatgc

SEQ ID NO: 475899 - DNA, 75 bp, synthetic construct
  source 1..75: mol_type = other DNA
ggcagagatcctggcgaaagattacggtgtaggttctgacgtttatagtgtgacttccttcaccgaactggcgcg

SEQ ID NO: 475900 - DNA, 75 bp, synthetic construct
  source 1..75: mol_type = other DNA
tcagttgattccctgtttttcgctcgatgaattagtcattttaggaatcaacaaaagtgcattgccggagcaggc

SEQ ID NO: 475901 - DNA, 75 bp, synthetic construct
  source 1..75: mol_type = other DNA
aacactggatggcaaggaacaagcagatggggcagtgtataccgcttctactgacacttttgcctgcgtattcag

SEQ ID NO: 475902 - DNA, 75 bp, synthetic construct
  source 1..75: mol_type = other DNA
atgttcctgccgtccgataaccatttggcttactttcgtacattcccttgcgtagatgttccaaattgtacgagt

SEQ ID NO: 475903 - DNA, 75 bp, synthetic construct
  source 1..75: mol_type = other DNA
ttaccttaaggccgtactggatgagtatcagatacccgtcatggctcccgccaggattgcaaaggttgcgttgct

SEQ ID NO: 475904 - DNA, 75 bp, synthetic construct
  source 1..75: mol_type = other DNA
cgttttattactccttcttttttttccaatccgtttggacaaccagacctgaactctgtgacccctgacagttca

SEQ ID NO: 475905 - DNA, 75 bp, synthetic construct
  source 1..75: mol_type = other DNA
gtcggtattcgaggtttatttaatgttcactatcgtaataaaccagttccatttggtgcgacggtcagtgtaccc

SEQ ID NO: 475906 - DNA, 75 bp, synthetic construct
  source 1..75: mol_type = other DNA
ttgcccagcgttttccggtcaaaatcatggtcgataaacctgacccggaaatgttccgcatcggcgcttcggcag

SEQ ID NO: 475907 - DNA, 75 bp, synthetic construct
  source 1..75: mol_type = other DNA
ccttaatgccgtattgttgcaggcgcagtcagccgccagcggcgtcagcggcgtcgatgcgctggtcgcccaacg

SEQ ID NO: 475908 - DNA, 75 bp, synthetic construct
  source 1..75: mol_type = other DNA
gcccgcgccgccgctaaacaggccagcgatacattgcaccgtaccgagccattactgaaagaaggttttgtttct

SEQ ID NO: 475909 - DNA, 75 bp, synthetic construct
  source 1..75: mol_type = other DNA
tgccggaattctggcagttcccgaccgtatctatggggctgggtccgattggtgctatttaccaggctaagttcc

SEQ ID NO: 475910 - DNA, 75 bp, synthetic construct
  source 1..75: mol_type = other DNA
acgatacattacgccgtactgagccgctactgaaggaaggttttgtctctgcggaagatgtagaccgcgcgagaa

SEQ ID NO: 475911 - DNA, 75 bp, synthetic construct
  source 1..75: mol_type = other DNA
agcttccctcgccgcgctggataagcaaattatgctcactcagcgtagcgttaatgcccaacagttcggtgctga

SEQ ID NO: 475912 - DNA, 75 bp, synthetic construct
  source 1..75: mol_type = other DNA
aaaaaccagtaaaaatacccgacaagaaatctgcaatgatttacttcataaaaaacatgtcagtgaaaaagaaac

SEQ ID NO: 475913 - DNA, 75 bp, synthetic construct
  source 1..75: mol_type = other DNA
gccttggcctgaatctgggtgtatttggtgcaacatcgtttgatgttactcaggctaacagttcgcttgtggatg

SEQ ID NO: 475914 - DNA, 75 bp, synthetic construct
  source 1..75: mol_type = other DNA
acgggcgcgtgctggcggttatcggtatgctacatgataaagatattgccggaactctggcctggttgaaaagcg

SEQ ID NO: 475915 - DNA, 75 bp, synthetic construct
  source 1..75: mol_type = other DNA
agttcgtgtacaaggccaggaattgccggaatccgcgcataccgcctcttttgctgaaatagaggtcgcacgcgg

SEQ ID NO: 475916 - DNA, 75 bp, synthetic construct
  source 1..75: mol_type = other DNA
ccgcgacgttctggccggaaacatgccgcttatcgaagatgccggttacagcattgtgctgacggtacacgatga

SEQ ID NO: 475917 - DNA, 75 bp, synthetic construct
  source 1..75: mol_type = other DNA
tccagctgttctgcaagccacgtccgaagaacagcaaactgcgccgggccaccagcaaaacccacccggaagaat

SEQ ID NO: 475918 - DNA, 75 bp, synthetic construct
  source 1..75: mol_type = other DNA
atgaacctaaagctcaaaagatgcgaatattggatggcggcacaaaagcagatgaaacgggttgtaccgcttctt

SEQ ID NO: 475919 - DNA, 75 bp, synthetic construct
  source 1..75: mol_type = other DNA
gacattttcgcccgcgataacctcgactggcaaagccgcgagctggcaacggttggcgcattagcggccacacca

SEQ ID NO: 475920 - DNA, 75 bp, synthetic construct
  source 1..75: mol_type = other DNA
gcacgaaagaatcatggagattacaccgcagcaactggttgaattcactatacctgatgggcggtgcaccatcgt

SEQ ID NO: 475921 - DNA, 75 bp, synthetic construct
  source 1..75: mol_type = other DNA
gacctgtttgaacgcgcagagcagactcccggaataaaagctgactggcttgtcagaatgaaatttaataacaga

SEQ ID NO: 475922 - DNA, 75 bp, synthetic construct
  source 1..75: mol_type = other DNA
atacgatgcctgttgctgttcagccaggagcttttctgccatccgcgagccagtgtgacagctgatgaagcatgt

SEQ ID NO: 475923 - DNA, 75 bp, synthetic construct
  source 1..75: mol_type = other DNA
acagtcgcattgtctctggggttaccggttgtgaccgccattatctatcgtccggtacagcgctgtacattgatt

SEQ ID NO: 475924 - DNA, 75 bp, synthetic construct
  source 1..75: mol_type = other DNA
accatggtgatcggcggcgcgttaactcatccgctgatgattcaagcgtttgacgccagcatggctcccggcgcc

SEQ ID NO: 475925 - DNA, 75 bp, synthetic construct
  source 1..75: mol_type = other DNA
catctctactatcagagggcggatgcacgcgcgcggttgcgttttggcgcgacgtggcgtgtctctccgagcgat

SEQ ID NO: 475926 - DNA, 75 bp, synthetic construct
  source 1..75: mol_type = other DNA
tataatatgccttatatttggttttcttatttttacacccaatgactataaagagcttggaatatcttcattata

SEQ ID NO: 475927 - DNA, 75 bp, synthetic construct
  source 1..75: mol_type = other DNA
gatgattccattgacctgattgttaccgatccgccgtacttcaaggtgaaacccaacggctgggacaatcagtgg

SEQ ID NO: 475928 - DNA, 75 bp, synthetic construct
  source 1..75: mol_type = other DNA
tttttcccgtatgccgggcggtggatttagtgccggagccggtggcggcaatacttttgatggtgagtatcagcg

SEQ ID NO: 475929 - DNA, 75 bp, synthetic construct
  source 1..75: mol_type = other DNA
tcggtaagtacttacctgccgacgaaaacggattacgtaaacgcctcgacagttattttgacgtgctggaaaaag

SEQ ID NO: 475930 - DNA, 75 bp, synthetic construct
  source 1..75: mol_type = other DNA
ggatgagtgctggcggatggggctgaaaatcctgccaccagatataaactccggtctttaccatttccacgtcaa

SEQ ID NO: 475931 - DNA, 75 bp, synthetic construct
  source 1..75: mol_type = other DNA
gaccgccgtcatggattccgcacagggctgggtggactccattaaatcagcactgcgtcttgaccctgacgggat

SEQ ID NO: 475932 - DNA, 75 bp, synthetic construct
  source 1..75: mol_type = other DNA
ccggggttccacaggacgcacgtctctctgaacagtacctgaaactggctggcctgtttggcgcacgctactccc

SEQ ID NO: 475933 - DNA, 75 bp, synthetic construct
  source 1..75: mol_type = other DNA
acccttcatgctaacgacccgataaatattcttgagcgtctggaaatggagggcgttcaggcaaggatgattgca

SEQ ID NO: 475934 - DNA, 75 bp, synthetic construct
  source 1..75: mol_type = other DNA
ccataaatccggatactaacggcgatctctccacgcttgctcagcttctttctggctttagcggtacggcggttg

SEQ ID NO: 475935 - DNA, 75 bp, synthetic construct
  source 1..75: mol_type = other DNA
atccgccaatgaatataataagttaaaaaatgaagttagaatttttagagaactattaatttctaattatgattt

SEQ ID NO: 475936 - DNA, 75 bp, synthetic construct
  source 1..75: mol_type = other DNA
ctatgtgctcgacggcctgctgtaccacgagtccgacctgcggatcgaggagcactacacggggtctgacgctca

SEQ ID NO: 475937 - DNA, 75 bp, synthetic construct
  source 1..75: mol_type = other DNA
ggctttaagaatttcgtgctgatgcagcaaaaaatggcggcgggtgaaaaccctgcggcggagatgattaaaagt

SEQ ID NO: 475938 - DNA, 75 bp, synthetic construct
  source 1..75: mol_type = other DNA
accgagttgggcgacgtcaaagtggtgattcttggtcaggacccttaccacgggccaggtcaggcacatggtctg

SEQ ID NO: 475939 - DNA, 75 bp, synthetic construct
  source 1..75: mol_type = other DNA
acctacgctgcgaactgccgcatcacaccacgctgccgctgtttgaaaaactggtacagcgcgaaccggtaacgc

SEQ ID NO: 475940 - DNA, 75 bp, synthetic construct
  source 1..75: mol_type = other DNA
caccacgctgccgctgtttgaaaaactggtgcagcgcgagccggtgacgctggtgtcgctgatggaccactcgcc

SEQ ID NO: 475941 - DNA, 75 bp, synthetic construct
  source 1..75: mol_type = other DNA
cgatgtacttcagcgaacatggcttcaacatcaccatcaataccgtcaacctgatgtttatgattgcgggtctgt

SEQ ID NO: 475942 - DNA, 75 bp, synthetic construct
  source 1..75: mol_type = other DNA
attcccacgccagcctcggctgggagacgttcaccgataaagtcatcagcctgattaatcagcatcgcgaaggcg

SEQ ID NO: 475943 - DNA, 75 bp, synthetic construct
  source 1..75: mol_type = other DNA
tggtgtttttgttgtggggatcacatgcgcaaaagaaaggggcgattattgataaacaacgccatcacgtactga

SEQ ID NO: 475944 - DNA, 75 bp, synthetic construct
  source 1..75: mol_type = other DNA
gttgggtacgaaaagggctggaagccgggttaacattggggatagaaacggtctggagcaaaaagcgtatcctga

SEQ ID NO: 475945 - DNA, 75 bp, synthetic construct
  source 1..75: mol_type = other DNA
ggaagctgcattactggcagctgtattacctaatccacttcgtttcaaagtctccgcgccatcgggctacgtgcg

SEQ ID NO: 475946 - DNA, 75 bp, synthetic construct
  source 1..75: mol_type = other DNA
gcggttaatggttgtcctcgccgttttctggggcgggggcatcgcgttgtttagcgttgcgcctgttcccttctc

SEQ ID NO: 475947 - DNA, 75 bp, synthetic construct
  source 1..75: mol_type = other DNA
gccgcacgctggtcgcagccgaatcgcgaatccatcgccgccctgtgccgcgcgcgacaaattgcgctcgccagc

SEQ ID NO: 475948 - DNA, 75 bp, synthetic construct
  source 1..75: mol_type = other DNA
gactactaccccgccagcctgctcgatgcggcatttcgcgtcgccgatgacgagagcaaccgctttacgctgccg

SEQ ID NO: 475949 - DNA, 75 bp, synthetic construct
  source 1..75: mol_type = other DNA
atgattatcaataacgttaaactggtgttggaaaacgaggtggtacacggctcgctggagatgcaggacggcgaa

SEQ ID NO: 475950 - DNA, 75 bp, synthetic construct
  source 1..75: mol_type = other DNA
accgggcgaggcgtgttgacacgttataagctgggcagaattgatgggattattttgcatggtgaccttaaatta

SEQ ID NO: 475951 - DNA, 75 bp, synthetic construct
  source 1..75: mol_type = other DNA
atggaatttgaagaacgctatttccgggaagaactcgattacctgcgccagcttagcaagctgctggcaacggaa

SEQ ID NO: 475952 - DNA, 75 bp, synthetic construct
  source 1..75: mol_type = other DNA
gcaaaagcgatgagcgagctgctgggagaagcaccggtacaggatgccgcagaaatcgccgctcagaacaaacgt

SEQ ID NO: 475953 - DNA, 75 bp, synthetic construct
  source 1..75: mol_type = other DNA
atggctaaagagatcagcagtgaacttctgaacaccattcttacccgggtcggtggcccgggaaacatcgccagc

SEQ ID NO: 475954 - DNA, 75 bp, synthetic construct
  source 1..75: mol_type = other DNA
tggctgtccggcgttgcctgacggattgctggctgaatcctttaccctgcaactgcgtttttcgcgccctttacc

SEQ ID NO: 475955 - DNA, 75 bp, synthetic construct
  source 1..75: mol_type = other DNA
aaaaagatatgggacgccccgtttcgacgcaagctgcacgtcagtggcctgcctttgaaagcttcagtcatcaga

SEQ ID NO: 475956 - DNA, 75 bp, synthetic construct
  source 1..75: mol_type = other DNA
agaagccatcactctggacaatcggcgggcagactatccgctggtccccagccgtcactacccggaacattacga

SEQ ID NO: 475957 - DNA, 75 bp, synthetic construct
  source 1..75: mol_type = other DNA
cttccgtaaagtatggccagtactgacgtttgccttcaccagtcgctccagcgccgcgtctattccgctgaacgt

SEQ ID NO: 475958 - DNA, 75 bp, synthetic construct
  source 1..75: mol_type = other DNA
tcgtggtgttcgttgtactgctgtttgcgctggctcaaacccgccataaacagtggagtctggcgaaaaaagtgc

SEQ ID NO: 475959 - DNA, 75 bp, synthetic construct
  source 1..75: mol_type = other DNA
gataccagcaattctggaggtaaatatacccctcctgttattgaccccggttttaagcccgttggaggtacgggc

SEQ ID NO: 475960 - DNA, 75 bp, synthetic construct
  source 1..75: mol_type = other DNA
cctgaacagtaatccgttcggttgtgcggttttagccgggctgttcctgatcgccgtggtatttggcgtgcatca

SEQ ID NO: 475961 - DNA, 75 bp, synthetic construct
  source 1..75: mol_type = other DNA
agaaatcgccgcccagaacaaacgtcagttaaaagccaaacaaacctccggcgtgcaacaatttctcgccaaatt

SEQ ID NO: 475962 - DNA, 75 bp, synthetic construct
  source 1..75: mol_type = other DNA
gtctgggtgtacatgacagttcactggttgatcccaatatcaaaacgctggaaggcgtgaagggcgtcattttga

SEQ ID NO: 475963 - DNA, 75 bp, synthetic construct
  source 1..75: mol_type = other DNA
aggacttcctgatccaaagtgccagcaaagactgaactttgctattgattattcgaacaaatttaatgtacctgt

SEQ ID NO: 475964 - DNA, 75 bp, synthetic construct
  source 1..75: mol_type = other DNA
tactgagcgcagtaggcagtgatttttatggtcaatcgctgctaacgcaaaccaatcaatctggcgtttatgtcg

SEQ ID NO: 475965 - DNA, 75 bp, synthetic construct
  source 1..75: mol_type = other DNA
gaatacatccagctatttatcactgctcgataatacaggagaaatgcttgtcgcgataaatgatatgagtattag

SEQ ID NO: 475966 - DNA, 75 bp, synthetic construct
  source 1..75: mol_type = other DNA
ttgggaagaaatgacctgcttattcgcaccttccttagcaacgctattacagctgaatatctcgcacagcaccgt

SEQ ID NO: 475967 - DNA, 75 bp, synthetic construct
  source 1..75: mol_type = other DNA
tcaaggcagttgcaacgatacgaggtaattacagcgagtgtagatccttccgcatcagtttactcaatccagtta

SEQ ID NO: 475968 - DNA, 75 bp, synthetic construct
  source 1..75: mol_type = other DNA
cgagggtggataacgctcaggccattctggatgcgctcaggtcgctaaccaaaaaggatgtgttggtcggcatcc

SEQ ID NO: 475969 - DNA, 75 bp, synthetic construct
  source 1..75: mol_type = other DNA
gaacggttaaagcagatccatacactgaagccaaaccgtctggaagcggaaaccctgagcggtattgccctttcg

SEQ ID NO: 475970 - DNA, 75 bp, synthetic construct
  source 1..75: mol_type = other DNA
tttaagttacagagatatgcaatgacagagtggaaacgttccagaagaggtgaatatccttatgagaagattttt

SEQ ID NO: 475971 - DNA, 75 bp, synthetic construct
  source 1..75: mol_type = other DNA
ttatgcgtcagatagccatgctgttttcgctgggatatacaaggtggtttggtggcgaaattcctctaaaccctc

SEQ ID NO: 475972 - DNA, 75 bp, synthetic construct
  source 1..75: mol_type = other DNA
gcatctggtcatgtgcctttcgctggcggcagcagtagcgcgtttcgccactggcaagctgagcaactggctgat

SEQ ID NO: 475973 - DNA, 75 bp, synthetic construct
  source 1..75: mol_type = other DNA
acgagtactttaaacaaaaaatgaataattcaggggagttccatctgcaacaatatggtggaaatgggtactatg

SEQ ID NO: 475974 - DNA, 75 bp, synthetic construct
  source 1..75: mol_type = other DNA
ttattcactccgcgtggtggatgaatctgaccaacagtcaacctgcactccacaaccgtttacgactctttccgg

SEQ ID NO: 475975 - DNA, 75 bp, synthetic construct
  source 1..75: mol_type = other DNA
gttggatggttaggacgatttaaacaaagtgaaaccatcacagatgaagagcttttgttaatatcgaagtcaaaa

SEQ ID NO: 475976 - DNA, 75 bp, synthetic construct
  source 1..75: mol_type = other DNA
cacaaagtggcggatgtcggtaagtacaacgccgggcaaaagatgatgttctggtcaatcatgagcatgattttc

SEQ ID NO: 475977 - DNA, 75 bp, synthetic construct
  source 1..75: mol_type = other DNA
gtatcatcctgatccacgccatcctgatccatatgtatatggcattttgggtgaaagggtcgattaaagggatga

SEQ ID NO: 475978 - DNA, 75 bp, synthetic construct
  source 1..75: mol_type = other DNA
tgtcttcatgacataccgtactaccggtgtggcaacctatcgcaactacgatttcttcggcttaattgaaggtct

SEQ ID NO: 475979 - DNA, 75 bp, synthetic construct
  source 1..75: mol_type = other DNA
cgttgaaatcgcccataagcatggcgcagatctgtttatgtcaattcacgccgacggcttcaccaacccgaaagc

SEQ ID NO: 475980 - DNA, 75 bp, synthetic construct
  source 1..75: mol_type = other DNA
aacctcgtttatcaccaacccggaagaagagcggctgttaggcacggcggcatttcgccagaaaatcgccacagc

SEQ ID NO: 475981 - DNA, 75 bp, synthetic construct
  source 1..75: mol_type = other DNA
cgtgcgttcctgctccagtttctgcgaaaggaagtcacaagacaggcggatgtgaaccgactacaaccgctgatt

SEQ ID NO: 475982 - DNA, 75 bp, synthetic construct
  source 1..75: mol_type = other DNA
agaaaggctgtgaagccggcttggatgagaccgtcagtgaatggatggcaatggagatggctgatgaataccttg

SEQ ID NO: 475983 - DNA, 75 bp, synthetic construct
  source 1..75: mol_type = other DNA
ctggccggcatgtctgcttcgccgtttaccggatatcggtcagcggattgatgcagcggtctggcagaaaggctg

SEQ ID NO: 475984 - DNA, 75 bp, synthetic construct
  source 1..75: mol_type = other DNA
ggccgatcacgtctgtcgctattcccgggggtgggaatggctgatgtggctggttgaggaagcccggacactgcg

SEQ ID NO: 475985 - DNA, 75 bp, synthetic construct
  source 1..75: mol_type = other DNA
cggcaacaagacccgtctggcctatgctggtttaaaaattagtgaatttggctctctggactatggtcgtaacta

SEQ ID NO: 475986 - DNA, 75 bp, synthetic construct
  source 1..75: mol_type = other DNA
taacgcaattccagattctggaaagtgctgccgctgagaagaccggatccgaacgccaggcattgcagaaacggg

SEQ ID NO: 475987 - DNA, 75 bp, synthetic construct
  source 1..75: mol_type = other DNA
ttgattatttcgacaataaactcgacccggcatttggtgattacttttcaggtgactatctgacgccggacatgc

SEQ ID NO: 475988 - DNA, 75 bp, synthetic construct
  source 1..75: mol_type = other DNA
tgccggtgcttcggtatttgccctctctaaccgtggggcaagtagcgcaatggcgaaatacctgtctgaacgcga

SEQ ID NO: 475989 - DNA, 75 bp, synthetic construct
  source 1..75: mol_type = other DNA
gaacgatgtggtgaatcttttgacactatcatcagtgctaaccctgtttcgtatccaggaagtgcagaggcattg

SEQ ID NO: 475990 - DNA, 75 bp, synthetic construct
  source 1..75: mol_type = other DNA
cccaagctaagccgtcgcatcgtggagcaggccattaaagaaatggaagatgcaggctacgatttcaacaagaaa

SEQ ID NO: 475991 - DNA, 75 bp, synthetic construct
  source 1..75: mol_type = other DNA
tccagaaaaagcggcaaagttggtcagggttgttgggcaaagcatggagccaacactccatgatggtgatgtggt

SEQ ID NO: 475992 - DNA, 75 bp, synthetic construct
  source 1..75: mol_type = other DNA
tcaggaaaaccatcattgaccgtatcgctgatgattatgattttgtctttattgatactggccctcatcttgatc

SEQ ID NO: 475993 - DNA, 75 bp, synthetic construct
  source 1..75: mol_type = other DNA
ccaaagctgagccggcgtatcgtagaactggccatgaaagaaatggaagaagacggctatatatttaataaaaag

SEQ ID NO: 475994 - DNA, 75 bp, synthetic construct
  source 1..75: mol_type = other DNA
cgtttcgtcagaaaatcgccaatgctattgccgaaggcgtaatcagttatttccattggtttgacaatcagaaag

SEQ ID NO: 475995 - DNA, 75 bp, synthetic construct
  source 1..75: mol_type = other DNA
gccgcatttgtggtgttgaaatcgccgtcggttccttcagtgctggtggaaacttcgtttatcaccaacccggaa

SEQ ID NO: 475996 - DNA, 75 bp, synthetic construct
  source 1..75: mol_type = other DNA
aaaccgcgccgatgaagttgccggtaaaaaggcgactgacaaggatcacctattgcagcaagtgctgtttgatct

SEQ ID NO: 475997 - DNA, 75 bp, synthetic construct
  source 1..75: mol_type = other DNA
attacttaaggccatgagtcaggatattgaagagcagcgcaaagagttcaatcagaccgagtattatcagacgtt

SEQ ID NO: 475998 - DNA, 75 bp, synthetic construct
  source 1..75: mol_type = other DNA
tgtgaaccggatacaaccgctgattaacgagctggagaagctacccagaccacctgtgaaaccgcaaaagaacga

SEQ ID NO: 475999 - DNA, 75 bp, synthetic construct
  source 1..75: mol_type = other DNA
ttgccgaagctgaggccagattgcagcgcctgaaggcgaagagccggagcctggacacggcgcaaaaagtcattg

SEQ ID NO: 476000 - DNA, 75 bp, synthetic construct
  source 1..75: mol_type = other DNA
ggtgcatcgtcatttaccggggctgattacccttaatgcttaccgcacgctcaccgttctgcacgaccccgccac

SEQ ID NO: 476001 - DNA, 75 bp, synthetic construct
  source 1..75: mol_type = other DNA
tgccgctatcgtctggtcgctgatggggaccggattgctggcagtggtagggatcaaactgccggggctggagtt

SEQ ID NO: 476002 - DNA, 75 bp, synthetic construct
  source 1..75: mol_type = other DNA
cgggcagatcccgattagcgccgcccgtttctggtcattagacttcctggttttttatgcttactacattgtttg

SEQ ID NO: 476003 - DNA, 75 bp, synthetic construct
  source 1..75: mol_type = other DNA
gaagcggcttatcgtaaagagttggtctacggtgaagatgatgcatcgcgcgcgacgccgccaacggtacgtgag

SEQ ID NO: 476004 - DNA, 75 bp, synthetic construct
  source 1..75: mol_type = other DNA
tctgcaatggctggcgtctcttgcacgggcgcagagcgatgccgatgcgttatctgttcatctggaacgcggcgc

SEQ ID NO: 476005 - DNA, 75 bp, synthetic construct
  source 1..75: mol_type = other DNA
tgaacgccttagagcagctgcaacaggactatatgcagcggctgaacgaatgggagagcgccttcgtggaattgc

SEQ ID NO: 476006 - DNA, 75 bp, synthetic construct
  source 1..75: mol_type = other DNA
tcgctgatggggaccggattgctggcagtggtagggatcaaactgccggggctggagtttaaaaaaccagcgtgt

SEQ ID NO: 476007 - DNA, 75 bp, synthetic construct
  source 1..75: mol_type = other DNA
ggagaacgcggcgctgaacgagcgcgtcacgcgcttgagtcagcaggtggcgaacttgagcaggcagttacagcg

SEQ ID NO: 476008 - DNA, 75 bp, synthetic construct
  source 1..75: mol_type = other DNA
ggcgcactcggtatcgcttaccttgcgatgtacttcagcgaacatggcttcaacatcaccatcaataccgtcaac

SEQ ID NO: 476009 - DNA, 75 bp, synthetic construct
  source 1..75: mol_type = other DNA
gacgcccgtacagggcgtcatgctggtcactttcttcggttcagtcgcttgtgtcatcaactggggatttggtct

SEQ ID NO: 476010 - DNA, 75 bp, synthetic construct
  source 1..75: mol_type = other DNA
ttatcaacgctatcatgacgttgatcgccttcctgccggtgctggtaacgctctccgcgcatgtgccggagctgc

SEQ ID NO: 476011 - DNA, 75 bp, synthetic construct
  source 1..75: mol_type = other DNA
cgattatcgggcatattccatatggtctggtgattgctgccatcgtctggtcgttgatgggaaccggattgctgg

SEQ ID NO: 476012 - DNA, 75 bp, synthetic construct
  source 1..75: mol_type = other DNA
cgcgacgccgcctacggtacgcgagctgtttagcgccgtgcggaaaaactatttccgcctctattttcactatat

SEQ ID NO: 476013 - DNA, 75 bp, synthetic construct
  source 1..75: mol_type = other DNA
tttacatcgatagtgataaaaacaatcgactcatccgttatgatttactgcgaaaagaaaataatgactttgttg

SEQ ID NO: 476014 - DNA, 75 bp, synthetic construct
  source 1..75: mol_type = other DNA
atcacagcgcgataccctcagaacggtgacagcacagctggcggtggccggcaaaccggatgagcagattacgct

SEQ ID NO: 476015 - DNA, 75 bp, synthetic construct
  source 1..75: mol_type = other DNA
actgacggttactactggtacatgaggggtaagatctgcgagagagtgagtgactaccgcactgccgcctttttt

SEQ ID NO: 476016 - DNA, 75 bp, synthetic construct
  source 1..75: mol_type = other DNA
cgtgtatcacaagctctggtgaattccggcgtaatgaatcaggctaatagctttatcggaaagttagttcagatc

SEQ ID NO: 476017 - DNA, 75 bp, synthetic construct
  source 1..75: mol_type = other DNA
caggtcgataacttttcgcaagcagcgttggtcagtcatattcagcacatcaataaactcaagaccacgttcgag

SEQ ID NO: 476018 - DNA, 75 bp, synthetic construct
  source 1..75: mol_type = other DNA
gtacaacatgcctgccctacgccgcttatcgcgttggttaatcgggataatggtgctggtgtgccggacgttggc

SEQ ID NO: 476019 - DNA, 75 bp, synthetic construct
  source 1..75: mol_type = other DNA
tcgtcccggcgtgtgccgtttcagttaaccgccattgaactgcggggcggtcgtcttcttgccgcactggcccct

SEQ ID NO: 476020 - DNA, 75 bp, synthetic construct
  source 1..75: mol_type = other DNA
tttatggtgctgatctacatgcaaaacatgttcgaaccactagattaaaaaaacaagcgtcggattggcttactt

SEQ ID NO: 476021 - DNA, 75 bp, synthetic construct
  source 1..75: mol_type = other DNA
tgttggacagcatgatcttctgttgctgaaaaatcaagcatcttcaatgatcacgggtatagacttagttgttgt

SEQ ID NO: 476022 - DNA, 75 bp, synthetic construct
  source 1..75: mol_type = other DNA
cgcgtcattacgatccgtttatcgtcaacaccgtggtcggctttattgggccggagtatctctacaacgaccgcc

SEQ ID NO: 476023 - DNA, 75 bp, synthetic construct
  source 1..75: mol_type = other DNA
agggtaaaatgttgggagcccgccaacgtaataaagttaatggtcagggctattataatgaaattggtattggcc

SEQ ID NO: 476024 - DNA, 75 bp, synthetic construct
  source 1..75: mol_type = other DNA
atctgctgctgcaatcgaatggtacagtgcgcgcgatgcagctatagaaaatgaaaagttgcggaaggaagttga

SEQ ID NO: 476025 - DNA, 75 bp, synthetic construct
  source 1..75: mol_type = other DNA
ctgaaatatttggggtcagcgtgcgaaccattcagaactggcaggatcagggaatgcctgtagcacgtggcggtg

SEQ ID NO: 476026 - DNA, 75 bp, synthetic construct
  source 1..75: mol_type = other DNA
gcagcctgatggaagtcggtgcctacaaccagccagagagctggatagcagagctgttggcggcaaaggacagaa

SEQ ID NO: 476027 - DNA, 75 bp, synthetic construct
  source 1..75: mol_type = other DNA
cgcgtcacggtccttatgtggtggtagatatcaaagcgaatgcttttgtacatcatatggtgaggaatattgtcg

SEQ ID NO: 476028 - DNA, 75 bp, synthetic construct
  source 1..75: mol_type = other DNA
gtgtgcaggagaagctggaaaaggcgctctcccaggtggcgaacgaacccatcaccgtcttctgcgccgggcgta

SEQ ID NO: 476029 - DNA, 75 bp, synthetic construct
  source 1..75: mol_type = other DNA
cggcgtcgtattctcgccggaaaccggcactactatggcgctgatcgaagcgaaagatgccgcgggcgcgatgtt

SEQ ID NO: 476030 - DNA, 75 bp, synthetic construct
  source 1..75: mol_type = other DNA
cgaacctaatgcgaacacggattacaccactggtaatttaactaatacggcttcttctggtgcatctaatgttca

SEQ ID NO: 476031 - DNA, 75 bp, synthetic construct
  source 1..75: mol_type = other DNA
atgcagaaaattcaatttatccttggaatactggcggctgcatcatcttctgctacgcttgcttatgacggtaca

SEQ ID NO: 476032 - DNA, 75 bp, synthetic construct
  source 1..75: mol_type = other DNA
gcagaacatcgttccccagcacatgacactgattcattttgcgatcttactggtttccaaaactacaataattaa

SEQ ID NO: 476033 - DNA, 75 bp, synthetic construct
  source 1..75: mol_type = other DNA
cgaagttgatccgtctctggttgaagcaatgaaagaacctgagatcgtcattgaagaaacaaaagaagaatctcc

SEQ ID NO: 476034 - DNA, 75 bp, synthetic construct
  source 1..75: mol_type = other DNA
tcagccatgacggcggcggggattattagcgcagcaatcctcgacccggcaaccggtcaactggtcggcgtcgac

SEQ ID NO: 476035 - DNA, 75 bp, synthetic construct
  source 1..75: mol_type = other DNA
tttataaaattgcgctgggcattgagtacgacggcagtaagtattacggctggcaacggcagaacgaagtccgca

SEQ ID NO: 476036 - DNA, 75 bp, synthetic construct
  source 1..75: mol_type = other DNA
cgactgcgtccggcggtactgagtaaaggtgttacccacttttacgaaccgctggatgccgaacggatgcatcgg

SEQ ID NO: 476037 - DNA, 75 bp, synthetic construct
  source 1..75: mol_type = other DNA
gctctcgcaggtagcgaacgaacccatcaccgtgttctgtgccgggcgaaccgacgcaggggtacacggcaccgg

SEQ ID NO: 476038 - DNA, 75 bp, synthetic construct
  source 1..75: mol_type = other DNA
ggtactgggtatcgttgaaaacatgagtgtgcatatttgcagtaactgcggtcatcacgagccaatttttggcac

SEQ ID NO: 476039 - DNA, 75 bp, synthetic construct
  source 1..75: mol_type = other DNA
ctgaaacagaccatggcgatgggctgctggagcgagcaggacctggtgggtgagcagggtcactggcaggcgaaa

SEQ ID NO: 476040 - DNA, 75 bp, synthetic construct
  source 1..75: mol_type = other DNA
ccgtgtgtggaagcggtactggaaaaaaacatcccttatatgtcaggtccacagtggctgcacgattttgtgctg

SEQ ID NO: 476041 - DNA, 75 bp, synthetic construct
  source 1..75: mol_type = other DNA
tagttttgacggaagccatgaaggaacaatatgaacaatatccgaaaatgaagatttttgtggtttctaattgct

SEQ ID NO: 476042 - DNA, 75 bp, synthetic construct
  source 1..75: mol_type = other DNA
gagaagagcttgattatctacgtcagcttggcaagctgctgtcacaggagaaaccttatctggcccgctttctgg

SEQ ID NO: 476043 - DNA, 75 bp, synthetic construct
  source 1..75: mol_type = other DNA
gacgacctgaaagcgatccagaaacagttccaccatctggtgcgtatcgttccggggcagggccgtattatctgg

SEQ ID NO: 476044 - DNA, 75 bp, synthetic construct
  source 1..75: mol_type = other DNA
gaagcgaatggcgtcacggtatatgacgatttcgcccatcacccgacggcgattctggcaacgctggcggcgctg

SEQ ID NO: 476045 - DNA, 75 bp, synthetic construct
  source 1..75: mol_type = other DNA
ttgtactcattggtcgcctgggtaaagacccggaagtccgttacatcccaaacgggggcgcagtggcaaacctgc

SEQ ID NO: 476046 - DNA, 75 bp, synthetic construct
  source 1..75: mol_type = other DNA
gcataccagaatgctatcgggattaatcaacatactgaataccaggctgaaaccggaaagttaattatagacaac

SEQ ID NO: 476047 - DNA, 75 bp, synthetic construct
  source 1..75: mol_type = other DNA
cgacgacgtttgagggcaccttttacggttgcacagggctggagagtgatgtgaatgacatcctcccggcggaag

SEQ ID NO: 476048 - DNA, 75 bp, synthetic construct
  source 1..75: mol_type = other DNA
aattacgccgactctaaccccgggaaaattaaattcacgcccggaggtgtcgggcgcaacatcgctcataatctt

SEQ ID NO: 476049 - DNA, 75 bp, synthetic construct
  source 1..75: mol_type = other DNA
gctcaaggacgtgcgcgagaagatggccgacttggcgcgcatggaaaccgtgctgtctgaactcgtgtgcgcctg

SEQ ID NO: 476050 - DNA, 75 bp, synthetic construct
  source 1..75: mol_type = other DNA
cggcccagcggctgggctttagcctggacgaaatcgccgagctactgcggctggaggatggcacccattgcgagg

SEQ ID NO: 476051 - DNA, 75 bp, synthetic construct
  source 1..75: mol_type = other DNA
gatttgatgccattaatcttggtgattgcaatatcacagacacaaacaaagccttagctgactcattcgaagaag

SEQ ID NO: 476052 - DNA, 75 bp, synthetic construct
  source 1..75: mol_type = other DNA
tgaatatcaaaggctggctcctcaacgaatccaattaccgcttggggcttatggccggatatcaggaaagccgtt

SEQ ID NO: 476053 - DNA, 75 bp, synthetic construct
  source 1..75: mol_type = other DNA
attacgtaacgcctaatgcaaaagtttatattgaaggcgcatggaatcgggttacgaataaaaaaggtgatactt

SEQ ID NO: 476054 - DNA, 75 bp, synthetic construct
  source 1..75: mol_type = other DNA
tgaatattaagggatggctcctgaatcaaccagactatcagttaggtcttatggctggttaccaggaaaatcgtt

SEQ ID NO: 476055 - DNA, 75 bp, synthetic construct
  source 1..75: mol_type = other DNA
tattcttatctggggacgttctggtctttcgtttgccggatttattgcccaaatggcaccgctggctggcgcaat

SEQ ID NO: 476056 - DNA, 75 bp, synthetic construct
  source 1..75: mol_type = other DNA
atgctgcgcctcggcaccggtgacccggcgcttgattatctgcgtctgtctaacctgccgccgacgccggaaatg

SEQ ID NO: 476057 - DNA, 75 bp, synthetic construct
  source 1..75: mol_type = other DNA
gtgatccagtgctttacgctgatgatggtggtggtttttgtggtctgtaatttgattgtcgatttgctcaacgcc

SEQ ID NO: 476058 - DNA, 75 bp, synthetic construct
  source 1..75: mol_type = other DNA
cgctgttcagtgagtatctgttgccctggtgcggctcatttcttggtaaagttgaggctcatgcgacttcatcat

SEQ ID NO: 476059 - DNA, 75 bp, synthetic construct
  source 1..75: mol_type = other DNA
gtgtgctggggtcactctattatcgccaaccgcaggaccctttgctggttcctctgtttaccctgattcgtgagg

SEQ ID NO: 476060 - DNA, 75 bp, synthetic construct
  source 1..75: mol_type = other DNA
tcacctgaacggcagcctgaagcagagagccactggcgaacgtctgcataagctgatctccacgcatcccaatgg

SEQ ID NO: 476061 - DNA, 75 bp, synthetic construct
  source 1..75: mol_type = other DNA
ctctgtactccagaaatttgaatatatctgatcacaccaaaaatggtgcaggcattgaaagctataactttatga

SEQ ID NO: 476062 - DNA, 75 bp, synthetic construct
  source 1..75: mol_type = other DNA
cactgtttagcgagtatctgttgccctggtgcggcgcatttctcggaaaagtagaggctcatgcgactacaccgt

SEQ ID NO: 476063 - DNA, 75 bp, synthetic construct
  source 1..75: mol_type = other DNA
gtgtgctgggttcgctctattaccgtcaaccgcaggatcctttactggttccgctgtttaccttaattcgtgaag

SEQ ID NO: 476064 - DNA, 75 bp, synthetic construct
  source 1..75: mol_type = other DNA
tccatttactgacccagcttccggcgttgcaaggcgtgttgagtaacgtgagtcatttatccgaacccggattat

SEQ ID NO: 476065 - DNA, 75 bp, synthetic construct
  source 1..75: mol_type = other DNA
gcgttgttcaccgcgggttgctgaacttgttgttggatatgcagcgtacctttgcggttggctcgcaagaccggc

SEQ ID NO: 476066 - DNA, 75 bp, synthetic construct
  source 1..75: mol_type = other DNA
cgcgtgtgcagttcatcgcgatgcgttttcgagcgcatggcatacaaccgggcgatcgtattggcgtgctgttgc

SEQ ID NO: 476067 - DNA, 75 bp, synthetic construct
  source 1..75: mol_type = other DNA
cagacaagatcgaagagggagtatccggtatttactacttcgacccgcgacagagctgtcttatgccggtagcac

SEQ ID NO: 476068 - DNA, 75 bp, synthetic construct
  source 1..75: mol_type = other DNA
ttaacgcttagcgatgaccatggaataggagttacttgccatgactggatttcagcgcagaaaactgaaatggaa

SEQ ID NO: 476069 - DNA, 75 bp, synthetic construct
  source 1..75: mol_type = other DNA
ctatagaattggtgcgtattcagcaggcacttgaggcgattatcgggcaggagattcccattgtcgatctgttcc

SEQ ID NO: 476070 - DNA, 75 bp, synthetic construct
  source 1..75: mol_type = other DNA
gcacgggctgttgatggcgggttggcgtggcgacccggaactatgtgtgctggcaggcggtgaagcgctgccaac

SEQ ID NO: 476071 - DNA, 75 bp, synthetic construct
  source 1..75: mol_type = other DNA
tgcaaggcgatcgtttttttcagttattaattatcgttggtattggattaagtttctttgttcccttcgcgcctg

SEQ ID NO: 476072 - DNA, 75 bp, synthetic construct
  source 1..75: mol_type = other DNA
aacacttcagactacagcaaaaatggtgcaggcatagaaaactataacttcatcactactgctggtcttaagtac

SEQ ID NO: 476073 - DNA, 75 bp, synthetic construct
  source 1..75: mol_type = other DNA
gcacaccatcattaccttaagtggcctgatgctgctgaccaaaggtgttgaattaagcggttattttgatgtgct

SEQ ID NO: 476074 - DNA, 75 bp, synthetic construct
  source 1..75: mol_type = other DNA
attcttctgctgaattatgtgccgccgtctttgttactggcatgggcggtcaacgtgggaggttttggtttgctg

SEQ ID NO: 476075 - DNA, 75 bp, synthetic construct
  source 1..75: mol_type = other DNA
gatcgctgctgacgccaataggtaatccgcaaaatattcttatctggggacgttctggcctttcgtttgttggtt

SEQ ID NO: 476076 - DNA, 75 bp, synthetic construct
  source 1..75: mol_type = other DNA
gttcgctactgacgccaattggcaacccgcaaaatattcttatctggggacgttctggtctttcgtttgccggat

SEQ ID NO: 476077 - DNA, 75 bp, synthetic construct
  source 1..75: mol_type = other DNA
tgatactgacattaacgtgatcaaatcatgcctgcgacaagaatacaatctcgtcgatgcgcaattaaataaagc

SEQ ID NO: 476078 - DNA, 75 bp, synthetic construct
  source 1..75: mol_type = other DNA
tggcatgtgtacatgtcgaagaagacagccggagggcggaatacggcacgctacctgggtcgttatctgaagaag

SEQ ID NO: 476079 - DNA, 75 bp, synthetic construct
  source 1..75: mol_type = other DNA
atgacagagcttctgtgcgcggtcggagtggtcccacagtcggggcgtatctactggcatgtgtacatgtcgaag

SEQ ID NO: 476080 - DNA, 75 bp, synthetic construct
  source 1..75: mol_type = other DNA
tttttatacaaaactgaacagaaaatattttcaagaaataaaatggattcagaatctccacaacaaagttgaata

SEQ ID NO: 476081 - DNA, 75 bp, synthetic construct
  source 1..75: mol_type = other DNA
ggcaactggcgtgtgagtgtatgcaccaggcgctgcacaacgccggcatagccccggagtatatcgctgccgttt

SEQ ID NO: 476082 - DNA, 75 bp, synthetic construct
  source 1..75: mol_type = other DNA
agtggcgaaagtgtgctatgcacaaatggtgaaacagttcctgagtcgtgatccgttcgaatgcgtgctgtgtgg

SEQ ID NO: 476083 - DNA, 75 bp, synthetic construct
  source 1..75: mol_type = other DNA
tttctgtcgaacgactggattattccaaaggtttgccggagcgttttctcgcctatgaagcgttactggaaaaat

SEQ ID NO: 476084 - DNA, 75 bp, synthetic construct
  source 1..75: mol_type = other DNA
caaaaatccatacggcctggggcaaagcgtttcgaactgaagtttaccccattggcattgaaccagatgagatag

SEQ ID NO: 476085 - DNA, 75 bp, synthetic construct
  source 1..75: mol_type = other DNA
tcccgtcatgcagaaatgctggacgttatcgtgaaaaacgatattaaccactggcaggagtgcttcattagcgac

SEQ ID NO: 476086 - DNA, 75 bp, synthetic construct
  source 1..75: mol_type = other DNA
ttttttaagatggtgaggtacttcaggttccttgccaaccgggtgtgtggagagaagctgccgcaggtgtataaa

SEQ ID NO: 476087 - DNA, 75 bp, synthetic construct
  source 1..75: mol_type = other DNA
ctgccgatagcagcctcccggctggcgcattacaacggaggggctagcctgagcttccgttacctggaccacaat

SEQ ID NO: 476088 - DNA, 75 bp, synthetic construct
  source 1..75: mol_type = other DNA
accggatcgctccgcctgatgagcacgctgccagtgctggcggccttgctgtcggtatattgggggcgctgaaaa

SEQ ID NO: 476089 - DNA, 75 bp, synthetic construct
  source 1..75: mol_type = other DNA
gctgaagcgttactatcagcaggtagatgagcaaggcaatgcgctgtggcgcggtattgcgttaacgcgcgatga

SEQ ID NO: 476090 - DNA, 75 bp, synthetic construct
  source 1..75: mol_type = other DNA
cacttcgctgattactttgcggaagatctcaagctgctcgccccgttagcaaaagatgggctggtggatgtggat

SEQ ID NO: 476091 - DNA, 75 bp, synthetic construct
  source 1..75: mol_type = other DNA
ctattccgggccacgatacacctcgtacccgaccgcgctggagttttcagaagacttcggcgaacaggcgttttt

SEQ ID NO: 476092 - DNA, 75 bp, synthetic construct
  source 1..75: mol_type = other DNA
atgaaaaaagtcacttttccccggctttccggctggctagtcgcttccgccgcgctgtttgtcgtgatcggctgg

SEQ ID NO: 476093 - DNA, 75 bp, synthetic construct
  source 1..75: mol_type = other DNA
gccgggcggaaagtcagccaattgcactggggcggcggtacgccaacatacctgaacaaagcgcaaatcagccgc

SEQ ID NO: 476094 - DNA, 75 bp, synthetic construct
  source 1..75: mol_type = other DNA
attggctttacctccaccaacattgacctgatttacggcctgccgaaacagacgccggagagtttcgcttttacc

SEQ ID NO: 476095 - DNA, 75 bp, synthetic construct
  source 1..75: mol_type = other DNA
gtggaactggttatgccatttgtctggcatagcgcgtttgaagagttaaaagagcaatgtagccctgacttactg

SEQ ID NO: 476096 - DNA, 75 bp, synthetic construct
  source 1..75: mol_type = other DNA
atcagcgtccaacttcgccggacggtacccatatggcaccgattatgtctcatggcctggcaaccaattcaattg

SEQ ID NO: 476097 - DNA, 75 bp, synthetic construct
  source 1..75: mol_type = other DNA
agtttgacaaggcaacagggaaaaccaaagcggcgctaaatctgccagcaatgactcaggaaaatgtgatatcag

SEQ ID NO: 476098 - DNA, 75 bp, synthetic construct
  source 1..75: mol_type = other DNA
ttctttcgcaatttgcgggagcggcaaacgagttaacgtcggcgttaattgttaacccctacgatcgtgacgaag

SEQ ID NO: 476099 - DNA, 75 bp, synthetic construct
  source 1..75: mol_type = other DNA
ccgcgcgcgggaaaaaggcttgctggtgatggggccggactgcggtacgtcgatgattgccggcacgccgctggc

SEQ ID NO: 476100 - DNA, 75 bp, synthetic construct
  source 1..75: mol_type = other DNA
tgctgcttgatgtcgtgattggcttcggtgcgaccgccgatcctgccgcctcgctggtaagcgcctggcaaaaag

SEQ ID NO: 476101 - DNA, 75 bp, synthetic construct
  source 1..75: mol_type = other DNA
ccgagaaagagggtgatccggacgtggagcgtctgatggaagcctttgcctttatgtccggtagcctgcgccaga

SEQ ID NO: 476102 - DNA, 75 bp, synthetic construct
  source 1..75: mol_type = other DNA
cagcaaatcgccacgctggaagatgcggggatcgcggtagtgagttcgctgccggaagccaccttgctggcggcg

SEQ ID NO: 476103 - DNA, 75 bp, synthetic construct
  source 1..75: mol_type = other DNA
caggcgctggatcgcaacctcaacgtgatgatgttctccgataacgtcacgctggaagatgaaatccaacttaaa

SEQ ID NO: 476104 - DNA, 75 bp, synthetic construct
  source 1..75: mol_type = other DNA
cgctgtttttaggttataccccgacggcgactcgtgacgagaatgtgtggtttgcctcctcgctggatgatgccg

SEQ ID NO: 476105 - DNA, 75 bp, synthetic construct
  source 1..75: mol_type = other DNA
gagaagtatcgcgaatattatcagggcaaatactccctcaccgatgcgcagatgcagcagtacgaagaagagcaa

SEQ ID NO: 476106 - DNA, 75 bp, synthetic construct
  source 1..75: mol_type = other DNA
tgtgggcacgcaaatggctcagaatatgatcgaccttcaccagataaaccaaatctgagcgaaccatttatccca

SEQ ID NO: 476107 - DNA, 75 bp, synthetic construct
  source 1..75: mol_type = other DNA
ctatgatatttttcagataaaatctgtttccagcaaacttccaacggtcagcaaaggggaaaagtatcgcctttg

SEQ ID NO: 476108 - DNA, 75 bp, synthetic construct
  source 1..75: mol_type = other DNA
tgatcaccgccgtggggatgcacattggcgaactgattggcgggacgatgattatcgaaaacatctttgcctggc

SEQ ID NO: 476109 - DNA, 75 bp, synthetic construct
  source 1..75: mol_type = other DNA
ttctgctgctgatcccgatggtgctcgccgcctcggtgatcatttttctgatgctgcgcctcggtaccggcgacc

SEQ ID NO: 476110 - DNA, 75 bp, synthetic construct
  source 1..75: mol_type = other DNA
aaacgccgtttcctgccgaacctgcactctcactgtttctgggttgagagcgagaagcgttttgtcaccctgcgc

SEQ ID NO: 476111 - DNA, 75 bp, synthetic construct
  source 1..75: mol_type = other DNA
ggcggtaatttattgaacgcatcagataaacttttttatctgatgcgttcattattatcgtattgctggtggttt

SEQ ID NO: 476112 - DNA, 75 bp, synthetic construct
  source 1..75: mol_type = other DNA
cgttttaaaggggttgctctggtcgacggtaaagtagtttgcgaagcaacgatgatgtgtgctcgtagccgggag

SEQ ID NO: 476113 - DNA, 75 bp, synthetic construct
  source 1..75: mol_type = other DNA
atcaaatgatcatggaagtcactttcgaaaaaacgcgccgcggcctgacccgttttaaaggggttgctctggtcg

SEQ ID NO: 476114 - DNA, 75 bp, synthetic construct
  source 1..75: mol_type = other DNA
atgcagaaataacgagcaaatggcatcattcctgcttttgtcagggagatctaccatgcttattggctatgtacg

SEQ ID NO: 476115 - DNA, 75 bp, synthetic construct
  source 1..75: mol_type = other DNA
agcgtttcgaacggaagtttacccgatcggcattgagccgaaagaaatagccaaacaggctgccgggccactgcc

SEQ ID NO: 476116 - DNA, 75 bp, synthetic construct
  source 1..75: mol_type = other DNA
atgagtcgtttagtcgtagtatctaaccggattgcaccaccagacgagcacgccgccagtgccggtggccttgcc

SEQ ID NO: 476117 - DNA, 75 bp, synthetic construct
  source 1..75: mol_type = other DNA
aattatatcaataggataatcgattaccttgctggcgctggatctcctgtatcacagacatacctcagtttatgg

SEQ ID NO: 476118 - DNA, 75 bp, synthetic construct
  source 1..75: mol_type = other DNA
gccatttttagactcggtgggactggtacttgatgataataaatattatcttttttcgcggagggcgaatgataa

SEQ ID NO: 476119 - DNA, 75 bp, synthetic construct
  source 1..75: mol_type = other DNA
ctggccgtttactcagcgttcggaaatattaatacagccggtgctgccggactgtggctgaatgttagcttcgga

SEQ ID NO: 476120 - DNA, 75 bp, synthetic construct
  source 1..75: mol_type = other DNA
cagggcgggttatttttgccgattttaacccatcgaaacgaccgtggtcgatggcttcagatgactctaacaaca

SEQ ID NO: 476121 - DNA, 75 bp, synthetic construct
  source 1..75: mol_type = other DNA
gcgcgcaggtcagcggtcagttgaaaactctgtcggtggcgattggcgataaagtaaaaaaaagaccagctttta

SEQ ID NO: 476122 - DNA, 75 bp, synthetic construct
  source 1..75: mol_type = other DNA
agccgttatcactctcaccggcacgctgacagaaagcctggaaaccgtacagaacacactgacactcaggagcga

SEQ ID NO: 476123 - DNA, 75 bp, synthetic construct
  source 1..75: mol_type = other DNA
ggcagcctgagttcacagataaaacactctccaggaaacccggggcggttcacaccgtctgggccagcgttattg

SEQ ID NO: 476124 - DNA, 75 bp, synthetic construct
  source 1..75: mol_type = other DNA
atgaacgataacgtcacgctacgggtaaatggccgggagtggaatggctggacatcggtgcgcatcggtgccggt

SEQ ID NO: 476125 - DNA, 75 bp, synthetic construct
  source 1..75: mol_type = other DNA
attgggttccttcgatttgttcaggaataaatgtattaagacaggtgtaatgtacgaaatattaaatgttttgag

SEQ ID NO: 476126 - DNA, 75 bp, synthetic construct
  source 1..75: mol_type = other DNA
tttgatctttttagaatatctttaataacaagtaatgaattcacaaaattaattgatgttatacgtgaatattat

SEQ ID NO: 476127 - DNA, 75 bp, synthetic construct
  source 1..75: mol_type = other DNA
gcaactttgacaaaagaagatcgttttaccaaaaaacaaatcgccgaggcaaaaatcctcgataacaacggaacc

SEQ ID NO: 476128 - DNA, 75 bp, synthetic construct
  source 1..75: mol_type = other DNA
cgtcaccgtcgctgcttggcggcgtggtgattatcggcggcaccattattggcgcagggatgttttctctgcctg

SEQ ID NO: 476129 - DNA, 75 bp, synthetic construct
  source 1..75: mol_type = other DNA
tgttctcaaactttgcggtagcgagttcgttccttggcgtaacgctgggtttgtttgactatctggcagatctgt

SEQ ID NO: 476130 - DNA, 75 bp, synthetic construct
  source 1..75: mol_type = other DNA
ttttttgtttctatacattagggtataaacatataaatatagctaaggaactagaaattacagaaatagcctcta

SEQ ID NO: 476131 - DNA, 75 bp, synthetic construct
  source 1..75: mol_type = other DNA
gttcaggcgctggaggactctttggatgagaccttcaatgatggagacttccgcactgctgtaatggagaatgtc

SEQ ID NO: 476132 - DNA, 75 bp, synthetic construct
  source 1..75: mol_type = other DNA
gcactgacatctcacgcactgactatgttcagatgaccaatggtcaagacgcccaagttctcaacgtaggcttta

SEQ ID NO: 476133 - DNA, 75 bp, synthetic construct
  source 1..75: mol_type = other DNA
tggtattctgtgttcagcgattacccatgtgtccgactttgcgatgatgggcggctggactggcgctggtctgat

SEQ ID NO: 476134 - DNA, 75 bp, synthetic construct
  source 1..75: mol_type = other DNA
ggtcgctttgccaaattcgaaacccctgaacacggtattcgtgcattagggcggaacctgatgtcgtatcagcgg

SEQ ID NO: 476135 - DNA, 75 bp, synthetic construct
  source 1..75: mol_type = other DNA
tcctaacccacctggtgaggctgattttattgcagcttatggagtcagagaaggaaacctgcgatataccgagtt

SEQ ID NO: 476136 - DNA, 75 bp, synthetic construct
  source 1..75: mol_type = other DNA
gagtttaaagagaaggttgctgatgcagcattgtcccagtggtcggcaaacaatgcgatctcatttatccaaagt

SEQ ID NO: 476137 - DNA, 75 bp, synthetic construct
  source 1..75: mol_type = other DNA
catttccattgcctttgtgctctatatcctgacttacgcctatatttctgccagcggttcgattctgcatcacac

SEQ ID NO: 476138 - DNA, 75 bp, synthetic construct
  source 1..75: mol_type = other DNA
agtacggttaatgctgctttctatgttgtgcgatatggtcaacaacaagccacagcaggataaaccttccgataa

SEQ ID NO: 476139 - DNA, 75 bp, synthetic construct
  source 1..75: mol_type = other DNA
gcgtgtttagtcattctccctttaaagtacggttaatgctgctctctatgttatgcgatatggtcaacaacaaac

SEQ ID NO: 476140 - DNA, 75 bp, synthetic construct
  source 1..75: mol_type = other DNA
aatccgctcaggctgggggccggagcacagggacaatatggatatgaaatcacaaaaggcctttcagccgttaat

SEQ ID NO: 476141 - DNA, 75 bp, synthetic construct
  source 1..75: mol_type = other DNA
ggcattactgcaagcgctgcgggagatgccgaatgtcgagactcatctggtgatgtcgaagtgggcgaaaaccac

SEQ ID NO: 476142 - DNA, 75 bp, synthetic construct
  source 1..75: mol_type = other DNA
ttgccaagaagagaagatgttcagatggcacaattaggaaggaattgcagactgccatggggtttgttgacggct

SEQ ID NO: 476143 - DNA, 75 bp, synthetic construct
  source 1..75: mol_type = other DNA
ttttcgagctaatgtggcacgcgagtttttccgctacccactcgacaaggccgttgcattactaattcagctgcc

SEQ ID NO: 476144 - DNA, 75 bp, synthetic construct
  source 1..75: mol_type = other DNA
gcaagccgatgattatgctgattctggtatttggcgttggcaacgcactggtccatatcttatcgagctttaatt

SEQ ID NO: 476145 - DNA, 75 bp, synthetic construct
  source 1..75: mol_type = other DNA
gcgttgctgacctttgccccgcctgttgtgggtggcctgctgtttcctaacggattcctgtacgccattggttat

SEQ ID NO: 476146 - DNA, 75 bp, synthetic construct
  source 1..75: mol_type = other DNA
cgaaagtcattactttcttcctcaccttcggcagcctgctggggcatgtgcagccaacgaccttgttcaacgtcg

SEQ ID NO: 476147 - DNA, 75 bp, synthetic construct
  source 1..75: mol_type = other DNA
gtgccttataaacatggcaataaagatttgaatgccggaaccttcagtgcttcggtcacaatgagcatcagttac

SEQ ID NO: 476148 - DNA, 75 bp, synthetic construct
  source 1..75: mol_type = other DNA
tcgcagagaagggcggcaatatagatgtgctggtacaggcattaagtggcgtgctgaacagccgtagtctggatc

SEQ ID NO: 476149 - DNA, 75 bp, synthetic construct
  source 1..75: mol_type = other DNA
tggcggatctgtttggctttgatgattcggcattggggcgctttaaaacggcactgttgacctttgcgccacctg

SEQ ID NO: 476150 - DNA, 75 bp, synthetic construct
  source 1..75: mol_type = other DNA
aaggttaagaccggggcgttcgacactgaggcggctgctagttatccgttggtccacgtcctgaagtttgaagac

SEQ ID NO: 476151 - DNA, 75 bp, synthetic construct
  source 1..75: mol_type = other DNA
atcagatcggggctttcttccgcgatgcaccagtttctcagcagactgcatatctcgacaccattcggcagagca

SEQ ID NO: 476152 - DNA, 75 bp, synthetic construct
  source 1..75: mol_type = other DNA
aaagcctattgatatgaccaaccagaacaatttcggccagacgatttcccttcgggcttctcaggctgtagatct

SEQ ID NO: 476153 - DNA, 75 bp, synthetic construct
  source 1..75: mol_type = other DNA
caaccagcacaaagcgctataccggcaatgcggcattcgatgcagcatctccggaggcccaggcgacattccttc

SEQ ID NO: 476154 - DNA, 75 bp, synthetic construct
  source 1..75: mol_type = other DNA
cggcgggctattttcttcggttgcgttggtaacgatgattttggccgtctcattattgaacgcctgcgtcatgaa

SEQ ID NO: 476155 - DNA, 75 bp, synthetic construct
  source 1..75: mol_type = other DNA
ccaacaggataaatataaaaaggataaacataaaaaaaatcgaactcagtacaaaacatcgggttcaaaaatcga

SEQ ID NO: 476156 - DNA, 75 bp, synthetic construct
  source 1..75: mol_type = other DNA
tgctgcagctcgcaaaggtacaggtgatgtgaaaggcataccaatgccgaaagataacgatcttcgtcttgagtt

SEQ ID NO: 476157 - DNA, 75 bp, synthetic construct
  source 1..75: mol_type = other DNA
tgtcggacctgctgggttcggcggaaaggtcagggactggaacgaccggacacatgccgagacgtggcgtgcatc

SEQ ID NO: 476158 - DNA, 75 bp, synthetic construct
  source 1..75: mol_type = other DNA
ggataaataatattcctcgcgcttctgaatattgccgcgtacctgtcccaaaaaagccagatgcggcgctatgcc

SEQ ID NO: 476159 - DNA, 75 bp, synthetic construct
  source 1..75: mol_type = other DNA
accaacacttcaggtgaggcacaagtcgttctgaccagcaataaagtcggtacatatgcggtgacagcatcgatc

SEQ ID NO: 476160 - DNA, 75 bp, synthetic construct
  source 1..75: mol_type = other DNA
gcaggtttatttatttttgcgcaatatctcgtctcctggctgcatttgccgctgcctgccaacctggtggggatg

SEQ ID NO: 476161 - DNA, 75 bp, synthetic construct
  source 1..75: mol_type = other DNA
aaggtcagggactggaacgaccggacacatgccgagacgtggcgggcatcatgggctgaccatgcaaacagggca

SEQ ID NO: 476162 - DNA, 75 bp, synthetic construct
  source 1..75: mol_type = other DNA
attatctccctggaaaccgggacgcaaagcacttatcaaacgcatgagtttttttatggggcgtgttataaacag

SEQ ID NO: 476163 - DNA, 75 bp, synthetic construct
  source 1..75: mol_type = other DNA
catcgggccatcttctttggatgtgttggtaatgatgattttggccgactcattatagagcgtctccgtcatgaa

SEQ ID NO: 476164 - DNA, 75 bp, synthetic construct
  source 1..75: mol_type = other DNA
atggaagaggaatggtcacgcctgcagcaggcgctaaccacctgttttagtcaaggggtcacctttaaggacggt

SEQ ID NO: 476165 - DNA, 75 bp, synthetic construct
  source 1..75: mol_type = other DNA
ctcgatatcatggtcgctacctctgcctttggggtagggatgaataaaaaggaaatccgcagcatcattcatgct

SEQ ID NO: 476166 - DNA, 75 bp, synthetic construct
  source 1..75: mol_type = other DNA
gcatacatcggtgcttatgctgcaaaagaggtattaaaagagcgcgtttatacagctgtaaaaaataagaaccta

SEQ ID NO: 476167 - DNA, 75 bp, synthetic construct
  source 1..75: mol_type = other DNA
cgaacaattcaaagattaaacacaccgacgaactccgcgcccacctgctggatagagaaggtaacaagattccgt

SEQ ID NO: 476168 - DNA, 75 bp, synthetic construct
  source 1..75: mol_type = other DNA
gttaatcgcagcaatggtgtatccgcaggggatttttccggtactggctgatgcgccgcgcgataaatgcactct

SEQ ID NO: 476169 - DNA, 75 bp, synthetic construct
  source 1..75: mol_type = other DNA
acctgttattgtttgtctgcttccttgtgatgtctctgctggttgatgcgccgcgcgataaatgcactctatctt

SEQ ID NO: 476170 - DNA, 75 bp, synthetic construct
  source 1..75: mol_type = other DNA
ggtacgaaaatcgaactgttacgtacgtaatacttttacacagagtgtaaaaaatacgtacgtagatcagggaga

SEQ ID NO: 476171 - DNA, 75 bp, synthetic construct
  source 1..75: mol_type = other DNA
ttgctggaatcccgactttccccggttgataaactgacctggatgatgatccgccttcatgctcagcaaaatgag

SEQ ID NO: 476172 - DNA, 75 bp, synthetic construct
  source 1..75: mol_type = other DNA
ctgctaaaacagtgtaaccatctgcatattgtgggctcatcgttgttctcatttcgcatgatcgatgtcatgcgt

SEQ ID NO: 476173 - DNA, 75 bp, synthetic construct
  source 1..75: mol_type = other DNA
gaacgccttttcccaaaggtcgagtttttggatttgtccattgccacgactgacgcttatgcagatataggcgcg

SEQ ID NO: 476174 - DNA, 75 bp, synthetic construct
  source 1..75: mol_type = other DNA
gttgggtaataccatcatctatcttaacgatgttcttctctgggaaagcaacggcgaatactacagatgggacgg

SEQ ID NO: 476175 - DNA, 75 bp, synthetic construct
  source 1..75: mol_type = other DNA
tagaaatcttcgtgatccatctcttccccaagatgctgctacaaaaaaatatactgatgatctttatgcaaaatt

SEQ ID NO: 476176 - DNA, 75 bp, synthetic construct
  source 1..75: mol_type = other DNA
cggggatttacaggcagtgaaaccatcgtcagggatgcggttgccaaatggcgtaaaggctggaacccaccggtt

SEQ ID NO: 476177 - DNA, 75 bp, synthetic construct
  source 1..75: mol_type = other DNA
gccggatacagcatctaccctgctcaggacatacgctatggcttgtattttccgtccgccactggtactgccgta

SEQ ID NO: 476178 - DNA, 75 bp, synthetic construct
  source 1..75: mol_type = other DNA
tgggtcgtgaaccgcactcggtgattggttcatcgtgcattggcgcgtcggtcattggtggcatttgtaataact

SEQ ID NO: 476179 - DNA, 75 bp, synthetic construct
  source 1..75: mol_type = other DNA
ccatggagggagtggttaaaagagcaacgagaaagtgggaattataacgccagccggataatggcgggaaatggt

SEQ ID NO: 476180 - DNA, 75 bp, synthetic construct
  source 1..75: mol_type = other DNA
agttgtcgtcggcgccggatacagcatctaccctgcttagggcacacgctatggcttgtattttccgtccgccac

SEQ ID NO: 476181 - DNA, 75 bp, synthetic construct
  source 1..75: mol_type = other DNA
agacacttctacaattaccttacggatggcgatgcagtcgacaaattattaactctgacggtataaccctccatc

SEQ ID NO: 476182 - DNA, 75 bp, synthetic construct
  source 1..75: mol_type = other DNA
aacgatccgaccaacagtatgaatccggggatcggtaaaaccagtaagcggaaaaactggcaggaagtggagtaa

SEQ ID NO: 476183 - DNA, 75 bp, synthetic construct
  source 1..75: mol_type = other DNA
gactacagcttcgccaaattgtttgctgaagaaggacttaacgtgatgttggttggcgattcgctgggcatgact

SEQ ID NO: 476184 - DNA, 75 bp, synthetic construct
  source 1..75: mol_type = other DNA
tcgccgaaacgggcgacatccgcgcagcggtgcgtcagtatatggctgaagtcgagtccggcgtttatccgggcg

SEQ ID NO: 476185 - DNA, 75 bp, synthetic construct
  source 1..75: mol_type = other DNA
ggcgcgataaatatgaacatcatctgctgttaaaaatggcgggcgatggcattggcgaagcgaaatcgtggctgg

SEQ ID NO: 476186 - DNA, 75 bp, synthetic construct
  source 1..75: mol_type = other DNA
ataaagcctttttgaatgaacttgctcgtctggtgggttcttcacacctgctcaccgatcccgcaaaaacggccc

SEQ ID NO: 476187 - DNA, 75 bp, synthetic construct
  source 1..75: mol_type = other DNA
aaaggcgtggatgtgcatgcgttaaaagaacagatgctggaactgctacagcagcgcggcgcgcaataccctgcc

SEQ ID NO: 476188 - DNA, 75 bp, synthetic construct
  source 1..75: mol_type = other DNA
aatagtcaatcttgatactcaccgtcccctcgtcctgcttcccggccgtgatcagcgtacgctggcgacctggtt

SEQ ID NO: 476189 - DNA, 75 bp, synthetic construct
  source 1..75: mol_type = other DNA
cagggccgcaaccaggtggatatcaatgagatccagaccgcagttgaaaaccagctgatgtcgggtccatacaaa

SEQ ID NO: 476190 - DNA, 75 bp, synthetic construct
  source 1..75: mol_type = other DNA
aacatcccggacgccgaaggctacgctaactctcgtaccatcaaagagtgctatgacgccttccagtcgctggag

SEQ ID NO: 476191 - DNA, 75 bp, synthetic construct
  source 1..75: mol_type = other DNA
gctgaaaatagcgcagcaactggtactcgagttctaccgtattctgaaaacccaaaataaatcacagcttagcag

SEQ ID NO: 476192 - DNA, 75 bp, synthetic construct
  source 1..75: mol_type = other DNA
gtttctgaaatcttcaaaaacggtcgtgcatcgatttcgctgggttatatcgggatccacgaaacgattaatgcg

SEQ ID NO: 476193 - DNA, 75 bp, synthetic construct
  source 1..75: mol_type = other DNA
agtacgtctgaatgctgatgacgacgtttctgaaatcttcaaaaacggtcgtgcatcgatttcgctgggttatat

SEQ ID NO: 476194 - DNA, 75 bp, synthetic construct
  source 1..75: mol_type = other DNA
gccgcagcttcctcggcgtatgggaaaacgaaaacggcgagcagatccacgatggtcgcaacaacctcggcgtga

SEQ ID NO: 476195 - DNA, 75 bp, synthetic construct
  source 1..75: mol_type = other DNA
tagtaaggggtaataatgttattaccttgtgcctggcagataaacacccgcacactgcagcatgcgggttatctg

SEQ ID NO: 476196 - DNA, 75 bp, synthetic construct
  source 1..75: mol_type = other DNA
agccggaataaacaacaggtcataattcatcgtgagaatgagatgtttgctgtgcactggcagataaaagaaaaa

SEQ ID NO: 476197 - DNA, 75 bp, synthetic construct
  source 1..75: mol_type = other DNA
gccaggggggctacaggcagtgaaaccatcgtcagggatgctgttgccaaatggcataaaggctggatcccaccg

SEQ ID NO: 476198 - DNA, 75 bp, synthetic construct
  source 1..75: mol_type = other DNA
ctctgtgccaacacgattaattgacaacatctggtacgattcgcccgcagccatcactgactgcgggcgaaagtg

SEQ ID NO: 476199 - DNA, 75 bp, synthetic construct
  source 1..75: mol_type = other DNA
ggattatcagataattagctggaataaacagcaggtcatcattcatcgtgagaatgagatgtttgctgtgcactg

SEQ ID NO: 476200 - DNA, 75 bp, synthetic construct
  source 1..75: mol_type = other DNA
gacgtaaacgtaaaacagagcatttagccggacggattgccgccgttcatgctttacgagagtatggtttgaaag

SEQ ID NO: 476201 - DNA, 75 bp, synthetic construct
  source 1..75: mol_type = other DNA
tcgccgaaacgggcgacatccgcgcggctgtgcggcagtatatggctgaagtggagtccggcgtttatccgggcg

SEQ ID NO: 476202 - DNA, 75 bp, synthetic construct
  source 1..75: mol_type = other DNA
ggttgcgtaaatataagccagaagaatatgagctactaattgcccactttgttattgggatctcattacgcacca

SEQ ID NO: 476203 - DNA, 75 bp, synthetic construct
  source 1..75: mol_type = other DNA
ttttacctcatggcaaaaagtcccggattcagtgtgatgatgacgaaggcattatgatagacagttgtgtggctc

SEQ ID NO: 476204 - DNA, 75 bp, synthetic construct
  source 1..75: mol_type = other DNA
acagccgaagccacactgcctaacggcaacaacgatacgaagatagtcaatattgcgcccgatgccagcaacgcg

SEQ ID NO: 476205 - DNA, 75 bp, synthetic construct
  source 1..75: mol_type = other DNA
ggaggaatagtggtcagccattcccttaaagttgcaggggataaaatagatgaggccattgcaagttatatcaaa

SEQ ID NO: 476206 - DNA, 75 bp, synthetic construct
  source 1..75: mol_type = other DNA
ggtgatggtttcggtttctccactacttatgagtatgaaggattcggcgtgggtgcaacctatgctaaatcagat

SEQ ID NO: 476207 - DNA, 75 bp, synthetic construct
  source 1..75: mol_type = other DNA
tgtctctttcttttataaaggcagtgactttgctatttcctatcgccattgtacctatcctgatatcaaagatag

SEQ ID NO: 476208 - DNA, 75 bp, synthetic construct
  source 1..75: mol_type = other DNA
tttcgtaccgacggcatgatcgttattccgtgcagtatgaaaacgctcgccggtatccgtgccggttacgccgat

SEQ ID NO: 476209 - DNA, 75 bp, synthetic construct
  source 1..75: mol_type = other DNA
gctcgcgatgttgccgccctcgcagacttcagccataacccggcggatcaggctgcgactatctcttccggctcc

SEQ ID NO: 476210 - DNA, 75 bp, synthetic construct
  source 1..75: mol_type = other DNA
ggcctcgaacatccccatgccaggcgctggcaaggattgccgcaggcccggaatttttctcaggagaatgaataa

SEQ ID NO: 476211 - DNA, 75 bp, synthetic construct
  source 1..75: mol_type = other DNA
gtggtagggatttcattgcgagccattgctaagaagagaaagtgttcggatgggactatcaggaaagagttgcaa

SEQ ID NO: 476212 - DNA, 75 bp, synthetic construct
  source 1..75: mol_type = other DNA
gattcagtgtgatgatgacgaaggcatcatgatagacagttgtgtggctcggttgagaaggtataaaccagagga

SEQ ID NO: 476213 - DNA, 75 bp, synthetic construct
  source 1..75: mol_type = other DNA
tggcacaattaggaaggaattgcagactgccatggggtttatcagcggtgtaataataactataaaccccattat

SEQ ID NO: 476214 - DNA, 75 bp, synthetic construct
  source 1..75: mol_type = other DNA
acagaaagcggtactgcaattgagacaaaatcaagtctaatgtctcttacgatcataaataatagttttaatgtg

SEQ ID NO: 476215 - DNA, 75 bp, synthetic construct
  source 1..75: mol_type = other DNA
atgagaggaaaactgatatccgccattcatgtggcaaagcgcgagcttgccctggatgatgagacttatacattc

SEQ ID NO: 476216 - DNA, 75 bp, synthetic construct
  source 1..75: mol_type = other DNA
gctggcagccctggatatgtcggagcgtgcagtgatgagttatgagcgcgtttgcaggctgtatgaaaaatcatt

SEQ ID NO: 476217 - DNA, 75 bp, synthetic construct
  source 1..75: mol_type = other DNA
tcaaacgctggcaccgccgcaaaatgctggcagccctggatatgtcggagcgtgcagtgatgagttatgagcgcg

SEQ ID NO: 476218 - DNA, 75 bp, synthetic construct
  source 1..75: mol_type = other DNA
ggctaagaacacaactcctttgcgccaaccagtcagaccacaaggacgcccgactcgtggcaaagagaaaattaa

SEQ ID NO: 476219 - DNA, 75 bp, synthetic construct
  source 1..75: mol_type = other DNA
tggcggggaaacagcccttaaccgctgggtgaaatcgcagacggccgctcagaacggcggcgaaggtgtggctaa

SEQ ID NO: 476220 - DNA, 75 bp, synthetic construct
  source 1..75: mol_type = other DNA
taatacatgtcgcaaaacgcgatctacagcttgaccatgagacctacacatccgtactactggcagccaccggca

SEQ ID NO: 476221 - DNA, 75 bp, synthetic construct
  source 1..75: mol_type = other DNA
ggtatccctgcgtatttcaccaattacgttgagccagaactgatccacgtgctggtgacgccgatgaaagccgct

SEQ ID NO: 476222 - DNA, 75 bp, synthetic construct
  source 1..75: mol_type = other DNA
gtgtcagggtactgatactatcgacggaggttgtgaatacctgggcacatccaaagacatgcaatacggtctggt

SEQ ID NO: 476223 - DNA, 75 bp, synthetic construct
  source 1..75: mol_type = other DNA
taaaaatgtatcgtatgatgcaaataaaatatttaaatctttactaaggtttcatgttttagaagttttgctacc

SEQ ID NO: 476224 - DNA, 75 bp, synthetic construct
  source 1..75: mol_type = other DNA
atgagaggaaaactgatatccgccattcatgtggcaaagcgcgagcttgccctggatgatgagacctacacattc

SEQ ID NO: 476225 - DNA, 75 bp, synthetic construct
  source 1..75: mol_type = other DNA
cgcagtaaccaggctgatcgcatgcagacgttgatttatcagcgcgcgcagtttacaaaagtgattggcatggat

SEQ ID NO: 476226 - DNA, 75 bp, synthetic construct
  source 1..75: mol_type = other DNA
gcagccttcaccgagaagatgcgtgcgcacgcagttgtggttgaagaatccagctggaagcagaagaagtcaggc

SEQ ID NO: 476227 - DNA, 75 bp, synthetic construct
  source 1..75: mol_type = other DNA
tgccgggtgttgcagggattggcccgaaaagcgccacgcagttgctggtcgagtttcagagtctggaaggaattt

SEQ ID NO: 476228 - DNA, 75 bp, synthetic construct
  source 1..75: mol_type = other DNA
ctttgagcaacgcggcgtcccgtgctggtcagccagcggcaacgaagccgatgacttagccgccacgctggcggt

SEQ ID NO: 476229 - DNA, 75 bp, synthetic construct
  source 1..75: mol_type = other DNA
ttgcgaggcctcttcctgttttctcatccagccgtagcctgttccggtatcgaatgttacccttatcgcctgatc

SEQ ID NO: 476230 - DNA, 75 bp, synthetic construct
  source 1..75: mol_type = other DNA
ggaacatgcgctctcgatggccacggaactgacaaccaacgttaatgagcaaaatgatcaagcagtaggattcta

SEQ ID NO: 476231 - DNA, 75 bp, synthetic construct
  source 1..75: mol_type = other DNA
ggaacatgcgctctcgatggcaccggaactgacaaccaatgttaatgagcaaaataagcaggctgttgggttcta

SEQ ID NO: 476232 - DNA, 75 bp, synthetic construct
  source 1..75: mol_type = other DNA
ggcatgaggaaggggaggaactcgttgcgatttggtgtcgttctgtcgatgccactcacgattttttatcagcag

SEQ ID NO: 476233 - DNA, 75 bp, synthetic construct
  source 1..75: mol_type = other DNA
gaccattcaggacattttaagtcgccattatcagttgcataaaacctacgataatctggcggataaaatcgcgat

SEQ ID NO: 476234 - DNA, 75 bp, synthetic construct
  source 1..75: mol_type = other DNA
taatctcggtaaatttaaccagggcgattacttcgcggcggtggaggacaaaaaccactccgagaacgtttcccg

SEQ ID NO: 476235 - DNA, 75 bp, synthetic construct
  source 1..75: mol_type = other DNA
attacatggcgaagcacattattcatttgatcaatgacgtagcgaaagtgatcaacaacgatccgcagattggcg

SEQ ID NO: 476236 - DNA, 75 bp, synthetic construct
  source 1..75: mol_type = other DNA
ttgttgacaccactggcgctaagaaaaatcattctttctggaaagtcagcgatccttccgattttcttgttggtg

SEQ ID NO: 476237 - DNA, 75 bp, synthetic construct
  source 1..75: mol_type = other DNA
ggcggccgatctgtctgaacagatttcgctggcggggacggaagcttccggcaccagtaacatgaagtttgcgct

SEQ ID NO: 476238 - DNA, 75 bp, synthetic construct
  source 1..75: mol_type = other DNA
gtcgtgttcatcccgaactacagcgttagcctggcgcagttgatcattccggcggccgatctgtctgaacagatt

SEQ ID NO: 476239 - DNA, 75 bp, synthetic construct
  source 1..75: mol_type = other DNA
ccggttgggtttatgttgttaagtgggcagcatatggatgcgctgtttatcgatcctgatgtgcgcggctgcggc

SEQ ID NO: 476240 - DNA, 75 bp, synthetic construct
  source 1..75: mol_type = other DNA
atgcctgtgaatggtatttttgatgtatttgatatgttatcaatttatattatttacaaactaattgtttcaaat

SEQ ID NO: 476241 - DNA, 75 bp, synthetic construct
  source 1..75: mol_type = other DNA
gatcagggcagtacaagccaacgaatggaagctcccgtcaatcagaagattcaactgtaggcatcttttatgaag

SEQ ID NO: 476242 - DNA, 75 bp, synthetic construct
  source 1..75: mol_type = other DNA
accgtctgcaagaagagcagttcagaacaattgccaaatctgagatgagaggcactggaggcttaaagcgagttc

SEQ ID NO: 476243 - DNA, 75 bp, synthetic construct
  source 1..75: mol_type = other DNA
tcgataggttatataccggaagatggttggtatgcaggcacggaagcgcgttatatgggcgatattatggcagat

SEQ ID NO: 476244 - DNA, 75 bp, synthetic construct
  source 1..75: mol_type = other DNA
cgggagattttcgcgtaaaagcgtcctggacctggcttgatgcgacctatcgcagcaatgtttgcaatgaacagg

SEQ ID NO: 476245 - DNA, 75 bp, synthetic construct
  source 1..75: mol_type = other DNA
accgccttgttacaaagtccggcctggcaggccagagagacggcattacggcaggcttatcagggcgtggttcag

SEQ ID NO: 476246 - DNA, 75 bp, synthetic construct
  source 1..75: mol_type = other DNA
tttgtaatgcgctaatgccgattatccctgtacgcgcttgtgacgatgtctccttttcgtcaacaacgctatatg

SEQ ID NO: 476247 - DNA, 75 bp, synthetic construct
  source 1..75: mol_type = other DNA
ctgatgaggcgctggtccttgacagcgaaggggggttacggaatgctgtgcagctaatttgttctggcggaaggg

SEQ ID NO: 476248 - DNA, 75 bp, synthetic construct
  source 1..75: mol_type = other DNA
aggaatcgctggcagtaagcgatcgggcaacgcagtttggtgatggttgttttaccaccgccagagttatcgacg

SEQ ID NO: 476249 - DNA, 75 bp, synthetic construct
  source 1..75: mol_type = other DNA
gctgtcgatccgtatcgatcctgaacaccatacctgtcaggagtcaaaaggcattgtgcaggaaagattacagga

SEQ ID NO: 476250 - DNA, 75 bp, synthetic construct
  source 1..75: mol_type = other DNA
gcccatagcagtgtttattgctcgattcttgaagctcttgaacaaggagcgagtggcgttaagagtggctgttga

SEQ ID NO: 476251 - DNA, 75 bp, synthetic construct
  source 1..75: mol_type = other DNA
gcgttgcaggcagatgagatggttatttgtaatgcgttaatgccagtgatgcccgtacgtgcctgtggcgatgtc

SEQ ID NO: 476252 - DNA, 75 bp, synthetic construct
  source 1..75: mol_type = other DNA
gccgactttgcgaaaatcttcccgggtcgtttcaccaacgtcaccaacggtgtgacgccgcgtcgctggctggcg

SEQ ID NO: 476253 - DNA, 75 bp, synthetic construct
  source 1..75: mol_type = other DNA
tacggcgagcacgcgacaggcccggcgcaggatgaagagttcgtgctggcgcatgccgacaacgtcgaagccgca

SEQ ID NO: 476254 - DNA, 75 bp, synthetic construct
  source 1..75: mol_type = other DNA
cctgcaagagagccgacgccggggcgataccgatttgcctgaactgagcgtcgcccagattgaacagcagcttaa

SEQ ID NO: 476255 - DNA, 75 bp, synthetic construct
  source 1..75: mol_type = other DNA
atgtacgttgccgtgaaagggggcgaaaaggcgatcgatgccgcccacgccctgcaagagagccgacgccggggc

SEQ ID NO: 476256 - DNA, 75 bp, synthetic construct
  source 1..75: mol_type = other DNA
agtgggatctggaaggtgtgcagttccatccagaaagtattctcagcgaacaaggacatcaactgctggctaatt

SEQ ID NO: 476257 - DNA, 75 bp, synthetic construct
  source 1..75: mol_type = other DNA
tggccgcgctggcgctgaaacaggccagcggcgataacgtcgaagcgattttcctgttgcgcgcctaccgtacca

SEQ ID NO: 476258 - DNA, 75 bp, synthetic construct
  source 1..75: mol_type = other DNA
gagcacgcgacaggcccggcgcaggatgaagagttcgtgctggcacatgccgacaacgtcgaagccgcaggcttt

SEQ ID NO: 476259 - DNA, 75 bp, synthetic construct
  source 1..75: mol_type = other DNA
agaaaggtggatttactcaggctgagatcgcaaagaaattgagtatcagtttatcgactgtgaagcggcactgga

SEQ ID NO: 476260 - DNA, 75 bp, synthetic construct
  source 1..75: mol_type = other DNA
gcccgaatcccttcatgattaacaaagctatcgcgccaaaagttgatggcgagatcaaggtttcatttatgaata

SEQ ID NO: 476261 - DNA, 75 bp, synthetic construct
  source 1..75: mol_type = other DNA
tctctgggaagcaatgacagggacagctacaaatggactcgcagctataggtggtgctttttcatcggacactaa

SEQ ID NO: 476262 - DNA, 75 bp, synthetic construct
  source 1..75: mol_type = other DNA
cgcgcacttacctacacgttgaccctgaaatcttcaagattttatttgctgaagccaagaaaaggcaaattatgg

SEQ ID NO: 476263 - DNA, 75 bp, synthetic construct
  source 1..75: mol_type = other DNA
aggtagatattaaagaggttgtttcagagcaacgtttactcagacaattgattcatcatgaaatgaaccggcagg

SEQ ID NO: 476264 - DNA, 75 bp, synthetic construct
  source 1..75: mol_type = other DNA
agcaggtagatattaaagaggttgtttcagagcaacgtttactcagacaattgattcatcatgaaatgaaccggc

SEQ ID NO: 476265 - DNA, 75 bp, synthetic construct
  source 1..75: mol_type = other DNA
gttccgttttgtgtactcatcctggcgggcgattcttacgggactttagccgccgtgggcagcttgctaaaaatg

SEQ ID NO: 476266 - DNA, 75 bp, synthetic construct
  source 1..75: mol_type = other DNA
cgaccctgggcttggtaacggtggtctgggccgtctggctgcctgttttctcgattcgctggcaactttaggtct

SEQ ID NO: 476267 - DNA, 75 bp, synthetic construct
  source 1..75: mol_type = other DNA
gtgggtaaagcgacagcttatcttgcggtacaactgaaaaaaacaccggaagcggctgctgagtttgccgcaaag

SEQ ID NO: 476268 - DNA, 75 bp, synthetic construct
  source 1..75: mol_type = other DNA
tggtcgccgctggggatggtgatcaataactggggaccggttgttaagtggtttcaggatatgtgggacaagctg

SEQ ID NO: 476269 - DNA, 75 bp, synthetic construct
  source 1..75: mol_type = other DNA
gactacttcgcggcagtggaagataaaaaccactccgagaacgtatctcgcgtactgtatccggacgactccacc

SEQ ID NO: 476270 - DNA, 75 bp, synthetic construct
  source 1..75: mol_type = other DNA
ctgtcgattcccgagctgatgcgtttgctgatcgatgaacacaaatttagctgggacgatgcgtttgaagtgtgc

SEQ ID NO: 476271 - DNA, 75 bp, synthetic construct
  source 1..75: mol_type = other DNA
taacctcggtaaattcaaccagggcgattacttcgcggcagtggaagataaaaaccactccgagaacgtttctcg

SEQ ID NO: 476272 - DNA, 75 bp, synthetic construct
  source 1..75: mol_type = other DNA
taaaaccacgctcttccatacctttaaagtcaataccagtatgttgacctcgcgtccggaaattcgtttctacgc

SEQ ID NO: 476273 - DNA, 75 bp, synthetic construct
  source 1..75: mol_type = other DNA
aggtgaaaatcctgatgtttatcctatatcaatgctttctgacggtgaaaaaagtgcactaattattgccagtga

SEQ ID NO: 476274 - DNA, 75 bp, synthetic construct
  source 1..75: mol_type = other DNA
gacgccgattggcatgattgcgacggcgattgccctggctgcgggattaattatcactaactgggatgttgtcgg

SEQ ID NO: 476275 - DNA, 75 bp, synthetic construct
  source 1..75: mol_type = other DNA
cattcttcactaaaaccagctctgttctgaagatggtgaacaaggacggtcttcaggctgcacagagccttgccc

SEQ ID NO: 476276 - DNA, 75 bp, synthetic construct
  source 1..75: mol_type = other DNA
gtaggagtacaaggtgaatatgctgcatggttaatggagcagaataaggacgaagatattttagtatctcgatgc

SEQ ID NO: 476277 - DNA, 75 bp, synthetic construct
  source 1..75: mol_type = other DNA
gttaggagctgctttctcaaaggtgactttttctcagcatgagaacattatattctgtggctatctatcagacga

SEQ ID NO: 476278 - DNA, 75 bp, synthetic construct
  source 1..75: mol_type = other DNA
cgcagtgaaatgggtgtgacttgctcaggccgccagaagcaacgcggaaaatcaattccagcttattacgattga

SEQ ID NO: 476279 - DNA, 75 bp, synthetic construct
  source 1..75: mol_type = other DNA
ggattttctgcttgagcaaggttttgtgcataaggtggaatccaccaacagttatgtgctctgtcatctgttcga

SEQ ID NO: 476280 - DNA, 75 bp, synthetic construct
  source 1..75: mol_type = other DNA
aaggtattacagttgtcactctaagcgacggtgaaacgtataaccgccaatctcttgatgattctctcgcattaa

SEQ ID NO: 476281 - DNA, 75 bp, synthetic construct
  source 1..75: mol_type = other DNA
ttcagtatctgagccttaaaagtaatggtgacaatatttctgttaccacgcttaaagctgatatcacatcactag

SEQ ID NO: 476282 - DNA, 75 bp, synthetic construct
  source 1..75: mol_type = other DNA
tcagcttttgtctgcgggagaaaaccgtatttcccgggtggcagagttgtgtggctatgccagtgcttcttattt

SEQ ID NO: 476283 - DNA, 75 bp, synthetic construct
  source 1..75: mol_type = other DNA
cgactggtataactccagctacatcatcgcctgggggtctaacgtaccgcagacacgtacgccggacgcccactt

SEQ ID NO: 476284 - DNA, 75 bp, synthetic construct
  source 1..75: mol_type = other DNA
atgatatttggacatatcacacaacctaatccgtgccgtttgcccgctgccattgaaaaggcgctcgattttcta

SEQ ID NO: 476285 - DNA, 75 bp, synthetic construct
  source 1..75: mol_type = other DNA
cgcgctaccgatttcaacgccctggagccgggtgttgtcgaaatcgacggcaagaatatttatgcgcaaattatc

SEQ ID NO: 476286 - DNA, 75 bp, synthetic construct
  source 1..75: mol_type = other DNA
cgtaaggctgagcagattaaaaatgaaagaaataaagaaaggtttgaagcagagtttgaatggaaaaaaccagtg

SEQ ID NO: 476287 - DNA, 75 bp, synthetic construct
  source 1..75: mol_type = other DNA
gttaaagggaaaagattaacagcagaggagcgaaggaaagtattatgtgtagcaagagagcaaatacgttctcaa

SEQ ID NO: 476288 - DNA, 75 bp, synthetic construct
  source 1..75: mol_type = other DNA
ctaaaaccatcgccattacccctgactactctgaagtggccaaattgtgcgaccagtggctggcaccgaaacaag

SEQ ID NO: 476289 - DNA, 75 bp, synthetic construct
  source 1..75: mol_type = other DNA
cttgacacattagcccaaagaataacaaataaccgtgttgaacttgaatctaagaagaaggacttgagacaagct

SEQ ID NO: 476290 - DNA, 75 bp, synthetic construct
  source 1..75: mol_type = other DNA
gaggatattttctttccaatcaggattttttattaaatcctgtggtggcaacgacacttgcaaaagctgcatgct

SEQ ID NO: 476291 - DNA, 75 bp, synthetic construct
  source 1..75: mol_type = other DNA
tatcagccttcacggcttacgccgtagttttggcactcttgctgaatgggttgaagtgccaacaggtattgttgc

SEQ ID NO: 476292 - DNA, 75 bp, synthetic construct
  source 1..75: mol_type = other DNA
aaaatatcagggaataatccatggcgatattgcacaagatcataacgtgagaaaagtggttccagtatcagcgag

SEQ ID NO: 476293 - DNA, 75 bp, synthetic construct
  source 1..75: mol_type = other DNA
ggtcaccttcagtaccaacccggcagatactcaacttagtcagagcacgagcaatactaacgacagtggtgttgc

SEQ ID NO: 476294 - DNA, 75 bp, synthetic construct
  source 1..75: mol_type = other DNA
cagctattcgttcactttctgccaaatttcctgagttgctcaagaaaagcacagacggtaaaggaaatgatatca

SEQ ID NO: 476295 - DNA, 75 bp, synthetic construct
  source 1..75: mol_type = other DNA
ctacaggttaaagctgaatgtacgagagaaggcatatagtaaatttatttactacaagttttttcatggaaatgc

SEQ ID NO: 476296 - DNA, 75 bp, synthetic construct
  source 1..75: mol_type = other DNA
tatagcccaattgctgcatgggcgctttgtgaggtcgccccctgtaatacgggatgtgcgtatcaggagatacta

SEQ ID NO: 476297 - DNA, 75 bp, synthetic construct
  source 1..75: mol_type = other DNA
acctcaccacatagaaacgattcatagaatctttgacgaaaaactttcaggaaaatcactacatgcaatcgccag

SEQ ID NO: 476298 - DNA, 75 bp, synthetic construct
  source 1..75: mol_type = other DNA
tcaaagagataatttttgactacgacaagcaagaaataactatacgcttattgaatggtaaatctttctctggta

SEQ ID NO: 476299 - DNA, 75 bp, synthetic construct
  source 1..75: mol_type = other DNA
acgtcaggataaaattcgtctgattgtccaggcgattatcggcgtctggctggtcaccgcgctggctttgcatct

SEQ ID NO: 476300 - DNA, 75 bp, synthetic construct
  source 1..75: mol_type = other DNA
tactaacggttgtcgggttactctgtgttgagtttacgcttgcccctgtaaccgaatggtttatgcaaatgggct

SEQ ID NO: 476301 - DNA, 75 bp, synthetic construct
  source 1..75: mol_type = other DNA
cgaactgtcaggaaaggagagaaaccagctcatagattttatcgataaacgggaaagcatcattgtatttaaggt

SEQ ID NO: 476302 - DNA, 75 bp, synthetic construct
  source 1..75: mol_type = other DNA
gtatatcgatattcagtttctggcgtggggtgaagagaaaatcggcattgctattgatacgggaaataataaagt

SEQ ID NO: 476303 - DNA, 75 bp, synthetic construct
  source 1..75: mol_type = other DNA
accggtcagatacgcggcattaccagaatatcagacagatttaacgaaggctctgaaaggggcggtgaataaact

SEQ ID NO: 476304 - DNA, 75 bp, synthetic construct
  source 1..75: mol_type = other DNA
atgccggtctggctggatgccatccctgaaaaggccccaaagatagcgcgccccgatacccgccgctggttgttg

SEQ ID NO: 476305 - DNA, 75 bp, synthetic construct
  source 1..75: mol_type = other DNA
aatctggaaaccaggtattggactggcgctgcagggcgtcggttttgctgtgattggcacgtttatctcccttta

SEQ ID NO: 476306 - DNA, 75 bp, synthetic construct
  source 1..75: mol_type = other DNA
aaaatccgtattgccggagatgatgggctgcctgcgtgggcagatattcctccacccacgcatgaagaacttatt

SEQ ID NO: 476307 - DNA, 75 bp, synthetic construct
  source 1..75: mol_type = other DNA
cgatcgcttttccaatggtgttgacatggtaattacccttaattactatagttacatggtaattaccattgtact

SEQ ID NO: 476308 - DNA, 75 bp, synthetic construct
  source 1..75: mol_type = other DNA
gctggctggtgctggattgtgataacgatctgtatcccctgattgaagagcagcttaaagccgacctctcactca

SEQ ID NO: 476309 - DNA, 75 bp, synthetic construct
  source 1..75: mol_type = other DNA
ttggcgttggaggccgccgcgcgcgccgatcgtgagcgactggaggggcgcgcaaggggcgtgttgcacggatta

SEQ ID NO: 476310 - DNA, 75 bp, synthetic construct
  source 1..75: mol_type = other DNA
gtgccagttaatagttctgatattatcgctttcgcaaaagattgtgaaaaacgtaacgacgaaattggttacaga

SEQ ID NO: 476311 - DNA, 75 bp, synthetic construct
  source 1..75: mol_type = other DNA
gcgatgatattgaggggttgttgaatgtagttaaacctgttctaccagccgaggccagaccgagagtagtcattc

SEQ ID NO: 476312 - DNA, 75 bp, synthetic construct
  source 1..75: mol_type = other DNA
tcgttttttggttgggggtgcttgtaagtctcccgaccttctatcgctttgtttatgctggttccgcgttgttgt

SEQ ID NO: 476313 - DNA, 75 bp, synthetic construct
  source 1..75: mol_type = other DNA
gcgtttacgtcatagccagaaggaagaaatttattctgttatatataaccgacgtcctctgaaaaataaattcag

SEQ ID NO: 476314 - DNA, 75 bp, synthetic construct
  source 1..75: mol_type = other DNA
cggtgcccattatctgaaagataaccgggcgacgcaggatgctccttccatcgcacgcttacgcgctgccggggc

SEQ ID NO: 476315 - DNA, 75 bp, synthetic construct
  source 1..75: mol_type = other DNA
aaagatgacaaagttagcctggaaaaagccgatttcttatggggaaaagggacgcgcgcaacgacggaagaaatt

SEQ ID NO: 476316 - DNA, 75 bp, synthetic construct
  source 1..75: mol_type = other DNA
tccacccacgcatgaagagcttattgaaattactgaatcagaaagacagctattaattaaccaggccaacgaata

SEQ ID NO: 476317 - DNA, 75 bp, synthetic construct
  source 1..75: mol_type = other DNA
gagatgatgggctgcctgcgtgggcagatattcctccacccacgcatgaagagcttattgaaattactgaatcag

SEQ ID NO: 476318 - DNA, 75 bp, synthetic construct
  source 1..75: mol_type = other DNA
tgacgaagtaccgccaggcacgaaacctttcgatgaagcgaataaattagtttttgctaccggcccattaactgg

SEQ ID NO: 476319 - DNA, 75 bp, synthetic construct
  source 1..75: mol_type = other DNA
cggatatacttttttatcaggcattaaagagtatcaggactattgtatcttgttgacgctttgctgctaccactg

SEQ ID NO: 476320 - DNA, 75 bp, synthetic construct
  source 1..75: mol_type = other DNA
ggattacctggacgcactggagctggttgatacccccagtgggccagatattgaatggcctacgcctccggcagt

SEQ ID NO: 476321 - DNA, 75 bp, synthetic construct
  source 1..75: mol_type = other DNA
attctaacattagtatttgcaataaagactctgatttaaatgaacttttatttgtttccgattgtctggtaacag

SEQ ID NO: 476322 - DNA, 75 bp, synthetic construct
  source 1..75: mol_type = other DNA
ctgggtattcgacaaggatccgcagatcccggtctttactgaaggtactgacaaaatggatcgtgacgatatgca

SEQ ID NO: 476323 - DNA, 75 bp, synthetic construct
  source 1..75: mol_type = other DNA
ctgcatgacgcacacgcacatcaactttattggctccggtttgccgttgaaattgcaacgtgaagtcgcaaaaga

SEQ ID NO: 476324 - DNA, 75 bp, synthetic construct
  source 1..75: mol_type = other DNA
gctgggatcaactggaagcgggcgacgttaacttcattaaagatttttattaccgtctggcgcatcgcgtcggcg

SEQ ID NO: 476325 - DNA, 75 bp, synthetic construct
  source 1..75: mol_type = other DNA
tgaaattcgctggatacgacgtcattattatcgaagggaaagcgaaatcaccggtatggctgaagattaaagatg

SEQ ID NO: 476326 - DNA, 75 bp, synthetic construct
  source 1..75: mol_type = other DNA
tgggctttggctacaaaattatgtatgacgaagtgcctgctggtactaaacctttcgatgaagcgaataaattag

SEQ ID NO: 476327 - DNA, 75 bp, synthetic construct
  source 1..75: mol_type = other DNA
ttgcatcgtgcctacacggtaaaactgatgcaaaccaaagatatgcgtaatgaacacgatcttatctgttcctag

SEQ ID NO: 476328 - DNA, 75 bp, synthetic construct
  source 1..75: mol_type = other DNA
cggcctcgcaaggtttgactgtcagcgaaaacatgagcgacgacgaagtcgcgatgctgatatttgcgcctggct

SEQ ID NO: 476329 - DNA, 75 bp, synthetic construct
  source 1..75: mol_type = other DNA
atcagacattttttgatgaagcggacgaattgttggccgatatggagcaacatctgctggatttgcagccagaag

SEQ ID NO: 476330 - DNA, 75 bp, synthetic construct
  source 1..75: mol_type = other DNA
gacagtcaatattgctcccgatgccagcaacgcacggctcacgctgaacatccctgctcaccaggtggtgacgaa

SEQ ID NO: 476331 - DNA, 75 bp, synthetic construct
  source 1..75: mol_type = other DNA
cgttgcgtccacatctcaaaatcgatctggtccaggaaggtctacgtattcagatcatcgatagccagaatcgcc

SEQ ID NO: 476332 - DNA, 75 bp, synthetic construct
  source 1..75: mol_type = other DNA
tggcgatcctcgatggcatgtctgtacgtgttgcagatgaagttttcattctgccgctgaatgccgtcatggaat

SEQ ID NO: 476333 - DNA, 75 bp, synthetic construct
  source 1..75: mol_type = other DNA
tctgatggaaaatctgctcgatgaagccagacgcggtgagatgcagcttaataccgacattatcaatctgttttt

SEQ ID NO: 476334 - DNA, 75 bp, synthetic construct
  source 1..75: mol_type = other DNA
ggtcgtttctattgctgcaggtgtcacgctcgaccagcttgcccgcgcgctgggccatgaccggaaaattatccg

SEQ ID NO: 476335 - DNA, 75 bp, synthetic construct
  source 1..75: mol_type = other DNA
ttctggccggaagtgccggacttctgcagaccactgaagatgtgcggtttgaaccatgccccggactgacggctg

SEQ ID NO: 476336 - DNA, 75 bp, synthetic construct
  source 1..75: mol_type = other DNA
ttgatgtgctgtggggggaactggaatggtcttccccgacagatgatgatgagctgccggaagtcaccgcgccgg

SEQ ID NO: 476337 - DNA, 75 bp, synthetic construct
  source 1..75: mol_type = other DNA
caacaaacctctggtttatgagccgggtctgcatttcaagataccgttcattgaaacggtgaaaatgctcgatgc

SEQ ID NO: 476338 - DNA, 75 bp, synthetic construct
  source 1..75: mol_type = other DNA
gtgaaaatcctgggagggaaaaaggatgtttataaatacagtgaagaggctgtcggatactgggcggagatgatc

SEQ ID NO: 476339 - DNA, 75 bp, synthetic construct
  source 1..75: mol_type = other DNA
tgggccatgaccggaaaattatccgcgccatgccgaacactcccgcgctggttaatgccgggatgacctccgtaa

SEQ ID NO: 476340 - DNA, 75 bp, synthetic construct
  source 1..75: mol_type = other DNA
ggccaatgcatcccgccgcgaactgatggtcggcgggttggatagcggcaaagtgttacgtgttgtcggcatggc

SEQ ID NO: 476341 - DNA, 75 bp, synthetic construct
  source 1..75: mol_type = other DNA
atgagaaggacctggtggtaatcgatctaagactaacactcacgtcatcaagtccgcttatcggcgtcaatgacc

SEQ ID NO: 476342 - DNA, 75 bp, synthetic construct
  source 1..75: mol_type = other DNA
ctgatttagtgaacgttatagcaacgagttctgttagtgttactgctgcgaacagaatatcgctgacagctcaaa

SEQ ID NO: 476343 - DNA, 75 bp, synthetic construct
  source 1..75: mol_type = other DNA
cagacggtattgacccgcaggcggcagcattgattgaacctttcgctattagcgctcatgcggtgcgtcgtgcag

SEQ ID NO: 476344 - DNA, 75 bp, synthetic construct
  source 1..75: mol_type = other DNA
atgaccacctttacccaaaaagaactgattaaagaaataaaagaccgcatcagcagcctcgacgtgcgagacgat

SEQ ID NO: 476345 - DNA, 75 bp, synthetic construct
  source 1..75: mol_type = other DNA
gtgcgagacgatattgagcgccgtgcttatgaaatcgcactcctatctctggaagtagaaccagatgaacgcgaa

SEQ ID NO: 476346 - DNA, 75 bp, synthetic construct
  source 1..75: mol_type = other DNA
gcctccttaacctctgtatactcattcgtcgtcagcacgaccgagggcgcaaccatgacggcaagcgtcactgac

SEQ ID NO: 476347 - DNA, 75 bp, synthetic construct
  source 1..75: mol_type = other DNA
gatgaccacggcgaacagtttcgcctggttgtccgtaataacggtgcaatggtctggcgtacctggaattttgag

SEQ ID NO: 476348 - DNA, 75 bp, synthetic construct
  source 1..75: mol_type = other DNA
cgctggagctgtttgcgactgataaagccccggcacgcctgaccaggatgcgggaaaaactgcgttacctcgctg

SEQ ID NO: 476349 - DNA, 75 bp, synthetic construct
  source 1..75: mol_type = other DNA
agccccggcacggctgacccggctgcgggaaaaactgcgttaccttgcagagtgtggcgttgattacgtgctgtg

SEQ ID NO: 476350 - DNA, 75 bp, synthetic construct
  source 1..75: mol_type = other DNA
ttgatctggcgctcctggaattttgaggacggtgccgggtactggatgaaccatgccatccgtgatttcgggatt

SEQ ID NO: 476351 - DNA, 75 bp, synthetic construct
  source 1..75: mol_type = other DNA
atgagcgaatatttcagaatacttcagggactgcctgacggtccttttacccgaaaacatgccgaagccgttgcc

SEQ ID NO: 476352 - DNA, 75 bp, synthetic construct
  source 1..75: mol_type = other DNA
atgagcgaatatttcagaatacttcagggactgccggacggctcctttacccgtgaacaggcggaagccgttgcc

SEQ ID NO: 476353 - DNA, 75 bp, synthetic construct
  source 1..75: mol_type = other DNA
agtgtggtgttgattacgtgctgtgcgtgcgttttgacaggcgttttgcggcgttaaccgcgcaaaacttcatca

SEQ ID NO: 476354 - DNA, 75 bp, synthetic construct
  source 1..75: mol_type = other DNA
gtaacgatgccccaggcggtgaagcctgtaagcgaggagaagcagccaataaagcgtatgccggagcgttggcca

SEQ ID NO: 476355 - DNA, 75 bp, synthetic construct
  source 1..75: mol_type = other DNA
attcccgtaccgtcgataactggtgtgatgaccacgatcaaatcctcaaagcgctgattcgcaaagatcctcatg

SEQ ID NO: 476356 - DNA, 75 bp, synthetic construct
  source 1..75: mol_type = other DNA
tggcagccatcgttgaaaaaatgtggacccaacgtagccataacccatactggaaaaaactgcacgagcatattg

SEQ ID NO: 476357 - DNA, 75 bp, synthetic construct
  source 1..75: mol_type = other DNA
attggtggtagtatcacttcagaagctggaggtaagtatacagagtacaaaatgaagcaggaaggtggtggcaaa

SEQ ID NO: 476358 - DNA, 75 bp, synthetic construct
  source 1..75: mol_type = other DNA
gccgcattagcgacaagtagtgtttcgctgttatctagaagcgcacaagccatgtgggctcttggcgcaggtgca

SEQ ID NO: 476359 - DNA, 75 bp, synthetic construct
  source 1..75: mol_type = other DNA
gaatgcaactggaggagcattaggaaactggctcgaaggaaaagccccaacatctggtgcgttgatcaatggtgc

SEQ ID NO: 476360 - DNA, 75 bp, synthetic construct
  source 1..75: mol_type = other DNA
acaggcagcgttgccctgttaccggggagtgcccaggctatgtggttacttggtgccgggacaaatgccgggatg

SEQ ID NO: 476361 - DNA, 75 bp, synthetic construct
  source 1..75: mol_type = other DNA
gtgcaatttcaaatggtatcggttctgctgccgggtatggtatcggtaaaggtgttacttgggggacagataaga

SEQ ID NO: 476362 - DNA, 75 bp, synthetic construct
  source 1..75: mol_type = other DNA
atttacttggcggtagtgaagatgctcaggctgcgtggatacgccagcatggtatcgacatggcgacatgtgcag

SEQ ID NO: 476363 - DNA, 75 bp, synthetic construct
  source 1..75: mol_type = other DNA
agttcaatgccgaccgctatctgttcgcagaaaacccggtagtgcatctcgatacggccaccagcggcagcaaat

SEQ ID NO: 476364 - DNA, 75 bp, synthetic construct
  source 1..75: mol_type = other DNA
ctggcgggcggcaatatggcaggcgcgctggcaggtgcttcagcgccggagctggcgaacatcatcggtcatcac

SEQ ID NO: 476365 - DNA, 75 bp, synthetic construct
  source 1..75: mol_type = other DNA
tctattacatcagaaatgacggggactgaactacaaaaagtcattaatgataaattgaagaaaggagagcgtgaa

SEQ ID NO: 476366 - DNA, 75 bp, synthetic construct
  source 1..75: mol_type = other DNA
gtagtgtagctctcttacctggcggtgctcaggccatgtggggattaggggcaggagctaatgcaggtgttagct

SEQ ID NO: 476367 - DNA, 75 bp, synthetic construct
  source 1..75: mol_type = other DNA
ttatgcccaatgaatacatcacccatctggaagcaacgcctgggatgctggtgcacattggcttatcgctctttt

SEQ ID NO: 476368 - DNA, 75 bp, synthetic construct
  source 1..75: mol_type = other DNA
tggtgctgctaacgctcacgctttgcactggcctgttctacatgcacaacttatttagcatggaaaatatcgaca

SEQ ID NO: 476369 - DNA, 75 bp, synthetic construct
  source 1..75: mol_type = other DNA
atctgtacggtaatgaccattgtggcttctcgcaatcgtggctggttgctgctacccattgtctatgcctttgcg

SEQ ID NO: 476370 - DNA, 75 bp, synthetic construct
  source 1..75: mol_type = other DNA
ttcgctacatttcatcgccaaatatcgtgctaccgggcgtcgggttactgcggcatcgccaatgcccaggcctgg

SEQ ID NO: 476371 - DNA, 75 bp, synthetic construct
  source 1..75: mol_type = other DNA
agctggcgtttagtcaggaaatgccgccgctaatgagtatcgagcgcaaaatgttccacatcacgcagattggcg

SEQ ID NO: 476372 - DNA, 75 bp, synthetic construct
  source 1..75: mol_type = other DNA
ggcgtggtgctgctaacgctcacgctttgcactggcctgttctacatgcacaacttatttagcatggaaaatatc

SEQ ID NO: 476373 - DNA, 75 bp, synthetic construct
  source 1..75: mol_type = other DNA
agccgatgccgtgttgtttggctcggtaggtggccccaaatgggagcatttaccaccagaccaacaaccggaacg

SEQ ID NO: 476374 - DNA, 75 bp, synthetic construct
  source 1..75: mol_type = other DNA
gccttccgccagcctgaacgaacaaggttttggtctgtacgaaccggcgggcggctctgcgccggatatcgcagg

SEQ ID NO: 476375 - DNA, 75 bp, synthetic construct
  source 1..75: mol_type = other DNA
gtgctggatgccgtgcgcaaccgctttgcgatgcgtatcaccaccagccattacgatgtaggcggcgcagccatt

SEQ ID NO: 476376 - DNA, 75 bp, synthetic construct
  source 1..75: mol_type = other DNA
cacgcaaatggctaaaactggcagcggatcaacattataaaaatgcagaaagattactggctgaacttcccgcac

SEQ ID NO: 476377 - DNA, 75 bp, synthetic construct
  source 1..75: mol_type = other DNA
atacaaaggcgagatactggtatgagcaatcagcggaacaggaaaatccacgcgcgcaaagtcaactgggatgga

SEQ ID NO: 476378 - DNA, 75 bp, synthetic construct
  source 1..75: mol_type = other DNA
cccgcaaatggttgaaactggcagcggaacaacattataaaaatgcggaagaattacttgcagagcttcccgcac

SEQ ID NO: 476379 - DNA, 75 bp, synthetic construct
  source 1..75: mol_type = other DNA
caaggtgcgtttccagcagcccgacatgcaaaaggcgctggccttgagggtttctgccagacagcagaaggcaaa

SEQ ID NO: 476380 - DNA, 75 bp, synthetic construct
  source 1..75: mol_type = other DNA
atgaaaataaacaagttaacactgaatgaacgtaagaatgacattctgtcttatttcagtgagattaacaccccc

SEQ ID NO: 476381 - DNA, 75 bp, synthetic construct
  source 1..75: mol_type = other DNA
atgaaaataaacaagttaacactgaatgaacgtaagaatgacattctttcttatttcggagaaatcgatgccccc

SEQ ID NO: 476382 - DNA, 75 bp, synthetic construct
  source 1..75: mol_type = other DNA
aaagtatatttataaatatgcttaaacaagctgatgtattagctgagaattttcgcccaggtacaatggaaaaac

SEQ ID NO: 476383 - DNA, 75 bp, synthetic construct
  source 1..75: mol_type = other DNA
gccgcgaaaagagccagagaggggcgcatgtcgatatagcgatgtttgatgccacgctgagttttctggagcatg

SEQ ID NO: 476384 - DNA, 75 bp, synthetic construct
  source 1..75: mol_type = other DNA
tgctcaaacaagctgatgtattagctgagaattttcgcccaggtacaatggaaaaactggggttttcatgggaaa

SEQ ID NO: 476385 - DNA, 75 bp, synthetic construct
  source 1..75: mol_type = other DNA
ctgccctgcttttcgccctgcttgccgtacaattttctcgtcgtccgcccaccattcgccacactttcggttggc

SEQ ID NO: 476386 - DNA, 75 bp, synthetic construct
  source 1..75: mol_type = other DNA
cgattcagatggaatatcagccttgtcatgggccggattgccaccttaatcaaggggtttccggccattcacatc

SEQ ID NO: 476387 - DNA, 75 bp, synthetic construct
  source 1..75: mol_type = other DNA
atggcgcactcacacacttccgcacatctgccagaagataataatgctcgtcgcttgttatatgctttcagcgtt

SEQ ID NO: 476388 - DNA, 75 bp, synthetic construct
  source 1..75: mol_type = other DNA
ctcgagctttaaaatattcgctgatgcaggatatttaggacctgataagttattgccgcttatacgaaggtatcg

SEQ ID NO: 476389 - DNA, 75 bp, synthetic construct
  source 1..75: mol_type = other DNA
tgagttaggctataacgcttctaaagcgcgtaaatacgcgattgagcagatgatagcccgaaacgaagcgcggag

SEQ ID NO: 476390 - DNA, 75 bp, synthetic construct
  source 1..75: mol_type = other DNA
ctggctggtaagctctccacgccgatggaagacacgatgtgggacatcatgcggatggcgatcatcctgtcgttt

SEQ ID NO: 476391 - DNA, 75 bp, synthetic construct
  source 1..75: mol_type = other DNA
ggaatagtgagtgcactttatggccgcgaaaagagccagagaggggcgcatgtcgatatagcgatgtttgatgcc

SEQ ID NO: 476392 - DNA, 75 bp, synthetic construct
  source 1..75: mol_type = other DNA
gtcagcccgcctgcgccagcagtaatgacggtaactcctgcaccggtaaaatcgccgccgacaacaaagcgtccg

SEQ ID NO: 476393 - DNA, 75 bp, synthetic construct
  source 1..75: mol_type = other DNA
gaccgtaccgttgatcaaaccaaaagcagccgcagcggccgctgctgcctcaacagcatcctcttccggtgcccc

SEQ ID NO: 476394 - DNA, 75 bp, synthetic construct
  source 1..75: mol_type = other DNA
tcaaaaatctctctgatgaaacccgcttgggcatcgtgctgctgctcagggagatgggagagctgtgcgtgtgcg

SEQ ID NO: 476395 - DNA, 75 bp, synthetic construct
  source 1..75: mol_type = other DNA
aaactgtgccggttgagaagaccgacgaaaagcctgcgtcaccgatagcggccgtacccacccctcaggaggata

SEQ ID NO: 476396 - DNA, 75 bp, synthetic construct
  source 1..75: mol_type = other DNA
cacagggcggtcaaatagcgagcatgcgttttcgtatgtttggtcagattgccaatattattctatatgtactgt

SEQ ID NO: 476397 - DNA, 75 bp, synthetic construct
  source 1..75: mol_type = other DNA
ggctggcagatgagcagacacagcgggatatgcagcggcgtgaagaggtcaatatcaaccacagccaccgccacg

SEQ ID NO: 476398 - DNA, 75 bp, synthetic construct
  source 1..75: mol_type = other DNA
ctaacaaactgctaatgaatgcattactcgaagttgagaaaaataacagagatacattctcggtgggtctgttag

SEQ ID NO: 476399 - DNA, 75 bp, synthetic construct
  source 1..75: mol_type = other DNA
agaacaactagagtttctcaagcttctttagaaagagaaagaaaaatagtttccaaagaaaaacgtctgcaaaac

SEQ ID NO: 476400 - DNA, 75 bp, synthetic construct
  source 1..75: mol_type = other DNA
atgactatcaagcaaactgaggaaatattagattctaatatatataattatttaacgggcactcaaaagcatagt

SEQ ID NO: 476401 - DNA, 75 bp, synthetic construct
  source 1..75: mol_type = other DNA
agggagatgggggagctgtgcgtatgcgatctctgcacagcgctggaacaatcacaacccaagacctcccgccat

SEQ ID NO: 476402 - DNA, 75 bp, synthetic construct
  source 1..75: mol_type = other DNA
gagattggggaagtgtgtgtatgcgacctctgcacggcgctggaacagtctcagccgaaaatatcccgccatctg

SEQ ID NO: 476403 - DNA, 75 bp, synthetic construct
  source 1..75: mol_type = other DNA
atgccacaattatcatcattacagctcttcaaaaacctctccgatgaaacccgtctagggatcgtactgctgctc

SEQ ID NO: 476404 - DNA, 75 bp, synthetic construct
  source 1..75: mol_type = other DNA
tgggttaaaggaggggttttctggcagtgataatatatggcagctattagatagcttatggaataacgcaaaagt

SEQ ID NO: 476405 - DNA, 75 bp, synthetic construct
  source 1..75: mol_type = other DNA
gcagtggacatttcaggtcggggaccttgaaaaggtcaatattacccactgggcagtaatgccgaaagcaccgga

SEQ ID NO: 476406 - DNA, 75 bp, synthetic construct
  source 1..75: mol_type = other DNA
tacagcactggaaaacaaagtaataccagtgtcagctgaactgccgccagcaaatgaaagtgttctgttatttga

SEQ ID NO: 476407 - DNA, 75 bp, synthetic construct
  source 1..75: mol_type = other DNA
atgaatgttttcgaaatggaagggtttcttcgcgggaaatgtgtaccgcgagatctgaaagtgaatgaaacggat

SEQ ID NO: 476408 - DNA, 75 bp, synthetic construct
  source 1..75: mol_type = other DNA
tttagctacccacgtgtattaggccatgaaatatgcgccgaagcggtttcacgaggtagccagtgccaaacagca

SEQ ID NO: 476409 - DNA, 75 bp, synthetic construct
  source 1..75: mol_type = other DNA
tgctgcgaacgtgtttcgctgtatggcgtgcatcaggatgggggttttagtgagtaccttgcggtacgtgaagac

SEQ ID NO: 476410 - DNA, 75 bp, synthetic construct
  source 1..75: mol_type = other DNA
gtgctgttaaaaatcaaagctgtgggtatttgtggtactgatattcacgcttttgccggcagacagccttttttt

SEQ ID NO: 476411 - DNA, 75 bp, synthetic construct
  source 1..75: mol_type = other DNA
gaaccagatgaacgcgaagcttatgaattattcatggaaaagcgtttcggtgacttagtagatcgtcggagagca

SEQ ID NO: 476412 - DNA, 75 bp, synthetic construct
  source 1..75: mol_type = other DNA
atgaccacctttacccaaaaagaactgattaaagaaatgaaagaccgcatcagcagcctcgacgtacgagacgat

SEQ ID NO: 476413 - DNA, 75 bp, synthetic construct
  source 1..75: mol_type = other DNA
atgaccacctttacccaaaaagaactgattaaagaaatcaaagaacgcatcagcagcctcgacgtccgagacgat

SEQ ID NO: 476414 - DNA, 75 bp, synthetic construct
  source 1..75: mol_type = other DNA
acaggaaaacaaagtaataccagtgtcaactgaactgccaccagcaaatgaaagtgttttgttattcgatgctaa

SEQ ID NO: 476415 - DNA, 75 bp, synthetic construct
  source 1..75: mol_type = other DNA
tgcggcactggaaaacaaaataataccagtgtcagctgaactgccaccagcaaatgaaagtgttctgttatttga

SEQ ID NO: 476416 - DNA, 75 bp, synthetic construct
  source 1..75: mol_type = other DNA
cagctcctgcaactgtttggcgtccatgctgaagagtggggttattttaaaattatccatctggaaggatcgcca

SEQ ID NO: 476417 - DNA, 75 bp, synthetic construct
  source 1..75: mol_type = other DNA
aggtcagcgatagcgccggagcattggttgaatgtttcgctattggagcacacgccgttcgccgtgctgagatca

SEQ ID NO: 476418 - DNA, 75 bp, synthetic construct
  source 1..75: mol_type = other DNA
ggtgagcgcggtattacactgcgttttggtaaggtactgcgtgacgatgataacaaacctttggtttatgagccg

SEQ ID NO: 476419 - DNA, 75 bp, synthetic construct
  source 1..75: mol_type = other DNA
cgcaccacgctgaagatgcaccagcctgtattacccatcggctggagttcgtgccggatggcgacctctatcgct

SEQ ID NO: 476420 - DNA, 75 bp, synthetic construct
  source 1..75: mol_type = other DNA
accacggcagagatcattcaggatgaagttaaggatactcagcgttgcgctcaactggcgcaacagttcagcatt

SEQ ID NO: 476421 - DNA, 75 bp, synthetic construct
  source 1..75: mol_type = other DNA
atcggtgctgctgcttttggtgccgggaagctgaccgggggagccgttaaagaaaccaaacgttccgcccaggac

SEQ ID NO: 476422 - DNA, 75 bp, synthetic construct
  source 1..75: mol_type = other DNA
aaatatatttgcagccatattaactattctcctttcctctttatcattaaggattgtagtcaattatttaaactc

SEQ ID NO: 476423 - DNA, 75 bp, synthetic construct
  source 1..75: mol_type = other DNA
gccgaagcggcagagcgcgtaacggctgagacgaagggcaaagttccggtcatcaacccgaacagtatggcggcg

SEQ ID NO: 476424 - DNA, 75 bp, synthetic construct
  source 1..75: mol_type = other DNA
atgtcatcgttgcaaattttgcaaggcacgtttcgtcttagcgacacaaaaacgctgcaattgcctcagctaacg

SEQ ID NO: 476425 - DNA, 75 bp, synthetic construct
  source 1..75: mol_type = other DNA
tgcagcactggaaaacaaagtaataccagtgtcagctgaactgccaccagcaaatgaaagtgttctgttatttga

SEQ ID NO: 476426 - DNA, 75 bp, synthetic construct
  source 1..75: mol_type = other DNA
ttattcgcaccttccttagctacccacgtgtattaggtcatgaaatatgcgccgaagcggtttcgcgaggcagcc

SEQ ID NO: 476427 - DNA, 75 bp, synthetic construct
  source 1..75: mol_type = other DNA
aacgctgcaattgcctcagctaacgttaaacgcgggtgatagttgggcgtttgtcggttcgaatggaagcgggaa

SEQ ID NO: 476428 - DNA, 75 bp, synthetic construct
  source 1..75: mol_type = other DNA
aacggcaaagccagttttcccacatcactcgtctctccttcgagcaattgcaaaagctcgtcagcgacgaatggc

SEQ ID NO: 476429 - DNA, 75 bp, synthetic construct
  source 1..75: mol_type = other DNA
gcctgtattacccatcgtcttgagttcgtgccggacggtggactctatcgctatgtgctgacaaaaataaattga

SEQ ID NO: 476430 - DNA, 75 bp, synthetic construct
  source 1..75: mol_type = other DNA
cttaccgccagatgcgcagcttccgcgcaccgcttgaggcgcatcatatcaatatgcagcagttcacgccgcagc

SEQ ID NO: 476431 - DNA, 75 bp, synthetic construct
  source 1..75: mol_type = other DNA
tttcgcccccgtttatgccacttatcatgagcgttacggcgatgagggattgcttaagcgtctgactgatttggc

SEQ ID NO: 476432 - DNA, 75 bp, synthetic construct
  source 1..75: mol_type = other DNA
gtgtggatcactattgcaccgttcgtgacaattgctgaggtggctgattcggttgttcgtgactgccttgtttct

SEQ ID NO: 476433 - DNA, 75 bp, synthetic construct
  source 1..75: mol_type = other DNA
tccgggcgcgttttgacgatcgcggtgacttgagctttatgcaacgtgaatccgacgggcaaaagcagcagcttt

SEQ ID NO: 476434 - DNA, 75 bp, synthetic construct
  source 1..75: mol_type = other DNA
tccgcagcagcaaagggaatagggcgtggaataactgctataaaaggcgatatcgcgccagaagtagcgaaaaaa

SEQ ID NO: 476435 - DNA, 75 bp, synthetic construct
  source 1..75: mol_type = other DNA
ccggtcataacccgttttatggggtgcgttgtccgccgtatgacccccgcagagaaaatccgcgcagatgaaatc

SEQ ID NO: 476436 - DNA, 75 bp, synthetic construct
  source 1..75: mol_type = other DNA
gcaggagactcgccaacaaaatttcttaccgagttaaataagttgaagtcgcaatctgacggtcagatctataac

SEQ ID NO: 476437 - DNA, 75 bp, synthetic construct
  source 1..75: mol_type = other DNA
cagagctaataaacagcgttgtattcagcagaaaaccatcagatattaagaggatatggcctgctcttagtgaag

SEQ ID NO: 476438 - DNA, 75 bp, synthetic construct
  source 1..75: mol_type = other DNA
tctacagcaaacagcaaggtcggacgccgcaaatgtagtaacacagacaggacaatcgcaagctaacaggattag

SEQ ID NO: 476439 - DNA, 75 bp, synthetic construct
  source 1..75: mol_type = other DNA
tcaatcaggacggagacccttatgaattctcgcttttctgcactgatgagcagattgctgaggtggctgattcgg

SEQ ID NO: 476440 - DNA, 75 bp, synthetic construct
  source 1..75: mol_type = other DNA
gcctaccacactgccgccgtacgtcgcggcgcaccaaactgcctgctgctggctgacctgccgtttatggcgtat

SEQ ID NO: 476441 - DNA, 75 bp, synthetic construct
  source 1..75: mol_type = other DNA
gcaacggttatgcgtgccggtgctaacatggtcaaaattgaaggcggtgagtggctggtagaaaccgtacaaatg

SEQ ID NO: 476442 - DNA, 75 bp, synthetic construct
  source 1..75: mol_type = other DNA
ccggtgattacccgttttatggggtgtattgttcgccggatgacccccgcagaaaaaatccgtgcagaagaaatc

SEQ ID NO: 476443 - DNA, 75 bp, synthetic construct
  source 1..75: mol_type = other DNA
tccaatatcgatttaagcagtgtgcaaaatgtggaagtgctgcgaggccccttctctgccctgtatggcaatgcg

SEQ ID NO: 476444 - DNA, 75 bp, synthetic construct
  source 1..75: mol_type = other DNA
cttacaaaaatgccggaaagacccgtcgtcaaggcgctgaactggcatgggatcaacgtttcgcgggagattttc

SEQ ID NO: 476445 - DNA, 75 bp, synthetic construct
  source 1..75: mol_type = other DNA
cctgtatggcaacgcgtctggtggggtaatgaatgtcaccacccagaccggacaacagccaccaaccattgaagc

SEQ ID NO: 476446 - DNA, 75 bp, synthetic construct
  source 1..75: mol_type = other DNA
atgaagattgttttcgttcgacagaccgttttgcccgcactgcttgtcctttcccacaccgtatttgccgctgat

SEQ ID NO: 476447 - DNA, 75 bp, synthetic construct
  source 1..75: mol_type = other DNA
gccagactgggcgtacacattgatgacgccagtaagttaaacctgattttcaacagtgtggatatcaaagccgat

SEQ ID NO: 476448 - DNA, 75 bp, synthetic construct
  source 1..75: mol_type = other DNA
tgtcacccgtttcctgcgggttgtccgtgaccagcgggtcaatgaggtctgccgcatgctcggcatactgaaccg

SEQ ID NO: 476449 - DNA, 75 bp, synthetic construct
  source 1..75: mol_type = other DNA
gttttaaggttgccggaaaatggcattctcgtccgaataaaaaatggtgggaagcaggttgcccgaccgttaaga

SEQ ID NO: 476450 - DNA, 75 bp, synthetic construct
  source 1..75: mol_type = other DNA
cagtatcgtgatgaggtcggggtactgtcttcacagcttgccctgccacgtaacacgcaggttgaccgtgtgatt

SEQ ID NO: 476451 - DNA, 75 bp, synthetic construct
  source 1..75: mol_type = other DNA
gaatcaggttgcccgaccgttaaggattcgcacgcatggctgaataccgtctggcgtcgggtctgccgcagactg

SEQ ID NO: 476452 - DNA, 75 bp, synthetic construct
  source 1..75: mol_type = other DNA
gtgttgtccgccgtatgacccccgcagaaaaaatccgcgcagaggaagtcagaagcggcagcagctatgaatctg

SEQ ID NO: 476453 - DNA, 75 bp, synthetic construct
  source 1..75: mol_type = other DNA
cttacaacaccatcgatgcggcatcggttgcccttggtcgtccttgcctgacgcaacccgaacgtgagcgtcttc

SEQ ID NO: 476454 - DNA, 75 bp, synthetic construct
  source 1..75: mol_type = other DNA
taacaagcgcggcggcatgggctggcggtaaactcggtattggcgatggaacatatcaaccagcgccacgagtaa

SEQ ID NO: 476455 - DNA, 75 bp, synthetic construct
  source 1..75: mol_type = other DNA
ctcttcggtatttcttgccggggcgatatcggcggtgctggggattatcgtgacgatactggcatttcgccgggg

SEQ ID NO: 476456 - DNA, 75 bp, synthetic construct
  source 1..75: mol_type = other DNA
tcatcatgatctgggctatggcaataccatggtcgggattgccgtcgggattcagtttctggctacggtgctgac

SEQ ID NO: 476457 - DNA, 75 bp, synthetic construct
  source 1..75: mol_type = other DNA
agcgtccggatctggttgaccggctgaatgatattattgcgcgccatttcccggaggcgctgccgccccgggtgt

SEQ ID NO: 476458 - DNA, 75 bp, synthetic construct
  source 1..75: mol_type = other DNA
ggactgattgatgtctaccggaaattgtcatgggattacagaaccaataatccctgccgtctgggcaagaaaatc

SEQ ID NO: 476459 - DNA, 75 bp, synthetic construct
  source 1..75: mol_type = other DNA
ggtacggtgcatatcaccttccgtcgccctgaccttgttgagcgactgaatgacatcattgcccgccattatccc

SEQ ID NO: 476460 - DNA, 75 bp, synthetic construct
  source 1..75: mol_type = other DNA
cgttgccggttatcccgctgtttgttcatcatgaactgggctatggcaataccatggtcggcattgccgtcggga

SEQ ID NO: 476461 - DNA, 75 bp, synthetic construct
  source 1..75: mol_type = other DNA
gactctgttcatagttgtcgtcggcgccggatacatcatctaccctgctcaggacatacgctatggcttgtattt

SEQ ID NO: 476462 - DNA, 75 bp, synthetic construct
  source 1..75: mol_type = other DNA
caacgtcaactgggattaatagctggaggtgaggctggaaaacgggctgcaacggcagcgggtctccgttgcagt

SEQ ID NO: 476463 - DNA, 75 bp, synthetic construct
  source 1..75: mol_type = other DNA
gctgatactctccttcgcagggttatcaataccccggagacgaaacagtcaggcgcgcctcatgtcggtattgat

SEQ ID NO: 476464 - DNA, 75 bp, synthetic construct
  source 1..75: mol_type = other DNA
tcgtgaatcggacggtgcccgttttggtgattttatacgccgtgaagacaatatcgggcagttgtacgaagggga

SEQ ID NO: 476465 - DNA, 75 bp, synthetic construct
  source 1..75: mol_type = other DNA
gaatcttatctcagtggaaagtgcctcacataaatccccgctgtggtattgtcattctgaccctgaaaaacgatt

SEQ ID NO: 476466 - DNA, 75 bp, synthetic construct
  source 1..75: mol_type = other DNA
tatagcgattttgctctgcaaggatggcttgtaccagatgaacatatggacgctagtagagatattggggatgat

SEQ ID NO: 476467 - DNA, 75 bp, synthetic construct
  source 1..75: mol_type = other DNA
cgtatcatcgcgcagcgtaacgaaggtattgcactgttcatgcaggcgatggaatgcctggcgacagcgcgcagg

SEQ ID NO: 476468 - DNA, 75 bp, synthetic construct
  source 1..75: mol_type = other DNA
ctcgagttctaccgtattctgaaaacccaaaataaatcacagctaagcagctggttcactcgagtccacgaaagc

SEQ ID NO: 476469 - DNA, 75 bp, synthetic construct
  source 1..75: mol_type = other DNA
gcctccaaagcgagggcttctggacccatggagggagtggttaaaagagcaacgagaaagtggtaattataatgc

SEQ ID NO: 476470 - DNA, 75 bp, synthetic construct
  source 1..75: mol_type = other DNA
tgcgacagcagcacgtgaaggtgcacctcaggccagacaggtggccgatcgatggcacctgctaaaaaatattgg

SEQ ID NO: 476471 - DNA, 75 bp, synthetic construct
  source 1..75: mol_type = other DNA
tcaaacgcgccttaaaaacgttctaaacaaaggagatttaactcccgaggctgtaaataccattgtgtatggaca

SEQ ID NO: 476472 - DNA, 75 bp, synthetic construct
  source 1..75: mol_type = other DNA
cttgttaatcgcttcaccgaaaaatacggcgactacgatccatctgtagtcgttgatagtctaaagtcaggcgtt

SEQ ID NO: 476473 - DNA, 75 bp, synthetic construct
  source 1..75: mol_type = other DNA
tggaggggcgcaacgttcctgacttccggagcagtatcgggcgcagtatggtgaatttctcggtaacggcgacaa

SEQ ID NO: 476474 - DNA, 75 bp, synthetic construct
  source 1..75: mol_type = other DNA
ccagctgatgagcgacacctgtcctgaaatcaccctggacaatgtactggcaacattccgccatcttaatgccag

SEQ ID NO: 476475 - DNA, 75 bp, synthetic construct
  source 1..75: mol_type = other DNA
caactattgcggcgcgacagtctgctaccggcactaaaaccgatacgccgattcaaaaagtgccacagtctattt

SEQ ID NO: 476476 - DNA, 75 bp, synthetic construct
  source 1..75: mol_type = other DNA
gccagaataactatctgaatggcctgaagttgcagggcaacttctataacgatgcggtcattgacccgtattatg

SEQ ID NO: 476477 - DNA, 75 bp, synthetic construct
  source 1..75: mol_type = other DNA
ggccaccgttacggtacgttaatcgtcaatcttgatactcaccgtcccctcgtcctgcttcccggccgtgatcag

SEQ ID NO: 476478 - DNA, 75 bp, synthetic construct
  source 1..75: mol_type = other DNA
aagtcctgacccgtgccggcatcttcctcgcctgcatggcgctgttcatggtggtctcactgatgatggctgaca

SEQ ID NO: 476479 - DNA, 75 bp, synthetic construct
  source 1..75: mol_type = other DNA
acatgctgattggcgacggtatcaaaacgggcctgagtaagatgggctttagcgtcgactggtttacagaaggtc

SEQ ID NO: 476480 - DNA, 75 bp, synthetic construct
  source 1..75: mol_type = other DNA
catcgcgcaggccactctcgcaggcgttgcctttggtgagcagactgttactgcatcactggctaatactggtgc

SEQ ID NO: 476481 - DNA, 75 bp, synthetic construct
  source 1..75: mol_type = other DNA
ccaccggttactactaccgccagacttccttcagtgtcccgggtaagccgatggttgatgccctggagaataatc

SEQ ID NO: 476482 - DNA, 75 bp, synthetic construct
  source 1..75: mol_type = other DNA
gatttgaactactcaggcagagggtaatgagcccactggcaacccaggttgcggaagagccgcttttcatccgtc

SEQ ID NO: 476483 - DNA, 75 bp, synthetic construct
  source 1..75: mol_type = other DNA
tcactcgagtccacgaaagcggatcagcagaatttcggtgcgtggcggcggggatggaagctgatgctgccgcta

SEQ ID NO: 476484 - DNA, 75 bp, synthetic construct
  source 1..75: mol_type = other DNA
tcactcgagtccacgaaagcggatcagcagaatttcggtgcgtggccgcggggatggaagctgatgctgcggcta

SEQ ID NO: 476485 - DNA, 75 bp, synthetic construct
  source 1..75: mol_type = other DNA
aaatagcgcagcaactggcactcgagttctaccgtattctgaaaacccaaaataaatcacagctaagcagcttgt

SEQ ID NO: 476486 - DNA, 75 bp, synthetic construct
  source 1..75: mol_type = other DNA
ttgatgcatcagacatcaactttaaaaaactgtatgaaacagatcaaatgatccatatacttatggaagaggtaa

SEQ ID NO: 476487 - DNA, 75 bp, synthetic construct
  source 1..75: mol_type = other DNA
tggttaaaccctgtgtcgattggcatcaacgatgtcacaccagcagatgaaagtacatggtgcataggaaaaggc

SEQ ID NO: 476488 - DNA, 75 bp, synthetic construct
  source 1..75: mol_type = other DNA
gtgacggcaggagagcggaagaccaccatacttcccctgagggtgctcagcgacctgacaccggaacgcacagca

SEQ ID NO: 476489 - DNA, 75 bp, synthetic construct
  source 1..75: mol_type = other DNA
aactggtactcgagttctaccgtattctgaaaacctataataaatcacagctaagcagctggttcactcgagtcc

SEQ ID NO: 476490 - DNA, 75 bp, synthetic construct
  source 1..75: mol_type = other DNA
tgccatgaaaaaaaaaaacagatggaccatctgtggtagaagatgccattatgaccactactgtcacaacagatt

SEQ ID NO: 476491 - DNA, 75 bp, synthetic construct
  source 1..75: mol_type = other DNA
atgaggaattcaaagggaatccccgtatagctatccataatatggataaagtggtctatagcggacatatacttg

SEQ ID NO: 476492 - DNA, 75 bp, synthetic construct
  source 1..75: mol_type = other DNA
tcactcgagtccacgaaagcggatcagcagaatttcggcgcgtggctgcggggatggaagctgatgctgcggcta

SEQ ID NO: 476493 - DNA, 75 bp, synthetic construct
  source 1..75: mol_type = other DNA
caactcagtggcagcaggctggataaatgtgataaccatggggcagggctggaaagggacaatagcctggaatgc

SEQ ID NO: 476494 - DNA, 75 bp, synthetic construct
  source 1..75: mol_type = other DNA
cagacttccttcagtgtcccgggtaagccgctggttgatgccctggagaataatcaggggtgaagaaaattatgc

SEQ ID NO: 476495 - DNA, 75 bp, synthetic construct
  source 1..75: mol_type = other DNA
tgtaaccggaacccccggaagccggtacattattacggggccggatacagcacagatatcaccggcacaaatcat

SEQ ID NO: 476496 - DNA, 75 bp, synthetic construct
  source 1..75: mol_type = other DNA
aggagatttgggaatctcaaaagaaatgaaaccaagcaatgtccccagctcaattggtgacattggtggtagtat

SEQ ID NO: 476497 - DNA, 75 bp, synthetic construct
  source 1..75: mol_type = other DNA
ggaattgctgggaatataggttcttcaattggttcagaaggatcaggagctataatccaagaacagttaaaaaat

SEQ ID NO: 476498 - DNA, 75 bp, synthetic construct
  source 1..75: mol_type = other DNA
tcactcgagtccacgaaagcggatcagcagaatttcggggcgtggccgcggggatggaagctgatgctgctgcta

SEQ ID NO: 476499 - DNA, 75 bp, synthetic construct
  source 1..75: mol_type = other DNA
tcactcgagtccacgaaagcggatcagcagaatttcggggcgtggctgcggggatggaagctgatgctgccgcta

SEQ ID NO: 476500 - DNA, 75 bp, synthetic construct
  source 1..75: mol_type = other DNA
tcactcgagtccacgaaagcggatcagcagaatttcggcgcgtggcggcggggatggaagctgatgctgctgcta

SEQ ID NO: 476501 - DNA, 75 bp, synthetic construct
  source 1..75: mol_type = other DNA
ccggtaatgaccatcacccagaagggaataaacaccctggtcggtacaacggccggcgaaaactggctaacgggt

SEQ ID NO: 476502 - DNA, 75 bp, synthetic construct
  source 1..75: mol_type = other DNA
gcatacacaatggctggaatataaaaaattcctgactgatggcagtaaacacattgttgtggcctctccggaaag

SEQ ID NO: 476503 - DNA, 75 bp, synthetic construct
  source 1..75: mol_type = other DNA
gctcaggatgtatatccttaaagagcatggtggtatttatacagacacagacatgatgcctgcatactctaaaca

SEQ ID NO: 476504 - DNA, 75 bp, synthetic construct
  source 1..75: mol_type = other DNA
tgctaacttggccatggacgctaaacagttagccgaggccactctcggtagcatgatccagattgccggaaataa

SEQ ID NO: 476505 - DNA, 75 bp, synthetic construct
  source 1..75: mol_type = other DNA
tgatcggtgaagccaccgcagaacgtatcaaacatgaaatcggttctgcttatccgggcgacgaagttcgtgaaa

SEQ ID NO: 476506 - DNA, 75 bp, synthetic construct
  source 1..75: mol_type = other DNA
gggcaatattgctgccattcgcccaatgaaagacggcgttatcgccgacttcttcgtgactgaaaaaatgctcca

SEQ ID NO: 476507 - DNA, 75 bp, synthetic construct
  source 1..75: mol_type = other DNA
gaccagcgaaatgctggtgaaattgctggatcaagggacggtgaagttaaacgatccgctaagtaaatatgctcc

SEQ ID NO: 476508 - DNA, 75 bp, synthetic construct
  source 1..75: mol_type = other DNA
caacaggtaagatggtaaaactaaaattacctgtagatgtggaaaggctattaattgaggcaagtaacagaagcg

SEQ ID NO: 476509 - DNA, 75 bp, synthetic construct
  source 1..75: mol_type = other DNA
agaaccgatggctgcggcaatcggtgctggcctgccggtttccgaagcgacggggtccatggtcgttgatatcgg

SEQ ID NO: 476510 - DNA, 75 bp, synthetic construct
  source 1..75: mol_type = other DNA
agagccgatggccgcagcaatcggtgccggcttgccggtatctgaagcaaccggttccatggtggttgatatcgg

SEQ ID NO: 476511 - DNA, 75 bp, synthetic construct
  source 1..75: mol_type = other DNA
gcgctacagctccgtatggtttgattccaacgatcattacgttactccgggtaacggcgatgacagtggtgatgc

SEQ ID NO: 476512 - DNA, 75 bp, synthetic construct
  source 1..75: mol_type = other DNA
acgttcactaccggcctgaactacgaaaacatgagtgaaaaccgtaaaggctacaacaacttccgcctgaacagc

SEQ ID NO: 476513 - DNA, 75 bp, synthetic construct
  source 1..75: mol_type = other DNA
caccgcgcattaacttgtctgaatcactgaccagcgtgcctggtttgcaggtacaaaaccggcagaactatgcgc

SEQ ID NO: 476514 - DNA, 75 bp, synthetic construct
  source 1..75: mol_type = other DNA
gctttaaaaatatgagtgatggcatcaatgatttggtgaccgaacttagcgggaataaaccattggtcatccccg

SEQ ID NO: 476515 - DNA, 75 bp, synthetic construct
  source 1..75: mol_type = other DNA
gcgccaggcagtcaggcggcgtactctaaccttgcgttcgacctgctggcagatgcactggcgaatgcgtccggc

SEQ ID NO: 476516 - DNA, 75 bp, synthetic construct
  source 1..75: mol_type = other DNA
tacaccgtctcaaccacgcgttttacgacccacggctatcgtgaccatagtggcgcacagaaaaatttagccaat

SEQ ID NO: 476517 - DNA, 75 bp, synthetic construct
  source 1..75: mol_type = other DNA
caaaaccgctgttgatacaacgaataccggtgtggcgacctacgccagtggccgtactttctggcttgatgtcag

SEQ ID NO: 476518 - DNA, 75 bp, synthetic construct
  source 1..75: mol_type = other DNA
tgtaataaaactgtcagacgatgacattggtaattaccagaaaacaattaacgacaataaagatagagtaaaaaa

SEQ ID NO: 476519 - DNA, 75 bp, synthetic construct
  source 1..75: mol_type = other DNA
attagccttactttatttacagactgaagatactgctcattatagcattctccaggaaaacctaatgactgtgag

SEQ ID NO: 476520 - DNA, 75 bp, synthetic construct
  source 1..75: mol_type = other DNA
aaaaggatatggccgattaaagataaaatagattcaagggaggggatgttaataaatggacataataaatggcaa

SEQ ID NO: 476521 - DNA, 75 bp, synthetic construct
  source 1..75: mol_type = other DNA
caaatcatcggcgtcctgctcgtgatcgggagtatctggctgggccaacgttccaaccgcactcctagggcgcgt

SEQ ID NO: 476522 - DNA, 75 bp, synthetic construct
  source 1..75: mol_type = other DNA
cgtcagaaaaatctgccgggctgaaggtgaaactgaggctgatgatgataaattagtggatgaatttcgtcgatt

SEQ ID NO: 476523 - DNA, 75 bp, synthetic construct
  source 1..75: mol_type = other DNA
atggtgaaccgtggcttgccggtcgtaccgtcgttcctgtgtcaacgttaagcgggccggagctggcgttacaaa

SEQ ID NO: 476524 - DNA, 75 bp, synthetic construct
  source 1..75: mol_type = other DNA
tacgcgttcggactggttaacatcgcatatcgatgagaataacaagagcgcatttaatcaaggctcttcaggaag

SEQ ID NO: 476525 - DNA, 75 bp, synthetic construct
  source 1..75: mol_type = other DNA
tttaatgctgatgatgacagcgtaaagctgagttatcgcacaacgcgttcggactggttaacgtctcatatcgat

SEQ ID NO: 476526 - DNA, 75 bp, synthetic construct
  source 1..75: mol_type = other DNA
agattttaaaaagaacttttatactttggcgtttaatcaggaactcgccgataactttggcgttaccgccggttt

SEQ ID NO: 476527 - DNA, 75 bp, synthetic construct
  source 1..75: mol_type = other DNA
taaaccaagccatgacgttcattccccgaacatctgaaaattcagacttagttctatgcgttgagaattcgagcc

SEQ ID NO: 476528 - DNA, 75 bp, synthetic construct
  source 1..75: mol_type = other DNA
gaactggaaatcgtcattgttacacaatgcactacttgggctatcaaacttttttaaagagcaacagataaccga

SEQ ID NO: 476529 - DNA, 75 bp, synthetic construct
  source 1..75: mol_type = other DNA
gaccttaatattcaattgcttgatcgtagcggacaccgcgctaaattcacccgtaccggaaaaatgttattagag

SEQ ID NO: 476530 - DNA, 75 bp, synthetic construct
  source 1..75: mol_type = other DNA
tgatccacgcaaagccgccgtcgaagctgctattgcccgtgccaaagcacgcaagctggaacagcaacaggctaa

SEQ ID NO: 476531 - DNA, 75 bp, synthetic construct
  source 1..75: mol_type = other DNA
aatgagcatgaaagagctgcagttgcccatgaatttatgaataacggtcagtctggcccacatcaggccatggcc

SEQ ID NO: 476532 - DNA, 75 bp, synthetic construct
  source 1..75: mol_type = other DNA
tgctcatgagaccatgacgaacggctcggcggatgcgcaccagaaaatggtggaaagtcatcagaagatgatggg

SEQ ID NO: 476533 - DNA, 75 bp, synthetic construct
  source 1..75: mol_type = other DNA
ctattgcccgcgccaaagcgcgcaagctggaacagcaacaggctaacgcagaaccagaagaacaggttgatccgc

SEQ ID NO: 476534 - DNA, 75 bp, synthetic construct
  source 1..75: mol_type = other DNA
gaagaacagattgatccgcgcaaagcggcagttgccgcggctattgcccgcgttcaggccaaaaaagccgcccag

SEQ ID NO: 476535 - DNA, 75 bp, synthetic construct
  source 1..75: mol_type = other DNA
cggaaccagaagaacaggtcgatccgcgcaaagctgccgtcgaagcggctattgcccgtgccaaagcgcgcaagc

SEQ ID NO: 476536 - DNA, 75 bp, synthetic construct
  source 1..75: mol_type = other DNA
aaaaggccttagtagaagaggaacccagtgataacgatttggccgaagaggaactgttatcgcagggagccacac

SEQ ID NO: 476537 - DNA, 75 bp, synthetic construct
  source 1..75: mol_type = other DNA
ggatcaggcttttggggttgtttgtactcaacaggacaccttattcaaaggtaagcgatacagcttgctcatgac

SEQ ID NO: 476538 - DNA, 75 bp, synthetic construct
  source 1..75: mol_type = other DNA
actggggtctcaaacgtctcaatgatgtggagtatcatgaatccattgatgagatgaaacacgccgatcgttata

SEQ ID NO: 476539 - DNA, 75 bp, synthetic construct
  source 1..75: mol_type = other DNA
cggatgaacaccgtgaaagcaatggtacccgtgttgagagtaccggcgacggtaacgtccgtacccgtctgggtg

SEQ ID NO: 476540 - DNA, 75 bp, synthetic construct
  source 1..75: mol_type = other DNA
atacggcaaacatggctgcagcaaacaccatgtttgtgacccgtcttcatgagcgtctggggccggtgcagtaca

SEQ ID NO: 476541 - DNA, 75 bp, synthetic construct
  source 1..75: mol_type = other DNA
tgcgtggagatgtcgcttcacgtcgccggatgattgaaagtaacctgcgtctggtcgtgaagattgcccgccgtt

SEQ ID NO: 476542 - DNA, 75 bp, synthetic construct
  source 1..75: mol_type = other DNA
tcgaaactgaactggatctcatcggtaaaatcggcctacaaaattacctgcaatcacaaattaaagttaatgatt

SEQ ID NO: 476543 - DNA, 75 bp, synthetic construct
  source 1..75: mol_type = other DNA
acaccaacccgctttggcaatatgtcaggccagatgcgtactttcctggatcagactggcggcctgtgggcttcc

SEQ ID NO: 476544 - DNA, 75 bp, synthetic construct
  source 1..75: mol_type = other DNA
gaaagtgacattgtgccgatgccaccgacaaaaaacattttgcagaagaaggtcacccctgcggtcacggctgcg

SEQ ID NO: 476545 - DNA, 75 bp, synthetic construct
  source 1..75: mol_type = other DNA
gaaaaaaaaccagacagattatctttttttatctacacacagttcgaaaatatcccgacaatggttttatcggtt

SEQ ID NO: 476546 - DNA, 75 bp, synthetic construct
  source 1..75: mol_type = other DNA
catccgcatcgtactggtaatcaggataatgaaacagcacaaataatggcgttatgtgactgtcaggcgttagca

SEQ ID NO: 476547 - DNA, 75 bp, synthetic construct
  source 1..75: mol_type = other DNA
atgaacttcagacgcctgaaatacttcgtaaaaattgtagatattggtagcctgactcaggctgctgaagtattg

SEQ ID NO: 476548 - DNA, 75 bp, synthetic construct
  source 1..75: mol_type = other DNA
aggctttgctgaaagaagatctttttctggtaggaactcaagattgcccggggcaaagcgttgatgttaatgcta

SEQ ID NO: 476549 - DNA, 75 bp, synthetic construct
  source 1..75: mol_type = other DNA
gcggcgattattttaatgtctatggcatgaccttcagtgaagggaacacctttaatcaggagcagctgaacggtc

SEQ ID NO: 476550 - DNA, 75 bp, synthetic construct
  source 1..75: mol_type = other DNA
cgtatggaactccaggccgactgttttgccggtgtctgggggcatagtatgcagcagcaaggtgttctggaaacc

SEQ ID NO: 476551 - DNA, 75 bp, synthetic construct
  source 1..75: mol_type = other DNA
tccattatgggaccgttctattgcccggcggatggcacggtttatatcgatctctccttctatgatgacatgaaa

SEQ ID NO: 476552 - DNA, 75 bp, synthetic construct
  source 1..75: mol_type = other DNA
ttattaggcggctgaaaaacggattatcaacttcacatccattgcagccagaaacaatagaactattgcaacgct

SEQ ID NO: 476553 - DNA, 75 bp, synthetic construct
  source 1..75: mol_type = other DNA
gaaagtgacattgtgccgatgcccccggcaaaaagaattttgcagaagaaggtcacccctgcggtcacggctgcg

SEQ ID NO: 476554 - DNA, 75 bp, synthetic construct
  source 1..75: mol_type = other DNA
atggcagaaatggtaagcgttggctgcaaattgccaaatggccttcaggtaactctggatggaaaaacggtaatt

SEQ ID NO: 476555 - DNA, 75 bp, synthetic construct
  source 1..75: mol_type = other DNA
atggttatgcggtcattattgaataatttggatatctcatatcgatatgtagtaaataatttattggcagctcgt

SEQ ID NO: 476556 - DNA, 75 bp, synthetic construct
  source 1..75: mol_type = other DNA
attggggtacgtggcgttaaaaccaatgataacgccacatatgaccccgtttttaagggggctgtcgtgattgcg

SEQ ID NO: 476557 - DNA, 75 bp, synthetic construct
  source 1..75: mol_type = other DNA
cccgcaactgaggcagactgccgccattcaccgcgttgagatcaggactgagccggaaatgttagagcttctcag

SEQ ID NO: 476558 - DNA, 75 bp, synthetic construct
  source 1..75: mol_type = other DNA
ctggttcaaactggacattgagcgctatatgaaggctgttgagcgtgccaagaatgagcgaaatgttgatgagga

SEQ ID NO: 476559 - DNA, 75 bp, synthetic construct
  source 1..75: mol_type = other DNA
ttattaaccgtcttatccgtgattacaacttcaaagaagaaaataactacctccggtatggtgtttgtccgcaat

SEQ ID NO: 476560 - DNA, 75 bp, synthetic construct
  source 1..75: mol_type = other DNA
gttcaccacgtgaagatccaaaccaatcccgaaatgataaagcttctcaaggctggccgttctcgatcgctgatt

SEQ ID NO: 476561 - DNA, 75 bp, synthetic construct
  source 1..75: mol_type = other DNA
tgatggcgttctgggagacgttcgactatctggacggcatcacagcatacggcgtaaatcattttggcaagggac

SEQ ID NO: 476562 - DNA, 75 bp, synthetic construct
  source 1..75: mol_type = other DNA
acgtctggtttgggcctttgatggcgataaggccggaacgaaacacaccctttcatttgcatcacgcagcaagtc

SEQ ID NO: 476563 - DNA, 75 bp, synthetic construct
  source 1..75: mol_type = other DNA
ttcaaattctggaatattttgaccggattggttttacgcgtcgtcgggggaatgatcatttattacgtgatgcat

SEQ ID NO: 476564 - DNA, 75 bp, synthetic construct
  source 1..75: mol_type = other DNA
ttgaatgcgccggttgccgcccgctggcagcggaaaattctcgacacattagcgacttatcatgagcaacatcgc

SEQ ID NO: 476565 - DNA, 75 bp, synthetic construct
  source 1..75: mol_type = other DNA
gctgtatgagatgaacgacgaggattacttcgaaatcaacagtgccagcgttaagagcctgagcctcacgccggc

SEQ ID NO: 476566 - DNA, 75 bp, synthetic construct
  source 1..75: mol_type = other DNA
tagctaactgctggctgacgccgctttactttcagcggtctgaacctacggacgagtcctggtattacgtgaaag

SEQ ID NO: 476567 - DNA, 75 bp, synthetic construct
  source 1..75: mol_type = other DNA
ataaaacacgtgaagccatcaccgcgctggccatcgagcgctgccatgcactcaaaaaggatcatccacttgttc

SEQ ID NO: 476568 - DNA, 75 bp, synthetic construct
  source 1..75: mol_type = other DNA
acaataacaacacctatgacccggattttaagggcgctatcgtgattgcgcagaatgcgcgggtaaacgcctctc

SEQ ID NO: 476569 - DNA, 75 bp, synthetic construct
  source 1..75: mol_type = other DNA
gtgaccgtagtggccagccagcctgtcaccacacaaatcatgccggagctggccgccattcagggcgtgatggca

SEQ ID NO: 476570 - DNA, 75 bp, synthetic construct
  source 1..75: mol_type = other DNA
agggggaatgatgaagaaattatttattgctacatgtttattgcttcctgggcttgtgtattcagcagcgactcc

SEQ ID NO: 476571 - DNA, 75 bp, synthetic construct
  source 1..75: mol_type = other DNA
gagatgaaacacgccgatcgttatatagagcgcattctttttctggaaggtcttccaaacttacaggacctgggc

SEQ ID NO: 476572 - DNA, 75 bp, synthetic construct
  source 1..75: mol_type = other DNA
gctctgactgcccgccagtattatgaaaaacaactcggtagccttgagaaaacaatcaatcaggcaaacgcacgt

SEQ ID NO: 476573 - DNA, 75 bp, synthetic construct
  source 1..75: mol_type = other DNA
tcaatgccattctggatgcggcggcagaaccccagcagtccctgatagctgacagtatccccaattccgccacca

SEQ ID NO: 476574 - DNA, 75 bp, synthetic construct
  source 1..75: mol_type = other DNA
gcactggccagcatcctgaccactgagcaggaaatcgcaacggcgattgctgaaaacgcgtcaaaaaccaatgcc

SEQ ID NO: 476575 - DNA, 75 bp, synthetic construct
  source 1..75: mol_type = other DNA
tggcgaccgttattatcatgcaccgtctggaaaatatcgtggttttatcggtgtgaaagttcgcgtgaatgatga

SEQ ID NO: 476576 - DNA, 75 bp, synthetic construct
  source 1..75: mol_type = other DNA
atggcaaccagtaccaataaacgaaacgctctaaggactaagaaagcgttgcggcaatggtctgaaaaggcaact

SEQ ID NO: 476577 - DNA, 75 bp, synthetic construct
  source 1..75: mol_type = other DNA
catcgccggaaagctgcgtggccatgatgtgaaaagataccgttattacggtgatttattgctggcgaaatctcc

SEQ ID NO: 476578 - DNA, 75 bp, synthetic construct
  source 1..75: mol_type = other DNA
atgaaaaagattatcgctggcatcgttcttactatgggtttggttggtactgctaatgctaatacctattatgtg

SEQ ID NO: 476579 - DNA, 75 bp, synthetic construct
  source 1..75: mol_type = other DNA
tcaaaagccctaaattgaaagaagataagaacgagaaagaagaatattatggttccgaagatggtaaagcctaca

SEQ ID NO: 476580 - DNA, 75 bp, synthetic construct
  source 1..75: mol_type = other DNA
gagtgatggcgaccgttattatcatgcgccgtctggcaaataccgtggttttatcggtgtaaaggttcgagtgaa

SEQ ID NO: 476581 - DNA, 75 bp, synthetic construct
  source 1..75: mol_type = other DNA
gaatcgctgtgtgagttcaccgtaaaggaacgtaatattgagtttaaggctgttctcgcttacgaaccgaagaag

SEQ ID NO: 476582 - DNA, 75 bp, synthetic construct
  source 1..75: mol_type = other DNA
ctgtcatagtgctgtgtttaacggtgctgggatttacgcttctggtcggagactcgctgtgtgagtttacggtga

SEQ ID NO: 476583 - DNA, 75 bp, synthetic construct
  source 1..75: mol_type = other DNA
taaagcatggagttaaagattgctttaagcttcgccccgacttgctgattcaatcaaataaaccagttcaaaccg

SEQ ID NO: 476584 - DNA, 75 bp, synthetic construct
  source 1..75: mol_type = other DNA
atgctgacgaaatatgcccttgtggcagtcatagtgctgtgtttaacggtgctgggatttacgcttctggtcggc

SEQ ID NO: 476585 - DNA, 75 bp, synthetic construct
  source 1..75: mol_type = other DNA
atgctgacgaaatatgcccttgtggcagtcatagtgctgtgtttaacggtcctgggatttacgcttctggtcggg

SEQ ID NO: 476586 - DNA, 75 bp, synthetic construct
  source 1..75: mol_type = other DNA
atgctgacaaaatatgcccttgtggcaatcatagtactgtgttgtacagtactgggattcacgctgatggtaggc

SEQ ID NO: 476587 - DNA, 75 bp, synthetic construct
  source 1..75: mol_type = other DNA
tgtcgcctcacccgtaaaaaatcactaccccgcgttaccgctggagcggttgcccgaactgcttggccgcattgg

SEQ ID NO: 476588 - DNA, 75 bp, synthetic construct
  source 1..75: mol_type = other DNA
cgggcgttgcgtcttatgggctatgataccaaaactgatgtctgtgggcatggattccggacaatggcgtgtagc

SEQ ID NO: 476589 - DNA, 75 bp, synthetic construct
  source 1..75: mol_type = other DNA
actgcgcttcgcccgctggagcgagattgatttcagaaacaaaatctggaccattcccgccacaagggaaacaat

SEQ ID NO: 476590 - DNA, 75 bp, synthetic construct
  source 1..75: mol_type = other DNA
acaacacagtatgggctagcgcaagccgacttctatcaaatgtttgcctacggtcaaaaatacctaaatgggatt

SEQ ID NO: 476591 - DNA, 75 bp, synthetic construct
  source 1..75: mol_type = other DNA
tgaagcacgggtctaacgattgctttaaacttcggccggatttgttgattcagtcacgtcgaccggtacaaacca

SEQ ID NO: 476592 - DNA, 75 bp, synthetic construct
  source 1..75: mol_type = other DNA
atgggtgaagttatctccgtttttgaatatgacctattggggagtgacaaagcggcttcagttggcgcaaaactg

SEQ ID NO: 476593 - DNA, 75 bp, synthetic construct
  source 1..75: mol_type = other DNA
atgctgacgaaatatgcccttgtggcagtcatagtgctgtgttttacggtactgggatttacgcttctggtcggt

SEQ ID NO: 476594 - DNA, 75 bp, synthetic construct
  source 1..75: mol_type = other DNA
atcaatgttcctcgccttaaatggttattttacgccttttatccggtgcacctttatctgatactggccctgaga

SEQ ID NO: 476595 - DNA, 75 bp, synthetic construct
  source 1..75: mol_type = other DNA
ataaaaaagagcagggcgtttttctgtttctggcgttactttcctgcgcggcgctcgcggtgataaatcagaact

SEQ ID NO: 476596 - DNA, 75 bp, synthetic construct
  source 1..75: mol_type = other DNA
gtttcgccacggcttttgatagccgcttctacatgaaaaatgcctctaacgatcccagcgaccaaatcttcctga

SEQ ID NO: 476597 - DNA, 75 bp, synthetic construct
  source 1..75: mol_type = other DNA
tatatcatgtgacagataaatttgatattaatccagacaccttagttctgggcattcctttatcaacatgtttgc

SEQ ID NO: 476598 - DNA, 75 bp, synthetic construct
  source 1..75: mol_type = other DNA
ataatgcattatgttacccagaataaaccatggtacaaaatatttagagcacaaaattttgatcattatttttca

SEQ ID NO: 476599 - DNA, 75 bp, synthetic construct
  source 1..75: mol_type = other DNA
cttgactgtgatgtcatatgtaatagccatttagatgaactggttgattataatttaaatgctaatattgcatgt

SEQ ID NO: 476600 - DNA, 75 bp, synthetic construct
  source 1..75: mol_type = other DNA
tgacctttatttatgtgcaggggatggcgctgacctacacggcgctgggtctggtggttgccgccgcagggttac

SEQ ID NO: 476601 - DNA, 75 bp, synthetic construct
  source 1..75: mol_type = other DNA
atcaagcctttgcttttgattttcagcaaaaccaacatgaccttaatctgacctggcagatcaaagacggttact

SEQ ID NO: 476602 - DNA, 75 bp, synthetic construct
  source 1..75: mol_type = other DNA
atgctgacgaaatatgcccttgtggcagtcatagtgctgtgttttacggttctgggatttacgcttctggtcgga

SEQ ID NO: 476603 - DNA, 75 bp, synthetic construct
  source 1..75: mol_type = other DNA
aatgggcagacctgacttactcaaagccgccttccctttccactcttcgccgctgggcacgagaggggcgtattt

SEQ ID NO: 476604 - DNA, 75 bp, synthetic construct
  source 1..75: mol_type = other DNA
acaactcccctcctcgctgcaaacgcgcctcacgctgatgagcaatcgccaacagggcggctcacctggcggtgt

SEQ ID NO: 476605 - DNA, 75 bp, synthetic construct
  source 1..75: mol_type = other DNA
gtctttaccttgctggcgatgtcaatgtttggcttgtttaccctgcaactcccctcttcgctgcaaacacgtctc

SEQ ID NO: 476606 - DNA, 75 bp, synthetic construct
  source 1..75: mol_type = other DNA
tcgggaacctacctgtatcagaacttaaaccccgtcatttcattgacctgcagaaagggatcgaggaaaaaggtc

SEQ ID NO: 476607 - DNA, 75 bp, synthetic construct
  source 1..75: mol_type = other DNA
atgttaacggcacgcggcagtgaacttgatcgcgtcctcggccttgagttaggcgctgatgactatctcccgaaa

SEQ ID NO: 476608 - DNA, 75 bp, synthetic construct
  source 1..75: mol_type = other DNA
tactaattgtacgccgaatgctggaattgcatggaggcggcatccacctgatggatgccacacccggtgcctgtt

SEQ ID NO: 476609 - DNA, 75 bp, synthetic construct
  source 1..75: mol_type = other DNA
gtgggacaggtcactccgaatcccgatggttcttacaatgtcgcttatcagttggttgacactggcggcgctccg

SEQ ID NO: 476610 - DNA, 75 bp, synthetic construct
  source 1..75: mol_type = other DNA
atgaaaaagaaaacaacacttagcgaggaggaccaggctctgtttcgccagttgatggcggggactcgcaagatt

SEQ ID NO: 476611 - DNA, 75 bp, synthetic construct
  source 1..75: mol_type = other DNA
tttcgaccgtgctatcgatatgcacatctccaacctacgccgtaagctgccggatcgcaaagacgggcatccgtg

SEQ ID NO: 476612 - DNA, 75 bp, synthetic construct
  source 1..75: mol_type = other DNA
gtttcccgtgaacatttaagccaggaagtgctgggcaaacgtctgacgcctttcgaccgcgctatcgatatgcac

SEQ ID NO: 476613 - DNA, 75 bp, synthetic construct
  source 1..75: mol_type = other DNA
tgatttttcgtcagtagatcggtgtaatgccgccctgatggcgacaaccgtggcagagtattttagagatcgagg

SEQ ID NO: 476614 - DNA, 75 bp, synthetic construct
  source 1..75: mol_type = other DNA
gataaaaagagcacaagaaaaattaattgaaaagagtaagactgaagagacaggccaggtttcacaagcagttct

SEQ ID NO: 476615 - DNA, 75 bp, synthetic construct
  source 1..75: mol_type = other DNA
cgcagagggtaaaccacaaaatgtgttgacccagcaaacactgacaatgctctatggcgcggatattacggtatt

SEQ ID NO: 476616 - DNA, 75 bp, synthetic construct
  source 1..75: mol_type = other DNA
tgctctgggcatcgatgccgtggttgtgggacaggtcactccgaatcccgatggttcttacaatgtcgcttatca

SEQ ID NO: 476617 - DNA, 75 bp, synthetic construct
  source 1..75: mol_type = other DNA
ttaagggtgcgttccgtactcgtattgcctacgttgttcagaccaacggtggtcagttcccgtacgaattgcgcg

SEQ ID NO: 476618 - DNA, 75 bp, synthetic construct
  source 1..75: mol_type = other DNA
ttctcgccagacggcagcaagctggcattcgctctgtcgaaaaccggtagcctgaacctgtacgtaatggatttg

SEQ ID NO: 476619 - DNA, 75 bp, synthetic construct
  source 1..75: mol_type = other DNA
cacggtttgacgcagttgcaagccaagcaggagttaggcgcattgattgccgcctgccgccgtgaacatgtgttt

SEQ ID NO: 476620 - DNA, 75 bp, synthetic construct
  source 1..75: mol_type = other DNA
gaaacacacatatgaagtgtactttggatatgagcgtacgttcaggaagtacggcagattccgtcaaaaattacc

SEQ ID NO: 476621 - DNA, 75 bp, synthetic construct
  source 1..75: mol_type = other DNA
ttacagtgagcaggtacgccctgaagccttcataatcggtagtgtgtgttgtttttctggaatgatttatccaca

SEQ ID NO: 476622 - DNA, 75 bp, synthetic construct
  source 1..75: mol_type = other DNA
aatgccgccctgatggcgacaaccgtggcagagtattttcgagatcgaggaaagagagttgtactttttatcgac

SEQ ID NO: 476623 - DNA, 75 bp, synthetic construct
  source 1..75: mol_type = other DNA
atgtcgctgccgcacctctcccttgctgatgcgcgtaatcttcaccttgccgcacaaggcctgttaaacaaaccc

SEQ ID NO: 476624 - DNA, 75 bp, synthetic construct
  source 1..75: mol_type = other DNA
aaacgttctgtgatgaatcatattgcggccctttgtgagtccgggctggtaaaaaaaagtcaacccggaaaggtg

SEQ ID NO: 476625 - DNA, 75 bp, synthetic construct
  source 1..75: mol_type = other DNA
tacaacgtttatcgactcacacgaacaacgatggtttaccgccttgcttacatgaagaaaagtggaaacaggtta

SEQ ID NO: 476626 - DNA, 75 bp, synthetic construct
  source 1..75: mol_type = other DNA
ttcaccggagctgtttttggatttgcacggtttgacgcagctgcaagccaagcaggagttagggaaggtgcgaac

SEQ ID NO: 476627 - DNA, 75 bp, synthetic construct
  source 1..75: mol_type = other DNA
aaagagtatggcggtgatgcggctttgttggtgttgattgaagtggaagagtggctgccgccggagttgccctga

SEQ ID NO: 476628 - DNA, 75 bp, synthetic construct
  source 1..75: mol_type = other DNA
atgaaaaagaaaacaacactcagcgaggaggatcaggcactgtttcgccagttgatggcgggtactcgcaaaatt

SEQ ID NO: 476629 - DNA, 75 bp, synthetic construct
  source 1..75: mol_type = other DNA
ccacctgtggaaatgaggctccggagtatctgaaagagtgcccatattgtggtgagagcaagtgtaatctctgcg

SEQ ID NO: 476630 - DNA, 75 bp, synthetic construct
  source 1..75: mol_type = other DNA
caggcggatgccagccattatttctccgatgagtttcaaccgttattaaataccgaaggcccggtgaaatatgtc

SEQ ID NO: 476631 - DNA, 75 bp, synthetic construct
  source 1..75: mol_type = other DNA
aaagagtacggtggtgatgcggcattgctggtgttgatagaagtggatgagtggctgccgccggaattgccctga

SEQ ID NO: 476632 - DNA, 75 bp, synthetic construct
  source 1..75: mol_type = other DNA
atgaaaattgaccttaacgccgatctgggcgaaggctgtgccagcgacgcagagctattaacgctggtttcatct

SEQ ID NO: 476633 - DNA, 75 bp, synthetic construct
  source 1..75: mol_type = other DNA
gcatggcgacggtgagcatgcactggcattcgcccgccgactacgatctgcatttgccgaaaaagggattatggt

SEQ ID NO: 476634 - DNA, 75 bp, synthetic construct
  source 1..75: mol_type = other DNA
tgtttgccgatcgtggatatcaggctgacggctcgctggtgtcgcgaagccagccaggcgcgttgattgaagatg

SEQ ID NO: 476635 - DNA, 75 bp, synthetic construct
  source 1..75: mol_type = other DNA
atgagctacgccatcaggtatgacattgctgactttgagcgctcactcggtgaactcattaaaaagctggaaaac

SEQ ID NO: 476636 - DNA, 75 bp, synthetic construct
  source 1..75: mol_type = other DNA
tgaactcattaaaaagctggaaaaccgagcccccctgatgcgcgagatggccgctgccatgggcgatgccgtcga

SEQ ID NO: 476637 - DNA, 75 bp, synthetic construct
  source 1..75: mol_type = other DNA
atgaaaattgacctgaacgccgatctgggtgaaggctgcgccagtgacgctgagctattaacgctggtttcctca

SEQ ID NO: 476638 - DNA, 75 bp, synthetic construct
  source 1..75: mol_type = other DNA
gcgcagtctggtaatgggattcggcagcggcgcgctgcttattctcgcgctgtttttatttgatctactggtcgt

SEQ ID NO: 476639 - DNA, 75 bp, synthetic construct
  source 1..75: mol_type = other DNA
cagagcacaaacattatatgttgaacaacgattttattccttgtaatttccattttggggtatgggcaagttatt

SEQ ID NO: 476640 - DNA, 75 bp, synthetic construct
  source 1..75: mol_type = other DNA
aaggtctgactcaggcagctcgtaacgccaacgacggtatctccgttgcacagaccactgaaggcgcactgtctg

SEQ ID NO: 476641 - DNA, 75 bp, synthetic construct
  source 1..75: mol_type = other DNA
atgcagctgccgccagaaaccgtttacgcccagacgctgtatcaaattggcgcgctggcaacgattgcccgtgcg

SEQ ID NO: 476642 - DNA, 75 bp, synthetic construct
  source 1..75: mol_type = other DNA
gccaatattgcctgtggatttcatgcaggcgacgcgcaaaccatgcaggcttgcgtgcgtgaagcaataaaaaat

SEQ ID NO: 476643 - DNA, 75 bp, synthetic construct
  source 1..75: mol_type = other DNA
atgaaaattgacctgaacgccgatctgggcgaaggctgcgccagcgacgcagagctattaacgctggtttcctct

SEQ ID NO: 476644 - DNA, 75 bp, synthetic construct
  source 1..75: mol_type = other DNA
gattggcgcaggccagatgagccgcgtgtactccgcaaaaatcgccggcattaaagctgccgatgaaggcctgga

SEQ ID NO: 476645 - DNA, 75 bp, synthetic construct
  source 1..75: mol_type = other DNA
gcgtaaattcctctatgacaccaacgttggggctggattaccggttattgagaacctgcaaaatctgctcaatgc

SEQ ID NO: 476646 - DNA, 75 bp, synthetic construct
  source 1..75: mol_type = other DNA
acatcgatatcttcgcgcaaagccataaagcttcgctactgccactgtgttgtgcgttgtcagcagagaccgcca

SEQ ID NO: 476647 - DNA, 75 bp, synthetic construct
  source 1..75: mol_type = other DNA
atggctgcggttaaggaacccgaccctgacaaagcctttgcaaaaggcatgatcgcacaccatgaaggcgcaata

SEQ ID NO: 476648 - DNA, 75 bp, synthetic construct
  source 1..75: mol_type = other DNA
tcggtgcggggttgccggtcattgagaacttgcaaaacctgctcaacgcgggtgatgaattgatgaaattctctg

SEQ ID NO: 476649 - DNA, 75 bp, synthetic construct
  source 1..75: mol_type = other DNA
acaccggaaatccacaagcgccagggacgctcattggtgccagccgtgatgaagatgaattaccggtcaagggta

SEQ ID NO: 476650 - DNA, 75 bp, synthetic construct
  source 1..75: mol_type = other DNA
cttctgaacgctcaatctctgtcgtggtaaataacgatgatgcgaccactggcgtgcgcgttactcatcagatgc

SEQ ID NO: 476651 - DNA, 75 bp, synthetic construct
  source 1..75: mol_type = other DNA
ttcttgcagttgcggcagcacttgatttgcatctaaacgcgcggatactgttgatcgaatgggacccacaagggt

SEQ ID NO: 476652 - DNA, 75 bp, synthetic construct
  source 1..75: mol_type = other DNA
gggtccatccgtgatgaagaagtgattgccgctgccgatgaacacggtatcgcgatggtcttcaccgacatgcgc

SEQ ID NO: 476653 - DNA, 75 bp, synthetic construct
  source 1..75: mol_type = other DNA
cggcgtggctatcggcaattccattcttgacgcttacgatcgcgcgtacaaaaccgacccgacctccgcattcgg

SEQ ID NO: 476654 - DNA, 75 bp, synthetic construct
  source 1..75: mol_type = other DNA
cctgaaattgttgaatttaatccccaatcgcttacggatcttgtagagaaggttggtcattatgatggtgagttg

SEQ ID NO: 476655 - DNA, 75 bp, synthetic construct
  source 1..75: mol_type = other DNA
atgtctgaactgaattatgaagcaataggtcgctgcaaaatccttaatgaaaagatcaaagatcttcatgctgaa

SEQ ID NO: 476656 - DNA, 75 bp, synthetic construct
  source 1..75: mol_type = other DNA
aatttgccggcaggctactttggtattgtgttggggacgatagggatgggatttgcctggcgctatgccagctag

SEQ ID NO: 476657 - DNA, 75 bp, synthetic construct
  source 1..75: mol_type = other DNA
gcctctcgctgatcactcagaacaacatcaacaaaaaccagtcttcaatgtctactgccattgagcgtctgtctt

SEQ ID NO: 476658 - DNA, 75 bp, synthetic construct
  source 1..75: mol_type = other DNA
aaggcctgactcaggcggcccgtaacgccaacgacggtatctctctggcgcagaccaccgaaggtgcgctgtctg

SEQ ID NO: 476659 - DNA, 75 bp, synthetic construct
  source 1..75: mol_type = other DNA
cgcaaaacgtcaaaaccgcggctcccgaaactcaaaagatgatgggggcaaaaaacagaggtgtattaaagatgg

SEQ ID NO: 476660 - DNA, 75 bp, synthetic construct
  source 1..75: mol_type = other DNA
ctgcaatggtgctggccgcaagcctgttaatgacaggctgtgtatcttctggctacggcaattattccaacgcca

SEQ ID NO: 476661 - DNA, 75 bp, synthetic construct
  source 1..75: mol_type = other DNA
gctaaccgttttacttctaacattaaaggcctgactcaggcggcccgtaacgccaacgacggtatctccgttgcg

SEQ ID NO: 476662 - DNA, 75 bp, synthetic construct
  source 1..75: mol_type = other DNA
tgctggtaagggtggatccctgacctttggtgacacgacgtataaaattggtcagggtacggctggggttaatcc

SEQ ID NO: 476663 - DNA, 75 bp, synthetic construct
  source 1..75: mol_type = other DNA
gatggtaagatttctattggtggtgttgctgcttatgtagatgcagcaggcaatctgaccactaacgcagcaggt

SEQ ID NO: 476664 - DNA, 75 bp, synthetic construct
  source 1..75: mol_type = other DNA
cgttgtggggatttcttgccaacaccgatatctcttacgatccgcagcaaattgacgcccaaacctgtatggcct

SEQ ID NO: 476665 - DNA, 75 bp, synthetic construct
  source 1..75: mol_type = other DNA
cgcgcatgtcaaagagttgatagcaacatatcagcccgaaaccataacatttcatcataaagcattaatgatatc

SEQ ID NO: 476666 - DNA, 75 bp, synthetic construct
  source 1..75: mol_type = other DNA
acaagctaaagcaaattagagaaataaggttagcaggacttgaggttatccatgtcatccatcgacacggaatga

SEQ ID NO: 476667 - DNA, 75 bp, synthetic construct
  source 1..75: mol_type = other DNA
gacctgctggcgaacggagaaacggttctgcgggatgcatccggagagaaacgttttgaaggtgaaaaggacagc

SEQ ID NO: 476668 - DNA, 75 bp, synthetic construct
  source 1..75: mol_type = other DNA
cggtcacggcgcaaacggtctgcctgcatggcgatggagagcacgcactggcgttcgcccgccgactacgctcta

SEQ ID NO: 476669 - DNA, 75 bp, synthetic construct
  source 1..75: mol_type = other DNA
gcggtatacgcttgcgatccggcattgattctcgtcgggctggcaggaagcgagctgattcgtgcaggcgaacga

SEQ ID NO: 476670 - DNA, 75 bp, synthetic construct
  source 1..75: mol_type = other DNA
ggcaacccgaacaaagcaaccgtttctgggcttctcggaaatacggatgcgaaaggtactgctgttaaaacaacc

SEQ ID NO: 476671 - DNA, 75 bp, synthetic construct
  source 1..75: mol_type = other DNA
ggtgcggtgcagaaccgtctggattccgcagtcaccaacctgaacaacaccactaccaacctgtctgaagcgcag

SEQ ID NO: 476672 - DNA, 75 bp, synthetic construct
  source 1..75: mol_type = other DNA
ctctgtacaaagcggctgacggttctctgaccactgaagctactggtaaatccgaagtgaccacggatccgctga

SEQ ID NO: 476673 - DNA, 75 bp, synthetic construct
  source 1..75: mol_type = other DNA
cggtagcgccattgccaattatccctcatgggtgctgtggttgaatcatgcacagtggttcggtattccgctacc

SEQ ID NO: 476674 - DNA, 75 bp, synthetic construct
  source 1..75: mol_type = other DNA
agtaatacggttactcagacttatcacgagtttgctaatggtaacatttatgatgacaaaggctcgtcactgtat

SEQ ID NO: 476675 - DNA, 75 bp, synthetic construct
  source 1..75: mol_type = other DNA
caacatgtcgaaagcgcagattatccagcaggcaggtaactccgtgttggcaaaagctaaccaggtaccgcagca

SEQ ID NO: 476676 - DNA, 75 bp, synthetic construct
  source 1..75: mol_type = other DNA
gatggcgcgcagaaagcaaccggcagtgacctgatttctaaatttaaagcgacaggtactgataattatcaaatt

SEQ ID NO: 476677 - DNA, 75 bp, synthetic construct
  source 1..75: mol_type = other DNA
tcggtgcggtgcagaaccgtctggattccgcggtcaccaacctgaacaacaccactaccaacctgtccgaagcgc

SEQ ID NO: 476678 - DNA, 75 bp, synthetic construct
  source 1..75: mol_type = other DNA
tagcacggatattttgaatgcggtagctggtgttgatggcagtaaagtttccacggcggcagatgttggttttgg

SEQ ID NO: 476679 - DNA, 75 bp, synthetic construct
  source 1..75: mol_type = other DNA
gtatccggccagacccagttcaacggcgtgaacgtgctggcgaaagacggttcgatgaaaattcaggttggagcg

SEQ ID NO: 476680 - DNA, 75 bp, synthetic construct
  source 1..75: mol_type = other DNA
tcaaagctgcggatgcggggacatttggtgctgatttagctcctgatgttggtaaaattaaaggctcttatgctg

SEQ ID NO: 476681 - DNA, 75 bp, synthetic construct
  source 1..75: mol_type = other DNA
aaattgctgtagctaataattcaacaactacgacgggggcatcactcagcgcaaaaattagttacacttctgggc

SEQ ID NO: 476682 - DNA, 75 bp, synthetic construct
  source 1..75: mol_type = other DNA
aagttgactattggtggtcaaactgcttatctggattcagcaggtaacctcacgacaaacaatgctggtaatgga

SEQ ID NO: 476683 - DNA, 75 bp, synthetic construct
  source 1..75: mol_type = other DNA
gccctttataatttgagctggacgtttatttgtttttttatttttgcagtaatctatttttttgtgcagattttt

SEQ ID NO: 476684 - DNA, 75 bp, synthetic construct
  source 1..75: mol_type = other DNA
gagctatgtgaacactatcaatttagcgttagcacgctgcggcgctggcaagaacagcacgctgacggcatcaga

SEQ ID NO: 476685 - DNA, 75 bp, synthetic construct
  source 1..75: mol_type = other DNA
cattgctatcgtcattatactcacgcttatatttggtaaacctacaggtggatgggcaataccgcctttattact

SEQ ID NO: 476686 - DNA, 75 bp, synthetic construct
  source 1..75: mol_type = other DNA
tagctgaggggattgaaaatgaagtgtatcataagatgtctgttgaactggatttgtggggagggcaggggtatt

SEQ ID NO: 476687 - DNA, 75 bp, synthetic construct
  source 1..75: mol_type = other DNA
tgtggatacctgaaaaattagccctgaaggtgctgaaggaagcagagaagtacgccatcaatcagagcaaagttg

SEQ ID NO: 476688 - DNA, 75 bp, synthetic construct
  source 1..75: mol_type = other DNA
atggctaaagcccgtttcactgatgaacaaattgctgaaattttacagcagtcaaaaaagggtgcgcctaataaa

SEQ ID NO: 476689 - DNA, 75 bp, synthetic construct
  source 1..75: mol_type = other DNA
tacttaggaacaatgctactgcaatccacaacgaagcggcgtaacatcacaagtaattcagtaatcaattcaggg

SEQ ID NO: 476690 - DNA, 75 bp, synthetic construct
  source 1..75: mol_type = other DNA
cagagggcgatttgtcttacaggacggcagccaggtgacagggggggagggcggcagtatgcataacatcaccct

SEQ ID NO: 476691 - DNA, 75 bp, synthetic construct
  source 1..75: mol_type = other DNA
gcaccttcctgacggcaagctccgcgcttgccttcctccatacccctttcgcccgtgcacttcccgcccgacaaa

SEQ ID NO: 476692 - DNA, 75 bp, synthetic construct
  source 1..75: mol_type = other DNA
attaaagacctggcgatgagcggttttggcccggtgacgcagatctatattggcggcaaaaacaagcgggtcatg

SEQ ID NO: 476693 - DNA, 75 bp, synthetic construct
  source 1..75: mol_type = other DNA
gcaccttcctgacggcaggctccgcgcttgcttttctccatactccttttgcccgtgcaattcccgcccgacaaa

SEQ ID NO: 476694 - DNA, 75 bp, synthetic construct
  source 1..75: mol_type = other DNA
ttggagttacacaacaaaccgcaacatctttttatgcgtaatatcaaggtgatgcaggaatcctcagttggacca

SEQ ID NO: 476695 - DNA, 75 bp, synthetic construct
  source 1..75: mol_type = other DNA
gaaaagaaaataatctcacaataaaagcattgcgagataaaatatctaacattgattctacgatagactcaataa

SEQ ID NO: 476696 - DNA, 75 bp, synthetic construct
  source 1..75: mol_type = other DNA
ggcaacgtattgcgcttaatatcgccggtgatgcggaaaaagaacagattaaccgtggcgactggctgcttgccg

SEQ ID NO: 476697 - DNA, 75 bp, synthetic construct
  source 1..75: mol_type = other DNA
attcaccacgccgccagccacgttacgggacgcgtttcgctgctggaagataaccttgccgagctggtgttcgac

SEQ ID NO: 476698 - DNA, 75 bp, synthetic construct
  source 1..75: mol_type = other DNA
cagccaacagaaaccgcccatgccgggcagcgtatcgcgcttaacatcgcgggtgatgcggaaaaagagcagatt

SEQ ID NO: 476699 - DNA, 75 bp, synthetic construct
  source 1..75: mol_type = other DNA
gcctggttttatcgacgttcccggtcatgaaaagtttctttccaacatgctggcgggcgttggtggtatcgatca

SEQ ID NO: 476700 - DNA, 75 bp, synthetic construct
  source 1..75: mol_type = other DNA
tagcttgttgaatgcgccggttgccgcccgctggcagcggaaaattctcgacacattagcgacttatcatgagca

SEQ ID NO: 476701 - DNA, 75 bp, synthetic construct
  source 1..75: mol_type = other DNA
ggccatctggcaaaaagcagagccgctgtttggtgacgagccgtggtgggtgcgtgacctggcaaaagagacggg

SEQ ID NO: 476702 - DNA, 75 bp, synthetic construct
  source 1..75: mol_type = other DNA
gctttctatagatatataaatagaggttcacactcagattcgataaacataacagatatgggtgaaataacaccc

SEQ ID NO: 476703 - DNA, 75 bp, synthetic construct
  source 1..75: mol_type = other DNA
ttctctattttattgaatattgtaagggacaaacaaacacagatgaattcgacaaccgagacagtttaatcgtca

SEQ ID NO: 476704 - DNA, 75 bp, synthetic construct
  source 1..75: mol_type = other DNA
atatagcatcgatgattcactatgacattttcacttctgctaataaagtgataatcctcactcataatctatatt

SEQ ID NO: 476705 - DNA, 75 bp, synthetic construct
  source 1..75: mol_type = other DNA
atgattattgcgactgccggacacgttgaccacggcaaaacaaccttattgcaggcgattactggcgtaaatgct

SEQ ID NO: 476706 - DNA, 75 bp, synthetic construct
  source 1..75: mol_type = other DNA
tcccctcagttcatccgatttgatcatcctgtgcaagtatctatgcttgagcgagcgctttttaaactgcgaaaa

SEQ ID NO: 476707 - DNA, 75 bp, synthetic construct
  source 1..75: mol_type = other DNA
agaataaaagaaaccttttcacaaaggtaaagtcttctattagattatctgatatagatttaaatcaattattaa

SEQ ID NO: 476708 - DNA, 75 bp, synthetic construct
  source 1..75: mol_type = other DNA
tccttggaagcctgcgcggcaacggcagagggcgttttgtcttacaggacggcagccaggtgacaggggaggagg

SEQ ID NO: 476709 - DNA, 75 bp, synthetic construct
  source 1..75: mol_type = other DNA
tgaacaggcaacggctgaaacaatggcagcggatacagttgaacatcatcaggacccgcagccgctggatgacaa

SEQ ID NO: 476710 - DNA, 75 bp, synthetic construct
  source 1..75: mol_type = other DNA
ggcccgttcaatggacatcgatatttacaatccacatccggcacacgccaaacgcattgaagaaatcgtttcaga

SEQ ID NO: 476711 - DNA, 75 bp, synthetic construct
  source 1..75: mol_type = other DNA
cccaggtatgtgaatgacttaaccggcacattaacaaacagcgaagtaaacaccctgaccaaccagattaaagcc

SEQ ID NO: 476712 - DNA, 75 bp, synthetic construct
  source 1..75: mol_type = other DNA
gatgggcgacgcaacataccaggagacattcaacgaagaaagccaggatgaagcccgggaaaaagatccggagga

SEQ ID NO: 476713 - DNA, 75 bp, synthetic construct
  source 1..75: mol_type = other DNA
ccaacttcgacaacgtaattttaagccgttcatataaacgacaagaaatcccctgcccgtggcgtcactacaacg

SEQ ID NO: 476714 - DNA, 75 bp, synthetic construct
  source 1..75: mol_type = other DNA
aaccctgatccggaaatcgtggatattgcctgcggtcgctcctctgcccctatcccgcagcgtgtaacaaaagaa

SEQ ID NO: 476715 - DNA, 75 bp, synthetic construct
  source 1..75: mol_type = other DNA
gcattctttctggttcgctttcatacatcttcggcaagctagacgaaggcatgagtttctctgaggcgaccacgc

SEQ ID NO: 476716 - DNA, 75 bp, synthetic construct
  source 1..75: mol_type = other DNA
catcagtggcaaatgcggaacgttttctgcgggttgccgatattctggagagcaatgccaggcaggggcaggtgg

SEQ ID NO: 476717 - DNA, 75 bp, synthetic construct
  source 1..75: mol_type = other DNA
attgaacctgtgctgcccgctgagtttaacgccgagggtgatgttgccgcttttatggcgaatctgtcacagctc

SEQ ID NO: 476718 - DNA, 75 bp, synthetic construct
  source 1..75: mol_type = other DNA
gaaagtcgtctgacggggaataatttagcaacgataacaccgaccgattaccctttgccctttagtggttggtgg

SEQ ID NO: 476719 - DNA, 75 bp, synthetic construct
  source 1..75: mol_type = other DNA
cggtaacgaaaaaggcgaactggtggtgctggggcgtaacggttctgactactctgcagccgtactggcagcttg

SEQ ID NO: 476720 - DNA, 75 bp, synthetic construct
  source 1..75: mol_type = other DNA
gcaagccgaattcctgctgaccacatggtgctgatggccggtttcaccgccggtaacgaaaaaggcgaactggtg

SEQ ID NO: 476721 - DNA, 75 bp, synthetic construct
  source 1..75: mol_type = other DNA
agttaatgataatttcttaaaaaaaattacctgtgagtatgggaaaaattatcttggtcattgtgaggaatctgg

SEQ ID NO: 476722 - DNA, 75 bp, synthetic construct
  source 1..75: mol_type = other DNA
aagaggcagggattcaattcgatgagtcgcagtttgtgccgacggtttccggttactactccgacagcaaaactg

SEQ ID NO: 476723 - DNA, 75 bp, synthetic construct
  source 1..75: mol_type = other DNA
ttttgcaggtttatgaagttggcaccgccaccatgatggcgtcgaaagccattaaaccggtgtatgacgtattta

SEQ ID NO: 476724 - DNA, 75 bp, synthetic construct
  source 1..75: mol_type = other DNA
ccaggcggtgaaaaactttgtcgtggcgaatattacaggatcggattgtcgacagctgattcatgttgaaaatgg

SEQ ID NO: 476725 - DNA, 75 bp, synthetic construct
  source 1..75: mol_type = other DNA
cggtaaatgaagcgacttctcttcagcaagggcagaatgtcacggcctactttaatgccgacagcgtgattatcg

SEQ ID NO: 476726 - DNA, 75 bp, synthetic construct
  source 1..75: mol_type = other DNA
cgccgtgggtgaacattactcaggatgacactgtcgcccagggtgccgacaaccaattgccgggcattattcgtc

SEQ ID NO: 476727 - DNA, 75 bp, synthetic construct
  source 1..75: mol_type = other DNA
ttttgcaggtttatgaagttggcaccgccaccatgatggcgtcgaaagccattaaaccggtatatgacgtgttta

SEQ ID NO: 476728 - DNA, 75 bp, synthetic construct
  source 1..75: mol_type = other DNA
tagatcaaagggattcattcgcaacgacacttaagcaatatgttccaacagcaacccctgaaatgataagagatg

SEQ ID NO: 476729 - DNA, 75 bp, synthetic construct
  source 1..75: mol_type = other DNA
aattataaactctggtcaatttcacaatcattggaaaaaagtaatgtatcagtgcctagctagatctgaattttt

SEQ ID NO: 476730 - DNA, 75 bp, synthetic construct
  source 1..75: mol_type = other DNA
cagaaaacgctgccgagtggcatcagaaaaccggttatctgccaatcaccaaagcggcgtatgacctgacccgtg

SEQ ID NO: 476731 - DNA, 75 bp, synthetic construct
  source 1..75: mol_type = other DNA
tctataacggtgattgcgcgatgacgaccgcttcttccggttctcttgccaacattcgcgagtacgccaaattta

SEQ ID NO: 476732 - DNA, 75 bp, synthetic construct
  source 1..75: mol_type = other DNA
aacctggcaggatctggcggactatgccgcaaaactgaaagcctccggtatgaagtgcggctacgccagcggctg

SEQ ID NO: 476733 - DNA, 75 bp, synthetic construct
  source 1..75: mol_type = other DNA
gacgatgttgagaacataaagtacaacattgcaaccattagaatgcccgaagaattgatgcttaaattggctgac

SEQ ID NO: 476734 - DNA, 75 bp, synthetic construct
  source 1..75: mol_type = other DNA
gtaagtctttatcggggactgatcacatttgtcagtctatcgttgatattttaacgaccccgctgggaacccgtg

SEQ ID NO: 476735 - DNA, 75 bp, synthetic construct
  source 1..75: mol_type = other DNA
cacgatgggaaccacgcgtcagaattgacagaataaatgtgttagcagtggatatcgggaaaataacaatattaa

SEQ ID NO: 476736 - DNA, 75 bp, synthetic construct
  source 1..75: mol_type = other DNA
tgccgcgatattgcccgcttacaaaccgatttgcatatcgacggcaatttacagcaattgcggttggtacggtaa

SEQ ID NO: 476737 - DNA, 75 bp, synthetic construct
  source 1..75: mol_type = other DNA
accgatcgctataacgagcgaccgtggggtggcggttttggcctgtcgcgttgggatgaaaaaggaaactggggt

SEQ ID NO: 476738 - DNA, 75 bp, synthetic construct
  source 1..75: mol_type = other DNA
tttcacattcccacttatgattatggtcatattatttcttcagcatcgtgatcaaaaagtgtttttatttaaagg

SEQ ID NO: 476739 - DNA, 75 bp, synthetic construct
  source 1..75: mol_type = other DNA
tgaactgtctctgggcaaactgggcgtgctgggcttcgaaattgaccatgaacgcaacctggctgcacgtttcgg

SEQ ID NO: 476740 - DNA, 75 bp, synthetic construct
  source 1..75: mol_type = other DNA
gaatatacagcatctgcgacggtcgcatagccttcgccatggcaggcgtcatacccgcaaaggcgaaagaggtac

SEQ ID NO: 476741 - DNA, 75 bp, synthetic construct
  source 1..75: mol_type = other DNA
ggatgtggttaacctgcgcgttatgatgggggatggtcatggcccagcggaaggatcgattgaggccagcctgac

SEQ ID NO: 476742 - DNA, 75 bp, synthetic construct
  source 1..75: mol_type = other DNA
aggggggatattaatgcaatacaggcaagcaattctatttctgccgggtttaatagtaacccagggttttgtgct

SEQ ID NO: 476743 - DNA, 75 bp, synthetic construct
  source 1..75: mol_type = other DNA
aaagacatgtcttgcccaatatactcaacatgaactagatctggttgctactcagctagggttaacataccatcc

SEQ ID NO: 476744 - DNA, 75 bp, synthetic construct
  source 1..75: mol_type = other DNA
ttctgctatccgcaacggtaaatgcgttgacacctctatgggtctgaccccgctggaaggtctggtcatgggtac

SEQ ID NO: 476745 - DNA, 75 bp, synthetic construct
  source 1..75: mol_type = other DNA
ctaaaggtgtctcctggtgagcattcagatgcgttacgaattctcaattccacccaggcagtctttaaatctcag

SEQ ID NO: 476746 - DNA, 75 bp, synthetic construct
  source 1..75: mol_type = other DNA
atggctcaagttattaatgaaatggatgttccgtcccattcgtttgtttttcatggtacaggtgagagatatttt

SEQ ID NO: 476747 - DNA, 75 bp, synthetic construct
  source 1..75: mol_type = other DNA
atggatgattgactggcaggcaaaaaatacgtatttgctgggcgatttggatgaccttcctttaatcaataaaga

SEQ ID NO: 476748 - DNA, 75 bp, synthetic construct
  source 1..75: mol_type = other DNA
gccttctttaccatttctgaaagagataaaaaggccggagcatgctccggccttcgttttcattactgtgttttg

SEQ ID NO: 476749 - DNA, 75 bp, synthetic construct
  source 1..75: mol_type = other DNA
catgctccggccttcgttttcattactgtgttttgattacagcgcggcgataacagcctgctgttcaatcagctt

SEQ ID NO: 476750 - DNA, 75 bp, synthetic construct
  source 1..75: mol_type = other DNA
ctgtgtattcaaatgatgatattgagaatttaggtaatgactccaacttattgatagtgttttatgttcagataa

SEQ ID NO: 476751 - DNA, 75 bp, synthetic construct
  source 1..75: mol_type = other DNA
aagcgttatctttatgctaatatggaagttaacggacaacgattttcttatggaattaccggtgggaatgttttt

SEQ ID NO: 476752 - DNA, 75 bp, synthetic construct
  source 1..75: mol_type = other DNA
ataagagcctgaccagactgattgccgatgctgacaaaatgcttgatatgcgcgggccgattgtagacagagagt

SEQ ID NO: 476753 - DNA, 75 bp, synthetic construct
  source 1..75: mol_type = other DNA
gcagcatatgctgcaagagaggagaaacggcgacatgctgaatccgcccagcacgtcgcaacctgacataccgct

SEQ ID NO: 476754 - DNA, 75 bp, synthetic construct
  source 1..75: mol_type = other DNA
cttaaagtgtctcctggtgagcattcagatgcgttacgaattctgaattccacccaggcagtcttcaaatctcag

SEQ ID NO: 476755 - DNA, 75 bp, synthetic construct
  source 1..75: mol_type = other DNA
attgatgaacagggacgcttgcagctggtcaatcacctcggcattgagctaggtcagacgccagagcaaatcctt

SEQ ID NO: 476756 - DNA, 75 bp, synthetic construct
  source 1..75: mol_type = other DNA
tctttgcttgaactctggaaagtccttagcgcctgcgttgaggccgataaaataatcctgatgcaggcgtcgaac

SEQ ID NO: 476757 - DNA, 75 bp, synthetic construct
  source 1..75: mol_type = other DNA
gtgagattgctgttaaaagggctcgtcggaatggcgctggcctggcttgttattggtttcgggatggagttattt

SEQ ID NO: 476758 - DNA, 75 bp, synthetic construct
  source 1..75: mol_type = other DNA
ggcgtcaatcatatcgacaccagtgatttttacggtcctcacgtgactaaccaaatcatccgtgaagcattgcat

SEQ ID NO: 476759 - DNA, 75 bp, synthetic construct
  source 1..75: mol_type = other DNA
gcaaaggaaaaactactttctatggatatttatttagttcctacagttaaagagttttatagtactgaatcaaca

SEQ ID NO: 476760 - DNA, 75 bp, synthetic construct
  source 1..75: mol_type = other DNA
taagcccgaaggtaagaaacagaagcatacgcatcctgtagatgttgtttttagttataaagatccatatttaaa

SEQ ID NO: 476761 - DNA, 75 bp, synthetic construct
  source 1..75: mol_type = other DNA
atttggcaaaacgcatatctgaggatctactgagtcgatttaagtggcagcagcatggcccctgcgaccgagatt

SEQ ID NO: 476762 - DNA, 75 bp, synthetic construct
  source 1..75: mol_type = other DNA
agaacgcagctactctgtggtatcacgccaatactcccaaccgcacggctcagcaggtctataacggccttgccg

SEQ ID NO: 476763 - DNA, 75 bp, synthetic construct
  source 1..75: mol_type = other DNA
atgttgggtggagcggacaatccaaatggtgaattaccgtcttatatcactggcgctgacactatcgataaaatg

SEQ ID NO: 476764 - DNA, 75 bp, synthetic construct
  source 1..75: mol_type = other DNA
gttgctgcccagcagggaacgtgggaacgctggacggtacgcgcggatgaaccgcaatcattccatattgaaggt

SEQ ID NO: 476765 - DNA, 75 bp, synthetic construct
  source 1..75: mol_type = other DNA
gaaccgggaagcggcggctttgttggtgatacgctactggttaacggtgtacaaagcccgtacgttgaagtctcg

SEQ ID NO: 476766 - DNA, 75 bp, synthetic construct
  source 1..75: mol_type = other DNA
tgcatccagcgacattactacccgccgtacgcagtgatattccggtgtttgtcggctccagcaaagatcctcgcg

SEQ ID NO: 476767 - DNA, 75 bp, synthetic construct
  source 1..75: mol_type = other DNA
gaaggcttagtgatcacccagggatttatcggtagcgaaagtaaaggtcgcactacgacactggggcgcggcggt

SEQ ID NO: 476768 - DNA, 75 bp, synthetic construct
  source 1..75: mol_type = other DNA
ttgtttattacaaccgctccggtaaaacagacttagagtttaattatttattagatactctagctaactaccaga

SEQ ID NO: 476769 - DNA, 75 bp, synthetic construct
  source 1..75: mol_type = other DNA
agaagaatatcttccagctacagtggaaactctaacatccccctacatgataattaaacatggtccagtaataga

SEQ ID NO: 476770 - DNA, 75 bp, synthetic construct
  source 1..75: mol_type = other DNA
cgaactattagttatcttatgtctgttgttgctgatatgaacgaaatgattgcggaaaataaattcccgcgtgat

SEQ ID NO: 476771 - DNA, 75 bp, synthetic construct
  source 1..75: mol_type = other DNA
accggccttctgccgctggtcacagacagtcttccgatgcgcttgctgccaactgaaatcatggctggttcgccg

SEQ ID NO: 476772 - DNA, 75 bp, synthetic construct
  source 1..75: mol_type = other DNA
ttattctttttcagatcaggatgatatctggtatgaaaacaaaatttcccacgcggtagaatggcttaaaaatat

SEQ ID NO: 476773 - DNA, 75 bp, synthetic construct
  source 1..75: mol_type = other DNA
gatggcgacaagacctacatgcgtcttggtttcaaaggtgaaactcaggttactgatcagctgaccggttatggt

SEQ ID NO: 476774 - DNA, 75 bp, synthetic construct
  source 1..75: mol_type = other DNA
aatgtatacctggctgctcagtacacccagacttacaacgcaactctggctggtgatttaggttgggcgaacaaa

SEQ ID NO: 476775 - DNA, 75 bp, synthetic construct
  source 1..75: mol_type = other DNA
atggcgcgatgcaactggcaggtcctggagtttttggcccccccacgagatcgccacgtcgctataaccgtgctg

SEQ ID NO: 476776 - DNA, 75 bp, synthetic construct
  source 1..75: mol_type = other DNA
gtgcaacacccatgcaggtggcgctggcgtggctgttacaacgttcaccgaatattttgctgatcccagggacgt

SEQ ID NO: 476777 - DNA, 75 bp, synthetic construct
  source 1..75: mol_type = other DNA
cgcgatggcattgcctacgtgccgttcttcccgctcgggggctttacgccgctgcaatcctccacactttcggat

SEQ ID NO: 476778 - DNA, 75 bp, synthetic construct
  source 1..75: mol_type = other DNA
accgcgttcgaatacaccattatggaaacgttgatacgcaataatggcaaagtggtgagcaaagattcgttaatg

SEQ ID NO: 476779 - DNA, 75 bp, synthetic construct
  source 1..75: mol_type = other DNA
gactcctctctgatgattggtatgccgaagtcactgaccgctgccactggtatggatgctttgactcatgctatt

SEQ ID NO: 476780 - DNA, 75 bp, synthetic construct
  source 1..75: mol_type = other DNA
tctgcaaaaccgcagttgccgatgatcgccatcaacaccacggcgggtactgcgtctgaaatgacccgtttctgc

SEQ ID NO: 476781 - DNA, 75 bp, synthetic construct
  source 1..75: mol_type = other DNA
tgactacaaaatcaacctgctggacgacaaccagttcacccgcgctgctggcatcaacactgatgacatcgtagc

SEQ ID NO: 476782 - DNA, 75 bp, synthetic construct
  source 1..75: mol_type = other DNA
gtaacttcctggaccgacgtactgccagaattcggtggcgacacttacggttctgacaacttcatgcagcagcgt

SEQ ID NO: 476783 - DNA, 75 bp, synthetic construct
  source 1..75: mol_type = other DNA
tgtcaggcaggcattgttaatgtcgtcagtcatgattggtggatttatattttgatttccggcgctggtggggaa

SEQ ID NO: 476784 - DNA, 75 bp, synthetic construct
  source 1..75: mol_type = other DNA
ttactaccatcaattaaattacaaattggtgatcgcgataattatggtaattactgggatggcggccactggcgc

SEQ ID NO: 476785 - DNA, 75 bp, synthetic construct
  source 1..75: mol_type = other DNA
gacgtcaatgcggataatgatatggaatatcccgcacacttgaataaaattcaagttcttcttaattttgccgtg

SEQ ID NO: 476786 - DNA, 75 bp, synthetic construct
  source 1..75: mol_type = other DNA
agcgctcatctgcgacccaaacgcccgggctgaacaacctggagcgtgtccatcaacgtatgcgtattaccgtga

SEQ ID NO: 476787 - DNA, 75 bp, synthetic construct
  source 1..75: mol_type = other DNA
caggcggatttcatccgcaaccagatcctgcagatatctgaagtgccgtggaagatcatcactacagaagacgcc

SEQ ID NO: 476788 - DNA, 75 bp, synthetic construct
  source 1..75: mol_type = other DNA
gctgtatgttgcgttcacccgtgccacacacaacgtgtatcttgttgaacagcaggtggcgcacccgttgtggtg

SEQ ID NO: 476789 - DNA, 75 bp, synthetic construct
  source 1..75: mol_type = other DNA
agcgtggctaccgtgaaggttggaacgaccgtgatgatcatcgcggaaaaggccgcggacatggtcatcggcatt

SEQ ID NO: 476790 - DNA, 75 bp, synthetic construct
  source 1..75: mol_type = other DNA
ggttttgtcagcttcgatcctaatattcgtgaagatctatggcaagacgagcatttgctccgcttgtgtttgcgg

SEQ ID NO: 476791 - DNA, 75 bp, synthetic construct
  source 1..75: mol_type = other DNA
ggctgtcattcaatggctggtatctcgataccattcgctgccaactgcatagtccgctacaacaacatgtcgagc

SEQ ID NO: 476792 - DNA, 75 bp, synthetic construct
  source 1..75: mol_type = other DNA
ccctggcgcactgctggcgcgttaccaccgcagtgattttgctgcgctgttaccgcaccggacgttaaaagaggc

SEQ ID NO: 476793 - DNA, 75 bp, synthetic construct
  source 1..75: mol_type = other DNA
gaggtagaaaagctggaagccaaactgtccagcgccgaagcagaagctcgctctcttgttcaagacaaaggcatg

SEQ ID NO: 476794 - DNA, 75 bp, synthetic construct
  source 1..75: mol_type = other DNA
atggttaaaacagcaagtagaggtaattcaatttttgcaactattaataatattcagaatataatcaagttggca

SEQ ID NO: 476795 - DNA, 75 bp, synthetic construct
  source 1..75: mol_type = other DNA
atgtcagccaaagtatgggttttaggggatgcggtcgtagatctcttgccagaatcagacgggcgcctgcgccta

SEQ ID NO: 476796 - DNA, 75 bp, synthetic construct
  source 1..75: mol_type = other DNA
aagcactgaccagcaactgccggtggtgcaaagccaatccggaaaaattcacggtattcactgagtccggaggca

SEQ ID NO: 476797 - DNA, 75 bp, synthetic construct
  source 1..75: mol_type = other DNA
ataacgtcctggatccacaagcccaggctcaggcggcgagcacgttagtaaatacgctgatggctcagaagatcc

SEQ ID NO: 476798 - DNA, 75 bp, synthetic construct
  source 1..75: mol_type = other DNA
tccggtacggtctggatccgtcagaaagtcgcactgccgcctgatgctgtgctgaccgtgacactttctgacgcg

SEQ ID NO: 476799 - DNA, 75 bp, synthetic construct
  source 1..75: mol_type = other DNA
ctgtccaggccagtggtggcgcaacaactaccgtaccatcgacttcaccgacccaggtgaatccatcttcggcag

SEQ ID NO: 476800 - DNA, 75 bp, synthetic construct
  source 1..75: mol_type = other DNA
gtgctggtagcaacaaaccaggaagatcagccactaggattcatgtttttgaatgaggggcatttagaggctctt

SEQ ID NO: 476801 - DNA, 75 bp, synthetic construct
  source 1..75: mol_type = other DNA
ggacatcaacgccaccagtcggataaaggtcaatacggggccgctggcggggcgtgtactgaatatcatcgggca

SEQ ID NO: 476802 - DNA, 75 bp, synthetic construct
  source 1..75: mol_type = other DNA
caattaatcatccagatatagacatcgcatgtgtagcgaacatagctcataacaaattaggcgaggtgaaaagca

SEQ ID NO: 476803 - DNA, 75 bp, synthetic construct
  source 1..75: mol_type = other DNA
aggagaaacggcgacatgctgaatcagcccagcacgccgcagcctgatataccgttgaaaactattgggccgtaa

SEQ ID NO: 476804 - DNA, 75 bp, synthetic construct
  source 1..75: mol_type = other DNA
catctaccggagccgaaatcacgcatcccgcaggacggcgactggtcacacattctggaggatgtgacgtggaac

SEQ ID NO: 476805 - DNA, 75 bp, synthetic construct
  source 1..75: mol_type = other DNA
actttaaatctgtcaccattgaaaaaagatgaaatagctgtaagcgtgaaggcgttagatatgaacgccatcttt

SEQ ID NO: 476806 - DNA, 75 bp, synthetic construct
  source 1..75: mol_type = other DNA
agtgcattgcccggtatgtcgggaaatacatcagtaagcattttgaagccaggcaacatcgtgataaaggcgttc

SEQ ID NO: 476807 - DNA, 75 bp, synthetic construct
  source 1..75: mol_type = other DNA
aacgttcttcgtgagcgttaccaagctgacattcgggttgttgaacgccagaagtcgggacgaattcattatcac

SEQ ID NO: 476808 - DNA, 75 bp, synthetic construct
  source 1..75: mol_type = other DNA
tgtgctccgacttttgatggcgttcgtggcgttcttggtccgaaatgggcttatcagtggcggaaatttatagct

SEQ ID NO: 476809 - DNA, 75 bp, synthetic construct
  source 1..75: mol_type = other DNA
agccaggttgaagaacagctctttaccctgacaaatctgttatcgacatttatgatgcgttatcccggggtgcta

SEQ ID NO: 476810 - DNA, 75 bp, synthetic construct
  source 1..75: mol_type = other DNA
gccgcacagcaggtggttaccgcctggcaggaactggaagcgatgggcggacggacgctgcttgcgccacgttta

SEQ ID NO: 476811 - DNA, 75 bp, synthetic construct
  source 1..75: mol_type = other DNA
gtcggcgtttgtcactgccgggcaacgttgcacctgcgcccgccgtttattgttgaaaagcggggcgcagggcga

SEQ ID NO: 476812 - DNA, 75 bp, synthetic construct
  source 1..75: mol_type = other DNA
gcaaacgttgcttgcgccacgtttgttacaagcgggaacatcgctgctaacgccggggatcgttgaaatgacagg

SEQ ID NO: 476813 - DNA, 75 bp, synthetic construct
  source 1..75: mol_type = other DNA
tgctggcaggcaacacaattatctttaaacccagcgaactgacaccgtggagcggcgaggtggtaatgcgcttat

SEQ ID NO: 476814 - DNA, 75 bp, synthetic construct
  source 1..75: mol_type = other DNA
aagtctggagtcatcttcattaacgttgcccgccgtacttaacccagggctggatttttctgatgaggtggcgcg

SEQ ID NO: 476815 - DNA, 75 bp, synthetic construct
  source 1..75: mol_type = other DNA
gggtgacggggcagggcgcacttcgcgtgaagcataatccggtatcgggcgacgtattatggcaaggcaatgatg

SEQ ID NO: 476816 - DNA, 75 bp, synthetic construct
  source 1..75: mol_type = other DNA
agtggcgaagcggtaatgcgtttatggcagcaggctggcttgccgccgggcgtgctgaacctggtgcagggcggg

SEQ ID NO: 476817 - DNA, 75 bp, synthetic construct
  source 1..75: mol_type = other DNA
tggtttttagcgatcttgatggcaccctgctggacagtcatagttatgactggcaaccggcagccccctggctca

SEQ ID NO: 476818 - DNA, 75 bp, synthetic construct
  source 1..75: mol_type = other DNA
cggtctggcttatccactgctgaaaatatggatgattgactggcaggcaaaaatacgtatttgctgggcgatttg

SEQ ID NO: 476819 - DNA, 75 bp, synthetic construct
  source 1..75: mol_type = other DNA
gcgatcgtcaggtaagagttgaacgctttgccggattgctggaaagcaataaagccgaattaaccgcgattattg

SEQ ID NO: 476820 - DNA, 75 bp, synthetic construct
  source 1..75: mol_type = other DNA
cgagcagcgcagcgaaatgccggacggcgcggcgagcttgcgccatcgtccgcacggtgtactggcagtgtttgg

SEQ ID NO: 476821 - DNA, 75 bp, synthetic construct
  source 1..75: mol_type = other DNA
ctggagtcggactcgttaacattgcccgccacgcttaaccctgggctggatttttccgatgaggtggtgcgatga

SEQ ID NO: 476822 - DNA, 75 bp, synthetic construct
  source 1..75: mol_type = other DNA
acgccgcagtgcatctgactatccagtcggcatttgttactgccggacaacgctgcacctgcgcccgtcgtatat

SEQ ID NO: 476823 - DNA, 75 bp, synthetic construct
  source 1..75: mol_type = other DNA
tgaacctcacagttaagcccgtcatttacaacaaagctttagtggttgcattcaattttgacagcatagaagaat

SEQ ID NO: 476824 - DNA, 75 bp, synthetic construct
  source 1..75: mol_type = other DNA
tagcatcgcccactgcgaatcgcctgggcgcattttatctgtctccccctttcctgaacattacacccgctggcg

SEQ ID NO: 476825 - DNA, 75 bp, synthetic construct
  source 1..75: mol_type = other DNA
tggcggcgtggatgcgtcagacctgcctcgatgagaagccggcgcgtgccggcagactgccgtcgatatcgccgg

SEQ ID NO: 476826 - DNA, 75 bp, synthetic construct
  source 1..75: mol_type = other DNA
cgtcaaccaggctggtttgacgctggtaagtaccagttggatcaaagaacttaatgttgagttactcaagctcca

SEQ ID NO: 476827 - DNA, 75 bp, synthetic construct
  source 1..75: mol_type = other DNA
gcgcattaaggccacaaattaccgaattaatgatgtcagcagatatcgttcgtgtagacctgctgcatggtgata

SEQ ID NO: 476828 - DNA, 75 bp, synthetic construct
  source 1..75: mol_type = other DNA
cctcatcccgctgttacgctattggccacaagaaaatctggcgattcaggtcaccgttgagtcgttgattcgacc

SEQ ID NO: 476829 - DNA, 75 bp, synthetic construct
  source 1..75: mol_type = other DNA
cgccggggatcattgaaatgacgggcgttgctggcgtaccagatgaagaggtgttcggtccgctattgcgcgtct

SEQ ID NO: 476830 - DNA, 75 bp, synthetic construct
  source 1..75: mol_type = other DNA
gagcctggagtcggactcgttaacgttacccgccacgcttaaccccggactggatttttccgatgaggtggtgcg

SEQ ID NO: 476831 - DNA, 75 bp, synthetic construct
  source 1..75: mol_type = other DNA
ctggagtcggactcgttaactttgcccgcaacgcttaaccccggactggatttttccgatgaggtggtgcgatga

SEQ ID NO: 476832 - DNA, 75 bp, synthetic construct
  source 1..75: mol_type = other DNA
tccatctcgccggcgctgcttcgtcagcttgccggcatgggtaacaaccttaatcagattgccaggcaggttaac

SEQ ID NO: 476833 - DNA, 75 bp, synthetic construct
  source 1..75: mol_type = other DNA
gtgttcgggccgctattgcgcgtctggcgttacgacaccttcgatgaggcgatcaggatggctaataacactcgc

SEQ ID NO: 476834 - DNA, 75 bp, synthetic construct
  source 1..75: mol_type = other DNA
gagcctggagtcggactcgttaacattgcccgccacacttaaccccgggctggatttttccgatgaggtggtgcg

SEQ ID NO: 476835 - DNA, 75 bp, synthetic construct
  source 1..75: mol_type = other DNA
aattaagaggttgtgccagcgaaaaggtgagctacctatacgtattggcaatatcaaaatggctgagcctcctga

SEQ ID NO: 476836 - DNA, 75 bp, synthetic construct
  source 1..75: mol_type = other DNA
cattaagaagttgtgccagcaagaaggtgagctgcccatacgtattggcaacatcaaaatggctgagccaccaga

SEQ ID NO: 476837 - DNA, 75 bp, synthetic construct
  source 1..75: mol_type = other DNA
cctgggaaggaacccaaacagaaaataagtggggtcgaatcttccagggtggtcttatcgttatcgttttcctgc

SEQ ID NO: 476838 - DNA, 75 bp, synthetic construct
  source 1..75: mol_type = other DNA
tcgctataaacggcaaacgagccgaagctatagattactggcataatactcttcatggactttctatgcgtgaac

SEQ ID NO: 476839 - DNA, 75 bp, synthetic construct
  source 1..75: mol_type = other DNA
tattggaaaacatgtggagtccgttaggtttgttaatgtcaatggatgtcaaaaatgtaatgcaggttatacagg

SEQ ID NO: 476840 - DNA, 75 bp, synthetic construct
  source 1..75: mol_type = other DNA
caacggtacttccactgcgaacaaaattgttggcatgtactctgctccggcaggcagcaccattctgattgaccg

SEQ ID NO: 476841 - DNA, 75 bp, synthetic construct
  source 1..75: mol_type = other DNA
taccgttaggaaatatctctccagagaatcttgacgcgttgtcagaacttatcgttaagcattccgataaattta

SEQ ID NO: 476842 - DNA, 75 bp, synthetic construct
  source 1..75: mol_type = other DNA
ttagatactaacacattggtgctaatcccttttatgtccgggtacagagataaagatactctgactttttgtgtt

SEQ ID NO: 476843 - DNA, 75 bp, synthetic construct
  source 1..75: mol_type = other DNA
attcaccagtgcagccagtgatgccatcacaggtggtgtttccattgtggacggtaaactcaccggttcaaaagc

SEQ ID NO: 476844 - DNA, 75 bp, synthetic construct
  source 1..75: mol_type = other DNA
acgctcacggaagaagcctgggtgacgaaaagtaacgcctctcagtcctataaagaggcttggggtttcgctttt

SEQ ID NO: 476845 - DNA, 75 bp, synthetic construct
  source 1..75: mol_type = other DNA
tcgacgttaataacgcgttttatggaatccctgaaatctcagaagaatgcagacaggctaaataaaatatctctc

SEQ ID NO: 476846 - DNA, 75 bp, synthetic construct
  source 1..75: mol_type = other DNA
gagaggttgaaggttatgcagaatacgaaattattgataatgaattagtcttctctcttgaggaactaccttggg

SEQ ID NO: 476847 - DNA, 75 bp, synthetic construct
  source 1..75: mol_type = other DNA
aacggtaaatggttttccgatgatcatgattagcggctccagcgaccgcgcgatcgtcgacctacagcaaggtga

SEQ ID NO: 476848 - DNA, 75 bp, synthetic construct
  source 1..75: mol_type = other DNA
tggtagttatcgtccggttggcaccaacgatctgtttcgtgaactgagcgttccgttgataaagcatccggggat

SEQ ID NO: 476849 - DNA, 75 bp, synthetic construct
  source 1..75: mol_type = other DNA
atggcgcttatctattgttccctcgctggcggcgcactttacgccgggaactgggcgctggaactcttcaaataa

SEQ ID NO: 476850 - DNA, 75 bp, synthetic construct
  source 1..75: mol_type = other DNA
ggatttaacgacctgatgcgtccggcaatgtacggcagttaccaccatattagcgccctggcggctgatggtcgt

SEQ ID NO: 476851 - DNA, 75 bp, synthetic construct
  source 1..75: mol_type = other DNA
cggtcacggaaaaacggaggttgtcgggcatatggcacttgaggcaatgcgtcagggtgtgaagacgtgcatcgc

SEQ ID NO: 476852 - DNA, 75 bp, synthetic construct
  source 1..75: mol_type = other DNA
cgggcacagtacgctaaaggtgagggcaaagcccaaatcactttttcagatgcggtcatgccttatctgacacag

SEQ ID NO: 476853 - DNA, 75 bp, synthetic construct
  source 1..75: mol_type = other DNA
cttagacgaagaagactacacaggtcagaaggacttcatcgatacgctgtgcgacttcaagaacgagcataactg

SEQ ID NO: 476854 - DNA, 75 bp, synthetic construct
  source 1..75: mol_type = other DNA
cacgacagatgaacttcgtcatgctttaaccaccggtattcagtcgcgcaaaccgaccattattaatgtggtcat

SEQ ID NO: 476855 - DNA, 75 bp, synthetic construct
  source 1..75: mol_type = other DNA
ttcgtggcgttggctataacgtcaccacgacagatgaacttcgtcatgctttaaccaccggtattcagtcgcgca

SEQ ID NO: 476856 - DNA, 75 bp, synthetic construct
  source 1..75: mol_type = other DNA
ggtatggcgcgatattttaaatatccacaagcagcaaaatgcacaaaaaatgcatgaaaaattaagtacagatac

SEQ ID NO: 476857 - DNA, 75 bp, synthetic construct
  source 1..75: mol_type = other DNA
tgggccatcctgtgaaactggaaattgaaccgggtcgctttctggtagcgcaggctggcgtattaattactcaag

SEQ ID NO: 476858 - DNA, 75 bp, synthetic construct
  source 1..75: mol_type = other DNA
gacgtgatacaacgtcatcatctgcagctggtcggcattcacatgcacattggttctggcgttgattatgcccat

SEQ ID NO: 476859 - DNA, 75 bp, synthetic construct
  source 1..75: mol_type = other DNA
cgtgacttctggttctccggttgtcgccattgaaggtgatagtgcttttggtttcagtgggatggaaattgaaac

SEQ ID NO: 476860 - DNA, 75 bp, synthetic construct
  source 1..75: mol_type = other DNA
atgcacacaccttacccttttaaccctagatacacgatgaactggtttctactgtctctgatcaataaccacctg

SEQ ID NO: 476861 - DNA, 75 bp, synthetic construct
  source 1..75: mol_type = other DNA
ggctgttcagtgccgaacgtgaaggtggtgcactgacagaagttgcgtgctgggcccatgcccggcgaaaaatcc

SEQ ID NO: 476862 - DNA, 75 bp, synthetic construct
  source 1..75: mol_type = other DNA
ggagaatctcatctggttacggtggggggcgagtttcagagctcgtccatgaaagacggagttgtccttgccagc

SEQ ID NO: 476863 - DNA, 75 bp, synthetic construct
  source 1..75: mol_type = other DNA
ttcagtccgcgtgcatatctggtctgggatgtggcagatgcctggacgctgaaaggcggtgtgaccacgggatat

SEQ ID NO: 476864 - DNA, 75 bp, synthetic construct
  source 1..75: mol_type = other DNA
cgatttgaggctggtggagaggatagggaatctcttattaccgaaattcaccagcaattaggcgactcggtggaa

SEQ ID NO: 476865 - DNA, 75 bp, synthetic construct
  source 1..75: mol_type = other DNA
acgacccggcaggctttcgcagcttaccctgcggttttgagcaccattttcgcaccgaatggaacttgcaggatg

SEQ ID NO: 476866 - DNA, 75 bp, synthetic construct
  source 1..75: mol_type = other DNA
ttgttttatttgctgcgcctgcaatgattttattttcttcaggttttggcatcggaataaaactgattcgcgcct

SEQ ID NO: 476867 - DNA, 75 bp, synthetic construct
  source 1..75: mol_type = other DNA
ctgtactaaaaaagagttactcaaagattttaaatcatcctcagatttcgaccagtctgtattatttaaaaatat

SEQ ID NO: 476868 - DNA, 75 bp, synthetic construct
  source 1..75: mol_type = other DNA
gtttcggtttttgatagcttacccagacttcttgaaaggccaggaaagttaaaggcaggtggctctattactgca

SEQ ID NO: 476869 - DNA, 75 bp, synthetic construct
  source 1..75: mol_type = other DNA
attttgaggagcatattaatgagtttaatgatggaaaggattatctatggattaattctgcatacgaattagcaa

SEQ ID NO: 476870 - DNA, 75 bp, synthetic construct
  source 1..75: mol_type = other DNA
ctgaccccggcattgacgatgccgtcgccattgccgccgcgatttttgcccccgaactcgacctgcaactgatga

SEQ ID NO: 476871 - DNA, 75 bp, synthetic construct
  source 1..75: mol_type = other DNA
tcagacatatctacaaaactggatcatgcaatatgttgtagcatcagataacgccggccaggagacaaaggcccg

SEQ ID NO: 476872 - DNA, 75 bp, synthetic construct
  source 1..75: mol_type = other DNA
cgagtcagcatggacggggctttataagcttgttcagtccagtgttactgaaaatgtaaaatacacagtgctgca

SEQ ID NO: 476873 - DNA, 75 bp, synthetic construct
  source 1..75: mol_type = other DNA
atgtttatgtaacactgagaatgtggagcaggaaatgttgatcactactcatacacctttccttatctcagatag

SEQ ID NO: 476874 - DNA, 75 bp, synthetic construct
  source 1..75: mol_type = other DNA
cgagcggaatggttccccttgccgccattggcgcatctgacacgccacaatcccgtttgccgggaaatgcctcat

SEQ ID NO: 476875 - DNA, 75 bp, synthetic construct
  source 1..75: mol_type = other DNA
cgtaatagaggggatgctaatagtacattcagggggtccacatcgataaatgtaagcggatccaatggaatattt

SEQ ID NO: 476876 - DNA, 75 bp, synthetic construct
  source 1..75: mol_type = other DNA
accaatatcacgaaagtgatcgtggatggatatcaggatggtgtaatgattgccggggcatggtatctggggcct

SEQ ID NO: 476877 - DNA, 75 bp, synthetic construct
  source 1..75: mol_type = other DNA
caaggtaaaaatgatagtgctgcaaaagtgaataactggaaaggccgtgacgaagttgaatctaatggtgatggc

SEQ ID NO: 476878 - DNA, 75 bp, synthetic construct
  source 1..75: mol_type = other DNA
aaatacgccgatgttggcgcgacttactatttcaataaaaacatgtccacctacgttgactataaaatcaacctg

SEQ ID NO: 476879 - DNA, 75 bp, synthetic construct
  source 1..75: mol_type = other DNA
tcaggtgggacagcatcggatgccatttccggtgatgccagtaatacccagaccaccaccgtggatatgaaatct

SEQ ID NO: 476880 - DNA, 75 bp, synthetic construct
  source 1..75: mol_type = other DNA
tgttggtgcatatacacaggcagaatgtaactcaaggtttattacaggtattcgcctgggcggtctgtcatctgt

SEQ ID NO: 476881 - DNA, 75 bp, synthetic construct
  source 1..75: mol_type = other DNA
actttggccttatcttcaggagatccgaggaatatcttcatcttatcccgacaaatgaaggggagggtgaaaatg

SEQ ID NO: 476882 - DNA, 75 bp, synthetic construct
  source 1..75: mol_type = other DNA
tcacaataagcatacctaaatacaacacacttggtgcatcaatcaataaaattactatgaataccttcggcaaac

SEQ ID NO: 476883 - DNA, 75 bp, synthetic construct
  source 1..75: mol_type = other DNA
ctattatctcgagacacggaccttccccatcacctatatggacagtcaggtggcctataacgccactgtggtcag

SEQ ID NO: 476884 - DNA, 75 bp, synthetic construct
  source 1..75: mol_type = other DNA
ctggcctacgactttcaccatcgttttgcgctcgatacgcaacagctgcgtgaacaggtgaccaacggcgttttg

SEQ ID NO: 476885 - DNA, 75 bp, synthetic construct
  source 1..75: mol_type = other DNA
aactatcaacaatgccctggctctcaaagcgcctttggcaagccctgcattaacgggtgtccctactgcgccgac

SEQ ID NO: 476886 - DNA, 75 bp, synthetic construct
  source 1..75: mol_type = other DNA
tcggtaacgtgcttatggggttgggtctggtggtcatggtggtcggtgtggggtattcaattctcaaccagctac

SEQ ID NO: 476887 - DNA, 75 bp, synthetic construct
  source 1..75: mol_type = other DNA
tgatgataaaggtcgtgagctgcaacagcaggttgatccaaccaaactgatgaatgatttctttgccgcaattga

SEQ ID NO: 476888 - DNA, 75 bp, synthetic construct
  source 1..75: mol_type = other DNA
caacagcaggtcgatccaaccaaactgatgaatgacttctttgccgcgattgagtttatgcaacgctatccgcaa

SEQ ID NO: 476889 - DNA, 75 bp, synthetic construct
  source 1..75: mol_type = other DNA
ccacacggtgtatgtaatgctgttctgctgccacacgttcaggtgttcaacagcaaagtcgctgctgcgcgtctg

SEQ ID NO: 476890 - DNA, 75 bp, synthetic construct
  source 1..75: mol_type = other DNA
ttaaagaaaataattgcgatagcgtgatttccttaggcggtggttctccgcacgactgcgcaaaaggtattgcgc

SEQ ID NO: 476891 - DNA, 75 bp, synthetic construct
  source 1..75: mol_type = other DNA
ccagttaggcggtttctacaacctgccgcacggtgtatgtaacgccgttctgctgccgcacgttcaggtattcaa

SEQ ID NO: 476892 - DNA, 75 bp, synthetic construct
  source 1..75: mol_type = other DNA
cgcgatggtattgcgtacgtgccgttcttcccgctcggcggttttacgccgctgcaatcctccacactttcggat

SEQ ID NO: 476893 - DNA, 75 bp, synthetic construct
  source 1..75: mol_type = other DNA
tagaaatcgttggcagccagaagcgactcgcagatatttgcggcgttagccagccagcggttcacaagtggctta

SEQ ID NO: 476894 - DNA, 75 bp, synthetic construct
  source 1..75: mol_type = other DNA
agaaataaggtagtgcatgaagaaattaaggaaagcataaaaaaaagagggttaagcaagcctataagcgtaaga

SEQ ID NO: 476895 - DNA, 75 bp, synthetic construct
  source 1..75: mol_type = other DNA
tggcgaagattgaagcgcctttactactccacttcgcggaactggacacccgaatcaacgagggctggcctgctt

SEQ ID NO: 476896 - DNA, 75 bp, synthetic construct
  source 1..75: mol_type = other DNA
gtgttgctgctggcgaatcaactgaacctgctcaacctcagcgacagcaccgcccatacgctgggagtgaacctg

SEQ ID NO: 476897 - DNA, 75 bp, synthetic construct
  source 1..75: mol_type = other DNA
gcggcgctggctatggcgcttaccagcgcgctgagtccgacgccgattgcaggctattctctgtcgttcatcgcg

SEQ ID NO: 476898 - DNA, 75 bp, synthetic construct
  source 1..75: mol_type = other DNA
tctgcaaaaccgcagctgccgatgatcgccatcaacaccacggcgggtacggcctctgaaatgacccgtttctgc

SEQ ID NO: 476899 - DNA, 75 bp, synthetic construct
  source 1..75: mol_type = other DNA
aacactgtattagttctgattcagaaataacggggaaaaagacagtcggtgaaacatcgtattcgtggccgggga

SEQ ID NO: 476900 - DNA, 75 bp, synthetic construct
  source 1..75: mol_type = other DNA
tgcatgaacgcgcaggcaataccaatgtgattcatatgcatggggaactgctgaaagtacgttgttcgcaaagtg

SEQ ID NO: 476901 - DNA, 75 bp, synthetic construct
  source 1..75: mol_type = other DNA
cgcacaccgtggaactgaatcttgaaccgagtcaggttggtaatgaatttgccgagaaatattacggcccggcaa

SEQ ID NO: 476902 - DNA, 75 bp, synthetic construct
  source 1..75: mol_type = other DNA
ctggctgaaggtctggaaccggttgagcgtttcgaaaaactcgatgctattcgcaatattcagttcgccattctg

SEQ ID NO: 476903 - DNA, 75 bp, synthetic construct
  source 1..75: mol_type = other DNA
tcctcaaccagttaccacagtttaatatgccccagtatttcgcacatggtgcagtgctaagtattttcgtcggtg

SEQ ID NO: 476904 - DNA, 75 bp, synthetic construct
  source 1..75: mol_type = other DNA
aacggttatctggcagacaatccatttaaggggatctcaccattaaaggagtcgagaaccatcccggatccactt

SEQ ID NO: 476905 - DNA, 75 bp, synthetic construct
  source 1..75: mol_type = other DNA
atttaaataaagaagtggtcgaaattgcggaaaaggcaatcgaagcatttggattatcttatgataaaacggcgc

SEQ ID NO: 476906 - DNA, 75 bp, synthetic construct
  source 1..75: mol_type = other DNA
taactttggtacgccagaatacaacgaaccgggaagcggcggctttgttggcgatacgctgctggttaacggtgt

SEQ ID NO: 476907 - DNA, 75 bp, synthetic construct
  source 1..75: mol_type = other DNA
cagcaaagtcgccgctgcgcgtctgcgtgactgtgctgctgccatgggcgttaacgtgacaggcaaaaatgacgc

SEQ ID NO: 476908 - DNA, 75 bp, synthetic construct
  source 1..75: mol_type = other DNA
tgcatgaacgcgcaggtaataccaatgtgattcatatgcatggggaactgctgaaagttcgttgttcacaaagtg

SEQ ID NO: 476909 - DNA, 75 bp, synthetic construct
  source 1..75: mol_type = other DNA
ctgaaagtacgttgttcgcaaagtggtcaggttctcgactggaccggagacgtcacgccagaagacaaatgtcat

SEQ ID NO: 476910 - DNA, 75 bp, synthetic construct
  source 1..75: mol_type = other DNA
atttctgcggaatcaggtattcgtacctttcgcgccgcagatggcctgtgggaagaacatcgggttgaagatgtg

SEQ ID NO: 476911 - DNA, 75 bp, synthetic construct
  source 1..75: mol_type = other DNA
atgaagtataaacgctataaagaatggaaaattccagaagcagcaacaaaagcagcgccgggagatttttctggc

SEQ ID NO: 476912 - DNA, 75 bp, synthetic construct
  source 1..75: mol_type = other DNA
ctggcgggattctgcgaaggtgcggaactgctggcggcaatggtaagccacgactgggataagttctggccgcag

SEQ ID NO: 476913 - DNA, 75 bp, synthetic construct
  source 1..75: mol_type = other DNA
tttgtcgccagccctgagcacccactggcgaaatacgccaccctcagttggaatgatcttgccaactggcgctgg

SEQ ID NO: 476914 - DNA, 75 bp, synthetic construct
  source 1..75: mol_type = other DNA
tttgtcgcccgccctgagcacccactggcgaaatacgccaccctcagctggaatgatcttgctaactggcggtgg

SEQ ID NO: 476915 - DNA, 75 bp, synthetic construct
  source 1..75: mol_type = other DNA
ggtgctctacaccgagccagtgtgctttgtcgctcgcccaaaccatccactggcgaaatatgccgctcttggctg

SEQ ID NO: 476916 - DNA, 75 bp, synthetic construct
  source 1..75: mol_type = other DNA
gctgtcacaactcgaagatgagatcggcctcacactctttgagcggcacagcaaagggctacgtccgaccgaagg

SEQ ID NO: 476917 - DNA, 75 bp, synthetic construct
  source 1..75: mol_type = other DNA
ggccgacagtcgctggccgaaaagtctgcaacagcagcaggcctcgacacaatggaatgaagcactcaaaacccg

SEQ ID NO: 476918 - DNA, 75 bp, synthetic construct
  source 1..75: mol_type = other DNA
ggtgtgtttggtgattttatagtgccaatggaaatggtgttaaatagacttaaagctgagtattccttagcacga

SEQ ID NO: 476919 - DNA, 75 bp, synthetic construct
  source 1..75: mol_type = other DNA
cggtgaaaaaggggcgaaccgttgtcgcgttgcggttccggttcaaagaggacaagcagatcaagatggccgtat

SEQ ID NO: 476920 - DNA, 75 bp, synthetic construct
  source 1..75: mol_type = other DNA
ctccttaagcgccttacccgtcaggcgacgtgctgcaagatgccgccagtgctggaaattgactctgcatttaaa

SEQ ID NO: 476921 - DNA, 75 bp, synthetic construct
  source 1..75: mol_type = other DNA
ttgatgtatgtggttggtactgtgtgccagttaaagatcataattcagttatagttcaactgtcctgcaaacaac

SEQ ID NO: 476922 - DNA, 75 bp, synthetic construct
  source 1..75: mol_type = other DNA
tgatcttttttgcgtgttcaataattctttaatgcctgagtgggctgggcctgtagtaatatctcactggataaa

SEQ ID NO: 476923 - DNA, 75 bp, synthetic construct
  source 1..75: mol_type = other DNA
gctaccggtcgttggtcagctgcgcaacgttggcgtactgtggctggtcggtgcgatggccgtggtgtatatcgg

SEQ ID NO: 476924 - DNA, 75 bp, synthetic construct
  source 1..75: mol_type = other DNA
tgaacgtcagtaccaacctgttacaaagcagcaatatgatctctattttgtcattacgcctggcgcaacgttatg

SEQ ID NO: 476925 - DNA, 75 bp, synthetic construct
  source 1..75: mol_type = other DNA
ttccgcatgaccgacgccaatatgaagcgccataagtattccaactttaaggacttctgggagcaactgaagccg

SEQ ID NO: 476926 - DNA, 75 bp, synthetic construct
  source 1..75: mol_type = other DNA
atccgaatgattacggtatcgggcgttatgcaggcctttcggcctcctatacgccgatgcgcggatttgtcgaaa

SEQ ID NO: 476927 - DNA, 75 bp, synthetic construct
  source 1..75: mol_type = other DNA
cccgacgcgtggaatggcgaatatactgctaccgtcacggatgaaaaaacactgacctggacgattgctgattct

SEQ ID NO: 476928 - DNA, 75 bp, synthetic construct
  source 1..75: mol_type = other DNA
ctactatcaagaaatatgcaagcctcacgtatgggatattaaagagcgcgtgaaaggcggggtaattgaggacgt

SEQ ID NO: 476929 - DNA, 75 bp, synthetic construct
  source 1..75: mol_type = other DNA
attcagccattaggattgccacttccgaagtaatgcgttctataatttcagcaagctttcgtgaaaaagccaata

SEQ ID NO: 476930 - DNA, 75 bp, synthetic construct
  source 1..75: mol_type = other DNA
gtaaccaaataaatctcataataaataaatactctgatgctaataatagccagagagtcattgaattgatgaaga

SEQ ID NO: 476931 - DNA, 75 bp, synthetic construct
  source 1..75: mol_type = other DNA
actctacacctgaatatcgaagagaaggtgatgaccccattgctgcaagatctgttggcaggttctgtcgatgtg

SEQ ID NO: 476932 - DNA, 75 bp, synthetic construct
  source 1..75: mol_type = other DNA
gtcgttgggcgaattggcggtcgcgcattgcagctgccactgaattatcaggtgctgtacaccgagccagtatgc

SEQ ID NO: 476933 - DNA, 75 bp, synthetic construct
  source 1..75: mol_type = other DNA
cagcggttaatcaatgacatggagcgctcgcaacatgaactggcccgttttaaacaaggtgggctggtcggcagt

SEQ ID NO: 476934 - DNA, 75 bp, synthetic construct
  source 1..75: mol_type = other DNA
agcgatgcagtatttcttcgtgctgacgaaaacgccggacgacacgaattacgtttcgccttatgccggtattaa

SEQ ID NO: 476935 - DNA, 75 bp, synthetic construct
  source 1..75: mol_type = other DNA
ccgctggcaggatgtctggcagctcttgccggtggtggtcactgcagtccctgtcgtgttgctgctggcgaatca

SEQ ID NO: 476936 - DNA, 75 bp, synthetic construct
  source 1..75: mol_type = other DNA
gatcttggacacatatgcgagatctttataaaagaaaaactttacaagcttattgataacaatatatctctagat

SEQ ID NO: 476937 - DNA, 75 bp, synthetic construct
  source 1..75: mol_type = other DNA
cggtggcactgcgcacgaagctgaagctgttctaccgcccgaaggcactgattgaggggcgcaaaggggcagaag

SEQ ID NO: 476938 - DNA, 75 bp, synthetic construct
  source 1..75: mol_type = other DNA
aaacgttaacggcaaaagggatggttttaccgcgaccgcgaattggtacccgggtcatgccacaatcgaactgga

SEQ ID NO: 476939 - DNA, 75 bp, synthetic construct
  source 1..75: mol_type = other DNA
tagttgcgttgcgtgacgaactggacggctgtattggttgcggctgcctttcgcgtagcgactgcccgttgcgta

SEQ ID NO: 476940 - DNA, 75 bp, synthetic construct
  source 1..75: mol_type = other DNA
gaagccgaatggtcagcagacgctgcgtatcatcatggcctcggaccatctgccgaaggataaagagtcggtgta

SEQ ID NO: 476941 - DNA, 75 bp, synthetic construct
  source 1..75: mol_type = other DNA
atgacaaggagcgtacctttggtggtcaggcctgggtggacaatatcgtggagaaggacacccgtccgacctttg

SEQ ID NO: 476942 - DNA, 75 bp, synthetic construct
  source 1..75: mol_type = other DNA
aagggctcagcctgcagagccgcccggatggcaggaccatgctggtgaacaccacgccgtacatttttgcgattg

SEQ ID NO: 476943 - DNA, 75 bp, synthetic construct
  source 1..75: mol_type = other DNA
gggcaatcatcacggtggtgttcatagaaagcagtgaacaggcacgcatccgccgccaacaatatttgcaacagt

SEQ ID NO: 476944 - DNA, 75 bp, synthetic construct
  source 1..75: mol_type = other DNA
catagtatttgcgccaaaataccgaagacaggtgttctacagagagaagcgtagagcaaaaggcagtattttgag

SEQ ID NO: 476945 - DNA, 75 bp, synthetic construct
  source 1..75: mol_type = other DNA
ggctgaaaaagcatcgtttccgtctcgaccaggtacagaacttctacccatcgccgctggcgaactcaaccacca

SEQ ID NO: 476946 - DNA, 75 bp, synthetic construct
  source 1..75: mol_type = other DNA
gagttggatcggcgcattcataccttagtggcgctgcgtgacgaactggacggatgtattggttgtggctgcctt

SEQ ID NO: 476947 - DNA, 75 bp, synthetic construct
  source 1..75: mol_type = other DNA
atgaatatgatgcgtattttttatatcggattgtcaggtgtggggatgatgatgttctcatcaatggcgtctgga

SEQ ID NO: 476948 - DNA, 75 bp, synthetic construct
  source 1..75: mol_type = other DNA
gcttcaccacataacaaactgtccacacttttttggaagataccaaacgcgttctggattttcctgatttgcata

SEQ ID NO: 476949 - DNA, 75 bp, synthetic construct
  source 1..75: mol_type = other DNA
aatgactggggaagcctgcagacctggacaattaataagaagaaaccggcagcagcaaaagctgagaccacagag

SEQ ID NO: 476950 - DNA, 75 bp, synthetic construct
  source 1..75: mol_type = other DNA
gatcaccgatcattctatgatgtgaactgcgaacgccacgaatcaccagcatatgaccagctttacaacttcctg

SEQ ID NO: 476951 - DNA, 75 bp, synthetic construct
  source 1..75: mol_type = other DNA
aaaaattgtgtttaaatgttcggcgcagttgggtaagactatgattcttaacggaattatcttccacaggatcgc

SEQ ID NO: 476952 - DNA, 75 bp, synthetic construct
  source 1..75: mol_type = other DNA
accacgccgtacatttttgcgattggcagcctgctggacggaaacggaaagaaaattgccacggataatgagacg

SEQ ID NO: 476953 - DNA, 75 bp, synthetic construct
  source 1..75: mol_type = other DNA
aggcaacgcgggtgttttacagtctacagcgaaagaaacgacacaatggttatcaggtaaaattaaaccgatgat

SEQ ID NO: 476954 - DNA, 75 bp, synthetic construct
  source 1..75: mol_type = other DNA
atgaaactgatttctaataaggccaaattaaaaaagattctcaaaaatgcagccaaatatattacgccaccgcct

SEQ ID NO: 476955 - DNA, 75 bp, synthetic construct
  source 1..75: mol_type = other DNA
aagctgaaccgtgaaacagaaaccgccgtagaagctcctaaatcgcattctgacgagcaaaaacaggaaactaag

SEQ ID NO: 476956 - DNA, 75 bp, synthetic construct
  source 1..75: mol_type = other DNA
cgataaggtagaatccctgaacgattacggtgagcttgaagcttggacgattaacaacatacagaaatcagtcga

SEQ ID NO: 476957 - DNA, 75 bp, synthetic construct
  source 1..75: mol_type = other DNA
ggatggcaggaccatgctggtgaacaccacgccatacatttttgcgattggcagcctgctggacggaaacggaaa

SEQ ID NO: 476958 - DNA, 75 bp, synthetic construct
  source 1..75: mol_type = other DNA
cctccctggcagcagaccagacccgttatgtttttcgcggggacaaagatgcgctgaccattacggttaccaaca

SEQ ID NO: 476959 - DNA, 75 bp, synthetic construct
  source 1..75: mol_type = other DNA
ggatggcaggaccatgctggtgaacaccacgccgtacatttttgcgattggcagcctgctggacggaaacgggaa

SEQ ID NO: 476960 - DNA, 75 bp, synthetic construct
  source 1..75: mol_type = other DNA
ccggctctggagggaagcggtattgcagtggcgctgcgcacgaagctgaaactgttctatcgcccgaaggcactg

SEQ ID NO: 476961 - DNA, 75 bp, synthetic construct
  source 1..75: mol_type = other DNA
ctattgccctgcgtaccaaactgaaactgttttatcgcccgaaggcactgcttgaaggtcgtaagggtgcagaag

SEQ ID NO: 476962 - DNA, 75 bp, synthetic construct
  source 1..75: mol_type = other DNA
gtattacgtcgatacggtgggtaagaacacggcgaagatacaggattacataaagcaccagcttgaagaggataa

SEQ ID NO: 476963 - DNA, 75 bp, synthetic construct
  source 1..75: mol_type = other DNA
tgcggtatggcgggcacttacggacatgaagcgaaaaatcataaaaactcgctcggtatctatgagttatcctgg

SEQ ID NO: 476964 - DNA, 75 bp, synthetic construct
  source 1..75: mol_type = other DNA
tcaggcgctcaaccaggggattattgttgatatgtcccgccatatgaaccgcatcatcgaaattaaccctgaaga

SEQ ID NO: 476965 - DNA, 75 bp, synthetic construct
  source 1..75: mol_type = other DNA
aatccagatactattattaatattaatgaaactattaagattaagtgtggcacaacgttagctcgccatttatgt

SEQ ID NO: 476966 - DNA, 75 bp, synthetic construct
  source 1..75: mol_type = other DNA
actctgtgcgcggctggatgagctgatcgccagccagcaagcgggcgtgatcggctggcaggtgtgttgtgagct

SEQ ID NO: 476967 - DNA, 75 bp, synthetic construct
  source 1..75: mol_type = other DNA
gaagatatcgtctggcattccgttagcgagctgattaccgatgtgcccgacaaagagatgctcgggctgaacatt

SEQ ID NO: 476968 - DNA, 75 bp, synthetic construct
  source 1..75: mol_type = other DNA
atgattccacagatttcccaggcacccggcgtcgttcaactggtgcttaattttttgcaagagctggagcaacag

SEQ ID NO: 476969 - DNA, 75 bp, synthetic construct
  source 1..75: mol_type = other DNA
atgcaaaaacgttatctgggtaaatccggactcgaagtctccgcccttgggctcggttgcatgggcttaagccac

SEQ ID NO: 476970 - DNA, 75 bp, synthetic construct
  source 1..75: mol_type = other DNA
gcaataccctgacagcgctacacgctggtattccacaaatagtcttcggccagggagccgatcgcccggtaaatg

SEQ ID NO: 476971 - DNA, 75 bp, synthetic construct
  source 1..75: mol_type = other DNA
gaaaacgacggtgaacccattattccgatgcagtacgtcccatataacggtggtgcggtgtgggaaccatggtgg

SEQ ID NO: 476972 - DNA, 75 bp, synthetic construct
  source 1..75: mol_type = other DNA
tggcgctattttgccagtaacgacgccagtcaggccgaactggcggcagacgctttgcataatgcgttgtctgcc

SEQ ID NO: 476973 - DNA, 75 bp, synthetic construct
  source 1..75: mol_type = other DNA
gtcgtttcacagcggataaacctgtaatgttgattggcacggcagcgggactaacgctggctggcatggtgcttt

SEQ ID NO: 476974 - DNA, 75 bp, synthetic construct
  source 1..75: mol_type = other DNA
cctgatcgctgaaggcaaagttaaacatttcggtctgtccgaagcgggtgcgcaaactattcgtcgtgcgcatgc

SEQ ID NO: 476975 - DNA, 75 bp, synthetic construct
  source 1..75: mol_type = other DNA
gctgcgtttgttggcggatcgcggcgttgacccactcaaactggaacaagaactgcctgaatccggcgtcagttt

SEQ ID NO: 476976 - DNA, 75 bp, synthetic construct
  source 1..75: mol_type = other DNA
catctttgccggatatattgaaagagtatggctataaaagttattttatagcgtctacagaaaaaaatagcccac

SEQ ID NO: 476977 - DNA, 75 bp, synthetic construct
  source 1..75: mol_type = other DNA
tttagttttttctgtatagtattattgcttgtgtgttctttcataagcacgggaccggtatatgctttttatgaa

SEQ ID NO: 476978 - DNA, 75 bp, synthetic construct
  source 1..75: mol_type = other DNA
ttatcagaatgaccgtatgtcagataagcaaactttcatagcgcttaaggaagtggttgaaagaaacaagaataa

SEQ ID NO: 476979 - DNA, 75 bp, synthetic construct
  source 1..75: mol_type = other DNA
gtggacctgaccctgtttgaggagggtgggcagttacccggtatttatccggttgacattatcctgaatggttcc

SEQ ID NO: 476980 - DNA, 75 bp, synthetic construct
  source 1..75: mol_type = other DNA
atcaatggtctttacaaaacggaggtaatacaccgtaagagctggaaaaaaccggacagaagtcgaaactggcca

SEQ ID NO: 476981 - DNA, 75 bp, synthetic construct
  source 1..75: mol_type = other DNA
acagcatcgcgcgcagcgtattctgcgagaaatcaatcaacatcatcggcataaattcgcccatttcgatgagaa

SEQ ID NO: 476982 - DNA, 75 bp, synthetic construct
  source 1..75: mol_type = other DNA
aacgcgccgtttatggtagaagctcgcgcgctttcggttgagacggtggattctaaagtcctgaacctggcgcga

SEQ ID NO: 476983 - DNA, 75 bp, synthetic construct
  source 1..75: mol_type = other DNA
acctgaaaccgttcggctacttttttgcgccggaactttcgaccagcaaccgggcaacgctcggcgggatgatca

SEQ ID NO: 476984 - DNA, 75 bp, synthetic construct
  source 1..75: mol_type = other DNA
cggtggtttgttgtggggcgaacacggcaaaggttttcgcgccgaatacagcccggcgtttttggtgaggaactt

SEQ ID NO: 476985 - DNA, 75 bp, synthetic construct
  source 1..75: mol_type = other DNA
taatgaatatctcaggcatgcaacaacttacatcaaccaaatcctttgttggtgatgtagtcggaacctgcaacc

SEQ ID NO: 476986 - DNA, 75 bp, synthetic construct
  source 1..75: mol_type = other DNA
ttggcattttaaaaaagcagaatatttactaggtgagattttagaatattcacttatcattaaaaatgagttaat

SEQ ID NO: 476987 - DNA, 75 bp, synthetic construct
  source 1..75: mol_type = other DNA
atgattgaaaacccgctaggttcttttgttgaaaacatattcactgaattaagaaacgaaataattttgcgttgt

SEQ ID NO: 476988 - DNA, 75 bp, synthetic construct
  source 1..75: mol_type = other DNA
cagcttgaagaggataaaatgggagagcagttatcgattccctatccgggcagcccgtttacgggccataagtaa

SEQ ID NO: 476989 - DNA, 75 bp, synthetic construct
  source 1..75: mol_type = other DNA
ttacctgttgttgagtctggctggcgtcgatggctgggcgatgcgtctgctgccagcaatttctgtactggcact

SEQ ID NO: 476990 - DNA, 75 bp, synthetic construct
  source 1..75: mol_type = other DNA
tctggtgcagagggtactacgtcgatacggtgggtaagaacatggcgaagatacaggattacataaagcaccagc

SEQ ID NO: 476991 - DNA, 75 bp, synthetic construct
  source 1..75: mol_type = other DNA
tgttgaagtgagcggtggcaccgataacccgtcggcaccgcctgcggattttatctgtcgggtgctggagccgct

SEQ ID NO: 476992 - DNA, 75 bp, synthetic construct
  source 1..75: mol_type = other DNA
tgctgaccaatatcacggtggtggagcgtttcttgccagtgcggtttattctggctgaaacagatggcgtaacgt

SEQ ID NO: 476993 - DNA, 75 bp, synthetic construct
  source 1..75: mol_type = other DNA
ctgccgcgcgagcaggggccaggaaataccgcttcgcttgaagtcgtcagcgaacacatcaccgagcgttttttt

SEQ ID NO: 476994 - DNA, 75 bp, synthetic construct
  source 1..75: mol_type = other DNA
cgaccggcgtgccgctggtttatgagttcgacgagaatttcaaaccgctgaaacgctattatctgggtaatgctg

SEQ ID NO: 476995 - DNA, 75 bp, synthetic construct
  source 1..75: mol_type = other DNA
attttgagaaagctgtgtgagtggaaaagcgtacggattcttgaagctgaatgctgtgcagatcatatccatatg

SEQ ID NO: 476996 - DNA, 75 bp, synthetic construct
  source 1..75: mol_type = other DNA
tggaaaagcgtacggattctggaagctgaatgctgtgcagatcatatccatatgcttgtggagatcccgcccaaa

SEQ ID NO: 476997 - DNA, 75 bp, synthetic construct
  source 1..75: mol_type = other DNA
accagcttgaagaggataaaatgggagagcagttatcgattccctatccgggcagcccgtttacgggccgtaagt

SEQ ID NO: 476998 - DNA, 75 bp, synthetic construct
  source 1..75: mol_type = other DNA
tgctgtgcagatcatatccatatgcttgtggagatcccgcccaaaatgagcgtatcaggctttatgggatatctg

SEQ ID NO: 476999 - DNA, 75 bp, synthetic construct
  source 1..75: mol_type = other DNA
tgctgcgctgttatgtcacgacacctttacccatccgcaaccgaccgcgccagaagtacaaaagccgactctaca

SEQ ID NO: 477000 - DNA, 75 bp, synthetic construct
  source 1..75: mol_type = other DNA
ataccgtctcgctggaagtcgaaagtgaaaatatcactgaacgcttttttgtcgtcggtgaaaagcgcgtcagtg

SEQ ID NO: 477001 - DNA, 75 bp, synthetic construct
  source 1..75: mol_type = other DNA
tggcaggagaaattttccgcgccattgatcgttcgtctggataaagaaggtgcctggtatttcagcaacggcgct

SEQ ID NO: 477002 - DNA, 75 bp, synthetic construct
  source 1..75: mol_type = other DNA
gggcttaatcagcctgatcgataacgccgaaggtgataacggctggtgtctggcgctggttgagccggatggcga

SEQ ID NO: 477003 - DNA, 75 bp, synthetic construct
  source 1..75: mol_type = other DNA
atgagcggcgctcgattacacacgctgctgcctgaattaaccacgcgtcagccggtgatggtcgtcggcgcggcg

SEQ ID NO: 477004 - DNA, 75 bp, synthetic construct
  source 1..75: mol_type = other DNA
tgatcgttcgtctggataaagaaggtgcctggcatttcagcgacaacgcatcaggctgtgttccggcatttccaa

SEQ ID NO: 477005 - DNA, 75 bp, synthetic construct
  source 1..75: mol_type = other DNA
tgctgcctgaattaaccacgcgtcagccggttatggtgattggcgcggcggtcattgatgtgatcgccgacgctt

SEQ ID NO: 477006 - DNA, 75 bp, synthetic construct
  source 1..75: mol_type = other DNA
aattattagtggaatggctggaagggctgaacgacgtgatgccatttatcgattttggcccgcgtattggcgata

SEQ ID NO: 477007 - DNA, 75 bp, synthetic construct
  source 1..75: mol_type = other DNA
ggcaacggaagtctcaccggtggcatcgtttaatagcttgcaacttggcgagcgcgggaacattgtgcagatgcg

SEQ ID NO: 477008 - DNA, 75 bp, synthetic construct
  source 1..75: mol_type = other DNA
gcgtttcttgccggtgcggtttggtttgatagaaacagatggcgtaacgcgggtgatgataaccaaactcactga

SEQ ID NO: 477009 - DNA, 75 bp, synthetic construct
  source 1..75: mol_type = other DNA
tcgtttaacacattgcaacttggcgagcgcgggaacattgtgcggatgcgtggtgaggtgctactggctggtgtg

SEQ ID NO: 477010 - DNA, 75 bp, synthetic construct
  source 1..75: mol_type = other DNA
aaagcagtctgatgctttacgagcagtttggtgatttgaaattcaaatacagaaacagggagttctggtgccgag

SEQ ID NO: 477011 - DNA, 75 bp, synthetic construct
  source 1..75: mol_type = other DNA
atgcacagccccccccagcctagcagggggttccggaaagctttcagctttgagccagttattaaaacccctttt

SEQ ID NO: 477012 - DNA, 75 bp, synthetic construct
  source 1..75: mol_type = other DNA
cagcttgaagaggataaaatgggagagcagttatcgattccctatccgggcagcccatttacgggccgtaagtaa

SEQ ID NO: 477013 - DNA, 75 bp, synthetic construct
  source 1..75: mol_type = other DNA
cagcttgaagaggataaaatgggagagcagttatcgattccctatccgggcaacccgtttacgggccgtaagtaa

SEQ ID NO: 477014 - DNA, 75 bp, synthetic construct
  source 1..75: mol_type = other DNA
atctattccgccgccaccgtgcgccaggcgttcagcgatgcgctggatatgacgcgcatgtcgttacgccataac

SEQ ID NO: 477015 - DNA, 75 bp, synthetic construct
  source 1..75: mol_type = other DNA
ggctatgctgcatgtcctgccggggaattcagcagaatatgtgggagtggtcctgtttttcaacaaggatacgca

SEQ ID NO: 477016 - DNA, 75 bp, synthetic construct
  source 1..75: mol_type = other DNA
atggaatatcgatggactgatcctcaccgaacgtacccacacgccacgcaccttaaagatgattgaagtggcggg

SEQ ID NO: 477017 - DNA, 75 bp, synthetic construct
  source 1..75: mol_type = other DNA
ttctggagtatcgtggtctggcgaagctgaagtcgacttacaccgacaagctgccgctgatgatcaacccgaaaa

SEQ ID NO: 477018 - DNA, 75 bp, synthetic construct
  source 1..75: mol_type = other DNA
cagttaaacattccgcgcaaagaagcgcagaagtacatggatctttacttcgaacgctatccgggcgtgctggag

SEQ ID NO: 477019 - DNA, 75 bp, synthetic construct
  source 1..75: mol_type = other DNA
acagcctcgcggaacgttggttgaagcacaaaaccatcacttttgaagagattgcgggtaaaggcaaaaatcaac

SEQ ID NO: 477020 - DNA, 75 bp, synthetic construct
  source 1..75: mol_type = other DNA
tagtgttgaggagaaagttattcttcaaagatgacaatggtaatatcacagtgaatccacttttagaagctgaaa

SEQ ID NO: 477021 - DNA, 75 bp, synthetic construct
  source 1..75: mol_type = other DNA
agcacaagtccagccgtcccttttcagattacgttaagtgaatgcagcaaagggacaatgaaccgccccgggaat

SEQ ID NO: 477022 - DNA, 75 bp, synthetic construct
  source 1..75: mol_type = other DNA
cagatccagaaactgcgcgtcttgaatgtccttcttgtaatgaagcaatctcagaagcacaacgagcaagagcat

SEQ ID NO: 477023 - DNA, 75 bp, synthetic construct
  source 1..75: mol_type = other DNA
ctggctttcttcctgacggtattgttgagcggtccaatacttgctgccgcaattctgcgggcagcccgcgttaca

SEQ ID NO: 477024 - DNA, 75 bp, synthetic construct
  source 1..75: mol_type = other DNA
cttgttttatattctgagcggaattgatctcactaagaaaacgattaccacaagtattcctggattaaatagaga

SEQ ID NO: 477025 - DNA, 75 bp, synthetic construct
  source 1..75: mol_type = other DNA
ttcctgctggggatggcctggttcaatgactggcacgcggcgctctatatgccgctttctgcgccattctggtgg

SEQ ID NO: 477026 - DNA, 75 bp, synthetic construct
  source 1..75: mol_type = other DNA
ctgcaaaacattccggtgcgtaacgaagaaggtcgtcgtatccgccaggcgtttattgggccagaggattatgtg

SEQ ID NO: 477027 - DNA, 75 bp, synthetic construct
  source 1..75: mol_type = other DNA
actcgttgctctggctcttttactgtgtagttgtaagaccacaccgccaacgccaataactacaccaccagcagg

SEQ ID NO: 477028 - DNA, 75 bp, synthetic construct
  source 1..75: mol_type = other DNA
tatgacgttttggcaaaatggtgggcggatgtcgttaaaccgaccaggacccgcctgtatatcggtatcgccttc

SEQ ID NO: 477029 - DNA, 75 bp, synthetic construct
  source 1..75: mol_type = other DNA
ggcgtgcagttcgacgattatttctatactgaatcaccgggttcgctgctgaacgataacgagacgtaccgcaaa

SEQ ID NO: 477030 - DNA, 75 bp, synthetic construct
  source 1..75: mol_type = other DNA
acctctttctcagggagtttagtctccaggatttccggggcggttcagttctcagtgaagtcgcttccggtgtga

SEQ ID NO: 477031 - DNA, 75 bp, synthetic construct
  source 1..75: mol_type = other DNA
gtgatcacgcgcacattaatgaaggcataaaaaaaagccggcatcatgccggcccaaaaaatataaacaagacga

SEQ ID NO: 477032 - DNA, 75 bp, synthetic construct
  source 1..75: mol_type = other DNA
aggcgctgaataaaaaagcccatacgttttatcaatcgctgggctttatcccattggtcggagaaaacgaaaatg

SEQ ID NO: 477033 - DNA, 75 bp, synthetic construct
  source 1..75: mol_type = other DNA
gctggacggacgccgcctctatttgccggatattaagtccagcaatggtgcgcgccgtgccgcggcagaacgtgc

SEQ ID NO: 477034 - DNA, 75 bp, synthetic construct
  source 1..75: mol_type = other DNA
cgtcggaagaggtgctggaagagctggcactggactatccattgccgaaagtgattctggagtaccgcggtctgg

SEQ ID NO: 477035 - DNA, 75 bp, synthetic construct
  source 1..75: mol_type = other DNA
cctggtggggttgtctttcgctatcgagcctggcgttgcggcctatattccggttgctcatgattaccttgatgc

SEQ ID NO: 477036 - DNA, 75 bp, synthetic construct
  source 1..75: mol_type = other DNA
atgtgtgaaccatgtgtgaaaggagacagcacagtgaagacacatggaatgctttttaatgatgaaatggtccgg

SEQ ID NO: 477037 - DNA, 75 bp, synthetic construct
  source 1..75: mol_type = other DNA
tggatgagataaaagaagagttaacaaaagatattcaaaaacagtttaacgacatgctcaaaaaggcatttaaag

SEQ ID NO: 477038 - DNA, 75 bp, synthetic construct
  source 1..75: mol_type = other DNA
tgaaattgatgtggggacagctcgccagatagctcgccgtcataaggaggcgattgcacttggaaatgaccctaa

SEQ ID NO: 477039 - DNA, 75 bp, synthetic construct
  source 1..75: mol_type = other DNA
cggtatacacgccggcgcgaaaaattcacctgtaccactgcgaccatcgcggcctgccgctggcgcttgtcagca

SEQ ID NO: 477040 - DNA, 75 bp, synthetic construct
  source 1..75: mol_type = other DNA
ccgacttcgatggtgaccagatggccgttcacgtaccgctgactctggaagcccagctggaagcgcgtgcgctga

SEQ ID NO: 477041 - DNA, 75 bp, synthetic construct
  source 1..75: mol_type = other DNA
tgcaaactgggacccgcacaccatgccggttatcactgaagtaagcggttttgttcgcttcaccgatatgattga

SEQ ID NO: 477042 - DNA, 75 bp, synthetic construct
  source 1..75: mol_type = other DNA
agggttaagcggggatgatattatagttgataattacagaagtatatacggaggtgatgatgtaggtgggacagg

SEQ ID NO: 477043 - DNA, 75 bp, synthetic construct
  source 1..75: mol_type = other DNA
acacaccgctggtggagtacacccgcgaccgcctgcaccgggaaacgctgcgccgcttcggccgttatgaactca

SEQ ID NO: 477044 - DNA, 75 bp, synthetic construct
  source 1..75: mol_type = other DNA
tgtttttaccgtgaataagggggctcagttggctgtatccacggctgataatctggggacagcctttgttgataa

SEQ ID NO: 477045 - DNA, 75 bp, synthetic construct
  source 1..75: mol_type = other DNA
tcctgactgaagaacagtatctggatgcgctggaagagttcggtgatgaattcgacgcgaagatgggtgcggaag

SEQ ID NO: 477046 - DNA, 75 bp, synthetic construct
  source 1..75: mol_type = other DNA
ccggcactgaaaatcgttgatgctcagggtaacgatgttctgattccgggtaccgatatgcctgcgcaatacttc

SEQ ID NO: 477047 - DNA, 75 bp, synthetic construct
  source 1..75: mol_type = other DNA
tctgtcgacgcggttaaagttcgttccgttgtatcctgtgacaccgactttggtgtatgtgcgcactgctatggt

SEQ ID NO: 477048 - DNA, 75 bp, synthetic construct
  source 1..75: mol_type = other DNA
gtggtgtgacctgctggaagagaactctgtcgacgcggttaaagtacgttctgttgtatcctgtgacaccgactt

SEQ ID NO: 477049 - DNA, 75 bp, synthetic construct
  source 1..75: mol_type = other DNA
aagccgctgttgcaggtaaacgtgatgaactgcgcggtctgaaagagaacgttatcgttggtcgtctgatcccag

SEQ ID NO: 477050 - DNA, 75 bp, synthetic construct
  source 1..75: mol_type = other DNA
gttcatgctgtgactcgttacatcgttaacgaagtacaggacgtataccgtttgcagggcgttaagattaacgat

SEQ ID NO: 477051 - DNA, 75 bp, synthetic construct
  source 1..75: mol_type = other DNA
tattgggcggtaatggcgtaaacggtggtgatggtattaatggtggtaatcttttcattactaacgacaacatga

SEQ ID NO: 477052 - DNA, 75 bp, synthetic construct
  source 1..75: mol_type = other DNA
gcaggcggtagctgtggcatccgggcgggttcaggtgaaagtcgggcgggtaagccgtattcgtgaagcctggtt

SEQ ID NO: 477053 - DNA, 75 bp, synthetic construct
  source 1..75: mol_type = other DNA
cagcagtttcaggttatgcaggagtcggaaaaacttatccaggacacgatgggggtttattccgcatttctcggg

SEQ ID NO: 477054 - DNA, 75 bp, synthetic construct
  source 1..75: mol_type = other DNA
ccacggtagatggtgtactgggaatggaggcaaaaacaagaacggacctgatagtgatgtcagacgatccgaacg

SEQ ID NO: 477055 - DNA, 75 bp, synthetic construct
  source 1..75: mol_type = other DNA
gttttatcaatcgctgggctttatcccgttagtcggagaaaacgaaaatgcgttatttttcccaaccaaatccat

SEQ ID NO: 477056 - DNA, 75 bp, synthetic construct
  source 1..75: mol_type = other DNA
cctttagtcggggaaaacgaaaatgcgttatttttcccaaccaaatccattgaactgctttttacacagagcgat

SEQ ID NO: 477057 - DNA, 75 bp, synthetic construct
  source 1..75: mol_type = other DNA
aattaatctacaaaatgagtttaggacacatcatgctttaaaatacaggttgcatttaatagaaagcagaccgag

SEQ ID NO: 477058 - DNA, 75 bp, synthetic construct
  source 1..75: mol_type = other DNA
tatttctggccagtgtactttattctgtacaatctcatttttctggtgcacaaacaatacaactcaatggtaatg

SEQ ID NO: 477059 - DNA, 75 bp, synthetic construct
  source 1..75: mol_type = other DNA
tcaattaagaactggactcaggactattacacattattgtcgtcagacacaggtatctcgatcgctgataatagt

SEQ ID NO: 477060 - DNA, 75 bp, synthetic construct
  source 1..75: mol_type = other DNA
cattcggaaggaagaatgaatggatacacagcgggtctttatgcaacatggtatgccaatgatgaaacacacaat

SEQ ID NO: 477061 - DNA, 75 bp, synthetic construct
  source 1..75: mol_type = other DNA
atctgctcaagagacaggtcaaagatgggggacaacgtctggtgttgtataacagcacaggcctcacactcttga

SEQ ID NO: 477062 - DNA, 75 bp, synthetic construct
  source 1..75: mol_type = other DNA
ccgtgagttccgtccgttcgtggaggtgaactggctgcacaacacccgtgattttggtacccgcatgaacggcgt

SEQ ID NO: 477063 - DNA, 75 bp, synthetic construct
  source 1..75: mol_type = other DNA
tttatgctaataaaataaaggtgggtcgaaaaagtgcctttggctcactgactatcaataatggagcaagtgtta

SEQ ID NO: 477064 - DNA, 75 bp, synthetic construct
  source 1..75: mol_type = other DNA
ccgggtacacagctgaccatgcgtacgttccatatcggtggtgcggcatcacgtgcggctgctgaatccagcatc

SEQ ID NO: 477065 - DNA, 75 bp, synthetic construct
  source 1..75: mol_type = other DNA
acatggggttgttggcgcgggtatagcgtggtcagtgaggatgatagtagattatatagcattaagtcttttgga

SEQ ID NO: 477066 - DNA, 75 bp, synthetic construct
  source 1..75: mol_type = other DNA
cggttgtcatcccgatgacaatgatgacgtgctgtgtcctggttggcctgacgttcggcaacctccagaaacggg

SEQ ID NO: 477067 - DNA, 75 bp, synthetic construct
  source 1..75: mol_type = other DNA
agaagtccaagggaatgcaggatatggggcagggctggtttgtttgggtcaaaggccgcatggaagcttttgtca

SEQ ID NO: 477068 - DNA, 75 bp, synthetic construct
  source 1..75: mol_type = other DNA
tatctatatcattcagattggattgtatgcttgttagtgcttgtgctgatttgttttctcaacgctataggaaag

SEQ ID NO: 477069 - DNA, 75 bp, synthetic construct
  source 1..75: mol_type = other DNA
aagctatattttgtgagaagacaatatcatacagtctggatgattcgagtgaaatcgttgaattatgcaagaaaa

SEQ ID NO: 477070 - DNA, 75 bp, synthetic construct
  source 1..75: mol_type = other DNA
ctcttagagttgtttccttatttattacttttattttacctcataaaagcacatggggttgttggcgcgggtata

SEQ ID NO: 477071 - DNA, 75 bp, synthetic construct
  source 1..75: mol_type = other DNA
aggtgtaccagaatatccgcagtaaccatcagttcgatcttaacggactcgaacagatggtgaagagccgtcagt

SEQ ID NO: 477072 - DNA, 75 bp, synthetic construct
  source 1..75: mol_type = other DNA
atggtcggactctctgtgtttatagcaatagcatttacacgtttacctatatcacgaagtcgaaactgatcctac

SEQ ID NO: 477073 - DNA, 75 bp, synthetic construct
  source 1..75: mol_type = other DNA
atgagcaaagaactgttatccggcacaccgctgaaatgggtgggtggcaaaagccgcatcatgaacacactgaag

SEQ ID NO: 477074 - DNA, 75 bp, synthetic construct
  source 1..75: mol_type = other DNA
tggttgcttgcagtcaggtgtttcgggtctgtggttttttgtgttctctggtaagtggttacgattcttttgtgt

SEQ ID NO: 477075 - DNA, 75 bp, synthetic construct
  source 1..75: mol_type = other DNA
ccttcgcagtggtcagcgagcccgcgttcccgctttaaagctggagtactggcagcagttcatgaccgcggttta

SEQ ID NO: 477076 - DNA, 75 bp, synthetic construct
  source 1..75: mol_type = other DNA
cacaagcgaatgagtttgtaaatgccctgcgcagtggtaaacgcgcccgtgttccagccctgaagctgaaatact

SEQ ID NO: 477077 - DNA, 75 bp, synthetic construct
  source 1..75: mol_type = other DNA
attgtgaaaacaagcatgatcccgatccctggatacaaagagatatcattcagaatcccattgagtcagttacag

SEQ ID NO: 477078 - DNA, 75 bp, synthetic construct
  source 1..75: mol_type = other DNA
ttatccatcagtgggctgatttttattctgctcgccagcttagttttataatcgggttcttgccagtgagccaac

SEQ ID NO: 477079 - DNA, 75 bp, synthetic construct
  source 1..75: mol_type = other DNA
ctgattattttctcgtttctgggaatacccgtcggtttatatgcgctgtcatatttacccgaccattttatgaaa

SEQ ID NO: 477080 - DNA, 75 bp, synthetic construct
  source 1..75: mol_type = other DNA
atggacttttttacgttattttcgccagatggggccatgctggaaacaaacgtggtatgtatcgttatcgcgttg

SEQ ID NO: 477081 - DNA, 75 bp, synthetic construct
  source 1..75: mol_type = other DNA
cgttatttttgcggaccagatcatgtacaccggcttcgcctatgcagcgcgttctggtgcatctgttggtatcga

SEQ ID NO: 477082 - DNA, 75 bp, synthetic construct
  source 1..75: mol_type = other DNA
tgtatccaaagcgatgatggataatctgcaaactgaaaccgttattaaccgtgacggtcaggaagagaagcaggt

SEQ ID NO: 477083 - DNA, 75 bp, synthetic construct
  source 1..75: mol_type = other DNA
tggggcgtggccgcattcctgcgtatttgtctgggttcagccaccgtcgcggcgatctctaccgccggtctggtc

SEQ ID NO: 477084 - DNA, 75 bp, synthetic construct
  source 1..75: mol_type = other DNA
caggaaaggccattatttatccgtgacagtgacggcttttatttaccgcaggcagctgacgtattgctgaccaca

SEQ ID NO: 477085 - DNA, 75 bp, synthetic construct
  source 1..75: mol_type = other DNA
ggtatcgatctattagatagcattataaatgagaagagagaaaatttcgatcttaagattgaatgtgcgggcata

SEQ ID NO: 477086 - DNA, 75 bp, synthetic construct
  source 1..75: mol_type = other DNA
tcattccattgcagggtatttatttttacgttcaccacagatttttaccttatatctgagtcggagtccgtataa

SEQ ID NO: 477087 - DNA, 75 bp, synthetic construct
  source 1..75: mol_type = other DNA
tgatgaaaaaactgtctcagatatgtctcctccgttatctgaggatatgaaatatgcacttgaattatcaggttt

SEQ ID NO: 477088 - DNA, 75 bp, synthetic construct
  source 1..75: mol_type = other DNA
agggacaactgaacagcctgtcggcgtggcagccggggatgagtgcgcccaccgtaccgtatcgttttcgctttc

SEQ ID NO: 477089 - DNA, 75 bp, synthetic construct
  source 1..75: mol_type = other DNA
atacgacagcctggtgtatgcggatgtcccagaaagagatgctgccccgcgggcttccgtcggaagagcagagcc

SEQ ID NO: 477090 - DNA, 75 bp, synthetic construct
  source 1..75: mol_type = other DNA
gcagagctggcccggtgcatcagaggaaaaatgataatttcggtgaacgacatcccgcagatgcgcgaggtgttc

SEQ ID NO: 477091 - DNA, 75 bp, synthetic construct
  source 1..75: mol_type = other DNA
gcagagctggcccgttgcatcagaggaaagatgattatatcggtcaacgatatcccggaaatgcggcaggttttt

SEQ ID NO: 477092 - DNA, 75 bp, synthetic construct
  source 1..75: mol_type = other DNA
tcctgaagggaactactcgcggctggcagagctggcccggtgcatcagaggaaagatgattatatcggtcaacga

SEQ ID NO: 477093 - DNA, 75 bp, synthetic construct
  source 1..75: mol_type = other DNA
aagtgcactcactaattttacatatgacaaactggtatctgttattgctgaaaaaaaggaatttcttgaatacaa

SEQ ID NO: 477094 - DNA, 75 bp, synthetic construct
  source 1..75: mol_type = other DNA
gttgaggtcatcaatgatatcaatggcgaattagtcaacctctaccgggtggtaaagcatcatctggaagagttc

SEQ ID NO: 477095 - DNA, 75 bp, synthetic construct
  source 1..75: mol_type = other DNA
actggactgaacatacagacagtgaacatcaactacagtctggcggggaaatccacgccgcgccgtgaactggta

SEQ ID NO: 477096 - DNA, 75 bp, synthetic construct
  source 1..75: mol_type = other DNA
aattagcggctggctgtgggtcaccgtactgttcgctaatttcgccgaggcgctggcagaaggccgcagtaaagc

SEQ ID NO: 477097 - DNA, 75 bp, synthetic construct
  source 1..75: mol_type = other DNA
cgctgaagactgcggcgttcctcacagcaagcgtatcagaaagggatatatctattaccagcagcggtacgacca

SEQ ID NO: 477098 - DNA, 75 bp, synthetic construct
  source 1..75: mol_type = other DNA
acgacggtaaaattggcattcttataaatggtggtgagacatcgccgggtttgataaggattaaaaacgtcgata

SEQ ID NO: 477099 - DNA, 75 bp, synthetic construct
  source 1..75: mol_type = other DNA
acggatatccagcgtgcggcacggttctactacctccagaagcaggcgtttgggggcaaggtggcagagcacagc

SEQ ID NO: 477100 - DNA, 75 bp, synthetic construct
  source 1..75: mol_type = other DNA
ctattttcttaaggtacccggcaagatcgaagtcattaatgatatcaacggtgagctggtgaacctgtatcgggt

SEQ ID NO: 477101 - DNA, 75 bp, synthetic construct
  source 1..75: mol_type = other DNA
aaaatttagctgccttttgttcagtcaagggagttcaacctgatgaacttgtgaccgctatatttgaaaaagaat

SEQ ID NO: 477102 - DNA, 75 bp, synthetic construct
  source 1..75: mol_type = other DNA
tctcaacgtttcatcgcgatgtcacgaaagggttatatcccatcgattgggcgggagacgtaatggattttagtg

SEQ ID NO: 477103 - DNA, 75 bp, synthetic construct
  source 1..75: mol_type = other DNA
gcttgatcctgactgctggcgggtgcgccatgtacgctttcatcacggttttaccaatatcgaattttacgatcc

SEQ ID NO: 477104 - DNA, 75 bp, synthetic construct
  source 1..75: mol_type = other DNA
gccacatccagcatggcttggctactggctgggcgggattaatttgcatcttactcatcatcttttccctcactg

SEQ ID NO: 477105 - DNA, 75 bp, synthetic construct
  source 1..75: mol_type = other DNA
atcgccatcatgttgattatatttatataaatccagtaaaacatggctgggtaaagcaagtgagagattggccat

SEQ ID NO: 477106 - DNA, 75 bp, synthetic construct
  source 1..75: mol_type = other DNA
agtctgcggctctggggcttggctggtcactggggcgtctgggggcggtgtcgctggacacgacgcactcccggg

SEQ ID NO: 477107 - DNA, 75 bp, synthetic construct
  source 1..75: mol_type = other DNA
gcatggtggttatcaaggcatttatcgcggtacggaggctgggcctgcggcaggaaggcatcagtgaagaaacac

SEQ ID NO: 477108 - DNA, 75 bp, synthetic construct
  source 1..75: mol_type = other DNA
cgcggtacggaggctgggcctgcggcaggaaggcatcagtgaagaaacacaaaatgacagctataagaaaatact

SEQ ID NO: 477109 - DNA, 75 bp, synthetic construct
  source 1..75: mol_type = other DNA
gtaaagcaggtgtgtgattggccattctcaacgttccatcgcgatgttgcgcgagggttatatcccatcgattgg

SEQ ID NO: 477110 - DNA, 75 bp, synthetic construct
  source 1..75: mol_type = other DNA
caacttttgactacccagtaccagacgctccgtaacgccattattaaagttaagcgagccagaccttttgaaatt

SEQ ID NO: 477111 - DNA, 75 bp, synthetic construct
  source 1..75: mol_type = other DNA
atgtctgaatatcgtcgttattacctcaaggggggaagctggtttttcacggtgaacttacggaatcgtcgaagc

SEQ ID NO: 477112 - DNA, 75 bp, synthetic construct
  source 1..75: mol_type = other DNA
tctcaacgttccatcgcgatgttgcgcgagggttatatcccatcgattgggcgggagacataacggatttaaatg

SEQ ID NO: 477113 - DNA, 75 bp, synthetic construct
  source 1..75: mol_type = other DNA
tcacccatgcttgcggattgaaaaatatctggcaaccgcgtttttgggagcatgccatccgtaatacaaaagatt

SEQ ID NO: 477114 - DNA, 75 bp, synthetic construct
  source 1..75: mol_type = other DNA
atatgcattgcatatggacattacctgaaggcgatgatgatttttcctctcgctggcgggaaattaaaaagcaat

SEQ ID NO: 477115 - DNA, 75 bp, synthetic construct
  source 1..75: mol_type = other DNA
atgccgcgcctcaggctccggtcgaatcatcccgtattgctgcgcctttcaacagcgactcagcaaagagagaca

SEQ ID NO: 477116 - DNA, 75 bp, synthetic construct
  source 1..75: mol_type = other DNA
cgcatagcagaactggaagcgcgggaaatactgctcccggaacgtagcagcatgcttcatcgaacagattttcac

SEQ ID NO: 477117 - DNA, 75 bp, synthetic construct
  source 1..75: mol_type = other DNA
tcgagtacgttgacgatatgcgcgagaagctggaagccgcagagaagcgcattgcagaactggaaagcaacgaag

SEQ ID NO: 477118 - DNA, 75 bp, synthetic construct
  source 1..75: mol_type = other DNA
gatgaatgggaaagaaaccagcaatacataaaacgccgcgatcaggagaacgaggatattgcgctaacggtaggg

SEQ ID NO: 477119 - DNA, 75 bp, synthetic construct
  source 1..75: mol_type = other DNA
gttaattggactaatggcgatgcagaaaagcgcatgactggcgctgactggctgacagcgattgagatgtacaaa

SEQ ID NO: 477120 - DNA, 75 bp, synthetic construct
  source 1..75: mol_type = other DNA
cgaggatattgcgctaacggtagggaagctgagagttgagcttgaggagacaaaatcaaaactcaacgagcagcg

SEQ ID NO: 477121 - DNA, 75 bp, synthetic construct
  source 1..75: mol_type = other DNA
aattgctggtgaagcacctgtaatgcccttcgatcagcgaattaatgcgcttaacgattttatgaagcacttttc

SEQ ID NO: 477122 - DNA, 75 bp, synthetic construct
  source 1..75: mol_type = other DNA
ctaatggattcgaaagaatgcattgacgtaattcgtgaagaagtaaagcgatggaatgattcccgtgccgctggc

SEQ ID NO: 477123 - DNA, 75 bp, synthetic construct
  source 1..75: mol_type = other DNA
caggcacaaaagttagttgaagcaatcattgttgcgatagaaaacgaacaggaaaggctttttgatgaagattac

SEQ ID NO: 477124 - DNA, 75 bp, synthetic construct
  source 1..75: mol_type = other DNA
agcggattgctgaactggaggtgctggcgttcaatcctgcacttctggatgtgatatcagaacgtcagcggcaga

SEQ ID NO: 477125 - DNA, 75 bp, synthetic construct
  source 1..75: mol_type = other DNA
cgacgaaaaacgacaatggagccacgccgcgtttttctcagcgccagttacaggcgctttgttctgatattgaca

SEQ ID NO: 477126 - DNA, 75 bp, synthetic construct
  source 1..75: mol_type = other DNA
ctccggaagagcaggaagcggcagcacaacagcaggcgctggatcaacagcaggcagaacttcagatgcgcgaaa

SEQ ID NO: 477127 - DNA, 75 bp, synthetic construct
  source 1..75: mol_type = other DNA
ggcgaccagctggcaccggaagttatccaggtactgaaagatcgcggtcagcccatgaccatccataacctcatt

SEQ ID NO: 477128 - DNA, 75 bp, synthetic construct
  source 1..75: mol_type = other DNA
attcgatatgcagatgttgaggtcatgaaaattgctggagatgcccagctttctaccccatgcactgacagcatc

SEQ ID NO: 477129 - DNA, 75 bp, synthetic construct
  source 1..75: mol_type = other DNA
tctatgtaagcaatgatcctcattttagtagccatctcgaagcaactgcgtttggtttcgataatggtcagcagc

SEQ ID NO: 477130 - DNA, 75 bp, synthetic construct
  source 1..75: mol_type = other DNA
cgctcatgccgttcaacccgttacagccttgcaaagcgaatattctctgtggtggagggaaccggaacaagagat

SEQ ID NO: 477131 - DNA, 75 bp, synthetic construct
  source 1..75: mol_type = other DNA
atgccgcaacggctcttgttgctctggtcttcagtattcttaccggaagcgctttaggcattatcgggtatggtt

SEQ ID NO: 477132 - DNA, 75 bp, synthetic construct
  source 1..75: mol_type = other DNA
ggtcgaatcgtcccgtattgctgcgccttttaacagtgactcaacaaagcgagataattctgaggcatcttggga

SEQ ID NO: 477133 - DNA, 75 bp, synthetic construct
  source 1..75: mol_type = other DNA
cgcgtgacggacattatgggcgaaatagcttctgcttctgatgagcagagccgtggtatcgatcaggttggctta

SEQ ID NO: 477134 - DNA, 75 bp, synthetic construct
  source 1..75: mol_type = other DNA
cgtggggtctggttacgggatggtgaatccatcaatgcagatggcagtcgttatggtgatccccggcgttcacgt

SEQ ID NO: 477135 - DNA, 75 bp, synthetic construct
  source 1..75: mol_type = other DNA
tgcgtgctaaggcagaaaaagcaacgtgtggcgagtggtcgctcgaatatggagagggacgatttgatggtgatg

SEQ ID NO: 477136 - DNA, 75 bp, synthetic construct
  source 1..75: mol_type = other DNA
aaagctggcggcgaaatatccctatgaacctgcttatctaccagtcgcacgtctggaagatggcacgctgtggaa

SEQ ID NO: 477137 - DNA, 75 bp, synthetic construct
  source 1..75: mol_type = other DNA
gggactgcaaacaactgattgaagagcaactcatcgattatatccgcaccacgctgacccatgcaggcggaatta

SEQ ID NO: 477138 - DNA, 75 bp, synthetic construct
  source 1..75: mol_type = other DNA
gaggacgtgatgtatatcgtagtaaaccaaatcaagattatattggagcgtcttatagtactagactggccccct

SEQ ID NO: 477139 - DNA, 75 bp, synthetic construct
  source 1..75: mol_type = other DNA
aacgaagcctcgttacgtgatctccaacaacgttgtccggccagtgtaaaaatggagcaattccgccccaatctg

SEQ ID NO: 477140 - DNA, 75 bp, synthetic construct
  source 1..75: mol_type = other DNA
gcgcccgatatgaccggcgtggtggacagcacctttgaccagaaggtgcagcagcatgccacgaccgagatgcag

SEQ ID NO: 477141 - DNA, 75 bp, synthetic construct
  source 1..75: mol_type = other DNA
tctggcctgccggtggcggacaggctccgaccgcaccggtgatgaccccggttcagcgtccgggaatgatggaca

SEQ ID NO: 477142 - DNA, 75 bp, synthetic construct
  source 1..75: mol_type = other DNA
ggttaagcggatttttctcccgcgaagtgcaattacgttgggtagggccacagatgacgcggcgcgtaaaacgcc

SEQ ID NO: 477143 - DNA, 75 bp, synthetic construct
  source 1..75: mol_type = other DNA
gcatttttatgctgacagaacccgacggtacatttattaccgcccgtcagtttccacagatggtgcgctttaccc

SEQ ID NO: 477144 - DNA, 75 bp, synthetic construct
  source 1..75: mol_type = other DNA
gcatttttatgctgacagaacctgacggtacgtttattaccgctcgtcagtttccgcaaatggtacggtttaccc

SEQ ID NO: 477145 - DNA, 75 bp, synthetic construct
  source 1..75: mol_type = other DNA
aacgcgaacaaattcgcaacgccctgctggcggcgctgtctcatgatttgcgcaccccgcttacggtattgttcg

SEQ ID NO: 477146 - DNA, 75 bp, synthetic construct
  source 1..75: mol_type = other DNA
agatagtgaaattgatattgataatataccagacgatgtactaggaattgtgatgggagtagaccaacagttaga

SEQ ID NO: 477147 - DNA, 75 bp, synthetic construct
  source 1..75: mol_type = other DNA
cgctggtggtcactccctgattaaccttaatgtaaacttaggtaaaacgaacgttagacaattactaaaccgtgc

SEQ ID NO: 477148 - DNA, 75 bp, synthetic construct
  source 1..75: mol_type = other DNA
cctgcagacacaactcgaggccgggaaaaattttgactctctcagtgctgaacccctgccaggggcgctcgcctc

SEQ ID NO: 477149 - DNA, 75 bp, synthetic construct
  source 1..75: mol_type = other DNA
cgttgtggggatttcttgccaataccgacatctcttatgatccgcagcaaattgacgcccaaacctgtatggcct

SEQ ID NO: 477150 - DNA, 75 bp, synthetic construct
  source 1..75: mol_type = other DNA
cgcacgccgcttacggtgctgttcggtcaggcagaaatcttaacgctcgatctggcaagcgaaggatcgccccac

SEQ ID NO: 477151 - DNA, 75 bp, synthetic construct
  source 1..75: mol_type = other DNA
atgacttcgacttcggtttaagtctgggtgctgcatattctaattctaaccgtactgacaatcaggttcacaaag

SEQ ID NO: 477152 - DNA, 75 bp, synthetic construct
  source 1..75: mol_type = other DNA
tcaaaatcgaaaatacctttttgagtgaagatcaagtagaccaactggcattgtatgcaccgcaagccacggtta

SEQ ID NO: 477153 - DNA, 75 bp, synthetic construct
  source 1..75: mol_type = other DNA
ggacagcgagcggtttattcgcttcgctgatttttgccgcgatccgctggcgcatccgttaaaaaccgccagcgg

SEQ ID NO: 477154 - DNA, 75 bp, synthetic construct
  source 1..75: mol_type = other DNA
gaaatcttctcacagcgtattgccgattacgcttatccggattgcccggggcatccaatgtggctggagccggac

SEQ ID NO: 477155 - DNA, 75 bp, synthetic construct
  source 1..75: mol_type = other DNA
gaaaccgtgtttagctcgcgtggcgcgttagccacaggaatggaaaactccttgcagagcgcggttcgcgaccag

SEQ ID NO: 477156 - DNA, 75 bp, synthetic construct
  source 1..75: mol_type = other DNA
atccgcagcagtttatgtccggagacaagaacccgctgggcggggatgccggcaaggagggcggaaatggcgggt

SEQ ID NO: 477157 - DNA, 75 bp, synthetic construct
  source 1..75: mol_type = other DNA
gattggtgcgggcaacgaagtgacagtggtgttccaggacggcttccagctgaaaaccgtggaggaaatggcgct

SEQ ID NO: 477158 - DNA, 75 bp, synthetic construct
  source 1..75: mol_type = other DNA
tgggctggaagcctggggggatgtgtccagtgagcgtgccatcgtgcgtacccgcaatatcagttgcctgaagga

SEQ ID NO: 477159 - DNA, 75 bp, synthetic construct
  source 1..75: mol_type = other DNA
tgtctaccgcatcaccttccgcgacacaaagcagataggtatcgactggacggcggtgtacagcgcagcaaaggg

SEQ ID NO: 477160 - DNA, 75 bp, synthetic construct
  source 1..75: mol_type = other DNA
tgaaaaccgtggaagagatggcgctggagcaaacgaaaacagtcgaagaggctgcagcagagcatgctcagaatt

SEQ ID NO: 477161 - DNA, 75 bp, synthetic construct
  source 1..75: mol_type = other DNA
gaagacaatccggaaagtccggttcctgttccgccatcggctgaaagtcatcttaacggctttaatactgaccag

SEQ ID NO: 477162 - DNA, 75 bp, synthetic construct
  source 1..75: mol_type = other DNA
tagatcatcgcagtatatacgcaattgactgtactaaaatcgaagccccagcatggaataaactaacggcctttg

SEQ ID NO: 477163 - DNA, 75 bp, synthetic construct
  source 1..75: mol_type = other DNA
ggtgttgcctgggcagcacagcaactcggtcagaacgcggtaatttacatgccgaaaggttccgctcaggaacgc

SEQ ID NO: 477164 - DNA, 75 bp, synthetic construct
  source 1..75: mol_type = other DNA
tcatttgaacacctgaaaaatgccatcggcgaaaaaatgacctttgcgaccaccaccgacggcaaccacggtcgc

SEQ ID NO: 477165 - DNA, 75 bp, synthetic construct
  source 1..75: mol_type = other DNA
tgcgtctacagatgcaggcgacaacggtcgtgattaacggtgaaacagttatcagcacggggattcctgggtttg

SEQ ID NO: 477166 - DNA, 75 bp, synthetic construct
  source 1..75: mol_type = other DNA
aaatccaatgaattaatatcttctcgggattataaaggcgttcaattcgaagttactcataaaggatggggcttt

SEQ ID NO: 477167 - DNA, 75 bp, synthetic construct
  source 1..75: mol_type = other DNA
tacggggctgcgtattgagttatcggtgtctggggctaaaccgcgcgaagggaaccctggtgttgaggttggcga

SEQ ID NO: 477168 - DNA, 75 bp, synthetic construct
  source 1..75: mol_type = other DNA
ggtccacactttctggaaagagcggtggaaattagcgagaagcagttctccgaagcgattattgaggctgccaga

SEQ ID NO: 477169 - DNA, 75 bp, synthetic construct
  source 1..75: mol_type = other DNA
ttcttggcaatccgccggatattcccgaagtaacaatggtgcatttgccgcgggtagaagcgacgctggccccgc

SEQ ID NO: 477170 - DNA, 75 bp, synthetic construct
  source 1..75: mol_type = other DNA
ccgatgcaggggcgggcagatattcaggctcgtcgactgaaactgaaagaactgatgcccgatgtggaactgatg

SEQ ID NO: 477171 - DNA, 75 bp, synthetic construct
  source 1..75: mol_type = other DNA
aggggataaaaaaccgatgcaggggcgggcggatatacaggctcgtcgactgaaactgaaggagctgatgccgga

SEQ ID NO: 477172 - DNA, 75 bp, synthetic construct
  source 1..75: mol_type = other DNA
gcatccgtatcgaaaacgctgcggataactccctgttttccattggtgaaaataactggacgtcttttacgttta

SEQ ID NO: 477173 - DNA, 75 bp, synthetic construct
  source 1..75: mol_type = other DNA
catcacagccgaaacttaatgcagtcccggtaaaacaaagtggtgcacaactttcaggggccgattttagtggga

SEQ ID NO: 477174 - DNA, 75 bp, synthetic construct
  source 1..75: mol_type = other DNA
tgggtatattactgctgggcgttagtgggatatataacattatccttgcaaattcaaaacctgttgatctcattt

SEQ ID NO: 477175 - DNA, 75 bp, synthetic construct
  source 1..75: mol_type = other DNA
ttatcctttgattttgtgattgaaagaggggcaaaaggacaaatgtattatgttactcataaaggctggacattt

SEQ ID NO: 477176 - DNA, 75 bp, synthetic construct
  source 1..75: mol_type = other DNA
cgaatttgagccgctgctggacgatctgctgactattccggtagctgaaaatgctaactggtcagcggaagagat

SEQ ID NO: 477177 - DNA, 75 bp, synthetic construct
  source 1..75: mol_type = other DNA
gaataccctgaaaatgggcattatggatgaagaacgccggacctcgctgaacttgcgtagctgtatcgctcaggc

SEQ ID NO: 477178 - DNA, 75 bp, synthetic construct
  source 1..75: mol_type = other DNA
gcagtgtctatattgtgaaaccgaaaatgcacggtccgcaggaagtggcgttcgccaacaaactgtttacccgca

SEQ ID NO: 477179 - DNA, 75 bp, synthetic construct
  source 1..75: mol_type = other DNA
agtcgccaactggctggcaggcgtcgtggcacagcagacgacagagtcgcaaattagcggtatggcaattgccgc

SEQ ID NO: 477180 - DNA, 75 bp, synthetic construct
  source 1..75: mol_type = other DNA
cgctcaccgggtacagccaatattttaattaaagcatttgtttccagcggacaatttttattaccgctaattatc

SEQ ID NO: 477181 - DNA, 75 bp, synthetic construct
  source 1..75: mol_type = other DNA
ccgcagcgcggcagaaaaaactgagcgcctgcccgtccgctgacagcgccattgtcggcaagatcatctcgaaat

SEQ ID NO: 477182 - DNA, 75 bp, synthetic construct
  source 1..75: mol_type = other DNA
gcaggctgttgcccagatgtgtgccatgcgacggcttgggcatcaggtgatgctggcctgccgcgaacacagcag

SEQ ID NO: 477183 - DNA, 75 bp, synthetic construct
  source 1..75: mol_type = other DNA
tcgctggctcgtggtgggcgccgggcgtgaagaatacgaagcacgtctgcgtcagcagacagaacacctgggaat

SEQ ID NO: 477184 - DNA, 75 bp, synthetic construct
  source 1..75: mol_type = other DNA
cagaagaatgtgacagggacgctgttacccgtgggggatgtgtctgcatggaccggcgcactgcgcgatttttta

SEQ ID NO: 477185 - DNA, 75 bp, synthetic construct
  source 1..75: mol_type = other DNA
gaaggggcgatggtcagcggctacgatccgcagcgcggtgcgcaggttatcgcctgggttcggcgtttcctcgat

SEQ ID NO: 477186 - DNA, 75 bp, synthetic construct
  source 1..75: mol_type = other DNA
ctgaccaaagaacaggtgcaggcgtcgctggagaatatggcgaaagtggtggatcagcaaaatgctggcgatccg

SEQ ID NO: 477187 - DNA, 75 bp, synthetic construct
  source 1..75: mol_type = other DNA
tcaccagtcaggcggggccacagctggtggttccggcaatgaacgcccgctacgcgctgaacgcggcgaacgctc

SEQ ID NO: 477188 - DNA, 75 bp, synthetic construct
  source 1..75: mol_type = other DNA
gattgcttatcgacggcagagaataaatttgatgcacatagattcgataagtgtgcattgcgtagtaataacaat

SEQ ID NO: 477189 - DNA, 75 bp, synthetic construct
  source 1..75: mol_type = other DNA
ttattctaatcattccattgattctatgctcttgcgataaaaaagatgaagattgtttatcgacgccagagaata

SEQ ID NO: 477190 - DNA, 75 bp, synthetic construct
  source 1..75: mol_type = other DNA
ttgtccgctttccgccatttcatcatcactgattggcgtggcgttttttgccagcactcccgctttgcgtttttc

SEQ ID NO: 477191 - DNA, 75 bp, synthetic construct
  source 1..75: mol_type = other DNA
agtaaaggaaaaaaatatgtcatctgccacgccgattatccttgtgataaatacgagtttggaaagccagttgat

SEQ ID NO: 477192 - DNA, 75 bp, synthetic construct
  source 1..75: mol_type = other DNA
caccctgctggatctgaaccgttacgaactgtattaccagtttgattttacggcgaagtatgaaatcacggaaga

SEQ ID NO: 477193 - DNA, 75 bp, synthetic construct
  source 1..75: mol_type = other DNA
atgaaatatcagggatttaaggggctaacaaaagaggactatgaagcagagttgctgggagttcttacacctgct

SEQ ID NO: 477194 - DNA, 75 bp, synthetic construct
  source 1..75: mol_type = other DNA
gataatctgaactcaggaaccggaggactgatttttgatgagggacaacattattcggttattgggaaagataaa

SEQ ID NO: 477195 - DNA, 75 bp, synthetic construct
  source 1..75: mol_type = other DNA
gtctcccctgttctggctgccgggttgttcagcggatataacgcggcgtactacggtgccatcaccggcggtaag

SEQ ID NO: 477196 - DNA, 75 bp, synthetic construct
  source 1..75: mol_type = other DNA
gaatgtcagctttatgaagaacccgtctccgggacagtccctgaatatcccgctggtcagtgcaccggtcggaac

SEQ ID NO: 477197 - DNA, 75 bp, synthetic construct
  source 1..75: mol_type = other DNA
atggaagcaatacgctgcctgaagcgctatatctcacgcgaagtttatacattacagcataatcaaaacaggcag

SEQ ID NO: 477198 - DNA, 75 bp, synthetic construct
  source 1..75: mol_type = other DNA
acgcgctcaggccgcacgaatataacggtgggttgccaccaaatgaatcggaaaaccgatactggaaaaactcta

SEQ ID NO: 477199 - DNA, 75 bp, synthetic construct
  source 1..75: mol_type = other DNA
tgtcgtgcagagcggtgtatcgctaacggcggcggaatttagcgccagtgccacaattgtggtggattatcaatg

SEQ ID NO: 477200 - DNA, 75 bp, synthetic construct
  source 1..75: mol_type = other DNA
attggtttcgtttcgccgactgctgaatttacccgaaaaccgtcgaaacaccggatctgcgtaccgacctcgtct

SEQ ID NO: 477201 - DNA, 75 bp, synthetic construct
  source 1..75: mol_type = other DNA
ggttgccggaggctactggtggtatcaaagccgccaggataacggcctgacgctgtatggcaacgtggatattcg

SEQ ID NO: 477202 - DNA, 75 bp, synthetic construct
  source 1..75: mol_type = other DNA
ggcaagtcaggaaacatgtgataaacgcctttctggtcgtgcgtacaacattaccaacggcgaacatcgcacatt

SEQ ID NO: 477203 - DNA, 75 bp, synthetic construct
  source 1..75: mol_type = other DNA
gacagggtaacggtacgctgtggcagcccaaccagcgggtgattgtcttcgatccggtctgtggtttcgacaata

SEQ ID NO: 477204 - DNA, 75 bp, synthetic construct
  source 1..75: mol_type = other DNA
cttgccggttatcgcgatgaagaaatcgcccaggctgccgctgcagtaaaacaggcgcaggccgcttacgactat

SEQ ID NO: 477205 - DNA, 75 bp, synthetic construct
  source 1..75: mol_type = other DNA
aatgaaggtggcacggtgtttaccgtctcgctaacacgtccagtgtgggtgcgtgcctatgttgacgaacgtaat

SEQ ID NO: 477206 - DNA, 75 bp, synthetic construct
  source 1..75: mol_type = other DNA
gcgcagcatcgtgcagaagctcatcgacgaactgaatattgattgccgtattcgttcaattccctacccgatgct

SEQ ID NO: 477207 - DNA, 75 bp, synthetic construct
  source 1..75: mol_type = other DNA
agcgtgcgagcgaccggtcgcaacgaggcaatgggcaaattgctggaaaaaatgggcgcagagtttgttccggcg

SEQ ID NO: 477208 - DNA, 75 bp, synthetic construct
  source 1..75: mol_type = other DNA
ggcgttataaggttgatgtaaggccgcaaggggcggaaggaaagcggatccgtaagatttttaccctgaagtcaa

SEQ ID NO: 477209 - DNA, 75 bp, synthetic construct
  source 1..75: mol_type = other DNA
gcaaacgttcgcgccactcgccgcctgggcgaatgggctgtcgcctggggtgtacgtaactttattcatatctct

SEQ ID NO: 477210 - DNA, 75 bp, synthetic construct
  source 1..75: mol_type = other DNA
taccggcgccaccagcggtttaggtcgaaacgcggttgagtttttatgccggaaaggcatcagtgtgagagcaac

SEQ ID NO: 477211 - DNA, 75 bp, synthetic construct
  source 1..75: mol_type = other DNA
cccacaaagtctgttcggaccgcacgataaagtctttatcccccgtctggcgcatatgatgcaccactacggcag

SEQ ID NO: 477212 - DNA, 75 bp, synthetic construct
  source 1..75: mol_type = other DNA
gcattctcaagtaaggatacctgggccttttttgctcgatatgatcagaacactgtcgataccctgaaaaatact

SEQ ID NO: 477213 - DNA, 75 bp, synthetic construct
  source 1..75: mol_type = other DNA
tgggcgagagtgacggaatagccaaaaccgccgaatgggcggcagggatttgtggggttcacgcagcgaaaattc

SEQ ID NO: 477214 - DNA, 75 bp, synthetic construct
  source 1..75: mol_type = other DNA
attcgtgaggcttatggcccagcatcgatttttgctggttcctacggctggcgttcaaatggcgtcttgcataaa

SEQ ID NO: 477215 - DNA, 75 bp, synthetic construct
  source 1..75: mol_type = other DNA
tgtacgcggtggcaaatcgtgagcctgtcaccattcatcctgacgatgcccaggcgcgcggcatacaagatggcg

SEQ ID NO: 477216 - DNA, 75 bp, synthetic construct
  source 1..75: mol_type = other DNA
aggtaaggatttaggcggtgtaagtagtgataactacgatagcaagggtaatcatcattacgccaacaaaagtct

SEQ ID NO: 477217 - DNA, 75 bp, synthetic construct
  source 1..75: mol_type = other DNA
gattacgcttatccggattgccctgggcatccaatgtggctggagccggacgaatggcagggcaatgccgaaccg

SEQ ID NO: 477218 - DNA, 75 bp, synthetic construct
  source 1..75: mol_type = other DNA
ccgcgatccgcaggcgcatccattaaaaaccgccagcggtaagattgaaatcttctcgcagcgtattgccgatta

SEQ ID NO: 477219 - DNA, 75 bp, synthetic construct
  source 1..75: mol_type = other DNA
tactaccatgctgatggctggctggggaatgcagcgccaacagtttggtgagcaaaaacactggatgatcgtcac

SEQ ID NO: 477220 - DNA, 75 bp, synthetic construct
  source 1..75: mol_type = other DNA
gttcatagcaacacgcgagtgcaatttccgatggtgcgcaaaggtttcctcgcatcgccagaaaaaccacaaggc

SEQ ID NO: 477221 - DNA, 75 bp, synthetic construct
  source 1..75: mol_type = other DNA
gcatccaatgtggctggagccggacgaatggcagggcaatgccgaaccggaacagttgcaggtactttctgctca

SEQ ID NO: 477222 - DNA, 75 bp, synthetic construct
  source 1..75: mol_type = other DNA
cgccgaatgggcggcagggatttgtggggttaacgcagcgaaaatccgcgagctggcggctcttttccaccaaaa

SEQ ID NO: 477223 - DNA, 75 bp, synthetic construct
  source 1..75: mol_type = other DNA
aaatccctgttgcccgtattgttgaagcactggaaaaccctggctgcgcataccaacacaatggcatgaatcgcc

SEQ ID NO: 477224 - DNA, 75 bp, synthetic construct
  source 1..75: mol_type = other DNA
cgggtggctgcgatgcggtagataaaatccctgtcgcccgcattgttgaagcactggaaaaccctggtggcgcat

SEQ ID NO: 477225 - DNA, 75 bp, synthetic construct
  source 1..75: mol_type = other DNA
atgccaggccatgagcctgtttgccagtcgacaaacgctattgctgttgttacccgaaaacggaccgaatgcggc

SEQ ID NO: 477226 - DNA, 75 bp, synthetic construct
  source 1..75: mol_type = other DNA
gtattctccagtaaggatacctgggccttttttgctcgatatgatcagaacactgtcgatatcctgaaaaatact

SEQ ID NO: 477227 - DNA, 75 bp, synthetic construct
  source 1..75: mol_type = other DNA
gtgttgacctgttcaccggtgtcacgatgacctataccgacagcagtgcagacagtgatgcgttcagcgggaaga

SEQ ID NO: 477228 - DNA, 75 bp, synthetic construct
  source 1..75: mol_type = other DNA
atgaacggtaccggttcggcagatggtggttacagcgataactacactcacgttcagattggtgccgacagaaag

SEQ ID NO: 477229 - DNA, 75 bp, synthetic construct
  source 1..75: mol_type = other DNA
ctggatggtttcaggacggaagctgataaagcggctgcagcgaaggcgaacagtttcatgaatgccggctacaaa

SEQ ID NO: 477230 - DNA, 75 bp, synthetic construct
  source 1..75: mol_type = other DNA
gacatacatgacagaaggctatgatttaaccggtgataacgctacgctgaacatcagccagcaggcgcatgtttc

SEQ ID NO: 477231 - DNA, 75 bp, synthetic construct
  source 1..75: mol_type = other DNA
tgactgggaaacccggcatttccgatttaagactctgaatctggaaaactcagaattcacaactgcacgtaactc

SEQ ID NO: 477232 - DNA, 75 bp, synthetic construct
  source 1..75: mol_type = other DNA
cagactgcggttacatatattcctttcaggaacagtctgcatttttcatcagtctggcgactgcgtcgtcttgtt

SEQ ID NO: 477233 - DNA, 75 bp, synthetic construct
  source 1..75: mol_type = other DNA
aaaccccagccaccgatgctttcctggctgaagtgcgggcgcagggggtagagatgtacgcagataacctcgaca

SEQ ID NO: 477234 - DNA, 75 bp, synthetic construct
  source 1..75: mol_type = other DNA
cgttccgctggaatcacgattgataaccttgaagccaagtgtgcggcgctggcagcagagaatgcggggatgaag

SEQ ID NO: 477235 - DNA, 75 bp, synthetic construct
  source 1..75: mol_type = other DNA
cgctgaagagtacggggggacgagttgaactggggggcgggaaagactttgccaccctgcgggtaaaagagctta

SEQ ID NO: 477236 - DNA, 75 bp, synthetic construct
  source 1..75: mol_type = other DNA
cggctcagggcggtattttcagcaccggggctgtggacgtaaaagaaaatgcctccctgatcctgacggggacac

SEQ ID NO: 477237 - DNA, 75 bp, synthetic construct
  source 1..75: mol_type = other DNA
ctgcagactccagtttgtatgcaatgcaaattcagcgttaccaacaggctgtgcgatcaacaatggtcctttcac

SEQ ID NO: 477238 - DNA, 75 bp, synthetic construct
  source 1..75: mol_type = other DNA
agagctgccgttatttctacgaagattttgctgagttcgatgccgatgcggcgaaaaaacatctgcgtccggtag

SEQ ID NO: 477239 - DNA, 75 bp, synthetic construct
  source 1..75: mol_type = other DNA
agggtagcgttggggggcaaagcggttgaggggaaaggatattattatccgccgactttgctgctggatgttcgt

SEQ ID NO: 477240 - DNA, 75 bp, synthetic construct
  source 1..75: mol_type = other DNA
tttataaggggttgaccagtccattatttacaaatgaacaagcatctgcagctctggcttttcataaaaaaatta

SEQ ID NO: 477241 - DNA, 75 bp, synthetic construct
  source 1..75: mol_type = other DNA
taagctgggggtgaaggacgagccacttacgctgctgaaaaatgtgcgcggactggagctgttgccctttgccga

SEQ ID NO: 477242 - DNA, 75 bp, synthetic construct
  source 1..75: mol_type = other DNA
accagatgcttcgtgcggcacaaaacaaagcagtaatagccagatttattggtgattccaaaatgtggcttgaag

SEQ ID NO: 477243 - DNA, 75 bp, synthetic construct
  source 1..75: mol_type = other DNA
atgaaaacacgtgatggtgagccaggattatatgccgcaatggaaaataatcaccctttgtgtgtcacacggttc

SEQ ID NO: 477244 - DNA, 75 bp, synthetic construct
  source 1..75: mol_type = other DNA
atgccactgctggataagctgcgtgagcagtacggggcggaccgctatgcagcgaactgcatattgccccgtcaa

SEQ ID NO: 477245 - DNA, 75 bp, synthetic construct
  source 1..75: mol_type = other DNA
atgcagagcgtgagatttatttcccgcagcgcccccccccgtccgcagggtgaagtttatcgtcgttacgatcca

SEQ ID NO: 477246 - DNA, 75 bp, synthetic construct
  source 1..75: mol_type = other DNA
gagtacgtgattatggaatgtgacaagctcatcgccctgccaccggcagcaaaccagagctcggttgcccgtatc

SEQ ID NO: 477247 - DNA, 75 bp, synthetic construct
  source 1..75: mol_type = other DNA
cttgccgctgctgttgatgataaatcaacgcagacccccttagcggttgttaacagtattctgctatctgacgca

SEQ ID NO: 477248 - DNA, 75 bp, synthetic construct
  source 1..75: mol_type = other DNA
cctgtccccatgagtctcagggaacgtcttacgatattctgtttgttaatgttgatgccccgagtacagaaatat

SEQ ID NO: 477249 - DNA, 75 bp, synthetic construct
  source 1..75: mol_type = other DNA
gattaccctgtcgactttcctcgcctgattcaggaaaagcgtaaggagtgggagcagattgcaggcatgcctgta

SEQ ID NO: 477250 - DNA, 75 bp, synthetic construct
  source 1..75: mol_type = other DNA
tctaaagagcgtctggaagcactgcgtgaagagcagatggcaaaaggcgagaagccgcgttatgacggtcgctgc

SEQ ID NO: 477251 - DNA, 75 bp, synthetic construct
  source 1..75: mol_type = other DNA
gttggtgaatatgctcttaatattattggacaaaatgttccaagagttataacagggaaaaaaccttatgatata

SEQ ID NO: 477252 - DNA, 75 bp, synthetic construct
  source 1..75: mol_type = other DNA
aaaaatacaaaaaaatttatctgtctggggatggttctgctggtctacctcttcttcagtgcggaaatgactttt

SEQ ID NO: 477253 - DNA, 75 bp, synthetic construct
  source 1..75: mol_type = other DNA
ggtgattcaaaaatgtggcttgaagcaaataaagcgatgaaatcagctatcaatattccgtggtatcgcaggaaa

SEQ ID NO: 477254 - DNA, 75 bp, synthetic construct
  source 1..75: mol_type = other DNA
gaaaaatcaacaaaaaccaacagcggctggttggctagtgcattatttggtcaaaagcgttcattagcagaacac

SEQ ID NO: 477255 - DNA, 75 bp, synthetic construct
  source 1..75: mol_type = other DNA
ggcacaggaaagtgcaaataaaaacgagaaacttttttcaggggacacaacgtctgttgcactgcaggcaagtga

SEQ ID NO: 477256 - DNA, 75 bp, synthetic construct
  source 1..75: mol_type = other DNA
atgtgtcacccagggtctttattaaattttataacgggaatcatgtcattctcgttacacaatcacccgaaggat

SEQ ID NO: 477257 - DNA, 75 bp, synthetic construct
  source 1..75: mol_type = other DNA
cgaaaatggcggctcagggtacagccgggcgctttgtcttcccgcgcccgatgaccgaccgtccggggctggatt

SEQ ID NO: 477258 - DNA, 75 bp, synthetic construct
  source 1..75: mol_type = other DNA
tccaggcggcgctaaaggagtctggtttaacggcaaaagacattgatgctgtggcctataccgcaggccctggat

SEQ ID NO: 477259 - DNA, 75 bp, synthetic construct
  source 1..75: mol_type = other DNA
cgccatagccacgaacatcacgctgatgatgagccgtgcgtggtgcgctttgctaacccgcaggaaggttccgtt

SEQ ID NO: 477260 - DNA, 75 bp, synthetic construct
  source 1..75: mol_type = other DNA
taaaaccgcgaagctgctggggctggattatcctggcgggccgttactgtcgaaaatggcggctcagggtactgc

SEQ ID NO: 477261 - DNA, 75 bp, synthetic construct
  source 1..75: mol_type = other DNA
atgcgtgtactgggtattgaaacttcctgcgatgaaaccggcatcgccattttcgacgatgaaaaaggtttgtta

SEQ ID NO: 477262 - DNA, 75 bp, synthetic construct
  source 1..75: mol_type = other DNA
cggcgtgagtgctaaccgcacactgcgggcgaagctggctgaaatgatgaaaaagcgtcgtggcgaagtgttcta

SEQ ID NO: 477263 - DNA, 75 bp, synthetic construct
  source 1..75: mol_type = other DNA
gttacgatccacgcattcgcaggatgctgagtttccgcattgccgatcccgtttctgatgcagaacgtttcactc

SEQ ID NO: 477264 - DNA, 75 bp, synthetic construct
  source 1..75: mol_type = other DNA
atggatcaaaaacagattgaagaaattgtacgcagcgtgatggcgtcaatgggacaagcggcccccgcgccgtca

SEQ ID NO: 477265 - DNA, 75 bp, synthetic construct
  source 1..75: mol_type = other DNA
agtcagaaagcctctcctgctacgccgtttactcgccgcgtatggcgaccaccgttgaggccgatcgcacctgta

SEQ ID NO: 477266 - DNA, 75 bp, synthetic construct
  source 1..75: mol_type = other DNA
gccgcagcggtaattgtggatttggcgaaacgtatgctggagcagaaagcatccggcatcaacatgacccgataa

SEQ ID NO: 477267 - DNA, 75 bp, synthetic construct
  source 1..75: mol_type = other DNA
gggacaagcggcccccgcgccgtcagaagcaaagtgcgccaccaccaactgtgcggcaccggtgacctcggaaag

SEQ ID NO: 477268 - DNA, 75 bp, synthetic construct
  source 1..75: mol_type = other DNA
ctgcgcgctggatttaggttccgcagaagcaaaagcgtggattggcgttgaaaacccgcatcgcgcagacgtatt

SEQ ID NO: 477269 - DNA, 75 bp, synthetic construct
  source 1..75: mol_type = other DNA
tgactcgcccggatatgggccgccgcctgtgtgcagaggctgttgaagcgctgaaagcgcagtgtgtaacttcgc

SEQ ID NO: 477270 - DNA, 75 bp, synthetic construct
  source 1..75: mol_type = other DNA
ccggtgtgatgaacacgaaaaccaaaggtaaggtctcgctcaacctggaaatcgaaccgtttgatgagaaccgtg

SEQ ID NO: 477271 - DNA, 75 bp, synthetic construct
  source 1..75: mol_type = other DNA
tcgcctgactattctgcaggaagactatggacaaatactgactcttgccggtgaacctgacggaaaactacgcgc

SEQ ID NO: 477272 - DNA, 75 bp, synthetic construct
  source 1..75: mol_type = other DNA
caagaaagtcaaggaaaagacggccggaggcgggagcggaaaaggctggctcgatgaaatcaaggcgagactgtc

SEQ ID NO: 477273 - DNA, 75 bp, synthetic construct
  source 1..75: mol_type = other DNA
gaagcgaaggcatggattggcgtggaaaatccgcatcgcgcagacgtattaacagaactgcgtcgcagcaccgtg

SEQ ID NO: 477274 - DNA, 75 bp, synthetic construct
  source 1..75: mol_type = other DNA
gtgcagttaacgagtttcactgattacggattacgtgcgctgatctacatggcgtcattgccagaagggcggatg

SEQ ID NO: 477275 - DNA, 75 bp, synthetic construct
  source 1..75: mol_type = other DNA
tcgcctgactattctgcaggaagaccagggacaattactgactcttgctggtgaacctgacggaaaactccgcgc

SEQ ID NO: 477276 - DNA, 75 bp, synthetic construct
  source 1..75: mol_type = other DNA
ttgtacgcagcgtgatggcgtcaatgggacaaacggcccccgcgccgtcagaagcaaagtgcgccaccaccacct

SEQ ID NO: 477277 - DNA, 75 bp, synthetic construct
  source 1..75: mol_type = other DNA
gaccaaatcagcgctggccgcacttgacggcaaggacactgcacgcgcattggcaacgctggccgaagtgacggg

SEQ ID NO: 477278 - DNA, 75 bp, synthetic construct
  source 1..75: mol_type = other DNA
ttgatgtcatgacaaaaacatctgaaaactcttttttattgcgcgtagagggagattcaatgacaaactctaacg

SEQ ID NO: 477279 - DNA, 75 bp, synthetic construct
  source 1..75: mol_type = other DNA
cggcctcccaaccatccccgacggatctaccgtgctgatcacaccatgctcaagtaacattagagaactggtggg

SEQ ID NO: 477280 - DNA, 75 bp, synthetic construct
  source 1..75: mol_type = other DNA
ttatcgacacatccggctcgatgcgcggtgagtcaatccattccgttaacgttggaattcaggcgatgcttagcg

SEQ ID NO: 477281 - DNA, 75 bp, synthetic construct
  source 1..75: mol_type = other DNA
tgaaaagcaattacagaaatcgtcccgttaaaactcacctcaccccatctaatcccataattatcgtgcagatga

SEQ ID NO: 477282 - DNA, 75 bp, synthetic construct
  source 1..75: mol_type = other DNA
ttctgattatttccgtgcttatggcaattggcattatgcgaattatcgaagcgctgaaaaatatcgaatctttat

SEQ ID NO: 477283 - DNA, 75 bp, synthetic construct
  source 1..75: mol_type = other DNA
gtttacacagcgaatggcgtaccgcggttggtgtcacaccaacattagatctgaattattatcacgatccccatg

SEQ ID NO: 477284 - DNA, 75 bp, synthetic construct
  source 1..75: mol_type = other DNA
ggattattaccactcgtcggggattatcgcctcgctggaagcagggtatcagtggttaccggggcatagtgtggt

SEQ ID NO: 477285 - DNA, 75 bp, synthetic construct
  source 1..75: mol_type = other DNA
cgccgatgtatgtcaatcgcggtggtcgcctgactattctgcaggaagaccaaggacaattactgactcttgccg

SEQ ID NO: 477286 - DNA, 75 bp, synthetic construct
  source 1..75: mol_type = other DNA
tattgggatatgagttgtccagtaaccgagattcctggcattaagaattgggttgatgtcatgacaaaaaccgct

SEQ ID NO: 477287 - DNA, 75 bp, synthetic construct
  source 1..75: mol_type = other DNA
tgctgtcactgaatccgctttacaaacccattgaactgaatggtggttacactattaaaggtaaagtttcacaaa

SEQ ID NO: 477288 - DNA, 75 bp, synthetic construct
  source 1..75: mol_type = other DNA
aaaggcgcaggaagcgaccggacaggcatcagccagcaaaacctttatgacggctatccttgagcttcagcgtaa

SEQ ID NO: 477289 - DNA, 75 bp, synthetic construct
  source 1..75: mol_type = other DNA
ggccggatgtgaagtatccgatttaatacactatgcagcaattggggttttagaaatatgtataaaaattccacc

SEQ ID NO: 477290 - DNA, 75 bp, synthetic construct
  source 1..75: mol_type = other DNA
atgaaattacctgcgcataaatattattctttggataaagcagccaaactggccggatgtgaagtatccgattta

SEQ ID NO: 477291 - DNA, 75 bp, synthetic construct
  source 1..75: mol_type = other DNA
cgctggcggctatcagggactttctcagcctgaaattgccgacattctcaatctatacccggacaatctcaccgc

SEQ ID NO: 477292 - DNA, 75 bp, synthetic construct
  source 1..75: mol_type = other DNA
aagaagatagctggaaagtgattcgcattggtgatgtggtgtttgatgtggttaaaccttgtagccgctgtattt

SEQ ID NO: 477293 - DNA, 75 bp, synthetic construct
  source 1..75: mol_type = other DNA
atggaactcagaaacgtcacacgttattaccctgaaaatatgccttatggtgaaaatattcagtatttccgcagt

SEQ ID NO: 477294 - DNA, 75 bp, synthetic construct
  source 1..75: mol_type = other DNA
attaccctgaaggcatgccttatggggaagggattcagtattttcgcagtgaggacgggcaggatttttacaatt

SEQ ID NO: 477295 - DNA, 75 bp, synthetic construct
  source 1..75: mol_type = other DNA
gcagaacccaggccagctgaaaaagccgctaaacagcttaaccaatggagacaaaaaagccgtcacgttattgga

SEQ ID NO: 477296 - DNA, 75 bp, synthetic construct
  source 1..75: mol_type = other DNA
cccggcatcgggtatgggtattgttcaacaaacagaatccgtctacctttgtggacgacctgaaaaaaatggatg

SEQ ID NO: 477297 - DNA, 75 bp, synthetic construct
  source 1..75: mol_type = other DNA
cgctgttcaacaaagagaatccttcttcctttgtggaagtcctgaaaaaactgggtgtgccggtagcgagaaaac

SEQ ID NO: 477298 - DNA, 75 bp, synthetic construct
  source 1..75: mol_type = other DNA
atttatagtttgttattttgcgcacaagcttgtagagcgaagaggtgttttaatcggcaagacacttttacgaaa

SEQ ID NO: 477299 - DNA, 75 bp, synthetic construct
  source 1..75: mol_type = other DNA
gtcaggcctggttgaaagatattgaaggcgctcggttgcagcataatcaggcgtataccgaaaccatgcttaatg

SEQ ID NO: 477300 - DNA, 75 bp, synthetic construct
  source 1..75: mol_type = other DNA
acaaaaaagccgtcacgttattggatgagagtcaacttgacgctttgctggataagctctctggttatgccaaac

SEQ ID NO: 477301 - DNA, 75 bp, synthetic construct
  source 1..75: mol_type = other DNA
tcccggactagcgagcacgcgcgatggttcgtttggtgtaggtgataaagccgctcagaagcgttttggctcgtt

SEQ ID NO: 477302 - DNA, 75 bp, synthetic construct
  source 1..75: mol_type = other DNA
actggatcgaaaggtaaagcggataaagaaaaggtgggcgattacgtttttggcctgaaggcgcagggacgttat

SEQ ID NO: 477303 - DNA, 75 bp, synthetic construct
  source 1..75: mol_type = other DNA
tgtacccgtgaagcagaatggggtatcgctggtatcttctgcattcagtgctactgcaactatggtggttgatta

SEQ ID NO: 477304 - DNA, 75 bp, synthetic construct
  source 1..75: mol_type = other DNA
ccattcgctggtggcagtgggtaacagtagctggctgccgttcaacatcaatacacagccagacttcgaagccgt

SEQ ID NO: 477305 - DNA, 75 bp, synthetic construct
  source 1..75: mol_type = other DNA
gccattgattggcgttgattccggggaaggggtagaaaagtcgaaacgctctgaacagaagaagggcgagaaaaa

SEQ ID NO: 477306 - DNA, 75 bp, synthetic construct
  source 1..75: mol_type = other DNA
gaaaaataggcggtatgctggcgctgcgtggcgaaggaacaccttttccggtgcaggctgattttcgctccggta

SEQ ID NO: 477307 - DNA, 75 bp, synthetic construct
  source 1..75: mol_type = other DNA
cgaagtcacgatggtgcatttgccgcgagtagaggcaacgctggcaccgttggcgctgctgaccaaaacggtctg

SEQ ID NO: 477308 - DNA, 75 bp, synthetic construct
  source 1..75: mol_type = other DNA
gatgcgattgaggtgttggctggggctttgagtgtcgagccgtggcaactgttagtgtctggtttgtccgaagat

SEQ ID NO: 477309 - DNA, 75 bp, synthetic construct
  source 1..75: mol_type = other DNA
agcatggagacagcaaaatggcgtaggcccaatgccagcggcaattggggcattgtgtcagcggtgcgtgggaca

SEQ ID NO: 477310 - DNA, 75 bp, synthetic construct
  source 1..75: mol_type = other DNA
ctgcaaagtggcgtagacccaatgctagcggcaattggggtattgtgtcagcggtgcgttgggacaaactgagaa

SEQ ID NO: 477311 - DNA, 75 bp, synthetic construct
  source 1..75: mol_type = other DNA
agaccgcaaagtggcgtaggcctaatgccagtggcaattggggcattgtgtcagcggtgcgatgggacaaactga

SEQ ID NO: 477312 - DNA, 75 bp, synthetic construct
  source 1..75: mol_type = other DNA
agaccttgagaatacagtttggcgagcgggtaaaagaactccgcatagccaccggattgagccaggaagcctttg

SEQ ID NO: 477313 - DNA, 75 bp, synthetic construct
  source 1..75: mol_type = other DNA
ttatgaagctcttgaatatctacgtagcatggagacagcaaaatggcgtaggcccaatgccagcggcaattgggg

SEQ ID NO: 477314 - DNA, 75 bp, synthetic construct
  source 1..75: mol_type = other DNA
atagaagaggcgctcctgccgcaggttgaagatttccctgacgccgaagaacggcgattaatgtatgttgcgttg

SEQ ID NO: 477315 - DNA, 75 bp, synthetic construct
  source 1..75: mol_type = other DNA
ctcggtgaactggtcggtgtataccgtcttgccgcgcagcctgccactaccacgctccagttctccgtagatgag

SEQ ID NO: 477316 - DNA, 75 bp, synthetic construct
  source 1..75: mol_type = other DNA
atgtttagcataagatccctactacctattagcgccaacgtatcagttccagcaaaacaatctcaccccatccca

SEQ ID NO: 477317 - DNA, 75 bp, synthetic construct
  source 1..75: mol_type = other DNA
gaagatccatgcggcgcagaacagggtttctccggtcgtgaagttatggcggagtttcggcgggcgaccggcttg

SEQ ID NO: 477318 - DNA, 75 bp, synthetic construct
  source 1..75: mol_type = other DNA
atgcttgaacttaatgctaaaaccactgcgctggtggtgattgatttacaagaaggcatcttaccttttgccggt

SEQ ID NO: 477319 - DNA, 75 bp, synthetic construct
  source 1..75: mol_type = other DNA
ttaatcgcgccgggaagctggcggcgaaatttcgcgcgagcggtcagcccgtgtttctggtgcgcgttggctggt

SEQ ID NO: 477320 - DNA, 75 bp, synthetic construct
  source 1..75: mol_type = other DNA
gcggataccggcaaaacgttgtatccggcacaggcagaacgtctgctgatagacctgtgggcctatcgcgaaatg

SEQ ID NO: 477321 - DNA, 75 bp, synthetic construct
  source 1..75: mol_type = other DNA
aaggcggcagctttaacagccactacggcgtaaaagttttcggcaacagccacggtatgttgcaggggtactgct

SEQ ID NO: 477322 - DNA, 75 bp, synthetic construct
  source 1..75: mol_type = other DNA
aaggcggcagctttaacagccactacggtgtcaaagtttttggcaacagccacggcatgttgcagggttactgct

SEQ ID NO: 477323 - DNA, 75 bp, synthetic construct
  source 1..75: mol_type = other DNA
cgtacaggcggcgctggatattgctcgttatacctcgccagatccgtatgccggcgtggcagacaaagaactgct

SEQ ID NO: 477324 - DNA, 75 bp, synthetic construct
  source 1..75: mol_type = other DNA
ttctgccggattggctgaccattgaactgaaccccaaaacctggacagtttcagttaaccggctttttgatactc

SEQ ID NO: 477325 - DNA, 75 bp, synthetic construct
  source 1..75: mol_type = other DNA
aaggtgtgcgcaccgagcgtcgcgatattattaaagatggcattctgacccagtggctgctgaccagctattccg

SEQ ID NO: 477326 - DNA, 75 bp, synthetic construct
  source 1..75: mol_type = other DNA
ctgctcgactcgctgggtaaacaaattctgccggactggctgaccattgaagaacatccgcatctgctgaaaggg

SEQ ID NO: 477327 - DNA, 75 bp, synthetic construct
  source 1..75: mol_type = other DNA
ctagcgccgagcagcacaataacagtatcaaccatatctacccgcgcattgcccgtgtgcgctgcgttgaagaga

SEQ ID NO: 477328 - DNA, 75 bp, synthetic construct
  source 1..75: mol_type = other DNA
atgacagaatccacaccccgtcgcccggcatatgctcgtctgttggaccgtgcggtgcgcattctggcggtacgc

SEQ ID NO: 477329 - DNA, 75 bp, synthetic construct
  source 1..75: mol_type = other DNA
caactgtcttttcagaaaaagttaagatccagcgttttctgctctatcgtggctatctgatggaagatatccagg

SEQ ID NO: 477330 - DNA, 75 bp, synthetic construct
  source 1..75: mol_type = other DNA
tgtgcgcagaggaaggggtaactcaggcagagttgatagaaagacttatcgagaaagaggcctgttaccggaata

SEQ ID NO: 477331 - DNA, 75 bp, synthetic construct
  source 1..75: mol_type = other DNA
agcgcgcctgaagagatccgcgacgtgttcagtaaacgaatcaaattgatggctccgttattgaaagcctggaag

SEQ ID NO: 477332 - DNA, 75 bp, synthetic construct
  source 1..75: mol_type = other DNA
atttccacacttcgcaggatgagtttgtgaacctgttcggcggcagtaaattcaatgataaaacggaaacctatt

SEQ ID NO: 477333 - DNA, 75 bp, synthetic construct
  source 1..75: mol_type = other DNA
gactctgagaaacaaatggctgctgttgcaagaaaacgtcttacacacaaagagataaaagtttttgtcaaaaat

SEQ ID NO: 477334 - DNA, 75 bp, synthetic construct
  source 1..75: mol_type = other DNA
tttatttctgcactgtggtcagtgcgttatatctggtgagtggtggttataaggccatcagaaattatgttcgcc

SEQ ID NO: 477335 - DNA, 75 bp, synthetic construct
  source 1..75: mol_type = other DNA
ccagcgcagaacagcacaataacagtattaattatatctacccgcgcattgcccgtgtgcgctgcgttgaagaga

SEQ ID NO: 477336 - DNA, 75 bp, synthetic construct
  source 1..75: mol_type = other DNA
ttatgtgggatctcgaccaacattggtgtcgaatccaccgcccgtaatgcctgggaactcggttttaatctggtg

SEQ ID NO: 477337 - DNA, 75 bp, synthetic construct
  source 1..75: mol_type = other DNA
acagacgttaggtatgaaggtatcgcgaggatataacgccggtgggacaggaatgacttttgttgcgccgttaat

SEQ ID NO: 477338 - DNA, 75 bp, synthetic construct
  source 1..75: mol_type = other DNA
gtggatattacgacctccacccgccttgagcgcgagcaacgcaaacgtctcggcggcagtcagcgcgtgcacatt

SEQ ID NO: 477339 - DNA, 75 bp, synthetic construct
  source 1..75: mol_type = other DNA
gtaaaattgatgcagcagcagctgaaaaaatcagtaaaacagcacaggcatcttcatccccaaacgatccgaccc

SEQ ID NO: 477340 - DNA, 75 bp, synthetic construct
  source 1..75: mol_type = other DNA
caaacggtctgtacgctgtcgtctttgtgatgtgcttcctgttaggtttcgtcagccgtcaccgtcagcataaca

SEQ ID NO: 477341 - DNA, 75 bp, synthetic construct
  source 1..75: mol_type = other DNA
gtactggctgggctggccgcgattctgatgtatgtctttaacactggaacaccagcacacatggcatggtccatt

SEQ ID NO: 477342 - DNA, 75 bp, synthetic construct
  source 1..75: mol_type = other DNA
ttacgttttggctttctcctgatggtgctggcggttgccggtttgatgttcagccacagtctggcgctgttctcg

SEQ ID NO: 477343 - DNA, 75 bp, synthetic construct
  source 1..75: mol_type = other DNA
ccaggagatgccaaagctgacggaagatctcgttcctggcgtcgtcacgctcaccacactgcataaagtgctgca

SEQ ID NO: 477344 - DNA, 75 bp, synthetic construct
  source 1..75: mol_type = other DNA
gcagttagtggttctgtcgaatctggaactgtctgataaccgacatatccgtatgacagcgacaattggcggtaa

SEQ ID NO: 477345 - DNA, 75 bp, synthetic construct
  source 1..75: mol_type = other DNA
ctgcttacagcaaacggtctgtacgctgtcgtctttgtgatgtgcttcctgttaggtttcgtcagccgtcaccgt

SEQ ID NO: 477346 - DNA, 75 bp, synthetic construct
  source 1..75: mol_type = other DNA
gctgggttacggttctccttcgctctgttatgcgatgggtggtagcgcgggtggcatgttgatgggggtcgctat

SEQ ID NO: 477347 - DNA, 75 bp, synthetic construct
  source 1..75: mol_type = other DNA
gtcagtctgcataaaacgacatcaaaacactatgtggttattcaccttgccagcgccacgaccagtgaagttcgt

SEQ ID NO: 477348 - DNA, 75 bp, synthetic construct
  source 1..75: mol_type = other DNA
attgctgtgtaccgacatggactcagggcatggcggtaaatcggggcgcttcaaatcttacgaaggtgtggcgat

SEQ ID NO: 477349 - DNA, 75 bp, synthetic construct
  source 1..75: mol_type = other DNA
gccaaaaacggatgctccagtagcgaaagaaaaatggggcatcggcgtactgtttctctcaattgcagcgctgtg

SEQ ID NO: 477350 - DNA, 75 bp, synthetic construct
  source 1..75: mol_type = other DNA
agctcagcctcttcaggactcaccctgaccccgggagtaagtaataccaacgagtctggcatcgcgcaggccact

SEQ ID NO: 477351 - DNA, 75 bp, synthetic construct
  source 1..75: mol_type = other DNA
cttgagtttgttggatcgtggatttgtctacgccattgtccatgttcgcggcggtggtgagctggggcaacaatg

SEQ ID NO: 477352 - DNA, 75 bp, synthetic construct
  source 1..75: mol_type = other DNA
gggggtcatcgttacgcgtgtcagcaccgatcaggatgttggcgagcagatggtgaatcagcttttcagtaaccc

SEQ ID NO: 477353 - DNA, 75 bp, synthetic construct
  source 1..75: mol_type = other DNA
gaaaatcgccgatcagatggcaaaaacacctgaagcagcacttaactttatgcgggaaattgttccagcggcgcg

SEQ ID NO: 477354 - DNA, 75 bp, synthetic construct
  source 1..75: mol_type = other DNA
gaaaatcgccgatcagatggcaaaaacgccagaagcagcgctcaactttatgcgggaaattgttccagcggcgcg

SEQ ID NO: 477355 - DNA, 75 bp, synthetic construct
  source 1..75: mol_type = other DNA
acggggaattattcgcgcgggtagatgctgtctggcaacgccgtgaatccctggggcttgatagtgaatccatcc

SEQ ID NO: 477356 - DNA, 75 bp, synthetic construct
  source 1..75: mol_type = other DNA
atgatgggacgcgtgtttatggcgaaaggagaatacgccaaagccgtcgaaagtttgcaacgtgtcatatcccag

SEQ ID NO: 477357 - DNA, 75 bp, synthetic construct
  source 1..75: mol_type = other DNA
ggaagcacgccagcaatccccggctggctgtgtgatggtattcgccgcccgtattcgtcagggggcgcaccatgc

SEQ ID NO: 477358 - DNA, 75 bp, synthetic construct
  source 1..75: mol_type = other DNA
aggcctcatgattgtggcaggactggtggacagcaaaaccggaaaaccaaagtttagtgctgccgaactggtagg

SEQ ID NO: 477359 - DNA, 75 bp, synthetic construct
  source 1..75: mol_type = other DNA
ttatttctaccgctgcgggggttatcgttacgcgagtcagtaccgatcaggacgttggcgagcagatggtgaatc

SEQ ID NO: 477360 - DNA, 75 bp, synthetic construct
  source 1..75: mol_type = other DNA
cgttacgcgtgtcagcaccgatcaggatgttggcgagcagatggtgaatcagcttttcagtaaccccagcgtcat

SEQ ID NO: 477361 - DNA, 75 bp, synthetic construct
  source 1..75: mol_type = other DNA
acctggtgaggcgaccgtcgatccggcatttggcctgaatgctatctggattgaaagtgcgctaaaagaacaggc

SEQ ID NO: 477362 - DNA, 75 bp, synthetic construct
  source 1..75: mol_type = other DNA
tcgatcatggtgttgctggtggcgatgtttacccagcgcacgcttgagtttgctgcgtttccgaccattctgttg

SEQ ID NO: 477363 - DNA, 75 bp, synthetic construct
  source 1..75: mol_type = other DNA
ccagagcgatccgcatgaattaaccgccgtcgtgcgcgtggcgctggggcgggcaattactcagcagtggttccc

SEQ ID NO: 477364 - DNA, 75 bp, synthetic construct
  source 1..75: mol_type = other DNA
ggtgaagtgactgtcgatccggcatttggtcttaatgctatctggatcgaaagtgcgctaaaagaacaagcgcag

SEQ ID NO: 477365 - DNA, 75 bp, synthetic construct
  source 1..75: mol_type = other DNA
ggttatggttcttacggagcaagcatagatgccgatttcagtttcagccgcctgagtttgttggatcgtggattt

SEQ ID NO: 477366 - DNA, 75 bp, synthetic construct
  source 1..75: mol_type = other DNA
gctactctgacggcaacgctaacctctgcaaatggcactccagtggagggtcaggtcatcaactttagcgtaacg

SEQ ID NO: 477367 - DNA, 75 bp, synthetic construct
  source 1..75: mol_type = other DNA
agtggagtccttctaacagaggataactcggttgcctggaaaagattaaaggaaaatggaatcgataataaaaaa

SEQ ID NO: 477368 - DNA, 75 bp, synthetic construct
  source 1..75: mol_type = other DNA
ccagctggagcaggcgcaggggctggttttagggttcgaccaaggaatattgcatttaactatattgtgagggct

SEQ ID NO: 477369 - DNA, 75 bp, synthetic construct
  source 1..75: mol_type = other DNA
aacgccagaaggggcgacgttaagtggcggaaaagtgagaactaactcttcaggtcaggctccggtcgttctgac

SEQ ID NO: 477370 - DNA, 75 bp, synthetic construct
  source 1..75: mol_type = other DNA
tctctactgatacgcatggtatagccgaggtctccatgacgcccgaaagaaacggttcgtatatggtgaaagcat

SEQ ID NO: 477371 - DNA, 75 bp, synthetic construct
  source 1..75: mol_type = other DNA
ctgcaaatggcactccagtggagggtcaggtcatcaactttagcgtaacgctagaaggtgcgacgttaagtggcg

SEQ ID NO: 477372 - DNA, 75 bp, synthetic construct
  source 1..75: mol_type = other DNA
cggaactggcaaaggcttatccgacaaataaattgcctgatttacgtggtgagtttattcgcggctgggatgacg

SEQ ID NO: 477373 - DNA, 75 bp, synthetic construct
  source 1..75: mol_type = other DNA
ccagtgttgggtgatcgacgatgtacgctatttaggcggcagcgttcatgccacggcgggtacgctccgtcagtc

SEQ ID NO: 477374 - DNA, 75 bp, synthetic construct
  source 1..75: mol_type = other DNA
ctcaaccagcatgtctgtatgcatgaactggcccctgtagatttagtaattaggactgggggagaacatcgcatt

SEQ ID NO: 477375 - DNA, 75 bp, synthetic construct
  source 1..75: mol_type = other DNA
ttacagtgcaacggagctacgttcaccaaagaacaatatcctgttctggccagagtctacccgaccctccgtctt

SEQ ID NO: 477376 - DNA, 75 bp, synthetic construct
  source 1..75: mol_type = other DNA
gacgaaaggttgataccgggcgtgcgctactttcatttcaggaagggactatcgtatccggttttgatgataatg

SEQ ID NO: 477377 - DNA, 75 bp, synthetic construct
  source 1..75: mol_type = other DNA
ttttcataaacgttggtttgggagaaggttctgcgttgcctgttggcataccagttccttggccttcagctacgc

SEQ ID NO: 477378 - DNA, 75 bp, synthetic construct
  source 1..75: mol_type = other DNA
cttcgccttaaaaagcggctccaccacattaacgtcattaacagcggtgatcgatcaaaacggaatcgcgacaac

SEQ ID NO: 477379 - DNA, 75 bp, synthetic construct
  source 1..75: mol_type = other DNA
gctggcagaagattttctttcccgacgccagtacggcattcgttttcgtaatctggaaactggtaactggtaccc

SEQ ID NO: 477380 - DNA, 75 bp, synthetic construct
  source 1..75: mol_type = other DNA
taagtggattgctgtgggtcagcgtggtaaccagtttcggctatgccttaagtatgattccgttcgttaaacgcc

SEQ ID NO: 477381 - DNA, 75 bp, synthetic construct
  source 1..75: mol_type = other DNA
ggctggctggcacagcttcctgctaaatatcaccagcgcgccacctgcatgtttgaccgccacggtctgctggcg

SEQ ID NO: 477382 - DNA, 75 bp, synthetic construct
  source 1..75: mol_type = other DNA
cctacgtgacctggattgcctacaatccagaacctgaaaccgcgcgattgcgttacggttattcctccatgacca

SEQ ID NO: 477383 - DNA, 75 bp, synthetic construct
  source 1..75: mol_type = other DNA
cgccagatactttgtttgaactggatatggatacgggggaacgccgggtgctgaaacaaatggaagttcccggtt

SEQ ID NO: 477384 - DNA, 75 bp, synthetic construct
  source 1..75: mol_type = other DNA
ggggaatgctgatgggggtcgcgattaacgaacgccccgaactgttccacggtgttatcgctcaggtgccgtttg

SEQ ID NO: 477385 - DNA, 75 bp, synthetic construct
  source 1..75: mol_type = other DNA
aatgatgttcaggtcgaagttaattacgcaataaaacttgatgatcaatggactgtgcgcccgggaatgttaacc

SEQ ID NO: 477386 - DNA, 75 bp, synthetic construct
  source 1..75: mol_type = other DNA
aatcggtcatcactgaaaggggactataccgatagtgctgaattacgtcttgttctgcacgatatatcaggcaat

SEQ ID NO: 477387 - DNA, 75 bp, synthetic construct
  source 1..75: mol_type = other DNA
tatgggatggttgcgctgcatcaggcatgaagttatccagcgtggcaattatggcccgcttggctgatttcagta

SEQ ID NO: 477388 - DNA, 75 bp, synthetic construct
  source 1..75: mol_type = other DNA
aaacagaacgattatcgctatgcaaaccataagaaatgggcgacggaaaatgcactgagagatcccctcataatt

SEQ ID NO: 477389 - DNA, 75 bp, synthetic construct
  source 1..75: mol_type = other DNA
agcggtacagtatcagtcaatggtactgacctaccgacaactacattcccttcgcaggggttcactgatcctctc

SEQ ID NO: 477390 - DNA, 75 bp, synthetic construct
  source 1..75: mol_type = other DNA
aagcttaccgacaacaagacttatctggtgatatgtctcgtgataacgttcatcgttgggatggatatgtcactt

SEQ ID NO: 477391 - DNA, 75 bp, synthetic construct
  source 1..75: mol_type = other DNA
ctggatcttctgtttcagcatgtcacgttatagccaacatctggaaaaacgttttaacaccgggcgtacaccgca

SEQ ID NO: 477392 - DNA, 75 bp, synthetic construct
  source 1..75: mol_type = other DNA
ctcgccgaaagacgctttcttcgatgatccgaaatcggaccgcgcaaaagacttcctcgcgaaaatcctgcatta

SEQ ID NO: 477393 - DNA, 75 bp, synthetic construct
  source 1..75: mol_type = other DNA
ccccttatcttttcgctatttcctttgtactgttgatcggcctgttagaaatttttgcgcttatctgcggtcaca

SEQ ID NO: 477394 - DNA, 75 bp, synthetic construct
  source 1..75: mol_type = other DNA
atgaacgcctaccgcgcatacgacgctatcgaagaaaggaaatgggctgaacagtcgctaaccgaagagaagcaa

SEQ ID NO: 477395 - DNA, 75 bp, synthetic construct
  source 1..75: mol_type = other DNA
gaaatacaaccgccggccccacctgaagatgcacagcctgttgccattccgcttcctgtttcactgggagatgca

SEQ ID NO: 477396 - DNA, 75 bp, synthetic construct
  source 1..75: mol_type = other DNA
tcatccacgaacgatttggtcagtttatgtatggactttacccacacgaccaacgctggcgaattaacctggcat

SEQ ID NO: 477397 - DNA, 75 bp, synthetic construct
  source 1..75: mol_type = other DNA
ttacagaagaagaatatattggctgcatggcattaattaccggacatcaggccacttcaggtaacccctgtgaag

SEQ ID NO: 477398 - DNA, 75 bp, synthetic construct
  source 1..75: mol_type = other DNA
gctcaggcatattattgctcagctgcggtgcttactcacaatccatcagtgaaaaaactaattccgacaaaaaag

SEQ ID NO: 477399 - DNA, 75 bp, synthetic construct
  source 1..75: mol_type = other DNA
tgctgcctttgtttatggcagaaggcaccagtatcgacaaactgatccgcgcgctggttggcgtgatcctgtttc

SEQ ID NO: 477400 - DNA, 75 bp, synthetic construct
  source 1..75: mol_type = other DNA
gtgagacggtatctaaagaacgagcattacaagaactgtccaggcattgcgttcccgaaacagatttcgaagaat

SEQ ID NO: 477401 - DNA, 75 bp, synthetic construct
  source 1..75: mol_type = other DNA
gtcgtagccagcgacatagacgtatttttttccgagttgggtgagagggaagagtacaacgcgcaagaagtattg

SEQ ID NO: 477402 - DNA, 75 bp, synthetic construct
  source 1..75: mol_type = other DNA
acccagtttatggggccggaaggtgtgggtaatgcgtcgctgtcgaatattgctggcgatgctgccgaaggcatg

SEQ ID NO: 477403 - DNA, 75 bp, synthetic construct
  source 1..75: mol_type = other DNA
aaatcatcgacatgatgccaaaagagccgtccggcctcttccacttcacggtcccgattgactccagcccatacg

SEQ ID NO: 477404 - DNA, 75 bp, synthetic construct
  source 1..75: mol_type = other DNA
gaaattgaaccaccacaacccgcgccggatatgttaccgccagccatccccgaacctgaaacgttgggcgatatc

SEQ ID NO: 477405 - DNA, 75 bp, synthetic construct
  source 1..75: mol_type = other DNA
gagtttcccacgcggcggtgcatctggccgccacggtggggacgctactggtctgggtcggtgaagcgggtgttc

SEQ ID NO: 477406 - DNA, 75 bp, synthetic construct
  source 1..75: mol_type = other DNA
tgtacaacaaccacatggaaggtgtgtgtgagctaatgaaacgacaggctccagagcattcagatccggtcgtta

SEQ ID NO: 477407 - DNA, 75 bp, synthetic construct
  source 1..75: mol_type = other DNA
ttgatctctttcttccccgaaattgccgatgaaattgcctttgtggcagaaaacggcggttgggtagtgagcgaa

SEQ ID NO: 477408 - DNA, 75 bp, synthetic construct
  source 1..75: mol_type = other DNA
ggatttgtgacggatggttttattttgcgtgaaaatgaatttgtcacatcattgcagtctctgaaagaagctgag

SEQ ID NO: 477409 - DNA, 75 bp, synthetic construct
  source 1..75: mol_type = other DNA
aattgaggaagtccttgccgccggtgaaattgaaccaccacaacccgcgccggatatgttaccgccagctatccc

SEQ ID NO: 477410 - DNA, 75 bp, synthetic construct
  source 1..75: mol_type = other DNA
accgatcgcggtccgaacgcggattcaccgaaagaggggaaaaacgaaactaaaattttcgttacgccagatttc

SEQ ID NO: 477411 - DNA, 75 bp, synthetic construct
  source 1..75: mol_type = other DNA
gcatcgaagatcggcgctgggctgagcagcagatcaccgacgagaaagagaagtggatcgacgaccgggcgcaga

SEQ ID NO: 477412 - DNA, 75 bp, synthetic construct
  source 1..75: mol_type = other DNA
ccgacggttcgtgtctgggtaatccaggaccggggggatacggtgctattttacgctatcgcggacgcgagaaaa

SEQ ID NO: 477413 - DNA, 75 bp, synthetic construct
  source 1..75: mol_type = other DNA
acatccaatttctcaaggataacggcgttaagatttgggatgcatgggccgatgagaatggcgatttggggccgg

SEQ ID NO: 477414 - DNA, 75 bp, synthetic construct
  source 1..75: mol_type = other DNA
cgatgttctggaagtaacagacaaaggccaagcggttgagttttgggatcgtaaagatggtgcctgtgttggtca

SEQ ID NO: 477415 - DNA, 75 bp, synthetic construct
  source 1..75: mol_type = other DNA
tctacgacaaccacatggaaggcgttgaggaactgatgaagcgcgagccgcccaaagagtccgacccggtagtca

SEQ ID NO: 477416 - DNA, 75 bp, synthetic construct
  source 1..75: mol_type = other DNA
gtgggggatcttactggcgttaggtcgccgctcccatatgccgattgtgcgtatcttatcggtcatttttatcga

SEQ ID NO: 477417 - DNA, 75 bp, synthetic construct
  source 1..75: mol_type = other DNA
ggaatagaccctatctattttggcatcatgtttattatcaactgttcgatatcactcattactcccccggttggt

SEQ ID NO: 477418 - DNA, 75 bp, synthetic construct
  source 1..75: mol_type = other DNA
tatatcttcattggatgagcataacgctatcacagttggcagtcatctggcgcaactattgaacaaagcagataa

SEQ ID NO: 477419 - DNA, 75 bp, synthetic construct
  source 1..75: mol_type = other DNA
ttatatttcaacgcattcactgaagatctgttccattggaacaacgatctagaaggtgatgaggatcgccgattg

SEQ ID NO: 477420 - DNA, 75 bp, synthetic construct
  source 1..75: mol_type = other DNA
gctgttcgatctggagatggacaaccgtatccgcccattgttgcggcgttacgcggattttgacttccgtatcga

SEQ ID NO: 477421 - DNA, 75 bp, synthetic construct
  source 1..75: mol_type = other DNA
gcagacagcttctccctgttagccattcccttctttgtgctggcgggtgagatcatgaacgcaggcggcctgtcg

SEQ ID NO: 477422 - DNA, 75 bp, synthetic construct
  source 1..75: mol_type = other DNA
ggaatagatcctgtctattttggcattatgtttattattaactgctcaatttcgctaattacgcccccggttggt

SEQ ID NO: 477423 - DNA, 75 bp, synthetic construct
  source 1..75: mol_type = other DNA
ttcgctgaaattcttgtgacaagcaccgaggtcggactgaaaacagtttcagcctctctggcagataaacctact

SEQ ID NO: 477424 - DNA, 75 bp, synthetic construct
  source 1..75: mol_type = other DNA
cgccagcaatccccggctggctgcgtgatggtattcgccgcccgtattcgtcagggggtacgccatgtgcaataa

SEQ ID NO: 477425 - DNA, 75 bp, synthetic construct
  source 1..75: mol_type = other DNA
gaaagcccgtcagcaatccccggctggctacgtgatggtattcgccgcccgtattcgtcagggggtgtgccatgc

SEQ ID NO: 477426 - DNA, 75 bp, synthetic construct
  source 1..75: mol_type = other DNA
atactcagaacgcctttatctggcgctttatcatcgttaatccgactgattaccgcgtcgttcacgtcgtggcgt

SEQ ID NO: 477427 - DNA, 75 bp, synthetic construct
  source 1..75: mol_type = other DNA
atgattttaatctgtgcgcacagtttgagttttgtcactcaaattaagcaacgccccgcagtgctcgcaacacat

SEQ ID NO: 477428 - DNA, 75 bp, synthetic construct
  source 1..75: mol_type = other DNA
ccaccgaacgcgaagcccgtgagcaatcaccggctggctgcgtgatggtattcgctggccgtctgcctgtggagg

SEQ ID NO: 477429 - DNA, 75 bp, synthetic construct
  source 1..75: mol_type = other DNA
gctccagaccttgataaatcgtactcacgaagaaatagacgcggcagaaaaccatacgcagcttatgctcgtaga

SEQ ID NO: 477430 - DNA, 75 bp, synthetic construct
  source 1..75: mol_type = other DNA
atgggggttgtcgaaagtcatgtaaatagactaaaaatgctgaaaggccagatgtatggtcgagccggatttgaa

SEQ ID NO: 477431 - DNA, 75 bp, synthetic construct
  source 1..75: mol_type = other DNA
aaaacctatgacttaagtagactttctaatctcttaaataaatacaacttctttgagagtgagcttttttttgat

SEQ ID NO: 477432 - DNA, 75 bp, synthetic construct
  source 1..75: mol_type = other DNA
ccgagaaaagacgaagagattcacgcaattgtaaacgaagttgaaaaaatggtcgataaattcaaagcagaactt

SEQ ID NO: 477433 - DNA, 75 bp, synthetic construct
  source 1..75: mol_type = other DNA
gctggtttttttggccttattggcatcctgctacagcaggtctgcatcatggtctggcaatcaccactcacaaat

SEQ ID NO: 477434 - DNA, 75 bp, synthetic construct
  source 1..75: mol_type = other DNA
agccctaactacaatgatggtaaatcagttagttaccatgtgccgctgtgtggtgtgtttatctgcgatgaaact

SEQ ID NO: 477435 - DNA, 75 bp, synthetic construct
  source 1..75: mol_type = other DNA
aatatcccaaagactattttatatccagtgcctaacatccttcgcggtgtgcgtaaggttacgacttatcagaca

SEQ ID NO: 477436 - DNA, 75 bp, synthetic construct
  source 1..75: mol_type = other DNA
gctccaggccctgctaaatcgtactcgtgaagaaatagacgcggcagaaaaccatacgcagcttatgctcgtaga

SEQ ID NO: 477437 - DNA, 75 bp, synthetic construct
  source 1..75: mol_type = other DNA
cattgatgttggggatgggaacatccgttacccaggcggcgatgcgtgaatttgcccatgccggggtgatggtgg

SEQ ID NO: 477438 - DNA, 75 bp, synthetic construct
  source 1..75: mol_type = other DNA
ctgatctcaaaaccattctccactccaggcgtgccaatatttattatctggaaaaatgccgggtgcaggtgaatg

SEQ ID NO: 477439 - DNA, 75 bp, synthetic construct
  source 1..75: mol_type = other DNA
atggctaaaccagcaaaacgcatcaaaagtgccgcagcggcttatgtgccacaaaaccgcgatgcggtgattacc

SEQ ID NO: 477440 - DNA, 75 bp, synthetic construct
  source 1..75: mol_type = other DNA
aaccctttcaaaaggcgttcagggatggtgtgaagcgaaccgcgacgaactgacgaacggcggcaaggtgaagac

SEQ ID NO: 477441 - DNA, 75 bp, synthetic construct
  source 1..75: mol_type = other DNA
cagaacgaaataatttccatccggaagaagatggttttagtggaacattcatcattaagacaaacggtgaagatg

SEQ ID NO: 477442 - DNA, 75 bp, synthetic construct
  source 1..75: mol_type = other DNA
ttgtggtgggaaaagagaaaccgaattgttcttttattcactgccagtaaagactaatcatcatccttactggat

SEQ ID NO: 477443 - DNA, 75 bp, synthetic construct
  source 1..75: mol_type = other DNA
cggcagcagggaaaggacattttacgaccacctggcctggcaaagtgctgaaaggcgatctttcacccgccttca

SEQ ID NO: 477444 - DNA, 75 bp, synthetic construct
  source 1..75: mol_type = other DNA
ctgtcatcaaaaataattcgtgtgtccaatgagctgctccaggacagtggggtggatattgaatcttatctggca

SEQ ID NO: 477445 - DNA, 75 bp, synthetic construct
  source 1..75: mol_type = other DNA
ttgctgaacttgtggcaatgaaagccagtgcgctcatgaaagatatgaacatgagttccggggttattaaaggta

SEQ ID NO: 477446 - DNA, 75 bp, synthetic construct
  source 1..75: mol_type = other DNA
tgtgaaggcgctattttcgatatgggcgatgtacaaagcgaggaccacgcgctggaatccgcacaaaatcgtctg

SEQ ID NO: 477447 - DNA, 75 bp, synthetic construct
  source 1..75: mol_type = other DNA
gatgtactttctgaactttatgcaatttattcatgggtttcatattgcaaacggagcgataattattctgtgtgg

SEQ ID NO: 477448 - DNA, 75 bp, synthetic construct
  source 1..75: mol_type = other DNA
gtataaaactaacgtcaccgcagtttaaaaattactccgtgcatattcggatggagaaagaccgattttctgttg

SEQ ID NO: 477449 - DNA, 75 bp, synthetic construct
  source 1..75: mol_type = other DNA
ttggggcatcgaacccaaaaagacgggaacagcagccacgtagcaaaaagggaaacagatgaactcttttttgaa

SEQ ID NO: 477450 - DNA, 75 bp, synthetic construct
  source 1..75: mol_type = other DNA
cgttattgttaagaaagtgagagaagtatcagtaagtgaatgctttattccatcatggtatgtgaaaccacgtta

SEQ ID NO: 477451 - DNA, 75 bp, synthetic construct
  source 1..75: mol_type = other DNA
tgcgtaacaaaatcattgacaccatgaaggcttatggcgggattgccagtgttgcgcaacttctgaccacatcaa

SEQ ID NO: 477452 - DNA, 75 bp, synthetic construct
  source 1..75: mol_type = other DNA
tttattcatgggtttcatattgcaaacggtgcgataattattctgtgtggtttttgaattgtccggatgtaaata

SEQ ID NO: 477453 - DNA, 75 bp, synthetic construct
  source 1..75: mol_type = other DNA
tattgttcttctctacaatagttttcgccaaaccaaaatcagataatggcgatcttaaaggcctgcaagaactca

SEQ ID NO: 477454 - DNA, 75 bp, synthetic construct
  source 1..75: mol_type = other DNA
agagaaagggcgggaagttctgcataccgtgcgggaactggaaaagcaggcgatcaaactgcatgaaggctggga

SEQ ID NO: 477455 - DNA, 75 bp, synthetic construct
  source 1..75: mol_type = other DNA
atgcagcgacggtagggcaactgaatgaacgatttgatgatgcacaggtctttttgttgcagacgaatgaaagaa

SEQ ID NO: 477456 - DNA, 75 bp, synthetic construct
  source 1..75: mol_type = other DNA
ttgctgaacttgtggcaatgaaagccggtgcgctcatgaaagatatggacatgagttccggggttattaaaggta

SEQ ID NO: 477457 - DNA, 75 bp, synthetic construct
  source 1..75: mol_type = other DNA
gtgacagcgggttacctgagagtattgcacagcgttatcagcgagccggatgtcagttgtttttacctcatcaat

SEQ ID NO: 477458 - DNA, 75 bp, synthetic construct
  source 1..75: mol_type = other DNA
tcatactgacagtcaggtcacagcagtacgtgatgaactcagcagggatattattgcaggcacatcggcagcggt

SEQ ID NO: 477459 - DNA, 75 bp, synthetic construct
  source 1..75: mol_type = other DNA
acagagaatgtggcaggaaaagttgcagttgctgcaggtgggtcatccgcatcgtggaatgctggtgtgaatttt

SEQ ID NO: 477460 - DNA, 75 bp, synthetic construct
  source 1..75: mol_type = other DNA
agtgcaagtgtgattgacagaaatggaaatgctaacgatggtggtagtgttactggaaaaaactttgctgttggt

SEQ ID NO: 477461 - DNA, 75 bp, synthetic construct
  source 1..75: mol_type = other DNA
cctgggaggcgctgacccagggccgggcagatattattgtcggcgctatgcacgagccgccatcttccagcgaat

SEQ ID NO: 477462 - DNA, 75 bp, synthetic construct
  source 1..75: mol_type = other DNA
caggtatttgccgttgcgccgcatcatcccttggcgcaagaggaagagccgctcacccgccgcgttattaagcgt

SEQ ID NO: 477463 - DNA, 75 bp, synthetic construct
  source 1..75: mol_type = other DNA
cggcctcacaacttctcgacgaacaagaagccattaccgttttcgattttaaaaccaagctggagctgcaaatta

SEQ ID NO: 477464 - DNA, 75 bp, synthetic construct
  source 1..75: mol_type = other DNA
ggcatgatccgcggtcacggttgcctggacttcgacgacagtacagacgacaaagagtacgtcttcgacgtgaaa

SEQ ID NO: 477465 - DNA, 75 bp, synthetic construct
  source 1..75: mol_type = other DNA
atgggggtaagtctggatatacggtcaaccggaataaagaagaaagataatggacccgccacgatttttggagtg

SEQ ID NO: 477466 - DNA, 75 bp, synthetic construct
  source 1..75: mol_type = other DNA
cctgggatgccctgactcaggggcgagcggatattattgttggcgcgatgcatgagccaccatcttccagtgagt

SEQ ID NO: 477467 - DNA, 75 bp, synthetic construct
  source 1..75: mol_type = other DNA
gggaatgttaatcttatttatccgactgtatataataagtcacatgagattgagttacatagtttattaaaaata

SEQ ID NO: 477468 - DNA, 75 bp, synthetic construct
  source 1..75: mol_type = other DNA
ttgacgcctggaacaccggtcatgagggcggcgcggcctcacttcacgccaacaacacactttctgctctcacgc

SEQ ID NO: 477469 - DNA, 75 bp, synthetic construct
  source 1..75: mol_type = other DNA
acattttatctcgtaatgatatcgctgtacgctacgtctttcagaaaatgttttccccacaaggtactctggtcg

SEQ ID NO: 477470 - DNA, 75 bp, synthetic construct
  source 1..75: mol_type = other DNA
ataatttatcacgtagcgatatatccgttcgttatgtctttcaaaagatgttttccccaaaaggtacgctcgtcg

SEQ ID NO: 477471 - DNA, 75 bp, synthetic construct
  source 1..75: mol_type = other DNA
cggttcagcaacccggtaaggaaattgcggttaaaacggaagagcagcaatcggttctggttctgcaccggaccc

SEQ ID NO: 477472 - DNA, 75 bp, synthetic construct
  source 1..75: mol_type = other DNA
ctgttcggccaggcgctgtttcagcaggaagatgtcgtcagaaagatgtcgttcataagcccgtattttaccggg

SEQ ID NO: 477473 - DNA, 75 bp, synthetic construct
  source 1..75: mol_type = other DNA
gatcatcaaaaagagtacggcgggctggagttctcggcttatgcccagtctcgcgtgctgcaaaaactctccggc

SEQ ID NO: 477474 - DNA, 75 bp, synthetic construct
  source 1..75: mol_type = other DNA
ggagcaactccgtccttacgatctcaatccccggctgatgcgtaaccccagctatgacgacattaaggaatcgat

SEQ ID NO: 477475 - DNA, 75 bp, synthetic construct
  source 1..75: mol_type = other DNA
ggtgtgcgagagattcgtactcgcgatgctgatgagatctatcgcgtcatgtatgtcgcaaaatttgaagaagcg

SEQ ID NO: 477476 - DNA, 75 bp, synthetic construct
  source 1..75: mol_type = other DNA
gacctgcctattttactaaactccgaaattcagaatttctgtcttcatggtactgttggttccggtaaatcagaa

SEQ ID NO: 477477 - DNA, 75 bp, synthetic construct
  source 1..75: mol_type = other DNA
cattaggaccagacaaaatataaattgttcttggtgggaatttgatgtagatacccttgtagatttttcctcaaa

SEQ ID NO: 477478 - DNA, 75 bp, synthetic construct
  source 1..75: mol_type = other DNA
ccgtcacggatatctggcgcattccacaactgtgggataccacggagtccttacgatcggctagcgatcgcctgg

SEQ ID NO: 477479 - DNA, 75 bp, synthetic construct
  source 1..75: mol_type = other DNA
aatgaattgtggcgcgaaacgcatgacgaacggttctggcgcattcagtgtctgtacaagccgtgggccggtaca

SEQ ID NO: 477480 - DNA, 75 bp, synthetic construct
  source 1..75: mol_type = other DNA
tcggttctggttctgcaccggacccgcaggtgtcacgaacggtgcaatagtggttcttccgaaactttggtagaa

SEQ ID NO: 477481 - DNA, 75 bp, synthetic construct
  source 1..75: mol_type = other DNA
ttttggccgtcgagctatctttgctgtttattgtcatcagtgccggtgtgagcctgataaggcaaaaggtcccgg

SEQ ID NO: 477482 - DNA, 75 bp, synthetic construct
  source 1..75: mol_type = other DNA
ctgctgttaattgctgtagtgcagccaaaacggctccccccagcctgctgaatcaggcaataaaggatgcatggc

SEQ ID NO: 477483 - DNA, 75 bp, synthetic construct
  source 1..75: mol_type = other DNA
tcaccgtttccgcaacgatgaagccttcctgcaacaggtgatgaaagacggcgcagaaaaagccagcgcacacgc

SEQ ID NO: 477484 - DNA, 75 bp, synthetic construct
  source 1..75: mol_type = other DNA
gtcgtttctatttctatccgtggatctgttctaaaaatgacgggcaacccttcgcggtgggggcggcttgataat

SEQ ID NO: 477485 - DNA, 75 bp, synthetic construct
  source 1..75: mol_type = other DNA
tgttgttgtgaaacaaacaagagaaataactgtttcggattgtgttattccttcttggtatataaagccatctta

SEQ ID NO: 477486 - DNA, 75 bp, synthetic construct
  source 1..75: mol_type = other DNA
ttgcagcagcgagaatctgggcaatgtgaatctcacaacgaataccacctctggcccaataaagttagctatgaa

SEQ ID NO: 477487 - DNA, 75 bp, synthetic construct
  source 1..75: mol_type = other DNA
atggtggcgcaggtgcaattagccgcgcgcagatgagtctgcaacaggaattacgctacatcgaggcgttgtctg

SEQ ID NO: 477488 - DNA, 75 bp, synthetic construct
  source 1..75: mol_type = other DNA
gcgaatttatcgagcagctgcacgataaaattatcgacctcgaagataatcttctcgatcagcaaattccaccgc

SEQ ID NO: 477489 - DNA, 75 bp, synthetic construct
  source 1..75: mol_type = other DNA
aaggcacgctgattacattgcgctgtataaacggcagcaccgatgaacgccccgatcaactggtcgccatgcgtg

SEQ ID NO: 477490 - DNA, 75 bp, synthetic construct
  source 1..75: mol_type = other DNA
gcgcagaaaaagccagtgcacacgcttcccggacgctgaaagcggtttacgaagcgattggttttgtggcgaagc

SEQ ID NO: 477491 - DNA, 75 bp, synthetic construct
  source 1..75: mol_type = other DNA
cgtcagtgggtaaacatgcaggatgactaccattgcatttactgtatcgttgaccaacacgcgatcaccgtgcgc

SEQ ID NO: 477492 - DNA, 75 bp, synthetic construct
  source 1..75: mol_type = other DNA
ccttagccataccgctgagtgcagttgttggtattccgttgtatatccgcgcagaggcagtgataccacttgcat

SEQ ID NO: 477493 - DNA, 75 bp, synthetic construct
  source 1..75: mol_type = other DNA
aatcgccgcagccaacggccacgcaggaaagcagtaatgtggcggccagcgacacgcaaagcagcagcgatagct

SEQ ID NO: 477494 - DNA, 75 bp, synthetic construct
  source 1..75: mol_type = other DNA
ccaagtccgtttaccaggttgccgaaagtatccatgtcggtcgggtggatcgtcgcaggcggctcgatccggagg

SEQ ID NO: 477495 - DNA, 75 bp, synthetic construct
  source 1..75: mol_type = other DNA
ctgcatatcgtcctggccgaaatcaacctgtatgaacagtgcatggccgagtgcgagcagcagctcaagcgctgg

SEQ ID NO: 477496 - DNA, 75 bp, synthetic construct
  source 1..75: mol_type = other DNA
aaaacctgaagatcttgctcactatgatttgaatgtcgccactcagaaaacgttacgtttgaaaggtctgatgta

SEQ ID NO: 477497 - DNA, 75 bp, synthetic construct
  source 1..75: mol_type = other DNA
gtcgcaaggaagagatttatatgatttacctgatctttgactgcgtctctgccaaccgtgaagtgaaaattaacg

SEQ ID NO: 477498 - DNA, 75 bp, synthetic construct
  source 1..75: mol_type = other DNA
cgcgtgggtaaaacctgaagatctggtgcattatgatttgaatgttgccacccgaaaaacgttacgtttgaaagg

SEQ ID NO: 477499 - DNA, 75 bp, synthetic construct
  source 1..75: mol_type = other DNA
gctgcgcaaacaattaattgtgatgcgtcgctatatggcaccgcaacgtgatgtttatgctcgtcttgccagtga

SEQ ID NO: 477500 - DNA, 75 bp, synthetic construct
  source 1..75: mol_type = other DNA
gtggatgaatgacgaccagcgccgccgaatgcaggatattgccgatcgtctcggacgtggtctggatgagattga

SEQ ID NO: 477501 - DNA, 75 bp, synthetic construct
  source 1..75: mol_type = other DNA
accaggcgacgtccgatctgcgtgaaacgctggagcagatggaaattcagaacgttgagttagatctggcgaaaa

SEQ ID NO: 477502 - DNA, 75 bp, synthetic construct
  source 1..75: mol_type = other DNA
aagctggatcagactgggatgttaatgacgcaagtaatataattctttcactaaatgccgcaaaagaaactattg

SEQ ID NO: 477503 - DNA, 75 bp, synthetic construct
  source 1..75: mol_type = other DNA
tttctgcaaatggtcatggattctaacaaggcatggaataaagcggacactccttcaaaggccattcatgcagaa

SEQ ID NO: 477504 - DNA, 75 bp, synthetic construct
  source 1..75: mol_type = other DNA
tgctttatggttgcatcgtagtaaatggttgaaacaaaagcaattttttccggctgtctgtatacaaaaacgccg

SEQ ID NO: 477505 - DNA, 75 bp, synthetic construct
  source 1..75: mol_type = other DNA
ccccaaaataattgacggtaagaacttcaggcctcagcaccgggaacgtatcgtgttggttggattcaggcgcga

SEQ ID NO: 477506 - DNA, 75 bp, synthetic construct
  source 1..75: mol_type = other DNA
acggaaaaggcggcgtaaccaaatcaacaattgcccgtgctttagcagttgcttatgcaaaggctggctggaatg

SEQ ID NO: 477507 - DNA, 75 bp, synthetic construct
  source 1..75: mol_type = other DNA
ttgtggagcgatattgtttatgctgctcagttgggtggtctggggggggcccctattaagttgtcaagcatgtta

SEQ ID NO: 477508 - DNA, 75 bp, synthetic construct
  source 1..75: mol_type = other DNA
aattctcttattgtgttttattggcatgatcttagcggccataataactaaactaacgcttgtagcgttagcatg

SEQ ID NO: 477509 - DNA, 75 bp, synthetic construct
  source 1..75: mol_type = other DNA
attcagcatactgtcagatacacagccagtaatgctgctcgatttaaaggggtgtggaaaaaaaagcctcgttaa

SEQ ID NO: 477510 - DNA, 75 bp, synthetic construct
  source 1..75: mol_type = other DNA
gatacccgactacttcaggattatctgggtcatcgaaatattcagcatactgtcagatacacagccagtaatgct

SEQ ID NO: 477511 - DNA, 75 bp, synthetic construct
  source 1..75: mol_type = other DNA
ctgaaaaactaaagcaagcggcaagacaagccagaggtgaaccagcctctggctcatcaccatcagcaaaaaccc

SEQ ID NO: 477512 - DNA, 75 bp, synthetic construct
  source 1..75: mol_type = other DNA
ccactgatgcaaccagcagtatgagtatgggctggaattttcctttatatgagcaggttacaacggggcctgtgg

SEQ ID NO: 477513 - DNA, 75 bp, synthetic construct
  source 1..75: mol_type = other DNA
atgatcataaaaaaatgcgctggctgccaggcgctaagtcttctggcgagcgtggtaaccagtttcctttttcta

SEQ ID NO: 477514 - DNA, 75 bp, synthetic construct
  source 1..75: mol_type = other DNA
ctggtgcaggttgcaagcatctacgacgtgaaggatttggctgagcaacttaatgctgcaaccggcagcgaatgg

SEQ ID NO: 477515 - DNA, 75 bp, synthetic construct
  source 1..75: mol_type = other DNA
tcttatttcattcgaaactttaaaaattactttgggattacaccgaaacagttttctctgaaggttaaacgaaaa

SEQ ID NO: 477516 - DNA, 75 bp, synthetic construct
  source 1..75: mol_type = other DNA
atgggctggaacttccctttatatgaacacgttacaacaggcccggtcgccgcattgcattacgacggaacgacc

SEQ ID NO: 477517 - DNA, 75 bp, synthetic construct
  source 1..75: mol_type = other DNA
gtggtaatcagttctttttttctcaacacagcttacgcctggcaacaagaatatatcgttgatacgcagccagga

SEQ ID NO: 477518 - DNA, 75 bp, synthetic construct
  source 1..75: mol_type = other DNA
ttgaaaaaaatcgaagcctaccctgatgatgcgtcgggtgctgatacgttaagaatcctttccaaagccacatca

SEQ ID NO: 477519 - DNA, 75 bp, synthetic construct
  source 1..75: mol_type = other DNA
aaaaaaacggggttgtatgttctcttccagcgtggcgcttcgatggatgtcgaaaattttaagtcaattgatttt

SEQ ID NO: 477520 - DNA, 75 bp, synthetic construct
  source 1..75: mol_type = other DNA
ctatttctgatgcgcagattgccgcagcgcgtcgaatggaatacggggccgtgcgtgtggtcgctgcgccagaag

SEQ ID NO: 477521 - DNA, 75 bp, synthetic construct
  source 1..75: mol_type = other DNA
taattctgcgacgattaccagtctggagatacctgaaggtcagctaatggtcgcacaagacgtagcagttaaagc

SEQ ID NO: 477522 - DNA, 75 bp, synthetic construct
  source 1..75: mol_type = other DNA
ttacgaaaaattccagcggggggcgtttactgaatggcttgcggcgggtaatgacgttcgcggcctgtatgagca

SEQ ID NO: 477523 - DNA, 75 bp, synthetic construct
  source 1..75: mol_type = other DNA
gagctttggctttcgctcccgtaaggatgtatgggataccacaacagatccatgcgtgcgcaccgtgctggtggc

SEQ ID NO: 477524 - DNA, 75 bp, synthetic construct
  source 1..75: mol_type = other DNA
cgcaccgttcgcttttctcccaatatcctgaactgcgccgggctggtgataaccgccgccgctgggctgaattag

SEQ ID NO: 477525 - DNA, 75 bp, synthetic construct
  source 1..75: mol_type = other DNA
agcaaaagagaattttgtttgaggccgagacaattgagtcttgggagtatactgatagtaaacttgtcgtaaatc

SEQ ID NO: 477526 - DNA, 75 bp, synthetic construct
  source 1..75: mol_type = other DNA
ttcagtcagaagaggcacttgaagctgcattaagaatgcccgagtcgagttttggtcctcctccctctgaactga

SEQ ID NO: 477527 - DNA, 75 bp, synthetic construct
  source 1..75: mol_type = other DNA
atggatttttggtcaaaagtccccgtgcgtttgaagagtttacgatggtgtccgtctggaatatcgaaggattcg

SEQ ID NO: 477528 - DNA, 75 bp, synthetic construct
  source 1..75: mol_type = other DNA
atgtgttgcgaaaatcgaggcaggggttttctgttcacaggttggaagtatgccagtcgcatacagatggatagc

SEQ ID NO: 477529 - DNA, 75 bp, synthetic construct
  source 1..75: mol_type = other DNA
tggcgtttctggtctgttgtgtcgcgctggcgataagcgcgatgtatgagttaatcgagtggtgggcagcgctgg

SEQ ID NO: 477530 - DNA, 75 bp, synthetic construct
  source 1..75: mol_type = other DNA
aaaatacaggggtgaaaaatatctccagtggcgaaagactatgcttgatgaaggttggatgctaccacgaacgta

SEQ ID NO: 477531 - DNA, 75 bp, synthetic construct
  source 1..75: mol_type = other DNA
atgagttttattgaatgttacgaaccggaatatgtgcgcaattttatggcacgccaccccgattcgcctttatac

SEQ ID NO: 477532 - DNA, 75 bp, synthetic construct
  source 1..75: mol_type = other DNA
atggcgtttatcagtcattggctacgcgagcttattaccgcctcgaaggtgagcacgttttgatgcgcctcggta

SEQ ID NO: 477533 - DNA, 75 bp, synthetic construct
  source 1..75: mol_type = other DNA
gctggtgtgcgatttttacctcatccgcacgttaatcagtttatggacgctggatgattcaccgctgcggcagga

SEQ ID NO: 477534 - DNA, 75 bp, synthetic construct
  source 1..75: mol_type = other DNA
gtaaaatgccgggcagagacggcgacactctcgcccggctgacagcactgccgcaggcgctggccgatcacgcac

SEQ ID NO: 477535 - DNA, 75 bp, synthetic construct
  source 1..75: mol_type = other DNA
cgacacggtgcaaaaaactatctggaattgagctacgacgttcctgaacttggatatcactgttacgactcaacg

SEQ ID NO: 477536 - DNA, 75 bp, synthetic construct
  source 1..75: mol_type = other DNA
gagcaatacacgtgtccaaaaagctattcagagtggtaaaacaacgccagaagatgtcactaaactagtatttag

SEQ ID NO: 477537 - DNA, 75 bp, synthetic construct
  source 1..75: mol_type = other DNA
tatctgtattataccagtcgcctgaaatcctctgcggcatttaatattattgtcgaatcactgcgaatgtctgac

SEQ ID NO: 477538 - DNA, 75 bp, synthetic construct
  source 1..75: mol_type = other DNA
ctgttggttcgccagcaaattcagtcgttatgtgccgctgacccgctgctttcagcgttttcgctgctaacgtga

SEQ ID NO: 477539 - DNA, 75 bp, synthetic construct
  source 1..75: mol_type = other DNA
aaggtgcagtggcaaaccacctggcaacagcattttgccaccgcgccgtggatgatgcgtaactggctgatttac

SEQ ID NO: 477540 - DNA, 75 bp, synthetic construct
  source 1..75: mol_type = other DNA
tattcttgcccgcttgacgacgctgccacaggcgctggccgatcatgcacaaaaaggcacgctacaggcacagtt

SEQ ID NO: 477541 - DNA, 75 bp, synthetic construct
  source 1..75: mol_type = other DNA
gctggtgtgcgatttttatctcatccgcacgttaatcagtttatggacgctggatggttctccgctgcggcagga

SEQ ID NO: 477542 - DNA, 75 bp, synthetic construct
  source 1..75: mol_type = other DNA
aggctgacggggcggattatttcccgctggtgtgcgatttttatctcatccgcacgttaatcagtttatggacgc

SEQ ID NO: 477543 - DNA, 75 bp, synthetic construct
  source 1..75: mol_type = other DNA
gtccgcaaggtgtggaaaaacgagattcgcctgagcctgtcattgaccgatattgccagctgcgaagcggtgctc

SEQ ID NO: 477544 - DNA, 75 bp, synthetic construct
  source 1..75: mol_type = other DNA
gccagtatgacgcttggcggtgttgcacagatgctggcccctaaacccaaaacccccccgcacacagacaacgga

SEQ ID NO: 477545 - DNA, 75 bp, synthetic construct
  source 1..75: mol_type = other DNA
gtgaaaacgggggccgaagccatccgggcgctggccatgcagatcccggtgtttcgtcagaaactgagtgacggc

SEQ ID NO: 477546 - DNA, 75 bp, synthetic construct
  source 1..75: mol_type = other DNA
agccaggacgcccacggcagccagtacagataacggcaaacagaacacgtatttctcgtcactggataacatggt

SEQ ID NO: 477547 - DNA, 75 bp, synthetic construct
  source 1..75: mol_type = other DNA
tcgctatggcgcgtaccgttggctggatcgctcactggagcgaaatgcacagcgaaggaatgaaaatcgcccgtc

SEQ ID NO: 477548 - DNA, 75 bp, synthetic construct
  source 1..75: mol_type = other DNA
acaaaaactacgacccgcgcgccaccgtcatgcgtgaaacctgccacgaagtcctgaaagagctgggcacgaagg

SEQ ID NO: 477549 - DNA, 75 bp, synthetic construct
  source 1..75: mol_type = other DNA
ctctcggttcaaaaggtgtgttcacctttgaccctggcttcacttcaaccgcatcctgcgaatctaaaattactt

SEQ ID NO: 477550 - DNA, 75 bp, synthetic construct
  source 1..75: mol_type = other DNA
ggacgtcagcacgtccggattgacggcgcagttacatgaggttctgcctgacggcgctgtgattcatattgttcc

SEQ ID NO: 477551 - DNA, 75 bp, synthetic construct
  source 1..75: mol_type = other DNA
cgtatgaagtcaatccaattctggaacgtgcaatggatcgtattctgatcctgcacgctgaccacgagcagaatg

SEQ ID NO: 477552 - DNA, 75 bp, synthetic construct
  source 1..75: mol_type = other DNA
caggttgtggcaggggccgtgctgacggtagccggggccgtcatcagttacttcagtgcaggtaccctgtcggca

SEQ ID NO: 477553 - DNA, 75 bp, synthetic construct
  source 1..75: mol_type = other DNA
ctgcctttacggggatttccaacgatttggccgccgcatcgaacttcgtgtgaaaacgggggcagaagccatccg

SEQ ID NO: 477554 - DNA, 75 bp, synthetic construct
  source 1..75: mol_type = other DNA
ctgcctttacggggattttcaacgatttggccgccgcatcgagcttcgtgtgaaaacgggggcagaagctatccg

SEQ ID NO: 477555 - DNA, 75 bp, synthetic construct
  source 1..75: mol_type = other DNA
ctgcctttacggggatttgcaacgatttggccgccgcatcgatcttcgtgtgaaaacgggggcagaagctatccg

SEQ ID NO: 477556 - DNA, 75 bp, synthetic construct
  source 1..75: mol_type = other DNA
gagccgctggcaaatggtgccgtgatccacatcgtgccgcgtctggcgggagctaaaagtggcggtgtgtttcag

SEQ ID NO: 477557 - DNA, 75 bp, synthetic construct
  source 1..75: mol_type = other DNA
gcgtctggcgggtgccaaaagtggtggtgtttttcaggcagtgctgggtgcggcgctgattgctacggcaatctg

SEQ ID NO: 477558 - DNA, 75 bp, synthetic construct
  source 1..75: mol_type = other DNA
gccgctggcaaatggtgccgtgatccacatcgtgccgcgcctggcgggtgctaaaagtggcggtgtgtttcaggc

SEQ ID NO: 477559 - DNA, 75 bp, synthetic construct
  source 1..75: mol_type = other DNA
tgatgcaggtgaaaccgaattatctgcccgtcttaatgagccgctggcaaatggtgcagtgatccacatcgtgcc

SEQ ID NO: 477560 - DNA, 75 bp, synthetic construct
  source 1..75: mol_type = other DNA
ggtgctgggggcggcgctgattgcggtggcatggtggaaccctgtgggctggctgggtgccgcggctgtatcggg

SEQ ID NO: 477561 - DNA, 75 bp, synthetic construct
  source 1..75: mol_type = other DNA
atgacctgctggaagtggctatggagctggaaaacatcgcgctgaacgacccgtactttatcgagaagaaactct

SEQ ID NO: 477562 - DNA, 75 bp, synthetic construct
  source 1..75: mol_type = other DNA
gttggctcccggcgaatatcccaggacgtcagcacccgtgatgaaggcgctggcgggaaggtggtggttatcggg

SEQ ID NO: 477563 - DNA, 75 bp, synthetic construct
  source 1..75: mol_type = other DNA
cgtattgccgggcgtgatgcaggtgaaaacgaattatccgtccggcttaatgaaccgctggcgaatggtgcggtt

SEQ ID NO: 477564 - DNA, 75 bp, synthetic construct
  source 1..75: mol_type = other DNA
tatcaggaatatgcgcaggactttattgattacctgcgtccgcagaccattatcgggcgatttggtcagggcggg

SEQ ID NO: 477565 - DNA, 75 bp, synthetic construct
  source 1..75: mol_type = other DNA
gtccacacagctcccggcgtttcgtcagaaactgaatgagggctggtatcaggtgcgcattgccgggcgtgatgc

SEQ ID NO: 477566 - DNA, 75 bp, synthetic construct
  source 1..75: mol_type = other DNA
tgtacggtgaaatgcgtgtggggtcgcgggtggtatctcaggagatcagcacagcagatgaaggggatggtggtc

SEQ ID NO: 477567 - DNA, 75 bp, synthetic construct
  source 1..75: mol_type = other DNA
cagtgggcaggcagcctgtctgaatatcaggaatacgcacaggactttattgattacctgcgtccgcagaccatt

SEQ ID NO: 477568 - DNA, 75 bp, synthetic construct
  source 1..75: mol_type = other DNA
gtacggtgaaatgctcgtgggatcgcgggtgatttcacaggaaatcagcacggctgatgaggggggcggcggtca

SEQ ID NO: 477569 - DNA, 75 bp, synthetic construct
  source 1..75: mol_type = other DNA
ccggctgggtgggtgagggtaaggcaaaacccctgacgaagtttgattttgaatccatcaccttcagtcatgcga

SEQ ID NO: 477570 - DNA, 75 bp, synthetic construct
  source 1..75: mol_type = other DNA
cccgaaaaaagcggcggtggcggatgtctccccggcgtccatcacccatgatgtgaagggcacggcatcaaccgg

SEQ ID NO: 477571 - DNA, 75 bp, synthetic construct
  source 1..75: mol_type = other DNA
gtgtacggtgcgccgggtcagcgaagggctggaatcacggcaacactggtgaagcccgtaccggatatgccgtcg

SEQ ID NO: 477572 - DNA, 75 bp, synthetic construct
  source 1..75: mol_type = other DNA
atgcagatcccggcgtttcgtcagaagctgagcgacggctggtatcaggtacggattgccgggcgtgatacaggt

SEQ ID NO: 477573 - DNA, 75 bp, synthetic construct
  source 1..75: mol_type = other DNA
gtcagaaactgaatgacggctggtatcaggtgcgcattgccgggcgtgatgcaggtgaaaccgaattatctgccc

SEQ ID NO: 477574 - DNA, 75 bp, synthetic construct
  source 1..75: mol_type = other DNA
gagcaatctgctgttttctctcggtgccagtatgacgcttggcggtgttgcacagatgctggcccctaaacccag

SEQ ID NO: 477575 - DNA, 75 bp, synthetic construct
  source 1..75: mol_type = other DNA
agtgacggcatgaaaattgcccgtccgcgtcagctgtatactggctatgaaaaacgtgactttaaaagcgatatc

SEQ ID NO: 477576 - DNA, 75 bp, synthetic construct
  source 1..75: mol_type = other DNA
tggtgaaaaaccgacccaggaacagtatgacgagtttaaaactaccgttacccgtcatacgatgatccacgaaca

SEQ ID NO: 477577 - DNA, 75 bp, synthetic construct
  source 1..75: mol_type = other DNA
gcatcctgcgaatctaaaattacttttattgatggtgatgaaggtattttgctgcaccgcggtttcccgatcgat

SEQ ID NO: 477578 - DNA, 75 bp, synthetic construct
  source 1..75: mol_type = other DNA
aatggtgccgtgatccacatcgtaccgcgtctggcgggtgccaaaagtggtggtgtttttcaggcagtgctgggt

SEQ ID NO: 477579 - DNA, 75 bp, synthetic construct
  source 1..75: mol_type = other DNA
gtgatgcaggtgaaaccgaattgtctgcccgtcttaatgagccgctggcaaatggtgcagtgatccacatagtac

SEQ ID NO: 477580 - DNA, 75 bp, synthetic construct
  source 1..75: mol_type = other DNA
gcgtgcgtgttatggccacgtttccgggcaatgctgtcgatttcatccttactgacccgccatatctcgtaggtt

SEQ ID NO: 477581 - DNA, 75 bp, synthetic construct
  source 1..75: mol_type = other DNA
gggcgggaacgccttgaggcggtacgccgcgccatgatgaaaccggcggcgaacgatgcctggcttccggaggct

SEQ ID NO: 477582 - DNA, 75 bp, synthetic construct
  source 1..75: mol_type = other DNA
ggacagcaacgactggccgccgtgcaacgggccatgcagcagggggccgcaaatgataacaggtttgaaccggag

SEQ ID NO: 477583 - DNA, 75 bp, synthetic construct
  source 1..75: mol_type = other DNA
gccacgaatgcgcctacatcctggcaaaaggacgtccggcgctgcctcagaagccattgcccgacgtgctgggct

SEQ ID NO: 477584 - DNA, 75 bp, synthetic construct
  source 1..75: mol_type = other DNA
ctcaccgacccgccatatctcgtcggtttccgtgaccgtcaggggcgtaccatcgccggcgataaaaccgatgaa

SEQ ID NO: 477585 - DNA, 75 bp, synthetic construct
  source 1..75: mol_type = other DNA
cgatgtctctcaggtctgggtgctggttctggtgaatgccggtggtgagccgtttacggtggttcaggtgcagcg

SEQ ID NO: 477586 - DNA, 75 bp, synthetic construct
  source 1..75: mol_type = other DNA
tgaaagatgttccggacaatgctgtcgatttcatcctcaccgccccaccatatctcgtcggttttcgtgaccgtc

SEQ ID NO: 477587 - DNA, 75 bp, synthetic construct
  source 1..75: mol_type = other DNA
atgtcccgttttatcctgggtgactgcgtgcgagttatggccacgtttccggacaatgctgtcgatttcattctc

SEQ ID NO: 477588 - DNA, 75 bp, synthetic construct
  source 1..75: mol_type = other DNA
accctcaccgacccgccatatctcgtcggtttccgtgaccgtcaggggcgtaccatcgccggcgataaaaccgat

SEQ ID NO: 477589 - DNA, 75 bp, synthetic construct
  source 1..75: mol_type = other DNA
tacacatcgaaggccgcatatgtgggctatcgccacgaatgcgcttacatcctggcaaaaggacgtccggcgctg

SEQ ID NO: 477590 - DNA, 75 bp, synthetic construct
  source 1..75: mol_type = other DNA
ttcgtgaccgttccgggcgcaccatcgctggcgataaaaccgatgaatggctgcaaccggcctgtaatgaaatgt

SEQ ID NO: 477591 - DNA, 75 bp, synthetic construct
  source 1..75: mol_type = other DNA
accgacccgccgtacctcgtcggtttccgtgaccgttccgggcgcaccatcgctggcgataaaaccgatgaatgg

SEQ ID NO: 477592 - DNA, 75 bp, synthetic construct
  source 1..75: mol_type = other DNA
atggctggaaccgcgtcgattcgctttatggccgcctggaaaaatgcgggattcagcgttgttggtcacctggtc

SEQ ID NO: 477593 - DNA, 75 bp, synthetic construct
  source 1..75: mol_type = other DNA
cattgcaacgctatagaagactatataataaatctttacctacggtacttgtagctgaagaagcacatacattta

SEQ ID NO: 477594 - DNA, 75 bp, synthetic construct
  source 1..75: mol_type = other DNA
gcttcacacacccgaacgcaattgtgctggacccgtttgcaggcagcggctcaacctgcgtcgccgccctccagt

SEQ ID NO: 477595 - DNA, 75 bp, synthetic construct
  source 1..75: mol_type = other DNA
gatgaatggctgcaaccggcctgtaatgagatgtaccgcgtactcaaaaaagacgcgttaatggtgagcttctat

SEQ ID NO: 477596 - DNA, 75 bp, synthetic construct
  source 1..75: mol_type = other DNA
ggcggtggctactgcccggactgcggacctgtaacgggagatgcaacttacagcgtgatgtttacccctgccagt

SEQ ID NO: 477597 - DNA, 75 bp, synthetic construct
  source 1..75: mol_type = other DNA
aatagttatattttaatccgtagtgatgacgggtttcttgttgggcaagttgagtggattgcaatagaaaactcg

SEQ ID NO: 477598 - DNA, 75 bp, synthetic construct
  source 1..75: mol_type = other DNA
tagaacaactaagaattggaactgttgagtttgtatcacctaatgaaattagggtgtctttagagattgattctc

SEQ ID NO: 477599 - DNA, 75 bp, synthetic construct
  source 1..75: mol_type = other DNA
gacgtccggcgctgcctcagaagccattgcccgacgtgctgggctggaaatattcaggcaatcgtcatcacccga

SEQ ID NO: 477600 - DNA, 75 bp, synthetic construct
  source 1..75: mol_type = other DNA
cgtaccgccacgaatgcgcttacatcctggcaaagggcagtccggctcggccccgtaacccgctgccggatgtgc

SEQ ID NO: 477601 - DNA, 75 bp, synthetic construct
  source 1..75: mol_type = other DNA
tatcaccgtgccgggcagcaacgccttgccgccgtgcaacgggccatgcagcagggggccgcgaatgatgactgg

SEQ ID NO: 477602 - DNA, 75 bp, synthetic construct
  source 1..75: mol_type = other DNA
atgaagttaaaacaacaaactgtgcgactttcacgtcgcacactgactgacccaccgtacctcgtcggtttccgt

SEQ ID NO: 477603 - DNA, 75 bp, synthetic construct
  source 1..75: mol_type = other DNA
atgtcccgttttgtcctcggtaactgcatcgatgttatggcccttattcctgataacgccattgatttcatactg

SEQ ID NO: 477604 - DNA, 75 bp, synthetic construct
  source 1..75: mol_type = other DNA
ttcgtgaccgtttcgggcgcaccatcgccggcgataaaaccgatgaatggctgcaaccggcctgtaatgaaatgt

SEQ ID NO: 477605 - DNA, 75 bp, synthetic construct
  source 1..75: mol_type = other DNA
ccctcatcctctgcgcaggacaagccagccagcactgacaataccaatgttaatggcgaagacatgacggagatt

SEQ ID NO: 477606 - DNA, 75 bp, synthetic construct
  source 1..75: mol_type = other DNA
tggataacatgattgcccagggcaatgttctgcccgttctgtacggggaaatgcgcgtgggatcgcgggtgattt

SEQ ID NO: 477607 - DNA, 75 bp, synthetic construct
  source 1..75: mol_type = other DNA
cgtcagattgttaacgtgggggcgggtgcgatttctgacacaagtacagatgccattaacggtagtcagttatat

SEQ ID NO: 477608 - DNA, 75 bp, synthetic construct
  source 1..75: mol_type = other DNA
taccgcaacaacgaccagcacggataacggtaagcagaacacgtatttctcgtcactggataacatggttgccca

SEQ ID NO: 477609 - DNA, 75 bp, synthetic construct
  source 1..75: mol_type = other DNA
gcccggacgtccacagcgaccagcacggataacggtaagcagaacacctatttctcatcactggataacatggtt

SEQ ID NO: 477610 - DNA, 75 bp, synthetic construct
  source 1..75: mol_type = other DNA
ccgggggatgtcattcatctggtaccccggactgaaggagccaaaagtgggggtgtgtttcaggcggttcttggc

SEQ ID NO: 477611 - DNA, 75 bp, synthetic construct
  source 1..75: mol_type = other DNA
ggtgccgcggctgtatcgggcatgtatgcggcaggggccagtatgatcctgggcggagtggcgcagatgctggca

SEQ ID NO: 477612 - DNA, 75 bp, synthetic construct
  source 1..75: mol_type = other DNA
gtacggtgaaatgcgcgtggggtcacgcgtgatttcgcaggagatcagcacggcagatgaaggagatggtggtca

SEQ ID NO: 477613 - DNA, 75 bp, synthetic construct
  source 1..75: mol_type = other DNA
tgccggggcatcgatggcgttatggggttcagccctggcagccggtggtttttctgccaccacgatgctgttttc

SEQ ID NO: 477614 - DNA, 75 bp, synthetic construct
  source 1..75: mol_type = other DNA
ccgggggatgtcattcatctggttccccgggcagaaggagccaaaagtggcggagtgtttcaggccgtgcttggc

SEQ ID NO: 477615 - DNA, 75 bp, synthetic construct
  source 1..75: mol_type = other DNA
gggcgctggccacgcagatccccgcatttcgtcagaaactgaatgagggctggtatcaggtgcgcattgccgggc

SEQ ID NO: 477616 - DNA, 75 bp, synthetic construct
  source 1..75: mol_type = other DNA
cgttccgcatgcttcggtaggctacaggcgacggaacgcctggttttactacttcattcacataaagttaaaaca

SEQ ID NO: 477617 - DNA, 75 bp, synthetic construct
  source 1..75: mol_type = other DNA
cctggcaaaagggcgtccggcgctgcctcagaagccattgcccgacgtgctgggctggaaatattcaggcaaccg

SEQ ID NO: 477618 - DNA, 75 bp, synthetic construct
  source 1..75: mol_type = other DNA
tcacggacccgccatatctcgtcggttttcgtgaccgttccgggcgcaccatcgccggcgataaaaccgatgaat

SEQ ID NO: 477619 - DNA, 75 bp, synthetic construct
  source 1..75: mol_type = other DNA
gctggacccgtttgcaggcagcggctcaacctgcgtggccgccctccagtccggacgccggtatatcggtatcga

SEQ ID NO: 477620 - DNA, 75 bp, synthetic construct
  source 1..75: mol_type = other DNA
tctttcttttgagggtgatgacggaaaggttattcataaaaaactgaatgaaaaactgaccatcaaaggtggtgc

SEQ ID NO: 477621 - DNA, 75 bp, synthetic construct
  source 1..75: mol_type = other DNA
atgtcccgttttgtcctcggtaactgcattgatgttatgacgcgtatccctgataacgccattgatttcatctta

SEQ ID NO: 477622 - DNA, 75 bp, synthetic construct
  source 1..75: mol_type = other DNA
tggcgtcaccgggcatggcacgcatctgcctttacggggatttccaacgatttggccgccgcatcgaccttcgtg

SEQ ID NO: 477623 - DNA, 75 bp, synthetic construct
  source 1..75: mol_type = other DNA
gagccgctggcaaatggtgccgtgatccacatcgtgccgcgtcttgcgggagcaaaaagtggcggtgtgtttcag

SEQ ID NO: 477624 - DNA, 75 bp, synthetic construct
  source 1..75: mol_type = other DNA
tcactgacccgccatatctcgtcggtttgcgtgaccgttccgggcgcaccatcgccggcgataaaaccgatgaat

SEQ ID NO: 477625 - DNA, 75 bp, synthetic construct
  source 1..75: mol_type = other DNA
agggcatctcgtcttcaccaaaaactacacatcgaaggccgcatatgtgggctatcgccacgaatgcgcctatat

SEQ ID NO: 477626 - DNA, 75 bp, synthetic construct
  source 1..75: mol_type = other DNA
taaaacgggagatggtaaaacactaacgaaaaaacttggtgaagaagttgagtttaatgatgccggaccaataaa

SEQ ID NO: 477627 - DNA, 75 bp, synthetic construct
  source 1..75: mol_type = other DNA
aatggtgaaaaaccgaagattgccatcgtaccccagagtctgcaccggctgatttatggccctgacaaacggacc

SEQ ID NO: 477628 - DNA, 75 bp, synthetic construct
  source 1..75: mol_type = other DNA
actgagttgcgcctcaaactggtctggctttgctggcttgatttaatgaccggaaacagccttgacgactggacg

SEQ ID NO: 477629 - DNA, 75 bp, synthetic construct
  source 1..75: mol_type = other DNA
agcacatcatcccatgctggaagggattttgctgtctgagtgcgtgcgattaaaacagcgtcctctggcaaacaa

SEQ ID NO: 477630 - DNA, 75 bp, synthetic construct
  source 1..75: mol_type = other DNA
cagttcagtggtaccgaactgcgcctcaagctgatctggttgtgctggtatgacttaatgatcggcaacagcctg

SEQ ID NO: 477631 - DNA, 75 bp, synthetic construct
  source 1..75: mol_type = other DNA
aagagctttataaatattaccagatctggttgaccgactttacgaagctgacggtcagatcgggtatgtgccacc

SEQ ID NO: 477632 - DNA, 75 bp, synthetic construct
  source 1..75: mol_type = other DNA
ggcttgatttaatgaccggaaactgccttgacgactggacggagaatctgaaacggaaatcagaaaaagagctgg

SEQ ID NO: 477633 - DNA, 75 bp, synthetic construct
  source 1..75: mol_type = other DNA
gataatcccggtcacgcagataacgttgcttcgatcaccctgaagaaaaccgccccattccgcgcgttactgcag

SEQ ID NO: 477634 - DNA, 75 bp, synthetic construct
  source 1..75: mol_type = other DNA
agaatatctaccaccatcataccctgacggttggcagccttaagtttccgggagaggaagaggttattgctattg

SEQ ID NO: 477635 - DNA, 75 bp, synthetic construct
  source 1..75: mol_type = other DNA
accgtcagaagcagagcgcagcactgacggatctgatggatcagtacgtgctcctgtcataccgcacaacggttg

SEQ ID NO: 477636 - DNA, 75 bp, synthetic construct
  source 1..75: mol_type = other DNA
tcgtaccccggagtctgcaccggctgatttatggctctgacaaacgggccacgccgcccctggatgatgatctgg

SEQ ID NO: 477637 - DNA, 75 bp, synthetic construct
  source 1..75: mol_type = other DNA
aattggtgccgtactggcgaacaccttgagcaacctgatttctgccatattgctcatctatctgttccgcctgta

SEQ ID NO: 477638 - DNA, 75 bp, synthetic construct
  source 1..75: mol_type = other DNA
acaaatcagaaaaagatctggagcaatggatcattgcacgtcagggtcagagtgaaccactgacaaatctgatgg

SEQ ID NO: 477639 - DNA, 75 bp, synthetic construct
  source 1..75: mol_type = other DNA
caacaaccagtattgaagatttcgcacgttattctataggttacgccagcgccagcgatccagcccgttgcttca

SEQ ID NO: 477640 - DNA, 75 bp, synthetic construct
  source 1..75: mol_type = other DNA
cggcgtgttcgctaaccacttcggtggctggcgtgcggcgctgaagatttgtctggtgatggggatgatcgaaat

SEQ ID NO: 477641 - DNA, 75 bp, synthetic construct
  source 1..75: mol_type = other DNA
cttctttggtgccattctgctctcctttggtatcgacaccgtacaagcgatggcgggtaaagtgaactggacggt

SEQ ID NO: 477642 - DNA, 75 bp, synthetic construct
  source 1..75: mol_type = other DNA
ggcgcggttctggcgattgactgtgcggctatttatagcttcgcgccgaacgccgtggtctggggctttatgtgg

SEQ ID NO: 477643 - DNA, 75 bp, synthetic construct
  source 1..75: mol_type = other DNA
gtttatcttcggctactccatgtggacgaccattatctgcacggcgattctggtttcgctctactggggcatcac

SEQ ID NO: 477644 - DNA, 75 bp, synthetic construct
  source 1..75: mol_type = other DNA
gaaatctttggctgcgtctgggcggtgaaactcaccggtatgagcgcctggatgggcatggcggactggtcgatt

SEQ ID NO: 477645 - DNA, 75 bp, synthetic construct
  source 1..75: mol_type = other DNA
tgcgcaaaagtgtcagcgttattatcaaaggtacgataaaaaccattatcggtttcatgttgttacaggcgggat

SEQ ID NO: 477646 - DNA, 75 bp, synthetic construct
  source 1..75: mol_type = other DNA
tcttttcaatgggtgcggcgatgacgcttggcggtgttgcacagatgctggcaccgaaagcgagtaccgcaacaa

SEQ ID NO: 477647 - DNA, 75 bp, synthetic construct
  source 1..75: mol_type = other DNA
tgtggggtcacgggtaatttcgcaggaaatcagcacggcagacgaaggggatggtggtgaaatcgtggtgattgg

SEQ ID NO: 477648 - DNA, 75 bp, synthetic construct
  source 1..75: mol_type = other DNA
ctgatcagtctcttccgtcagtttggtggcacggaactgcgcctcaaactggtctggctctgctggcttgattta

SEQ ID NO: 477649 - DNA, 75 bp, synthetic construct
  source 1..75: mol_type = other DNA
gctttcagtgacattctcttttctatgggggcagcgatgacgcttggtggtgttgcacagatgctggctcctaaa

SEQ ID NO: 477650 - DNA, 75 bp, synthetic construct
  source 1..75: mol_type = other DNA
agttcctcaactattaccgcgaccgtgtttccgtggtgtttgatgataaaaccggcctgctgactattcagactc

SEQ ID NO: 477651 - DNA, 75 bp, synthetic construct
  source 1..75: mol_type = other DNA
tcagaacaaaaataacattctcgacccggaggccagcgccactgcggcgacctcgctggtgatgaccctgcaagg

SEQ ID NO: 477652 - DNA, 75 bp, synthetic construct
  source 1..75: mol_type = other DNA
tgccactcaactggccatcaaactgaaagctgaaaagatgattggtttttgctcttcccagggcgtcactaatga

SEQ ID NO: 477653 - DNA, 75 bp, synthetic construct
  source 1..75: mol_type = other DNA
tgtctccccggcgtccatcacccatgatgtgaagggcacggcatcaaccggtaacccggatgcggatgcagaggc

SEQ ID NO: 477654 - DNA, 75 bp, synthetic construct
  source 1..75: mol_type = other DNA
gctaaaggtgtccgctctgaagccctggaagtggcccgtcgtcagtatccggatgacagtcgtctgcatcatgtc

SEQ ID NO: 477655 - DNA, 75 bp, synthetic construct
  source 1..75: mol_type = other DNA
agttttgaaaacaagcgtgcggcactggcggcctcccttgaggagattatgagtaaagccgcagaggaaggtcgc

SEQ ID NO: 477656 - DNA, 75 bp, synthetic construct
  source 1..75: mol_type = other DNA
gtggtgactaaccagtctggcattgcgcgcggtaaatttactgaagcgcagtttgaaacgttgactgagtggatg

SEQ ID NO: 477657 - DNA, 75 bp, synthetic construct
  source 1..75: mol_type = other DNA
gtggaacaagctacacctgatgaattttttgcgcatcctaaatcggagcgtacgagggcatttttatcgcaggtt

SEQ ID NO: 477658 - DNA, 75 bp, synthetic construct
  source 1..75: mol_type = other DNA
tctgtgtggcccttctggctccgggaaatcgacaaccatccgttgtattaatcacctggaagaacatcaacaggg

SEQ ID NO: 477659 - DNA, 75 bp, synthetic construct
  source 1..75: mol_type = other DNA
tcatttctgcaactaatcagaatttggcccagttcattgccgaaggtaaattccgcgaagatctcttctaccgac

SEQ ID NO: 477660 - DNA, 75 bp, synthetic construct
  source 1..75: mol_type = other DNA
cgttacccacgagcaacaagagcatatcagtgataatttacgcgaattttctgattatgttcgacatatatccac

SEQ ID NO: 477661 - DNA, 75 bp, synthetic construct
  source 1..75: mol_type = other DNA
ccgtctggttcggtattaaagcctcgttggtagcgccaatgaatcgcctgattgacagcattcgtcatattgcag

SEQ ID NO: 477662 - DNA, 75 bp, synthetic construct
  source 1..75: mol_type = other DNA
agctggtgctggtgaatgcgccggatatttatctggctgatgacggcggtgtggcggtggatatgtcccgtgaag

SEQ ID NO: 477663 - DNA, 75 bp, synthetic construct
  source 1..75: mol_type = other DNA
tcattggtcagttgcataacatccaggggcgacagttatttttgatggcgtttcaccagtcacataccagttttt

SEQ ID NO: 477664 - DNA, 75 bp, synthetic construct
  source 1..75: mol_type = other DNA
ttgcataacattcagggccgacaattatttttaatggcgtttcaccaatcgcataccagtttttctgtagcaaat

SEQ ID NO: 477665 - DNA, 75 bp, synthetic construct
  source 1..75: mol_type = other DNA
gcggaaaaaaactgggcggattacgaagcgttgccgcgtgacccgcgtcagagcaccgccgcagcggcagagatc

SEQ ID NO: 477666 - DNA, 75 bp, synthetic construct
  source 1..75: mol_type = other DNA
tctgacgcccgggtgggtgtcattcaatggcgaaaaaccggagattgccatcgttccccagagtctgcaccggct

SEQ ID NO: 477667 - DNA, 75 bp, synthetic construct
  source 1..75: mol_type = other DNA
ttgcttcaatcactctgaagaaaaccgccccgtttcgcgcgctactacagatcgatggtcagcgtctgaaacaaa

SEQ ID NO: 477668 - DNA, 75 bp, synthetic construct
  source 1..75: mol_type = other DNA
gtcagatggatggcgcaggtcgattgttaatcgcgccagtactgcggcaacatgccgggctgacaaaagaagtga

SEQ ID NO: 477669 - DNA, 75 bp, synthetic construct
  source 1..75: mol_type = other DNA
cggcttaagcaaattatttgtgctgaccacgcgcagtattcactggttccaggaacgtggatttaccccggtgga

SEQ ID NO: 477670 - DNA, 75 bp, synthetic construct
  source 1..75: mol_type = other DNA
gtggtgaaggaacgtaaaaccgagctggtcgagggattccgccattcggttccctatatcaacactcatcgggga

SEQ ID NO: 477671 - DNA, 75 bp, synthetic construct
  source 1..75: mol_type = other DNA
cactggaactggtgaagcaggctgcgggaacattgcaactggatattactgctcgcctgtcgatgagtctcaata

SEQ ID NO: 477672 - DNA, 75 bp, synthetic construct
  source 1..75: mol_type = other DNA
tctacgctgaatagcagttgggttgagttgttgcagacgcgtaacaccctcaaccgcgcgggtatccgctacatg

SEQ ID NO: 477673 - DNA, 75 bp, synthetic construct
  source 1..75: mol_type = other DNA
ttgcttctgcttctgatgagcagagccgtggtatcgatcaggttggcttagcggttgctgagatggaccgggtaa

SEQ ID NO: 477674 - DNA, 75 bp, synthetic construct
  source 1..75: mol_type = other DNA
gttaggtgcaggcaaaatcaacgagttctttgatcagccgacccagggatatcaggacggtttcgagaagcagta

SEQ ID NO: 477675 - DNA, 75 bp, synthetic construct
  source 1..75: mol_type = other DNA
cctgaatgggaaattatcgagcaaaaattatcgcgtctgtcgagcatgaacccggttgagcgccgtgtgcagcgc

SEQ ID NO: 477676 - DNA, 75 bp, synthetic construct
  source 1..75: mol_type = other DNA
acgccgcccctggatgatgatctggtggtgaacttatgcaccagtgaaaatctgctggttcatcatccgatgctg

SEQ ID NO: 477677 - DNA, 75 bp, synthetic construct
  source 1..75: mol_type = other DNA
aatattctggctttgaacgcggcggttgaagcagcgcgcgcgggtgagcaagggcgcggttttgcggtggtcgcg

SEQ ID NO: 477678 - DNA, 75 bp, synthetic construct
  source 1..75: mol_type = other DNA
gtgaaaacgggggctgaagccatccgcgcactgtccacacaggtcccggcgtttcgtcagaaactgaatgacggc

SEQ ID NO: 477679 - DNA, 75 bp, synthetic construct
  source 1..75: mol_type = other DNA
atggctgtgctgatttttctgggctgtctgttgggtggtattgctatcggtttgcctattgcctgggcacttttg

SEQ ID NO: 477680 - DNA, 75 bp, synthetic construct
  source 1..75: mol_type = other DNA
tctggcactcttttgtctccggtatctgggcgctgtttcttccggtcatcattattgggggttttcgctccggtc

SEQ ID NO: 477681 - DNA, 75 bp, synthetic construct
  source 1..75: mol_type = other DNA
gctgctgttatggcggttgctatatggatgccgggggtgggaattatggcgagtaatctgctgttttctctcggt

SEQ ID NO: 477682 - DNA, 75 bp, synthetic construct
  source 1..75: mol_type = other DNA
cgctggcaaatggtgccgtgatccacattgtgccgcgtctggcgggagccaaaagtggcggtctttttcaggctg

SEQ ID NO: 477683 - DNA, 75 bp, synthetic construct
  source 1..75: mol_type = other DNA
aaatgctggttggctcccggcgaatctcccaggacatcagtacccgtgatgaaggcggtggcgggaaggtggtgg

SEQ ID NO: 477684 - DNA, 75 bp, synthetic construct
  source 1..75: mol_type = other DNA
cgtattcgcggtgaggacacggcaccggaggcggtgtacgcccgtcttcacgaacagctgggtgagggaacggtc

SEQ ID NO: 477685 - DNA, 75 bp, synthetic construct
  source 1..75: mol_type = other DNA
tcttaccccggtattaatgcctttagttaaagaggcaggaatcgatccgatttatttcggtgtcatgtttatcat

SEQ ID NO: 477686 - DNA, 75 bp, synthetic construct
  source 1..75: mol_type = other DNA
aatgtccttaatgttatttccggtgtggcgaaactgaaatttgatgatgcggtaagaggcgttttcccttacgta

SEQ ID NO: 477687 - DNA, 75 bp, synthetic construct
  source 1..75: mol_type = other DNA
cgtctgaatgagccgctggaaaatggtgccgtgatccacatcgtaccgcgtctggcgggtgctaaaagtggcggt

SEQ ID NO: 477688 - DNA, 75 bp, synthetic construct
  source 1..75: mol_type = other DNA
tggtatcaggtacggattgccgggcgtgatgcaggcgaaaatgaattatctgcccgtcttaatgaaccgctggca

SEQ ID NO: 477689 - DNA, 75 bp, synthetic construct
  source 1..75: mol_type = other DNA
ggtgaaatgcgcgtgggctcccgggtggtatctcaggagatcagcactgcagatgaaggcgatggtggtcaggtt

SEQ ID NO: 477690 - DNA, 75 bp, synthetic construct
  source 1..75: mol_type = other DNA
ggtgaaatgcgcgtgggttcccgggtggtatctcaggagatcagcactgcagacgaaggcgatggtggtcaggtt

SEQ ID NO: 477691 - DNA, 75 bp, synthetic construct
  source 1..75: mol_type = other DNA
gcacaggggaacccgatgccggtgccttacggtgaaatgctggttggctcacggcgaatctcccaggacatcagt

SEQ ID NO: 477692 - DNA, 75 bp, synthetic construct
  source 1..75: mol_type = other DNA
acgggggctgaagccatccgggcgctggccacgcagcttccgtcgtttcgccagaaactgaatgagggctggtat

SEQ ID NO: 477693 - DNA, 75 bp, synthetic construct
  source 1..75: mol_type = other DNA
taatttttatccatcagcaggtgtaatatcaataactgttggtgttaatgggtttgttcttataaacactcaggg

SEQ ID NO: 477694 - DNA, 75 bp, synthetic construct
  source 1..75: mol_type = other DNA
aagccggtaaaaatctcagcgtgaaacaaagtaacggtgattttacattctctgttattgatactccgtcattca

SEQ ID NO: 477695 - DNA, 75 bp, synthetic construct
  source 1..75: mol_type = other DNA
atccgggcgctgtccacacaggtcccggcgtttcgtcagaaactgaatgacggctggtatcaggtgcgcattgcc

SEQ ID NO: 477696 - DNA, 75 bp, synthetic construct
  source 1..75: mol_type = other DNA
aaaaatatgattggcgctttttatcagccagcatcagtggtggtggatctcgactgtctgaaaacgcttcctccg

SEQ ID NO: 477697 - DNA, 75 bp, synthetic construct
  source 1..75: mol_type = other DNA
cgtctgttgcgttattaccagaaattacaggcgttaagttgtgatccagataaaaagttcagcctggatgtgtgg

SEQ ID NO: 477698 - DNA, 75 bp, synthetic construct
  source 1..75: mol_type = other DNA
aatggtgccgtgatccacgtcgttccgcgtctggcgggtgccaaaagtggaggagtgtttcaggcggtgctgggt

SEQ ID NO: 477699 - DNA, 75 bp, synthetic construct
  source 1..75: mol_type = other DNA
cttgcgggagagatgcgcttaattcttccgctggcaattggtaagagtgaagttcgcggcggcgtatcgcacgaa

SEQ ID NO: 477700 - DNA, 75 bp, synthetic construct
  source 1..75: mol_type = other DNA
gtgattcttgcccggactgttttaccacgcagcgagaatgtatctacattaaggaaggtgcgaataagcaggtca

SEQ ID NO: 477701 - DNA, 75 bp, synthetic construct
  source 1..75: mol_type = other DNA
gtgcagctaccgccagttctccttcgccgcaatgggtcgcatggttgcaaagtcaggcggctcaggtcgcggggg

SEQ ID NO: 477702 - DNA, 75 bp, synthetic construct
  source 1..75: mol_type = other DNA
ctcaccggtatgagtgcctggatgggcatggcggactggtcgattctggcaccgccgatgatgcagggcttcttc

SEQ ID NO: 477703 - DNA, 75 bp, synthetic construct
  source 1..75: mol_type = other DNA
ggtgttgcacagatgctggcccctaaacccaaaaccccccgcacacagacaacggataacggcaaacagaatacc

SEQ ID NO: 477704 - DNA, 75 bp, synthetic construct
  source 1..75: mol_type = other DNA
aaagtggcggtgtgtttcaggctgtgctgggggcggctgttatggcggttgctatatggatgccgggggtaggaa

SEQ ID NO: 477705 - DNA, 75 bp, synthetic construct
  source 1..75: mol_type = other DNA
tgtggctcagatgctggcaccgaaagccaggacgcccacggcagccagtacagataacggcaaacagaacacgta

SEQ ID NO: 477706 - DNA, 75 bp, synthetic construct
  source 1..75: mol_type = other DNA
atttttcttcactggataatatggttgccctgggcaatgttctgcccgttctgtacggtgaaatgcgcgtgggat

SEQ ID NO: 477707 - DNA, 75 bp, synthetic construct
  source 1..75: mol_type = other DNA
agatgaacgaaggctggtatcagatacgtattgccggtgaggataccgcgccggaggcggtgtatgcccgtcttc

SEQ ID NO: 477708 - DNA, 75 bp, synthetic construct
  source 1..75: mol_type = other DNA
agcataaaatcagtattggttttacctccatttcagtgcaagataactccggtagatcagtttgatgttccaggt

SEQ ID NO: 477709 - DNA, 75 bp, synthetic construct
  source 1..75: mol_type = other DNA
cgtttcgtcagaaactgagcgacggctggtatcaggtacggattgccgggcgtgatgcaggcgaaaccgaattat

SEQ ID NO: 477710 - DNA, 75 bp, synthetic construct
  source 1..75: mol_type = other DNA
gctggcgttgggttactggaaaacccaggggctggttattctgccacaggcgttgaagctggtaattcctgggct

SEQ ID NO: 477711 - DNA, 75 bp, synthetic construct
  source 1..75: mol_type = other DNA
aatactccctcatcgcgggcgctatattgcggtatgggcggttatctacccactcatcgtctggtggctaatgta

SEQ ID NO: 477712 - DNA, 75 bp, synthetic construct
  source 1..75: mol_type = other DNA
gaccgaccatccctcttcggtggtagaactggacacggaagggcacgtgctgtgggtaataccgtcagatggtga

SEQ ID NO: 477713 - DNA, 75 bp, synthetic construct
  source 1..75: mol_type = other DNA
ataatattgctaatcttcttaatcttccgccctattgtatcaacagcaaaataaaacggtacagacaacagcttt

SEQ ID NO: 477714 - DNA, 75 bp, synthetic construct
  source 1..75: mol_type = other DNA
gcgtctggcaggagccaaaagtggcggtgtgtttcaggctgtgctgggggcggctgttatggcggttgctatatg

SEQ ID NO: 477715 - DNA, 75 bp, synthetic construct
  source 1..75: mol_type = other DNA
ttggatcttctgtttcagtatgtcgcgttatagccaacatctggaaaaacgttttaacaccgagcgtacagcgca

SEQ ID NO: 477716 - DNA, 75 bp, synthetic construct
  source 1..75: mol_type = other DNA
acgggaagcgcaggaacaaaaacgcggtttatgggctgatacaaatccggttccaccgtgggaatggcgatacaa

SEQ ID NO: 477717 - DNA, 75 bp, synthetic construct
  source 1..75: mol_type = other DNA
gtggtcattggttttggtcatccggtttataccatcgccgacccgcgccaccaggtgatcaaacgtgtggcgaag

SEQ ID NO: 477718 - DNA, 75 bp, synthetic construct
  source 1..75: mol_type = other DNA
gtctgatggatatttaagtgagtctgtatcaaaaaaaccactgattttgcttatgcagctggtgttattattaat

SEQ ID NO: 477719 - DNA, 75 bp, synthetic construct
  source 1..75: mol_type = other DNA
gggataaaggcaccaccgccctgtacggcggcagccgcatcgagaaagaccatattcgcgtcgaggcctacggca

SEQ ID NO: 477720 - DNA, 75 bp, synthetic construct
  source 1..75: mol_type = other DNA
gcgatcagcctggtcacgggctgagtggattggagccggaagaatggccattgacgggctcaaggaagtccagga

SEQ ID NO: 477721 - DNA, 75 bp, synthetic construct
  source 1..75: mol_type = other DNA
agggattcaaagggtttctcgtagtatattaactcaattacgtaaaattgacttgcatggatatgaagtctatcc

SEQ ID NO: 477722 - DNA, 75 bp, synthetic construct
  source 1..75: mol_type = other DNA
ccatgatggttcgctggcgcaggttgacctcagtgcgaactaccatgaagggcaatacacctctgcgggcttgtc

SEQ ID NO: 477723 - DNA, 75 bp, synthetic construct
  source 1..75: mol_type = other DNA
tccgtttgttccaggaaggtcatctgctacgtaatagcatcgctatttttgcgctaaccacgctgtttattttat

SEQ ID NO: 477724 - DNA, 75 bp, synthetic construct
  source 1..75: mol_type = other DNA
agtgagctggattatctgggggaagtcagtgctgaacagctggaactggtgagcagcaccctgaaagtgatctgc

SEQ ID NO: 477725 - DNA, 75 bp, synthetic construct
  source 1..75: mol_type = other DNA
tgatgagtggggaagaccgaaaaaatatctggtttataaaaattatccggtcagcggccggcagagtgatacgaa

SEQ ID NO: 477726 - DNA, 75 bp, synthetic construct
  source 1..75: mol_type = other DNA
caacatggaggagcaacaatgcgatgcctgttgctgctcagccagacgagcatttgccatccacgggtcagtgcc

SEQ ID NO: 477727 - DNA, 75 bp, synthetic construct
  source 1..75: mol_type = other DNA
cgggaacaacatggaggagcaacaatacgatgcctgttgctgctcagccagacgagcatttgccatccgcgggcc

SEQ ID NO: 477728 - DNA, 75 bp, synthetic construct
  source 1..75: mol_type = other DNA
gtgcaaataaccgaagcattactttcagagccgggagacatccggcgttttattcagcaggcggtggaccactgg

SEQ ID NO: 477729 - DNA, 75 bp, synthetic construct
  source 1..75: mol_type = other DNA
atgtgaacggcgttccgcttcgtgagagtctcagctacaacggggcgggtgcaggacttggcgggcgaaataggc

SEQ ID NO: 477730 - DNA, 75 bp, synthetic construct
  source 1..75: mol_type = other DNA
atgctgcgctgccgtaaatctggcgtgctgaccggtttaccagatggctatggccgtgggcgcattatcggtgac

SEQ ID NO: 477731 - DNA, 75 bp, synthetic construct
  source 1..75: mol_type = other DNA
ttggagctgcccgccccgttttgttattaattgcccgtatcgccgtggtcttaattttcattatttttggtttcc

SEQ ID NO: 477732 - DNA, 75 bp, synthetic construct
  source 1..75: mol_type = other DNA
ggtaacgcccgtgcagacgatctggtccgtaacaacggtattgccgcaaatgctgtagaaattcataaagaccat

SEQ ID NO: 477733 - DNA, 75 bp, synthetic construct
  source 1..75: mol_type = other DNA
aatcggtgatgcgcattgaggccggactgagcacgtatgagaaagagctggcgctgatgggcgaggattatcagg

SEQ ID NO: 477734 - DNA, 75 bp, synthetic construct
  source 1..75: mol_type = other DNA
ggtgggagatggaggtaaaaatcccctgaacaccatcatgaaaggctacgcgcgttattacgccaccaatacggt

SEQ ID NO: 477735 - DNA, 75 bp, synthetic construct
  source 1..75: mol_type = other DNA
ggccaaccagttttattccgtgatggagcgcctcaagatgctcgacacactgcaggccacgcaactgcagtcggc

SEQ ID NO: 477736 - DNA, 75 bp, synthetic construct
  source 1..75: mol_type = other DNA
atgtgaacggcgttccgcttcgggagagcctcagctacaacggtggcggtgcaggatttggcgggcaaatggcgg

SEQ ID NO: 477737 - DNA, 75 bp, synthetic construct
  source 1..75: mol_type = other DNA
tcgagccggtggaggacgggcagacccgtggggctaatcagttttacagcgtcatggaacggctgaagatgctag

SEQ ID NO: 477738 - DNA, 75 bp, synthetic construct
  source 1..75: mol_type = other DNA
ctggtaatggcacctgtggtattttttattttgctcctgatagtgtcatcgctgatattatttatgactggcaac

SEQ ID NO: 477739 - DNA, 75 bp, synthetic construct
  source 1..75: mol_type = other DNA
ccggcctgcgataaaggaggtggtaatgctgaaacagaacgcgtggtttcgcggcgaaccgaaggccagtctgaa

SEQ ID NO: 477740 - DNA, 75 bp, synthetic construct
  source 1..75: mol_type = other DNA
agaaaagatattgatgcccctgggtattatcggactgagcatttagtgttcgctgagagtagtgttaagcaatgg

SEQ ID NO: 477741 - DNA, 75 bp, synthetic construct
  source 1..75: mol_type = other DNA
ctggattcatgacgtaatagttcaggccgcgtggtttgtaaaagcatcactggagcagaccgcgttatcgggcac

SEQ ID NO: 477742 - DNA, 75 bp, synthetic construct
  source 1..75: mol_type = other DNA
gcaaatgggtggggctgcggtgcaccgtcaacaggcgttagttctcattaatgaagacaatgcaaaaagcgaaga

SEQ ID NO: 477743 - DNA, 75 bp, synthetic construct
  source 1..75: mol_type = other DNA
tgatgctgatttgcgctggattcatgacgttatagttcgggctgcgaggtttgtaaaagcatcactggagcagaa

SEQ ID NO: 477744 - DNA, 75 bp, synthetic construct
  source 1..75: mol_type = other DNA
atgatctcggtaatgtattccccggttcttgggataaggttttttgccccacttgtggcgggaataagatggctt

SEQ ID NO: 477745 - DNA, 75 bp, synthetic construct
  source 1..75: mol_type = other DNA
ccaatgtgtttcgtatcgcactggcatcgctggaagcagagccagtggcgtggaaggcaaccttcacgcaaattg

SEQ ID NO: 477746 - DNA, 75 bp, synthetic construct
  source 1..75: mol_type = other DNA
atgatcactattaccaaagagcgactacttacaatcaagcagtggcgcgaaacatacggaccgggtagcaacgtt

SEQ ID NO: 477747 - DNA, 75 bp, synthetic construct
  source 1..75: mol_type = other DNA
caacgattaagccgggtaatggtattgagcaagcaactcactggatgccgctaccagaaccgccgcaggaggtaa

SEQ ID NO: 477748 - DNA, 75 bp, synthetic construct
  source 1..75: mol_type = other DNA
atggctgcgcaagggttcttactgatcgccacgtttttactggtgctgatggtgctggcgcgccctttaggcagc

SEQ ID NO: 477749 - DNA, 75 bp, synthetic construct
  source 1..75: mol_type = other DNA
ctccggatggttggataagctgtagtgagcgaatgccaaatgatggtcagcacgtaattattttatgtgatggcg

SEQ ID NO: 477750 - DNA, 75 bp, synthetic construct
  source 1..75: mol_type = other DNA
gaatatccggatccgcactcggttacgcactggcgtgaaatgccagcagcaccgcagcaggaggttaaccgtggc

SEQ ID NO: 477751 - DNA, 75 bp, synthetic construct
  source 1..75: mol_type = other DNA
ctccggatggttggataagctgtagtgagcgaatgccggataataatcacgacgtacttttcttcgatgtgtggg

SEQ ID NO: 477752 - DNA, 75 bp, synthetic construct
  source 1..75: mol_type = other DNA
aggtgactggcgaatgaaatgggcgacttacatcccggggcatcctgacgctaatgatgggtgggtaatacctgg

SEQ ID NO: 477753 - DNA, 75 bp, synthetic construct
  source 1..75: mol_type = other DNA
ggctgatgctgcgaacgtggctccgggacggtgaggtatttgctcagctggttcgcggtaccggaaatggccttc

SEQ ID NO: 477754 - DNA, 75 bp, synthetic construct
  source 1..75: mol_type = other DNA
tttttccagtacagcgcgcaactataacggcacttacagcgcccagcgtcaggagctggttgaatctactgatgg

SEQ ID NO: 477755 - DNA, 75 bp, synthetic construct
  source 1..75: mol_type = other DNA
gagcgacggcactttatcgtggttagggaacgccttgttctggatgccgctaccagaaccgccgcaggaggttaa

SEQ ID NO: 477756 - DNA, 75 bp, synthetic construct
  source 1..75: mol_type = other DNA
tttcgtaatggtcagttgcgggccatggcggcgggcacacgtctgagtttttccagtacagcacgtaactataac

SEQ ID NO: 477757 - DNA, 75 bp, synthetic construct
  source 1..75: mol_type = other DNA
ccggatgacgtcaaacgtcggcgtaaggctgagattgatgaaaaccgcaggctggaactggtatttgataccgat

SEQ ID NO: 477758 - DNA, 75 bp, synthetic construct
  source 1..75: mol_type = other DNA
taacaaccttagcctgtgggggaatgtcggtatgcaactaggtgataaaggctatagcgatactcagggcatgct

SEQ ID NO: 477759 - DNA, 75 bp, synthetic construct
  source 1..75: mol_type = other DNA
cctgtagaaatcaacgacgacatggcttacgcattccatcacgcattgtcagattcatcgctaggcgctgatgaa

SEQ ID NO: 477760 - DNA, 75 bp, synthetic construct
  source 1..75: mol_type = other DNA
ttgaaggagatgaaccagactacattcctgcttatttctttgtccataaaaccaatggatggacggagtggcagc

SEQ ID NO: 477761 - DNA, 75 bp, synthetic construct
  source 1..75: mol_type = other DNA
aggtgactggcgaatgaaatgggctacttacatccccgggcatcctgacgctaatgatgggtggataattcctgg

SEQ ID NO: 477762 - DNA, 75 bp, synthetic construct
  source 1..75: mol_type = other DNA
ttaacgtggtgcagccacaatcagcaccatgatgacacgctatatgttcgagctgacttggtaaatggcaattct

SEQ ID NO: 477763 - DNA, 75 bp, synthetic construct
  source 1..75: mol_type = other DNA
tgaaacaggcgcgtgcggctctggaacgtctctacactgcgctgcgtggcacagacaaaaccgttgctcctgcgg

SEQ ID NO: 477764 - DNA, 75 bp, synthetic construct
  source 1..75: mol_type = other DNA
ataagctgaagtatgtgcgcaacattactgatatcgacgacaaaatcatcaaacgcgccaatgaaaatggcgaaa

SEQ ID NO: 477765 - DNA, 75 bp, synthetic construct
  source 1..75: mol_type = other DNA
acggatcccgcgtgaacttctcaccgggcgtccggccatgctgcatattttcgagccggtggaggacgggcagac

SEQ ID NO: 477766 - DNA, 75 bp, synthetic construct
  source 1..75: mol_type = other DNA
tccaggaatcagtgatgcgcattgaggccggactgagcacgtatgagaaagagctggcgctgatgggcgaggatt

SEQ ID NO: 477767 - DNA, 75 bp, synthetic construct
  source 1..75: mol_type = other DNA
tccgccagcaactgcgtgaaagccaggagcgacaggcagcgggtcttccccgccccatctggataaaggacacgt

SEQ ID NO: 477768 - DNA, 75 bp, synthetic construct
  source 1..75: mol_type = other DNA
gttcagcaggcggtggaccactgcccaaatctgttggcatttcacttcacgctctattcggcagaaggaatctat

SEQ ID NO: 477769 - DNA, 75 bp, synthetic construct
  source 1..75: mol_type = other DNA
ttgatgaagaatgttcgcaagtggtggatttattgcagcaggcctggcgggggataaacgctggcggacaatgtc

SEQ ID NO: 477770 - DNA, 75 bp, synthetic construct
  source 1..75: mol_type = other DNA
agtgttacagttgatgaagcatgttcgcaagtggcggatttactgcaacagacctggccggtgataagcgctggc

SEQ ID NO: 477771 - DNA, 75 bp, synthetic construct
  source 1..75: mol_type = other DNA
gaagaatacactgtagctgcagccagtcgcatcgatctggggggcggtagtcagatattccgttactacacttcc

SEQ ID NO: 477772 - DNA, 75 bp, synthetic construct
  source 1..75: mol_type = other DNA
atcttaaactggcaggaaaaacgctggcagcgatttttaacagcgaagaaccgggaaatatcgaacccgtctaca

SEQ ID NO: 477773 - DNA, 75 bp, synthetic construct
  source 1..75: mol_type = other DNA
gatcacattgtcgggcatatgtttctgatcagctaccgtccgaactggcgctggctggggatgcgggagactgca

SEQ ID NO: 477774 - DNA, 75 bp, synthetic construct
  source 1..75: mol_type = other DNA
gtcggccattgtgaaggccatgtatgcagccacaatcgaaagtgaacttgataccgaaaaggcctttgaatatat

SEQ ID NO: 477775 - DNA, 75 bp, synthetic construct
  source 1..75: mol_type = other DNA
gtgaccgaagatacttacgaatatttgctgttaaatggtgaggaatcctttaacgaactcggtgaaccggagtgg

SEQ ID NO: 477776 - DNA, 75 bp, synthetic construct
  source 1..75: mol_type = other DNA
atgctggaaaaagtagaaaatcaaaaccatgccaaatgggaagtgcataattttaccatgggctaccaacggcag

SEQ ID NO: 477777 - DNA, 75 bp, synthetic construct
  source 1..75: mol_type = other DNA
ccgttcaggtacattagatcagttcgttgtgctaaagacaactgttcagtcccttatgttacccgttatggcaac

SEQ ID NO: 477778 - DNA, 75 bp, synthetic construct
  source 1..75: mol_type = other DNA
cattaacccggatgaagggggctgccatgcgcctgaccgggatgttgtaccggaatccggatcttgcggagcggg

SEQ ID NO: 477779 - DNA, 75 bp, synthetic construct
  source 1..75: mol_type = other DNA
gcaggattcagacaatggattttcggcgcttgaacaggcgctgctgcggtatatcgccgccggtcttggcgtttc

SEQ ID NO: 477780 - DNA, 75 bp, synthetic construct
  source 1..75: mol_type = other DNA
atgtgaatggcgctccgcttcgtgagagtctcagctacagcggtggtggtgcaggatttggtgggcaaatggcgg

SEQ ID NO: 477781 - DNA, 75 bp, synthetic construct
  source 1..75: mol_type = other DNA
gagcgtcggatcaggctggaaaaactggcgcggcacaaacacgagaatccgccaacactggtatctgaagccatg

SEQ ID NO: 477782 - DNA, 75 bp, synthetic construct
  source 1..75: mol_type = other DNA
gttttctgtgtccgtgctgatttacgatttgcgttgtccgacgggtgttatgaggagggaggaatggcaatatct

SEQ ID NO: 477783 - DNA, 75 bp, synthetic construct
  source 1..75: mol_type = other DNA
ccgtgctgctggcctacattcagggcagccgggataaagtgattcgtgaggacggtgaactgatcccgggcgagg

SEQ ID NO: 477784 - DNA, 75 bp, synthetic construct
  source 1..75: mol_type = other DNA
tgtcacccgcgagccagtgtcacagttgatgaacaatgttcgcaagtggtggatttactgcaacatagctggcag

SEQ ID NO: 477785 - DNA, 75 bp, synthetic construct
  source 1..75: mol_type = other DNA
tgccatccgcgtgccagtgccacggttgaggaagaatgttcgcaagtggtggatttactgcaacagacctggaag

SEQ ID NO: 477786 - DNA, 75 bp, synthetic construct
  source 1..75: mol_type = other DNA
tgtacttctttttaccgacaggtgcacgaacgtattactgagagtaatcacatgctcagtccatcatcgccggtg

SEQ ID NO: 477787 - DNA, 75 bp, synthetic construct
  source 1..75: mol_type = other DNA
gttgcgttaaaaacagtcgcattgtctctggggttaccggttgtgaccgccattatctatcgtccggtacagcgc

SEQ ID NO: 477788 - DNA, 75 bp, synthetic construct
  source 1..75: mol_type = other DNA
ggatttactgcaacagacctggcggatgataagtgctggcggacaatgcccaggtggaaaagtgttttcgggttg

SEQ ID NO: 477789 - DNA, 75 bp, synthetic construct
  source 1..75: mol_type = other DNA
ggtcagcccatcagcgccggtggtattacgctggttgcgggaacaacatgaaggagcacagatacgatgtctgtt

SEQ ID NO: 477790 - DNA, 75 bp, synthetic construct
  source 1..75: mol_type = other DNA
gcaggatttggcgggcaaatggcggagtggttgccaccggcgcagagtgccgatgcagccctgctgcctgcgttg

SEQ ID NO: 477791 - DNA, 75 bp, synthetic construct
  source 1..75: mol_type = other DNA
catcttaaatttgttcgccgtctgcaccagatgcgcgggacgtctttgttgtccggtgtgctgatccgcctcagt

SEQ ID NO: 477792 - DNA, 75 bp, synthetic construct
  source 1..75: mol_type = other DNA
cagtttacccgtccgatgctggaacgtctgatgctgcgtacctggctgcgcgatggtgaggtgtttgcccagatg

SEQ ID NO: 477793 - DNA, 75 bp, synthetic construct
  source 1..75: mol_type = other DNA
cactggagtgatatcaccgagcgccgatttaacactgaaagtgaggcgttcaacttcacttacgaatacgcattt

SEQ ID NO: 477794 - DNA, 75 bp, synthetic construct
  source 1..75: mol_type = other DNA
ggtccataattttaccatgggctaccaacggcaagtaaccgaagatacttacgaatatttgctgctaaatggtga

SEQ ID NO: 477795 - DNA, 75 bp, synthetic construct
  source 1..75: mol_type = other DNA
ttgccagcctcgctaagtggctttacgctcgacacgttagcgtttcgtttgctggaagatgaattgctgattgcg

SEQ ID NO: 477796 - DNA, 75 bp, synthetic construct
  source 1..75: mol_type = other DNA
ttgctgattgcgctgccgggtgaggaatttacggtagccgctgtcagccacatcgatctgggcggcggtagtcag

SEQ ID NO: 477797 - DNA, 75 bp, synthetic construct
  source 1..75: mol_type = other DNA
gaaggaaaacgcacatttacggagtttatccgtgaaggtgttggcgttcatgcgtttaacggcgaaatctttgtg

SEQ ID NO: 477798 - DNA, 75 bp, synthetic construct
  source 1..75: mol_type = other DNA
acggatcccgcgtgaacttcccaccgggcgtccggccatgttgcatattttcgagccggtggaggacgggcagac

SEQ ID NO: 477799 - DNA, 75 bp, synthetic construct
  source 1..75: mol_type = other DNA
atcaggacattttccgccagcaggtcagggaatctgcagagcggaaaaagccggactctcacgtccggtgtggat

SEQ ID NO: 477800 - DNA, 75 bp, synthetic construct
  source 1..75: mol_type = other DNA
ggattctcagcccacggattctgccgctgaagattttatgaagtctcacgtggaggcgacgattcgcgatgttcc

SEQ ID NO: 477801 - DNA, 75 bp, synthetic construct
  source 1..75: mol_type = other DNA
actgcgcaggattcagacaatggattttcggcgcttgaacaggcgctgctgcggtatatcgccgccggtcttggc

SEQ ID NO: 477802 - DNA, 75 bp, synthetic construct
  source 1..75: mol_type = other DNA
cgggcgcgttttgatttttatcaggcgcgatcagcctggtcacgggctgagtggattggagccggaagaatggcc

SEQ ID NO: 477803 - DNA, 75 bp, synthetic construct
  source 1..75: mol_type = other DNA
atcgtcggccacatgtttcgcctgagctatcgacccaactggcgctggctggggatgtcggaagctgattcgcat

SEQ ID NO: 477804 - DNA, 75 bp, synthetic construct
  source 1..75: mol_type = other DNA
tcagccagatggggcgtgtgatttacgaaacgcaggttccggctggaccgtttcgtattcaggatcttggtgatt

SEQ ID NO: 477805 - DNA, 75 bp, synthetic construct
  source 1..75: mol_type = other DNA
cgtggtgcaggccacgcttaccgaaggggccattggctaccgtaagttctcggtgatcagcgggcaaaaagcgat

SEQ ID NO: 477806 - DNA, 75 bp, synthetic construct
  source 1..75: mol_type = other DNA
ggatttcactccagggcggggcaacgcccaccgcgcagggcggcgcgctccaccgtacccagaatatgggcggca

SEQ ID NO: 477807 - DNA, 75 bp, synthetic construct
  source 1..75: mol_type = other DNA
gatccacgacggcaaatgtttgaaacccggtcagctggaaggcattgatattaaagctgacctgagtcagtcagc

SEQ ID NO: 477808 - DNA, 75 bp, synthetic construct
  source 1..75: mol_type = other DNA
ctataacggcaactacggcagcggttcggacagcagccaggtggggtatttcagccgtgtcgatgacgcaactca

SEQ ID NO: 477809 - DNA, 75 bp, synthetic construct
  source 1..75: mol_type = other DNA
attaagccggtgatccaggagcagactcagcaggtcacgccaacggaaccgccagtatcggtatcagccaattaa

SEQ ID NO: 477810 - DNA, 75 bp, synthetic construct
  source 1..75: mol_type = other DNA
cggtatttctggtttaattgctgactacagtattaccgcccagacacgacatgaagaaaatggcggggatgacag

SEQ ID NO: 477811 - DNA, 75 bp, synthetic construct
  source 1..75: mol_type = other DNA
ggctggaggaagcccttattcgcggtgtgatccgcccgccgaaatcccgtttctcattctgggaggcccgttccg

SEQ ID NO: 477812 - DNA, 75 bp, synthetic construct
  source 1..75: mol_type = other DNA
ggttatggcatcggcgatcgttttatgcgtgccggagtggaaatcaaccgttacggaaaggcgatggcttatcat

SEQ ID NO: 477813 - DNA, 75 bp, synthetic construct
  source 1..75: mol_type = other DNA
cgatgccagcgacagcgaaatggtgcgcaccggcaacgacaaagagatgtacaccgccacctacaaccagaactt

SEQ ID NO: 477814 - DNA, 75 bp, synthetic construct
  source 1..75: mol_type = other DNA
ctcaactacacccgccatacctactgggatcgcgacgaacagaccaactacaacgtcatgctctcgcactacttc

SEQ ID NO: 477815 - DNA, 75 bp, synthetic construct
  source 1..75: mol_type = other DNA
tgaagagcagaacggccaggtgcaggaatatgacatcaacaccgcctcgatgccgttcctgacccgccccggcca

SEQ ID NO: 477816 - DNA, 75 bp, synthetic construct
  source 1..75: mol_type = other DNA
ctgcactgcccgttggtgtacctgttccgtggccgtcagcaacactgccagagggatggctgaaatgtaacggcg

SEQ ID NO: 477817 - DNA, 75 bp, synthetic construct
  source 1..75: mol_type = other DNA
tccagctcagtagcgccaccaacagcgattctgaaacgcttgcagcaacgccaaaggcggttaagacagcgtatg

SEQ ID NO: 477818 - DNA, 75 bp, synthetic construct
  source 1..75: mol_type = other DNA
gctcagtagcgccgccaacagtgattctgaaacgctggccgcaacaccaaaagcagtgaagtctgcctatgacaa

SEQ ID NO: 477819 - DNA, 75 bp, synthetic construct
  source 1..75: mol_type = other DNA
gctgaatccgcggcaacgcgtgccgaaacagcagcaaaacgggcagaggatattgctgatgccgtatctctggaa

SEQ ID NO: 477820 - DNA, 75 bp, synthetic construct
  source 1..75: mol_type = other DNA
gttgcggaaatatttgtcttgcaggtgctgtggtggaagttattggcactcgcggcgcaatgaccatacgcgtta

SEQ ID NO: 477821 - DNA, 75 bp, synthetic construct
  source 1..75: mol_type = other DNA
aactgcgcgacagggaacgaataatacccaaatcgcaagcacggctttcgttatggctgcgattgccgcccttgt

SEQ ID NO: 477822 - DNA, 75 bp, synthetic construct
  source 1..75: mol_type = other DNA
aaaaggcattgttcaactcagtaatgccaccaatagcacgtctgaaaagctcgcagcgacgcctaaggctgttaa

SEQ ID NO: 477823 - DNA, 75 bp, synthetic construct
  source 1..75: mol_type = other DNA
cccggcagagacatggcagattgattttactgcccgtctggcggcaatggatgaacgccagcgccgcgaaaatat

SEQ ID NO: 477824 - DNA, 75 bp, synthetic construct
  source 1..75: mol_type = other DNA
cggcgtcattaccgatcttcgtccaaaaggtacgctgaacgagcaacaggccagtgatgcgctgaaaaaacacga

SEQ ID NO: 477825 - DNA, 75 bp, synthetic construct
  source 1..75: mol_type = other DNA
cggtaaaccgagccgggaacgccgtgcaaaaaaatggcgataccttgtccggcgggcttacttttgaaaacgact

SEQ ID NO: 477826 - DNA, 75 bp, synthetic construct
  source 1..75: mol_type = other DNA
attttacggggaatgatgttgccagcctggcaaccctgacaaaagttgggcgggatattcttgcgaaatcgaccg

SEQ ID NO: 477827 - DNA, 75 bp, synthetic construct
  source 1..75: mol_type = other DNA
cctggtatttacagtgttacaggaaaggcaacaaacggtccgatgctggacgctgctggggcgacattgcttggg

SEQ ID NO: 477828 - DNA, 75 bp, synthetic construct
  source 1..75: mol_type = other DNA
ggagttgccctgctgtacagttccgcgtgaattacaggaacggcggtattttttatcgttcagcgcgtgatggtt

SEQ ID NO: 477829 - DNA, 75 bp, synthetic construct
  source 1..75: mol_type = other DNA
tggtgtaaatattcaatgggattataccagtaatgccagcgtgacgattcatacgtcaccagcatattctgctaa

SEQ ID NO: 477830 - DNA, 75 bp, synthetic construct
  source 1..75: mol_type = other DNA
cgcatggtcatcatcgtcagcagtgtgacctcagtggcgctgaccattgacaccacaacggtgatggcgacgcag

SEQ ID NO: 477831 - DNA, 75 bp, synthetic construct
  source 1..75: mol_type = other DNA
caatacgcagggggcaacaggtcttgagttatacgaggtgtataacaacggatatccaacagcgtatggaaatat

SEQ ID NO: 477832 - DNA, 75 bp, synthetic construct
  source 1..75: mol_type = other DNA
gagactgtttttgttgctccgggtaatgcaggcactgcactggaacccgcgctgcaaaacgttgctattggcgtg

SEQ ID NO: 477833 - DNA, 75 bp, synthetic construct
  source 1..75: mol_type = other DNA
cagcgttacactaccagtcgtggaaatatgtatgtacgctgccttaccgcaagctgggatgcatcaaatccgcag

SEQ ID NO: 477834 - DNA, 75 bp, synthetic construct
  source 1..75: mol_type = other DNA
tggcctcagtggcgctgaccattgacaccacaacggtgatggcaacgcaggattatgttgatgacaaaattgcag

SEQ ID NO: 477835 - DNA, 75 bp, synthetic construct
  source 1..75: mol_type = other DNA
gggtctataacgcaaacattggtggcgcatcgacattaatcctccacttcaatatgaatacggggagctgccctg

SEQ ID NO: 477836 - DNA, 75 bp, synthetic construct
  source 1..75: mol_type = other DNA
tggcgatgatccggcagtattcagaccaatacaaaagttaattaacggaacatggtataacgtatcgcaggtata

SEQ ID NO: 477837 - DNA, 75 bp, synthetic construct
  source 1..75: mol_type = other DNA
agcgcgagatggttatggatttgaggctgactggtcagagttttataccacaacacgcaagccatcagcaggaga

SEQ ID NO: 477838 - DNA, 75 bp, synthetic construct
  source 1..75: mol_type = other DNA
catagcgcgaaaaggccttgtccagctcagtagtgccaccaacagcacgtctgaaacgctcgccgcaacgccgaa

SEQ ID NO: 477839 - DNA, 75 bp, synthetic construct
  source 1..75: mol_type = other DNA
tggcgataaatttgggacatggaacggcttaagaccgctgactatcaataacgccaatggcggagtgtcaatggg

SEQ ID NO: 477840 - DNA, 75 bp, synthetic construct
  source 1..75: mol_type = other DNA
tcccggaaattatggcaattttgactcacgctatgtgagagatgtccgacttggcacacgtgttgttcaattgat

SEQ ID NO: 477841 - DNA, 75 bp, synthetic construct
  source 1..75: mol_type = other DNA
cacagactgaaaccgggattactacaccggctgaaacctggcagattgatttcacggcgcgtatggccggaatgg

SEQ ID NO: 477842 - DNA, 75 bp, synthetic construct
  source 1..75: mol_type = other DNA
cagcctgatgccatcaataacccgacgttacgggaaaagctattcacctttgaggtggatattctgcgcaacgat

SEQ ID NO: 477843 - DNA, 75 bp, synthetic construct
  source 1..75: mol_type = other DNA
gcaacatccaccaacgcaacactggagaaaaatttcccggaagataatgctgtcggtgtgcttgaggtttttgct

SEQ ID NO: 477844 - DNA, 75 bp, synthetic construct
  source 1..75: mol_type = other DNA
agctgacagagcgcgtactggtcagcactgacggcactgtgtccagtgttgaagctgtagcggaacccgatgaac

SEQ ID NO: 477845 - DNA, 75 bp, synthetic construct
  source 1..75: mol_type = other DNA
aagaatatcccggaacccccgccgccggagccggtcacccgcccggtggagctttatatcaatggcgaactggtg

SEQ ID NO: 477846 - DNA, 75 bp, synthetic construct
  source 1..75: mol_type = other DNA
cagccggacattatgaccaccgacgacgggcgggaaaaaggattcacctggattattgatatcaataacgacgat

SEQ ID NO: 477847 - DNA, 75 bp, synthetic construct
  source 1..75: mol_type = other DNA
caggggcaagaaattattgccggtaacttccgcgcccttgagatctggagcgccgtggcggtgttctatctgatt

SEQ ID NO: 477848 - DNA, 75 bp, synthetic construct
  source 1..75: mol_type = other DNA
tgcccccacggcagcaaaaggggtcaacaacacccagatagcgacaaccgcttacgtgatggcagcaatcgctaa

SEQ ID NO: 477849 - DNA, 75 bp, synthetic construct
  source 1..75: mol_type = other DNA
aggcgctgggagatgacccaaacttttctgccaccatgacaaaggcactggccggaaagcaaccccttgacgcca

SEQ ID NO: 477850 - DNA, 75 bp, synthetic construct
  source 1..75: mol_type = other DNA
gtgcatatgtgactggtgcagtaaccgcttttttcggtgctataaccatcaatgacgttgcagtgttcgttggta

SEQ ID NO: 477851 - DNA, 75 bp, synthetic construct
  source 1..75: mol_type = other DNA
gtgaacaaaccacaatccctgcgccacgccctcaataaagcagtgccttatgtccgcaataacccggacaaactg

SEQ ID NO: 477852 - DNA, 75 bp, synthetic construct
  source 1..75: mol_type = other DNA
cgcaattatccagaggaaggcggctttgctcaggggatgcttgagatcctcgaaggcggaaattatggaagaacg

SEQ ID NO: 477853 - DNA, 75 bp, synthetic construct
  source 1..75: mol_type = other DNA
aaacttattcgtgaggtctggcgcggcacaccaaataaggtcgttcaggacagcaaaaaaccaaaccagattatt

SEQ ID NO: 477854 - DNA, 75 bp, synthetic construct
  source 1..75: mol_type = other DNA
gtgaacaaaccacaatccctgcgccacgccctcaataaagcggtgccttatgtccgcaataacccggacaaacta

SEQ ID NO: 477855 - DNA, 75 bp, synthetic construct
  source 1..75: mol_type = other DNA
atgcagaagcacaaaagcctgcgcaaagcactgattaacgccgtgccgcagctccgaaacaaccccgatatgctg

SEQ ID NO: 477856 - DNA, 75 bp, synthetic construct
  source 1..75: mol_type = other DNA
tgaggtggacggcgcgctgcatgtgaagaatatcccggaacccacgccgccggagccggccacccgcccgatgga

SEQ ID NO: 477857 - DNA, 75 bp, synthetic construct
  source 1..75: mol_type = other DNA
ccagcctgactgaacgtctggttgctgcccagcgccacaccgaaaacgaagagaaagtaaaagatagcctgaaag

SEQ ID NO: 477858 - DNA, 75 bp, synthetic construct
  source 1..75: mol_type = other DNA
gtgggtaaagcagggcaacgctggacaacagaacagttcgtggaatggctgaatgagcgcggtgcattcagaacg

SEQ ID NO: 477859 - DNA, 75 bp, synthetic construct
  source 1..75: mol_type = other DNA
ccgtatctggctgaatgtgtggtggaccggtacgctcaccagtgaatggacgacagagcacgaaatcataacagc

SEQ ID NO: 477860 - DNA, 75 bp, synthetic construct
  source 1..75: mol_type = other DNA
cactgacggcagtgtgtcgagcgttgaagcggtagcagaacccgatgaacctgaagaaatgtggacggtgaaacg

SEQ ID NO: 477861 - DNA, 75 bp, synthetic construct
  source 1..75: mol_type = other DNA
ggtgtattaagcacttcgaccgctgggtagacggtaaaatcaaatccggttttgagatgctggtgaataacttct

SEQ ID NO: 477862 - DNA, 75 bp, synthetic construct
  source 1..75: mol_type = other DNA
ctaccatgggcgttatcgtcggcgcagacatgccgatgttcctcggttctatgattgcaggtccgctgggcggct

SEQ ID NO: 477863 - DNA, 75 bp, synthetic construct
  source 1..75: mol_type = other DNA
aacgtggtggtgaccggcttcaccggtgaccttgatttgatattcgtgccggtgcaggcgtggctgcgtgaacat

SEQ ID NO: 477864 - DNA, 75 bp, synthetic construct
  source 1..75: mol_type = other DNA
ctgggtattcagcagtcccatgaactgggtaaatccatattcttcctgattgaagctaacccaggtcctggtatg

SEQ ID NO: 477865 - DNA, 75 bp, synthetic construct
  source 1..75: mol_type = other DNA
ccacaatgggcgttatcgtcggcgcagatatgccgatgttcctcggttctatgattgcaggtccgctgggcggct

SEQ ID NO: 477866 - DNA, 75 bp, synthetic construct
  source 1..75: mol_type = other DNA
ggcgtgctgctggcgtacatgttctttggtcgtggtagtgctaaacagtctgcgggcggtgcggcaatcatccac

SEQ ID NO: 477867 - DNA, 75 bp, synthetic construct
  source 1..75: mol_type = other DNA
agcgacggcactttatcgtggttagggaacgccttgttctggatgccgctaccggaaccgccgcaggaggtgaat

SEQ ID NO: 477868 - DNA, 75 bp, synthetic construct
  source 1..75: mol_type = other DNA
cggtaattccggatagttggataagctgtagtgagcgaatgccccctcaagatgattggattttaatttattcaa

SEQ ID NO: 477869 - DNA, 75 bp, synthetic construct
  source 1..75: mol_type = other DNA
atgtaagacaaaaagtgggtgaaaaatttaatgtctggcttgagcctgaagtccgctttattggtgcatcaggtg

SEQ ID NO: 477870 - DNA, 75 bp, synthetic construct
  source 1..75: mol_type = other DNA
tgatgcggatttaggtaatcgctatttcggtaccgtcaccgaggcgttagaacttgatactgccaagaatggtta

SEQ ID NO: 477871 - DNA, 75 bp, synthetic construct
  source 1..75: mol_type = other DNA
ggcattaaaggtcgcaatgcgcaactatccggtaactccggatggttggataagctgtagtgagcgaatgcccgc

SEQ ID NO: 477872 - DNA, 75 bp, synthetic construct
  source 1..75: mol_type = other DNA
tggatggcatagagcggagcgacgccatgcttcatggtgccaaacctgtaagccagacttacaagttgaacaagc

SEQ ID NO: 477873 - DNA, 75 bp, synthetic construct
  source 1..75: mol_type = other DNA
gaacaacaattactcaatgcctggcagtatgcaaccgcagaaggacaacccgttcttattctgggtgaaggaagt

SEQ ID NO: 477874 - DNA, 75 bp, synthetic construct
  source 1..75: mol_type = other DNA
atgaccacatttaccgacaaagaactgattaaagaaatcaaagagcgcataggcagtctggatgtgcgagacaat

SEQ ID NO: 477875 - DNA, 75 bp, synthetic construct
  source 1..75: mol_type = other DNA
cagcagcctggaggttcgagacgatattgagcgccgtgcttatgaaattgctctggcatcgctggaagaggagcc

SEQ ID NO: 477876 - DNA, 75 bp, synthetic construct
  source 1..75: mol_type = other DNA
gtaacgccacagcaagtatttaatgcggtgtgtcatatgcgcaccaccaaactccctgatccaaaagtgaatggc

SEQ ID NO: 477877 - DNA, 75 bp, synthetic construct
  source 1..75: mol_type = other DNA
ccaggatcgcttcgccattgtagccgtaggtctgcgtctgccaaaagagtggcaacctgtactaacgtatggtga

SEQ ID NO: 477878 - DNA, 75 bp, synthetic construct
  source 1..75: mol_type = other DNA
caaaggtatcgaaattcatgatgaacctgatgcgtggtatttacatgtaggagccggagaaaactggcatcgcct

SEQ ID NO: 477879 - DNA, 75 bp, synthetic construct
  source 1..75: mol_type = other DNA
gcaacgattaagccgggtaatggtattgagcaggcaactcactggatgccgctaccggaaccaccgcaggaggtg

SEQ ID NO: 477880 - DNA, 75 bp, synthetic construct
  source 1..75: mol_type = other DNA
acaaaatgttccaacgggaacaatgcagggcagaggccgcagagaagcgcattgcagagttagaaagtggttctc

SEQ ID NO: 477881 - DNA, 75 bp, synthetic construct
  source 1..75: mol_type = other DNA
gacggaaacagggttcaggaatacgttaagctggaacggttgcagaatgcgctgtctggcaactctccggtaact

SEQ ID NO: 477882 - DNA, 75 bp, synthetic construct
  source 1..75: mol_type = other DNA
cggcagtgcctttgccggattaagcgccaactctccgttctggaactgtttactggcgttctgcatgtttgtcgg

SEQ ID NO: 477883 - DNA, 75 bp, synthetic construct
  source 1..75: mol_type = other DNA
tgcactggcgattctggttaccccgacgctggtgctgatgggcgcggcgctggcaatgatgaccgacgccggacg

SEQ ID NO: 477884 - DNA, 75 bp, synthetic construct
  source 1..75: mol_type = other DNA
tgatagccctgttttttattcaacaaggtgcgctgcaaaactttctgccttatcaggctgtgacaaccgttgaag

SEQ ID NO: 477885 - DNA, 75 bp, synthetic construct
  source 1..75: mol_type = other DNA
cttacaagttgaacgagctgtcgggcaactctccggtaactccggatggttggataagctgtagtgagcgaatgc

SEQ ID NO: 477886 - DNA, 75 bp, synthetic construct
  source 1..75: mol_type = other DNA
aaattccaatattgtagaaaaagttgatgatgaccgtattgaggctgttaaggctgttttgcgtagactggctgg

SEQ ID NO: 477887 - DNA, 75 bp, synthetic construct
  source 1..75: mol_type = other DNA
cggtgggtgcggctgcataaagcatgtaattttctggcagatataacaccgctttataccgccaagccagtgccg

SEQ ID NO: 477888 - DNA, 75 bp, synthetic construct
  source 1..75: mol_type = other DNA
ttgacgtaggcaaacaaaagttcgtacaggccattggagagcttcctgactttggcggatatctatttgccgccc

SEQ ID NO: 477889 - DNA, 75 bp, synthetic construct
  source 1..75: mol_type = other DNA
aacatacggaccgggtagcaacgttgtactgccagcagaagaagcggaagaactggcacgaattgcactggtatc

SEQ ID NO: 477890 - DNA, 75 bp, synthetic construct
  source 1..75: mol_type = other DNA
aggcgttatatcaaccggctgtcggatgcgctgttctccatggccagaatcgaagaaactactccagatgtttgc

SEQ ID NO: 477891 - DNA, 75 bp, synthetic construct
  source 1..75: mol_type = other DNA
aagaaaaaccaatgcccaaccctcttaaaatgtacgcggtcgatgctgttgccgctattgcagaggtgagaggct

SEQ ID NO: 477892 - DNA, 75 bp, synthetic construct
  source 1..75: mol_type = other DNA
tattgcgctggtggcgatggctatcgcgctgctgtctacgctttacccttcctggcgcgctgccgccactcaacc

SEQ ID NO: 477893 - DNA, 75 bp, synthetic construct
  source 1..75: mol_type = other DNA
gtgatcaaatccgcgtgatggtgccatctgccagccagttcacgccgatggggcgtattccaagccagcgcctgt

SEQ ID NO: 477894 - DNA, 75 bp, synthetic construct
  source 1..75: mol_type = other DNA
atcatctggccaaccgtgaaaggtatggcggcggaaggcaacacctacaccggttttctctatgcgggcctgatg

SEQ ID NO: 477895 - DNA, 75 bp, synthetic construct
  source 1..75: mol_type = other DNA
gcaacgattaagtcgggtaatggtattgagcaagcaactcactggatgccgctaccggaaccgccgcaggaggtt

SEQ ID NO: 477896 - DNA, 75 bp, synthetic construct
  source 1..75: mol_type = other DNA
ccttcgaagggtattacgattgttcgagaaacaaatggtgggcagttactgacaatggggaagaaccggcatcga

SEQ ID NO: 477897 - DNA, 75 bp, synthetic construct
  source 1..75: mol_type = other DNA
aggcagcaaatggcaggactggcgtgaccgtaaaggcgagctgttccaggccgtacgaatggaaaaaaatatgat

SEQ ID NO: 477898 - DNA, 75 bp, synthetic construct
  source 1..75: mol_type = other DNA
tgacgctcgaagaagcggaagccgccgtgcaggatatgctggcgggtaatgcctttggcgatgcaggccaccgca

SEQ ID NO: 477899 - DNA, 75 bp, synthetic construct
  source 1..75: mol_type = other DNA
accgatatcccggcgctgctggatttcgcgcaaaacgaaaaggtagatctaaccatcgtcggcccggaagcgccg

SEQ ID NO: 477900 - DNA, 75 bp, synthetic construct
  source 1..75: mol_type = other DNA
aagattttctcgcgcgtcatcagatcccgacggcggaatatcagaactttaccgaagttgagcctgcgctggcct

SEQ ID NO: 477901 - DNA, 75 bp, synthetic construct
  source 1..75: mol_type = other DNA
aaccatcgtcggcccggaagcgccgctggtgaaaggcgtggttgataccttccgcgccgccgggctgaaaatctt

SEQ ID NO: 477902 - DNA, 75 bp, synthetic construct
  source 1..75: mol_type = other DNA
ctgcgcatgaagtccgatctggttgaactctgcctggcagcctgtgaaggcaagctggacgagaaaacatccgag

SEQ ID NO: 477903 - DNA, 75 bp, synthetic construct
  source 1..75: mol_type = other DNA
aataccggcggtatgggcgcttactctcctgcgccggtagtgaccgatgacgttcatcagcgcaccatggaacgt

SEQ ID NO: 477904 - DNA, 75 bp, synthetic construct
  source 1..75: mol_type = other DNA
agatcgcgatgctgatttgcgctggattcatggcgttatagttcaggcagcgtggtttgtaaaagcatcactgga

SEQ ID NO: 477905 - DNA, 75 bp, synthetic construct
  source 1..75: mol_type = other DNA
taatttattcaaagcacggcgagtatatggcaggacaggtacaaggggaatacgtggagttgagcgacggcactt

SEQ ID NO: 477906 - DNA, 75 bp, synthetic construct
  source 1..75: mol_type = other DNA
cgttaccattaacaaatatgccagtcagttggcagtagagccggtagtgcctgctgttctggaacgtttgcgaac

SEQ ID NO: 477907 - DNA, 75 bp, synthetic construct
  source 1..75: mol_type = other DNA
ggcatgtgcagcgccagcagaaattgaaggaacaggtcgatacgcgcgtcgcggcggcgatagagaaaaaaggga

SEQ ID NO: 477908 - DNA, 75 bp, synthetic construct
  source 1..75: mol_type = other DNA
tattgatggtgtatttcaacctttgagatatgagcgtgactgtgaaaaagcggttgtggccgctggcggtgtagt

SEQ ID NO: 477909 - DNA, 75 bp, synthetic construct
  source 1..75: mol_type = other DNA
ttcaacaatctgaaaggttgcttctatgaggcattaaaggtcgcaatgcgcaactatccggtaactccggatggt

SEQ ID NO: 477910 - DNA, 75 bp, synthetic construct
  source 1..75: mol_type = other DNA
tggatggcatagagcggagcgacgccatgcttcatggtgccgaacctgtaagccagacttacaagttgaacgagc

SEQ ID NO: 477911 - DNA, 75 bp, synthetic construct
  source 1..75: mol_type = other DNA
accaatgcctaaccctcttagcatgtacacagttgatgctgttgcagctattgcagaggtgagaggctggaacgc

SEQ ID NO: 477912 - DNA, 75 bp, synthetic construct
  source 1..75: mol_type = other DNA
gaaaagatgaaaaagaaagatcgcgatgctgatttgcgctggattcatggcgttatagttcaggcagcgtggttt

SEQ ID NO: 477913 - DNA, 75 bp, synthetic construct
  source 1..75: mol_type = other DNA
agctgtagtgagcgaatgccggataccaaaacagccgttcttgttgccagggagtttgacaggaaaggtgactgg

SEQ ID NO: 477914 - DNA, 75 bp, synthetic construct
  source 1..75: mol_type = other DNA
caaagggaaatccactgccgcgtttggtactgtgacgcgcgcggtgggtcatggcaaaacggtgggggttgcgca

SEQ ID NO: 477915 - DNA, 75 bp, synthetic construct
  source 1..75: mol_type = other DNA
aagcacttgtgatgctgatttaggtaatcgctatttcggcaccgtcaccgaggcgttagaacttgatacagccaa

SEQ ID NO: 477916 - DNA, 75 bp, synthetic construct
  source 1..75: mol_type = other DNA
ccgggtcgtttacctggtggctttaccattgaggatgcgaaggaattacatgaaaacctggtacgcagccacata

SEQ ID NO: 477917 - DNA, 75 bp, synthetic construct
  source 1..75: mol_type = other DNA
ggctactggaccgataaatatccgatgccgtggtcgttgccaattggcatgtgcttcaccttaagcgggctggta

SEQ ID NO: 477918 - DNA, 75 bp, synthetic construct
  source 1..75: mol_type = other DNA
accttttatctaatgcaaaaattcggattatctatccagaatgcccagcttcatctgtttgccttcctgtttgcc

SEQ ID NO: 477919 - DNA, 75 bp, synthetic construct
  source 1..75: mol_type = other DNA
ggtgctggcgcaaatcagccgttggtactcggcacagcaccgaatgaataagggcaaacccaaagcaacgattat

SEQ ID NO: 477920 - DNA, 75 bp, synthetic construct
  source 1..75: mol_type = other DNA
tgtccagaagtgggagcgtgtctgcgccgcgctgcgtgagttgaacaagcacagggatattgtacgacagattac

SEQ ID NO: 477921 - DNA, 75 bp, synthetic construct
  source 1..75: mol_type = other DNA
aatcagcaaaggtcgtctgattcgtgttaatcagaacggtaaatttcgttactgcatgccgggcggtaatttacc

SEQ ID NO: 477922 - DNA, 75 bp, synthetic construct
  source 1..75: mol_type = other DNA
agattccgttaatctagttgggataatgttgaataacgggaagtatcttagctttattcgaactgatggtggtgt

SEQ ID NO: 477923 - DNA, 75 bp, synthetic construct
  source 1..75: mol_type = other DNA
caaaaatttggattatctatccagaatgcccagcttcatctgtttgcctttctatttgccgttgctgcaggaacc

SEQ ID NO: 477924 - DNA, 75 bp, synthetic construct
  source 1..75: mol_type = other DNA
ctttttcaggggaaaatgtttcgatttatgaagggaagttgaaactggcattaacagctatgcgggaaaataaag

SEQ ID NO: 477925 - DNA, 75 bp, synthetic construct
  source 1..75: mol_type = other DNA
ccgcgacgattgaacaacgcggaccacaaacggcggatgaactggctacattgtttggtaccacatcacgcaaag

SEQ ID NO: 477926 - DNA, 75 bp, synthetic construct
  source 1..75: mol_type = other DNA
ttatgcagattgggatgattaccctcacctttcagctcgcctcttcgctgctgcaaccggtagtcggctactgga

SEQ ID NO: 477927 - DNA, 75 bp, synthetic construct
  source 1..75: mol_type = other DNA
atggcaatgagtgaacaaacccagcctgcggcgggcgcggctgcatcgaccactaaggctcgtacatcatttggt

SEQ ID NO: 477928 - DNA, 75 bp, synthetic construct
  source 1..75: mol_type = other DNA
gtttgccttcctgtttgccgttgcggcaggtacggtgatcggcgggcctgtaggggataaaattggacggaaata

SEQ ID NO: 477929 - DNA, 75 bp, synthetic construct
  source 1..75: mol_type = other DNA
atgtatagcattaccgaaaaattaaactcaagatttaacactgcggttatattagctgttactgtctatattgtc

SEQ ID NO: 477930 - DNA, 75 bp, synthetic construct
  source 1..75: mol_type = other DNA
tatccggaaatgggagcgagtctgcgtcgcgctgcgggagctgaataaatatcgcgatattgtcgcccagctttg

SEQ ID NO: 477931 - DNA, 75 bp, synthetic construct
  source 1..75: mol_type = other DNA
acggtaaaattcgttactgcataccaggtgataatttaccagcagagccgaaagttgaatcggtagcggaaaccg

SEQ ID NO: 477932 - DNA, 75 bp, synthetic construct
  source 1..75: mol_type = other DNA
atgggagcgagtctgtgccgcgctgcgggagctgaataaatatcgcgatattgtcgcccagctttgccaggaggc

SEQ ID NO: 477933 - DNA, 75 bp, synthetic construct
  source 1..75: mol_type = other DNA
ggtaaagcctttcctcagccagccggtgttgcgttaccagtacaggaagcggcaacacaggaagagcgtgaaaaa

SEQ ID NO: 477934 - DNA, 75 bp, synthetic construct
  source 1..75: mol_type = other DNA
tgtgggaactgaaaagggctggcttcgttgataaaagcgtatacacctggcgtgtggctgataacaacgttcagc

SEQ ID NO: 477935 - DNA, 75 bp, synthetic construct
  source 1..75: mol_type = other DNA
aagtgggagcgtgtctgcgccgcgctgagggagctgaacaagcaccgggatattgtccgacagattgtcgattct

SEQ ID NO: 477936 - DNA, 75 bp, synthetic construct
  source 1..75: mol_type = other DNA
accacaaacggcggatgaactggctacattgttcggtaccacatcacgcaaagtggcttcaacgctggcaatggc

SEQ ID NO: 477937 - DNA, 75 bp, synthetic construct
  source 1..75: mol_type = other DNA
tatgggaactgaaaaatgctggttttgttgataaaagcgcgtacacctggcgtgtggctgataacaacgttcagc

SEQ ID NO: 477938 - DNA, 75 bp, synthetic construct
  source 1..75: mol_type = other DNA
tcacagccgtcgttcacaagaaagcatcaggatggtttgattttaccatcgctgcatgtggccaaccgcgagctg

SEQ ID NO: 477939 - DNA, 75 bp, synthetic construct
  source 1..75: mol_type = other DNA
accacaaacggctgatgagctggctacattgtttgataccacatcacgcaaagtggcttcaacgctggcaatggc

SEQ ID NO: 477940 - DNA, 75 bp, synthetic construct
  source 1..75: mol_type = other DNA
agcagagccgaaagttgaatcggtagcggaaactgatggtaaagcctttcctcagccagccggtgttgcgttacc

SEQ ID NO: 477941 - DNA, 75 bp, synthetic construct
  source 1..75: mol_type = other DNA
acgggaaatggtggtaaagcctttcctcagccatctggtgttgcgttaccagcgccggaagctgcaatacaggaa

SEQ ID NO: 477942 - DNA, 75 bp, synthetic construct
  source 1..75: mol_type = other DNA
tccagccttgctcgtgaagaaaatatgccggtaatagctgaaggtgttgaaactgaaagtcaggccagagaattg

SEQ ID NO: 477943 - DNA, 75 bp, synthetic construct
  source 1..75: mol_type = other DNA
acatgatttattggtggactattatgtcggcggcatgacttttatggcgcttgcacgtaagcatgggcgatctga

SEQ ID NO: 477944 - DNA, 75 bp, synthetic construct
  source 1..75: mol_type = other DNA
gcgtccgggtggcgtgctggttgccgtctgtctcaacgggccacgccagcaggagaagctgttaccgttttctga

SEQ ID NO: 477945 - DNA, 75 bp, synthetic construct
  source 1..75: mol_type = other DNA
taaccacgaagatgttacttggtcgtccattgctgccggatttaaggggttgattccgtcaaaggttaaatcacg

SEQ ID NO: 477946 - DNA, 75 bp, synthetic construct
  source 1..75: mol_type = other DNA
gaacaatcacgaagatgtgtcatgggcgtcaatcgctgctggttttaaaggattaatcccgccgaaagtgaaatc

SEQ ID NO: 477947 - DNA, 75 bp, synthetic construct
  source 1..75: mol_type = other DNA
ctgagggcataattgaagggatgttaatggcattagatatccggttagagatggatatcgttgttaataactcta

SEQ ID NO: 477948 - DNA, 75 bp, synthetic construct
  source 1..75: mol_type = other DNA
agcgctggggcgcgtgggtggctaataatcatgaggatgtgacctggtcgtccattgctgccggttttaagggat

SEQ ID NO: 477949 - DNA, 75 bp, synthetic construct
  source 1..75: mol_type = other DNA
atgcacagtcagttaagagaacgtatccggttgatgcgcgcaaggctggataacgtcgcgccggttgctaaaatc

SEQ ID NO: 477950 - DNA, 75 bp, synthetic construct
  source 1..75: mol_type = other DNA
taccgttttctgacatctgcgaggaactgccgcgcggcacgtttgcttatactgatgtgccgacgatgatgattc

SEQ ID NO: 477951 - DNA, 75 bp, synthetic construct
  source 1..75: mol_type = other DNA
ggcagggacacgattatcaggctcgcttattctggtattacgcatcttttttgaaagacagaacccggtcagatg

SEQ ID NO: 477952 - DNA, 75 bp, synthetic construct
  source 1..75: mol_type = other DNA
ccttttccctgttgcgtccgggtggcgtgctggtcgcagtctgtctcaacgggccacgccagcaggagaagctgt

SEQ ID NO: 477953 - DNA, 75 bp, synthetic construct
  source 1..75: mol_type = other DNA
gattcgggataccgcgccgggggccatgtgtgatgcggtggaaatcaacagcgggctggtccggtatctgcggga

SEQ ID NO: 477954 - DNA, 75 bp, synthetic construct
  source 1..75: mol_type = other DNA
ggcgacttcatggaatggcagccggtgcagtattacagccgggttatcatgaatccgccgttcagccacgggtag

SEQ ID NO: 477955 - DNA, 75 bp, synthetic construct
  source 1..75: mol_type = other DNA
gttgtgacgatgacgcgatgattatatgcgggtgtatggctcgccttaacaggaacaacagtgatctgcatgact

SEQ ID NO: 477956 - DNA, 75 bp, synthetic construct
  source 1..75: mol_type = other DNA
cccattgcctctggatttaaggggcttattccgccaaaggtaacgtcacgtccgcagtgctgcgacgatgatgcg

SEQ ID NO: 477957 - DNA, 75 bp, synthetic construct
  source 1..75: mol_type = other DNA
ggatacctgtattggcaagcgcctgcagaaagcggaaggggttattgatggcatgttgatgatgcttgatatccg

SEQ ID NO: 477958 - DNA, 75 bp, synthetic construct
  source 1..75: mol_type = other DNA
aaataatcatgaagatgtaacatggccctcgatagctgctggttttaaaggattaatcccgactaaagtgaaatc

SEQ ID NO: 477959 - DNA, 75 bp, synthetic construct
  source 1..75: mol_type = other DNA
tgatgggtttattggtaaaagactttataaagcggaaggtattattgaaggaatgcttatggctctgaatgttag

SEQ ID NO: 477960 - DNA, 75 bp, synthetic construct
  source 1..75: mol_type = other DNA
atggtgatatgcgggtgtatagcccgtctttaccggaacaaccgcgatttgcatgatttgctggttgattactac

SEQ ID NO: 477961 - DNA, 75 bp, synthetic construct
  source 1..75: mol_type = other DNA
aacgatggggggcatgggcggcaaataatcacgagaatgtgacctggtcgcccattgctgccggatttaaggggg

SEQ ID NO: 477962 - DNA, 75 bp, synthetic construct
  source 1..75: mol_type = other DNA
ttgttgggttggcaggatgctccagaaagctgagggcgtagtggagggtatgctgatggtgttggatctccgatt

SEQ ID NO: 477963 - DNA, 75 bp, synthetic construct
  source 1..75: mol_type = other DNA
aggatttgcacgatttgttggtggattattacgtaggtggaatgacttttatggggctggcacgaaagcatgggt

SEQ ID NO: 477964 - DNA, 75 bp, synthetic construct
  source 1..75: mol_type = other DNA
tgccggatttaagggactgatccccgaaaaagtaaaatcacgcccgcagtgctgtgacgatgatgcgatggtgat

SEQ ID NO: 477965 - DNA, 75 bp, synthetic construct
  source 1..75: mol_type = other DNA
agcgttggggtgcgtgggcggctaataatcatgaagatgtgacctggtcgtccattgccgccggttttaagggat

SEQ ID NO: 477966 - DNA, 75 bp, synthetic construct
  source 1..75: mol_type = other DNA
tccgttgctgccggatttaaggggattattccgccaaagataacatctcgtccgcagtgctgtgacgatgatgcg

SEQ ID NO: 477967 - DNA, 75 bp, synthetic construct
  source 1..75: mol_type = other DNA
gaaaaagtaaaatcacgtccactgtgttgtgacgatgacgcgatgattatatgcgggtgtatggctcgccttaac

SEQ ID NO: 477968 - DNA, 75 bp, synthetic construct
  source 1..75: mol_type = other DNA
gcgtggctggtgggtgaaagtgaaatgccgaccctgggtgcatttgaagctaataccacgttccagatcacctat

SEQ ID NO: 477969 - DNA, 75 bp, synthetic construct
  source 1..75: mol_type = other DNA
gggccagccaacacggataactatgcgttattcaacattgacaccggtgttgccatgaaccacgtgagcctggta

SEQ ID NO: 477970 - DNA, 75 bp, synthetic construct
  source 1..75: mol_type = other DNA
acaaaagcggcacggctatcgaacaaccgctgaccatggataccgccaccacgaaaggtaaaccgaaccagacgc

SEQ ID NO: 477971 - DNA, 75 bp, synthetic construct
  source 1..75: mol_type = other DNA
gcaggcaacaacggtaccgcgcgcttctacggcaccattgaagactccccgtgctctatcgttccagacgatcac

SEQ ID NO: 477972 - DNA, 75 bp, synthetic construct
  source 1..75: mol_type = other DNA
ggcaactcaaaaaactattccctgtctaacatggataatggaactgaaattccaaatgtaagtctggtgattggc

SEQ ID NO: 477973 - DNA, 75 bp, synthetic construct
  source 1..75: mol_type = other DNA
ttgcagcagcaatggtcatgggagcattcacttcaacttcttcttttgctgaaggcaacaacggtactgcgcgtt

SEQ ID NO: 477974 - DNA, 75 bp, synthetic construct
  source 1..75: mol_type = other DNA
cagtccggacgccggtatatcggtatcgagctgcttgaacagtatcaccgtgccggacagcaacgcctggctgcc

SEQ ID NO: 477975 - DNA, 75 bp, synthetic construct
  source 1..75: mol_type = other DNA
caccgtgccggacagcaacggctggccgccgtgcatcgggccatgcagcagggggccgcgaatgattactggttt

SEQ ID NO: 477976 - DNA, 75 bp, synthetic construct
  source 1..75: mol_type = other DNA
caccgtgccggacagcaacgcctggccgccgttcaccgggccatgcagcagggggccgcgaatgattactggttt

SEQ ID NO: 477977 - DNA, 75 bp, synthetic construct
  source 1..75: mol_type = other DNA
agttactcacgaagacctggtgaaaaacaggcctcgctcccctgtcagaccacctatacccgcaaccgccaaaac

SEQ ID NO: 477978 - DNA, 75 bp, synthetic construct
  source 1..75: mol_type = other DNA
cggaagtccatccccgggaggtaattaaacgtgccctgtaccacaatgccgctgccgtggtgctggcgcacaatc

SEQ ID NO: 477979 - DNA, 75 bp, synthetic construct
  source 1..75: mol_type = other DNA
aactggcgttgaactggagactgaacgttttgagcagacggtgcgggaagtacaggatttaatcattcgtaacgg

SEQ ID NO: 477980 - DNA, 75 bp, synthetic construct
  source 1..75: mol_type = other DNA
ccatgaaaacacccgttaccgtgctttctgacatgctgcgcgccatccgcgacgcagagcacgcacagagaatca

SEQ ID NO: 477981 - DNA, 75 bp, synthetic construct
  source 1..75: mol_type = other DNA
ctcttcctatctgagcgcagcctcattcaacgggccctgaaaaccctggaccgccatcttcatgaacccggcgtg

SEQ ID NO: 477982 - DNA, 75 bp, synthetic construct
  source 1..75: mol_type = other DNA
acgcgcccaccgcaaagcagacctgctgcggggtagcctgaccagtggaaacaaaaaaacagacagaaacgggat

SEQ ID NO: 477983 - DNA, 75 bp, synthetic construct
  source 1..75: mol_type = other DNA
acaggaaaaacaggacaaaaccatcgcactggcaggagacgccagaaaacaggcacgcggcgcggtggatgaagc

SEQ ID NO: 477984 - DNA, 75 bp, synthetic construct
  source 1..75: mol_type = other DNA
cattctcattggtcatttgattgacttcttattcttagaaagcccggatgtaactattcatattgaacggataaa

SEQ ID NO: 477985 - DNA, 75 bp, synthetic construct
  source 1..75: mol_type = other DNA
aaaaaacccgtaaacagcattcgcctgagtttcgcagtgaagccctgaagcttgctgaacgcatcggtgttgctg

SEQ ID NO: 477986 - DNA, 75 bp, synthetic construct
  source 1..75: mol_type = other DNA
tgccggaagtgatcaataaaacaggatttagcaaagcatggatctatagacttattagtaagggggatttcccta

SEQ ID NO: 477987 - DNA, 75 bp, synthetic construct
  source 1..75: mol_type = other DNA
accttcgagacactctgcgatggctttggcgcgaccgatggtgagctgaccatggaagtggcgctgaaggcgtat

SEQ ID NO: 477988 - DNA, 75 bp, synthetic construct
  source 1..75: mol_type = other DNA
tcgctgccgctgatgccgggtgttttgcctcctacattgaaaaacagggtggcgtacttgttccacgcaaagact

SEQ ID NO: 477989 - DNA, 75 bp, synthetic construct
  source 1..75: mol_type = other DNA
agctgaccatggatgtaatgttgaaggcttaccggatgctggcccgtatcgcattacgcctgcacatcatgccgc

SEQ ID NO: 477990 - DNA, 75 bp, synthetic construct
  source 1..75: mol_type = other DNA
ggcaacaaccacgccatgcagtcggtggcgagggaacgggggagcctgtccgcccctcccttctttcttcctggc

SEQ ID NO: 477991 - DNA, 75 bp, synthetic construct
  source 1..75: mol_type = other DNA
tctggcagcgcctgagccgtaatcacggcgtaagcagcacggagatccgccataacccggtcgccagctatctgg

SEQ ID NO: 477992 - DNA, 75 bp, synthetic construct
  source 1..75: mol_type = other DNA
aaaaaacagacagaaacgggattcacaaatcccataaatgagcaaaaaaacgcgccgcgatatatgaagcgcgca

SEQ ID NO: 477993 - DNA, 75 bp, synthetic construct
  source 1..75: mol_type = other DNA
caccgtgccggacagcaacgtctggccgccgtccaccgggccatgcagcagggggccgcgaatgattactggttt

SEQ ID NO: 477994 - DNA, 75 bp, synthetic construct
  source 1..75: mol_type = other DNA
aatcagtaaaggtcgtctgattcgcgttaatcaggacggtaaatttcgttactgcataccgggcgctgatttacc

SEQ ID NO: 477995 - DNA, 75 bp, synthetic construct
  source 1..75: mol_type = other DNA
agtcgtgaagaagtgctgaacgaactatgggaactgaaaaaagctggtttcgttgataaaagcgcgtacacctgg

SEQ ID NO: 477996 - DNA, 75 bp, synthetic construct
  source 1..75: mol_type = other DNA
gtgtggcggtcacagtgcagtcacagccgtcgttcaccagaaaacatccggatggtctgattttaccatcgctgc

SEQ ID NO: 477997 - DNA, 75 bp, synthetic construct
  source 1..75: mol_type = other DNA
aagcaatggggaaagccacgtcgacagaactggctgcgcgacttgatatcagtcgtgaagaagtgctgaacgagc

SEQ ID NO: 477998 - DNA, 75 bp, synthetic construct
  source 1..75: mol_type = other DNA
tgcgttaccagtccgggaagccgcaacacaggaagaaattaaaacagaaactgtggcggacattgtgcagtcgtt

SEQ ID NO: 477999 - DNA, 75 bp, synthetic construct
  source 1..75: mol_type = other DNA
ggtaaggcctttcctcagccagcaggtgctgcgttaccagtccgggaagccgcaacacaggaagaaattaaaaca

SEQ ID NO: 478000 - DNA, 75 bp, synthetic construct
  source 1..75: mol_type = other DNA
tgtgctgcgctgcgggaactgaacaagcaccgggatattgttcgacagattactgattcttctcgctgtgttgca

SEQ ID NO: 478001 - DNA, 75 bp, synthetic construct
  source 1..75: mol_type = other DNA
gagcgtgtctgtgctgcactacgtgagctgaataaacaccgggaacttgtcatgcagattaccgattcatccagc

SEQ ID NO: 478002 - DNA, 75 bp, synthetic construct
  source 1..75: mol_type = other DNA
ataatctgtcgcgagtgccggaagagtgaagttatgaaacgtgtactggcattttatcaaggaaatcttcggtat

SEQ ID NO: 478003 - DNA, 75 bp, synthetic construct
  source 1..75: mol_type = other DNA
aatttcgttactgcataccgggcgctgatttaccggcagagccggaagctgcatccgtagcggaaacggatggta

SEQ ID NO: 478004 - DNA, 75 bp, synthetic construct
  source 1..75: mol_type = other DNA
gagcgtgtctgcgccgcgctgcgggagctgaacaagcaccgggatattgttcgactgattgtcgattcctccagt

SEQ ID NO: 478005 - DNA, 75 bp, synthetic construct
  source 1..75: mol_type = other DNA
accacaaacggctgatgagctggctacattgtttggtaccacatcacgcaaagtggcttcaacactggcaatggc

SEQ ID NO: 478006 - DNA, 75 bp, synthetic construct
  source 1..75: mol_type = other DNA
ctgtggcggacatggtgcagtcgttaccatcgctcaccgaaacgcaaggggatgacctgattttaccatcgttgc

SEQ ID NO: 478007 - DNA, 75 bp, synthetic construct
  source 1..75: mol_type = other DNA
attcgtttcgaagctcttgccgtcggtgcaacattagcactagaggaagaacccaatttagttcctaaaaatatt

SEQ ID NO: 478008 - DNA, 75 bp, synthetic construct
  source 1..75: mol_type = other DNA
tgccagaatcagtcgtggagaatatccagaattggttcttagatattttgcctattgtgataactatcttaactt

SEQ ID NO: 478009 - DNA, 75 bp, synthetic construct
  source 1..75: mol_type = other DNA
gaactcaaaacctaaagttaaagcacgaattgaatatgtaagagataaacttttaggtgtacagactcaagatac

SEQ ID NO: 478010 - DNA, 75 bp, synthetic construct
  source 1..75: mol_type = other DNA
cgggccctgtaaaccctggaccgccatcttcatgaacccggcgtggccttcacctccacccgtgcggcacgggaa

SEQ ID NO: 478011 - DNA, 75 bp, synthetic construct
  source 1..75: mol_type = other DNA
tgaaagatatttccttgatcctgatttgatggtgcttggcaacacatcattacagggcatcgttgcctacggtgg

SEQ ID NO: 478012 - DNA, 75 bp, synthetic construct
  source 1..75: mol_type = other DNA
cggccctgaaaaatcttggggattccgtcagttttaagggttacgtaggcgatgtggctattgttgtgtatagcg

SEQ ID NO: 478013 - DNA, 75 bp, synthetic construct
  source 1..75: mol_type = other DNA
cgactgatgtatctggacctcgaatgtcatcaggggtgctatcgcctgcggaccggtgcaggtccgcagggtgaa

SEQ ID NO: 478014 - DNA, 75 bp, synthetic construct
  source 1..75: mol_type = other DNA
atggtgacaacgccacggacagctatgtgcgccagacacgcccgctgctggcccgcctttcctgttacagcagtc

SEQ ID NO: 478015 - DNA, 75 bp, synthetic construct
  source 1..75: mol_type = other DNA
cgtttcggagcaggacacaagggcggtactggcgcgtatggacgccattccggaggaacaacggcttgagtcggg

SEQ ID NO: 478016 - DNA, 75 bp, synthetic construct
  source 1..75: mol_type = other DNA
cgttttgaagcactggctgttggttcaactttagccttacaaactaatccaagcataacaccagccccagtaact

SEQ ID NO: 478017 - DNA, 75 bp, synthetic construct
  source 1..75: mol_type = other DNA
aacaagtgatcacagaagaagataaaattgaactggatagccagatcaaatccatgcaaaaaataaccgatcacc

SEQ ID NO: 478018 - DNA, 75 bp, synthetic construct
  source 1..75: mol_type = other DNA
atatagatgatagaagtttaggcaaaagaaattctaattcatttacagctatagtaccgtttgtcatttttcttt

SEQ ID NO: 478019 - DNA, 75 bp, synthetic construct
  source 1..75: mol_type = other DNA
gaaacgctgtttaacgcgccgcaacatccggtgacgcgcagcctggtttccgctcatctcgcgctttacggtatg

SEQ ID NO: 478020 - DNA, 75 bp, synthetic construct
  source 1..75: mol_type = other DNA
ctgcgcggcatcaaaattgccaccatcatgcagaacccgcgcagcgcctttaatccgctgcacaccatgcacacc

SEQ ID NO: 478021 - DNA, 75 bp, synthetic construct
  source 1..75: mol_type = other DNA
tggcaaaccggtttcgccttgcgccctgcgcggcatcaaaattgccaccatcatgcagaacccgcgcagcgcctt

SEQ ID NO: 478022 - DNA, 75 bp, synthetic construct
  source 1..75: mol_type = other DNA
tcccgtcaccatctggcagactctgctgtcccgcctgctggaccagcattacggccttacgctgaatgacacacc

SEQ ID NO: 478023 - DNA, 75 bp, synthetic construct
  source 1..75: mol_type = other DNA
atgaaaacattacctgtattacccgggcaggcggctagttctcgcccgtctcctgttgaaatctggcagatactg

SEQ ID NO: 478024 - DNA, 75 bp, synthetic construct
  source 1..75: mol_type = other DNA
atgccgcaacagattgaactacgtaatatcgcgctacaggccgcgcagccgctggtgcacggcgtatcgttaacc

SEQ ID NO: 478025 - DNA, 75 bp, synthetic construct
  source 1..75: mol_type = other DNA
gaaaacggggtgaccgagtggagtccgctgttcagcgagccgcatccttcccgtgagttttgtgtccagtacggc

SEQ ID NO: 478026 - DNA, 75 bp, synthetic construct
  source 1..75: mol_type = other DNA
gtattcggggttacctgactggcgaggtcatttgataagccaggaagatggctcgttccttgaaaccagtattcc

SEQ ID NO: 478027 - DNA, 75 bp, synthetic construct
  source 1..75: mol_type = other DNA
actgaaacggcacgaacgccgggcactgatgcgttcgctgcgtgacaaacaggcaaaaaacagcagtgatgaaat

SEQ ID NO: 478028 - DNA, 75 bp, synthetic construct
  source 1..75: mol_type = other DNA
gaaacgctgtttaacgcccccaaacatgcagtaacgcgcagtctggtttctgctcacctcgccctttatggtatg

SEQ ID NO: 478029 - DNA, 75 bp, synthetic construct
  source 1..75: mol_type = other DNA
aaacaaattgaacctgaaaaagcctttaccgctgaaattatttatatgcacggttcccttattgcacgtaaggag

SEQ ID NO: 478030 - DNA, 75 bp, synthetic construct
  source 1..75: mol_type = other DNA
accggcctgatgacccggaacaattacagaatggtaaataacattacccggggcaagcatccggaggcaaaacga

SEQ ID NO: 478031 - DNA, 75 bp, synthetic construct
  source 1..75: mol_type = other DNA
atgaacacattacccgacacacacgtacgggaggcatcgcgctgcccatctccagtaaccatctggcagacactg

SEQ ID NO: 478032 - DNA, 75 bp, synthetic construct
  source 1..75: mol_type = other DNA
gttgccagggactggcataaggcttgtaaaagaaaatggtcagattcccacagcgagagagttctaaaaagcatg

SEQ ID NO: 478033 - DNA, 75 bp, synthetic construct
  source 1..75: mol_type = other DNA
ccgccgggcaaccggcctgatgacccgcgacaattacagaacggtaaatgacattaccctgggcaggcatccgga

SEQ ID NO: 478034 - DNA, 75 bp, synthetic construct
  source 1..75: mol_type = other DNA
tatagaagatgatcatacaatttcatttaaaccgtttatagatagagtatttagatctgaacacggagattggat

SEQ ID NO: 478035 - DNA, 75 bp, synthetic construct
  source 1..75: mol_type = other DNA
gaacacattgatgccggtatcacgatggctgatgccgttaactttctggtggataagtacgagctggttcgtatc

SEQ ID NO: 478036 - DNA, 75 bp, synthetic construct
  source 1..75: mol_type = other DNA
acggcctcacactgaatgacacaccgttggccgatgaacgtgtgattgagcagcatattgaagcagggatttcac

SEQ ID NO: 478037 - DNA, 75 bp, synthetic construct
  source 1..75: mol_type = other DNA
acggcctcacactgaatgacacaccgttcgcggatgaacgtgtgattgagcagcatattgaagcagggatttcac

SEQ ID NO: 478038 - DNA, 75 bp, synthetic construct
  source 1..75: mol_type = other DNA
ctcacccgactgctggatcagcactacggccttacgctgaatgacacaccgttcgccgatgaacgtgtgattgag

SEQ ID NO: 478039 - DNA, 75 bp, synthetic construct
  source 1..75: mol_type = other DNA
agacaccgaacatgccaacgacagcatcagcccgatcttcgacaaggagaaagagcagaaccgcctgaaggaaat

SEQ ID NO: 478040 - DNA, 75 bp, synthetic construct
  source 1..75: mol_type = other DNA
aaaaccaagagttagaaatatagacaactatggtcgattgagaaaagtttcattatcagaaagaaattttttaaa

SEQ ID NO: 478041 - DNA, 75 bp, synthetic construct
  source 1..75: mol_type = other DNA
aaaaattttctgaaactgtttttcaacaacattattaccaatgtttacgattgctaagttatgaattagagaaac

SEQ ID NO: 478042 - DNA, 75 bp, synthetic construct
  source 1..75: mol_type = other DNA
cgttaatgcggcaaaaggcagcgagaaaggtaacggtactgagtggactgaaaccacgatagacagcggcaaaac

SEQ ID NO: 478043 - DNA, 75 bp, synthetic construct
  source 1..75: mol_type = other DNA
tgatattctccgggctcgccgggcaacaggtctgatgacccgcagcaactacagaacggtaaataacattacccg

SEQ ID NO: 478044 - DNA, 75 bp, synthetic construct
  source 1..75: mol_type = other DNA
gcctaaggacgataaggcatcggaagcgttagccgaaaagatgaacggcaaattccgcgctgactatcaggaaac

SEQ ID NO: 478045 - DNA, 75 bp, synthetic construct
  source 1..75: mol_type = other DNA
cttctttctttctggatttttcatttaatgcatataggcaggggctttcattctggtttgttctacttgccatag

SEQ ID NO: 478046 - DNA, 75 bp, synthetic construct
  source 1..75: mol_type = other DNA
aactggaagctggtaagacgcaaaccggaagcggaagacagcgcccgcgaaaatggttttgaccttcagggcggc

SEQ ID NO: 478047 - DNA, 75 bp, synthetic construct
  source 1..75: mol_type = other DNA
attcgaacgtctggaccgcaccgatcaccgctggctgacaccgggttatcgctcccttgccggacgcgaacgcct

SEQ ID NO: 478048 - DNA, 75 bp, synthetic construct
  source 1..75: mol_type = other DNA
ttactactgccacgcgcatcagatcacctcgtcattacaggaaatggcggtcggtctgtcgcaaatcatctccac

SEQ ID NO: 478049 - DNA, 75 bp, synthetic construct
  source 1..75: mol_type = other DNA
gcgagcataactaccagaatggcgatgacttcattagcccaacgacgcgtcaggcgatgaattatgggaaaatca

SEQ ID NO: 478050 - DNA, 75 bp, synthetic construct
  source 1..75: mol_type = other DNA
gttcgcccgggcgacgggcgtatcgcgtactggagcgccacaacccgccgtatcgtcatcacacaggagtcgtca

SEQ ID NO: 478051 - DNA, 75 bp, synthetic construct
  source 1..75: mol_type = other DNA
gcatacgaaaccgcagatgaggccaacgactacggcgaattcccgcagcgcatctacggaatttgtgccccgtcg

SEQ ID NO: 478052 - DNA, 75 bp, synthetic construct
  source 1..75: mol_type = other DNA
taattcgcaccttcaccacgacgaagagcgtcggatcagactggaaaaactggcgcggcacaaacgcgaaaatcc

SEQ ID NO: 478053 - DNA, 75 bp, synthetic construct
  source 1..75: mol_type = other DNA
cagaaaggcagccggacggacgcagggagcagagacttaccctgccggaaggtgatttgggtgaatggttaaggt

SEQ ID NO: 478054 - DNA, 75 bp, synthetic construct
  source 1..75: mol_type = other DNA
cgcacgaacgagggttttgacgttgagtgcggctttgccgcaccttggactcgtggcaataactgtccccctgac

SEQ ID NO: 478055 - DNA, 75 bp, synthetic construct
  source 1..75: mol_type = other DNA
tgacgccatactggccgccgccgacgtgggatgttttgccacctatatcacccgccagggtggtgtgctcattcc

SEQ ID NO: 478056 - DNA, 75 bp, synthetic construct
  source 1..75: mol_type = other DNA
aacagtcggaagagcaaccaacaccgtggacgcagatccctgacggcgttgatgtggatgagtggatgcgctcac

SEQ ID NO: 478057 - DNA, 75 bp, synthetic construct
  source 1..75: mol_type = other DNA
tatattgccattgagcaggcccgctttggcgacaagctgacggttatctatgatattgatgaagaggtgaattgc

SEQ ID NO: 478058 - DNA, 75 bp, synthetic construct
  source 1..75: mol_type = other DNA
cagatggcccgtaacccggctgccccgcagcgtctggaccatgacgacattgacgccatactggccgccgccgac

SEQ ID NO: 478059 - DNA, 75 bp, synthetic construct
  source 1..75: mol_type = other DNA
ggtgccgggtgcggtcatgcgtctttcctgcgcgaactggtggaacggtcagttaagacaccttcgcgacatctg

SEQ ID NO: 478060 - DNA, 75 bp, synthetic construct
  source 1..75: mol_type = other DNA
caaacacagacgaaggcaagcgaattaattcgcatcttcaccacgacgaagagcgtcggatcagactggaaaaac

SEQ ID NO: 478061 - DNA, 75 bp, synthetic construct
  source 1..75: mol_type = other DNA
tcatcacagtaaccaccccttcccgctttcacagcgtgaacgagaacggcagcctgaacccgaaatacaacggtg

SEQ ID NO: 478062 - DNA, 75 bp, synthetic construct
  source 1..75: mol_type = other DNA
cgacgtctttgcagctgcaagaaaaaaactcaacaaagaaggcctgagctggtacggggtgcgcaccgttgagcc

SEQ ID NO: 478063 - DNA, 75 bp, synthetic construct
  source 1..75: mol_type = other DNA
cgcaccgcatacgaaaccgccgaagaggccaacgactacggcgaatttccgcaacgtatttacggtgtccgtgca

SEQ ID NO: 478064 - DNA, 75 bp, synthetic construct
  source 1..75: mol_type = other DNA
gcacctggtccggcgtgcccgtagaaggctcgctggttaatgtgcgcattatcgcggtgatgtcaggcggaattc

SEQ ID NO: 478065 - DNA, 75 bp, synthetic construct
  source 1..75: mol_type = other DNA
ggctggatcaacctgaaaatccctaaagcgcagcgctggcgcgtcggtattctcggcggcatgttgtgtgaaacg

SEQ ID NO: 478066 - DNA, 75 bp, synthetic construct
  source 1..75: mol_type = other DNA
cagtattctggcgggatgtatatcgggctggatcaacctaaaaatccccaaagcgcagcgttggcgtgtcggtat

SEQ ID NO: 478067 - DNA, 75 bp, synthetic construct
  source 1..75: mol_type = other DNA
acgactacggcgaattcccgcagcgcatctacggaatttgtgccccgtcgctcggagaacgctacaccatctgca

SEQ ID NO: 478068 - DNA, 75 bp, synthetic construct
  source 1..75: mol_type = other DNA
acaatgaagaacgcatcattgaaatcatgcgtgatgcagcaatcaaatcagatcgcgcagaactggggaatgata

SEQ ID NO: 478069 - DNA, 75 bp, synthetic construct
  source 1..75: mol_type = other DNA
aatgccgggcaataaaattggcctgctgaatgtccatcatcgcgtgaagttattgtatggcgaggggctgcatat

SEQ ID NO: 478070 - DNA, 75 bp, synthetic construct
  source 1..75: mol_type = other DNA
cgatatcctccgggctcgccgggcaacaggcctgatgacccgcgacaattacataacggtaaataacattaccct

SEQ ID NO: 478071 - DNA, 75 bp, synthetic construct
  source 1..75: mol_type = other DNA
atgaaaacattacctgtattacccgggcaggcggccagttcacgcccgtctccggttgaaatctggcagacactg

SEQ ID NO: 478072 - DNA, 75 bp, synthetic construct
  source 1..75: mol_type = other DNA
cgcagggcgaccggcctgatgacccgcgacaattacagaacggtaaataacattaccctgggtaagtatccggag

SEQ ID NO: 478073 - DNA, 75 bp, synthetic construct
  source 1..75: mol_type = other DNA
taatcaacagcattgatattctccgggcccgccgggcaaccggcctgatgacccgcagccactacagaacggtaa

SEQ ID NO: 478074 - DNA, 75 bp, synthetic construct
  source 1..75: mol_type = other DNA
gcgaagatgcactccccacacctggtcccattgtcacgtcaggccatcgaactgctgcacgaggtgcggcagcat

SEQ ID NO: 478075 - DNA, 75 bp, synthetic construct
  source 1..75: mol_type = other DNA
cagcatattgaggcaggaatttcactgtgtgatgcagtgaattttctcgttgaaaaatacgcactggtacgtacc

SEQ ID NO: 478076 - DNA, 75 bp, synthetic construct
  source 1..75: mol_type = other DNA
agtggaaacaaaaaacagacagaaacgggactcacgaatcccgtaaatgagcaaaaaacgcgccgcgatatatga

SEQ ID NO: 478077 - DNA, 75 bp, synthetic construct
  source 1..75: mol_type = other DNA
gtggcaacggagtacatcagagactggcaacaaccacgccatgcagtcggtcgcgaggggacgggggagtctgtc

SEQ ID NO: 478078 - DNA, 75 bp, synthetic construct
  source 1..75: mol_type = other DNA
tgctgcgcgccatccgtgacgcagagcacgcacaacgcatcagcgcaaccacaaagcatgtacgccgcaaagctg

SEQ ID NO: 478079 - DNA, 75 bp, synthetic construct
  source 1..75: mol_type = other DNA
cagcatattgaggcaggcatttcactgtgcgatgcggtgaactttctcgtggaaaaatacgcactggtacgaacc

SEQ ID NO: 478080 - DNA, 75 bp, synthetic construct
  source 1..75: mol_type = other DNA
tgtgcgatgcggtgaactttctcgtggaaaaatacgcactggtacgaaccgaccagccggggttcagcacctgta

SEQ ID NO: 478081 - DNA, 75 bp, synthetic construct
  source 1..75: mol_type = other DNA
atgcgagcggaaccctgcgcaaaatattcgaacgtctggcccgcaccgaccgtcgctggctgactccgggttatc

SEQ ID NO: 478082 - DNA, 75 bp, synthetic construct
  source 1..75: mol_type = other DNA
tcccgtcaccatctggcagacactgctgtcccgactgctggaccagcattacggcctcacactgaatgacacacc

SEQ ID NO: 478083 - DNA, 75 bp, synthetic construct
  source 1..75: mol_type = other DNA
tcccatcaccatctggcagacactgcttggccgtctgctggaccagcactacggcctcacgctgaatgacacacc

SEQ ID NO: 478084 - DNA, 75 bp, synthetic construct
  source 1..75: mol_type = other DNA
attgatattctccgggcacgccgggcaacaggtctgatgacccgcagcaactacagaacggtaaataacattacc

SEQ ID NO: 478085 - DNA, 69 bp, synthetic construct
  source 1..69: mol_type = other DNA
atgaaaacattacctgacacacacgtacgggaggcatcgcgctgcccgtctcccgtcaccatctggcag

SEQ ID NO: 478086 - DNA, 75 bp, synthetic construct
  source 1..75: mol_type = other DNA
cagcatattgaagcaggcatttcactgtgcgatgcggtgaactttctcgttgaaaaatacgcactggtacgtacc

SEQ ID NO: 478087 - DNA, 75 bp, synthetic construct
  source 1..75: mol_type = other DNA
cagcatattgagacaggcatttcactgtgcgatgcggtgaactttctcgttgaaaaatacgcactggtacgtacc

SEQ ID NO: 478088 - DNA, 75 bp, synthetic construct
  source 1..75: mol_type = other DNA
cccgctctcagttaataaacagcatcgatatcctccgggctcgccgggcgaccggcctgatgacccgcgacaatt

SEQ ID NO: 478089 - DNA, 75 bp, synthetic construct
  source 1..75: mol_type = other DNA
cgatatcctccgggctcgccgggcgactggcctgatgacccgcgacaattaccgaacggtaaataacattaccct

SEQ ID NO: 478090 - DNA, 75 bp, synthetic construct
  source 1..75: mol_type = other DNA
ggcaggcggccggtttacgcccgtctccggttgaaatctggcagacactgcttaccagactgctggaccagcatt

SEQ ID NO: 478091 - DNA, 75 bp, synthetic construct
  source 1..75: mol_type = other DNA
tacgggaggtatctcgctgcccgtctcccgtcaccatctggcagacactgctcacccggttgctggaccagcact

SEQ ID NO: 478092 - DNA, 75 bp, synthetic construct
  source 1..75: mol_type = other DNA
cagcatattgaagctggcatttcactgtgtgatacggtgaactttctcgttgaaaaatacgcactgatacgtacc

SEQ ID NO: 478093 - DNA, 75 bp, synthetic construct
  source 1..75: mol_type = other DNA
agctaagtcaaacgtaactgttgagttagtgcagaaaggaaaggcttcaacgtcagtatggaacgccaatgacgg

SEQ ID NO: 478094 - DNA, 75 bp, synthetic construct
  source 1..75: mol_type = other DNA
ttcagcgcctgtacccgctctcagttaataaacagcatcgatatcctccgggctcgcagggcgaccggcctgatg

SEQ ID NO: 478095 - DNA, 75 bp, synthetic construct
  source 1..75: mol_type = other DNA
ggctgacaccgggttatcgctcccttgccggacgcgaacgcctggacgatttgctttacctgccgcagctcaaca

SEQ ID NO: 478096 - DNA, 75 bp, synthetic construct
  source 1..75: mol_type = other DNA
cctccgggctcgcggggcaactggcctgatgatcagcgacaattacagaacggtaaataacattaccctgggtaa

SEQ ID NO: 478097 - DNA, 75 bp, synthetic construct
  source 1..75: mol_type = other DNA
cctccgggctcgctgggcgactggcctgatgagcagcgacaattacagaacggtaaataacattaccctgggtaa

SEQ ID NO: 478098 - DNA, 75 bp, synthetic construct
  source 1..75: mol_type = other DNA
cctccgggctcgctgggccactggcctgatgaccagcgacaattacagaacggtaaataacattaccctgggtaa

SEQ ID NO: 478099 - DNA, 75 bp, synthetic construct
  source 1..75: mol_type = other DNA
catttttcatctctgcatatcaggaaaaccttcagtatgaaaacattacccgacacacacgtacgggcggcatcg

SEQ ID NO: 478100 - DNA, 75 bp, synthetic construct
  source 1..75: mol_type = other DNA
gatgttcagtaagattgaagtcaatggcgaaaggcggcatccgttgtaccaaaaactgattgccgctgcgccgac

SEQ ID NO: 478101 - DNA, 75 bp, synthetic construct
  source 1..75: mol_type = other DNA
agccgaaagatttgttggtgtcaaagtcagagttggtactgatggcggcgcaggatgaggtggagtcgggggagt

SEQ ID NO: 478102 - DNA, 75 bp, synthetic construct
  source 1..75: mol_type = other DNA
atacgcgctggtgcgtaccgaccagccgggattcagcgcctgtacccggtctcagttaataaacagaatcgatat

SEQ ID NO: 478103 - DNA, 75 bp, synthetic construct
  source 1..75: mol_type = other DNA
atacgcgctggtgcgtaccgaccagccgggattcagcgcctgtacccgctctcagttaataaacagtattgatat

SEQ ID NO: 478104 - DNA, 75 bp, synthetic construct
  source 1..75: mol_type = other DNA
atacgcgctggtgcgtaccgaccagccgggattcagcgcctgtacccgatctcagttaataaacaggatggatat

SEQ ID NO: 478105 - DNA, 75 bp, synthetic construct
  source 1..75: mol_type = other DNA
cctccgggctcgctgggcaactggcctgatgaacagcgacaattacagaacggtaaataacattaccctgggtaa

SEQ ID NO: 478106 - DNA, 75 bp, synthetic construct
  source 1..75: mol_type = other DNA
cctccgggctcgcagggcgactggcctgatgatcagcgacaattacagaacggtaaataacattaccctgggtaa

SEQ ID NO: 478107 - DNA, 75 bp, synthetic construct
  source 1..75: mol_type = other DNA
atacgcgctggtgcgtaccgaccagccgggattcagcgcctgtacccggtctcagttaataaacagcatagatat

SEQ ID NO: 478108 - DNA, 75 bp, synthetic construct
  source 1..75: mol_type = other DNA
aagatattctcgctgaaggtcgatggtgaggatttataccctgattatgttctggatgagaaaatgcggcctctc

SEQ ID NO: 478109 - DNA, 75 bp, synthetic construct
  source 1..75: mol_type = other DNA
cgcacggtggagcctcaccatgacggcaccgtgcactggcatatgatggtctttgcacatccggaagaaatcgac

SEQ ID NO: 478110 - DNA, 75 bp, synthetic construct
  source 1..75: mol_type = other DNA
gcgttacacctgcacatcatgcctccacattatgacgcactgacaacagacaaagaccggaggaacgaaccggac

SEQ ID NO: 478111 - DNA, 75 bp, synthetic construct
  source 1..75: mol_type = other DNA
ctcaacaagcaccagatacagacgctggccgtcatgacagcggcgatgttcagcagcaccttcgaaaaactctgc

SEQ ID NO: 478112 - DNA, 75 bp, synthetic construct
  source 1..75: mol_type = other DNA
gcaccgtgcactggcatatgatggtctttgcccatccggaagaaatcgccagcatcgtggacatcgcccgtgata

SEQ ID NO: 478113 - DNA, 75 bp, synthetic construct
  source 1..75: mol_type = other DNA
gatgaaatgcagaactggacacagagccgcaaacagccacagcctttgcctgataaccacgagttactcgctaaa

SEQ ID NO: 478114 - DNA, 75 bp, synthetic construct
  source 1..75: mol_type = other DNA
tgctgcgcgccatccgcgacgcagagcacgcacagagaatcagtgaaaccactgaacgcgccagccgcaaagcag

SEQ ID NO: 478115 - DNA, 75 bp, synthetic construct
  source 1..75: mol_type = other DNA
ctcccgtgtgtgcacgcatccggataactggaagctggtaagacgtaaaccggaagcggaagacagcgcccgcga

SEQ ID NO: 478116 - DNA, 75 bp, synthetic construct
  source 1..75: mol_type = other DNA
tctggtcaccactcatcggggaatcctcccgtgtgtgcacgcatccggataactggaagctggtaagacgtaaac

SEQ ID NO: 478117 - DNA, 75 bp, synthetic construct
  source 1..75: mol_type = other DNA
tgatatcctccgggcccgccgggcaaccggcctgatggcccgcgacaattacagaacggtaaataacattacctt

SEQ ID NO: 478118 - DNA, 75 bp, synthetic construct
  source 1..75: mol_type = other DNA
acgggaggcatcgcgctgcccgtctcccgtcaccatctggcagacactgctcacccgactgctggaccagcacta

SEQ ID NO: 478119 - DNA, 75 bp, synthetic construct
  source 1..75: mol_type = other DNA
caaaaggcacgccaaccagctacatcgccacctacatcggaaaaaacctggacagccgcgccgtggatggcatcg

SEQ ID NO: 478120 - DNA, 75 bp, synthetic construct
  source 1..75: mol_type = other DNA
tggcagcgcctgagccgtaaccacggcgtaagcagcacggagatccgccataacccggtcgccagctatctggaa

SEQ ID NO: 478121 - DNA, 75 bp, synthetic construct
  source 1..75: mol_type = other DNA
gtttagtctccaggatttccggggcggttcaaaagaacaattttgaattccttacattcctggctattgcacaac

SEQ ID NO: 478122 - DNA, 75 bp, synthetic construct
  source 1..75: mol_type = other DNA
ccgacggtatggtctggatggcgcacaccggcacgttaggcgcggtaaccagctttggtgaatcccggaacgact

SEQ ID NO: 478123 - DNA, 75 bp, synthetic construct
  source 1..75: mol_type = other DNA
aaagggtctctggggatcaccgcccgctttaccggtgaatgctccgttcatgatgtgcgcctgaactatcacgac

SEQ ID NO: 478124 - DNA, 75 bp, synthetic construct
  source 1..75: mol_type = other DNA
actggccgacaacggtacccccgtccggcccggtcagaatatcgtgacgccggagatcatgacgctccagctgat

SEQ ID NO: 478125 - DNA, 75 bp, synthetic construct
  source 1..75: mol_type = other DNA
tgatgacacccatgcagatgtggttctgagtgcaaaatttacaggtgcattatctgccgtggacgtgcgctggaa

SEQ ID NO: 478126 - DNA, 75 bp, synthetic construct
  source 1..75: mol_type = other DNA
ttgcaggaacgctggggaccggtcaatcaggctgatggctttgcagtaacggtgctgtccggcacgtatggggac

SEQ ID NO: 478127 - DNA, 75 bp, synthetic construct
  source 1..75: mol_type = other DNA
cgaaaggggcgattgatacgttaaccacagggctgtcgctggaagtcgccgcgcaggggatccgcgttaacggcg

SEQ ID NO: 478128 - DNA, 75 bp, synthetic construct
  source 1..75: mol_type = other DNA
gcagtcgtggcatcgggcgagcaacggcgttactgttggcgcaagaaggatatacggtggcggttaattatcagc

SEQ ID NO: 478129 - DNA, 75 bp, synthetic construct
  source 1..75: mol_type = other DNA
ggggaatatgttgattacgcggcatcgaaaggggcgattgatacgttaaccaccggactatcgctggaagtcgcc

SEQ ID NO: 478130 - DNA, 75 bp, synthetic construct
  source 1..75: mol_type = other DNA
gccgtggcagctgggcttcgtgctggacgcacacgttctattggtcttgtgatccccgatctggagaacaccagc

SEQ ID NO: 478131 - DNA, 75 bp, synthetic construct
  source 1..75: mol_type = other DNA
cgtgaccgcgccgctggagcaggtgcagatagaccatacggtcatcgacctgatcgtggtcgatgaccgcgaccg

SEQ ID NO: 478132 - DNA, 75 bp, synthetic construct
  source 1..75: mol_type = other DNA
gcgcaggggatccgcgttaacggcgtgcggccagggtttatttataccgaaatgcacgccagcggtggcgaacct

SEQ ID NO: 478133 - DNA, 75 bp, synthetic construct
  source 1..75: mol_type = other DNA
acgaaacagtctgttgtatacggggatttccacagtaacggtgggagccggtgatgtgatgcagattgagcgtca

SEQ ID NO: 478134 - DNA, 75 bp, synthetic construct
  source 1..75: mol_type = other DNA
agtaagtacaagtgtatttgctgcagatactggagtggttaactttaacggtaaaattgttgccgatacttgcga

SEQ ID NO: 478135 - DNA, 75 bp, synthetic construct
  source 1..75: mol_type = other DNA
tgacgaagctgtagcccgtgctttgaactgtgatcctgttggagacagatatactaaagtcagttatgacatact

SEQ ID NO: 478136 - DNA, 75 bp, synthetic construct
  source 1..75: mol_type = other DNA
gcctgcgtgagtacctgaaacgcaagccgggcgcgctttccggcgggcaacgccagcgtgtggcgctcgggcggg

SEQ ID NO: 478137 - DNA, 75 bp, synthetic construct
  source 1..75: mol_type = other DNA
attacacggccaatgttattcaggttggtaacaacgcaccaactgcgggtaaatatgcctcatctgcgactttcg

SEQ ID NO: 478138 - DNA, 75 bp, synthetic construct
  source 1..75: mol_type = other DNA
attacaccgccaatgttattcaggttggtaataacgcgccgactgcgggtaagtatgcctcatctgcgacgttcg

SEQ ID NO: 478139 - DNA, 75 bp, synthetic construct
  source 1..75: mol_type = other DNA
gctgcgtcgctgcggcattatggttgatccgcaatacatcgcccgtggcgacttcaccttcgaagccggaagcaa

SEQ ID NO: 478140 - DNA, 75 bp, synthetic construct
  source 1..75: mol_type = other DNA
taaagcatcaagtagacttttggttttctgacatggccgaaactcggctcgcaaccgattggaacaccgccgtca

SEQ ID NO: 478141 - DNA, 75 bp, synthetic construct
  source 1..75: mol_type = other DNA
aggcctgtttctggatagtcagaagcgtttcaaccagttcgttcaagagatcgaggctgacaacaaggttgagga

SEQ ID NO: 478142 - DNA, 75 bp, synthetic construct
  source 1..75: mol_type = other DNA
tcaccttcacagtctcaacaaccatctttatatacatcaccttctccaacaataaatacagaagcattcttaagt

SEQ ID NO: 478143 - DNA, 75 bp, synthetic construct
  source 1..75: mol_type = other DNA
aatcctgaatcctgtgttacagggctaccgcgagctatatagagaaaaactgaatctggacctgacaccagaaca

SEQ ID NO: 478144 - DNA, 75 bp, synthetic construct
  source 1..75: mol_type = other DNA
gtaaattatctgtatgaacagggacataaacggattggttgtattgctggtcccgaagaaatgccgctgtgtcat

SEQ ID NO: 478145 - DNA, 75 bp, synthetic construct
  source 1..75: mol_type = other DNA
tcaataacgccgggatcttgtttacccagtgcaccgttgaaaaccttaccgcagagcgaatcaaccgagtacttt

SEQ ID NO: 478146 - DNA, 75 bp, synthetic construct
  source 1..75: mol_type = other DNA
gcgctgactttgccgaagattccggttgcggagaaaaaagcgactacatcgcttgccagcaagctgggtctggat

SEQ ID NO: 478147 - DNA, 75 bp, synthetic construct
  source 1..75: mol_type = other DNA
gccctataaatgaaactcatcctattggcaaaactacaaatccttatggaacatcaaaattaatgatggagttaa

SEQ ID NO: 478148 - DNA, 75 bp, synthetic construct
  source 1..75: mol_type = other DNA
tggaattggcaattgaaaaatcctcatggttatgacaacgatgaagtaatgctcttagatagtaaaatggatgat

SEQ ID NO: 478149 - DNA, 75 bp, synthetic construct
  source 1..75: mol_type = other DNA
ttttgctgctgctgtcgatgattgtttatggctgtgcattcgatttcttcaatatttctggttcggtatttgtcg

SEQ ID NO: 478150 - DNA, 75 bp, synthetic construct
  source 1..75: mol_type = other DNA
ggtctatagctccaaaggtatcgccgcgatcattatgcccggtattatggggatcatcgcggacaaatggctgcg

SEQ ID NO: 478151 - DNA, 75 bp, synthetic construct
  source 1..75: mol_type = other DNA
atgtcctttttgcaatattttatctgggggagctggctggttaccctcggttcttacatgattaatacccttcat

SEQ ID NO: 478152 - DNA, 75 bp, synthetic construct
  source 1..75: mol_type = other DNA
ccccctcaagatgattggattttaatttattcaaagcacggcgagtatatggcaggacaggtgcaaggggaatac

SEQ ID NO: 478153 - DNA, 75 bp, synthetic construct
  source 1..75: mol_type = other DNA
cgttagaacttgatacagccaagaatggttacatcctcctggttcaggacgcagagccaaacttcgatgtaaatg

SEQ ID NO: 478154 - DNA, 75 bp, synthetic construct
  source 1..75: mol_type = other DNA
aattttcagaaactacgtttataagctgcctggaatgctttggcgatgatgattgcgatacctgtgacggaagcg

SEQ ID NO: 478155 - DNA, 75 bp, synthetic construct
  source 1..75: mol_type = other DNA
gagatgcaaaaaagaatacagaaagaaaaaaacagaataggaaaaatgataaaatcataagaaggaaaatgttag

SEQ ID NO: 478156 - DNA, 75 bp, synthetic construct
  source 1..75: mol_type = other DNA
ttcatagtgatgtgcaaaaggctgcacaatggcttcaggcatgcgacggaaacagggttcaggaatacgtgaagt

SEQ ID NO: 478157 - DNA, 75 bp, synthetic construct
  source 1..75: mol_type = other DNA
aggggaatacgtggagttgagcgacggcactttatcgtggttagggaacgtcttgttctggatgacgttgccaga

SEQ ID NO: 478158 - DNA, 75 bp, synthetic construct
  source 1..75: mol_type = other DNA
tgagtttgctgatagcttcgtggtgaaatatccgtccattttactgtcagtttcacagatggctgaagtcggttt

SEQ ID NO: 478159 - DNA, 75 bp, synthetic construct
  source 1..75: mol_type = other DNA
gtgagcaaaattaactatcaggcactacgtgagatagcaaaacaggcaacacagggcgaatggggcgcgtttatt

SEQ ID NO: 478160 - DNA, 75 bp, synthetic construct
  source 1..75: mol_type = other DNA
caatgattatcaacgatgccctacaccacagcgaaactccagctaccgatgctttcctggctgatgtacgggcgg

SEQ ID NO: 478161 - DNA, 75 bp, synthetic construct
  source 1..75: mol_type = other DNA
tacgtgagatagcaaaacaggcaacacagggcgaatgggtcgcgtttatttcgacgggtacaggtacgtatgctg

SEQ ID NO: 478162 - DNA, 75 bp, synthetic construct
  source 1..75: mol_type = other DNA
ggtgaacttaatcacgcaagccggtggcaaggcattcgtgctccaggcggatatcagcgacgaaaatcaggtcat

SEQ ID NO: 478163 - DNA, 75 bp, synthetic construct
  source 1..75: mol_type = other DNA
gggcaggccggagttgctgcaatgattatcaacgatgccctgcaccacagcgaaactccagctaccgatgctttt

SEQ ID NO: 478164 - DNA, 75 bp, synthetic construct
  source 1..75: mol_type = other DNA
gtgattgctgtatgcaccctggttcagacctggtagggaaggttgaaatgactgagtggttagttgactttgctg

SEQ ID NO: 478165 - DNA, 75 bp, synthetic construct
  source 1..75: mol_type = other DNA
acagcgaactgcgcggcggcgtgttgctgctggccctgctgcattcgccgctgcgttatataccgcctgctgccg

SEQ ID NO: 478166 - DNA, 75 bp, synthetic construct
  source 1..75: mol_type = other DNA
ctggctgaacgtcaggaaaaaattagcacctggctggagctgatgaaggctgatggaattaatccagaagagtta

SEQ ID NO: 478167 - DNA, 75 bp, synthetic construct
  source 1..75: mol_type = other DNA
ggctgatgtttgcagggtatgctcttttcctcgcagtgatatttttctttgggtttaaatataaccatgaccctg

SEQ ID NO: 478168 - DNA, 75 bp, synthetic construct
  source 1..75: mol_type = other DNA
ggtttcctttgccaactcattcagtctgctgttaatcggtcgcgcctgtctggggctggcgctgggcgggttctg

SEQ ID NO: 478169 - DNA, 75 bp, synthetic construct
  source 1..75: mol_type = other DNA
cggtaatctttgccctgttccgtttcgatcttaactccagctcaagcaacatcgtaaaagttgcaaaaacgttaa

SEQ ID NO: 478170 - DNA, 75 bp, synthetic construct
  source 1..75: mol_type = other DNA
atggcttgtaccacagtcgccaaacagacttacgccctgccagcacctcccgatttaagcggtggcgcgggaaca

SEQ ID NO: 478171 - DNA, 75 bp, synthetic construct
  source 1..75: mol_type = other DNA
cccctgctactgtagcccgtcgtttttcgatactggatggagtaactattcagggcgtgctttaccagatcatct

SEQ ID NO: 478172 - DNA, 75 bp, synthetic construct
  source 1..75: mol_type = other DNA
tgttctaaatgaacctgctgaaatgttctggggtgatttaaaagcccgtgtgaaagacccatttggttttatctg

SEQ ID NO: 478173 - DNA, 75 bp, synthetic construct
  source 1..75: mol_type = other DNA
aaactatccgcctggatggactacaaaaaagaagtaaaagccgtcgacacttcgacggctcctgagattagctgg

SEQ ID NO: 478174 - DNA, 75 bp, synthetic construct
  source 1..75: mol_type = other DNA
cacgctgcatcttgagtcggggagttttattgaagaaagcctgaaaggacacagcacggacgtactctattccgt

SEQ ID NO: 478175 - DNA, 75 bp, synthetic construct
  source 1..75: mol_type = other DNA
atgttgctcagattgaagggattgttgtcgatggcgctgtacgtgatgttggtcttgcaacgtttgtttatgaaa

SEQ ID NO: 478176 - DNA, 75 bp, synthetic construct
  source 1..75: mol_type = other DNA
ccgtttgatggtgatcggatctgctatgatggggaaagtattcctgaatcagaaatctggagtgaacatcctgat

SEQ ID NO: 478177 - DNA, 75 bp, synthetic construct
  source 1..75: mol_type = other DNA
aggcggcgtggtttatcgtcttgatccggttactctggaagtgacgcaggcgatccataacgatctcaagccgtt

SEQ ID NO: 478178 - DNA, 75 bp, synthetic construct
  source 1..75: mol_type = other DNA
gggcagttgtccgggggcagacgcaaaagtttttgacgcttgcggcaaaaagttttgtggctggtacatctctcc

SEQ ID NO: 478179 - DNA, 75 bp, synthetic construct
  source 1..75: mol_type = other DNA
caagaaaacgcgctgtggctcgccacttcgcaaagccgcaaactggataaaggcggcgtggtttatcgtcttgat

SEQ ID NO: 478180 - DNA, 75 bp, synthetic construct
  source 1..75: mol_type = other DNA
gtgctgcaccaggtggttggtcacagtatgtggtcagtcaaattggcggcaaaggtcgcatcatcgcttgtgatc

SEQ ID NO: 478181 - DNA, 75 bp, synthetic construct
  source 1..75: mol_type = other DNA
atgaaatggtttacaccggaacacgtcgtcgcggcatttaaaaaaggtgagctaacacgacatcaagtagtaatg

SEQ ID NO: 478182 - DNA, 75 bp, synthetic construct
  source 1..75: mol_type = other DNA
tcgtagaggcatttaaaaaaggtgagctaacacgacatcaaatagtaatgaatcgtaatatggcaaggagtcgag

SEQ ID NO: 478183 - DNA, 75 bp, synthetic construct
  source 1..75: mol_type = other DNA
gtcaatggctgcaaaactgttcaacacagacaactaccacaacaaaagaaaaacatattccagattataaggaat

SEQ ID NO: 478184 - DNA, 75 bp, synthetic construct
  source 1..75: mol_type = other DNA
actgagggcggtcgcgatctgatgaaaagcgtgggcaaagcagaagagaacaaatcggacagctggtttaactaa

SEQ ID NO: 478185 - DNA, 75 bp, synthetic construct
  source 1..75: mol_type = other DNA
tcgagaaaattaatctcgctttcactcgccccactacaggcttcatcgcaccggagactaatacaggtcgctatc

SEQ ID NO: 478186 - DNA, 75 bp, synthetic construct
  source 1..75: mol_type = other DNA
ttgagaccgtacctgtacttaccctcgaaaagaaatggtcaaacctgggcgaagctgaaagctacgtccggcgag

SEQ ID NO: 478187 - DNA, 75 bp, synthetic construct
  source 1..75: mol_type = other DNA
ataaactggatgtgattgtgaatgcttaccgggttatcaatatggataagctgaaatcggatatccggggcggaa

SEQ ID NO: 478188 - DNA, 75 bp, synthetic construct
  source 1..75: mol_type = other DNA
acagtcagctatggcgcatcgtatatgcacacccatgaagtggatgccggtacagataaggcctcaggtgaattg

SEQ ID NO: 478189 - DNA, 75 bp, synthetic construct
  source 1..75: mol_type = other DNA
actgaaggcggtcgcgatctgatgaaaagcgtgggcaaagcagaagagaataaatcagatagctggtttaactaa

SEQ ID NO: 478190 - DNA, 75 bp, synthetic construct
  source 1..75: mol_type = other DNA
ggtgatatgtccatgtgcggagataattgtgtgagagtctggtttggcagaagggacgacaactattggaacgat

SEQ ID NO: 478191 - DNA, 75 bp, synthetic construct
  source 1..75: mol_type = other DNA
actgttcatatctaccaagacctgctatatgtgaagtagggtctgtatattcggaccctacgacaggtaatgtaa

SEQ ID NO: 478192 - DNA, 75 bp, synthetic construct
  source 1..75: mol_type = other DNA
tattgaatcagcagttgtagcgggagaagtccctgatgaatacgcggcattcacagaaaactctgtagccaatat

SEQ ID NO: 478193 - DNA, 75 bp, synthetic construct
  source 1..75: mol_type = other DNA
ccggatctatgatcagaaacacaaactggaccagagttaatgctcagctaataaaatggaccggcggtgatacag

SEQ ID NO: 478194 - DNA, 75 bp, synthetic construct
  source 1..75: mol_type = other DNA
tagctatcttccacgccctgcgatttgtgaagttgggtcaacttatgtagatccaattacaggtaaggaaatacc

SEQ ID NO: 478195 - DNA, 75 bp, synthetic construct
  source 1..75: mol_type = other DNA
tcgtatttaaaaatgtagcgacaacgggtggagaaatagtcttttctgctgctgttcaaaactttatgcttgcat

SEQ ID NO: 478196 - DNA, 75 bp, synthetic construct
  source 1..75: mol_type = other DNA
gaacagcgccttctccgattatttttgcaaaatggtgcagatcctgaatggatacaaaagattaccggacattca

SEQ ID NO: 478197 - DNA, 75 bp, synthetic construct
  source 1..75: mol_type = other DNA
agcttaagcgtcaggctgcgcatactgatgttgttcagtcagaagccgatgcgaaccgcaatatgtcggaaggcg

SEQ ID NO: 478198 - DNA, 75 bp, synthetic construct
  source 1..75: mol_type = other DNA
tgggggaggtgtaaatgcgttttcgcgttacgaaaaaggcaatgcccaacctcatccttccacaatcaaactttt

SEQ ID NO: 478199 - DNA, 75 bp, synthetic construct
  source 1..75: mol_type = other DNA
tatatatgtaaaaagcggtttcaggaacgctgaatatatcgacataagaaactggcttgctggcattcgcatcaa

SEQ ID NO: 478200 - DNA, 75 bp, synthetic construct
  source 1..75: mol_type = other DNA
cgtggcttcaatctgcgtgagcgcgtgtttatcagctgggtaggattacgcgaccggacggcgaagcgccataca

SEQ ID NO: 478201 - DNA, 75 bp, synthetic construct
  source 1..75: mol_type = other DNA
aaacgaatttcttgatttgcggggggcatacggaaaagccgtgctctggtctaggtcatactttgctggctcctg

SEQ ID NO: 478202 - DNA, 75 bp, synthetic construct
  source 1..75: mol_type = other DNA
acagagggctactgacgctaatttctgctgctctgatgttttttatattactcaaagctgcaacgagtacgctgc

SEQ ID NO: 478203 - DNA, 75 bp, synthetic construct
  source 1..75: mol_type = other DNA
atgaaaactgatattactgctatttctgaaaatatagttgagttctttgagaaaacaacactgcgtgatcacata

SEQ ID NO: 478204 - DNA, 75 bp, synthetic construct
  source 1..75: mol_type = other DNA
actgcttcgttattgacttcgaatataaaggggtgaaatttgcattagatttcacagccagccagccagccagcc

SEQ ID NO: 478205 - DNA, 75 bp, synthetic construct
  source 1..75: mol_type = other DNA
gacaaaatcaaaactcaacgagcagcgtgtgtattacgagggagtaatcgcggatggaagtaagcgcatagcaga

SEQ ID NO: 478206 - DNA, 75 bp, synthetic construct
  source 1..75: mol_type = other DNA
gctgactaataatcgctctcgccctgattcgcatacacaccggtttaatccagaaaatcccgtaggcaatctcac

SEQ ID NO: 478207 - DNA, 75 bp, synthetic construct
  source 1..75: mol_type = other DNA
tcacgttccgggcagttctgtattagccatgtgcatcaggctgatgacgtgctgactaataatcgctctcgccct

SEQ ID NO: 478208 - DNA, 75 bp, synthetic construct
  source 1..75: mol_type = other DNA
atgattacgctcattctttctgcaccagtaacagaaatggctgaagcatttaaacggatatttgcaaatgcagat

SEQ ID NO: 478209 - DNA, 75 bp, synthetic construct
  source 1..75: mol_type = other DNA
attcagcatcacgaaagcagtattagctggatgttcgtaattgatattcttcagcaatttggtctgggaattatc

SEQ ID NO: 478210 - DNA, 75 bp, synthetic construct
  source 1..75: mol_type = other DNA
tttaatgagtttatcagcgaacttacccgtcgaatgccacaacaaagggagcgaataatgacgattgcagagcga

SEQ ID NO: 478211 - DNA, 75 bp, synthetic construct
  source 1..75: mol_type = other DNA
ccctgtgctggctggacgaatttgctgacccaaccaccgcacggaaactttataccgccgcgttcccgctggtgg

SEQ ID NO: 478212 - DNA, 75 bp, synthetic construct
  source 1..75: mol_type = other DNA
ggtagccgtagtccttacccctggtctttgtgctggctggatgaatttgccgacccggctaccgcacggaagctt

SEQ ID NO: 478213 - DNA, 75 bp, synthetic construct
  source 1..75: mol_type = other DNA
ctgttggagttgatccaaaagcatattcgccagcgcgatctgatggggcttatcgatcaactgggtgatgctgcc

SEQ ID NO: 478214 - DNA, 75 bp, synthetic construct
  source 1..75: mol_type = other DNA
cgacaccttaaaactggaatcagccagctttgtcgatgaaaaattgcgggcgctgcactccgatattttatggtc

SEQ ID NO: 478215 - DNA, 75 bp, synthetic construct
  source 1..75: mol_type = other DNA
gacgagattgtgcagcaccgcagagtcgccctgttggagttgatccaaaagcatattcgccagcgcgatctgatg

SEQ ID NO: 478216 - DNA, 75 bp, synthetic construct
  source 1..75: mol_type = other DNA
gaatgccacaccacagggagcgaataatgacaattgcagagcgaattcataatgatggatggctgttgggaaggg

SEQ ID NO: 478217 - DNA, 75 bp, synthetic construct
  source 1..75: mol_type = other DNA
ggcggtatcccgtttgataattatcccttcgcctacatggtaagtaacctggcgctggcgattattttgctcgac

SEQ ID NO: 478218 - DNA, 75 bp, synthetic construct
  source 1..75: mol_type = other DNA
atgtggcgctgatatatggcctggaagacgggcgagaatatcgcgataagcagcaaacgctgggtgaaatcgtcc

SEQ ID NO: 478219 - DNA, 75 bp, synthetic construct
  source 1..75: mol_type = other DNA
gcgaataatgacgattgcagagcgaattcataatgatggatggctgttggggatggaaaaggggaaagaagaagg

SEQ ID NO: 478220 - DNA, 75 bp, synthetic construct
  source 1..75: mol_type = other DNA
cgacagcttaaaactggaatccgccagctttgtcgatgaaaaattgcgggcgctacattccgatattctgtggtc

SEQ ID NO: 478221 - DNA, 75 bp, synthetic construct
  source 1..75: mol_type = other DNA
tataccgccgcgttcccgctggtggatatcactgtcgtgccagacgacgagattgtgcagcatcgcagagtcgcc

SEQ ID NO: 478222 - DNA, 75 bp, synthetic construct
  source 1..75: mol_type = other DNA
tacggcgctggattcgaacaagtacacctgtaataaggtgaacgcggatactttcgcctcatatgcgcagcttga

SEQ ID NO: 478223 - DNA, 75 bp, synthetic construct
  source 1..75: mol_type = other DNA
tcctgtcatcgcgctccattggcgggctggttgttttccttgcgccgttcttcccggattcatcgatgctgatca

SEQ ID NO: 478224 - DNA, 75 bp, synthetic construct
  source 1..75: mol_type = other DNA
atgaaggctcgtcagtaccagtgtgaacaggtgaactacgacacgtttatttcgtatccgaagcttgatgcctgg

SEQ ID NO: 478225 - DNA, 75 bp, synthetic construct
  source 1..75: mol_type = other DNA
aacacgttgtagttcacattttagacaaacaacaaaatggagacgcttctgagagattgagtcctgaagaaggtc

SEQ ID NO: 478226 - DNA, 75 bp, synthetic construct
  source 1..75: mol_type = other DNA
tgttttgcgtagactggctggcaactatccggtaactccggatggttggataagctgtagtgagcgaatgccgga

SEQ ID NO: 478227 - DNA, 75 bp, synthetic construct
  source 1..75: mol_type = other DNA
caggccactgacagaggaacaaaaaaatgcactggcggtgtttatgttcagcgccagttctggtgctgtgcccgc

SEQ ID NO: 478228 - DNA, 75 bp, synthetic construct
  source 1..75: mol_type = other DNA
atgaatctggtgatgtcagatattacccgtaacaagctgggctgctacatgacgcagcaggcgtcgcttaacaat

SEQ ID NO: 478229 - DNA, 75 bp, synthetic construct
  source 1..75: mol_type = other DNA
ccattcgcgtgtatggcaccgtagggtttattgttgctatgtggctggtgagtttattgcacctggagttgagca

SEQ ID NO: 478230 - DNA, 75 bp, synthetic construct
  source 1..75: mol_type = other DNA
gcaataataatgccagctatcatgggcattattgccgataaatggttacgggctgagcgtacctatatgttgtgc

SEQ ID NO: 478231 - DNA, 75 bp, synthetic construct
  source 1..75: mol_type = other DNA
ccgcaacccgattaacgctgtcgacctgaactcccgtcagtaccagtgtgagcaggtgaactacgacacgtttat

SEQ ID NO: 478232 - DNA, 75 bp, synthetic construct
  source 1..75: mol_type = other DNA
atataatgaaaggaagtagacagaaaagagatgctattgttaacgcacttatggaaaggcaaattaatttaatag

SEQ ID NO: 478233 - DNA, 75 bp, synthetic construct
  source 1..75: mol_type = other DNA
agcgatgcctgggtggtggaagacttcggcaaatgcgcccttatcacggggctgaaactggctgatgaaagtaat

SEQ ID NO: 478234 - DNA, 75 bp, synthetic construct
  source 1..75: mol_type = other DNA
cggcaggtcatgagccagacccagcaggccagcgaggcgcaggcggcggagtggctgaaagcccagcgccagaca

SEQ ID NO: 478235 - DNA, 75 bp, synthetic construct
  source 1..75: mol_type = other DNA
caaacgagcgagttacaaaaatacgtgaactgaaacgaaaaggtaacgctgccggcgttacacaaacggatcaaa

SEQ ID NO: 478236 - DNA, 75 bp, synthetic construct
  source 1..75: mol_type = other DNA
ttaacagatatcgcatttgatgtgaatattgataagttatcccgagggattgagttctctattgaagaaaataat

SEQ ID NO: 478237 - DNA, 75 bp, synthetic construct
  source 1..75: mol_type = other DNA
gatatcatcgccccgttcaccgacacgaaaagcctgaacaccctgcgtgatgaactgctgaaccgctgggggccg

SEQ ID NO: 478238 - DNA, 75 bp, synthetic construct
  source 1..75: mol_type = other DNA
acctaactttgagcgtcataacggaaaaagctcgaaaaaacgggcggttacaaacgagagagttacaaaaatacg

SEQ ID NO: 478239 - DNA, 75 bp, synthetic construct
  source 1..75: mol_type = other DNA
ccctgagcaggtgattcgacatagcatcgccaatgaataccagggcttgttcgcgccgaaaggtgttcggcctga

SEQ ID NO: 478240 - DNA, 75 bp, synthetic construct
  source 1..75: mol_type = other DNA
gctgccagcgttacacaaacggatcaaaaagcgttaccagaggaagaggaagaggaagaggaagaggaagaggaa

SEQ ID NO: 478241 - DNA, 75 bp, synthetic construct
  source 1..75: mol_type = other DNA
ctcgggagctggcccgcgagtatgacgctgacccggcaagtgctgacagccgccattatggacgcctagcgggct

SEQ ID NO: 478242 - DNA, 75 bp, synthetic construct
  source 1..75: mol_type = other DNA
agcgcccggctgaccagtggttcaagcggtacaacgccaaacagccagagcggggcggggcgcagaagtccgaaa

SEQ ID NO: 478243 - DNA, 75 bp, synthetic construct
  source 1..75: mol_type = other DNA
cgctcaagcccaaggcatggcttgagcagacccgcgaggcatgggccgaccatgccaaccgggcattagagcggg

SEQ ID NO: 478244 - DNA, 75 bp, synthetic construct
  source 1..75: mol_type = other DNA
agatatcgccgcttgtccaacggctgggatgtggtgatgtccaataccccgatggagatccgaacctgccaggat

SEQ ID NO: 478245 - DNA, 75 bp, synthetic construct
  source 1..75: mol_type = other DNA
cgaactgaaacgaaaaggtaacgctgacagcgttacacaaacggatcaaaaagcgttaccagaggaagaggaaga

SEQ ID NO: 478246 - DNA, 75 bp, synthetic construct
  source 1..75: mol_type = other DNA
ctcatctgcgcaaggcagaacgtgaagacggccgccctggacctcgcccgcgagcgccaggcgcacgaggccggc

SEQ ID NO: 478247 - DNA, 75 bp, synthetic construct
  source 1..75: mol_type = other DNA
gtagatgatattaccgtgtcatctaaaataagtaattatgatttttctcaaatgcaaagccatatagagaggatg

SEQ ID NO: 478248 - DNA, 75 bp, synthetic construct
  source 1..75: mol_type = other DNA
ggtaaactggtgccgcaggatccgaatgacgaaccagcgtcggagctgttgaagcgtattgcggcggaaaaagca

SEQ ID NO: 478249 - DNA, 75 bp, synthetic construct
  source 1..75: mol_type = other DNA
aaatcttgtgttccatatatcaaagaaagtgcagaatatatatattactttctactggcatctgcaaaaaaaata

SEQ ID NO: 478250 - DNA, 75 bp, synthetic construct
  source 1..75: mol_type = other DNA
gatttatatcaaaattaaaaaatctgactcaatccgcccagcaaacccaactgcaccttgcagatgcactaaccg

SEQ ID NO: 478251 - DNA, 75 bp, synthetic construct
  source 1..75: mol_type = other DNA
ctggtcagaaacgtgttccaaggcttttttttgaaaataatcctattcccttccctccaatgcaagaacaagagc

SEQ ID NO: 478252 - DNA, 75 bp, synthetic construct
  source 1..75: mol_type = other DNA
acctgataatagcaaatttacatttggcggattcttgagtgtattgagaccattagttgttaatgaaatttattt

SEQ ID NO: 478253 - DNA, 75 bp, synthetic construct
  source 1..75: mol_type = other DNA
aactggagaatatcttatgaggatacccgagcacttaaaataacaaaagaaatgaaagaaaaatatagtatgtca

SEQ ID NO: 478254 - DNA, 75 bp, synthetic construct
  source 1..75: mol_type = other DNA
gcctctgaactgctcaaacgtattgcgcaggaaaaagctcaattggtgaaagaagggaaaataaaaaaacaaaaa

SEQ ID NO: 478255 - DNA, 75 bp, synthetic construct
  source 1..75: mol_type = other DNA
gtacagggaagcactgataaagaaattttgatgtgcaaagttagcgacatgaatcttgaaggtaacgagaaattc

SEQ ID NO: 478256 - DNA, 75 bp, synthetic construct
  source 1..75: mol_type = other DNA
tattgaggaaaaagaaaaatatcaagtagtcaagggagatttattgatcacagaaggcggcgactgggatacagt

SEQ ID NO: 478257 - DNA, 75 bp, synthetic construct
  source 1..75: mol_type = other DNA
gcgttaaaacagaccattctgcaactggccgtaatgggtaaacttgtgccgcaggatccgaatgacgaaccagcc

SEQ ID NO: 478258 - DNA, 75 bp, synthetic construct
  source 1..75: mol_type = other DNA
atgagcaataaccttaatgaatgtgacgatacattctggaatggcagtattctcggctattggctgaagtatacc

SEQ ID NO: 478259 - DNA, 75 bp, synthetic construct
  source 1..75: mol_type = other DNA
gagctggtgaagcaaggtaaaattaaaaagcaaaaaccactgccggaaattagtgaggaagagaagccgtttgaa

SEQ ID NO: 478260 - DNA, 75 bp, synthetic construct
  source 1..75: mol_type = other DNA
atgggttcgtcagcaagttcctgctcgtgtggttgccctgaccggttcctccggtaaaacctccgtgaaagagat

SEQ ID NO: 478261 - DNA, 75 bp, synthetic construct
  source 1..75: mol_type = other DNA
atggtgaagttgggccaaacaagaaagttccggggctgattagaggcgcagagatatgcgtaagtattgctgaac

SEQ ID NO: 478262 - DNA, 75 bp, synthetic construct
  source 1..75: mol_type = other DNA
ctgctgctttcaaccacggatttatcaataagtctttacgtgaagttttcgacgttacacgcatgattctgtcag

SEQ ID NO: 478263 - DNA, 75 bp, synthetic construct
  source 1..75: mol_type = other DNA
cagcgattcttatgcggtatctatcactgatggaagccagaacatgcacgatggtctgctaatggcctccgtatc

SEQ ID NO: 478264 - DNA, 75 bp, synthetic construct
  source 1..75: mol_type = other DNA
ttgaactgccggaagggtgggagtggtgtttatttgaagatattattgatattcaaagtggtatcactaaaggaa

SEQ ID NO: 478265 - DNA, 75 bp, synthetic construct
  source 1..75: mol_type = other DNA
tggaaatgaatattatatcgatacccccgaaaagtggtcatggataagacttggtaatttagctaaattcatcga

SEQ ID NO: 478266 - DNA, 75 bp, synthetic construct
  source 1..75: mol_type = other DNA
atcatatggcaacctggacctcggcgttgcaaacccgttccaccgccgggcgcggcagttccggtaaaattgatt

SEQ ID NO: 478267 - DNA, 75 bp, synthetic construct
  source 1..75: mol_type = other DNA
acgatgaaccggcgtcggagctgctgaagcgtattgcggcggaaaaagcagagctggtgaagcaaggtaaaatta

SEQ ID NO: 478268 - DNA, 75 bp, synthetic construct
  source 1..75: mol_type = other DNA
gtactgaattcacgctgcaaaccccaacgggtagcgtcgatgttttgctaccgctgcccggacgtcacaatattg

SEQ ID NO: 478269 - DNA, 75 bp, synthetic construct
  source 1..75: mol_type = other DNA
catgattttgccgaccaggcgaaagcgggtggtgcgggcgcgctgctggtcagccgctcgctggatatcgacttg

SEQ ID NO: 478270 - DNA, 75 bp, synthetic construct
  source 1..75: mol_type = other DNA
tagcgaggaagagaagccgtttgaattgccgcagggatgggagtgggtgcgattgggggatgctacatacaaccg

SEQ ID NO: 478271 - DNA, 75 bp, synthetic construct
  source 1..75: mol_type = other DNA
tgcgataagcttaaaactcgtataaaaaccgcccaacaaacccaactgcaccttgcagacgcactgactaacgcg

SEQ ID NO: 478272 - DNA, 75 bp, synthetic construct
  source 1..75: mol_type = other DNA
tgtttctggaggaatacaaaaacaaccgaaaagacgacctgttaaaaaccatttcccttatttgcgggttgctaa

SEQ ID NO: 478273 - DNA, 75 bp, synthetic construct
  source 1..75: mol_type = other DNA
aaatgagattagtgattcagttactcaacaaatagaaaaaataaaacaatccggtgtagaattacctgaagatgc

SEQ ID NO: 478274 - DNA, 75 bp, synthetic construct
  source 1..75: mol_type = other DNA
ctcgaggcaacccactaataagtcgtgtaccccctgactttttcgatctcattattattgatgaggctcatcatg

SEQ ID NO: 478275 - DNA, 75 bp, synthetic construct
  source 1..75: mol_type = other DNA
taattttgatattgtttttaatagcaaagatataccaatagttaatgaatactcatctgatttatctgatgaaca

SEQ ID NO: 478276 - DNA, 75 bp, synthetic construct
  source 1..75: mol_type = other DNA
tgttaatgctcatgagttgtacttcacaactccagatatacctaacaaaaaactaactaaagaagatattttaga

SEQ ID NO: 478277 - DNA, 75 bp, synthetic construct
  source 1..75: mol_type = other DNA
agctgaaataaacaaaaaagttgatgaacaattagaaatattcaggaaggcaagtcttgatgcaggattaacgtt

SEQ ID NO: 478278 - DNA, 75 bp, synthetic construct
  source 1..75: mol_type = other DNA
atacttcatgtaacaggaacgccttaccggggcgataaccaggaaattcctggagtaagaattcatgaaacacct

SEQ ID NO: 478279 - DNA, 75 bp, synthetic construct
  source 1..75: mol_type = other DNA
cctgccggggacgaagacgcagatgacgatccgctcgaaaacctataagggcagcgggtttaatgaactgaagtt

SEQ ID NO: 478280 - DNA, 75 bp, synthetic construct
  source 1..75: mol_type = other DNA
ccggcaatccagaaacaggagtaaaaccagaacctgaatttaataatacaagttatgtacaacgtataggattca

SEQ ID NO: 478281 - DNA, 75 bp, synthetic construct
  source 1..75: mol_type = other DNA
tgataaccgtattcgtttacaacagttgctatggaaaaccgcccgcgatcaggacgaatttctgctgttgacgcg

SEQ ID NO: 478282 - DNA, 75 bp, synthetic construct
  source 1..75: mol_type = other DNA
ggtcggggaatcgacggtaatcaggctgtcgaaggatggcatcaccatcgtgggcggttctgttttcatcaactg

SEQ ID NO: 478283 - DNA, 75 bp, synthetic construct
  source 1..75: mol_type = other DNA
acttaaaaagcagaataatagatataaagaacagtttacactatggcagtacaattcatataaatatggacttaa

SEQ ID NO: 478284 - DNA, 75 bp, synthetic construct
  source 1..75: mol_type = other DNA
gagatagttcatgcgtatttattgaaaaaggaaaggttaaaaattaatgggaaggtttttagaaaacctgccaat

SEQ ID NO: 478285 - DNA, 75 bp, synthetic construct
  source 1..75: mol_type = other DNA
ttacgcgtgatagcagcgaggaagagattctctggctggaaacgatgttaaaccgcgcattgcatatttcgacag

SEQ ID NO: 478286 - DNA, 75 bp, synthetic construct
  source 1..75: mol_type = other DNA
agttgcccacaaagctggcagatgaacgtagcggtgcgcccggatgtactggtgccagtagtaatggcgaagtca

SEQ ID NO: 478287 - DNA, 75 bp, synthetic construct
  source 1..75: mol_type = other DNA
atcgctacacctttaaggtctacattccctcgcagattgcgaccgcagccccctgtgcgacaacacccggcgtta

SEQ ID NO: 478288 - DNA, 75 bp, synthetic construct
  source 1..75: mol_type = other DNA
ctggttgcccgcgatacgccgctcacggcaaatgatgtggagttgaagccctacaacgtcagcgcccagcgcagg

SEQ ID NO: 478289 - DNA, 75 bp, synthetic construct
  source 1..75: mol_type = other DNA
gggagcatgtgtgttgacgggttcggtgagtatgtaggtcactcgctgcctgatggaacgcaccagctttacact

SEQ ID NO: 478290 - DNA, 75 bp, synthetic construct
  source 1..75: mol_type = other DNA
ggcttaggtattccggcaataacacggagtaaaaacattgctgaccgttggttatcaaagggctggtatgttcag

SEQ ID NO: 478291 - DNA, 75 bp, synthetic construct
  source 1..75: mol_type = other DNA
gcggagatgcaacgattaagccgggtaatggtattgagcaagcaactcactggatgccgctaccggagccgccgc

SEQ ID NO: 478292 - DNA, 75 bp, synthetic construct
  source 1..75: mol_type = other DNA
cgcgccgaatatgggcaccgacgtggcactgatgttagggattgcgcataccctgatgacacaaggcaaacacga

SEQ ID NO: 478293 - DNA, 75 bp, synthetic construct
  source 1..75: mol_type = other DNA
gtattcagcatccgatggtgagaaaaagctatctcgataatccactgcaaccggcgaaaggtcgaggcgaagata

SEQ ID NO: 478294 - DNA, 75 bp, synthetic construct
  source 1..75: mol_type = other DNA
cacatgtataagcaacatgtgatcgaatggctgacggatgaacagctttttggagtgatggtggcgctggttaaa

SEQ ID NO: 478295 - DNA, 75 bp, synthetic construct
  source 1..75: mol_type = other DNA
ctacaacgtcagcgcccagcgccgcgatgtgttgatggagcttgatgacgcgattggtttaagcagtaagcacgc

SEQ ID NO: 478296 - DNA, 75 bp, synthetic construct
  source 1..75: mol_type = other DNA
cgcttttcacatcgatgaagacgattaccacggcaagcatattgcgtatttcatgcgacaagcactggtctggct

SEQ ID NO: 478297 - DNA, 75 bp, synthetic construct
  source 1..75: mol_type = other DNA
cgatcgccgggaagatatttccctgttagctaatcactttttgcaaaaattcagtagtgagaatcagcgcgatat

SEQ ID NO: 478298 - DNA, 75 bp, synthetic construct
  source 1..75: mol_type = other DNA
cccgcactgctttaatgctaggtattagtcgccgggcattgatgtataaactccaggaatacggtatcgatccgg

SEQ ID NO: 478299 - DNA, 75 bp, synthetic construct
  source 1..75: mol_type = other DNA
cggtagtacctgatgacgttcgagtgcagacagccgttccgccagctccggtaatacaggctgatatcgcgcaat

SEQ ID NO: 478300 - DNA, 75 bp, synthetic construct
  source 1..75: mol_type = other DNA
atcataatgcatcacatggaattgccaactatataaaaaatcttgaaaatgcgttggttggggtagaaataataa

SEQ ID NO: 478301 - DNA, 75 bp, synthetic construct
  source 1..75: mol_type = other DNA
atgacttctgccggaaaatcaacgtgaacgataaaatctcgcccgcggggaccgtagccattgatcagttcgtca

SEQ ID NO: 478302 - DNA, 75 bp, synthetic construct
  source 1..75: mol_type = other DNA
cttgggatgacggtgatggcgaagacctgtatctcaaagaggtaacccactggatgcctctaccagaaccgccgc

SEQ ID NO: 478303 - DNA, 75 bp, synthetic construct
  source 1..75: mol_type = other DNA
tcggtgaggcgaacagctttctcgaagtgctggaacaggtttcgcatctcgcgccgctggacaaaccggtgctca

SEQ ID NO: 478304 - DNA, 75 bp, synthetic construct
  source 1..75: mol_type = other DNA
cgatagcgactaatgacgttcgagagcaaacagccgttccgccagttccggtaactccggatggttggataagct

SEQ ID NO: 478305 - DNA, 75 bp, synthetic construct
  source 1..75: mol_type = other DNA
gcaataccaaaggtgagccgccaagtcaggcggatacggaacacggctttaatcctacccggaaaagtgctgatg

SEQ ID NO: 478306 - DNA, 75 bp, synthetic construct
  source 1..75: mol_type = other DNA
ggaagatataaatactgatcaccccctaaatccccctcggcaaaaacgagcgtctaaacaattcgagccggaggc

SEQ ID NO: 478307 - DNA, 75 bp, synthetic construct
  source 1..75: mol_type = other DNA
ctaaatccccctcggcaaaaacgagcgtctaaacaattcgagccggaggccattgctctgcccgactggttgcca

SEQ ID NO: 478308 - DNA, 75 bp, synthetic construct
  source 1..75: mol_type = other DNA
ctacttggccacacatcggagaagacaacaaaaatgtatcttgatgagagagaaaaaacgtacttactgctctga

SEQ ID NO: 478309 - DNA, 75 bp, synthetic construct
  source 1..75: mol_type = other DNA
gtctacttggccacacatcggagaagacaacaaaaatgtatcttgatgagagagaaaaaacgtactactgctctg

SEQ ID NO: 478310 - DNA, 75 bp, synthetic construct
  source 1..75: mol_type = other DNA
caccaacttttcacgagatcagaagcctggctggacgattgtacaaagaaacatatggagaagaatttgctcagc

SEQ ID NO: 478311 - DNA, 75 bp, synthetic construct
  source 1..75: mol_type = other DNA
gattgatagccttggctatgcgtgggccgatcaggcattgctggaagtggtcaatcgctttcgtgaaaaactcaa

SEQ ID NO: 478312 - DNA, 75 bp, synthetic construct
  source 1..75: mol_type = other DNA
gcgatgttaacggtgccagttttacccttgaacagatgctcgcctggcgggaccatccgcaggttaccggccttg

SEQ ID NO: 478313 - DNA, 75 bp, synthetic construct
  source 1..75: mol_type = other DNA
gatgcgtgtgagggcgttgttgccctgccgccggtcttcggtgactggaatgatgccttcacgcagtacggcggg

SEQ ID NO: 478314 - DNA, 75 bp, synthetic construct
  source 1..75: mol_type = other DNA
gcggcgttcgcgccagctcttaacagtcatacgcgagagtcttttttttcgtgcatcgcagcgcagatccgtaaa

SEQ ID NO: 478315 - DNA, 75 bp, synthetic construct
  source 1..75: mol_type = other DNA
gacggggttaatgcaggagtggctgacaatagtggacggaaaagcatggtcatttaaacaaagggagttcatatg

SEQ ID NO: 478316 - DNA, 75 bp, synthetic construct
  source 1..75: mol_type = other DNA
acctggcctgattcgcgtattgcatttgcggggccatggattatggagatgaacagcataatggatttcagagaa

SEQ ID NO: 478317 - DNA, 75 bp, synthetic construct
  source 1..75: mol_type = other DNA
ccgtttattcagatggcgtttctttccctgccagtgatccccgcgctgaaactgaccagccaggggctgtttgat

SEQ ID NO: 478318 - DNA, 75 bp, synthetic construct
  source 1..75: mol_type = other DNA
cattgggcaaagcctcaatttaaccgtcgtggcggaaggcgtcgaaaccaaagagcaatttgagatgctacgcaa

SEQ ID NO: 478319 - DNA, 75 bp, synthetic construct
  source 1..75: mol_type = other DNA
tagtcagtcttccggtaacggaaatcaaaattgacaaaagttttgtcgatcgttgtctgaccgaaaaacgcatcc

SEQ ID NO: 478320 - DNA, 75 bp, synthetic construct
  source 1..75: mol_type = other DNA
tgatgtttttcaaccccgccgcagagaagctctggggatacaaacgtgaagaagtcattggcaataacattgata

SEQ ID NO: 478321 - DNA, 75 bp, synthetic construct
  source 1..75: mol_type = other DNA
ggctttagtttttttgcagtttttgatgcagatatgcgtgaaaaaataaataaccttgtcggtaaggttatacca

SEQ ID NO: 478322 - DNA, 75 bp, synthetic construct
  source 1..75: mol_type = other DNA
ttccaaagatagacgtcttagttgttgatgaagcacacaagatcggtgatggtggaagaggtgttattcttcaac

SEQ ID NO: 478323 - DNA, 75 bp, synthetic construct
  source 1..75: mol_type = other DNA
aaattgttggtaaagccgcctggctttggggatgttcttcacttcataaaagctggcctatatctatattccata

SEQ ID NO: 478324 - DNA, 75 bp, synthetic construct
  source 1..75: mol_type = other DNA
cgcgggcgtgggatcgacgcgccgatgccaaagaagccctgtgggcgcgcttattcaccccaacggcgaagtttg

SEQ ID NO: 478325 - DNA, 75 bp, synthetic construct
  source 1..75: mol_type = other DNA
cgcggcctgttgattggcatgggaatgacggaaaagcagggcggctctgatgttatgagcaataccacacgggca

SEQ ID NO: 478326 - DNA, 75 bp, synthetic construct
  source 1..75: mol_type = other DNA
tgctaaagaagccctgtgggcgcgcttatttacgcctgcggcgaagtttgtaatctgcaaaagcggtatcccgtt

SEQ ID NO: 478327 - DNA, 75 bp, synthetic construct
  source 1..75: mol_type = other DNA
ccaacgcgacgaaagtagagtttggttctggcgaaggtgtttttgtctttaatcatactaataacagtgatgccg

SEQ ID NO: 478328 - DNA, 75 bp, synthetic construct
  source 1..75: mol_type = other DNA
gaaaagcccgaatgatgcggcttgtagccatatttcacgtactggccgccccggcaaagattatttactcacgct

SEQ ID NO: 478329 - DNA, 75 bp, synthetic construct
  source 1..75: mol_type = other DNA
caacagaataagtgaatatggttttgttattggcagtgattacgccgtgcataaaatgatttccccaaaaatggg

SEQ ID NO: 478330 - DNA, 75 bp, synthetic construct
  source 1..75: mol_type = other DNA
tacacaaggttgcgcctgtacgttccgcagcgttacgccgggaactgaaagcccgtatcacagttgccagctact

SEQ ID NO: 478331 - DNA, 75 bp, synthetic construct
  source 1..75: mol_type = other DNA
aatgttgattccacatgacttttcgccaagatcaagtaatggcataagaataagtgatgttatggtttgggctaa

SEQ ID NO: 478332 - DNA, 75 bp, synthetic construct
  source 1..75: mol_type = other DNA
gcagtggtttactactcatccctcggcaaaaaacattacctatccaggtgctattagttgccctgagcctgctat

SEQ ID NO: 478333 - DNA, 75 bp, synthetic construct
  source 1..75: mol_type = other DNA
gggacggccgaatcccttgaattggggcggctggcgaatgtgaatccgccagagttgttacgctacgacgcccag

SEQ ID NO: 478334 - DNA, 75 bp, synthetic construct
  source 1..75: mol_type = other DNA
gggtagtggcgcgcaaatgttgaaatatgcatctccgccaatggcgcaggcgtggtgtcagatgatgttagatac

SEQ ID NO: 478335 - DNA, 75 bp, synthetic construct
  source 1..75: mol_type = other DNA
gtttgtcctgcttttttgtgccgcgctttttgcctgacgggcaacgcaacgcgattcgcctcgagcggctgaaag

SEQ ID NO: 478336 - DNA, 75 bp, synthetic construct
  source 1..75: mol_type = other DNA
tgaaaacgggcttacccgtggtgaacaaatggaactggcacgaattgctctggcatcgctggaagcaaaaccaat

SEQ ID NO: 478337 - DNA, 75 bp, synthetic construct
  source 1..75: mol_type = other DNA
cgccatcgccgacacccgtaatgatgtctccgcagtgcagtcagacgtcaccaacataaaagccgatgtcacaca

SEQ ID NO: 478338 - DNA, 75 bp, synthetic construct
  source 1..75: mol_type = other DNA
gcacatgcccagtcaacggctgaccatgccaacgctaacgccaacaccgctctgattaacggcgtcaaactatcc

SEQ ID NO: 478339 - DNA, 75 bp, synthetic construct
  source 1..75: mol_type = other DNA
actcgacgaaacccagaaaaccgttgccgccactggcgatgtacagactaccgcccgttatcagagcatgatcga

SEQ ID NO: 478340 - DNA, 75 bp, synthetic construct
  source 1..75: mol_type = other DNA
gagaaccccgatcactcatctcatcagttacaagttggtgaaggatatatttcacatatggctttaggactacct

SEQ ID NO: 478341 - DNA, 75 bp, synthetic construct
  source 1..75: mol_type = other DNA
acagcttgattacgtcgcgagttatgtggtggtgaatgctaacgcaacatccggcattgcaaatgcattggtcaa

SEQ ID NO: 478342 - DNA, 75 bp, synthetic construct
  source 1..75: mol_type = other DNA
ccagtacagccgtacagactgacagcactgtcaccgataaaaaccaggcagatcgcgacgcggcgcaagataccg

SEQ ID NO: 478343 - DNA, 75 bp, synthetic construct
  source 1..75: mol_type = other DNA
gactttttaattacaatccagatactggaattcttacatggaagaatccacctcggtcttctagatttatttatg

SEQ ID NO: 478344 - DNA, 75 bp, synthetic construct
  source 1..75: mol_type = other DNA
tgtcgggcgtatcggcagcgccattggcggtgctttcggtggtggtgcatctgcttcctcggggacggccattga

SEQ ID NO: 478345 - DNA, 75 bp, synthetic construct
  source 1..75: mol_type = other DNA
taccggcgtgattgcgggtattcaccgttatttaattgacatcggcggcgtaacggcgatcccctgctttatcac

SEQ ID NO: 478346 - DNA, 75 bp, synthetic construct
  source 1..75: mol_type = other DNA
aaaaacgggtcgcagataacagccaacaaattaacacgctcaataaccatttcagttcgctgaaaaacgaagttg

SEQ ID NO: 478347 - DNA, 75 bp, synthetic construct
  source 1..75: mol_type = other DNA
ccgccattcaggacgcacaacatgccgccaactgggcttcactgaaagctgatgacgcgcagcacgccatcacgg

SEQ ID NO: 478348 - DNA, 75 bp, synthetic construct
  source 1..75: mol_type = other DNA
ctgggctaccgactagccgaaatggcgcagtttaaagtgacacaaattctgaaggtttcctggttctggatcgat

SEQ ID NO: 478349 - DNA, 75 bp, synthetic construct
  source 1..75: mol_type = other DNA
tcatacgcgggaaattaaaggtcttaagaaaaaagatggtgctaagtttgatgccgtgctgaatcttaaccgtga

SEQ ID NO: 478350 - DNA, 75 bp, synthetic construct
  source 1..75: mol_type = other DNA
cgaatatgacgataatgcggataaggggatgtacctcagtatgaggaatatgacgataatgcggataaggggatg

SEQ ID NO: 478351 - DNA, 75 bp, synthetic construct
  source 1..75: mol_type = other DNA
atatcagtaatcaggggcttgttgtcagcaacggaggaagttcactcggttatggagaaaccggcgtcgggaatg

SEQ ID NO: 478352 - DNA, 75 bp, synthetic construct
  source 1..75: mol_type = other DNA
tcattctgacagaaatttcaggtggtcagtatgcggtggcggtggctcgtgtagtcggtgatgattttgctaaac

SEQ ID NO: 478353 - DNA, 75 bp, synthetic construct
  source 1..75: mol_type = other DNA
tacctcgaatataccagcagcgactgggaccctccctcacgttgggacgacggtattcctggcctgattgccgac

SEQ ID NO: 478354 - DNA, 75 bp, synthetic construct
  source 1..75: mol_type = other DNA
tgatctcagcgccaactaccatgaaggggaataccgttcggcggggatcgccttacagggcggggcaacgctgac

SEQ ID NO: 478355 - DNA, 75 bp, synthetic construct
  source 1..75: mol_type = other DNA
tcctggcctgattgccgactacagcctcaatgcgcaaactcgccatcaggagcaggggggcgaggactcacatga

SEQ ID NO: 478356 - DNA, 75 bp, synthetic construct
  source 1..75: mol_type = other DNA
gtttctgagcagaacattaattctttctttgctgaggtggataatagctatacaagaggttttccatccgagagt

SEQ ID NO: 478357 - DNA, 75 bp, synthetic construct
  source 1..75: mol_type = other DNA
atcggtttctgtattgcatggacagcatactactttctttcgcttttcgagtattttgtaaaatacttctttcct

SEQ ID NO: 478358 - DNA, 75 bp, synthetic construct
  source 1..75: mol_type = other DNA
atgcgggcagaaatcagcaagctgcatcagaaactcaataccaccatgatatatgttacccatgatcaaaccgaa

SEQ ID NO: 478359 - DNA, 75 bp, synthetic construct
  source 1..75: mol_type = other DNA
ggatgttaatgctgaacgagccagggcctttagtcgtttgacagttatattttctacccctgatcgcctttcagg

SEQ ID NO: 478360 - DNA, 75 bp, synthetic construct
  source 1..75: mol_type = other DNA
gaagcagaatacgatatcttgaaaggcgcttaaatgaaaatgggttttatttaccatcaagtctggccgataaag

SEQ ID NO: 478361 - DNA, 75 bp, synthetic construct
  source 1..75: mol_type = other DNA
agattctgtcgagttgttcattagaaagtttaagagcgcctggtctactcaaaaaaataggaataaaaataaaga

SEQ ID NO: 478362 - DNA, 75 bp, synthetic construct
  source 1..75: mol_type = other DNA
cttgattgttatcgtgttccagtaattgtaattgaagaattcgaaatagcgtataaaactttaccagaagaagaa

SEQ ID NO: 478363 - DNA, 75 bp, synthetic construct
  source 1..75: mol_type = other DNA
ttaactcttcgggttctgatatctctttagcgcgtttcagttccagttggcgctcaagtatgcggtgcaaaagct

SEQ ID NO: 478364 - DNA, 75 bp, synthetic construct
  source 1..75: mol_type = other DNA
ggcttacgttaattgtctcatctcaaataccatcggcaatggcaaaaaatgaatcaaaactttgggttgttgttg

SEQ ID NO: 478365 - DNA, 75 bp, synthetic construct
  source 1..75: mol_type = other DNA
atgacaatttttgtaacgcgcacctttgttcgcagcgaagtaatcaatgtcggatggcagttgttgatgatttgt

SEQ ID NO: 478366 - DNA, 75 bp, synthetic construct
  source 1..75: mol_type = other DNA
tgacttattgttaacagaactcctggacatgtttgcacctcccattaataacgggatgcagtgtaatacaaaagt

SEQ ID NO: 478367 - DNA, 75 bp, synthetic construct
  source 1..75: mol_type = other DNA
atcgtgagccatttcgccgctgagcgcatgaaacacgttaagcaatacttgggggaggttttatcaaattatcgc

SEQ ID NO: 478368 - DNA, 75 bp, synthetic construct
  source 1..75: mol_type = other DNA
atgctgctgccctgtaaagcaatgcgccgtagtacctcacaccacggcgctgatagtgattattctgattctttg

SEQ ID NO: 478369 - DNA, 75 bp, synthetic construct
  source 1..75: mol_type = other DNA
cgtccggcaaataccgtaattgtctgcgcatcaactgcgctttgccgctcagcgaaacctatcgcgaagcactaa

SEQ ID NO: 478370 - DNA, 75 bp, synthetic construct
  source 1..75: mol_type = other DNA
agccgcgttcgggttattttgtcgcacaacgtaaagcccagccgccagtgccaccaatgacgcgtccggtgcagc

SEQ ID NO: 478371 - DNA, 75 bp, synthetic construct
  source 1..75: mol_type = other DNA
ggaaggtcactatcatcgccatatccggcggatgcggcagacttatcagcgcaatctggcgctttatacctgctg

SEQ ID NO: 478372 - DNA, 75 bp, synthetic construct
  source 1..75: mol_type = other DNA
gttaactgcatcgacacggtgaaaacaccgcactccctgccgaaactgccggtggcgaatgcgctgtggaaagcg

SEQ ID NO: 478373 - DNA, 75 bp, synthetic construct
  source 1..75: mol_type = other DNA
gtctggccgtacagcgtctgatgcagcagggttacggctttgcgggcgaaggcgactggaaaactgccgccctgc

SEQ ID NO: 478374 - DNA, 75 bp, synthetic construct
  source 1..75: mol_type = other DNA
gatataagaccccattacttaatgatttctgtggtgagccattaaaacggcgagtgcgtgattattacagtacgc

SEQ ID NO: 478375 - DNA, 75 bp, synthetic construct
  source 1..75: mol_type = other DNA
ttgttgataacgacaccgtgaccatgcttcaacacttcactgatgtaggtattagcattgactttgacaggctgt

SEQ ID NO: 478376 - DNA, 75 bp, synthetic construct
  source 1..75: mol_type = other DNA
atgagcaattacgaattacagattttcgttgataacgacaccgctatgatgattcaggctttcagtgattccggt

SEQ ID NO: 478377 - DNA, 75 bp, synthetic construct
  source 1..75: mol_type = other DNA
atgaacaattacccaatgcaaattatggttgatgccgacaccgctatgatgattcaggctttcagtgatgtaggt

SEQ ID NO: 478378 - DNA, 75 bp, synthetic construct
  source 1..75: mol_type = other DNA
aacaaacttagtgtcagcccagagcaatttctgaaaggcgctgtgacaatcctgtacagcgataatattttggtg

SEQ ID NO: 478379 - DNA, 75 bp, synthetic construct
  source 1..75: mol_type = other DNA
agtaattgaagactttattcaggaaattgaaactggcgacccacgttttatgtttcctgttaccgactcaaacat

SEQ ID NO: 478380 - DNA, 75 bp, synthetic construct
  source 1..75: mol_type = other DNA
gtggagtttaacgagcctcgaatgatgttaccaattgcagacagcgacatgaagcgattggttattgaagaaacg

SEQ ID NO: 478381 - DNA, 75 bp, synthetic construct
  source 1..75: mol_type = other DNA
aagatgctcggtactaacggcggtggcttctttaatgccaactcggctcatccgtttgaaaacccaaccgcactg

SEQ ID NO: 478382 - DNA, 75 bp, synthetic construct
  source 1..75: mol_type = other DNA
ctgcccaaatgcctaattgctggtcatctgaactaccaacaatcgatctttatatcgaccaacttcgcactgtta

SEQ ID NO: 478383 - DNA, 75 bp, synthetic construct
  source 1..75: mol_type = other DNA
atgacattaccaacgactatttattcatttcctgcatatttatctcgtttttcgtccaccgacaaaccagtaaaa

SEQ ID NO: 478384 - DNA, 75 bp, synthetic construct
  source 1..75: mol_type = other DNA
gtaggtgttagcattgactttgataagttgttagagttaatgactgataatgcggaaagcatctctgactttatt

SEQ ID NO: 478385 - DNA, 75 bp, synthetic construct
  source 1..75: mol_type = other DNA
gtcagtaatggtatggcgcggtacagtaagtaaagcgaactaccgtttctttatggcacgaattgccgggaatcc

SEQ ID NO: 478386 - DNA, 75 bp, synthetic construct
  source 1..75: mol_type = other DNA
tgatcgcactgttttttatacaacaaggtgcgctgcaaaactttttgccttaccagccaattaccactcttgaag

SEQ ID NO: 478387 - DNA, 75 bp, synthetic construct
  source 1..75: mol_type = other DNA
ctcagaagcaattgaagattttattcagggaattgaaactggtgaaccgcgttttatgtttcccgttaccgactc

SEQ ID NO: 478388 - DNA, 75 bp, synthetic construct
  source 1..75: mol_type = other DNA
tgcgcagggagcaggactatgggcgtccaccagttacagcaattcaggattccacatttgtactcccttataatt

SEQ ID NO: 478389 - DNA, 75 bp, synthetic construct
  source 1..75: mol_type = other DNA
gtggatgaggtgctggatattcatcagcgcgatgcggaaaacaccatgcgcgaactggcagtgcgggaagggatt

SEQ ID NO: 478390 - DNA, 75 bp, synthetic construct
  source 1..75: mol_type = other DNA
ggcagcaaaccggcgggcgcattacccattttgtctccagcatgggaacaaccggcactatcaccggcgtttcac

SEQ ID NO: 478391 - DNA, 75 bp, synthetic construct
  source 1..75: mol_type = other DNA
gactgggtgaccaaagaggcttgccaagctgtagacattggcatcaaagtgaaccgccccgggaatcctggagac

SEQ ID NO: 478392 - DNA, 75 bp, synthetic construct
  source 1..75: mol_type = other DNA
cgggctttgatgaactggtggcgctggcagtagaaacaggccgtgaaggtgtgaaagcactgaaagccaaaccgg

SEQ ID NO: 478393 - DNA, 75 bp, synthetic construct
  source 1..75: mol_type = other DNA
gtgatgaagtggctgcggataccgttcgtaagacactgctcacccaggttgcacctccgggcgtaacagcacacg

SEQ ID NO: 478394 - DNA, 75 bp, synthetic construct
  source 1..75: mol_type = other DNA
aacaaatacagcgttagccctgaaaaatatctcaaggcagctatagaaattttgtacgctgacaatattttggtt

SEQ ID NO: 478395 - DNA, 75 bp, synthetic construct
  source 1..75: mol_type = other DNA
aacaaatacagtattagccctgaaagatatctcaaggcagctatagcaattttgtacgctgacaatattttggtg

SEQ ID NO: 478396 - DNA, 75 bp, synthetic construct
  source 1..75: mol_type = other DNA
tcgttgataacgacgccgctctgatgattcaggctttcactgatgcaggtgtggcaattgattttgacaggctgt

SEQ ID NO: 478397 - DNA, 75 bp, synthetic construct
  source 1..75: mol_type = other DNA
gtgagtacattagaacaaacaataggcaatacgcctctggtgaagttacagcgaatggggccggataacggcagt

SEQ ID NO: 478398 - DNA, 75 bp, synthetic construct
  source 1..75: mol_type = other DNA
ggaagatgtcgaaagagggcgaaccgagctggccgtctccgtggggcgcgggccgtcctggctggcacattgaat

SEQ ID NO: 478399 - DNA, 75 bp, synthetic construct
  source 1..75: mol_type = other DNA
gcccgtaaagcgaaagactgggcggcggcagatgcggcgcgtgaccgccttaacgagatggggatcgtgctggaa

SEQ ID NO: 478400 - DNA, 75 bp, synthetic construct
  source 1..75: mol_type = other DNA
gcttacgcgggtgcgaggttaaccgcagaactgaaatatttattgcaagatgtcgaatccttcgaacccaacagt

SEQ ID NO: 478401 - DNA, 75 bp, synthetic construct
  source 1..75: mol_type = other DNA
ggatagttaatatttcaacggacagtctctggaatttaaagacatcatctactaacgcacaattgctacaggtcg

SEQ ID NO: 478402 - DNA, 75 bp, synthetic construct
  source 1..75: mol_type = other DNA
gcctgaccaatgcactggatgatgagtccgtcatcgagcgtctggcacacaccaccagcgtggatgaagtgctgg

SEQ ID NO: 478403 - DNA, 75 bp, synthetic construct
  source 1..75: mol_type = other DNA
catggttgtccatgacatgttgccgctggcgtctatctttgttgaaccggcgaaaatcctgttcctcaacaacgc

SEQ ID NO: 478404 - DNA, 75 bp, synthetic construct
  source 1..75: mol_type = other DNA
agtatcgcgtggtgctggagcacaacaccgaaaatatcccagggcttgcggcgctggataccattcgcctgacca

SEQ ID NO: 478405 - DNA, 75 bp, synthetic construct
  source 1..75: mol_type = other DNA
gctggctgccgagcgtgagcaaggcatgtcgccgcgtgatgctatctaccaggcttgtctgctccgttttcgtcc

SEQ ID NO: 478406 - DNA, 75 bp, synthetic construct
  source 1..75: mol_type = other DNA
gcaccgcaatccagctcctttgccaatatggcccagcggcaacgccaggtcgcggacgtgattttgcaggatccg

SEQ ID NO: 478407 - DNA, 75 bp, synthetic construct
  source 1..75: mol_type = other DNA
aagttatgtcccgcaaactatcgcgtttctgattggtggttatggctgtcgcgccgcgctgcagaaatggcaagg

SEQ ID NO: 478408 - DNA, 75 bp, synthetic construct
  source 1..75: mol_type = other DNA
tcggcactgaatacctcgaattctgccgcaacgcgaagcacaaccctttgcagcgctttaaggccaaccctgaaa

SEQ ID NO: 478409 - DNA, 75 bp, synthetic construct
  source 1..75: mol_type = other DNA
gtgatcgtatgcatctaacgccagcaaaccatcctgacttatggacacaagagaatggtgaatggatctacttgc

SEQ ID NO: 478410 - DNA, 75 bp, synthetic construct
  source 1..75: mol_type = other DNA
ccatcatgccgctggtgggtctgtctccggcactggctcctctgttaggaagctggctgctggtccatttttcct

SEQ ID NO: 478411 - DNA, 75 bp, synthetic construct
  source 1..75: mol_type = other DNA
caaaaagtgaatcgcatttttgcaaccatcatgccgctggttgggctttctcctgctctggcgcctctgttaggt

SEQ ID NO: 478412 - DNA, 75 bp, synthetic construct
  source 1..75: mol_type = other DNA
gcgccgcggcagttatctggcaggcgttggtgacggactactacccttcacaaaaagtgaatcgtattttcgcca

SEQ ID NO: 478413 - DNA, 75 bp, synthetic construct
  source 1..75: mol_type = other DNA
agtatcgcgtggtgctggagcacaacactgaaaacacaccagggctggcggcgctggataccattcgcctgacca

SEQ ID NO: 478414 - DNA, 75 bp, synthetic construct
  source 1..75: mol_type = other DNA
gcgtgcaacaggcgtcagcaaaggtccggggcagcagtaagccgtcaggaacgccgcgtcggctgaagagctgac

SEQ ID NO: 478415 - DNA, 75 bp, synthetic construct
  source 1..75: mol_type = other DNA
gtgctgtccatgatgacagaaatcctgcttaaacaggccatggtgggcattgtcgggcgtatcggcagcgccatt

SEQ ID NO: 478416 - DNA, 75 bp, synthetic construct
  source 1..75: mol_type = other DNA
ctcgaacgccagtttgggcagatgtctggcctgaaacagatgtcgtcgcaaagttccggcggtgcgtcagttatc

SEQ ID NO: 478417 - DNA, 75 bp, synthetic construct
  source 1..75: mol_type = other DNA
cggtggcggctgcgtggtggatgagctgatgaaagggctgaatctgccggtgaaaaagaaaaatggcctgcgggt

SEQ ID NO: 478418 - DNA, 75 bp, synthetic construct
  source 1..75: mol_type = other DNA
cattgccgaaatgaccgccgcgaaagcagaacaactgattgagcagggcattattactgacggcatgatagtgaa

SEQ ID NO: 478419 - DNA, 75 bp, synthetic construct
  source 1..75: mol_type = other DNA
gcgtgcaacaggcgtcagcaaaggtccggggcagcagtaagccgtcaggaccgcagcgtcggctgaagagctgac

SEQ ID NO: 478420 - DNA, 75 bp, synthetic construct
  source 1..75: mol_type = other DNA
aggcctgcctgctgcgttttcgtccgatcctgatgaccacgctggcagcgctgctcggtgcattgccgctgatgt

SEQ ID NO: 478421 - DNA, 75 bp, synthetic construct
  source 1..75: mol_type = other DNA
ctggctgattgtcgcggcagtggtggcgatgtatatcgtgctcggtattctgtacgaaagctttattcacccgat

SEQ ID NO: 478422 - DNA, 75 bp, synthetic construct
  source 1..75: mol_type = other DNA
cggtcatggtgtttctcgatttttcaatcaataacctgacgctgatggcgttaactatcgccaccggattcgtgg

SEQ ID NO: 478423 - DNA, 75 bp, synthetic construct
  source 1..75: mol_type = other DNA
tacccagtttgaactgatgatggctatcgcgctggtagtcatgattatctacctgtttttgcgcaatattccggc

SEQ ID NO: 478424 - DNA, 75 bp, synthetic construct
  source 1..75: mol_type = other DNA
ggcgtatgtcaatgtcgacagggacagcgccagccgtctggggatcagcatggcggatgtcgataacgccctgta

SEQ ID NO: 478425 - DNA, 75 bp, synthetic construct
  source 1..75: mol_type = other DNA
gctgaacagtgcgcgtttacagatcaatctcaaaccactggatgaacgagatgaccgggtgcaaaaagtcatcgc

SEQ ID NO: 478426 - DNA, 75 bp, synthetic construct
  source 1..75: mol_type = other DNA
cgtagcgtttgccccggaaacccgtgggatgtcactggcgcagaccagcaatatgacgatccgcaggcagcgaat

SEQ ID NO: 478427 - DNA, 75 bp, synthetic construct
  source 1..75: mol_type = other DNA
cgcgatggcttattgattgaaggacagaggacaaattatctgaggaactcaaataaaccagactcatggactgtt

SEQ ID NO: 478428 - DNA, 75 bp, synthetic construct
  source 1..75: mol_type = other DNA
aaatgttgaacgcgatcgccgcgatatcagtcgcttgcaggaactcggctggcgcgtactgattgtctgggagtg

SEQ ID NO: 478429 - DNA, 75 bp, synthetic construct
  source 1..75: mol_type = other DNA
gaggcactgtatcgttttgaaaagatggtggaagaggcggcacgcaacgctgaagccgcctctcagagcgcagcg

SEQ ID NO: 478430 - DNA, 75 bp, synthetic construct
  source 1..75: mol_type = other DNA
ggaacgtggtgattagcctgttctttatgctcggctgtattccgccgatgttatggcttaatactgccggacggc

SEQ ID NO: 478431 - DNA, 75 bp, synthetic construct
  source 1..75: mol_type = other DNA
tctccagcacccgtcagcgggcgttttccatcagctttattgccgccatgtggtatgtcggcgcgacctgtgccg

SEQ ID NO: 478432 - DNA, 75 bp, synthetic construct
  source 1..75: mol_type = other DNA
atccaatattggtgaactagagcttgagtatcaggcaaaattccctggcgatccactctcagtagagagatatta

SEQ ID NO: 478433 - DNA, 75 bp, synthetic construct
  source 1..75: mol_type = other DNA
gtggcatataaccaggagggtgttatttgctgtattgagaaagatgtatccctgattaatccagagggaatgagt

SEQ ID NO: 478434 - DNA, 75 bp, synthetic construct
  source 1..75: mol_type = other DNA
ctggcaaccctaaaacaaaagagcaataccagctaacgaaacaatttaacatcaaatggctttattcagatgatg

SEQ ID NO: 478435 - DNA, 75 bp, synthetic construct
  source 1..75: mol_type = other DNA
cccgcagcaaaaatatgcgcgcgattgccacgcgtgatacggcgattgagaagcgcctcgccagtttgttaaccg

SEQ ID NO: 478436 - DNA, 75 bp, synthetic construct
  source 1..75: mol_type = other DNA
gattttgtcctcgatgagtatcgctgcgtgatatttacccacggctgcttctggcaccatcatcattgccatttg

SEQ ID NO: 478437 - DNA, 75 bp, synthetic construct
  source 1..75: mol_type = other DNA
cgccttcacatgccggaaccattaccgtctatgaaggttccagacctggtacgctgaatgattttctcggtgcca

SEQ ID NO: 478438 - DNA, 75 bp, synthetic construct
  source 1..75: mol_type = other DNA
cgttgcagaacactctacaactgggtctgtgcttcctcgcaagtctggtagtttcctggctgatcagtatcagca

SEQ ID NO: 478439 - DNA, 75 bp, synthetic construct
  source 1..75: mol_type = other DNA
cggcaccagtgagaaccacggcagcgtggatggctactacaaccatgacggctcgctggcgcaggtggatttaag

SEQ ID NO: 478440 - DNA, 75 bp, synthetic construct
  source 1..75: mol_type = other DNA
atcagtcggcggccatcggtgtcgggcgtgacctgtcagtctttggcgcgatggcctttgacgtcacacactcgc

SEQ ID NO: 478441 - DNA, 75 bp, synthetic construct
  source 1..75: mol_type = other DNA
tcagcggtgtacaccaacatgttcggtaaagctgttattgcggacgtcaataactactaccgtaaccaggccact

SEQ ID NO: 478442 - DNA, 75 bp, synthetic construct
  source 1..75: mol_type = other DNA
atggtagaagaacagaagtatccagatttcgccaagagactaaacgaattgatgacaatcaaaggaatctctgtc

SEQ ID NO: 478443 - DNA, 75 bp, synthetic construct
  source 1..75: mol_type = other DNA
tacagcatcaacgcccaaacccgacacgaagaaaatggcggtgatgacagcaacgatatcagcggcaacggtacg

SEQ ID NO: 478444 - DNA, 75 bp, synthetic construct
  source 1..75: mol_type = other DNA
gctgaccgagggcgcgattggctaccgtcactttgccgtgatcagcgggcagaaagcgatggcggtactgcgcct

SEQ ID NO: 478445 - DNA, 75 bp, synthetic construct
  source 1..75: mol_type = other DNA
attggctaccgtaaatttgcggtcatcagcggacaaaaggcgatggctgtcctgcgcatgagtgatggtagttat

SEQ ID NO: 478446 - DNA, 75 bp, synthetic construct
  source 1..75: mol_type = other DNA
tacagcatcaacgcccaaacccgacacgaagaaaatggcggcgatgacagcaacgacatcagcggcaacggtacg

SEQ ID NO: 478447 - DNA, 75 bp, synthetic construct
  source 1..75: mol_type = other DNA
ggtggtcagccggtttcactggcaaacttaaaagcgatgtacagcatcgcgaagaaatacgatattccggtggta

SEQ ID NO: 478448 - DNA, 75 bp, synthetic construct
  source 1..75: mol_type = other DNA
gggcagtacacctctgccgggttgtcgctacagggcggcgctacgctcacggctcacggtggcgcgttgcaccgt

SEQ ID NO: 478449 - DNA, 75 bp, synthetic construct
  source 1..75: mol_type = other DNA
ggttgacgatgacggcaacgtctatctggccggggtaaaagcgggtgagcgtatgagtgtctcatggaatggggc

SEQ ID NO: 478450 - DNA, 75 bp, synthetic construct
  source 1..75: mol_type = other DNA
caggagtggggacaccatgtacagggcggattcttctccggtggtgaagcgtcctgggggatagccaacggctgg

SEQ ID NO: 478451 - DNA, 75 bp, synthetic construct
  source 1..75: mol_type = other DNA
tgaaaagcagagcctgttgcaacttgtcagggataaaactcagctatgggactcacagctacggctgggcatcat

SEQ ID NO: 478452 - DNA, 75 bp, synthetic construct
  source 1..75: mol_type = other DNA
tacccgcccaatggctggaactgtcgctgccgtgtgcggccattgtctcaggcccgtctggatgcaatggggtta

SEQ ID NO: 478453 - DNA, 75 bp, synthetic construct
  source 1..75: mol_type = other DNA
gggaatttcagcatgggaatgctggtgtttatcttcgtcgcgcgggtcattaccaccttactctgcttctcttcc

SEQ ID NO: 478454 - DNA, 75 bp, synthetic construct
  source 1..75: mol_type = other DNA
cgtgtattgccggtgaaattctttggcgggctggggacactcggcggaggcatggtgttggggcgcgaagggcca

SEQ ID NO: 478455 - DNA, 75 bp, synthetic construct
  source 1..75: mol_type = other DNA
tatgcgacgtgcaaatggatgtaactgcaatttgcccagaaggaaaaagtgttgtcgagttgcccaatatcacag

SEQ ID NO: 478456 - DNA, 75 bp, synthetic construct
  source 1..75: mol_type = other DNA
atgaactggatgcgatacgtgcaacagattgaagccactgatacctctgaattgcccgttacatttccggaacaa

SEQ ID NO: 478457 - DNA, 75 bp, synthetic construct
  source 1..75: mol_type = other DNA
atgatgcatttaaaaaatataaaaccgggcaatccaaaaacaaaagaacagtacctgttaactaaaaactccggc

SEQ ID NO: 478458 - DNA, 75 bp, synthetic construct
  source 1..75: mol_type = other DNA
gccgctggcgggtattctatttattatcgaagagatgcgtccgcaatttcgctatacgctgatttcgattaaggc

SEQ ID NO: 478459 - DNA, 75 bp, synthetic construct
  source 1..75: mol_type = other DNA
cactaccttactttgcttctcttcaggtgcgccggggggcattttcgcgccgatgttggcgttaggtacggtgct

SEQ ID NO: 478460 - DNA, 75 bp, synthetic construct
  source 1..75: mol_type = other DNA
tggcgatgagtggtaaaaatgttctccatgcggacagagtgaaacatcagaatgacggcatcgccctgacgccgg

SEQ ID NO: 478461 - DNA, 75 bp, synthetic construct
  source 1..75: mol_type = other DNA
gtgcgattggcggtctgtgtggattgctggggtttgtggcaccagcaacgtcgggcggcggttttaacctgattc

SEQ ID NO: 478462 - DNA, 75 bp, synthetic construct
  source 1..75: mol_type = other DNA
gtattatttttggtatcttcggccctatttttaataaatgggtgctggggatgcaggatttgttgcaccgtgtgc

SEQ ID NO: 478463 - DNA, 75 bp, synthetic construct
  source 1..75: mol_type = other DNA
gccgctggcgggtattttgtttattatcgaagagatgcgtccgcagtttcgctatacgttaatttcgattaaagc

SEQ ID NO: 478464 - DNA, 75 bp, synthetic construct
  source 1..75: mol_type = other DNA
gctgtgttgtttaacccggcgcgtaatgaagcctacgtgacgcatcggcaggcgggtaaagtcagtgtgattgac

SEQ ID NO: 478465 - DNA, 75 bp, synthetic construct
  source 1..75: mol_type = other DNA
tgctccgcaggaagtggaagtcagttcttatctggtcgggcagattgactcggaagtggacaccgacgatttgag

SEQ ID NO: 478466 - DNA, 75 bp, synthetic construct
  source 1..75: mol_type = other DNA
atcattcgtaatatcgttaacgatccgtctgttgtctttgacgatatcgtcaccaacgagcagatccagaaacgt

SEQ ID NO: 478467 - DNA, 75 bp, synthetic construct
  source 1..75: mol_type = other DNA
ctggcatctgctgggcgaaggtacccacaccgttaacggtaaaactgtgaccgttagcctgcgcgagctgaagaa

SEQ ID NO: 478468 - DNA, 75 bp, synthetic construct
  source 1..75: mol_type = other DNA
atagcttatgaccagaaggggattattcgttgtattgagaaagacgcatcaatgcttaaccctgacggtttaagt

SEQ ID NO: 478469 - DNA, 75 bp, synthetic construct
  source 1..75: mol_type = other DNA
ttccagacgcgctccaacccgatcccgtggatcaacacctggctggtgtctgataacgtgcaggttgctccgcag

SEQ ID NO: 478470 - DNA, 75 bp, synthetic construct
  source 1..75: mol_type = other DNA
gaaggtaacgccaaaattattcgtctgattgcccgcgacgaagccctgcacctgaccggtactcagcatatgctg

SEQ ID NO: 478471 - DNA, 75 bp, synthetic construct
  source 1..75: mol_type = other DNA
caggaaaatgcgctgtggctcgccacttcgcaaagccgcaaactggataaaggcggagtggtttatcgtctcgat

SEQ ID NO: 478472 - DNA, 75 bp, synthetic construct
  source 1..75: mol_type = other DNA
taaacagtgcggtcacggcaattgatgccaaaacgggcgaagtgaaagggcgtctggtactggacgatcgcaaac

SEQ ID NO: 478473 - DNA, 75 bp, synthetic construct
  source 1..75: mol_type = other DNA
atgcatttacgtcatctgttttcatcgcgcctgcgtggttcgctactgttaggttcattgctcgttgcttcatca

SEQ ID NO: 478474 - DNA, 75 bp, synthetic construct
  source 1..75: mol_type = other DNA
gaatttccagccagacactttgaaaatggtctatgaccataacggcgttattatttgcattgaaaaggatgtttc

SEQ ID NO: 478475 - DNA, 75 bp, synthetic construct
  source 1..75: mol_type = other DNA
acagagtggatactctttgcgcagaaagtcgaatctacagacacttccagcctgccagtaacgtttcccgaacaa

SEQ ID NO: 478476 - DNA, 75 bp, synthetic construct
  source 1..75: mol_type = other DNA
ggcaggtaaagtcagtgtgattgacgcgaaaacttacaaagtggtgaaaacgtttgatacaccgactcatccgaa

SEQ ID NO: 478477 - DNA, 75 bp, synthetic construct
  source 1..75: mol_type = other DNA
caactgcgctttgccgctcagcgaaacctatcgcgaagcactgaagcaaattggcgaggccgtgtatcgggcaat

SEQ ID NO: 478478 - DNA, 75 bp, synthetic construct
  source 1..75: mol_type = other DNA
catgaatcgcttttgtgcatagttatgcagccccctgaaaacaattctgacgcatttttctgttttaccctggtg

SEQ ID NO: 478479 - DNA, 75 bp, synthetic construct
  source 1..75: mol_type = other DNA
ttactgtggatagaattgcctgaacaggtcgatatggtctgcgtcgcgcggcagctgtgccgcatgaaaatccag

SEQ ID NO: 478480 - DNA, 75 bp, synthetic construct
  source 1..75: mol_type = other DNA
gtggcggcaggctcgattttctcagcttccggcaaataccgtaactgcctgcgcatcaactgtgctttgccactc

SEQ ID NO: 478481 - DNA, 75 bp, synthetic construct
  source 1..75: mol_type = other DNA
acattgatacccgttatcgacgatcaaacaacaagggtatctttttcaaaaaaggcatacaaaaaggcatacaaa

SEQ ID NO: 478482 - DNA, 75 bp, synthetic construct
  source 1..75: mol_type = other DNA
ttgccgctgtttgacggtggacggttgaatgccaatctcgaaggcacgcgcgccgccagcaacatgatgattgaa

SEQ ID NO: 478483 - DNA, 75 bp, synthetic construct
  source 1..75: mol_type = other DNA
agcaattgttaggtgcggctccggttgtcggcgaccaagtggagtttgccgggatgatctggacggtggctgaga

SEQ ID NO: 478484 - DNA, 75 bp, synthetic construct
  source 1..75: mol_type = other DNA
cagttgcttcaccccaccggcagcacccgactgcgcgaaggcgacgtattatgcgtgattggtcgggaacgcgat

SEQ ID NO: 478485 - DNA, 75 bp, synthetic construct
  source 1..75: mol_type = other DNA
ttggatgccacaacaataattagccttttcatcttaggatccatccttgtcaccagcagtatattacttagttca

SEQ ID NO: 478486 - DNA, 75 bp, synthetic construct
  source 1..75: mol_type = other DNA
tgatggcggcgtggctgtttaatcttgatttgattgaaggcttattaattggcgcaattgtcggctccaccgatg

SEQ ID NO: 478487 - DNA, 75 bp, synthetic construct
  source 1..75: mol_type = other DNA
gggatgatctggacggtggccgagaaagaagataatgaagtgttgaagattggtgtacgggtagcagaagaggac

SEQ ID NO: 478488 - DNA, 75 bp, synthetic construct
  source 1..75: mol_type = other DNA
tcaacgcttctttggtgacttcattctcgaagccagcgccaaatatgctgatgtggcgctgatatatggcctgga

SEQ ID NO: 478489 - DNA, 75 bp, synthetic construct
  source 1..75: mol_type = other DNA
gcagaaattcagcgtatcgtcgatgatatgttcgagacgatgtacgcagaaaaaggtattggcctggcggcaacc

SEQ ID NO: 478490 - DNA, 75 bp, synthetic construct
  source 1..75: mol_type = other DNA
atgcaggagaaaatatcactattcattttgatatgaccaaatgtcatttctttgatgcagaaacggaaatagcaa

SEQ ID NO: 478491 - DNA, 75 bp, synthetic construct
  source 1..75: mol_type = other DNA
cgtcggggcagtcagcatccggtaggctctcatctggaaagcgttattcgtctgcaaaagaaacccctgctggtt

SEQ ID NO: 478492 - DNA, 75 bp, synthetic construct
  source 1..75: mol_type = other DNA
cagcaccccggtagtgtcagacctgaccggcactctcggcatagacagtcagcaattgctgaccgatgagctggt

SEQ ID NO: 478493 - DNA, 75 bp, synthetic construct
  source 1..75: mol_type = other DNA
ccggatttattggatcaccagcgatgaattttattcgcggcacgatcgatggcgataaattcgttacggaaacgc

SEQ ID NO: 478494 - DNA, 75 bp, synthetic construct
  source 1..75: mol_type = other DNA
gcaagaggaaaataacatttccgccaaaattagcgtggcagaattaaccggtgcggaatttatgctctacaccac

SEQ ID NO: 478495 - DNA, 75 bp, synthetic construct
  source 1..75: mol_type = other DNA
atgaaccgctctctaaccttgatgccaagctgcgcgtgcaaatgcgcgcagagatcagcaagctgcaccagaagc

SEQ ID NO: 478496 - DNA, 75 bp, synthetic construct
  source 1..75: mol_type = other DNA
ggattgcgattctcgaactactgcaaaaacatattcgccagcgcgacttaatgttattgctggagcaactggtca

SEQ ID NO: 478497 - DNA, 75 bp, synthetic construct
  source 1..75: mol_type = other DNA
cagcacggacgtgctctattccgtgcaaatgcagggcaatcccggttatctgcatgttgtgattgaacaccaaag

SEQ ID NO: 478498 - DNA, 75 bp, synthetic construct
  source 1..75: mol_type = other DNA
agctacgcgaactgtgtgacctcgacacgctgcatcttgagtcggggagttttattgaagaaagccagaaagggc

SEQ ID NO: 478499 - DNA, 75 bp, synthetic construct
  source 1..75: mol_type = other DNA
tgctgaaaaagcagaaactgaaaagaatcgtgtcttcaacggggtaattgaactgcctaaagaccaggctgtttt

SEQ ID NO: 478500 - DNA, 75 bp, synthetic construct
  source 1..75: mol_type = other DNA
ctgaagtcaatgacgccatcaccaaagcggcaaaagcgaaaggcgcttacgctttctacattgttcgtcaaatcg

SEQ ID NO: 478501 - DNA, 75 bp, synthetic construct
  source 1..75: mol_type = other DNA
ttcctggagatacatttgccagcggaattacgcgagctgtgtgatctcgacacgctgcatcttgagtcggggagt

SEQ ID NO: 478502 - DNA, 75 bp, synthetic construct
  source 1..75: mol_type = other DNA
gttgccggatgcggcgtaaaacgccttatccgtcctggggggctgggcttggatcttgtaggcctgataagacgc

SEQ ID NO: 478503 - DNA, 75 bp, synthetic construct
  source 1..75: mol_type = other DNA
agtcatatcgcacgccaacgggtcgacactatgtgtttaaggatttaaatattgaaatcccttcaggaaaaagtg

SEQ ID NO: 478504 - DNA, 75 bp, synthetic construct
  source 1..75: mol_type = other DNA
gacaatgcggttagttttcatgaggatgttcaggagggggttgcagagtatataacggaacaaaataattactga

SEQ ID NO: 478505 - DNA, 75 bp, synthetic construct
  source 1..75: mol_type = other DNA
gtctgttaatcgacgctgatggcgttgctaatgtgccggttgaaggtaatggttccgccgtttataccaacatgt

SEQ ID NO: 478506 - DNA, 75 bp, synthetic construct
  source 1..75: mol_type = other DNA
attggtggtatcgacaaacctgattatggagcagtaatcacgaacagaagtatctcttggcccgttggactctca

SEQ ID NO: 478507 - DNA, 75 bp, synthetic construct
  source 1..75: mol_type = other DNA
gcggttagtttttatgaagatgttcagggcgggatagaggagtataggtgtgatggtatattaaatccattacca

SEQ ID NO: 478508 - DNA, 75 bp, synthetic construct
  source 1..75: mol_type = other DNA
atgattaagattgaaaatttgacgaagtcctatcgcacgccaacgggtcgacattatgtctttaaggatttaaac

SEQ ID NO: 478509 - DNA, 75 bp, synthetic construct
  source 1..75: mol_type = other DNA
aaagtgctgggaaccagcctcgataccatcaaaagctgggaaaccggacgccgtaacccaaccggactggcagca

SEQ ID NO: 478510 - DNA, 75 bp, synthetic construct
  source 1..75: mol_type = other DNA
aaaccgattatccaggagcagacacagcgcattacgccatcggctaaaccagaagcattgtcagacaacacctat

SEQ ID NO: 478511 - DNA, 75 bp, synthetic construct
  source 1..75: mol_type = other DNA
ggcgacagcagtaccgtcagctataacggcaactacggcagcggctcagactccagccaggtcggctatttcagc

SEQ ID NO: 478512 - DNA, 75 bp, synthetic construct
  source 1..75: mol_type = other DNA
ggcacgctgcatgtccgcattgaagaacaaaacggccaggtacaggaatacgacgtcagcacggcgtccatgccg

SEQ ID NO: 478513 - DNA, 75 bp, synthetic construct
  source 1..75: mol_type = other DNA
ctgaaagagaaaattgagtttgtcgaagaatttgccgaactcggtaagtacttcgatatgccgatcaaaacttac

SEQ ID NO: 478514 - DNA, 75 bp, synthetic construct
  source 1..75: mol_type = other DNA
agtcatacagaacgccactcggacgacactatatatttaaagatttaaatattgcatttccatcagataaaagca

SEQ ID NO: 478515 - DNA, 75 bp, synthetic construct
  source 1..75: mol_type = other DNA
cggacgacactatatatttaaagatttaaatattgcatttccatcagataaaagcatagctctcttagggcgaaa

SEQ ID NO: 478516 - DNA, 75 bp, synthetic construct
  source 1..75: mol_type = other DNA
atggggtgtgctgaaaaatatcattcatctggctatctgggttccctatttccgtgtctctaaacgcgtcaaatt

SEQ ID NO: 478517 - DNA, 75 bp, synthetic construct
  source 1..75: mol_type = other DNA
atgcctcatttgaattgacagatgcatgggagcttctgaaaagtatcatccatcttgcaatctggatcccctatt

SEQ ID NO: 478518 - DNA, 75 bp, synthetic construct
  source 1..75: mol_type = other DNA
actgttgagcattgagcagggttcattgcaggttccatgcaagaagtgcctcgctgcaatcgtcaaaacggctaa

SEQ ID NO: 478519 - DNA, 75 bp, synthetic construct
  source 1..75: mol_type = other DNA
cctgcaaaccgccacccagaagctggctgacttcatgcagtcgcaaggcgtgggcaatgcgccggaagaagtagc

SEQ ID NO: 478520 - DNA, 75 bp, synthetic construct
  source 1..75: mol_type = other DNA
agctgaagaccttggcagtcagcccacgccgggccatgcagcagatcgttgattacaaggccgatcccggcaatg

SEQ ID NO: 478521 - DNA, 75 bp, synthetic construct
  source 1..75: mol_type = other DNA
acaaagaccaaacactaccagaagtacaacaactcgattttgaatttgtactttttgcctctgcggttattgatt

SEQ ID NO: 478522 - DNA, 75 bp, synthetic construct
  source 1..75: mol_type = other DNA
tgtacggctgggcatcctggagcaaagacaaagccattctcggtttgcgcaacccatcggataagccacaggcct

SEQ ID NO: 478523 - DNA, 75 bp, synthetic construct
  source 1..75: mol_type = other DNA
gcaaacggacagcgactttgccgatcaggtctggagctacttcgcgaccggcacccagctgcaggagctgtatat

SEQ ID NO: 478524 - DNA, 75 bp, synthetic construct
  source 1..75: mol_type = other DNA
gtggtgactcgacggcgcttgccatgtacgactggccatcttggaacaaagacaaagccattcttggtttgcgca

SEQ ID NO: 478525 - DNA, 75 bp, synthetic construct
  source 1..75: mol_type = other DNA
gctgttgagcattgagcagggaacgctgcttgttccttgcaagaattgtctggcagcaatcatcaaaacggcgca

SEQ ID NO: 478526 - DNA, 75 bp, synthetic construct
  source 1..75: mol_type = other DNA
cacagacttgtaggcatgataagacgcgtccagcgtcgcatcaggcattgtgcgccaactgccggatgcggcgtg

SEQ ID NO: 478527 - DNA, 75 bp, synthetic construct
  source 1..75: mol_type = other DNA
gttgttgtgccttttccatcttttcccgtaagtcaggatctaaacggaactggaacggaggattaccacgccttt

SEQ ID NO: 478528 - DNA, 75 bp, synthetic construct
  source 1..75: mol_type = other DNA
attatatatggtgataaatatgctgctgtttattaccgcgagggtgaacgaccctacatcatgaaaacaaccggt

SEQ ID NO: 478529 - DNA, 75 bp, synthetic construct
  source 1..75: mol_type = other DNA
tatcatttggggctcaacctattttgtcattcggattggggttgaaagctggccaccgttaatgatggcaggcgt

SEQ ID NO: 478530 - DNA, 75 bp, synthetic construct
  source 1..75: mol_type = other DNA
taccagctacgcatacgttaatccggttgtagcggtattgctgggtacagggctgggtggcgaaacgctatcgcg

SEQ ID NO: 478531 - DNA, 75 bp, synthetic construct
  source 1..75: mol_type = other DNA
agtacgaatgtgtattgagcagcttgtctatgaaaaaaatagtatcagaaataataatgcagataaaaagatgta

SEQ ID NO: 478532 - DNA, 75 bp, synthetic construct
  source 1..75: mol_type = other DNA
gatgctggaagacagattcgatatttccattcctattaatattctgctggatgtcaaaacccctgcgcaattaat

SEQ ID NO: 478533 - DNA, 75 bp, synthetic construct
  source 1..75: mol_type = other DNA
cccggtaacatcagccggatcattatccatcaggatgggcgcatggggattctgccagcaggaatacaccgcctg

SEQ ID NO: 478534 - DNA, 75 bp, synthetic construct
  source 1..75: mol_type = other DNA
cccggataaaaagaaactggcggcgaaaggcattacctcggtacgttcccgcgtgaccaatctgaccgaattgct

SEQ ID NO: 478535 - DNA, 75 bp, synthetic construct
  source 1..75: mol_type = other DNA
aaaacaaaaggtattactatacctttgataattcattactctttactgaaaacatacagagcacatcacaaatgt

SEQ ID NO: 478536 - DNA, 75 bp, synthetic construct
  source 1..75: mol_type = other DNA
tgccctgaagcatctgtcatacggtaagcatgtttcgttaatcaccgatgcacgtttctcgggcgtttctactgg

SEQ ID NO: 478537 - DNA, 75 bp, synthetic construct
  source 1..75: mol_type = other DNA
ggttatcccgatgctgttttatcacggtagccgtagtccttacccctggtccctgtgctggctggacgaatttgc

SEQ ID NO: 478538 - DNA, 75 bp, synthetic construct
  source 1..75: mol_type = other DNA
ttagaaacaaacgacaaaaattcctcttatcattgggattacaataagttagttgagcggcatgaagatgctcag

SEQ ID NO: 478539 - DNA, 75 bp, synthetic construct
  source 1..75: mol_type = other DNA
gcgacagagataataacggacctgcacgggaagcctggaaatgtgataacgatgtggtgtacgtgaaaaacagcc

SEQ ID NO: 478540 - DNA, 75 bp, synthetic construct
  source 1..75: mol_type = other DNA
atgcttgagcagggaaaggcctgttataccggacatgaccacaggggatatttccgtcagggcgttttcgaactg

SEQ ID NO: 478541 - DNA, 75 bp, synthetic construct
  source 1..75: mol_type = other DNA
aaacaaagacatcgactaaacgccataatcttacgcgtatcgcaatgtattgctcaatcatgtatagcggcgcta

SEQ ID NO: 478542 - DNA, 75 bp, synthetic construct
  source 1..75: mol_type = other DNA
atgaacggctggcgcaacacgcgccggggtgatgaaactcagtcgttctatactgcactcaacgcagggcttaac

SEQ ID NO: 478543 - DNA, 75 bp, synthetic construct
  source 1..75: mol_type = other DNA
aataagccgatcagcaatctgtccattgagtttattgaaatagcgaatagccgtagcgccaaaccctgtatctct

SEQ ID NO: 478544 - DNA, 75 bp, synthetic construct
  source 1..75: mol_type = other DNA
tccagtacgttgacgcacgaatgaacaccgactttaacggcagccacgctttcagcgccagcaccaacggtgcca

SEQ ID NO: 478545 - DNA, 75 bp, synthetic construct
  source 1..75: mol_type = other DNA
ggcgcgtattaactacggcaacaataccgttgaccgttggggatatggcgtaaccagtgctctttcaccatacca

SEQ ID NO: 478546 - DNA, 75 bp, synthetic construct
  source 1..75: mol_type = other DNA
gatgggtacggagcaccgtgattccggtttccaaagtattgatacacaacttagtaccaatatggatggtaataa

SEQ ID NO: 478547 - DNA, 75 bp, synthetic construct
  source 1..75: mol_type = other DNA
catcaacgtacagacgctgctgaccgaagctattcttacggaaaatcgcgaccgtgtttaccacgccgcgatgat

SEQ ID NO: 478548 - DNA, 75 bp, synthetic construct
  source 1..75: mol_type = other DNA
caaacaggtagggttgtgccattcggtgcagggaacggcggaagagctggcgcgcgatctcaatattgatcccgc

SEQ ID NO: 478549 - DNA, 75 bp, synthetic construct
  source 1..75: mol_type = other DNA
ggttgatgctaatggcattcagccgaccaaagtcggtacgctaccttcgcatctggccgccctgatgcaaaccaa

SEQ ID NO: 478550 - DNA, 75 bp, synthetic construct
  source 1..75: mol_type = other DNA
gcgtttaaggactgaaagcgcccacagttctgcgttcacagcatggtgcaggtctcatcaaaaaatggttgatgc

SEQ ID NO: 478551 - DNA, 75 bp, synthetic construct
  source 1..75: mol_type = other DNA
gcgtgacgcattcggctgtcgcgagcaggataaaattgtcggatttctctatctcggtacgccacaactgaaagc

SEQ ID NO: 478552 - DNA, 75 bp, synthetic construct
  source 1..75: mol_type = other DNA
atctggcagccctgatgcaaaccaatatcaacgtacagacgctgcttaccgaagccattctcaccgaaaaccgtg

SEQ ID NO: 478553 - DNA, 75 bp, synthetic construct
  source 1..75: mol_type = other DNA
tcacatcaatcaaatgatggcacgctattcctgcctgcgggccttacgcactgatgaatcccctaatgattttta

SEQ ID NO: 478554 - DNA, 75 bp, synthetic construct
  source 1..75: mol_type = other DNA
aacaatatcacgctgtctaataattgtttaaatttaaatgatgtcaaggtggtgaggttcgacaccaaagtaaag

SEQ ID NO: 478555 - DNA, 75 bp, synthetic construct
  source 1..75: mol_type = other DNA
caacactggtctcacgcagtcgccagcccggaatagatgatttcagcccttctatcacagaagaaaaacaacggg

SEQ ID NO: 478556 - DNA, 75 bp, synthetic construct
  source 1..75: mol_type = other DNA
gccggtttttgccaatacggaaaaattgaacgatgctgtggaagagctgcgtcagttgctcgataaccaccatga

SEQ ID NO: 478557 - DNA, 75 bp, synthetic construct
  source 1..75: mol_type = other DNA
agagttaattccagattcctgtttcactatttgcacattgttaacttcattccatttcttactggtggagtaagg

SEQ ID NO: 478558 - DNA, 75 bp, synthetic construct
  source 1..75: mol_type = other DNA
tgaaaattttggcccatatcctgtctatagctctcaaactgcaaataatgggaaaataggttctatcaatacctt

SEQ ID NO: 478559 - DNA, 75 bp, synthetic construct
  source 1..75: mol_type = other DNA
gcactgtgttctatcgaacaggtaaattttcaataactaatgtttgcggcctgattacattaaaaaataaatacc

SEQ ID NO: 478560 - DNA, 75 bp, synthetic construct
  source 1..75: mol_type = other DNA
taatgccacctttatgctcacccaggcactgcttcctttattactcaaatcggacgccggttcactggtctttac

SEQ ID NO: 478561 - DNA, 75 bp, synthetic construct
  source 1..75: mol_type = other DNA
tattctcgatttgctgacctgcacgtccgaagattgccaacaactggcacagcgcattgccgttaattatccgcg

SEQ ID NO: 478562 - DNA, 75 bp, synthetic construct
  source 1..75: mol_type = other DNA
actaccatcaaacgcttggcggaatttctgctggccccggacgcagcgcaagggaccacaggagatcagacacaa

SEQ ID NO: 478563 - DNA, 75 bp, synthetic construct
  source 1..75: mol_type = other DNA
tgcgcggctgccatgtttctttgtggctggctggcactcggcaagaaaccgtatcaaggtttattgattggtgtg

SEQ ID NO: 478564 - DNA, 75 bp, synthetic construct
  source 1..75: mol_type = other DNA
tatggctatgtctggctgaacatggaaacagcacaccagttagagttgctgtcaaatctgatttgtcgggccttg

SEQ ID NO: 478565 - DNA, 75 bp, synthetic construct
  source 1..75: mol_type = other DNA
aatgccacttttatgctcacccaggcgctgcttcctttattactcaaatcagacgcaggttctctggtctttact

SEQ ID NO: 478566 - DNA, 75 bp, synthetic construct
  source 1..75: mol_type = other DNA
gacagccattctggcgaagaggtgatggcgatcctgcatcagctgcgcgatcgcgggcatacggtgattatcgtc

SEQ ID NO: 478567 - DNA, 75 bp, synthetic construct
  source 1..75: mol_type = other DNA
atgacaaaaactaaacgtgtgcgcctcctggcgctcacagaagaaggcaaagcgtgccaatgtttcacagtaggt

SEQ ID NO: 478568 - DNA, 75 bp, synthetic construct
  source 1..75: mol_type = other DNA
atgacagtaaaaactaaacgtgtgcgcctcctggcgctcacccgtgaaggcgcatcgtgccaatgtttcacagta

SEQ ID NO: 478569 - DNA, 75 bp, synthetic construct
  source 1..75: mol_type = other DNA
aagttgaaggacgcgggttacttggtgcttgacgcaagtgctgtagtcggtgcgccaagtgacgtgtacctcccc

SEQ ID NO: 478570 - DNA, 75 bp, synthetic construct
  source 1..75: mol_type = other DNA
ttgcttcccccggccacacagatggaacgcttgaattgttttacgtccaggaaggcacactcacactgggtgtac

SEQ ID NO: 478571 - DNA, 75 bp, synthetic construct
  source 1..75: mol_type = other DNA
ccgatgtaaattctatcgtcagcactgtgaatgaagccgtatctcagcgaattaaactttatcgtaagcaaaaga

SEQ ID NO: 478572 - DNA, 75 bp, synthetic construct
  source 1..75: mol_type = other DNA
ctgccaatagtcaacctgccgcaccagctcctgaagctcccgttgcaaaagcagaagctaaacctgaaacacctg

SEQ ID NO: 478573 - DNA, 75 bp, synthetic construct
  source 1..75: mol_type = other DNA
ggttccagtctttctaaaggtgatattcagtctgcgatcgaaggtgcttcacccaaaatagccagcgatattcat

SEQ ID NO: 478574 - DNA, 75 bp, synthetic construct
  source 1..75: mol_type = other DNA
cagtcaccacccatttcggcacctcttgtttgcctattggctatttagagagccggaaaaaagtaagcgtaaact

SEQ ID NO: 478575 - DNA, 75 bp, synthetic construct
  source 1..75: mol_type = other DNA
gccgtgggttgcctctgccacgcccgccgtctcgcaaaacctgcgcctgcgttataacaatgttgatgtggctgc

SEQ ID NO: 478576 - DNA, 75 bp, synthetic construct
  source 1..75: mol_type = other DNA
tccgcgcaaagcggcagttgctgcggctattgcccgcgttcaggccaaaaaagccgcccagcaaaaggttgtaaa

SEQ ID NO: 478577 - DNA, 75 bp, synthetic construct
  source 1..75: mol_type = other DNA
aaaaaacgtggtaaatcagagcagcatcttcgccagatggttcgcgtactggacctgccttctgaactacagacc

SEQ ID NO: 478578 - DNA, 75 bp, synthetic construct
  source 1..75: mol_type = other DNA
cgtacctgtactgcgtcagggggcttgccgtatccgttccatcgctattgcaaaccgccagctggaagcagaagg

SEQ ID NO: 478579 - DNA, 75 bp, synthetic construct
  source 1..75: mol_type = other DNA
gaaaagcaccagtactgtcgccatcccgcgccagggagccgtcgtctttgctgattttgaaacagttcagggaca

SEQ ID NO: 478580 - DNA, 75 bp, synthetic construct
  source 1..75: mol_type = other DNA
ttagtgattccgacactctggctgtcattcaggcgccaggagcaaaaggcgctcgtattaactacggaaacagca

SEQ ID NO: 478581 - DNA, 75 bp, synthetic construct
  source 1..75: mol_type = other DNA
cgtcgtggaaccgctgttctccaactttggcggacgggcgtcgtttggcggacaaataatcacggtaaaatgttt

SEQ ID NO: 478582 - DNA, 75 bp, synthetic construct
  source 1..75: mol_type = other DNA
ctgacgaataacaggaaagtcagtatgccggtgtatcggcccgtggctgtagcgccagctgttcgaccagtgagt

SEQ ID NO: 478583 - DNA, 75 bp, synthetic construct
  source 1..75: mol_type = other DNA
agcggagagagaacgagcacgtgcagtgtacctaaataatccaacggcaaagaatgaggcaatatatttcgaaac

SEQ ID NO: 478584 - DNA, 75 bp, synthetic construct
  source 1..75: mol_type = other DNA
aatcaggtcacggtcagtatcaaccaaccgctgaaatttgagaaaaaggattacggttcattttatctctcggga

SEQ ID NO: 478585 - DNA, 75 bp, synthetic construct
  source 1..75: mol_type = other DNA
gaaccgcgtcgatgtgctgtggccgggaaccctcatgaaccagttgcgcattttcgcgctgctcaatcagttccg

SEQ ID NO: 478586 - DNA, 75 bp, synthetic construct
  source 1..75: mol_type = other DNA
gttggaacatggaaaggagtacaccgaatctgaattaagagaaatgattaagcaaggaaaggtaactagcaaata

SEQ ID NO: 478587 - DNA, 75 bp, synthetic construct
  source 1..75: mol_type = other DNA
tgccgacgcgctggacagactgcacaagccggaagaagccgcagcgatgcgtcgcgatggcttgatgctaacctt

SEQ ID NO: 478588 - DNA, 75 bp, synthetic construct
  source 1..75: mol_type = other DNA
ggcagaggggaccgccacggcagggacggcataccgctgttcgtcggcctccacggcagccggactgtgtggtga

SEQ ID NO: 478589 - DNA, 75 bp, synthetic construct
  source 1..75: mol_type = other DNA
tatctctctttatattgctggcgttcgcgtacaactgaccgtactggcgactgacactccggctcagattgccac

SEQ ID NO: 478590 - DNA, 75 bp, synthetic construct
  source 1..75: mol_type = other DNA
ccggcaatttacgtgtgccgcttttttatgtggagtttgataactccatggccaacacggcgacggctacacaac

SEQ ID NO: 478591 - DNA, 75 bp, synthetic construct
  source 1..75: mol_type = other DNA
aattcgtacccgttgccgccacagtccaacctgacccaggccagagtggccgcggagaaagatcgagcacgtgca

SEQ ID NO: 478592 - DNA, 75 bp, synthetic construct
  source 1..75: mol_type = other DNA
ctcaacgattgctaactggattgccgctccgttcaacggtttattggctgaacaactggaagcaagattgactgg

SEQ ID NO: 478593 - DNA, 75 bp, synthetic construct
  source 1..75: mol_type = other DNA
gccacgatgatgtggtggtccccggagcctttaccacaacactccagaaatggagcgaaaaaaaggcgctgcctg

SEQ ID NO: 478594 - DNA, 75 bp, synthetic construct
  source 1..75: mol_type = other DNA
cctgagcgcctgttccggttcgaactatgtgatgcacaccaatgacggacgtaccatcgtctctgacggcaaacc

SEQ ID NO: 478595 - DNA, 75 bp, synthetic construct
  source 1..75: mol_type = other DNA
tgcttgttgcggcctgtggtgctaacttcctgaaggatcaggttggttttatgggtgagttagccggacccacct

SEQ ID NO: 478596 - DNA, 75 bp, synthetic construct
  source 1..75: mol_type = other DNA
cgccgttaccagtttgaagtgatcacatccctgccactgaatatcaatattggctggtatcagggggaatatatt

SEQ ID NO: 478597 - DNA, 75 bp, synthetic construct
  source 1..75: mol_type = other DNA
ctgtcgccaaccgtttcctggtcatgatgggcgcactgtttctcagcatctggggcacatggacgataattaaca

SEQ ID NO: 478598 - DNA, 75 bp, synthetic construct
  source 1..75: mol_type = other DNA
cgacgcaaagtcggtttttttacgtcctgattcagacctcctttcaaatgaatagccaactcaaaattcacacct

SEQ ID NO: 478599 - DNA, 75 bp, synthetic construct
  source 1..75: mol_type = other DNA
ctccctatgtggattccgatgatgtatatcatcaaccaacgacagtgttatttgtggtgaccccatcaacctggg

SEQ ID NO: 478600 - DNA, 75 bp, synthetic construct
  source 1..75: mol_type = other DNA
gaacgcagtgaggcaaagccggttgcggccgggttgcctcgactggctgacggtaatttcagaacgacgtcagta

SEQ ID NO: 478601 - DNA, 75 bp, synthetic construct
  source 1..75: mol_type = other DNA
ggatattaccgtggtgccggatgacgagattatgcaacatcgcaaaatggcgctgttggagttaattcagaaaca

SEQ ID NO: 478602 - DNA, 75 bp, synthetic construct
  source 1..75: mol_type = other DNA
aacaacgttaaaactggaaccaaacagttttattgatgaaaacctgcgacaatattactccgacgtcttgtggtc

SEQ ID NO: 478603 - DNA, 75 bp, synthetic construct
  source 1..75: mol_type = other DNA
cgggctataaagagcttccattggtgatcccgatgctgttttatcatggttgcagaagtccttatccttattcac

SEQ ID NO: 478604 - DNA, 75 bp, synthetic construct
  source 1..75: mol_type = other DNA
gtctgatggatcaggcgcgggctgatgacggtagtgaaggcttgcgtaactggtggaaaaatcaaagccggaaaa

SEQ ID NO: 478605 - DNA, 75 bp, synthetic construct
  source 1..75: mol_type = other DNA
caggggcaatcggcaatcatgaatattaaacgaacaaacggtaaaaatattccattcgcggcggatatctttgat

SEQ ID NO: 478606 - DNA, 75 bp, synthetic construct
  source 1..75: mol_type = other DNA
cgacagcggggaattaatcgtgcgctggtatgaaaacaaccaaaccattgactgtaagttgcactaccagttccc

SEQ ID NO: 478607 - DNA, 75 bp, synthetic construct
  source 1..75: mol_type = other DNA
tgtccgcgtgtttgtaaacggtcaggccacctccagtttagaaattccgtttgtggatattggtgaaaacagcgc

SEQ ID NO: 478608 - DNA, 75 bp, synthetic construct
  source 1..75: mol_type = other DNA
cgatctcagcccttcaggatttggtagcgaattggtcattactattgaagaagcggatggctctaaacgctcatt

SEQ ID NO: 478609 - DNA, 75 bp, synthetic construct
  source 1..75: mol_type = other DNA
cgatctcagtccttcagggtttggtagcgaattggtcattactattgaagaagcagatggttctaaacgctcatt

SEQ ID NO: 478610 - DNA, 75 bp, synthetic construct
  source 1..75: mol_type = other DNA
cgatctcagcccttctggatttggtagcgaactggtcatcacgattgaagaagccgatggttcgaaacgctcctt

SEQ ID NO: 478611 - DNA, 75 bp, synthetic construct
  source 1..75: mol_type = other DNA
ctgtcaacgtccgtggtgttcgtctatacagcgatagccgtatgctgccttccgcgctggccagttacgctccga

SEQ ID NO: 478612 - DNA, 75 bp, synthetic construct
  source 1..75: mol_type = other DNA
ctttggtaacagcaccatcgaccgttttggctacggcgtgaccagttcactgtcaccgtaccgggaaaataccgt

SEQ ID NO: 478613 - DNA, 75 bp, synthetic construct
  source 1..75: mol_type = other DNA
acagcgtcagcctgcaacgcacatacgacgaagacaataagaaggatgactcggtttatctgagcgtgaccattc

SEQ ID NO: 478614 - DNA, 75 bp, synthetic construct
  source 1..75: mol_type = other DNA
ctgtcaacgtccgtggtgttcgcctgtacagcgacagccgtatgctgccttcggcgctggccagttacgctccga

SEQ ID NO: 478615 - DNA, 75 bp, synthetic construct
  source 1..75: mol_type = other DNA
cattgatgacaacctgcgctcagaaccgaatatggggcaagcctcttattactatggtctgaataacctcttcac

SEQ ID NO: 478616 - DNA, 75 bp, synthetic construct
  source 1..75: mol_type = other DNA
aagcggatggttccaaacgcacctttacgcaacccttctcgtcggttgtacaaatgcaacgtcctggtgtaggcc

SEQ ID NO: 478617 - DNA, 75 bp, synthetic construct
  source 1..75: mol_type = other DNA
attaaagcacccggagcgaaggggcacgagtcaataacggtactgatgaaatcgatcgctggggttatgccgttt

SEQ ID NO: 478618 - DNA, 75 bp, synthetic construct
  source 1..75: mol_type = other DNA
gctggagtacgatctggacgacgccggacgcgggcatcgcgatcgcgcgctggcgcaactgctgtgccgcattac

SEQ ID NO: 478619 - DNA, 75 bp, synthetic construct
  source 1..75: mol_type = other DNA
atagccagcttcctgctattgatcgcttattgcgcgatagttctttcctttctttacgtgatacttatggtcaca

SEQ ID NO: 478620 - DNA, 75 bp, synthetic construct
  source 1..75: mol_type = other DNA
tcaacctgacgggaaccgtgctgcataccaatcttgggcgagctttacaggcggaagccgcggtggaagccgttg

SEQ ID NO: 478621 - DNA, 75 bp, synthetic construct
  source 1..75: mol_type = other DNA
atgttaaaagtgttattgctctttgtgttgctgattgcaggcatcgtcgttggcccaatgattgccggacatcag

SEQ ID NO: 478622 - DNA, 75 bp, synthetic construct
  source 1..75: mol_type = other DNA
gatgaagaacatcgtgcaatgctggaacaacaggcatggattggcctgatggatcaggcgcgtgccgataacggt

SEQ ID NO: 478623 - DNA, 75 bp, synthetic construct
  source 1..75: mol_type = other DNA
cggcgacaagctgttaggcgggccgcaggcaggaattattgttggtaaaaaagagatgatcggatcgcccgcctg

SEQ ID NO: 478624 - DNA, 75 bp, synthetic construct
  source 1..75: mol_type = other DNA
tccgtttgccgcagatatttatgacgagaacggaaatattattggcaatgtagggcaaggtggtcaggcctttgt

SEQ ID NO: 478625 - DNA, 75 bp, synthetic construct
  source 1..75: mol_type = other DNA
tgacgtcaacgatcaacgactggacatcaatgttcctcaagcctgggtaatgaagaattaccaaaactatgttga

SEQ ID NO: 478626 - DNA, 75 bp, synthetic construct
  source 1..75: mol_type = other DNA
attgcaagttgaattatcaactccctgtacgaccagaaactctgggaagcatagatactttattgttaaaaaatc

SEQ ID NO: 478627 - DNA, 75 bp, synthetic construct
  source 1..75: mol_type = other DNA
atgattatcgtcaggcggtgaatgaaaataccgcgctgttgatgaaagtacataccagtaactacagcattcagg

SEQ ID NO: 478628 - DNA, 75 bp, synthetic construct
  source 1..75: mol_type = other DNA
ctgatttggtttggtgaaattggtgtccacgaattcgcgtatctggtgaaaaactacgtagctgcggttaactaa

SEQ ID NO: 478629 - DNA, 75 bp, synthetic construct
  source 1..75: mol_type = other DNA
atcaggggcaaagctatcgggtgacctggaacaaacttatcgaatcgacagatacatcaatcaacctggcagcct

SEQ ID NO: 478630 - DNA, 75 bp, synthetic construct
  source 1..75: mol_type = other DNA
ctgggcgcttccggctgtggtaaatccacgctgctgcgtatgctggcaggttttgaacaaccctctgccggacag

SEQ ID NO: 478631 - DNA, 75 bp, synthetic construct
  source 1..75: mol_type = other DNA
tactcaaagagcgtcaggaagatggcttggtgcttgattcgccggggctggtgcatccactgaaagtcgacgcgg

SEQ ID NO: 478632 - DNA, 75 bp, synthetic construct
  source 1..75: mol_type = other DNA
ccctggcccgaagccttgccaaacgcccgaaactattactgctcgatgagccgatgggcgcgctggataaaaagc

SEQ ID NO: 478633 - DNA, 75 bp, synthetic construct
  source 1..75: mol_type = other DNA
caatatgatgtttcagtcttacgcgctgtttccccatatgactgtggagcagaacatcgcctttggcctgaaaca

SEQ ID NO: 478634 - DNA, 75 bp, synthetic construct
  source 1..75: mol_type = other DNA
gcgataaatgcactctatcttgtgcgataaatggcatccacgcggcgtttcattatttgaaaaagaattacattt

SEQ ID NO: 478635 - DNA, 75 bp, synthetic construct
  source 1..75: mol_type = other DNA
cgttatcgcaaaggtttaccaacatggggcgatgaagtgcgcttgtgctgggaagtggacagttgtgtggtgctg

SEQ ID NO: 478636 - DNA, 75 bp, synthetic construct
  source 1..75: mol_type = other DNA
tgtactggaaatcccggccccgcaggctgctgaatttgcacaactgttctctgactacgaactattgccaccatt

SEQ ID NO: 478637 - DNA, 75 bp, synthetic construct
  source 1..75: mol_type = other DNA
tattgatgctgccgtagcgttgggtaataccattaacgaaatggataaatattacacccaggaaaattataaaga

SEQ ID NO: 478638 - DNA, 75 bp, synthetic construct
  source 1..75: mol_type = other DNA
ggaagtgaaaaccagcaatggtgtagtggagaaggactacaccctggcagagtcgatgcgtaaaccgcagtactg

SEQ ID NO: 478639 - DNA, 75 bp, synthetic construct
  source 1..75: mol_type = other DNA
gccgctattagaaatccgcaacctcaccaaatcctacgatggtcaacatgcggtggatgatgtcagcctgaccat

SEQ ID NO: 478640 - DNA, 75 bp, synthetic construct
  source 1..75: mol_type = other DNA
gcgcgcccgacagccgatctgtgcatcgactgcaaaacgctggctgaaattcgcgaaaaacagatggctggctaa

SEQ ID NO: 478641 - DNA, 75 bp, synthetic construct
  source 1..75: mol_type = other DNA
gatgttcctcaagcaggtcaggtgctggcgaatgtcgcagatcagtatgcggtggcatatggtgaagccaggcag

SEQ ID NO: 478642 - DNA, 75 bp, synthetic construct
  source 1..75: mol_type = other DNA
cgcccagctacaaaacgcccatcgtcatcgtaaagggttaccgacctggggcgacgaagtgcgtttgtgctggga

SEQ ID NO: 478643 - DNA, 75 bp, synthetic construct
  source 1..75: mol_type = other DNA
aacggtgaggaacggattctgtttggcatggcaggcactgcgcgccagtgtgaagagttccaccatgaagatgat

SEQ ID NO: 478644 - DNA, 75 bp, synthetic construct
  source 1..75: mol_type = other DNA
cgccgggtcgttacgaattacagggcgacaatatctttatgaatgtcatgacgtttaacactcaatcgcccgtcg

SEQ ID NO: 478645 - DNA, 75 bp, synthetic construct
  source 1..75: mol_type = other DNA
tatctactcgacacagctgaaagtagctatcagcaaagcaaggaactaatcgaacgctggcataaaaacggtcgt

SEQ ID NO: 478646 - DNA, 75 bp, synthetic construct
  source 1..75: mol_type = other DNA
tgccggatacataccggtatcatctgtctcatcgtattcgccggctgattgggagtgaaaagacatcatcgccat

SEQ ID NO: 478647 - DNA, 75 bp, synthetic construct
  source 1..75: mol_type = other DNA
tgccggatacataccggtatcatctgtctcatcgtattcgccggttgtttgggactgaaaagacatcatcgccat

SEQ ID NO: 478648 - DNA, 75 bp, synthetic construct
  source 1..75: mol_type = other DNA
tgccggatacataccggtatcatctgtctcatcgtattcgccggatgcttgggagtgaaaagacatcatcgccat

SEQ ID NO: 478649 - DNA, 75 bp, synthetic construct
  source 1..75: mol_type = other DNA
acagacgattgtatgcctgtgatatttttcagaaaaaacagtctgacataccagaaaggattaaaggttatattc

SEQ ID NO: 478650 - DNA, 75 bp, synthetic construct
  source 1..75: mol_type = other DNA
agcaaaacattgcctttggtctgaaacaagacaagttaccaaaagcggaaattgccactcgggtcaacgagatgc

SEQ ID NO: 478651 - DNA, 75 bp, synthetic construct
  source 1..75: mol_type = other DNA
tactcaaagagcgtcaggaagatggtctggtgctttattcgccgggactggtgcatccactgaaagtcgatgcag

SEQ ID NO: 478652 - DNA, 75 bp, synthetic construct
  source 1..75: mol_type = other DNA
ttgaataaacacacattccccacagagcgtcgttatgaggatttagaatacgcccgcgaaatgtcggcgtttttc

SEQ ID NO: 478653 - DNA, 75 bp, synthetic construct
  source 1..75: mol_type = other DNA
gctatcaccaaagcaaagaactgatcgaacgctggcacaaaaatggtcgtctgttgtatgcgattacgccacgct

SEQ ID NO: 478654 - DNA, 75 bp, synthetic construct
  source 1..75: mol_type = other DNA
gatatagtaagcaaattaaaacggggtaaatttgaactccaaataccaggaggtggaattaaagaatgcgatgga

SEQ ID NO: 478655 - DNA, 75 bp, synthetic construct
  source 1..75: mol_type = other DNA
ctttgttatttggggcgcgattgtactggtgatgattgtctttggcgcaacgttaatgaaagatgcgccgaagca

SEQ ID NO: 478656 - DNA, 75 bp, synthetic construct
  source 1..75: mol_type = other DNA
gggcagaagatagtaccgatactgcttttgatgctatcagcacactcaaagaaggtgatgtagctgtatgtgatg

SEQ ID NO: 478657 - DNA, 75 bp, synthetic construct
  source 1..75: mol_type = other DNA
gataacgtgagtgcgcataccggaattattccttcggcagagccgcgcaatcttgacaagctaaattcaaaagag

SEQ ID NO: 478658 - DNA, 75 bp, synthetic construct
  source 1..75: mol_type = other DNA
gaaaggtataggttttattaaaaacctccctgtagcggttacagcgcctgatatgacagcattatggcatgagca

SEQ ID NO: 478659 - DNA, 75 bp, synthetic construct
  source 1..75: mol_type = other DNA
atcctaaaactaaaaaggaaatgggttataatcaaataattaaatcgtcactaagtgtgggtacttttattttta

SEQ ID NO: 478660 - DNA, 75 bp, synthetic construct
  source 1..75: mol_type = other DNA
gcaaatgatgatcatggagggtgatttagaattaagtgatttcatcctcaacattaattcaacggttaaagaatt

SEQ ID NO: 478661 - DNA, 75 bp, synthetic construct
  source 1..75: mol_type = other DNA
cggagcttgcaggaatcattgctaaagcctttggtggagaagtcaaaaagtcgggttattgggagtgtgcaaaca

SEQ ID NO: 478662 - DNA, 75 bp, synthetic construct
  source 1..75: mol_type = other DNA
gctccgctgcgtatctttaacgcctggcggcaggcgcgggcaattatgaaagcttacaagcctgatgtggtgctc

SEQ ID NO: 478663 - DNA, 75 bp, synthetic construct
  source 1..75: mol_type = other DNA
tattgaaacttggtcgagatttacaacatactctttatccggaagaataatgtatcgattgtctaataaatttta

SEQ ID NO: 478664 - DNA, 75 bp, synthetic construct
  source 1..75: mol_type = other DNA
atgtctttaaataaaaaatatatattatttgtttatggtgaaggtgggcatgctgctcaaatgaatcgacttgct

SEQ ID NO: 478665 - DNA, 75 bp, synthetic construct
  source 1..75: mol_type = other DNA
tcgagcggcaatacaaaatcattactgatctgctgcgcaaatcatcttctgttatcaatgctggcgatcctgatg

SEQ ID NO: 478666 - DNA, 75 bp, synthetic construct
  source 1..75: mol_type = other DNA
ccaatgccctcaaaacgtgaaggctgggcaggctgcatgacgctggcgcgcgagctatcagagagcaatggcaaa

SEQ ID NO: 478667 - DNA, 75 bp, synthetic construct
  source 1..75: mol_type = other DNA
aacaaatatgttttgcaggaaaacgcgcaagcggttgagattcagttgcactgggctctgaagaacagcgatgcc

SEQ ID NO: 478668 - DNA, 75 bp, synthetic construct
  source 1..75: mol_type = other DNA
tggacggtcactttgtccccaatctgacactctcaccgttcttcgtaagtcaggttaaaaactggcaactaaacc

SEQ ID NO: 478669 - DNA, 75 bp, synthetic construct
  source 1..75: mol_type = other DNA
ctgctgattctgtctctggcgctttcaacgaccattcgccagccagagcagaaagtattgcgtgaagcgcatggc

SEQ ID NO: 478670 - DNA, 75 bp, synthetic construct
  source 1..75: mol_type = other DNA
ccgtcactggtcagtgagttcttcggcctcaataacctggcgaaaaactacggtgtgatttacctcggtttcggt

SEQ ID NO: 478671 - DNA, 75 bp, synthetic construct
  source 1..75: mol_type = other DNA
attgaagaaagagaagggaaaacattccactactactactctctggcagtcatgatttcagcgaaacaaattaat

SEQ ID NO: 478672 - DNA, 75 bp, synthetic construct
  source 1..75: mol_type = other DNA
tggttggtctggcggatggtgcgggttacctgttgacgctctctaactgcgtgaagtggtttccggagcgtaagg

SEQ ID NO: 478673 - DNA, 75 bp, synthetic construct
  source 1..75: mol_type = other DNA
ttggggtggcgaaagatatcgcccagagtctggcgcatcttgatgcaatttccgcagccaatgcagtgacagtta

SEQ ID NO: 478674 - DNA, 75 bp, synthetic construct
  source 1..75: mol_type = other DNA
ctgctgattctgtctcttgcactttctacgactattcgccagccagggcagaaggtgttgcgcgaggttcacgtc

SEQ ID NO: 478675 - DNA, 75 bp, synthetic construct
  source 1..75: mol_type = other DNA
atgaaaaggaatttattatcttccgctattatagccgccatcatggctctcggtatcacgggttgtgatgataaa

SEQ ID NO: 478676 - DNA, 75 bp, synthetic construct
  source 1..75: mol_type = other DNA
gcatcatcagaaatatgcctcatgatacagccatcagcattattaataacatcgtaaatactgataataatgagg

SEQ ID NO: 478677 - DNA, 75 bp, synthetic construct
  source 1..75: mol_type = other DNA
gggtgtggcttcatcattggtgatattgaccacgccctgccattgtctgatatgccagaaaggttctctgccagg

SEQ ID NO: 478678 - DNA, 75 bp, synthetic construct
  source 1..75: mol_type = other DNA
agctggatggtcgacgactctttcccgagagcattacgcgagtacaacgaaatggtcgatgattataatcgcctg

SEQ ID NO: 478679 - DNA, 75 bp, synthetic construct
  source 1..75: mol_type = other DNA
attgaagaaacagaaggaaaaacattccactactactccctggcagtcatgatttcagcgaaacaaattaataac

SEQ ID NO: 478680 - DNA, 75 bp, synthetic construct
  source 1..75: mol_type = other DNA
tgaagaaagtggctgaacttgaaacgctggtggcgcaagccaaagaagtgagtaaagacagtatgaattctctct

SEQ ID NO: 478681 - DNA, 75 bp, synthetic construct
  source 1..75: mol_type = other DNA
ctgtagcattagttggggggaggcattcgttgcctcttccaggaaatgcgatagcagcgcagtggttaattgaaa

SEQ ID NO: 478682 - DNA, 75 bp, synthetic construct
  source 1..75: mol_type = other DNA
gcactctttcttccagatctatctctacatggcaccctgtgaacaatgcgtttacattcgctacgccatgtttgt

SEQ ID NO: 478683 - DNA, 75 bp, synthetic construct
  source 1..75: mol_type = other DNA
agaaaattattcaagcagtgtgttaaatggatatattgatcctagtttaggaagttttcttttcgattcattctt

SEQ ID NO: 478684 - DNA, 75 bp, synthetic construct
  source 1..75: mol_type = other DNA
actgaagcggtatcgctctctggtttgtttatcccatcaggtccgattgtgcaggttcgcgataacaacggtaaa

SEQ ID NO: 478685 - DNA, 75 bp, synthetic construct
  source 1..75: mol_type = other DNA
tgctgctggcaagcgatgttgaacagttcgcgaaaaagaaaagcgagttaggcgatgaactgcgttcaggcaaac

SEQ ID NO: 478686 - DNA, 75 bp, synthetic construct
  source 1..75: mol_type = other DNA
tgcgccaggtatggaaatcacttatgtcgaattatcagggtgataatattcaatgtgattttggacctgcaggta

SEQ ID NO: 478687 - DNA, 75 bp, synthetic construct
  source 1..75: mol_type = other DNA
tttaaataaatttggctacacgccgctttcatttagaaaattatcatatttcgatgtatcaaaacttgaaccaaa

SEQ ID NO: 478688 - DNA, 75 bp, synthetic construct
  source 1..75: mol_type = other DNA
ggtcattatgttaaagaaaggaggctttcacaggcagcactattaataagactcacaaagaaaagtatttttaac

SEQ ID NO: 478689 - DNA, 75 bp, synthetic construct
  source 1..75: mol_type = other DNA
gagtccggttcgttgcgcttttacaggtgcattaacactctattactattttatcggcttctttgggatacttgc

SEQ ID NO: 478690 - DNA, 75 bp, synthetic construct
  source 1..75: mol_type = other DNA
atttccttatgactagcggggaagagcaggataataatattcgctgggtatatgattttatcagtcgacctatag

SEQ ID NO: 478691 - DNA, 75 bp, synthetic construct
  source 1..75: mol_type = other DNA
gcgtaaaggcgatcattatgtgaatgatgaggcccgcgcccggttctggaatgatcgtgaaacggccaggcttgc

SEQ ID NO: 478692 - DNA, 75 bp, synthetic construct
  source 1..75: mol_type = other DNA
agctgcagcgtgccggtgatgaggctggcgcactgcaggcggctaatcaggctgctactgccggattcaacgatc

SEQ ID NO: 478693 - DNA, 75 bp, synthetic construct
  source 1..75: mol_type = other DNA
ggtggtgctggttgaccgtttcagtgcttcggcttcggaaatctttgctgctgccatgcaggattacggtcgtgc

SEQ ID NO: 478694 - DNA, 75 bp, synthetic construct
  source 1..75: mol_type = other DNA
tgctgctggtggcgcaaccgctggaatcccctcatgggctgacgataccttgggtgctagtgcctgactggcgta

SEQ ID NO: 478695 - DNA, 75 bp, synthetic construct
  source 1..75: mol_type = other DNA
tggtgcctgaagaacaggacattgtggtcactcccgactacacccttaatttcgacaataccgacgccaaaatca

SEQ ID NO: 478696 - DNA, 75 bp, synthetic construct
  source 1..75: mol_type = other DNA
agatgatgttgaagttattgaactctctgttccagccgtgctctgcgtcacctccgatattaacgtgccacgtat

SEQ ID NO: 478697 - DNA, 75 bp, synthetic construct
  source 1..75: mol_type = other DNA
agcgtgtcggcaccaccacaaatttcttcgatctcggtggacactcacttctgctagtacagatgcagcaataca

SEQ ID NO: 478698 - DNA, 75 bp, synthetic construct
  source 1..75: mol_type = other DNA
acggttgccgactctatgtgctggatgaccatggtaatccggtagcagacggcgaagagggcgaactgtatctcg

SEQ ID NO: 478699 - DNA, 75 bp, synthetic construct
  source 1..75: mol_type = other DNA
ggctggggatcggcgaggatcgtgtggtagctatccgcctgccgcgcggcatggcaatgctgattgccattttcg

SEQ ID NO: 478700 - DNA, 75 bp, synthetic construct
  source 1..75: mol_type = other DNA
atgccaaagaaggcgaaggaactctcaggactcgtcgtatcacgattaaaatccgaaggcatgtatgccgttggt

SEQ ID NO: 478701 - DNA, 75 bp, synthetic construct
  source 1..75: mol_type = other DNA
agggtaaaccggaactgaagaaactggatgatctaccgaaagattatcaggagccggatccgtacttggatgaaa

SEQ ID NO: 478702 - DNA, 75 bp, synthetic construct
  source 1..75: mol_type = other DNA
acgctgtgcgtgaaaaagagaataacgaagatgatgcgacgcgtctggcgcggttgaacgatcgctttaaacgcg

SEQ ID NO: 478703 - DNA, 75 bp, synthetic construct
  source 1..75: mol_type = other DNA
gacgtattgaaacggtgatcgattacgccaaggccaaagaatactttgaaggtgataatcctgccgcatggaaag

SEQ ID NO: 478704 - DNA, 75 bp, synthetic construct
  source 1..75: mol_type = other DNA
aacatgtcgctcagtggcgagctaccttagaaacatacgcctatccgtttattggtcagaaagcagtaaatgaaa

SEQ ID NO: 478705 - DNA, 75 bp, synthetic construct
  source 1..75: mol_type = other DNA
cggtattaaaacgcatggggcgtagtgatttaacccagcacggtttccgctccacgtttcgtgaatgggcagggg

SEQ ID NO: 478706 - DNA, 75 bp, synthetic construct
  source 1..75: mol_type = other DNA
taactaatgattttcagcacgaagccaggatattaaacagcatatggctcattaccgctttaggtttggtggcaa

SEQ ID NO: 478707 - DNA, 75 bp, synthetic construct
  source 1..75: mol_type = other DNA
atgcgtacacgaattgattatctggcggataaatacagttttacagagctgaatgaatccccccgtcttcgccgg

SEQ ID NO: 478708 - DNA, 75 bp, synthetic construct
  source 1..75: mol_type = other DNA
catcagccagaaaaatgtggtgttcaacgataaacgttttggctgcgtgtacagcctgaaggccagcctttcggg

SEQ ID NO: 478709 - DNA, 75 bp, synthetic construct
  source 1..75: mol_type = other DNA
ggcagcctgagttcacagataaaacactctccaggaaacccggggcggttcagaaggccagtctttccagtgtgc

SEQ ID NO: 478710 - DNA, 75 bp, synthetic construct
  source 1..75: mol_type = other DNA
atgacacgcagaactcagttcaaaggcaattcacgttctcgtcgtcgtgagcgtttaaaggcaaaggcattagct

SEQ ID NO: 478711 - DNA, 75 bp, synthetic construct
  source 1..75: mol_type = other DNA
gtcggcagacagaggccggaccagaagaacggctgcgtattgccctgctgaatgtggattacgtcaccagttttg

SEQ ID NO: 478712 - DNA, 75 bp, synthetic construct
  source 1..75: mol_type = other DNA
gtggattacgtcaccagttttgaactgccttttcgcttgctgcttacccggacaccacaactgattgccgcgctg

SEQ ID NO: 478713 - DNA, 75 bp, synthetic construct
  source 1..75: mol_type = other DNA
aactgccttttcgcttgttgcttactcgtacaccacaactgattgccgcgctgcgtgaagaatgggacatcagcc

SEQ ID NO: 478714 - DNA, 75 bp, synthetic construct
  source 1..75: mol_type = other DNA
ttgcgtgaagaatgggacatcagccagaaaaatgtgctgtttaacgataaacggtttggttgcgtgtacagcctg

SEQ ID NO: 478715 - DNA, 75 bp, synthetic construct
  source 1..75: mol_type = other DNA
tgccggatacataccggtatcatctgtctcatcgtattcgccgggtggttgggaatgaaaagacatcatcgccat

SEQ ID NO: 478716 - DNA, 75 bp, synthetic construct
  source 1..75: mol_type = other DNA
caaccagaaactggtgtatgtcttccaaacgtagccatttacgcggcaggctaccggaaatccaaacaactgacg

SEQ ID NO: 478717 - DNA, 75 bp, synthetic construct
  source 1..75: mol_type = other DNA
gaaaacacatcattgccatatcagcaggttgcccgggaagtgaaagtgccccgtgaacggctgaagtatgcgctg

SEQ ID NO: 478718 - DNA, 75 bp, synthetic construct
  source 1..75: mol_type = other DNA
aggttgagaaagttcggaatgccggtggtgacaacgaccgcggaggtgcatgataatctgacgggaacaacccgc

SEQ ID NO: 478719 - DNA, 75 bp, synthetic construct
  source 1..75: mol_type = other DNA
gcgtttaaaggcaaaggcattagctaacggcgtactggcccgcgaagaagcaataagttcagaagtattacaccg

SEQ ID NO: 478720 - DNA, 75 bp, synthetic construct
  source 1..75: mol_type = other DNA
cgcgctcgtacccgtactttgagcgtcgaacagaactacgataaatggtacgagttcacgggtgagcaggatctg

SEQ ID NO: 478721 - DNA, 75 bp, synthetic construct
  source 1..75: mol_type = other DNA
atggcgagccggtgccgtattgcctggcgcgtattccgcaggggggcgaaacccgtggcaatctggctgccggtg

SEQ ID NO: 478722 - DNA, 75 bp, synthetic construct
  source 1..75: mol_type = other DNA
tctgtatctgatcaatggcgaagcccgcgcccatacccgcacgctgaacgtgaagcagaactacgaagagtggtt

SEQ ID NO: 478723 - DNA, 75 bp, synthetic construct
  source 1..75: mol_type = other DNA
ggaaccctgcgacagggaattatactgttaccagcgaaacggcaaaagccgtggcaagaaatctgggcgcagtaa

SEQ ID NO: 478724 - DNA, 75 bp, synthetic construct
  source 1..75: mol_type = other DNA
tcaccagcccaacctgtattcgtgagattgaagcagagtttccggtgtcgatcactggaatgttaatggatgcca

SEQ ID NO: 478725 - DNA, 75 bp, synthetic construct
  source 1..75: mol_type = other DNA
ggacgctgatcgttaacaagccgcagagcctgcgcgattgtaacgaaaaactgttcactgcctggttctctgact

SEQ ID NO: 478726 - DNA, 75 bp, synthetic construct
  source 1..75: mol_type = other DNA
atgttctggaaccctgaagtaataacgacgaccggaaaatcgcttcgcatcactcaaatccaatttaacataata

SEQ ID NO: 478727 - DNA, 75 bp, synthetic construct
  source 1..75: mol_type = other DNA
tagcagaaaaattaaacaagccaaaattgctgaagtattacaacaggttcaactgggagaaagttattccctgat

SEQ ID NO: 478728 - DNA, 75 bp, synthetic construct
  source 1..75: mol_type = other DNA
tatttccattatgtatcaacgaccccgaattggtctggcagtgattgttaaaacaatcaatggactcggcaccta

SEQ ID NO: 478729 - DNA, 75 bp, synthetic construct
  source 1..75: mol_type = other DNA
aatgatagccaactatggtgggctggataaatatatatcatccatgaataagattactgaagagtataataaggg

SEQ ID NO: 478730 - DNA, 75 bp, synthetic construct
  source 1..75: mol_type = other DNA
attcgtggttttgatgccagcctctacgtgaaagataaatcactagcgatccgtaccgaagacttacgtctgatt

SEQ ID NO: 478731 - DNA, 75 bp, synthetic construct
  source 1..75: mol_type = other DNA
gccatgtcgttctcgccggacagcaggctcaccatgaaagcgctggaaatggcatgggaaacccgtggtaagccc

SEQ ID NO: 478732 - DNA, 75 bp, synthetic construct
  source 1..75: mol_type = other DNA
cggttgtctgattgccttcggcggcacagtttggctgtggccgcagtggcagagcggcttattgcgcaagaacgc

SEQ ID NO: 478733 - DNA, 75 bp, synthetic construct
  source 1..75: mol_type = other DNA
cagtttgcatcagccggaagaggtgcaaaagctggtcgagcgtagccatgcggaagaagttatccgctggaatgc

SEQ ID NO: 478734 - DNA, 75 bp, synthetic construct
  source 1..75: mol_type = other DNA
atgaaactgtgggtaacgcacagtcagtttattgttgagcatattaatgccatgaccacgctggcgcgggaacac

SEQ ID NO: 478735 - DNA, 75 bp, synthetic construct
  source 1..75: mol_type = other DNA
gaacaccgggcattgccacctgaactggcacaagagtatttacagtcttgtgaaatcgccattcagcgttgtcag

SEQ ID NO: 478736 - DNA, 75 bp, synthetic construct
  source 1..75: mol_type = other DNA
cgttgctcatctatgcgctgggcactctctggtacggattgtttaactggttttggttctggatctggcgcgaac

SEQ ID NO: 478737 - DNA, 75 bp, synthetic construct
  source 1..75: mol_type = other DNA
gccgccagcgactgcgagcgtatggccatgacactgtcgggctataacggtggcccgggctgggtgcgccgtgac

SEQ ID NO: 478738 - DNA, 75 bp, synthetic construct
  source 1..75: mol_type = other DNA
gcgggagaaccgtcattatccgcagcgcatcctgcacgaactggccccgcgttatctcacctggggaggcggcag

SEQ ID NO: 478739 - DNA, 75 bp, synthetic construct
  source 1..75: mol_type = other DNA
tccggctggaacccttctgcccgctcgcccgttggcgcacaggggatggcgcagtttatgccctccaccagcgac

SEQ ID NO: 478740 - DNA, 75 bp, synthetic construct
  source 1..75: mol_type = other DNA
aaccgctgcgcgagtcactcagcctgctgtatcgcgagctggcagactactgcgaagcgaaatacagcctgctta

SEQ ID NO: 478741 - DNA, 75 bp, synthetic construct
  source 1..75: mol_type = other DNA
tgcccgccaccgctgactggataagccagttgatgccggcgttgagcagtcgtgagccgtttaatccggcatggg

SEQ ID NO: 478742 - DNA, 75 bp, synthetic construct
  source 1..75: mol_type = other DNA
gtcattatccgcagcgcatcctgcgtgagctggcaccgcgatatctcacatgggggggcagcagctgtgtggcat

SEQ ID NO: 478743 - DNA, 69 bp, synthetic construct
  source 1..69: mol_type = other DNA
tctcaggagaaccccgctgacccggcggcgtgtttgccgttgttccgtgtcagtggtggcgcattatag

SEQ ID NO: 478744 - DNA, 75 bp, synthetic construct
  source 1..75: mol_type = other DNA
ttgccgcgcgtggactggaaatgacaagtgttgacctcgaaacaatggtagaagtctggcaacaggtaaaacggc

SEQ ID NO: 478745 - DNA, 75 bp, synthetic construct
  source 1..75: mol_type = other DNA
gtcatgtacgaggcgcggcaggctgtagtggaccaggctaaactggaggaggaaatgggcgacctgctgtttgcg

SEQ ID NO: 478746 - DNA, 75 bp, synthetic construct
  source 1..75: mol_type = other DNA
attccacaccgatcaaggtttactgcttcccggaagagaagatgcagattgaagcaaatgccgccgctgctggtc

SEQ ID NO: 478747 - DNA, 75 bp, synthetic construct
  source 1..75: mol_type = other DNA
gtgaagtgcttacccgttgggagcaaatcaaaaccgaagagcgcgcgcagaaagcgcagcattcagcgctggacg

SEQ ID NO: 478748 - DNA, 75 bp, synthetic construct
  source 1..75: mol_type = other DNA
cagaaatatgaatggtgaatatgtctggccctggatattgccgttttcagcggcaggcatgaaacatactggcat

SEQ ID NO: 478749 - DNA, 75 bp, synthetic construct
  source 1..75: mol_type = other DNA
atgccaaatcatgatcgattcgaatgccaaactgcgatcgattcagatgccattttgcaggatacggcagaagat

SEQ ID NO: 478750 - DNA, 75 bp, synthetic construct
  source 1..75: mol_type = other DNA
ttatcaacaaagttcagaggcagaaaaattagcccaatctattattctgaatggaattcggtgtcagattcagta

SEQ ID NO: 478751 - DNA, 75 bp, synthetic construct
  source 1..75: mol_type = other DNA
aacccgtaagttgtcttgcgcattatcaacaaagcccagaagcagaaaaaatagcacaatctattattctgaatg

SEQ ID NO: 478752 - DNA, 75 bp, synthetic construct
  source 1..75: mol_type = other DNA
gactttctctcagccgttttcatcggtagtgcaaatgctacgacctggcgttggtcgctgggatattagtggtgg

SEQ ID NO: 478753 - DNA, 75 bp, synthetic construct
  source 1..75: mol_type = other DNA
accaatcagagcatcccttttattgttgttgaagggaagaaaaacgcactggcctgtatcacgctgaagaatttg

SEQ ID NO: 478754 - DNA, 75 bp, synthetic construct
  source 1..75: mol_type = other DNA
actcaatactgatggtggatttgtgttacatagcggcgggctgacgttcagtaatgacagttttagtgattccga

SEQ ID NO: 478755 - DNA, 75 bp, synthetic construct
  source 1..75: mol_type = other DNA
caaaacggacgttctcccagccattttcatctgttgtgcaaatgctgcgccctggcgttggtcgctgggatatta

SEQ ID NO: 478756 - DNA, 75 bp, synthetic construct
  source 1..75: mol_type = other DNA
gcttaacgcatctgaaccgccgcgagcatctctggcatggcgaaacgaactgattcgaactgcacgagaagtctg

SEQ ID NO: 478757 - DNA, 75 bp, synthetic construct
  source 1..75: mol_type = other DNA
aaagtaccggacccgaaattctcctcccagactaaagacaaactggtttcttctgaggtgaaatcggcggtagaa

SEQ ID NO: 478758 - DNA, 75 bp, synthetic construct
  source 1..75: mol_type = other DNA
cccatcaacaatggtggaccgtattgtgcccgcagtgacagaggatacgctgtcgaaaatcgaacaacttaccgg

SEQ ID NO: 478759 - DNA, 75 bp, synthetic construct
  source 1..75: mol_type = other DNA
gataactttgttgccggacgtccggaatgggaaaaagcgggagccgaactggttagtgatgtgctgccttatgaa

SEQ ID NO: 478760 - DNA, 75 bp, synthetic construct
  source 1..75: mol_type = other DNA
tgagtacaacgcgacgcagaaaatgatcaaccgcatggagcgtcgttatccgaaagcaatgctgaaagagcttat

SEQ ID NO: 478761 - DNA, 75 bp, synthetic construct
  source 1..75: mol_type = other DNA
tgctgttgacctttttctatcgtcagatgccggaaatcgttgaacgtggtcacgtctacatcgctcagccgccgc

SEQ ID NO: 478762 - DNA, 75 bp, synthetic construct
  source 1..75: mol_type = other DNA
gttacccgctgggtgaacgcgctggtcagcgaactgaacgacaaagaacagcacggcagccagtggaagtttgat

SEQ ID NO: 478763 - DNA, 75 bp, synthetic construct
  source 1..75: mol_type = other DNA
gccaggcatcggcaggcggcaattcaatggttgtgccgatgattcagagcctgcgcccgggtgctgaggtgaacg

SEQ ID NO: 478764 - DNA, 75 bp, synthetic construct
  source 1..75: mol_type = other DNA
gcccaggcgcaacaactgattgccccggtggtaaagctgggaagcgaagagattaacgtcctgacactgctcacc

SEQ ID NO: 478765 - DNA, 75 bp, synthetic construct
  source 1..75: mol_type = other DNA
agataaaacaaccgtgcttggcacggccacacttctggccggggcggtcgttcatatcagcgagggggattacag

SEQ ID NO: 478766 - DNA, 75 bp, synthetic construct
  source 1..75: mol_type = other DNA
aaccaatgccgccgagtttacacagacggcgacgaaagccgggcagacccggagcaagtaccagaacattatcgc

SEQ ID NO: 478767 - DNA, 75 bp, synthetic construct
  source 1..75: mol_type = other DNA
aacagctgcggtcggggcttcatcaccgcagagacaacaaccgattacaccggaaaactggtgcggctggatgtg

SEQ ID NO: 478768 - DNA, 75 bp, synthetic construct
  source 1..75: mol_type = other DNA
gccaagcgaggatgtttcagggggtaatattgccgatccattccgcccgcgctatgccgtggatctccagctgct

SEQ ID NO: 478769 - DNA, 75 bp, synthetic construct
  source 1..75: mol_type = other DNA
gagatgaacccggaacagctgtgggaaaccactatggacccggaaagtcgtcgtatgctgcgcgttaccgttaaa

SEQ ID NO: 478770 - DNA, 75 bp, synthetic construct
  source 1..75: mol_type = other DNA
aaaaaaatacacctgtgaatgcagatgttggggatttgatttgcaaagaagattatgaagctaaaccatatcaat

SEQ ID NO: 478771 - DNA, 75 bp, synthetic construct
  source 1..75: mol_type = other DNA
acagcaatggttaaatgctgctgagcgatttggatttttgagtaaacgtgtccagttacaacaaaagctagaaaa

SEQ ID NO: 478772 - DNA, 75 bp, synthetic construct
  source 1..75: mol_type = other DNA
gattatgaagctaaaccatatcaatatcccggaactgcttactataaagcatatgttgaaaaaaaagaaaaaaat

SEQ ID NO: 478773 - DNA, 75 bp, synthetic construct
  source 1..75: mol_type = other DNA
ctgttctcctcaatgatgggggctggtggtctccttggcattgccattcatgcgtcggtcggcgcccggatatca

SEQ ID NO: 478774 - DNA, 75 bp, synthetic construct
  source 1..75: mol_type = other DNA
gtcgccgggctctccgttgagcgcgtctcgtcactgaaagcggtgatcgggaacgtcgcgattctaggtggcccg

SEQ ID NO: 478775 - DNA, 75 bp, synthetic construct
  source 1..75: mol_type = other DNA
aaccgtggaatgatcccatggcgaataaccctctgacgacgctcaatttgctggaacacgacgatagccatgtcg

SEQ ID NO: 478776 - DNA, 75 bp, synthetic construct
  source 1..75: mol_type = other DNA
cgccgatccacccgaacatcttctacttctccaccgagaaagacggtatcggcgttgaagtggcattgcagtgga

SEQ ID NO: 478777 - DNA, 75 bp, synthetic construct
  source 1..75: mol_type = other DNA
gcgggcctgccgggcaaactggcagactgtcaggaacgcgatccggcgctctctgaactgtacctagtggaagga

SEQ ID NO: 478778 - DNA, 75 bp, synthetic construct
  source 1..75: mol_type = other DNA
tgctgttgactttcttctatcgtcagatgccggaaatcgttgaacgcggtcacgtttatattgctcagccgccgc

SEQ ID NO: 478779 - DNA, 75 bp, synthetic construct
  source 1..75: mol_type = other DNA
atggtggtaatggcttcgttataaatgatattacaccttcaaataacattatatggtcatcgccaaatggctgga

SEQ ID NO: 478780 - DNA, 75 bp, synthetic construct
  source 1..75: mol_type = other DNA
atgaaagttaaagtactgtccctcctggtcccagctctgctggtagcaggcgcagcaaacgctgctgaaatttac

SEQ ID NO: 478781 - DNA, 75 bp, synthetic construct
  source 1..75: mol_type = other DNA
gcttccgtgcggcgatgacccgtactctgaacgcctacatggacaaagaaggttacagcaaaaaagccaaagtca

SEQ ID NO: 478782 - DNA, 75 bp, synthetic construct
  source 1..75: mol_type = other DNA
gaagctcgccggacgtaagttgtggagcgatcaggacgtcactaccgctgcggcattgctgaaaagcgcagacgc

SEQ ID NO: 478783 - DNA, 75 bp, synthetic construct
  source 1..75: mol_type = other DNA
taagtcagcagaatatttcgatggatctcccggaaaccctgcaaagccaggcaatgctggaaaagctgatgcaaa

SEQ ID NO: 478784 - DNA, 75 bp, synthetic construct
  source 1..75: mol_type = other DNA
cgatgccctggctaaccaactgacggcattgcaaaaagcccaggagagccaaaaagccgagctggaaggcattat

SEQ ID NO: 478785 - DNA, 75 bp, synthetic construct
  source 1..75: mol_type = other DNA
taaacctgcacctgcaccctgcacctgcacctgcacctgcacctgcacctgcacctgcacctgcacctgcaccgc

SEQ ID NO: 478786 - DNA, 75 bp, synthetic construct
  source 1..75: mol_type = other DNA
cagcctggcggatatgaatgacccgagtctgattaccgttcgccgggcaattaccgatgatatcgccagcctttc

SEQ ID NO: 478787 - DNA, 75 bp, synthetic construct
  source 1..75: mol_type = other DNA
accggcagcggggacaacggaagctaaacctgcacctgcacctgcaccgcaagctgcaccgcaagctgatactcc

SEQ ID NO: 478788 - DNA, 75 bp, synthetic construct
  source 1..75: mol_type = other DNA
cactatgtcggtcaggaaaaactgcgcccacaaaccggctggttgccgctggcctttgcgctcgactggaaccgc

SEQ ID NO: 478789 - DNA, 75 bp, synthetic construct
  source 1..75: mol_type = other DNA
tttggcgatgacgatccgcaatatcagcaggcgctgaagtacgacgacttaatcgccatccaaaaacaaccgtgg

SEQ ID NO: 478790 - DNA, 75 bp, synthetic construct
  source 1..75: mol_type = other DNA
tactgcaacgactggggctggaagaccgtacagagtattatccggcacagctttcgggtggtcagcaacagcgcg

SEQ ID NO: 478791 - DNA, 75 bp, synthetic construct
  source 1..75: mol_type = other DNA
ccgtggttgaagataccagggaggccgtggacaccacgccacaacctgtcgttgcagaaaagaagagtaagaaca

SEQ ID NO: 478792 - DNA, 75 bp, synthetic construct
  source 1..75: mol_type = other DNA
taataccgcaggtgaattggtagtgccgaacggttcgattggtttccgctggggagaaaaaggcaaatggaatct

SEQ ID NO: 478793 - DNA, 75 bp, synthetic construct
  source 1..75: mol_type = other DNA
gctggctaccttctgcgccgcagctggggcgtaacccgctcgggattaaagctgaagccgacaaggccggattat

SEQ ID NO: 478794 - DNA, 75 bp, synthetic construct
  source 1..75: mol_type = other DNA
ggctgtgccacgtcatcaggaagaaacctaccgccaggcactggagaatgtctctacatgggttcgtgcttatta

SEQ ID NO: 478795 - DNA, 75 bp, synthetic construct
  source 1..75: mol_type = other DNA
aaaccacccgcgtaatctgttcatctggcgttctaacctgctcggttcttccggtaaaggtcatgagtttatgct

SEQ ID NO: 478796 - DNA, 75 bp, synthetic construct
  source 1..75: mol_type = other DNA
ctttataccttgcggaagcctatcgccattttggtcatgatgcccgggcgcggctgttgctggaggatcaactga

SEQ ID NO: 478797 - DNA, 75 bp, synthetic construct
  source 1..75: mol_type = other DNA
gcagcaggaatggaacgggaggcatcagcgcagtatggagtcccggctgaaacaggcccgcttcccgtgggtcaa

SEQ ID NO: 478798 - DNA, 75 bp, synthetic construct
  source 1..75: mol_type = other DNA
tccccgccccgtccacctctcttcccgactggtggtcttcgatgctgctgaaatccgtcagtggcaacagcgccg

SEQ ID NO: 478799 - DNA, 75 bp, synthetic construct
  source 1..75: mol_type = other DNA
tgcctggaacacccagagcgagatggatctcctgcgtaagctcaactacaccaaagcggaaggtccggcaaaagg

SEQ ID NO: 478800 - DNA, 75 bp, synthetic construct
  source 1..75: mol_type = other DNA
cgcacattatggtcgtagagcgcgattatccggcaacttacgaacgctttacctctatcggcccgctgatggaga

SEQ ID NO: 478801 - DNA, 75 bp, synthetic construct
  source 1..75: mol_type = other DNA
caaaccggcgtaccttgatgccctgatcatgcattacgatggtacccgactcatacttgacggaaaatacaacaa

SEQ ID NO: 478802 - DNA, 75 bp, synthetic construct
  source 1..75: mol_type = other DNA
tcgtgatgtggagaactggctgagggattcagtcgggctcaccaaatcacaggcagttgggctaatagcccggtt

SEQ ID NO: 478803 - DNA, 75 bp, synthetic construct
  source 1..75: mol_type = other DNA
tatttcaccgactatgtgcgtcgctacaccgacatgccgatgctggtgatgctggaagagcgcgacggttactac

SEQ ID NO: 478804 - DNA, 75 bp, synthetic construct
  source 1..75: mol_type = other DNA
cgttatgccgtcagcgtggcgactcgtaacaaggctgaagctctgcgtctggcgcggttgctgtatcagcaagaa

SEQ ID NO: 478805 - DNA, 75 bp, synthetic construct
  source 1..75: mol_type = other DNA
acgctgaatatcaaaggagagagttaccggttaaaagagaaacgtaaagcaggagtgctgaccaaaaacacaacg

SEQ ID NO: 478806 - DNA, 75 bp, synthetic construct
  source 1..75: mol_type = other DNA
cattatcgtcgcgacacaaatcaagaaagcaagtggtgatgtctatcaaaccattatcaatagcgcagttttttt

SEQ ID NO: 478807 - DNA, 75 bp, synthetic construct
  source 1..75: mol_type = other DNA
ccacgcccgccgtctcgcaaaacctgcgcctgcgttataacaatgttgatgtggctgccagtgccaatggcgtga

SEQ ID NO: 478808 - DNA, 75 bp, synthetic construct
  source 1..75: mol_type = other DNA
caggttactacagctacctgtgggccgatgtgctggcggcagatgccttctcgcgttttgaggaagagggcattt

SEQ ID NO: 478809 - DNA, 75 bp, synthetic construct
  source 1..75: mol_type = other DNA
aatctctgccagccgcttgcagaagtcgatgatgtactgggacgtattttctccccggttagccacctgaactcg

SEQ ID NO: 478810 - DNA, 75 bp, synthetic construct
  source 1..75: mol_type = other DNA
gatctcactgccatgtcggttgaggttgttacttttttgttgaagaagtcggtacttgccggtttaccgacagcc

SEQ ID NO: 478811 - DNA, 75 bp, synthetic construct
  source 1..75: mol_type = other DNA
caccatatgctgacccgcatcgaaaccgccggtgtatccgggatcagtggggtgccgtgggatgcggtcgaactg

SEQ ID NO: 478812 - DNA, 75 bp, synthetic construct
  source 1..75: mol_type = other DNA
aagctacctgccggtaatgacctactgcgacaaccaggctctgcgcgaagagatgtatcgtgcttacagcacccg

SEQ ID NO: 478813 - DNA, 75 bp, synthetic construct
  source 1..75: mol_type = other DNA
cgttacggtgagattgccactcgtctttccgagctgggcaaccagtacagcaacaacgtcctcgatgcgacaatg

SEQ ID NO: 478814 - DNA, 75 bp, synthetic construct
  source 1..75: mol_type = other DNA
gtgctgcgtaaaccgcagtccggtgcgctgcgcggtacacgcctgcaggccattatggatatggatgttaacgcg

SEQ ID NO: 478815 - DNA, 75 bp, synthetic construct
  source 1..75: mol_type = other DNA
acgaaactacgaaaattatttttgtgaatgtattgacaacgctaactatttttaattatatattcatgatgctcc

SEQ ID NO: 478816 - DNA, 75 bp, synthetic construct
  source 1..75: mol_type = other DNA
atgagtgataagcagactgaaaagaccattcaactggatacccctatcaagcgcggtaaaacggaaatcaccgaa

SEQ ID NO: 478817 - DNA, 75 bp, synthetic construct
  source 1..75: mol_type = other DNA
attgtgctgcgtaaaccgcagtccggtgcactgcgcggtacacgcctgcaggctattatggatatggatgtgaac

SEQ ID NO: 478818 - DNA, 75 bp, synthetic construct
  source 1..75: mol_type = other DNA
tggcgatgttttttaaccacaggacgtgggaactgccggttggcaaatgggacagcctggctgaggacgaaaaag

SEQ ID NO: 478819 - DNA, 75 bp, synthetic construct
  source 1..75: mol_type = other DNA
ggaaatggcagagctggaccccgccgatctcacctcgttgtctgttgaggtggtcacttttttgttgaagaagtc

SEQ ID NO: 478820 - DNA, 75 bp, synthetic construct
  source 1..75: mol_type = other DNA
caccatatgctgacccgcattgaaaccgctggtgtttccggtatcagcggtgtgccgtgggatgcggtcgaactg

SEQ ID NO: 478821 - DNA, 75 bp, synthetic construct
  source 1..75: mol_type = other DNA
gacgccgatgcgctggcgcaactgcgccgcgagcatttcggctttattttccagcgttaccatttactttcgcat

SEQ ID NO: 478822 - DNA, 75 bp, synthetic construct
  source 1..75: mol_type = other DNA
tagggcatctcggcaaagaaaccgacgtggtattacaaccactgctgcatgactccccggcagagctttcacagc

SEQ ID NO: 478823 - DNA, 75 bp, synthetic construct
  source 1..75: mol_type = other DNA
tgcgggcggttgaatgggaagagtacagcgaacgcatggtgcagctgctggacatccattatcgcaaagaaggct

SEQ ID NO: 478824 - DNA, 75 bp, synthetic construct
  source 1..75: mol_type = other DNA
actttcactgcgccacggaaagaaggatttctttacctggaacatggacggcgtcttgaaaactgttgaaaagac

SEQ ID NO: 478825 - DNA, 75 bp, synthetic construct
  source 1..75: mol_type = other DNA
gcgcgttagggatctctctttcgctgttaatcgctttcaccttgcagctttttttacccggctgggaaattggct

SEQ ID NO: 478826 - DNA, 75 bp, synthetic construct
  source 1..75: mol_type = other DNA
gttgtcgctgcgtcacggcaaaaaggatttcttcacctggaacatggacggcgtcttgaaaaccgtcgaaaagac

SEQ ID NO: 478827 - DNA, 75 bp, synthetic construct
  source 1..75: mol_type = other DNA
tgggtatattctctttgcaagaggtgttatcaatagcatcaaatattgaaataagcaatgcaatgctaattttac

SEQ ID NO: 478828 - DNA, 75 bp, synthetic construct
  source 1..75: mol_type = other DNA
gcgcggtaaaacagaaattaccgaaattgtgctgcgtaaacctcagtctggtgcgctgcgcggcacacgcctgca

SEQ ID NO: 478829 - DNA, 75 bp, synthetic construct
  source 1..75: mol_type = other DNA
tttctgaactgggcaaccagtacagcaacaacgtcctcgatgcgacgatgggctggaccaaactcgttaccgacg

SEQ ID NO: 478830 - DNA, 75 bp, synthetic construct
  source 1..75: mol_type = other DNA
ggacatccattatcgcaaagaaggctatgagcgcatttctgccaccaacccaggtggtttaagcgacaagcttcg

SEQ ID NO: 478831 - DNA, 75 bp, synthetic construct
  source 1..75: mol_type = other DNA
acagcgaacgcatggtgcagctgctggacatccattatcgcaaagaaggctatgagcgcatttctgccaccaacc

SEQ ID NO: 478832 - DNA, 75 bp, synthetic construct
  source 1..75: mol_type = other DNA
tttcattgtgccttgaaaatggaatagctgaattagaacacggtaaattagcatttaaaaacaagttaatattag

SEQ ID NO: 478833 - DNA, 75 bp, synthetic construct
  source 1..75: mol_type = other DNA
gcctgcaagtgctacgcgacagcaacgacggatttgtgattgcgcaaaaagatttagagattcgcggccctggtg

SEQ ID NO: 478834 - DNA, 75 bp, synthetic construct
  source 1..75: mol_type = other DNA
cggatgaaacctgccgaaaagcaagcggtaatggcgtcgtttaaacaaggcgagctacacctgctggttgccact

SEQ ID NO: 478835 - DNA, 75 bp, synthetic construct
  source 1..75: mol_type = other DNA
ctctggcgatgaccgcgtatgccgatctcgatacctcggtcattgatgaactgccgccaggacgtaccccagtga

SEQ ID NO: 478836 - DNA, 75 bp, synthetic construct
  source 1..75: mol_type = other DNA
ttgcaccgcccgccgccgacgctacagcttagcgatctcgaaaccgggcagcatccggcacaacgccgtctgatt

SEQ ID NO: 478837 - DNA, 75 bp, synthetic construct
  source 1..75: mol_type = other DNA
aagagttgaaactggcgctaccagagttgaatgttggcctggtacacggacggatgaaacccgccgagaaacagg

SEQ ID NO: 478838 - DNA, 75 bp, synthetic construct
  source 1..75: mol_type = other DNA
gcgtacagggtgatctcagtactccggagctacaggaaacgctcacgccggtttacccaacgactgaaggcgtta

SEQ ID NO: 478839 - DNA, 75 bp, synthetic construct
  source 1..75: mol_type = other DNA
gtgtaggtcgtggcgcggtggcttctcactgcgtgctgctctacaaaacgccgctctccaaaaccgcgcaaatcc

SEQ ID NO: 478840 - DNA, 75 bp, synthetic construct
  source 1..75: mol_type = other DNA
ttgtgaatctcatttttgggttcgaggccgttgaaactgatagtggttatcagcttaatctcaccaaagatcagt

SEQ ID NO: 478841 - DNA, 75 bp, synthetic construct
  source 1..75: mol_type = other DNA
tgagcaaattacgcagcgttgctgaaaaaggcgttatcaagcgcgcagatagttacaaagtgctttattccgaac

SEQ ID NO: 478842 - DNA, 75 bp, synthetic construct
  source 1..75: mol_type = other DNA
gcggagatgatccacccggaataccgcgtgcagggcgatctcagtacgccagagttgcaggaaacgctcacgccg

SEQ ID NO: 478843 - DNA, 75 bp, synthetic construct
  source 1..75: mol_type = other DNA
tattcacgaacgttacccacaacaggcaaaagccctgatagaacgctggatgccggaaacggaacgttactccaa

SEQ ID NO: 478844 - DNA, 75 bp, synthetic construct
  source 1..75: mol_type = other DNA
gtcaggcgtattgggtttgtacgctgattgaagagtcagaattactggaagcgcaagcggcagaagcgacgtggg

SEQ ID NO: 478845 - DNA, 75 bp, synthetic construct
  source 1..75: mol_type = other DNA
agcttagcgatctggacaccggccagcatccggcacaacgccgtctgattctggaagaactgctggcgcacaacc

SEQ ID NO: 478846 - DNA, 75 bp, synthetic construct
  source 1..75: mol_type = other DNA
acggtcgcaccctggacgttgaaggcggcgattatcaggtcattgaaaacgtgcgcgtggttgataaagcatccc

SEQ ID NO: 478847 - DNA, 75 bp, synthetic construct
  source 1..75: mol_type = other DNA
tatcaactcagtctgactaaagagcagtatgaagccgttaaagcgctccagaagcagattgaagatgaaatgact

SEQ ID NO: 478848 - DNA, 75 bp, synthetic construct
  source 1..75: mol_type = other DNA
gggtatcgatggtacgccaatcagcgccaaagcagtgggtattacgctgttcgggccttacgtgctggcggttga

SEQ ID NO: 478849 - DNA, 75 bp, synthetic construct
  source 1..75: mol_type = other DNA
aaggcggcgattaccagtcgattgaaaccctgcgagttgccgataaagcggcgcgtcgtgtgcgtctgctggcta

SEQ ID NO: 478850 - DNA, 75 bp, synthetic construct
  source 1..75: mol_type = other DNA
ggtcctggccgcacaggtggtgtgttcggtggaaggggtggtgctgtccagtgatgtgacggcaaaagcccaggt

SEQ ID NO: 478851 - DNA, 75 bp, synthetic construct
  source 1..75: mol_type = other DNA
accaggtaaaccagctgctgggtgaaaccaatgaagtggaacgcacgctgctgtttatcggtacgggtaccaaaa

SEQ ID NO: 478852 - DNA, 75 bp, synthetic construct
  source 1..75: mol_type = other DNA
tggcgctggatgtgccgatgatgcgcctggtgcagggcgatgtaggttccggtaaaacgctggtcgccgccctcg

SEQ ID NO: 478853 - DNA, 75 bp, synthetic construct
  source 1..75: mol_type = other DNA
cgctggcgatgactgcgtatgccgatctcgatacctcggtgatagatgagctgccgccaggccgcacgccagtga

SEQ ID NO: 478854 - DNA, 75 bp, synthetic construct
  source 1..75: mol_type = other DNA
accgaattactcgccgagcagcacgccaataacttccgtaactggtttgcaccgctcggtatcgaagtgggctgg

SEQ ID NO: 478855 - DNA, 75 bp, synthetic construct
  source 1..75: mol_type = other DNA
gccggtgcgctggaaattattgtctacgcgggtgccattatggtgctgttcgtgttcgtggtgatgatgctcaac

SEQ ID NO: 478856 - DNA, 75 bp, synthetic construct
  source 1..75: mol_type = other DNA
cgtcggcaatggtcaacgcatccgcctgaaaggccaggggacgccgggcgaaaatggcggcccgaatggcgattt

SEQ ID NO: 478857 - DNA, 75 bp, synthetic construct
  source 1..75: mol_type = other DNA
ccgccgaaaccggatgaaaatacagccgcactttggcaacaactggcagacgcccagtcgtcttttgatccacgt

SEQ ID NO: 478858 - DNA, 75 bp, synthetic construct
  source 1..75: mol_type = other DNA
aacctggctctgactgaagagcaaacaaggttgctggcggagttcaaaacggaacacgcacaacagcaacataaa

SEQ ID NO: 478859 - DNA, 75 bp, synthetic construct
  source 1..75: mol_type = other DNA
gtgaaattgttcctctggtcaaccatcgcctttgctattgcgtcgtgggcgtgtggtgtctccagcagcctgaat

SEQ ID NO: 478860 - DNA, 75 bp, synthetic construct
  source 1..75: mol_type = other DNA
tgctggaaaccgccccgaaaggcttttcgccagactgggtgcgctatgaaaaagataaaggctggcagttaaaac

SEQ ID NO: 478861 - DNA, 75 bp, synthetic construct
  source 1..75: mol_type = other DNA
cttcttgaatggacgcaaaacaatctcgctcagggatcgttaaaggagcatttacccgcctggctgtggggtaaa

SEQ ID NO: 478862 - DNA, 75 bp, synthetic construct
  source 1..75: mol_type = other DNA
gatatcaacaaatggggtatcgaccatacctttgaatgcatcggtaatgtcaacgtgatgcgtgcagcgctggaa

SEQ ID NO: 478863 - DNA, 75 bp, synthetic construct
  source 1..75: mol_type = other DNA
gatgccagacggcaccacccgtttttcttacaacgggcagccgctttatcactacatgggatgctcaacattcag

SEQ ID NO: 478864 - DNA, 75 bp, synthetic construct
  source 1..75: mol_type = other DNA
accagcgtcaaacctggcgaccatgtgatcccgctttacaccgcagagtgcggcgagtgtgagttctgtcgttct

SEQ ID NO: 478865 - DNA, 75 bp, synthetic construct
  source 1..75: mol_type = other DNA
ttccagctggtgaccggccgggtctggaaaggcacggcgttcggcggcgtgaaagggcgtacccagttgccggga

SEQ ID NO: 478866 - DNA, 75 bp, synthetic construct
  source 1..75: mol_type = other DNA
cattatcaggcgttcagatggagaccgaaggtctcgcagacgctttgtacaccaacggttgcgatgacgcgctca

SEQ ID NO: 478867 - DNA, 75 bp, synthetic construct
  source 1..75: mol_type = other DNA
gtttggcgacattcaggaggtggagtcaattacccactcactgcttcgcccgcataatcgcgaagaaatttgcgc

SEQ ID NO: 478868 - DNA, 75 bp, synthetic construct
  source 1..75: mol_type = other DNA
atgaatgtgttgcgtagtggactcgtgacgatgctgctgttggctgcctttagtgttcaggcagcctgcagttgg

SEQ ID NO: 478869 - DNA, 75 bp, synthetic construct
  source 1..75: mol_type = other DNA
tctgccgccatgctgccatttctgcaaaaccgtgatgcgcaggccgtacagcgccagcgtgttgccgataacctc

SEQ ID NO: 478870 - DNA, 75 bp, synthetic construct
  source 1..75: mol_type = other DNA
ttccagctggtcaccggccgtgtatggaagggttctgcctttggtggtgttaaaggtcgtacccagctgccgggc

SEQ ID NO: 478871 - DNA, 75 bp, synthetic construct
  source 1..75: mol_type = other DNA
ccacacgatgacgctggatgaaatcaatgaggccttcgatcttatgcatgaaggtaaatcaatccgtacggtaat

SEQ ID NO: 478872 - DNA, 75 bp, synthetic construct
  source 1..75: mol_type = other DNA
gcctggtataacctggccattatgtatcactacggagaaggaagacctgtcgatctccgacaggctctcgacctg

SEQ ID NO: 478873 - DNA, 75 bp, synthetic construct
  source 1..75: mol_type = other DNA
atcaggcacacttcaggcgctacagaatgaaatcgaacaacgtctgaaaccacactacccggaaatctggctgca

SEQ ID NO: 478874 - DNA, 75 bp, synthetic construct
  source 1..75: mol_type = other DNA
gttaccagcaatgacgttgattgactccgtttcccggtttattccgggagtactgggacatgaagcctcggcaac

SEQ ID NO: 478875 - DNA, 75 bp, synthetic construct
  source 1..75: mol_type = other DNA
gcagacctatgccgggccgattgaaatttatggcgacaagctcatgttatgtattgtgcatgatattactgagca

SEQ ID NO: 478876 - DNA, 75 bp, synthetic construct
  source 1..75: mol_type = other DNA
caacatgcgcaatatggtgctgaaagtggcgtggcaagctgaccagcatcagtcactgcgcaccagcgcggcgct

SEQ ID NO: 478877 - DNA, 75 bp, synthetic construct
  source 1..75: mol_type = other DNA
gtatctgtcacaggagcccgcaacgacaaagataaagaacgtatcctggctctgctgtcagaaatctggcaggac

SEQ ID NO: 478878 - DNA, 75 bp, synthetic construct
  source 1..75: mol_type = other DNA
gccgcaccggagaaaaccgaccccgccccggtgacaccaccaccgccgcgtaaagtacagggctgctacagctcg

SEQ ID NO: 478879 - DNA, 75 bp, synthetic construct
  source 1..75: mol_type = other DNA
cgagtcggttgacggtgtgatacgtgccgcaccggagaaaaccgaccccgccccggtgacaccaccaccgccgcg

SEQ ID NO: 478880 - DNA, 75 bp, synthetic construct
  source 1..75: mol_type = other DNA
aaaaaaggtgaagtgctgattaaagtcacccataccggggtttgccataccgacgcctttaccctctctggcgat

SEQ ID NO: 478881 - DNA, 75 bp, synthetic construct
  source 1..75: mol_type = other DNA
aacaattcgtattcttttacctaaccctgctgctaaatgggagcattacgaaaaaattaacctgactcgcaaaga

SEQ ID NO: 478882 - DNA, 75 bp, synthetic construct
  source 1..75: mol_type = other DNA
acgtaaccataagttacgtaaggctgagcatgatgatgaagaagatattgaatatgaggatactgagtatgagga

SEQ ID NO: 478883 - DNA, 75 bp, synthetic construct
  source 1..75: mol_type = other DNA
ctatatgtctgacagcgtcaaagagagttacctccagtgccagaatgtgcactgctcggcgacattcaaaacgca

SEQ ID NO: 478884 - DNA, 75 bp, synthetic construct
  source 1..75: mol_type = other DNA
cgaccggttccggcggtgaaatccgcgatgaaggtgccaccgggcgcggcgcgaagccgaaagctggtctggtcg

SEQ ID NO: 478885 - DNA, 75 bp, synthetic construct
  source 1..75: mol_type = other DNA
cactgaacggctacttccgtacttatgaagaaaaagtgaacagccacaatggcgaagagctgcgcggttatcaca

SEQ ID NO: 478886 - DNA, 75 bp, synthetic construct
  source 1..75: mol_type = other DNA
ccggacaggcatataacactgtggttctggctggtcgaaagctgggaaggggagccgtggggtaaagaagggcaa

SEQ ID NO: 478887 - DNA, 75 bp, synthetic construct
  source 1..75: mol_type = other DNA
cactcaagaacttattaagcagacagcaaagcaaatcaataattgtgagtatattattacggatacagtaccaaa

SEQ ID NO: 478888 - DNA, 75 bp, synthetic construct
  source 1..75: mol_type = other DNA
tgagggcgttccgcctgctgggagtttgcttcctgatcacccgggaacattccttactcccaagggggatttcgc

SEQ ID NO: 478889 - DNA, 75 bp, synthetic construct
  source 1..75: mol_type = other DNA
atggtcccctgatggtaaaaaagttgctatagatagcgcccattcaggacaaagacaacttatattaattgaaat

SEQ ID NO: 478890 - DNA, 75 bp, synthetic construct
  source 1..75: mol_type = other DNA
gatgacgtctccagctccaagagagtatcgtttcggcaaaagcacgttcagaaaaattattgattatcgtcttat

SEQ ID NO: 478891 - DNA, 75 bp, synthetic construct
  source 1..75: mol_type = other DNA
gtttaccgacgagcatttgcagccgtttgagcgcgtgtatggcgaagacccgcacggtttaagcccgcgcactga

SEQ ID NO: 478892 - DNA, 75 bp, synthetic construct
  source 1..75: mol_type = other DNA
ggccaggagcagttgcagttctaccgaaaaatgctcgtgcatttaggcgaagatgacaaaaagctggtacaggca

SEQ ID NO: 478893 - DNA, 75 bp, synthetic construct
  source 1..75: mol_type = other DNA
cccggtgagtggatgtcgctggtcggtcttaatgccgatgatttcccgccagccaatgaaccggtaattgcgaag

SEQ ID NO: 478894 - DNA, 75 bp, synthetic construct
  source 1..75: mol_type = other DNA
gatgcgcacatggcgaataaactggagtttcccggcggtaaaattgaaatgagcgaaacgccggaacaggcggtg

SEQ ID NO: 478895 - DNA, 75 bp, synthetic construct
  source 1..75: mol_type = other DNA
gtattattcgcaacgagaacaatgaaatctttataacgcgtcgcgcagcagatgcgcacatggcgaataaactgg

SEQ ID NO: 478896 - DNA, 75 bp, synthetic construct
  source 1..75: mol_type = other DNA
attaactttctttcatctggaagtaataaaacattactcataacagataaaacgtttttcaaaattcctcctgaa

SEQ ID NO: 478897 - DNA, 75 bp, synthetic construct
  source 1..75: mol_type = other DNA
aaaatgagatccgcaataacgattttctcaatagaattaaggatgaacttgatggggaattttacgaaactttcg

SEQ ID NO: 478898 - DNA, 75 bp, synthetic construct
  source 1..75: mol_type = other DNA
gatggcaccagtctgccggacgttaaacccggtgagcaattacagcagcagcgggaagaagtatccctgagggtg

SEQ ID NO: 478899 - DNA, 75 bp, synthetic construct
  source 1..75: mol_type = other DNA
ttttattctgccgcagatcatcgccgagcagaactggtgatgaataaactttatgataaggtgccttccggcgtc

SEQ ID NO: 478900 - DNA, 75 bp, synthetic construct
  source 1..75: mol_type = other DNA
cgctggcgcagaagctggttggcgatacggtgaagctgggaaacgagggcattaatgtactgaccatgctgacgg

SEQ ID NO: 478901 - DNA, 75 bp, synthetic construct
  source 1..75: mol_type = other DNA
gcgcgacggcgtatcgcagcgcgtgacggtcgccggagactgggagcgccagacagaccagcggatacaggagac

SEQ ID NO: 478902 - DNA, 75 bp, synthetic construct
  source 1..75: mol_type = other DNA
ttcatttcagcacccgacaatgcgcacggtcacacagtggctgagtgagaccagcgggctggaaatcatcctgcc

SEQ ID NO: 478903 - DNA, 75 bp, synthetic construct
  source 1..75: mol_type = other DNA
gcggctgaaagaaacccagaagtacagggggatgtagtaaggaacattttaaatcaactttcagtattgaatgat

SEQ ID NO: 478904 - DNA, 75 bp, synthetic construct
  source 1..75: mol_type = other DNA
taaccctgataaagtacaaaaaatatactcatttattgataaaaaacttgagggacaggatttctactggacgaa

SEQ ID NO: 478905 - DNA, 75 bp, synthetic construct
  source 1..75: mol_type = other DNA
aacttggaggattactgacacgaaaaacagctctcaaagacagattaaaggtttattacttctcaaaaaatcaaa

SEQ ID NO: 478906 - DNA, 75 bp, synthetic construct
  source 1..75: mol_type = other DNA
tgaagtttctatagcttcaactcatttacgactggtctcagagcagcctgatttgcttttcaaaggatttaaccg

SEQ ID NO: 478907 - DNA, 75 bp, synthetic construct
  source 1..75: mol_type = other DNA
gtgaaatatcttaagggtgcagaccatctttacagtggtaacgatgatttgcatcctcttttcatttatttttcc

SEQ ID NO: 478908 - DNA, 75 bp, synthetic construct
  source 1..75: mol_type = other DNA
tattacaaagcagtacaaaaaaaagccgcagatgcagtccgaaacaccgacatgaaaaacaatgggatgtccaaa

SEQ ID NO: 478909 - DNA, 75 bp, synthetic construct
  source 1..75: mol_type = other DNA
cggtatttttttacgcgcagggcgtgaagaccaacgtgctgttctttaccaaaggcacagtggcgaacccgcatc

SEQ ID NO: 478910 - DNA, 75 bp, synthetic construct
  source 1..75: mol_type = other DNA
gatcagcacactttaccgcagggctgccgctggagcgatctcaacagtttatcgggcctcaacttgcttaaccat

SEQ ID NO: 478911 - DNA, 75 bp, synthetic construct
  source 1..75: mol_type = other DNA
atgcgggcgatctcaatcctcgcgtctgggaagaagagatcaagccgctgtgggagaaatacagtaaggaggccg

SEQ ID NO: 478912 - DNA, 75 bp, synthetic construct
  source 1..75: mol_type = other DNA
cgttgattatcttcctggcgattgccgcggcgctgctgtggcagctggcgcgtaatgccgaaggggatgatccga

SEQ ID NO: 478913 - DNA, 75 bp, synthetic construct
  source 1..75: mol_type = other DNA
ggaaagcactttttcaaaattgtgggtgaggagctaaaaaatttgcgactatctttaagagagtcacaaatatct

SEQ ID NO: 478914 - DNA, 75 bp, synthetic construct
  source 1..75: mol_type = other DNA
ggtaaacactttttcaaggttgctggtgatgagttgaaaaatttgcgggttactttaagtaactcacaaacgcct

SEQ ID NO: 478915 - DNA, 75 bp, synthetic construct
  source 1..75: mol_type = other DNA
atggccactcaaatctctgttgaaactctctccccgatcacccataaccagatccctgttattaccaccgaactt

SEQ ID NO: 478916 - DNA, 75 bp, synthetic construct
  source 1..75: mol_type = other DNA
gtttggtcttggcgcgattggtctggcagtagttcagggggctcgtcaggcgaaggcgggacggattatcgctat

SEQ ID NO: 478917 - DNA, 75 bp, synthetic construct
  source 1..75: mol_type = other DNA
accgactgcattaacccgaatgactacgacaaaccgattaaagatgtcctgctggatatcaacaaatggggtatc

SEQ ID NO: 478918 - DNA, 75 bp, synthetic construct
  source 1..75: mol_type = other DNA
caggcgaaagcgggacggattatcgctatcgataccaacccgaagaaattcgatctggcgcgtcgcttcggtgcc

SEQ ID NO: 478919 - DNA, 75 bp, synthetic construct
  source 1..75: mol_type = other DNA
actccgcatgaacggtttgctttcattggcactggcaacacgaacggatctggtgatgaaaccggcttgtaccag

SEQ ID NO: 478920 - DNA, 75 bp, synthetic construct
  source 1..75: mol_type = other DNA
caatcgtccgttaatccgtgcccaacatacagcatcaatggaagaggctcatgttacgggacaaattctggcgcg

SEQ ID NO: 478921 - DNA, 75 bp, synthetic construct
  source 1..75: mol_type = other DNA
gggagtgagaacgggggcgacggtgatgcgttcgtcagggaagaacgcgaagcaatggacgttgtgttacaggcg

SEQ ID NO: 478922 - DNA, 75 bp, synthetic construct
  source 1..75: mol_type = other DNA
gttttaagttttatctggaacagcaaggctggatagttgcccgtaaggagcaactgttagaaaggttaatgtcgc

SEQ ID NO: 478923 - DNA, 75 bp, synthetic construct
  source 1..75: mol_type = other DNA
tcacgccaaaatgctcgaaaccgatcaggcttgggaagtgttcgaaaaactcgaagactgttatttcagccagaa

SEQ ID NO: 478924 - DNA, 75 bp, synthetic construct
  source 1..75: mol_type = other DNA
tggaacggttcaaattttatctggaacaacgcggctggatcgttgcccataaagaacaactggtggaacggttga

SEQ ID NO: 478925 - DNA, 75 bp, synthetic construct
  source 1..75: mol_type = other DNA
cccgccgatgcgatggtatgcactctggagcggtttaaattttatctggagcaacacggctggatcgttgcccgt

SEQ ID NO: 478926 - DNA, 75 bp, synthetic construct
  source 1..75: mol_type = other DNA
tacctgcagtaatgcacaattatatgcgaaaagtttaacactgcttgcaacccaccctgaaacatcccagaggag

SEQ ID NO: 478927 - DNA, 75 bp, synthetic construct
  source 1..75: mol_type = other DNA
cgcccgccacgccaaaatgctggaaaccgatcagacgtgggaagtgttcgaaaaactggaagactgttatttcac

SEQ ID NO: 478928 - DNA, 75 bp, synthetic construct
  source 1..75: mol_type = other DNA
tactgatccacttcgataaacacggtcaggtagagttcacggaaaaagtccccgccgatgcgatggtatgcactc

SEQ ID NO: 478929 - DNA, 75 bp, synthetic construct
  source 1..75: mol_type = other DNA
gtggggatggcggatatgtcggagaatttccgcgccagaggcggagaaatttacctgcgtaaggaggacgcgtga

SEQ ID NO: 478930 - DNA, 75 bp, synthetic construct
  source 1..75: mol_type = other DNA
tgaaaccctgccgcaagagtctggcaaggtcgcccatttctgctcgatgtgtggaccgaaattctgctcgatgaa

SEQ ID NO: 478931 - DNA, 75 bp, synthetic construct
  source 1..75: mol_type = other DNA
caccctgctggaacaggccgagcaaggtgtggattacttcactatccatgcgggggtgctgctgcgctacgtgcc

SEQ ID NO: 478932 - DNA, 75 bp, synthetic construct
  source 1..75: mol_type = other DNA
ccatgcaaaaatgctcgaaaccgatcaggcgtgggaagtgttcgaaaaactggaagactgttatttcagccataa

SEQ ID NO: 478933 - DNA, 75 bp, synthetic construct
  source 1..75: mol_type = other DNA
ttggcgcagctttatggcaccgaaattctgaatatccaggttaacttcaccagaaacaaagagcgttttgtcgaa

SEQ ID NO: 478934 - DNA, 75 bp, synthetic construct
  source 1..75: mol_type = other DNA
atacgtagcgaagttttgcgccaccagcatccgggaatgagctttggcgcacgtctgccggaaaatatcactgcg

SEQ ID NO: 478935 - DNA, 75 bp, synthetic construct
  source 1..75: mol_type = other DNA
taaacgcgccctgcaccacaatgccgctgccgtggtactggcacacaatcatccgtccggtgaagtcacacccag

SEQ ID NO: 478936 - DNA, 75 bp, synthetic construct
  source 1..75: mol_type = other DNA
gaaccagcttatcgcccatgagaccctctttagtggcacgattaaccgcaccgaggtctatccccgggaagtggt

SEQ ID NO: 478937 - DNA, 75 bp, synthetic construct
  source 1..75: mol_type = other DNA
gagagatgacgcccggcgagcgcagtctcattctgcgggccctgaaaaccctggaccgacatcttcatgaacccg

SEQ ID NO: 478938 - DNA, 75 bp, synthetic construct
  source 1..75: mol_type = other DNA
cgggaatggctgattctgaacatggcgggactggagcgtgaagaattccgggtgctgtatctgaacaaccagaat

SEQ ID NO: 478939 - DNA, 75 bp, synthetic construct
  source 1..75: mol_type = other DNA
tggatatccgggtaccggaccatttgatagtcggtggcagccgggtgttctcctttgcggaacacggtctgcttt

SEQ ID NO: 478940 - DNA, 75 bp, synthetic construct
  source 1..75: mol_type = other DNA
cgactggttcaggtgcttcagctggtggatatccgtgtccctgaccatctgattgtcggtggcaggcaaatctat

SEQ ID NO: 478941 - DNA, 75 bp, synthetic construct
  source 1..75: mol_type = other DNA
acccgtccggtgaagtcacccccagtaaggctgaccggcttatcactgaacgtctggtacaggcgctggccctgg

SEQ ID NO: 478942 - DNA, 75 bp, synthetic construct
  source 1..75: mol_type = other DNA
acccgtccggtgaagtcacacctggcaaggcagaccgccttatcacggaacgtctggtacaggcactgggcctgg

SEQ ID NO: 478943 - DNA, 75 bp, synthetic construct
  source 1..75: mol_type = other DNA
ccttccggcgagacgacacctagccaggccgacaaaaccctcacgcagcgactggttcaggtgcttcagctggtg

SEQ ID NO: 478944 - DNA, 75 bp, synthetic construct
  source 1..75: mol_type = other DNA
ggcacgagaatggctgattctgagcatggcgggactggagcgggaagagttccgggtactgtatctgaacaacca

SEQ ID NO: 478945 - DNA, 75 bp, synthetic construct
  source 1..75: mol_type = other DNA
gagcagttgcaaaagattaacccacatctcccggttgccgtgctggatgaggtgatactgcgtatcgcccatgcg

SEQ ID NO: 478946 - DNA, 75 bp, synthetic construct
  source 1..75: mol_type = other DNA
tgattaaaaagattgccgcttaccaccaattccacgcagtacgtgaagcggtgacggcgacgattgtggcctcta

SEQ ID NO: 478947 - DNA, 75 bp, synthetic construct
  source 1..75: mol_type = other DNA
cagaagtccatccccgggaggtgattaaacgcaccctgtaccacaatgctgctgccgtggtgctggcgcacaatc

SEQ ID NO: 478948 - DNA, 75 bp, synthetic construct
  source 1..75: mol_type = other DNA
gtctgttttcgctgccggtatttccagaaaagtactggaaggatcacaaacttagcgacccgctcgccacgcctc

SEQ ID NO: 478949 - DNA, 75 bp, synthetic construct
  source 1..75: mol_type = other DNA
gctatgctgacgattattcctgggtggaggtcgctattaatccgcgcgcccgttttcatgatggttcgcccatta

SEQ ID NO: 478950 - DNA, 75 bp, synthetic construct
  source 1..75: mol_type = other DNA
ttttgattatgtgaaccccgccgcgccaaaaggtggacaaataacgttatcctccattggaaccttcgataattt

SEQ ID NO: 478951 - DNA, 75 bp, synthetic construct
  source 1..75: mol_type = other DNA
cgcgaccggcgttgaagatgtgtttgccctcgcggggctggataaaccgaatatcggcctgttatcagatgagtt

SEQ ID NO: 478952 - DNA, 75 bp, synthetic construct
  source 1..75: mol_type = other DNA
ctcttcaccggcaccatcaaccgcacggaagtccatccccgggaagtgattaaacgcgccctgtaccacaatacc

SEQ ID NO: 478953 - DNA, 75 bp, synthetic construct
  source 1..75: mol_type = other DNA
cctcattcagcgggccctgaaaaccctggaccgccatcttcatgaacccggcgtgggcttcacctccacccgtgc

SEQ ID NO: 478954 - DNA, 75 bp, synthetic construct
  source 1..75: mol_type = other DNA
ggagctggtgcttctggcaccaatgaaaaaagatctaccgccagaagtcggtgatgctgccaacttactgattta

SEQ ID NO: 478955 - DNA, 75 bp, synthetic construct
  source 1..75: mol_type = other DNA
gcgtggccttcacctccacgcatgcggcacgagaatggctgattctgaacatggcgggactggagcgtgaagagt

SEQ ID NO: 478956 - DNA, 75 bp, synthetic construct
  source 1..75: mol_type = other DNA
atgacgcccggcgagcgcagcctcattcatcgggccctgaaaaccctggaccgccatcttcatgaacccggcgtg

SEQ ID NO: 478957 - DNA, 75 bp, synthetic construct
  source 1..75: mol_type = other DNA
ccaaaaggcgggcagataacgttatcctctattggtactttcgataattttaaccgctatgcactacgcggaaac

SEQ ID NO: 478958 - DNA, 75 bp, synthetic construct
  source 1..75: mol_type = other DNA
tgacgagccgggcagttattacccgctaattgccgaaagcgcgcgctatgccgacgattattcctgggttgaagt

SEQ ID NO: 478959 - DNA, 75 bp, synthetic construct
  source 1..75: mol_type = other DNA
ttatcaccctgttcaccttcggtgtgcaggcgcaggctattaaggaaagctatgcctttgcagtactgggagaac

SEQ ID NO: 478960 - DNA, 75 bp, synthetic construct
  source 1..75: mol_type = other DNA
tctcgacggccaactgtatgccaccttctgccaggcacaggatttgcttaagcaggaaccgttacaggcaaacga

SEQ ID NO: 478961 - DNA, 75 bp, synthetic construct
  source 1..75: mol_type = other DNA
ttcctattgacatgaaagaatcggctcaaaatgtatcagaaattctccggggccttgcaaatccagacagattgt

SEQ ID NO: 478962 - DNA, 75 bp, synthetic construct
  source 1..75: mol_type = other DNA
tgttgatgtgtcagttaagcctgggggaagcgaatgtgaccgagctggaagcggcggtcggtatcactcagccga

SEQ ID NO: 478963 - DNA, 75 bp, synthetic construct
  source 1..75: mol_type = other DNA
ctaagctggatcaactgccagcagacaagaaaaccgttttgcgcaacaacgcaggcggccatgctaaccacagcc

SEQ ID NO: 478964 - DNA, 75 bp, synthetic construct
  source 1..75: mol_type = other DNA
tgctatcggcattgaagtccatgaagatccgcgtttttcaccgcgggacaccacgacgctacagccaggtatgtt

SEQ ID NO: 478965 - DNA, 75 bp, synthetic construct
  source 1..75: mol_type = other DNA
caggcacagctcgcagcaatctccgcgattcgccccggcgtgcgctgccagcaggttgacgatgccgcgcgccgg

SEQ ID NO: 478966 - DNA, 75 bp, synthetic construct
  source 1..75: mol_type = other DNA
gatcgcctcctcggaacaggaagtacggcagatcctgctggaagaagcggatcgcctgcaaaaagaagtgcgatt

SEQ ID NO: 478967 - DNA, 75 bp, synthetic construct
  source 1..75: mol_type = other DNA
aagacctgatgaataaccagaaaatcccggacagtggcgttctgacgcagaaagtgaaagagcagattgctgacc

SEQ ID NO: 478968 - DNA, 75 bp, synthetic construct
  source 1..75: mol_type = other DNA
aactgaaagagggaaacctcttcgctgagcagtgtccgtcgcgggatgtgttgaaacacgttaccagccgttggg

SEQ ID NO: 478969 - DNA, 75 bp, synthetic construct
  source 1..75: mol_type = other DNA
acaggcgctggagcaggatggttttgttaaccgtatctcgtatccggtggtgccgccgcatgtggaatatagcct

SEQ ID NO: 478970 - DNA, 75 bp, synthetic construct
  source 1..75: mol_type = other DNA
acgcaggttaagaaccttgaagaagggaaaaacattgatatagccgcaacatcagcagcgtgtttttcagaagat

SEQ ID NO: 478971 - DNA, 75 bp, synthetic construct
  source 1..75: mol_type = other DNA
tggccatgcctgccgctgctgatattgatttcgaaccacctgttatatctgcaggcactcaacccgctgattttt

SEQ ID NO: 478972 - DNA, 75 bp, synthetic construct
  source 1..75: mol_type = other DNA
cggtgaagtcacacccagtaaggcagaccggcttatcaccgaacgtctggtacaggcactgggcctggtggatat

SEQ ID NO: 478973 - DNA, 75 bp, synthetic construct
  source 1..75: mol_type = other DNA
gattcgtgatgccgaagggcgaattgcggcagaaggggcgttgccttatccacctggcgtgctttgcgtggtacc

SEQ ID NO: 478974 - DNA, 75 bp, synthetic construct
  source 1..75: mol_type = other DNA
gtgattaaacgcgccctgtatcacaatgccgctgctgtggtgctggcacacaatcacccgtccggtgaagtcaca

SEQ ID NO: 478975 - DNA, 75 bp, synthetic construct
  source 1..75: mol_type = other DNA
tggatatccggatgccggaccatctgatagtcggtggcagccaggttttctcctttgccgaacacggtctgcttt

SEQ ID NO: 478976 - DNA, 75 bp, synthetic construct
  source 1..75: mol_type = other DNA
atgggagattttggccctctggtaggagaaaaattgccatttagccctgctcaggacaataaaccattacactgg

SEQ ID NO: 478977 - DNA, 75 bp, synthetic construct
  source 1..75: mol_type = other DNA
tggatatccgggtgccggaccatctgatagtcggtggcaaccaggttttctcctttgccgaacacggtctgcttt

SEQ ID NO: 478978 - DNA, 75 bp, synthetic construct
  source 1..75: mol_type = other DNA
cgactggttcaggtacttcaactggtggatatccgtgtccctgaccatctgattgtcggtggcaggcaaatctat

SEQ ID NO: 478979 - DNA, 75 bp, synthetic construct
  source 1..75: mol_type = other DNA
gagcgatgacgcccggcgagcgcagcctcattcagcgagccctgaaaactctggaccgtcatcttcatgaacccg

SEQ ID NO: 478980 - DNA, 75 bp, synthetic construct
  source 1..75: mol_type = other DNA
tcagatttggttgtacggtcgcagttgtgcctttggtgagaactggcttaatactattattcgccagacgggatt

SEQ ID NO: 478981 - DNA, 75 bp, synthetic construct
  source 1..75: mol_type = other DNA
tcagtcggtgcacaaacagcaggcgggattctcacagacgtcgcagatccataaaaaagataaccatatccgcgg

SEQ ID NO: 478982 - DNA, 75 bp, synthetic construct
  source 1..75: mol_type = other DNA
tctggcgcactatctgcgtgagaacggcattgtgccggagaagtgcgatctcaactccattctgttcttattaac

SEQ ID NO: 478983 - DNA, 75 bp, synthetic construct
  source 1..75: mol_type = other DNA
aggttcgaatcctcccggatgcaccatattctacgtactttcagcgatgaaggtatggaagaggtggcggtataa

SEQ ID NO: 478984 - DNA, 75 bp, synthetic construct
  source 1..75: mol_type = other DNA
cgtcttgtacaggcgctggccctggttgacatccgggtgccggaccatctgatagtcggtggcagccatgttttc

SEQ ID NO: 478985 - DNA, 75 bp, synthetic construct
  source 1..75: mol_type = other DNA
tgcgttgtctgctatacaaacgacagtaaaacccatcagcgagattgccaggggaaaatggttacaagtgtcctt

SEQ ID NO: 478986 - DNA, 75 bp, synthetic construct
  source 1..75: mol_type = other DNA
ctaccttccatctacaaacagcatgaagagcgctacgccggttatacccttcgtcagttgtgccaggaaatgcat

SEQ ID NO: 478987 - DNA, 75 bp, synthetic construct
  source 1..75: mol_type = other DNA
atagacgctactggctatgacattcctgtttttattgcaacggaaaatgaagaacgtataccagcagaatatctt

SEQ ID NO: 478988 - DNA, 75 bp, synthetic construct
  source 1..75: mol_type = other DNA
ttcgaagaaaaagaaatggattgatcttcgtactaataatgaataccaatcatataaacacgcagtgcatcgtat

SEQ ID NO: 478989 - DNA, 75 bp, synthetic construct
  source 1..75: mol_type = other DNA
cttatcctccgggtgtgctgtgtgttgttccgggtgaaatctggggggtgcccctattaagttgtcaagcatgtt

SEQ ID NO: 478990 - DNA, 75 bp, synthetic construct
  source 1..75: mol_type = other DNA
ctcgatgaaatagacgctactggctatggcattcctgtttttattgcaacggaaaatgaagaacgtataccagca

SEQ ID NO: 478991 - DNA, 75 bp, synthetic construct
  source 1..75: mol_type = other DNA
ttctgtttgactccgcatgggttggctatgagcaatttatcccgatgatggctgactgttcgccgctgttgctgg

SEQ ID NO: 478992 - DNA, 75 bp, synthetic construct
  source 1..75: mol_type = other DNA
ccttgagcagatgtacgccaacattcgccaactggcaaaaacgttacaggttcctgaacaaggcgaggcgctggt

SEQ ID NO: 478993 - DNA, 75 bp, synthetic construct
  source 1..75: mol_type = other DNA
aagaccgcggtaaaacgaaaaaaattgtttacggcagtactggctcttagctgggcttttagcgtaacggctgcc

SEQ ID NO: 478994 - DNA, 75 bp, synthetic construct
  source 1..75: mol_type = other DNA
ggtactggcattgttttatctgttctacatgctgcgtctggacagtcagacgcaggatattctgcatcaactgaa

SEQ ID NO: 478995 - DNA, 75 bp, synthetic construct
  source 1..75: mol_type = other DNA
atagcactaatgtaaaatacagtattagtaagcgtaaaccaatgcaagataagtttgatgtagaactaatacatg

SEQ ID NO: 478996 - DNA, 75 bp, synthetic construct
  source 1..75: mol_type = other DNA
tcggcggtatgctgatggcgggtattgtggtggtgctgattggtatggttgctaatatcttcctgcaactgcctg

SEQ ID NO: 478997 - DNA, 75 bp, synthetic construct
  source 1..75: mol_type = other DNA
aacgaagcctggggcggcgagaaagtgtttatcctgctcgaacgcctgatccgggagccggtacgttaccaggat

SEQ ID NO: 478998 - DNA, 75 bp, synthetic construct
  source 1..75: mol_type = other DNA
tgcgggatattggttatctggattacaccgagtttaaacgtggccgagccacctatttcagcgtgcattatcgca

SEQ ID NO: 478999 - DNA, 75 bp, synthetic construct
  source 1..75: mol_type = other DNA
acaggaaatggtgaatttcctgttcgagggtaaagaggtgcatatcgaaggctatacgccggaagataagaaata

SEQ ID NO: 479000 - DNA, 75 bp, synthetic construct
  source 1..75: mol_type = other DNA
atgccgagcaccgcaagctgctggaacaggagatggtcaacttcctgttcgagggtaaagaggtgcatatcgagg

SEQ ID NO: 479001 - DNA, 75 bp, synthetic construct
  source 1..75: mol_type = other DNA
gagggtaaagaggtgcatatcgaggctatacgccggaagataaaaaataaaaacagtgccggagcacgcctccgg

SEQ ID NO: 479002 - DNA, 75 bp, synthetic construct
  source 1..75: mol_type = other DNA
ccagattggcgccggaatcaccacggctccgatggcctgctttagtgcagcgattcgggctcttgcgcaaaagct

SEQ ID NO: 479003 - DNA, 75 bp, synthetic construct
  source 1..75: mol_type = other DNA
gccttcagtaactttaatgaaggcctgggcaaagttttacgctttggggcgaacaatgaagaggtcctggagcgc

SEQ ID NO: 479004 - DNA, 75 bp, synthetic construct
  source 1..75: mol_type = other DNA
aaaattaattctgcatgccggtccccctatcgcttgggaagagatgtgcgggccggtcaagggtgccattatcgg

SEQ ID NO: 479005 - DNA, 75 bp, synthetic construct
  source 1..75: mol_type = other DNA
gtcattcgtcgcggtcactactatttttcctcgggcaaaacgaaattccggcaatcgtcaaaccctttatcgatc

SEQ ID NO: 479006 - DNA, 75 bp, synthetic construct
  source 1..75: mol_type = other DNA
tttcctgatggacatacgttgattccaacgggaaagcgtaagaaagttacttcagatgaacttatataccttcgc

SEQ ID NO: 479007 - DNA, 75 bp, synthetic construct
  source 1..75: mol_type = other DNA
caaatacagagggattcacgaactattccggtcatgactttaagtttgaagagcaaaaacgcctggtgtctctgt

SEQ ID NO: 479008 - DNA, 75 bp, synthetic construct
  source 1..75: mol_type = other DNA
tttgtcgatggctgcctgtaaagcaatgatggatgccgccgccaatgtaccgttcagttcaatggttacggtgat

SEQ ID NO: 479009 - DNA, 75 bp, synthetic construct
  source 1..75: mol_type = other DNA
attggcagtcgataaaatcgatctcacaagcaaaattgaatatatcgcgcccggagaacataaacagttaccact

SEQ ID NO: 479010 - DNA, 75 bp, synthetic construct
  source 1..75: mol_type = other DNA
catcggtgtgatggggattttaattcgcattctcggcggtatcttccagaaagcgttaaatatcagcaagatcga

SEQ ID NO: 479011 - DNA, 75 bp, synthetic construct
  source 1..75: mol_type = other DNA
actccaggagcagggctatgagcctggcgtgatcgtctcttttcgctatgttctgtgcacttttatcgatgaggc

SEQ ID NO: 479012 - DNA, 75 bp, synthetic construct
  source 1..75: mol_type = other DNA
cgcgaccctgattgaccagcaaaaaatccgggaacagttgcgatcccgggaagagacactgaagaatgagaatgc

SEQ ID NO: 479013 - DNA, 75 bp, synthetic construct
  source 1..75: mol_type = other DNA
gtgagtagagcattattcgccgtaacattggcatttccattctttgcgctggccaacccgcaatatcgtccggat

SEQ ID NO: 479014 - DNA, 75 bp, synthetic construct
  source 1..75: mol_type = other DNA
ttgctgattcccttgtcaaaggctgggaaaccagaattccggcaatgaaatttagtgaatgggatcaatttcgat

SEQ ID NO: 479015 - DNA, 75 bp, synthetic construct
  source 1..75: mol_type = other DNA
tggccgcgctacaaagcgccatgctgaacggtgaagcaacggtatttcgccgcaactactacattaacggcagtc

SEQ ID NO: 479016 - DNA, 75 bp, synthetic construct
  source 1..75: mol_type = other DNA
attgcagtaaagtgcaacattctgaccagcacctacatccctcacccgctgctcagccagcaggctttttcgcgt

SEQ ID NO: 479017 - DNA, 75 bp, synthetic construct
  source 1..75: mol_type = other DNA
agcagtgcctgcaatggtttgctgtacagggctgggaagtgctgcacgggccagatattgcgccggatggcgaca

SEQ ID NO: 479018 - DNA, 75 bp, synthetic construct
  source 1..75: mol_type = other DNA
attggctggctattggatacgctattttatcgctcattggtgctgctattacgtcgtcgttttccggaggtaaca

SEQ ID NO: 479019 - DNA, 75 bp, synthetic construct
  source 1..75: mol_type = other DNA
gtggttggggttatcacctattttctgcatgaccgttttcaggacacggttctgcatgacgccttcgccttcttt

SEQ ID NO: 479020 - DNA, 75 bp, synthetic construct
  source 1..75: mol_type = other DNA
ctatgaatcccggctggcaaaactcgacctgaaccatgaggagctggaaacgctctccgaccaggtggatgagct

SEQ ID NO: 479021 - DNA, 75 bp, synthetic construct
  source 1..75: mol_type = other DNA
gtgtgcagaacaccgttgcggaagacttatccaaaaacggtctggagcttgaaagtgtgtcgctgacaagtttca

SEQ ID NO: 479022 - DNA, 75 bp, synthetic construct
  source 1..75: mol_type = other DNA
attagtggtgttaattaccatgtcaaagcggaagatggtgaaaaattcaaagttgcacattttcgttctccacat

SEQ ID NO: 479023 - DNA, 75 bp, synthetic construct
  source 1..75: mol_type = other DNA
ctactgaaactccccagccagtcattcccgagccgctgacctatggggccagtctggatctgaatgtgagcctgc

SEQ ID NO: 479024 - DNA, 75 bp, synthetic construct
  source 1..75: mol_type = other DNA
agaaattaattacccgtggttgttaaattatatagaccagattggttatcagggatggattggttgcgaatatat

SEQ ID NO: 479025 - DNA, 75 bp, synthetic construct
  source 1..75: mol_type = other DNA
cacatcatccgtgcgacgctggaatctatcgcttatcagacgcgtgacgtgctggaagcgatgcaggccgactct

SEQ ID NO: 479026 - DNA, 75 bp, synthetic construct
  source 1..75: mol_type = other DNA
attgcctatacgccaattccctttgcctacaccctgattttgcatcgcaccgtgtatctgttttgtatcatgctg

SEQ ID NO: 479027 - DNA, 75 bp, synthetic construct
  source 1..75: mol_type = other DNA
ttactcctgaaaatctcgcattagcattaacaggaaagtcagacctgccagtagagataaagctgcgaaatattg

SEQ ID NO: 479028 - DNA, 75 bp, synthetic construct
  source 1..75: mol_type = other DNA
tggcgggcgcatccattcagtggctgcgcgatgaaatgaagctgatcaatgacgcctacgattccgaatactttg

SEQ ID NO: 479029 - DNA, 75 bp, synthetic construct
  source 1..75: mol_type = other DNA
agaaaccggcaagcccatttataacgccattgtctggcagtgtcgccgtactgccgacatctgcgagcatctaaa

SEQ ID NO: 479030 - DNA, 75 bp, synthetic construct
  source 1..75: mol_type = other DNA
cgtagcaataccggtctggtgattgacccgtacttctctggcaccaaagtgaagtggatcctcgaccatgtggaa

SEQ ID NO: 479031 - DNA, 75 bp, synthetic construct
  source 1..75: mol_type = other DNA
gtaacaaaagcagcacaagtctttgtacgcaacgagctaacgttcctccaagagcgatgtaaagaaattaactgt

SEQ ID NO: 479032 - DNA, 75 bp, synthetic construct
  source 1..75: mol_type = other DNA
ggttcactcggtgacgttgagaaggtggcaaaggtatttgtgcgtaatgagctgtcacccctgcaggataggttc

SEQ ID NO: 479033 - DNA, 75 bp, synthetic construct
  source 1..75: mol_type = other DNA
gaggtgcagcgcatcagcattcgtaaccggctgcatgattttatgcagcaggacggcgcagagctggccgccgca

SEQ ID NO: 479034 - DNA, 75 bp, synthetic construct
  source 1..75: mol_type = other DNA
ctccgagaagctctttccgtctggctgacagcaggaaatgacattaattattctgcacaggacagcgatatttta

SEQ ID NO: 479035 - DNA, 75 bp, synthetic construct
  source 1..75: mol_type = other DNA
gaccaggagcatgtgacgatagcgagatacgcatgattattcgtctggcgagggggaaaacaataactgttctca

SEQ ID NO: 479036 - DNA, 75 bp, synthetic construct
  source 1..75: mol_type = other DNA
ccgaacggcaaaccggacagcgtaaaggtgatcccgattggcgaggtggcggcgaaagataacttctccgatatc

SEQ ID NO: 479037 - DNA, 75 bp, synthetic construct
  source 1..75: mol_type = other DNA
tggatatccgggtaccggaccatctgatagtcggtggcagccaggttttctcctttgctgaacatggttttcttt

SEQ ID NO: 479038 - DNA, 75 bp, synthetic construct
  source 1..75: mol_type = other DNA
tccgggtgctgtatctgaacaaccagaatcagctgattgctggtgaaaccctcttcaccggcaccatcaaccgca

SEQ ID NO: 479039 - DNA, 75 bp, synthetic construct
  source 1..75: mol_type = other DNA
atggtgatagccagaaacggcaaagcgattctctatgacacaggactggcctggcccgaaggggatagtgggcaa

SEQ ID NO: 479040 - DNA, 75 bp, synthetic construct
  source 1..75: mol_type = other DNA
acagcggtcgtaccgccatgcgcgccaatatcagcgttcatgagccgcgtcagccgcaggatattgacaccatgt

SEQ ID NO: 479041 - DNA, 75 bp, synthetic construct
  source 1..75: mol_type = other DNA
actacttcctctgcgaccgtggtcgtttcggttacggttacgtcaacctgaaagatcgtccgcgtcagccagtac

SEQ ID NO: 479042 - DNA, 75 bp, synthetic construct
  source 1..75: mol_type = other DNA
tggtttcctctaacgccagttgtggtaaccctgtacagtccaccgccagcgagcttaccacctccggcggtgggt

SEQ ID NO: 479043 - DNA, 75 bp, synthetic construct
  source 1..75: mol_type = other DNA
cagcgtctggtgcaggcgcttcagctcgttgatatccgtgtgcctgaccaccttatcgtcggtggtacgcagata

SEQ ID NO: 479044 - DNA, 75 bp, synthetic construct
  source 1..75: mol_type = other DNA
aatgcggcagcagtgatactggcgcataaccatccctccggcgacacctcgcccagcaaggcagataagaccatc

SEQ ID NO: 479045 - DNA, 75 bp, synthetic construct
  source 1..75: mol_type = other DNA
aggctccggcactaccactaaccgcacaacgcacggtaaaacgcgccttaacgctgcttgaccgacacctgcgcg

SEQ ID NO: 479046 - DNA, 75 bp, synthetic construct
  source 1..75: mol_type = other DNA
caaacgtgctctgcacttcaacgcggcggcggtgatactcgcgcataaccatccttccggcgagacgacacccag

SEQ ID NO: 479047 - DNA, 75 bp, synthetic construct
  source 1..75: mol_type = other DNA
tccgggtgttgtatctggataaccagaaccagcttatcgcccatgagacgctctttagcggcacgattaaccgca

SEQ ID NO: 479048 - DNA, 75 bp, synthetic construct
  source 1..75: mol_type = other DNA
caaacgtgctctgcacttcaatgtcgcagcagtaatactcgcgcacaaccatccttctggcgagacaacacccag

SEQ ID NO: 479049 - DNA, 75 bp, synthetic construct
  source 1..75: mol_type = other DNA
tgacaccatgttcaccttctcgatggaaggtaacaaccagccgaccgcgcaccgttcgcaagtgccgtttgcctg

SEQ ID NO: 479050 - DNA, 75 bp, synthetic construct
  source 1..75: mol_type = other DNA
gtactggccagaatgcgggaatcgaaaggtcgcctgcgccgcgtcggcaatgaccgggggcgtgatgtcacgaat

SEQ ID NO: 479051 - DNA, 75 bp, synthetic construct
  source 1..75: mol_type = other DNA
tgatattattatcactaaccgaatgtcagaggagttgaacgatgtggtcgacaaagtctatagtcgcgatttgtt

SEQ ID NO: 479052 - DNA, 75 bp, synthetic construct
  source 1..75: mol_type = other DNA
tctttaccgggaactgcatgaaaatggcaacaatccgttggttggtgtccgagccctttttctctatccattgaa

SEQ ID NO: 479053 - DNA, 75 bp, synthetic construct
  source 1..75: mol_type = other DNA
ctgttctgacacaggccggaacggatgcacacgccgatttgtccggctacatcgaaccgctggacaccctctggc

SEQ ID NO: 479054 - DNA, 75 bp, synthetic construct
  source 1..75: mol_type = other DNA
ggtcgctgctcttgagaatccgcaaagacctaatcaaaaactgctaaaagcagcgcaaaactacaaggatgtagt

SEQ ID NO: 479055 - DNA, 75 bp, synthetic construct
  source 1..75: mol_type = other DNA
tcgtccgggctgaaggcggaaaaatctggtgggaagaggaagatggcacctgcctgattttaaaagccgaaatca

SEQ ID NO: 479056 - DNA, 75 bp, synthetic construct
  source 1..75: mol_type = other DNA
aagcaataccaaaacgcggaagacacgcgtggtcgcctggggatgtcctgtatgacaccggcttccgatggcacc

SEQ ID NO: 479057 - DNA, 75 bp, synthetic construct
  source 1..75: mol_type = other DNA
ctggcgctgaaagtgctgcgtgaaggcggcatttatacgccggcactgcgcgaaatcgaatcttacgatgcggta

SEQ ID NO: 479058 - DNA, 75 bp, synthetic construct
  source 1..75: mol_type = other DNA
tcaccttctcgatggaaggtaacaaccagccgaccgcgcaccgttcgcaagtgccgtttgcctgggcaccgggct

SEQ ID NO: 479059 - DNA, 75 bp, synthetic construct
  source 1..75: mol_type = other DNA
gcaaacgctgcatcgtgaagtagaagcctatgaagcgcgcctggcgcggtgtcgccatgcgctggaaaaaatcga

SEQ ID NO: 479060 - DNA, 75 bp, synthetic construct
  source 1..75: mol_type = other DNA
gcctatgaagcgcgcctggcacgctgccgccatgcgctggataaaatcgaaaacaggctagcgcgtttaacccgc

SEQ ID NO: 479061 - DNA, 75 bp, synthetic construct
  source 1..75: mol_type = other DNA
aagccatcgcgcgtgaagcctccgcctggtcattgcgcgagtgggacagtgcgccaccgaaaattgcccgctggc

SEQ ID NO: 479062 - DNA, 75 bp, synthetic construct
  source 1..75: mol_type = other DNA
atgatggaacagtcacttagcccactaagtccgatacttccactaaccgcacaacgcacgataaaacgcgcctta

SEQ ID NO: 479063 - DNA, 75 bp, synthetic construct
  source 1..75: mol_type = other DNA
tacgaattttccatatatcacctgattgaagccaacgacgctctgcgttttgatttccatattgaacaggtgacg

SEQ ID NO: 479064 - DNA, 75 bp, synthetic construct
  source 1..75: mol_type = other DNA
tgacagcattcgcatcaatttccacctgtacggcaaaaacggggtgatgggcgaccatgaaccgatgcaaactgc

SEQ ID NO: 479065 - DNA, 75 bp, synthetic construct
  source 1..75: mol_type = other DNA
cgccaacggcaatcctcgggtatggattcccggaggagagcttccgcaaagcgatggcagaatcgcccgatctga

SEQ ID NO: 479066 - DNA, 75 bp, synthetic construct
  source 1..75: mol_type = other DNA
caattgccgcgacaccaggatctggctctgactgtgcgatgggcatcatcgacgataatggcttcacgctgaaga

SEQ ID NO: 479067 - DNA, 75 bp, synthetic construct
  source 1..75: mol_type = other DNA
agaaggcgcgcaagtggtgctgggcgggcgcgcttacgacccggcctgctttgctgcgcttccgatcatgcaagg

SEQ ID NO: 479068 - DNA, 75 bp, synthetic construct
  source 1..75: mol_type = other DNA
ttgccaatagcgtttgctcgctggtgcgctctaccatgctgcactacggctatgaaaaccgcatcgctaccgcag

SEQ ID NO: 479069 - DNA, 75 bp, synthetic construct
  source 1..75: mol_type = other DNA
aagaagccaaaggtttctatgctcaccatggatttaaggcatcgcaaacttatgagcggactctgttccttaaac

SEQ ID NO: 479070 - DNA, 75 bp, synthetic construct
  source 1..75: mol_type = other DNA
attaactttgccatattatcgcccgacggctttattgccgggctgctgcatctgaacagcgttttccccaacctt

SEQ ID NO: 479071 - DNA, 75 bp, synthetic construct
  source 1..75: mol_type = other DNA
taatcacgaaacaaaagtacttggcagcgaaattctgaattttgcgtgtgaatatgcaaaagctgctgccgaaaa

SEQ ID NO: 479072 - DNA, 75 bp, synthetic construct
  source 1..75: mol_type = other DNA
cataatggctttttgttctatcacgccagcatcacagaacgtgcagacggcaagcgttccacgtggcacacgcag

SEQ ID NO: 479073 - DNA, 75 bp, synthetic construct
  source 1..75: mol_type = other DNA
aagaccaaatcagcagcccgtattattccggtgcatagcctgatcactccgttggttttgtcgctgcgtgagaag

SEQ ID NO: 479074 - DNA, 75 bp, synthetic construct
  source 1..75: mol_type = other DNA
ctttgtcctcatttcatcaggccgctgaatttgtcagtggtgaagctgtgcttgatgactggttaaagcagaagg

SEQ ID NO: 479075 - DNA, 75 bp, synthetic construct
  source 1..75: mol_type = other DNA
atgcatcatctttcctttctgcccggagatatgacgcccggtgagcgcagtctcattctgcgggctctgaaaacc

SEQ ID NO: 479076 - DNA, 75 bp, synthetic construct
  source 1..75: mol_type = other DNA
tggcggcaattacgcagcaggttaatcagattaatgaatctgttaatggtgcgtttcttccgttgatctcaaatg

SEQ ID NO: 479077 - DNA, 75 bp, synthetic construct
  source 1..75: mol_type = other DNA
agatttttgttattttcgccactgataaatcaacgaataaatctgccggtatttatatttttatcgtgaagcgtt

SEQ ID NO: 479078 - DNA, 75 bp, synthetic construct
  source 1..75: mol_type = other DNA
taaagctgcggctggccgtgcgttagatgctattattgcttccgtaactgaatctctgaaagaaggggatgatgt

SEQ ID NO: 479079 - DNA, 75 bp, synthetic construct
  source 1..75: mol_type = other DNA
actttaaagcctggctggtgggcgctgctgatgcgccagatttaggtaacttcgaagccaacacgactttccaga

SEQ ID NO: 479080 - DNA, 75 bp, synthetic construct
  source 1..75: mol_type = other DNA
atttaacaatgtcagcctggccattggtgacgctcaggggacctcttataaaagcggcgcgggtatcgaacagaa

SEQ ID NO: 479081 - DNA, 75 bp, synthetic construct
  source 1..75: mol_type = other DNA
cccagcaaggcagaccgccttatcacggaacgtctggtacaggcactgggcctggtggatatccgggtaccggac

SEQ ID NO: 479082 - DNA, 75 bp, synthetic construct
  source 1..75: mol_type = other DNA
tcttgctgatatcgatatgcccggttaccgactacacccgttaagcggcgatcgcgatggaatttgggcgatatc

SEQ ID NO: 479083 - DNA, 75 bp, synthetic construct
  source 1..75: mol_type = other DNA
tactgggtgaaattaagcataacattcaggttaatttgaaggtgaaccctgataattttcctgagctaataaata

SEQ ID NO: 479084 - DNA, 75 bp, synthetic construct
  source 1..75: mol_type = other DNA
tgctgagtgaaattaagtgtaacattcagttgaatttaaaggtgaatcctgataattttcctgaattaatagaag

SEQ ID NO: 479085 - DNA, 75 bp, synthetic construct
  source 1..75: mol_type = other DNA
gttcgctatagatatcttggttttagggagtggtcctctattcgtttttacggtgtctggcgaaacagaagcgca

SEQ ID NO: 479086 - DNA, 75 bp, synthetic construct
  source 1..75: mol_type = other DNA
caaacctcagaaaggaataaaggcggtctctataccagaataaaaaagaaagtgactttctttctatggatagat

SEQ ID NO: 479087 - DNA, 75 bp, synthetic construct
  source 1..75: mol_type = other DNA
gtgccggaggagcgaagttatgcagcgcatactggcattttatcaaggaaatgttaggtattttagacgttacta

SEQ ID NO: 479088 - DNA, 75 bp, synthetic construct
  source 1..75: mol_type = other DNA
tccggaccttatctggtcattacctgacggagaaatacgtcgctacgacaggcgtatgaacataatctgtcgcga

SEQ ID NO: 479089 - DNA, 75 bp, synthetic construct
  source 1..75: mol_type = other DNA
gacggagaaatacgccgttacgacaggcgtctgaacataatctgtcgcgagtgcctgaagagagaagttatgcag

SEQ ID NO: 479090 - DNA, 75 bp, synthetic construct
  source 1..75: mol_type = other DNA
acaggctcgtaaggactggcaaaacgcccgcaaaaaattatcgagggcaaagctgaagaaaccggttgtggttga

SEQ ID NO: 479091 - DNA, 75 bp, synthetic construct
  source 1..75: mol_type = other DNA
agcgggaaaaaattaagaggcaggttgtcgaactcgtgcgacagagcgggcgcgagacgttacgacaactggaag

SEQ ID NO: 479092 - DNA, 75 bp, synthetic construct
  source 1..75: mol_type = other DNA
gacggagaaatacgccgttacgacaggcgtctgaacataatctgtcgcgagtgccggaagagtgaagttatgcag

SEQ ID NO: 479093 - DNA, 75 bp, synthetic construct
  source 1..75: mol_type = other DNA
tctgatgagtgttctcgccagagagctggttgccagtggcgatgtatacaattctggctacgggttatttccgtc

SEQ ID NO: 479094 - DNA, 75 bp, synthetic construct
  source 1..75: mol_type = other DNA
ccacagggccgggcagtcaaccggcgcgtcgaaatcagtcttgttccgcgttctgacgcctgtcaggacgtgaaa

SEQ ID NO: 479095 - DNA, 75 bp, synthetic construct
  source 1..75: mol_type = other DNA
ggtccggcaggtttcagaagggctgtatctgcatgtttctgatgaagaacagcttgtggcgcaggtggagcgatt

SEQ ID NO: 479096 - DNA, 75 bp, synthetic construct
  source 1..75: mol_type = other DNA
acaggctcgtaaggactggcaaaacgcccgcaaaaaactctcaagggcaaaggtgaagaaaacggctgtggttga

SEQ ID NO: 479097 - DNA, 75 bp, synthetic construct
  source 1..75: mol_type = other DNA
ctggctacgggttattcccgtcagaacaggctcgtaaggactggcaaaacgcccgcaaaaaactctcgagagcaa

SEQ ID NO: 479098 - DNA, 75 bp, synthetic construct
  source 1..75: mol_type = other DNA
gtgccgggagagcgaagttatgcagcgcatactggcattttatcaaggaaatgttaggtattttagacgttacta

SEQ ID NO: 479099 - DNA, 75 bp, synthetic construct
  source 1..75: mol_type = other DNA
aggtgaagaaaccagctgtggttgatccggaccttatctggtcgttaccagccggagaaatacgccgttacgaca

SEQ ID NO: 479100 - DNA, 75 bp, synthetic construct
  source 1..75: mol_type = other DNA
tcctggccttatctggtcattagatgacggagaaatacgtcgctacgacaggcgtcataatataatttgtaatga

SEQ ID NO: 479101 - DNA, 75 bp, synthetic construct
  source 1..75: mol_type = other DNA
ctggctatgggttatttccgtctgagcaggcacgtcaagactggcaaaacgcccgcaaaaaactctcgagggcaa

SEQ ID NO: 479102 - DNA, 75 bp, synthetic construct
  source 1..75: mol_type = other DNA
gtttcgagtggtgacgtatacaactctggctatgggttatttccgtctgagcaggcacgtcaagactggcaaaac

SEQ ID NO: 479103 - DNA, 75 bp, synthetic construct
  source 1..75: mol_type = other DNA
acaggcgcgtaaagactggcaaaacgcccgcaaaaaactatcgagggcaaaggtgaagaaacctgctgtagttga

SEQ ID NO: 479104 - DNA, 75 bp, synthetic construct
  source 1..75: mol_type = other DNA
gtggcaaaagtttttacacaagaagagcgggaaaaaattaaagggcaggttgttgaacttgtacgtctgagcggt

SEQ ID NO: 479105 - DNA, 75 bp, synthetic construct
  source 1..75: mol_type = other DNA
aaacataatctgtagcgagtgccggaagagcgaagctatgcagcgtgtactggctttctatcagggtaattttca

SEQ ID NO: 479106 - DNA, 75 bp, synthetic construct
  source 1..75: mol_type = other DNA
acaggctcgtaaggactggcaaaatgcccgcaaaaaactctcgagggcaaaggtgaagaaaccatctgtggttga

SEQ ID NO: 479107 - DNA, 75 bp, synthetic construct
  source 1..75: mol_type = other DNA
cgcgagacgttacggcaactggaagccaagacaggtgcgacaagatatctgatgagcgttctcaccagagagctg

SEQ ID NO: 479108 - DNA, 75 bp, synthetic construct
  source 1..75: mol_type = other DNA
gatgagtgttctcgccagagagctggttgccagtggcgatgtatacaactctggttacgggttattcccgtctga

SEQ ID NO: 479109 - DNA, 75 bp, synthetic construct
  source 1..75: mol_type = other DNA
tccggaccttatctggtcgttacctgatggagaaatacgtcgctacgacagtcgtctaaacataatctgtcgcga

SEQ ID NO: 479110 - DNA, 75 bp, synthetic construct
  source 1..75: mol_type = other DNA
atggcaaaagtatttacacaagaagagcgggaaaaaattaaggggaaggttgttgagctcgtgcaccagagtggg

SEQ ID NO: 479111 - DNA, 75 bp, synthetic construct
  source 1..75: mol_type = other DNA
cagaacatgatttgccgtgagtgccgggaaagcaaaggtatgcagcgtatactaacgttctattggggaatatag

SEQ ID NO: 479112 - DNA, 75 bp, synthetic construct
  source 1..75: mol_type = other DNA
tgtccgccactggcgatggccgtggggctggtcccctcgttgcctgcggtggataacaacctgtggcagttgtgg

SEQ ID NO: 479113 - DNA, 75 bp, synthetic construct
  source 1..75: mol_type = other DNA
gtgttattttagaaacacaaccaaatgtctgtatggaaccacataatttatatgacaaccaaatagataaggttt

SEQ ID NO: 479114 - DNA, 75 bp, synthetic construct
  source 1..75: mol_type = other DNA
tcagccaccgggcctgacgggctggaaatacgccgggaatatgatgaatggggcaacctgctgaatgaagagaac

SEQ ID NO: 479115 - DNA, 75 bp, synthetic construct
  source 1..75: mol_type = other DNA
cttcgcgcctggcctatcagtattaccggtcaaaaaccgaccgaggggccgtttagcgcgctggggtatttacgc

SEQ ID NO: 479116 - DNA, 75 bp, synthetic construct
  source 1..75: mol_type = other DNA
ttagagtttttccagtatcggttttccgattcatttggtggcaacccaccgttatattcgtgcggcctgagcgcg

SEQ ID NO: 479117 - DNA, 75 bp, synthetic construct
  source 1..75: mol_type = other DNA
tttcacgtgcgcgcagtgaactcgaccggagcgtggacaacaacgatgccgctggcgtttatggctgaactacgc

SEQ ID NO: 479118 - DNA, 75 bp, synthetic construct
  source 1..75: mol_type = other DNA
tgatccggaccttatctggtcgttaccagacggagaaatacgccgctatgacaggcgtctgaacataatctgtcg

SEQ ID NO: 479119 - DNA, 75 bp, synthetic construct
  source 1..75: mol_type = other DNA
caggcaactttaatagggacagtcgcctttatagctaggcctattggcggtggtttatttggggccatggcagat

SEQ ID NO: 479120 - DNA, 75 bp, synthetic construct
  source 1..75: mol_type = other DNA
atttctgtgaaaaactcttctcttataggattatgtctctttggattaatgtttacaaatttaggtattgcaggg

SEQ ID NO: 479121 - DNA, 75 bp, synthetic construct
  source 1..75: mol_type = other DNA
cgttgactgcggtgatttgccgctggcgctgcgcatcggtgagtacgtggtacgccataacctcagcacaccgga

SEQ ID NO: 479122 - DNA, 75 bp, synthetic construct
  source 1..75: mol_type = other DNA
cgagaaatatttctggagcgaagaagagcagatgtgcttggaatcctgggacgaagccttcagcaaaaccgaagc

SEQ ID NO: 479123 - DNA, 75 bp, synthetic construct
  source 1..75: mol_type = other DNA
tcaacgtacactttaataataatcacgagttagttagttctggtgagcctgacgtaatatgtttaagcaagcagg

SEQ ID NO: 479124 - DNA, 75 bp, synthetic construct
  source 1..75: mol_type = other DNA
accgcgattgctgcacgcgctcaagaaatcgaaaataccgcgaaggaaggcatgtctcatctcgaagcttttcga

SEQ ID NO: 479125 - DNA, 75 bp, synthetic construct
  source 1..75: mol_type = other DNA
gcgcctgaatataatctgtcgcgagtgccggaagagtgaagctatgcagcgtgtactggcgttttatcaggggaa

SEQ ID NO: 479126 - DNA, 75 bp, synthetic construct
  source 1..75: mol_type = other DNA
gttgccagtggcgatgtatacaactctggctatgggttattcccgtctgaacaggctcgtaaggattggaaaaac

SEQ ID NO: 479127 - DNA, 75 bp, synthetic construct
  source 1..75: mol_type = other DNA
gttgcgagcggtgatgtatacaactctggttacgggttatttccctcagaacaggttcgtaaagactggcaaaac

SEQ ID NO: 479128 - DNA, 75 bp, synthetic construct
  source 1..75: mol_type = other DNA
gtggcaaaagtttttacacaagaagagcgggaaaaaattaaagggcaggttgttgagcttgtacgccggagtggg

SEQ ID NO: 479129 - DNA, 75 bp, synthetic construct
  source 1..75: mol_type = other DNA
ctgcaccggttttatgccgtcccggtggaggaatttatcaccaaagcccgtcacctgtcggtgctgaaagacgat

SEQ ID NO: 479130 - DNA, 75 bp, synthetic construct
  source 1..75: mol_type = other DNA
ggataacaacctatggcagttgtggatcaccgccagaaccggcctgacgccggatatcgcggacaccggcacaga

SEQ ID NO: 479131 - DNA, 75 bp, synthetic construct
  source 1..75: mol_type = other DNA
tctggaccttatttggtcattaccagacggagaaatacgtcgctacgacaggcgtctgaacataatttgccgtga

SEQ ID NO: 479132 - DNA, 75 bp, synthetic construct
  source 1..75: mol_type = other DNA
atgttaaaagtggaaatgctatccaccggggatgaagtgttacacgggcaaatcgttgacactaacgctgcctgg

SEQ ID NO: 479133 - DNA, 75 bp, synthetic construct
  source 1..75: mol_type = other DNA
tgcaactgtggtttggtcttacgcatgcgccgttctgcgtgatgccgcgagtattcatggaggctatgccgccag

SEQ ID NO: 479134 - DNA, 75 bp, synthetic construct
  source 1..75: mol_type = other DNA
caggaaaatagcgcggtgctgaaatcgcagcggcgaatgttccatcaccagattgaacgtggcaacccgagacgg

SEQ ID NO: 479135 - DNA, 75 bp, synthetic construct
  source 1..75: mol_type = other DNA
cgcgtaaggactggcaaaatgcccgtaaaaagctctcaagggcaaagctgaagaaaccatctgcggttgatccgg

SEQ ID NO: 479136 - DNA, 75 bp, synthetic construct
  source 1..75: mol_type = other DNA
gcgttctggccagagagctggttgccagtggcgatgtatacaactctggttacgggttattcccgtctgaacagg

SEQ ID NO: 479137 - DNA, 75 bp, synthetic construct
  source 1..75: mol_type = other DNA
agcgggaaaaaattaaggagcaggttgttgagctagtacgccagagtgggcgcgagacgttaaggcaactggaag

SEQ ID NO: 479138 - DNA, 75 bp, synthetic construct
  source 1..75: mol_type = other DNA
tgatgatttgcgccatgtgaaggtggtgaacggtatcccgcaaatcgacaaggggcgcacgaaggaccagaacgc

SEQ ID NO: 479139 - DNA, 75 bp, synthetic construct
  source 1..75: mol_type = other DNA
ggctgtgaacgcccgccgccatggtgattttgccgtggcgctctgtatggcaaaccgggcgtcatacatggaggg

SEQ ID NO: 479140 - DNA, 75 bp, synthetic construct
  source 1..75: mol_type = other DNA
caggagatggcgctggaatatatttctgcctgtgcactgttctcccgtgcctttaaccagctggcagatgctgat

SEQ ID NO: 479141 - DNA, 75 bp, synthetic construct
  source 1..75: mol_type = other DNA
cgttttttatgtgggttcccgtcaggaaatggcgctggaatatatcgccgcctgtgccctgtttgcccgcgcctt

SEQ ID NO: 479142 - DNA, 75 bp, synthetic construct
  source 1..75: mol_type = other DNA
gcccgtctaacctgcgtggtttacagggggatgtggtgattgatgaggcggcatttcatgaagccctggacgaac

SEQ ID NO: 479143 - DNA, 75 bp, synthetic construct
  source 1..75: mol_type = other DNA
cgctggtttgaggatgaaagccagatttgtattgctgaaaaatcccgtcgtaccggtctgacatgggccgaagcg

SEQ ID NO: 479144 - DNA, 75 bp, synthetic construct
  source 1..75: mol_type = other DNA
ttacctggtggcctgcgaaaccttgcagattgagccgattattgtgctcaacaagatagacctgctggacgacga

SEQ ID NO: 479145 - DNA, 75 bp, synthetic construct
  source 1..75: mol_type = other DNA
gttatcgcgtattgatggtttccagtcatactcaggatgggctgaaaccgctggaagaggcgttgaccgggcgca

SEQ ID NO: 479146 - DNA, 75 bp, synthetic construct
  source 1..75: mol_type = other DNA
actggcggagaggtaaactaccagtcgcacgaatcactttctctgctgacgttctgcgtcctggtgctgcgcaac

SEQ ID NO: 479147 - DNA, 75 bp, synthetic construct
  source 1..75: mol_type = other DNA
gggaaaaggcgtggcggtctgtgaaatcctgtgggacacccgcaacaaccactggatgccccgtgattatgaatg

SEQ ID NO: 479148 - DNA, 75 bp, synthetic construct
  source 1..75: mol_type = other DNA
aaaattcggcattccggttacggtggggaaatacggtcccaacgccacggaggagcaaatccgcgtgctgattga

SEQ ID NO: 479149 - DNA, 75 bp, synthetic construct
  source 1..75: mol_type = other DNA
catgctgatgtggaatccgccgatggcgaagttcaccgctgcaatattcgccgcaccatccgttcgctggtgact

SEQ ID NO: 479150 - DNA, 75 bp, synthetic construct
  source 1..75: mol_type = other DNA
agtagcggtagcggcatttccgaacatggtatcgcccatttccataatctgctggcgcaggtgtttaaggactaa

SEQ ID NO: 479151 - DNA, 75 bp, synthetic construct
  source 1..75: mol_type = other DNA
atggaagtgattttgaaatcaaaaaatggtgtgcacgtacacttagatgctaatgattctagaggcttgttaaat

SEQ ID NO: 479152 - DNA, 75 bp, synthetic construct
  source 1..75: mol_type = other DNA
ccgctataactcaacggggcgtatcgatgaaatcccgctggtgacgcaccttacggtaatgttcaagaagaatcc

SEQ ID NO: 479153 - DNA, 75 bp, synthetic construct
  source 1..75: mol_type = other DNA
gccgagttctctagcagcttcacctgcacgtacatcaagcaggtactggatggtgaagagctgctggagctggac

SEQ ID NO: 479154 - DNA, 75 bp, synthetic construct
  source 1..75: mol_type = other DNA
tgtatattttcaccctgattggcctgctcctgaatatcgtcagtgatatcagctatacactggtcgatcctcgta

SEQ ID NO: 479155 - DNA, 75 bp, synthetic construct
  source 1..75: mol_type = other DNA
ggttcgctgttgattgaggtgatgttttcactcaatggcctcggtttgctgggctatgaagcgaccgtctcgcgc

SEQ ID NO: 479156 - DNA, 75 bp, synthetic construct
  source 1..75: mol_type = other DNA
ctacggtttcgataagccgatccacgaacgttacttcaaaatgctctgggactacatccgctttgattttggcga

SEQ ID NO: 479157 - DNA, 75 bp, synthetic construct
  source 1..75: mol_type = other DNA
ttctaccagaaaatttttgcgccaatcctcaggatgcgtggaccattccggcccgtttctatactgaccagaacg

SEQ ID NO: 479158 - DNA, 75 bp, synthetic construct
  source 1..75: mol_type = other DNA
atgtcctcccggttttttttcgtacttcaagtgaatcaatacaccggtctgggcgcgaaagtgctggaagcctgc

SEQ ID NO: 479159 - DNA, 75 bp, synthetic construct
  source 1..75: mol_type = other DNA
ccaatgattatgtgacgcgtgagatcattggcgaaagcatcgtgctggtacgcggtcgtgataaggttttgcgcg

SEQ ID NO: 479160 - DNA, 75 bp, synthetic construct
  source 1..75: mol_type = other DNA
ggggacgttcaaacagcacgagaacgccgagttctccagtagcttcacctgcacgtatatcagacaggtactgga

SEQ ID NO: 479161 - DNA, 75 bp, synthetic construct
  source 1..75: mol_type = other DNA
tgatggtgaaacgctgcttgaacttgattatatggccaatattttccgggttaatggtgtggatcaattaagtac

SEQ ID NO: 479162 - DNA, 75 bp, synthetic construct
  source 1..75: mol_type = other DNA
ttcaccaatgaagagctcactgacgagcaaaaatcgttgattgagtggtatcgcgatgtcttccgcccggaagat

SEQ ID NO: 479163 - DNA, 75 bp, synthetic construct
  source 1..75: mol_type = other DNA
tgtggcagagaaaaaccagaagaaggcgatcgtgatttatcaccattgaagttgctcactttctgcgtactggtg

SEQ ID NO: 479164 - DNA, 75 bp, synthetic construct
  source 1..75: mol_type = other DNA
ggttcggcattaatcgggcagaattttaccggcaacggctattttcatggtcgcccgtcggcaacggcagaaatg

SEQ ID NO: 479165 - DNA, 75 bp, synthetic construct
  source 1..75: mol_type = other DNA
gattgggtttcagatgtttgtgaagtggtttatttaccacgtaccccttcaatttcaaccacagaaattatagaa

SEQ ID NO: 479166 - DNA, 75 bp, synthetic construct
  source 1..75: mol_type = other DNA
ccctataatccacaggcttctggcgggagcaatctggcggtcagtaaccctgagctggataaacaaatagccgca

SEQ ID NO: 479167 - DNA, 75 bp, synthetic construct
  source 1..75: mol_type = other DNA
caggcgcttcatgagacaataacccgaaatcaccagtgccgttcaatgtggcaactgttgaaaaaggttcgtcac

SEQ ID NO: 479168 - DNA, 75 bp, synthetic construct
  source 1..75: mol_type = other DNA
caaaagcacgtggtcacgccgggccagaatgaaaagtactatctcgccggtgcgctgcacagcggtacgggaaaa

SEQ ID NO: 479169 - DNA, 75 bp, synthetic construct
  source 1..75: mol_type = other DNA
gcctgatcgccgggaaagtgatgatggatcgccatgtgcccgactacctgtgcgaaaccgccggggagagctacg

SEQ ID NO: 479170 - DNA, 75 bp, synthetic construct
  source 1..75: mol_type = other DNA
cgcatcgccggcatgaatctgctcgccgccatcatcatcttctggaacaccatgaagctcggcgaggtcgttgca

SEQ ID NO: 479171 - DNA, 75 bp, synthetic construct
  source 1..75: mol_type = other DNA
ccgaaggccagcattaccgcatcgccggcatgaatctgctcgccgccatcatcatcttctggaacaccatgaagc

SEQ ID NO: 479172 - DNA, 75 bp, synthetic construct
  source 1..75: mol_type = other DNA
accattgctgccgggaccgtcgcgccaagccagattctgcggaaactcgcctcctatccgcggcagaacgagctc

SEQ ID NO: 479173 - DNA, 75 bp, synthetic construct
  source 1..75: mol_type = other DNA
ctggtgaattttatcggccagccggtcgtcaatattgtcgaactcaatctggcgctggataagcttgatgaataa

SEQ ID NO: 479174 - DNA, 75 bp, synthetic construct
  source 1..75: mol_type = other DNA
ccgaaatcacccggcggttacgtaaaagtttagaggatgaatccactattcattctcaggatttagcaacttctt

SEQ ID NO: 479175 - DNA, 75 bp, synthetic construct
  source 1..75: mol_type = other DNA
aagacaaagagatggatatctggatcaataaccggcaggctgaaagtaagcgtcaacggagcaccgtattgacgc

SEQ ID NO: 479176 - DNA, 75 bp, synthetic construct
  source 1..75: mol_type = other DNA
atggtaaatctccctcctgaactggggtcacctgatgtatgggctggtggaggtgttgggctgattgcaggtctg

SEQ ID NO: 479177 - DNA, 75 bp, synthetic construct
  source 1..75: mol_type = other DNA
tcagtttctcgccgggctgcatcagcttctgccgcaagaacaagacgggcaatatccgtcccattggcgcgtgag

SEQ ID NO: 479178 - DNA, 75 bp, synthetic construct
  source 1..75: mol_type = other DNA
aggaaggggaaaatgatttaccctcgaccgccagtcgtgaaattctgtttatgcaattactgctcttgctgcgta

SEQ ID NO: 479179 - DNA, 75 bp, synthetic construct
  source 1..75: mol_type = other DNA
tcagtttctcgccgggctgcatcagcttcttccgcaagagctggacgggcaatatccgtctcactggcgcgtgag

SEQ ID NO: 479180 - DNA, 75 bp, synthetic construct
  source 1..75: mol_type = other DNA
aagattgcccggcagaatgctgtaaacaaaatctggatgctcgaaggttacttgctgaagcagtcactgattgaa

SEQ ID NO: 479181 - DNA, 75 bp, synthetic construct
  source 1..75: mol_type = other DNA
atgaccgtattacatagtgtggatttttttccgtctggtaacgcgtccgtggcgatagaaccccggcttccgcag

SEQ ID NO: 479182 - DNA, 75 bp, synthetic construct
  source 1..75: mol_type = other DNA
taagcagcaaacgggactgacgcctcagcgttacctgaaccgcctgcgactgatgaaagcccgacatctgctacg

SEQ ID NO: 479183 - DNA, 75 bp, synthetic construct
  source 1..75: mol_type = other DNA
tggtcttcaggttgttcggtcgagaatggtcgtttgacctgaaggacagaggccgtgaagacaaccacaaagacc

SEQ ID NO: 479184 - DNA, 75 bp, synthetic construct
  source 1..75: mol_type = other DNA
ccgctacatgcttcaaccatccggcgatggttacctgctgccggactggtatggcgcagagccgcgccgacactg

SEQ ID NO: 479185 - DNA, 75 bp, synthetic construct
  source 1..75: mol_type = other DNA
tgcttgttgtctttaaactgttcggtcgtacatggacgcttgaccttaaggataacgaccacacagaaccccgtt

SEQ ID NO: 479186 - DNA, 75 bp, synthetic construct
  source 1..75: mol_type = other DNA
agcagcaaacgggactgacgcctgaaccgcctgcgactgatgaaagcccgacatctactacgccacagcgaggcc

SEQ ID NO: 479187 - DNA, 75 bp, synthetic construct
  source 1..75: mol_type = other DNA
acagcgaggccagcgttactgacatcgcctatcgctgtggattcagcgacagtaaccacttttcgacgctttttc

SEQ ID NO: 479188 - DNA, 75 bp, synthetic construct
  source 1..75: mol_type = other DNA
tgctgtatcgctcgccggatcgatttcagtttctcgccgggctgaatcagttgctgccacaagagctggatgggc

SEQ ID NO: 479189 - DNA, 75 bp, synthetic construct
  source 1..75: mol_type = other DNA
tacgatctgattgtcactaacccgccgtatgtcgacgcggaagatatgtccgacctgccaaacgaataccgtcac

SEQ ID NO: 479190 - DNA, 75 bp, synthetic construct
  source 1..75: mol_type = other DNA
ataacggcggtgatggtgtgtttatgctcaccaaagagcagcttattgctgcacaagaacatttcgcgatttata

SEQ ID NO: 479191 - DNA, 75 bp, synthetic construct
  source 1..75: mol_type = other DNA
cgccgaaacgacagcgtcgactacgacggtaagaacctgatcgttacccgctatgacatgttcaacggaaaaccc

SEQ ID NO: 479192 - DNA, 75 bp, synthetic construct
  source 1..75: mol_type = other DNA
gaaccggaactgggtctggcgtctggcactgacggcctgaaactgacacgtcgcattctcggtaatgcggctgat

SEQ ID NO: 479193 - DNA, 75 bp, synthetic construct
  source 1..75: mol_type = other DNA
agattacctcgctgatgatggtgtgctgatttgtgaagtcggcaacagcatggtacatcttatggaacaatatcc

SEQ ID NO: 479194 - DNA, 75 bp, synthetic construct
  source 1..75: mol_type = other DNA
ttccggaagatatgcgtaacgcccgcctgacctccagcgaaaaacaccgtattgttgagcgcgtgatccgccgcg

SEQ ID NO: 479195 - DNA, 75 bp, synthetic construct
  source 1..75: mol_type = other DNA
gcggtgatcgtcgcagtgaagagtatttgatctccacgaacatggcgaaagaactggcgatggtcgaacgcaccg

SEQ ID NO: 479196 - DNA, 75 bp, synthetic construct
  source 1..75: mol_type = other DNA
agtttgtagaaaatttgacctcccccaatccggtgagcgcaaaatctcgccaacgtgtagagcacgactacctga

SEQ ID NO: 479197 - DNA, 75 bp, synthetic construct
  source 1..75: mol_type = other DNA
gcaattattccggtatcacctggcattattggcggatatgaaacgggcattgtcagcgcacgcgcactgcataaa

SEQ ID NO: 479198 - DNA, 75 bp, synthetic construct
  source 1..75: mol_type = other DNA
gcgttaggtgtagggcgcgttttccgttcgtggatcaaggggcgcattgaagaatacgggttcacggaaggcgtg

SEQ ID NO: 479199 - DNA, 75 bp, synthetic construct
  source 1..75: mol_type = other DNA
gccgacccgatccggtgagcgcaaaatctcgccagcaaacagctcttgagtacatcatcaccgtgaacatggcga

SEQ ID NO: 479200 - DNA, 75 bp, synthetic construct
  source 1..75: mol_type = other DNA
gaactggcgatggtcgaacgcaccgaacagggccgcgccgttcgtcagtacttcatcaaatgcgaggaggagcta

SEQ ID NO: 479201 - DNA, 75 bp, synthetic construct
  source 1..75: mol_type = other DNA
aacctacagtgtccatcaggactgctggaaatggcaggacacatacctgacccagaccgaaacggaaggcacctg

SEQ ID NO: 479202 - DNA, 75 bp, synthetic construct
  source 1..75: mol_type = other DNA
aagtctccggactgtcgtggcataacggtggatgaactgcaacgcctcgattttggggtgatgaacttcagtgat

SEQ ID NO: 479203 - DNA, 75 bp, synthetic construct
  source 1..75: mol_type = other DNA
cattgccgttttccataacgaatagacgcaacaaacctacagtgtcttccatttggtatagctcaaatatgaagt

SEQ ID NO: 479204 - DNA, 75 bp, synthetic construct
  source 1..75: mol_type = other DNA
cgggtaaaataatcacggagtccattctcaatacgccgccggataacaagccgtcgctggatgcgccgtttattt

SEQ ID NO: 479205 - DNA, 75 bp, synthetic construct
  source 1..75: mol_type = other DNA
ttaaatttgaattatttttattagcatcagaaatttcagacaactatgacaatcttcctgagaaagtatccaagc

SEQ ID NO: 479206 - DNA, 75 bp, synthetic construct
  source 1..75: mol_type = other DNA
cgtagaacttatctatgccgataatgtaaatgaaggtataagtaaggttgattttttattagataatttaatgga

SEQ ID NO: 479207 - DNA, 75 bp, synthetic construct
  source 1..75: mol_type = other DNA
gcgtggaccagccggccagctttactgaaatcaccacccaccagtgcctgcgggacacaaagattgagcagtact

SEQ ID NO: 479208 - DNA, 75 bp, synthetic construct
  source 1..75: mol_type = other DNA
tgaaatttggctatgcagatgattcctcctatgcccttgttgacagaaataaccactggagagatttccacactc

SEQ ID NO: 479209 - DNA, 75 bp, synthetic construct
  source 1..75: mol_type = other DNA
aaaatactaaggaacaagttgttgccgtagctgagatctttagtagatctaagaagggatgtgaggggaaagtaa

SEQ ID NO: 479210 - DNA, 75 bp, synthetic construct
  source 1..75: mol_type = other DNA
tttcacccaatcttctttgtcattaggtgaaggggcaaaattgaccgctacagccggattactttctgacgggac

SEQ ID NO: 479211 - DNA, 75 bp, synthetic construct
  source 1..75: mol_type = other DNA
gcaagtctgaaggtgcaatgaccggatctcagtgtgtagagccaggaggcacccggaccgtcgttgttgacggaa

SEQ ID NO: 479212 - DNA, 75 bp, synthetic construct
  source 1..75: mol_type = other DNA
ctggaattcccgtgtcagttttatgaataccacatttaatctgggctggaatgacaccattacactgggtggcgc

SEQ ID NO: 479213 - DNA, 75 bp, synthetic construct
  source 1..75: mol_type = other DNA
gcgctgggtgacaattcagtactgacccaaccagtgtcatttactcagaacgattgggaaaatcgacagttcagt

SEQ ID NO: 479214 - DNA, 75 bp, synthetic construct
  source 1..75: mol_type = other DNA
tgaaaatgcgcgcgataccgtgatgccatttgcctttgccgaagcggtttatggcattggcgaatggcgcggatt

SEQ ID NO: 479215 - DNA, 75 bp, synthetic construct
  source 1..75: mol_type = other DNA
gcatactgggccacgcgccccagccatttcgtgttattgaacgcgcaaaaacttcgtgatacccagcacatgatg

SEQ ID NO: 479216 - DNA, 75 bp, synthetic construct
  source 1..75: mol_type = other DNA
tctcgttctgggggaacgttgtccctcgtgccttcgaacgtattggcggtacggtgttgggttcgattttaggtc

SEQ ID NO: 479217 - DNA, 75 bp, synthetic construct
  source 1..75: mol_type = other DNA
gttagccagcgtctacgcgccgcaacaaacagaacgtaagcacatcatcatcgaaggcgatggcgaggaagaagt

SEQ ID NO: 479218 - DNA, 75 bp, synthetic construct
  source 1..75: mol_type = other DNA
ttcaccatgcatgactttgatatggctcgttttatgatgcaggatgaagtcagcgaagtctatgttaagggcaat

SEQ ID NO: 479219 - DNA, 75 bp, synthetic construct
  source 1..75: mol_type = other DNA
ttggtcttggccgggtagggaaaatgcatgttgagaatatgtatttacttcctcaattagatattgtctgtgctg

SEQ ID NO: 479220 - DNA, 75 bp, synthetic construct
  source 1..75: mol_type = other DNA
ttcctgaagggttaagatctctatctttgattacttcgggttatgtaaaatatgatatggggggagtatcttcaa

SEQ ID NO: 479221 - DNA, 75 bp, synthetic construct
  source 1..75: mol_type = other DNA
tcgcaaacagcaatatccagtgttcctggcatctggcaaggatgtgaggaagatggtgtcgaataccagcgtaag

SEQ ID NO: 479222 - DNA, 75 bp, synthetic construct
  source 1..75: mol_type = other DNA
catgtcgataactttatgtcatctgttagcgctgatttaatcacctgtattttatgtaaagagccggtaattcac

SEQ ID NO: 479223 - DNA, 75 bp, synthetic construct
  source 1..75: mol_type = other DNA
tgaagcattatatccgacagagtcagctatattgcttgctgcggcagcgaagaaaataggttttgatttattaat

SEQ ID NO: 479224 - DNA, 75 bp, synthetic construct
  source 1..75: mol_type = other DNA
agaatattcaggaagaaataggcggcctgcccaatttttcaggaaaaacccccagggcaaatacggcaaactttg

SEQ ID NO: 479225 - DNA, 75 bp, synthetic construct
  source 1..75: mol_type = other DNA
taccagggacagtacctcgacagggaaacagggctgcattacaatctgcacaggtactatgatccggatgtcggg

SEQ ID NO: 479226 - DNA, 75 bp, synthetic construct
  source 1..75: mol_type = other DNA
atggaagaaataccgtgtgctgctgatgcgtgttgatacgtcaacagcacccgatattgaatggcctacacctcc

SEQ ID NO: 479227 - DNA, 75 bp, synthetic construct
  source 1..75: mol_type = other DNA
ccgcctgtcggcagtggaatgaacatgtacgatcggcttgctgtcttacggaaaaccgattttacgggtgacatt

SEQ ID NO: 479228 - DNA, 75 bp, synthetic construct
  source 1..75: mol_type = other DNA
ggcaaaacccttgattggccgtactggtgtggagtttggaaaaacacttgatggtcgcgactggcaggttacagc

SEQ ID NO: 479229 - DNA, 75 bp, synthetic construct
  source 1..75: mol_type = other DNA
atgctttcaaaggtaaaacgaagtctgtgggtgctggactctatgcttccgccatgtttaattccggtgcctata

SEQ ID NO: 479230 - DNA, 75 bp, synthetic construct
  source 1..75: mol_type = other DNA
ctgatgtggcgctaccgtacaacggacactggatactattgctcggcaataccactcgttgacgaccctataact

SEQ ID NO: 479231 - DNA, 75 bp, synthetic construct
  source 1..75: mol_type = other DNA
tgatcgcatctctgaatatgacttcaccattgggcacgattactcagtccataaaacaatttccccaaatttggg

SEQ ID NO: 479232 - DNA, 75 bp, synthetic construct
  source 1..75: mol_type = other DNA
gccatgcgcagcattacgcttgctgaagggtttgttgatctgctatgccagcttgatcgccggtataaaactaat

SEQ ID NO: 479233 - DNA, 75 bp, synthetic construct
  source 1..75: mol_type = other DNA
gaaaacaccaggattagtctcaatgtagagcgttcagcctctggtcattacgatattgataaggcaattaatgcc

SEQ ID NO: 479234 - DNA, 75 bp, synthetic construct
  source 1..75: mol_type = other DNA
taaaacctttacaggtggagactataagctgactgcgctagcaggcgttcattatcagtatgacctgtttaatcc

SEQ ID NO: 479235 - DNA, 75 bp, synthetic construct
  source 1..75: mol_type = other DNA
ccagtaaactatgttaaaggtatcctcgctcaggattctgatcccgcagtcaacaatacgtcttctgagaaaatc

SEQ ID NO: 479236 - DNA, 75 bp, synthetic construct
  source 1..75: mol_type = other DNA
ctgaaagacaaagacttcagcccactgataggtcgtacaggtattgatgcaggcaagactttctccggtaaggag

SEQ ID NO: 479237 - DNA, 75 bp, synthetic construct
  source 1..75: mol_type = other DNA
aaagtgaacggtacgggcattaatcctggtggactgaatgtcggtgaggggacggtcatcctggcgcaacgaccg

SEQ ID NO: 479238 - DNA, 75 bp, synthetic construct
  source 1..75: mol_type = other DNA
ctacaaaacgggaggaatagttaatcctcctttttcttcaaacttacgttttacgaccaatatagataattcgcc

SEQ ID NO: 479239 - DNA, 75 bp, synthetic construct
  source 1..75: mol_type = other DNA
atgagctttttcgacaaagttaaaggtgccattaactctggtcgtgacgaactgacccgccaggttggtcgtttc

SEQ ID NO: 479240 - DNA, 75 bp, synthetic construct
  source 1..75: mol_type = other DNA
gaatttttaggggagtgcaaagccgcagaccctgaatcaataagtaaaatcctttcaaaatttggcagagtgaaa

SEQ ID NO: 479241 - DNA, 75 bp, synthetic construct
  source 1..75: mol_type = other DNA
ttcaagcagccattgactatgcattaagtaaaggctggatctgggtagcagctggtggtgctgcacattgttttt

SEQ ID NO: 479242 - DNA, 75 bp, synthetic construct
  source 1..75: mol_type = other DNA
tcatcaaaaatgacagtcataatcaaaagctactggaggtaataaatccgtttgggaacaactttgacataacca

SEQ ID NO: 479243 - DNA, 75 bp, synthetic construct
  source 1..75: mol_type = other DNA
tcggcggtatgctgatggcaggtattgttgttgtcctgatcgggatggtagcgaatatcttcctgcaactgcctg

SEQ ID NO: 479244 - DNA, 75 bp, synthetic construct
  source 1..75: mol_type = other DNA
gttttctgggttatatcctcggaccaattctgaacacctatctgtctgccggaatgggtgacgtaatcgctatgg

SEQ ID NO: 479245 - DNA, 75 bp, synthetic construct
  source 1..75: mol_type = other DNA
atgagtattgaccgcacttcacctctgaagcccgtaagcaccgttcaaccgcgtgaaaccactgacgcgccggta

SEQ ID NO: 479246 - DNA, 75 bp, synthetic construct
  source 1..75: mol_type = other DNA
ccacaacacacgtcctctcgtctgcagttgcagggacgatggtggtggacggcggtgggttacagcgtaaaacgg

SEQ ID NO: 479247 - DNA, 75 bp, synthetic construct
  source 1..75: mol_type = other DNA
catcttttatggcaccactgacatctagaggtaaagaattagtacggctcatccatgaattagaatgtaggttaa

SEQ ID NO: 479248 - DNA, 75 bp, synthetic construct
  source 1..75: mol_type = other DNA
gattctctcctgagccccagtagctatgattcgctggcgagattgctataccaggcaagtgaaaaacgtattact

SEQ ID NO: 479249 - DNA, 75 bp, synthetic construct
  source 1..75: mol_type = other DNA
cttctggcctggctggaggaccattttgccgatgaggtgaattgggacgctgtggcggatcaattttctctttca

SEQ ID NO: 479250 - DNA, 75 bp, synthetic construct
  source 1..75: mol_type = other DNA
atgagtattgatcgcacttcgcctctgaagcccgtaagcaccgttcaaccgcgcgaaaccactgacgcgccggta

SEQ ID NO: 479251 - DNA, 75 bp, synthetic construct
  source 1..75: mol_type = other DNA
agtttgcgctaaagacatgaaggtgccgggtatttctgtttccgttgtgggcaaagtaaaagcggcaaaggcgag

SEQ ID NO: 479252 - DNA, 75 bp, synthetic construct
  source 1..75: mol_type = other DNA
aaactggaaaacatcttttttatgtaatcttgctagactactatatagtatgtttaatggtagtaactatttttg

SEQ ID NO: 479253 - DNA, 75 bp, synthetic construct
  source 1..75: mol_type = other DNA
ttttttttcttgagtcaatgataggtatgcaagacaactatttcacatattgtatatcaaacggaatatcaaata

SEQ ID NO: 479254 - DNA, 75 bp, synthetic construct
  source 1..75: mol_type = other DNA
agccacgcaagcaccttaaaatcaccatcatacactaaatcagtaagttggcagcattacctggcattgctcacc

SEQ ID NO: 479255 - DNA, 75 bp, synthetic construct
  source 1..75: mol_type = other DNA
ctttcttctttccaacaattgttctctcagcatccaacaatacaaatgtatcaagtataacgtttagtcagtcta

SEQ ID NO: 479256 - DNA, 75 bp, synthetic construct
  source 1..75: mol_type = other DNA
atggcgaactggcaatctatcgacgagctgcaggatattgcatcggatttaccgcgatttatccacgcattagat

SEQ ID NO: 479257 - DNA, 75 bp, synthetic construct
  source 1..75: mol_type = other DNA
aaaggtgagcatgagcgattaccgaatccgacactggcggtcaccgatagcaaaacgacgattaaatttcatccg

SEQ ID NO: 479258 - DNA, 75 bp, synthetic construct
  source 1..75: mol_type = other DNA
cggttttcgtaacaacgcggggtatgcacgttatgtcgaagcgcggcaactttggggacaactgatgattgcttc

SEQ ID NO: 479259 - DNA, 75 bp, synthetic construct
  source 1..75: mol_type = other DNA
atgaatcacgccgcaatctcttatgacgatattgtccgcctgaagcatcttcgtaacgtgggggagtttgtcact

SEQ ID NO: 479260 - DNA, 75 bp, synthetic construct
  source 1..75: mol_type = other DNA
atgaataagattagtttttcggtagggcaggcagctggcgttgctgtaatgtcagtaaatgctgacgctaccctc

SEQ ID NO: 479261 - DNA, 75 bp, synthetic construct
  source 1..75: mol_type = other DNA
cgacttttccacgcctgaagataatcatgattgttcgcccacaacaacactggctgcgccgtatttttgtctggc

SEQ ID NO: 479262 - DNA, 75 bp, synthetic construct
  source 1..75: mol_type = other DNA
atatgacgccttttatctctgtgttgatttcctacacgttcatttcgttggattgtctggcggaggaactggaag

SEQ ID NO: 479263 - DNA, 75 bp, synthetic construct
  source 1..75: mol_type = other DNA
agtgctggcagggtgtgaacgtattgcacacacgccaattccattcgcttatactctgattttgcatcgcacagt

SEQ ID NO: 479264 - DNA, 75 bp, synthetic construct
  source 1..75: mol_type = other DNA
tccgctgcctgtactcataattatccacaacccagagactaatttaagttattggcaagatgctcgccaagtgtt

SEQ ID NO: 479265 - DNA, 75 bp, synthetic construct
  source 1..75: mol_type = other DNA
gtactggcaaccgtactatcgcggtttatgacctgggtggtggtactttcgatatttccattatcgaaatcgacg

SEQ ID NO: 479266 - DNA, 75 bp, synthetic construct
  source 1..75: mol_type = other DNA
agcaggctgaagccagttaccttgagcagattgctcaactggagagccagaacaaacaactacaggggcaaatta

SEQ ID NO: 479267 - DNA, 75 bp, synthetic construct
  source 1..75: mol_type = other DNA
gtgtggcatctggttaaaaaactgccatggcgcggcattcttctggccattcttatcaatgcctttctgatcggc

SEQ ID NO: 479268 - DNA, 75 bp, synthetic construct
  source 1..75: mol_type = other DNA
atgggtaaaataattggtatcgacctgggtactaccaactcttgtgtagcgattatggatggcaccactcctcgt

SEQ ID NO: 479269 - DNA, 75 bp, synthetic construct
  source 1..75: mol_type = other DNA
ttatgacctgggtggtggtactttcgatatttccattatcgaaatcgacgaggttgacggcgaaaaaaccttcga

SEQ ID NO: 479270 - DNA, 75 bp, synthetic construct
  source 1..75: mol_type = other DNA
cgacgcagaagcgaacgccgaagctgaccgtaagtttgaagagctggtacagactcgcaaccagggcgaccatct

SEQ ID NO: 479271 - DNA, 75 bp, synthetic construct
  source 1..75: mol_type = other DNA
ccccatttaccgaatacgaaaaaaaaggccagcgtgactaccatctcgcacttcgtggcaacagccttaatccga

SEQ ID NO: 479272 - DNA, 75 bp, synthetic construct
  source 1..75: mol_type = other DNA
tggagcgcctgatccgtgaacccaaacgttaccaggatctgctggaatttctctggctctgtttttctctgggat

SEQ ID NO: 479273 - DNA, 75 bp, synthetic construct
  source 1..75: mol_type = other DNA
caggagcagggctacgaaccgggtgtaattatctcgtttcgctatattctctgcacttttattgatgaagctgcg

SEQ ID NO: 479274 - DNA, 75 bp, synthetic construct
  source 1..75: mol_type = other DNA
acaacgctctccagtgccgcgcctggcgaagtcaggtgaacgggctgctggatgaacgggaaggattacagcaat

SEQ ID NO: 479275 - DNA, 75 bp, synthetic construct
  source 1..75: mol_type = other DNA
cagcaccgctcgcgatctcgacggtactattctggcgaccggcttcccgttcaaagcaaaacagtacgccactac

SEQ ID NO: 479276 - DNA, 75 bp, synthetic construct
  source 1..75: mol_type = other DNA
tgccgtggcgcgaattgttgctgttcctgattatcagcgggtttctcgccggggtgtatcacatgggatacagca

SEQ ID NO: 479277 - DNA, 75 bp, synthetic construct
  source 1..75: mol_type = other DNA
cttgtctcgccggaacgctgaatttactgcagctcggtgatgaagaagcccattacctcggcgtgaacgttaagc

SEQ ID NO: 479278 - DNA, 75 bp, synthetic construct
  source 1..75: mol_type = other DNA
cgcccttcttccgcgcactggtcgattatgtcaatcagggcaacagcgcatttgactgccccggtcatcagggtg

SEQ ID NO: 479279 - DNA, 75 bp, synthetic construct
  source 1..75: mol_type = other DNA
cagggtgtctatatcgaagaacatgatggtcgtaagcaagtttggtgctatgtcatcaagcctcgtgatgcgcaa

SEQ ID NO: 479280 - DNA, 75 bp, synthetic construct
  source 1..75: mol_type = other DNA
gtgagtttttccgtcgtcatccggcagggaatcagttcgtggagtacttcggagaaacgctgttccgttccgact

SEQ ID NO: 479281 - DNA, 75 bp, synthetic construct
  source 1..75: mol_type = other DNA
atggatgaaattatgcggatttcggatgatatttcagtgatccgcgatggtgaatatattgcaacgcatgaaaag

SEQ ID NO: 479282 - DNA, 75 bp, synthetic construct
  source 1..75: mol_type = other DNA
ccactggtggtaaagcgcattacgccggttgttgaacgccagttgatgctggtgcgcaggaagaaccgttcactt

SEQ ID NO: 479283 - DNA, 75 bp, synthetic construct
  source 1..75: mol_type = other DNA
atacttcgttctaaatggcacttcatcttctaacaaagtggttttaaacgccctgctaacaccgggtgatctggt

SEQ ID NO: 479284 - DNA, 75 bp, synthetic construct
  source 1..75: mol_type = other DNA
agaaaagttaggtattctttcattagcaagcagtaacaataacttactgatgtggtcgcattatgcttctgagca

SEQ ID NO: 479285 - DNA, 75 bp, synthetic construct
  source 1..75: mol_type = other DNA
cacaacacggcgagctggaactcaagccattaatggcgcaggcgctgcatatgggggatgaagttcataaccgca

SEQ ID NO: 479286 - DNA, 75 bp, synthetic construct
  source 1..75: mol_type = other DNA
tctggcctggatgcgcgatgaactggcgccggcaatgaaagcagcaatcgcacaacacggcgagctggaactcaa

SEQ ID NO: 479287 - DNA, 75 bp, synthetic construct
  source 1..75: mol_type = other DNA
tttatcccgatgatggctgactgttcgccgctgctgctggagcttaatgaaaacgatccgggcattctggttacg

SEQ ID NO: 479288 - DNA, 75 bp, synthetic construct
  source 1..75: mol_type = other DNA
ccgtgtatcgcacaacaacatgcggcaaaagtgtttaatgccgataaaacctacttcgttttaaacggcacctcc

SEQ ID NO: 479289 - DNA, 75 bp, synthetic construct
  source 1..75: mol_type = other DNA
atgataaaaaaaccaagcctatgaattacaatgataattacccttcgatacaagcgaattcaattttaaatgaag

SEQ ID NO: 479290 - DNA, 75 bp, synthetic construct
  source 1..75: mol_type = other DNA
gagctgaaaacgatgggtcgcctgactcgcagagagtggacgctgattggccttgtcattctcagcttaggtttg

SEQ ID NO: 479291 - DNA, 75 bp, synthetic construct
  source 1..75: mol_type = other DNA
catggcattacttcgccgtgtttgtggcaatgattgtcggcatgatcctcgagccaattccggcaacagcgatca

SEQ ID NO: 479292 - DNA, 75 bp, synthetic construct
  source 1..75: mol_type = other DNA
cgcacgctgacgttgggttatgcgattgtcattatcgacattctgctggcaccgtttacaccgtccaacaccgcg

SEQ ID NO: 479293 - DNA, 75 bp, synthetic construct
  source 1..75: mol_type = other DNA
agacgaaattttactataacgacgggaaccagctgacggcggtggtgtacccggacgggctggagagccgccggg

SEQ ID NO: 479294 - DNA, 75 bp, synthetic construct
  source 1..75: mol_type = other DNA
gggctgattatcaggagtgatggggagcccggctttggtgctattcagtctttagacggaatgactcactgggct

SEQ ID NO: 479295 - DNA, 75 bp, synthetic construct
  source 1..75: mol_type = other DNA
atgccgcaggttgctgcaaaactgggtgattcagtcactatctggcatcagagcggcaaaggttcgcaacaatcc

SEQ ID NO: 479296 - DNA, 75 bp, synthetic construct
  source 1..75: mol_type = other DNA
agaatgattttactctatatggaggagtcatattggctgataattataaatctgcaataattggtgccggtaaat

SEQ ID NO: 479297 - DNA, 75 bp, synthetic construct
  source 1..75: mol_type = other DNA
aacacgggcaggcttggcgtacatcatgggtttatagcattgacagaacaggaaccctgctgaatttatccggat

SEQ ID NO: 479298 - DNA, 75 bp, synthetic construct
  source 1..75: mol_type = other DNA
atacagacggtagcgtcacattcgctgtaaacggacagatgaccccatcaaactacgcaaattttgatgcccgct

SEQ ID NO: 479299 - DNA, 75 bp, synthetic construct
  source 1..75: mol_type = other DNA
gtaacccggtgcgtaccgatgtgttggcgctaccgttgccgcagcaacgtttggctggacgtgaaggtccggttc

SEQ ID NO: 479300 - DNA, 75 bp, synthetic construct
  source 1..75: mol_type = other DNA
aggcattccggttgtacttcatgaacaaaacggtattgcgggcttaaccaataaatggctggcgaagattgccac

SEQ ID NO: 479301 - DNA, 75 bp, synthetic construct
  source 1..75: mol_type = other DNA
ctcactgggggcggaaaagtgaaatgtcatgtaaggcgaaaatgccagacttaaagttatcgtcaggtttttctc

SEQ ID NO: 479302 - DNA, 75 bp, synthetic construct
  source 1..75: mol_type = other DNA
ggtaacgttgtggtgcacggtatttttgccagcgtaccgtactgcattcagttgctggaagggccatacgttgaa

SEQ ID NO: 479303 - DNA, 75 bp, synthetic construct
  source 1..75: mol_type = other DNA
gttccgcgacttgccgaaagtgcagtacgacctgattgtcactaacccgccatatgtcgatgcagaagatatgtc

SEQ ID NO: 479304 - DNA, 75 bp, synthetic construct
  source 1..75: mol_type = other DNA
ttgggtggaatggatatgcccagcaaagggaaacttactcgtcaatgtcgtgtctcctggccactcgcattaggt

SEQ ID NO: 479305 - DNA, 75 bp, synthetic construct
  source 1..75: mol_type = other DNA
tgaacgttaaaattgagcatgagatcatcatcaaggcagacaaagatgtcgaagagctgcttgagactcgtagcg

SEQ ID NO: 479306 - DNA, 75 bp, synthetic construct
  source 1..75: mol_type = other DNA
tcgcattctcggtaacgcggcagattacctcgctgatgatggcgtgctgatttgtgaagtcggcaacagcatggt

SEQ ID NO: 479307 - DNA, 75 bp, synthetic construct
  source 1..75: mol_type = other DNA
gcttatgccttcccggaagcggaagtcgacgcggtggacatctctcccgacgcgctggcggttgctgaacagaac

SEQ ID NO: 479308 - DNA, 75 bp, synthetic construct
  source 1..75: mol_type = other DNA
gcaccgacggcctgaaactgacgcgtcgcattctcggaaacgcggcagattacctcgctgatgatggcgtgctga

SEQ ID NO: 479309 - DNA, 75 bp, synthetic construct
  source 1..75: mol_type = other DNA
ctgcgttatcgggtttccagcgaacattaatgaacagtcttgccagcagaaaccagtaccaacagctctggcggc

SEQ ID NO: 479310 - DNA, 75 bp, synthetic construct
  source 1..75: mol_type = other DNA
ggctgacgcgatgaaagaagcgggcatcaatgttgattacgttctggagttcgacgtaccggacgaactgattgt

SEQ ID NO: 479311 - DNA, 75 bp, synthetic construct
  source 1..75: mol_type = other DNA
cagatgacgtggagccgcttcggccagatgacggcggttcaccgcgaggaaggtatcagcaccgccactatgaca

SEQ ID NO: 479312 - DNA, 75 bp, synthetic construct
  source 1..75: mol_type = other DNA
gccaactggcaggtcaaccgaatgcagacatcgcaggcgggatgtgtcagcatcagcgttacgctagtttcaccc

SEQ ID NO: 479313 - DNA, 75 bp, synthetic construct
  source 1..75: mol_type = other DNA
acatcgcaggcgggatgtgtcagcatcagcgttacgctgttttcaccagggggcagagaaggcgaaatgacccgt

SEQ ID NO: 479314 - DNA, 75 bp, synthetic construct
  source 1..75: mol_type = other DNA
atgtcagcttccctgaagaatcaacaaggctttagcctgccggaagtgatgttggcgatggtgctgatggtaatg

SEQ ID NO: 479315 - DNA, 75 bp, synthetic construct
  source 1..75: mol_type = other DNA
tctgtttgtcatttctttaactatgtcgctgatcaatcgcgatcagctcctcgcttttactatgggaccggctgc

SEQ ID NO: 479316 - DNA, 75 bp, synthetic construct
  source 1..75: mol_type = other DNA
gcaaccctgtcagtggcgaacgcgtggactggcatgctgacagtggcaacctctggcagacacagggcaccacag

SEQ ID NO: 479317 - DNA, 75 bp, synthetic construct
  source 1..75: mol_type = other DNA
gggcaggctgtcacctggcacacagacaacgggcagttcacacagcaggatgcagtgacaaatgctgccggtgcc

SEQ ID NO: 479318 - DNA, 75 bp, synthetic construct
  source 1..75: mol_type = other DNA
ttccgccattgtggtgaacaaaacctccgccgttgccgacggccaggacagcatcattctgaccgctgtcatccg

SEQ ID NO: 479319 - DNA, 75 bp, synthetic construct
  source 1..75: mol_type = other DNA
gtgaaccgtaacaatgatgtggtgctggaataccgcaaacagacgctgattaccctgcaactgccaccagacgta

SEQ ID NO: 479320 - DNA, 75 bp, synthetic construct
  source 1..75: mol_type = other DNA
cctgacaggcacggatgcagacggacagaccgttaccctgaatatgggcagcaactggtttgcgcagagtgcgac

SEQ ID NO: 479321 - DNA, 75 bp, synthetic construct
  source 1..75: mol_type = other DNA
atggtaaagacaaatccatcttctgtaagacgtgtcgcagtttatgggctggctggattgcagttcttttttcag

SEQ ID NO: 479322 - DNA, 75 bp, synthetic construct
  source 1..75: mol_type = other DNA
tgtgccacagttcactcccgaattttggccggtgtggttgatcattgccggagtattgctggttgggatgtggtt

SEQ ID NO: 479323 - DNA, 75 bp, synthetic construct
  source 1..75: mol_type = other DNA
atcgaaaccatgggcggtgtgatgacgacgctgatcgcgaaaaacaccactatcccgaccaagcacagccaggtg

SEQ ID NO: 479324 - DNA, 75 bp, synthetic construct
  source 1..75: mol_type = other DNA
atgcaatctactattaaatcgttgcccgctatttcgcttagcaatatttataagtgttatggcgctggggcagga

SEQ ID NO: 479325 - DNA, 75 bp, synthetic construct
  source 1..75: mol_type = other DNA
cgcatcctcaccggccgtaagcatcagtggcaatgtcatgaccgtgaagagcaatcccgcaggcgtcaccctgac

SEQ ID NO: 479326 - DNA, 75 bp, synthetic construct
  source 1..75: mol_type = other DNA
ctgaaaggttcgtcgcttgacgtcctgctgccgttttacaacaccccgaagaacgtgctgttcacccagctcggg

SEQ ID NO: 479327 - DNA, 75 bp, synthetic construct
  source 1..75: mol_type = other DNA
taccgcaatctgcgtcctctgtatcccaaaatggtaattcgtatccgcaaaggtagctctaacggtgtggaactg

SEQ ID NO: 479328 - DNA, 75 bp, synthetic construct
  source 1..75: mol_type = other DNA
cagtaagtgcgccccgcgtcagcttcacgcagcagttgtatctcaccctgcaggccggcagaaccactgctgtgg

SEQ ID NO: 479329 - DNA, 75 bp, synthetic construct
  source 1..75: mol_type = other DNA
aatagcgttaaaaaatattcaggccggaaatgctaaaaaattcacgttatccagcaccaacaactccacgaaaaa

SEQ ID NO: 479330 - DNA, 75 bp, synthetic construct
  source 1..75: mol_type = other DNA
tggtgcgctgggtatcggcgttcagaacgcgctgggcggaaactcaattgctttcggggataacgatacgggtat

SEQ ID NO: 479331 - DNA, 75 bp, synthetic construct
  source 1..75: mol_type = other DNA
cggcgtgggttatgtgggaggtctgcgcgtcagtctgcgcaaaccttacagcctgccggctgcggtcggggatac

SEQ ID NO: 479332 - DNA, 75 bp, synthetic construct
  source 1..75: mol_type = other DNA
atattcaggccggaaatgctaaaaaattcacgttatccagcgccaacaactccacgaaaaacgcaacgtttaatt

SEQ ID NO: 479333 - DNA, 75 bp, synthetic construct
  source 1..75: mol_type = other DNA
ttttgcgcgccctgggcggaagtagaatatctctttgatgaggagattttgccggtatgcagcggcagtttgctt

SEQ ID NO: 479334 - DNA, 75 bp, synthetic construct
  source 1..75: mol_type = other DNA
atgagcactggtgtgcaaaccagcttatcagcaacgaaccggccagaccggacacttttatctttgcctgcattc

SEQ ID NO: 479335 - DNA, 75 bp, synthetic construct
  source 1..75: mol_type = other DNA
gaacggtacgaccaccacagtaagtgctccccgcgtcagcttcacacagcagttgtatctcaccctgcaggctgg

SEQ ID NO: 479336 - DNA, 75 bp, synthetic construct
  source 1..75: mol_type = other DNA
tacggagaatgccgccggcacagtcacctggaccgcatcctcaccggcggtgagcattaacggcaatgtcatgac

SEQ ID NO: 479337 - DNA, 75 bp, synthetic construct
  source 1..75: mol_type = other DNA
tgccgccatgcagggagaactgctggctgaccgtactcaggcgctggcagatggtcaggaggcggtcagctacac

SEQ ID NO: 479338 - DNA, 75 bp, synthetic construct
  source 1..75: mol_type = other DNA
aggataccgggagcaactctgcggataatatcggtggcgtgtattacaaacaggctcagatttatataaatggcg

SEQ ID NO: 479339 - DNA, 75 bp, synthetic construct
  source 1..75: mol_type = other DNA
atatagaggcaataaagatagataagtattttctttgggggaatgaagcaaccacacgattctcaaatctcgtaa

SEQ ID NO: 479340 - DNA, 75 bp, synthetic construct
  source 1..75: mol_type = other DNA
gtgatattggtgtggtgtttaaataccttggtattgataacatatcattcaaccacgacgggacattttcacctg

SEQ ID NO: 479341 - DNA, 75 bp, synthetic construct
  source 1..75: mol_type = other DNA
aaaaataaagaataaagttactgagttattgtccctctgtggcaaactggaacagcaatccctgaccagtctgga

SEQ ID NO: 479342 - DNA, 75 bp, synthetic construct
  source 1..75: mol_type = other DNA
tgtgatgcgtacgctggaactggaatctgaacccgtcaccaaattgttgcaggagaacgcgtaccgtgagttgct

SEQ ID NO: 479343 - DNA, 75 bp, synthetic construct
  source 1..75: mol_type = other DNA
gaacgtaaggcagaatttgtggcgctccatccgaaagatgagcgggaagctgtgatgcgtacgctggaactggaa

SEQ ID NO: 479344 - DNA, 75 bp, synthetic construct
  source 1..75: mol_type = other DNA
cgcagaaatcatcccgtatcgcgtggaagccaccatttttctctatcctggaccggaagcagagccggtaatggc

SEQ ID NO: 479345 - DNA, 75 bp, synthetic construct
  source 1..75: mol_type = other DNA
agcttcctctctcgaagactggcaccttgaaacgctgcacattccggaaacggagcgtgacctctatcgcgtaca

SEQ ID NO: 479346 - DNA, 75 bp, synthetic construct
  source 1..75: mol_type = other DNA
ctgcgtgtgcctgcagcctttgaggggctttcagttgcggggccaactgcagcttatgaatttcatgcccgaagc

SEQ ID NO: 479347 - DNA, 75 bp, synthetic construct
  source 1..75: mol_type = other DNA
ggctttctgttgcggggccaactgccgcttatgaatttcatgcccgaagtgccgacggtcgggtggcggatgcca

SEQ ID NO: 479348 - DNA, 75 bp, synthetic construct
  source 1..75: mol_type = other DNA
tttttgccgcgctgcatgttgagggtgttcaacgtgtggagctggcttctcctctggcggatgtggtcctgaaca

SEQ ID NO: 479349 - DNA, 75 bp, synthetic construct
  source 1..75: mol_type = other DNA
gtgcaaccagtccggcacctgcacaggtggtgctgactgtccttagccgcgaaggcgacggaacagcagaaaaag

SEQ ID NO: 479350 - DNA, 75 bp, synthetic construct
  source 1..75: mol_type = other DNA
tttttgccgcgctgcatgttgagggggttcaacgtgtagaactggcttctccgctggcggatgtggtcctgaaca

SEQ ID NO: 479351 - DNA, 75 bp, synthetic construct
  source 1..75: mol_type = other DNA
tttatctttcgtggccgacggggtgacactgttaaaatactctgggccgatgctgatggtctgtgcctgttcacc

SEQ ID NO: 479352 - DNA, 75 bp, synthetic construct
  source 1..75: mol_type = other DNA
atggtatataatatattggtattaattgtttttgtaattgttgtattggtttcaaataaaagattacgcattttt

SEQ ID NO: 479353 - DNA, 75 bp, synthetic construct
  source 1..75: mol_type = other DNA
atggcagtgattgacctttcccagctgcccgcgccgcagatagtggacgtgccggattttgagacgctgctggct

SEQ ID NO: 479354 - DNA, 75 bp, synthetic construct
  source 1..75: mol_type = other DNA
tttactatcatggtccacgggataaccgcgagcgctactaccgggtctcatttcgcgaagtccccactcgtaacc

SEQ ID NO: 479355 - DNA, 75 bp, synthetic construct
  source 1..75: mol_type = other DNA
cttcaacccaggcgatgcagcgaaaactcggcaagcactggcaacagttgcataacttcgtctatcttgtcgcga

SEQ ID NO: 479356 - DNA, 75 bp, synthetic construct
  source 1..75: mol_type = other DNA
agttgcgcgcgaagcacgtaggctttgtttttcagtcatttatgttaattcctacccttaacgcgctggaaaacg

SEQ ID NO: 479357 - DNA, 75 bp, synthetic construct
  source 1..75: mol_type = other DNA
tgtttttcagtcatttatgttaattcctacccttaacgcgctggaaaacgtcgagcttccggcgctgctgcgcgg

SEQ ID NO: 479358 - DNA, 75 bp, synthetic construct
  source 1..75: mol_type = other DNA
actgctacgatggaaaacctcatcaatcagcctttctgggatgcgatgagtccgcagaacaaatcagcgatgatg

SEQ ID NO: 479359 - DNA, 75 bp, synthetic construct
  source 1..75: mol_type = other DNA
tgactaaattcgtgcagacgccggttaagtacactccgggccagtcgaagaattacacggtggaaagtcagcgcg

SEQ ID NO: 479360 - DNA, 75 bp, synthetic construct
  source 1..75: mol_type = other DNA
caacgtatttggagaggccaagcaacgggcaaatgtggcacttacccaagaggcaactcttcaactgaatgcggt

SEQ ID NO: 479361 - DNA, 75 bp, synthetic construct
  source 1..75: mol_type = other DNA
cataacttcgtctatcttgtcgcgatcctggccccaatacattatctgtggtcagtgaagattatttcaccgcag

SEQ ID NO: 479362 - DNA, 75 bp, synthetic construct
  source 1..75: mol_type = other DNA
acccgccgcctgctgggtttatggtgtttcgtctgggcaacgctgcacttaaccagttatgccttactggaactg

SEQ ID NO: 479363 - DNA, 75 bp, synthetic construct
  source 1..75: mol_type = other DNA
ccgcgcattatgactaaaaacacgcatggcacaggttgtacgctctcggcggcgttggcggcgctacgtccgcgg

SEQ ID NO: 479364 - DNA, 75 bp, synthetic construct
  source 1..75: mol_type = other DNA
actcggcaagcactggcaacagttgcataacttcgtctatcttgtcgcgatcctggccccaatacattatttgtg

SEQ ID NO: 479365 - DNA, 75 bp, synthetic construct
  source 1..75: mol_type = other DNA
ggcgtgaataatctggcgttattaggtaaggagttaattactcggccttatttaacgttaggtattatcagctgg

SEQ ID NO: 479366 - DNA, 75 bp, synthetic construct
  source 1..75: mol_type = other DNA
attttttccaactgctggggatgcatggatcaattccaatagttatttccaagcccatgcgtggtcgatttttgg

SEQ ID NO: 479367 - DNA, 75 bp, synthetic construct
  source 1..75: mol_type = other DNA
ggcaggtaactgcaacgtgaagcgcctgacggtagtccctgccgataatgacgcggtgccgccggtcgccgcagt

SEQ ID NO: 479368 - DNA, 75 bp, synthetic construct
  source 1..75: mol_type = other DNA
ccgccagtatatgtcctgcggcttgcgcgcatttctcgattatgtaaaaacgggtcagatctgccagagtcagcg

SEQ ID NO: 479369 - DNA, 75 bp, synthetic construct
  source 1..75: mol_type = other DNA
gctcacaaggctcggggcgatgttttctggtaaagagtaccagatactgcttcctggtgaaattcacattaaaga

SEQ ID NO: 479370 - DNA, 75 bp, synthetic construct
  source 1..75: mol_type = other DNA
ccactggtgattataatgttattaccggtgcatatcttggtaatatcacactgaaaacagaaggtactttaacta

SEQ ID NO: 479371 - DNA, 75 bp, synthetic construct
  source 1..75: mol_type = other DNA
ttcatccgaaagatgagcaggaagccgtgatccgcacgctggaactggaatctgaacccgtcactaaattgttgc

SEQ ID NO: 479372 - DNA, 75 bp, synthetic construct
  source 1..75: mol_type = other DNA
accggttaaagaaaattatccgggcgagcagtttgttgaatggcacagaaaagaggtgttcagaggagagcattg

SEQ ID NO: 479373 - DNA, 75 bp, synthetic construct
  source 1..75: mol_type = other DNA
ggcattaaccattatcagggcaccgccggggatatcgaaggcgtggccagcggccaggcggcaggcaatgccttt

SEQ ID NO: 479374 - DNA, 75 bp, synthetic construct
  source 1..75: mol_type = other DNA
gaattggtgggaagattttgaacaaaaaagccttgcccttgctcttgaatacgaattcatgttcagcactgacat

SEQ ID NO: 479375 - DNA, 75 bp, synthetic construct
  source 1..75: mol_type = other DNA
aatcgttgacacagataaatttgataaaatggatgacaatataacacctgaagaagttaatctattctttaaaga

SEQ ID NO: 479376 - DNA, 75 bp, synthetic construct
  source 1..75: mol_type = other DNA
gctcttgagtatgagttcatgttcagcacagatatttcaaacttctacccttctatttacactcatagctttgaa

SEQ ID NO: 479377 - DNA, 75 bp, synthetic construct
  source 1..75: mol_type = other DNA
ttttgaggtcgccgactttaaccgaggcctggtgatcccggcgtttaaccgcgccgtctgtaacgaactcaccaa

SEQ ID NO: 479378 - DNA, 75 bp, synthetic construct
  source 1..75: mol_type = other DNA
aggccgatagcaaaaccctgcgcttctccaaaggcgcgcgcccggaacccggcgtcaataaagccattgccgaat

SEQ ID NO: 479379 - DNA, 75 bp, synthetic construct
  source 1..75: mol_type = other DNA
caccgccaccccggcgctgcatacggtgcagattttcggcgagccggtttaccgttatacctaccgtaccgcggt

SEQ ID NO: 479380 - DNA, 75 bp, synthetic construct
  source 1..75: mol_type = other DNA
tctgaacccgtcactaaattgttgcaggagaacgcttaccgtgagttgcttctgcgccagcgcattaacgaagcc

SEQ ID NO: 479381 - DNA, 75 bp, synthetic construct
  source 1..75: mol_type = other DNA
ctgcgtgtgcctgcagcctttgaaggactttcagttgcggggccaactgcagcttatgaatttcatgcccgaagc

SEQ ID NO: 479382 - DNA, 75 bp, synthetic construct
  source 1..75: mol_type = other DNA
gtatacgtatgttatgtggcataaaagttgatgtacgattgaaaatcgtgtcattaatatttatggctataccaa

SEQ ID NO: 479383 - DNA, 75 bp, synthetic construct
  source 1..75: mol_type = other DNA
cgctgccaactacaacgtgaaacgcctgacggtgacacctgctgataatgacgctgtgccgcccgttgcagcagt

SEQ ID NO: 479384 - DNA, 75 bp, synthetic construct
  source 1..75: mol_type = other DNA
cagttagcccgaaatgtatcttccggcacatgcgagtatgtgatcaacacaaccaaaggcgggaaggtcatagct

SEQ ID NO: 479385 - DNA, 75 bp, synthetic construct
  source 1..75: mol_type = other DNA
tacacgtgcagggtgtgcagcgagtggaactggatctacctgaacggctgattatcagcgatacacaggcggcgc

SEQ ID NO: 479386 - DNA, 75 bp, synthetic construct
  source 1..75: mol_type = other DNA
ggccgggaacaacaataccgagcgcctgaccatcaccccggcggatgacactaccatcccgccgacgcctgccgt

SEQ ID NO: 479387 - DNA, 75 bp, synthetic construct
  source 1..75: mol_type = other DNA
aaggataagttggaatcagctataaataatttattttctgaatgtaacaaagttgtttcttttagtaatggtaac

SEQ ID NO: 479388 - DNA, 75 bp, synthetic construct
  source 1..75: mol_type = other DNA
aaagaaataagagttattggatttactgccccccggtctattgaagatagtatttcatcgcttggtgacattgat

SEQ ID NO: 479389 - DNA, 75 bp, synthetic construct
  source 1..75: mol_type = other DNA
gctgatatcccggcgcggctggtggataagcttcagaacctgatccttgacggctggcggtttcatctttctggg

SEQ ID NO: 479390 - DNA, 75 bp, synthetic construct
  source 1..75: mol_type = other DNA
gcgcaggctgtgatggtggcttacgcgatgggcagcgatcttgaccagctagctgccaactacaacgtgaaacgc

SEQ ID NO: 479391 - DNA, 75 bp, synthetic construct
  source 1..75: mol_type = other DNA
gggcgaccacaaactctgaccacaatctgccggttacgccgaatctgctgaatcagaactttacgcccacagcac

SEQ ID NO: 479392 - DNA, 75 bp, synthetic construct
  source 1..75: mol_type = other DNA
ggtcgggatattcgccgtagcgccatttttgccgcgctgcatgttgagggtgttcagcgtgtggaactggcttcc

SEQ ID NO: 479393 - DNA, 75 bp, synthetic construct
  source 1..75: mol_type = other DNA
cttggcggcgaagattttactcatatgctggtggatgaagttttaaaacgcgccgcagtggctaaaaacatgctc

SEQ ID NO: 479394 - DNA, 75 bp, synthetic construct
  source 1..75: mol_type = other DNA
tccgcgcgatatgctcatcaaccgcacctttaaggccaaactggaagagttgtgggcgcgggcgctgggtgacga

SEQ ID NO: 479395 - DNA, 75 bp, synthetic construct
  source 1..75: mol_type = other DNA
gaagagttgtgggcgcgggcgctgggtgacgagcgagaagagattggccgggtgatcaccgattttgatgcggcg

SEQ ID NO: 479396 - DNA, 75 bp, synthetic construct
  source 1..75: mol_type = other DNA
gcaaggagttaattacccggccttatttaactataagggcttccccggcatgtcaacgccggtgtttacggtttc

SEQ ID NO: 479397 - DNA, 75 bp, synthetic construct
  source 1..75: mol_type = other DNA
ggtacgtttgacgttacggttctcgaatacgccactccggtgattgaagttcacgcctccgcgggcgataacttc

SEQ ID NO: 479398 - DNA, 75 bp, synthetic construct
  source 1..75: mol_type = other DNA
gtttagccgccgaattagctgggttaaatgccgtgcgtttaattaatgagccaacggcagccgcaatggcttatg

SEQ ID NO: 479399 - DNA, 75 bp, synthetic construct
  source 1..75: mol_type = other DNA
gctgagtatgccattttctctgggatcacggtttatgatttcagcccggagactcgcattgcgatcctggatatg

SEQ ID NO: 479400 - DNA, 75 bp, synthetic construct
  source 1..75: mol_type = other DNA
attgccagtatcaccctgaacaatgacgaatcgcactgtattaacatctgcgatacgcagttaggttcaaggtat

SEQ ID NO: 479401 - DNA, 75 bp, synthetic construct
  source 1..75: mol_type = other DNA
ccgcggctgaatatccagatcatggaaggggaactggaagaagatggtggcctgatttactgcgatggcaagtat

SEQ ID NO: 479402 - DNA, 75 bp, synthetic construct
  source 1..75: mol_type = other DNA
cgcgctttccaaggttgagggcgtgagcaagaccgacgtaagtttcgacaagcgccaggccgtcgtcaccttcga

SEQ ID NO: 479403 - DNA, 75 bp, synthetic construct
  source 1..75: mol_type = other DNA
acctgagcgcgattttccgggcagataaaaaattgccttatctgaccatcattgataagggatacagtgcgaaag

SEQ ID NO: 479404 - DNA, 75 bp, synthetic construct
  source 1..75: mol_type = other DNA
ctcagtccgcagaaaccttcattcctgctttaccggagcagtacagggcatatcaccaggcgcgcatcagggagc

SEQ ID NO: 479405 - DNA, 75 bp, synthetic construct
  source 1..75: mol_type = other DNA
gtgcgccacagatgttggtcgtcgaggtgtctcatcagagcaagcatgggatgcttatcgagaactccgttacaa

SEQ ID NO: 479406 - DNA, 75 bp, synthetic construct
  source 1..75: mol_type = other DNA
ccctctttttctgcggcaatccaccattcgatgacacgctatcaaaaactcttaaggcagcccgccgtgctgaaa

SEQ ID NO: 479407 - DNA, 75 bp, synthetic construct
  source 1..75: mol_type = other DNA
cctaataattccagtgttcgtgatctctgtgaggagatcttggtagcattagatttagctatgggtagagaaaaa

SEQ ID NO: 479408 - DNA, 75 bp, synthetic construct
  source 1..75: mol_type = other DNA
gtgattttgtggggtgtgaaaatgactaatttcctgaacaaacaacacatgcaacacgacaaagcgcagttactc

SEQ ID NO: 479409 - DNA, 75 bp, synthetic construct
  source 1..75: mol_type = other DNA
tcgggccgttggccggattgcgcgttgtcttctccggtatcgaaatcgccgggccgttcgccgggcaaatgttcg

SEQ ID NO: 479410 - DNA, 75 bp, synthetic construct
  source 1..75: mol_type = other DNA
attctcttttgatttgtattctgaccttcatttgtgtctattattacgattatctatatcaagccgtattgtata

SEQ ID NO: 479411 - DNA, 75 bp, synthetic construct
  source 1..75: mol_type = other DNA
tctctattcatgaagtcagaaaattcaatggtgaaataaaaagaatctctgaagaaataatgggttcaagagaca

SEQ ID NO: 479412 - DNA, 75 bp, synthetic construct
  source 1..75: mol_type = other DNA
caactcaaagatttggatttgaatagcgattcaatcgtaaaatatataaatgaaatggccaaaacagaagctttc

SEQ ID NO: 479413 - DNA, 75 bp, synthetic construct
  source 1..75: mol_type = other DNA
gtacaccaaatattaagaaaattacaatcaacggcaaagaacaactggcaacactcgataatccgccgccgtcaa

SEQ ID NO: 479414 - DNA, 75 bp, synthetic construct
  source 1..75: mol_type = other DNA
cacaactacgcttgaaggaaatacagattcagagcctgaaagggatatcaaactgtaccatcaactttccttctg

SEQ ID NO: 479415 - DNA, 75 bp, synthetic construct
  source 1..75: mol_type = other DNA
cgaatgaactggatcaggtacaggaggcgttacgcatcctgaaagttcatgaattactcgacagggctggtattg

SEQ ID NO: 479416 - DNA, 75 bp, synthetic construct
  source 1..75: mol_type = other DNA
tgctgctggtgattgcccgacggcgttcaacacttcagctagccagccgggttgtggtgctggataagggccgta

SEQ ID NO: 479417 - DNA, 75 bp, synthetic construct
  source 1..75: mol_type = other DNA
ttggtcagaagcgattaagaccataggcgacaaaagcattagccttattttttacactaacaaaggtcttacctt

SEQ ID NO: 479418 - DNA, 75 bp, synthetic construct
  source 1..75: mol_type = other DNA
aagcattgactcctgatatttcgcgcatcgcgtatggtatgccgttagctggtctgtttggaatatcatcggtcg

SEQ ID NO: 479419 - DNA, 75 bp, synthetic construct
  source 1..75: mol_type = other DNA
atgacgaactatcgcgttgagagtagcagcggacgggcggcgcgcaagatgaggctcgcattaatgggacctgcg

SEQ ID NO: 479420 - DNA, 75 bp, synthetic construct
  source 1..75: mol_type = other DNA
ttcacctggcacccggtatcgtgcgcggtgggtaatgttaaaaaccagggagcggagttaattcaacctatctga

SEQ ID NO: 479421 - DNA, 75 bp, synthetic construct
  source 1..75: mol_type = other DNA
ggtgacaccgtcaaaattctttgggctgatgctgatggtctgtgcctgttcaccaaaacgcctggaggaaggcca

SEQ ID NO: 479422 - DNA, 75 bp, synthetic construct
  source 1..75: mol_type = other DNA
gccacgctgcggcaacggtctttggattaagcctggttgctgcggggctgtcttcaacggtggtggggacactgg

SEQ ID NO: 479423 - DNA, 75 bp, synthetic construct
  source 1..75: mol_type = other DNA
cgtagtgtggttctattgggttcaggcagaaattattgcgatggctaccgacctggctgaattcatcggtgcggc

SEQ ID NO: 479424 - DNA, 75 bp, synthetic construct
  source 1..75: mol_type = other DNA
cgtagtgtggttctattgggttcaggcagaaattattgcgatggcaaccgacctggcggaatttattggtgcggc

SEQ ID NO: 479425 - DNA, 75 bp, synthetic construct
  source 1..75: mol_type = other DNA
ttgtaacactggataaaataaagataaacaacaccgaactaaaaaatggtgattacatgatagctccattttcct

SEQ ID NO: 479426 - DNA, 75 bp, synthetic construct
  source 1..75: mol_type = other DNA
atgcttagaaaaaaagcactaaagattactaccaaaatattaataccatatctatttttagcatcttatgttttt

SEQ ID NO: 479427 - DNA, 75 bp, synthetic construct
  source 1..75: mol_type = other DNA
atggctagagagcgactgatgaaggtaagggaaaccgagattaatttggtgaaatcaactctggctaatttgatt

SEQ ID NO: 479428 - DNA, 75 bp, synthetic construct
  source 1..75: mol_type = other DNA
caaactataaaaatataactattgctatatctaagttcacgggagaaaaaggagttatattaaggcaatattttt

SEQ ID NO: 479429 - DNA, 75 bp, synthetic construct
  source 1..75: mol_type = other DNA
atgacctgcagcagcagaacgtcattctgtcccagcaggcccgtgccgctgaactgcgccagcgcattgcccagg

SEQ ID NO: 479430 - DNA, 75 bp, synthetic construct
  source 1..75: mol_type = other DNA
caagacgcttcggttccgcgtgacaagctggaacgcttgaccgacaccaaaacgtttggtgctgcctacgtgctg

SEQ ID NO: 479431 - DNA, 75 bp, synthetic construct
  source 1..75: mol_type = other DNA
cggggcaggtagtgatgcagggattcattcgcttccatattccgctgtgggtgcgccgtaccgtgaccatgttgc

SEQ ID NO: 479432 - DNA, 75 bp, synthetic construct
  source 1..75: mol_type = other DNA
tactgtgcagtaaccggcgagttcgatagcggcgcagcgatcctgctggctatcttcagcctgtggcagatgcct

SEQ ID NO: 479433 - DNA, 75 bp, synthetic construct
  source 1..75: mol_type = other DNA
gctttaaggattatcaggcggcaaacattccggtactgccggtggtgaaaggcatttcggtagcgaaaaaccaca

SEQ ID NO: 479434 - DNA, 75 bp, synthetic construct
  source 1..75: mol_type = other DNA
gtatcgcgattttgtaaactccccatcagtactgaatataattgcaactattattgcctataacgaatgtgaggg

SEQ ID NO: 479435 - DNA, 75 bp, synthetic construct
  source 1..75: mol_type = other DNA
aaaaaggcacaggggaaagaggccgtacccgccggcacgaagcccggcactgagcatgggagtgcggcggattga

SEQ ID NO: 479436 - DNA, 75 bp, synthetic construct
  source 1..75: mol_type = other DNA
atgataaagaaaccacttattgccggcatcatgctggttgtggcgcacaccgccggcgctgcgcagggtgatgat

SEQ ID NO: 479437 - DNA, 75 bp, synthetic construct
  source 1..75: mol_type = other DNA
acggcacattgattggttcgctctccggcgctgcgccgccggtgatcggttactgtgcggtaaccggcgagttcg

SEQ ID NO: 479438 - DNA, 75 bp, synthetic construct
  source 1..75: mol_type = other DNA
cttggcggccagtatccggtgatttgcgtggtactgttcaatcctgctaacggtacctgctttgcctctttcggt

SEQ ID NO: 479439 - DNA, 75 bp, synthetic construct
  source 1..75: mol_type = other DNA
gctgtttgccgacgaacccaccggcaaccttgaccgccagaccggcgataaaattgccgacctgctgttttccct

SEQ ID NO: 479440 - DNA, 75 bp, synthetic construct
  source 1..75: mol_type = other DNA
acctgcgtccgtcaccggagtttgaacgctggctggaaagcatgggcattatggcaaacggtcgcctgaccaaac

SEQ ID NO: 479441 - DNA, 75 bp, synthetic construct
  source 1..75: mol_type = other DNA
cgcggtatatgtggcctgccgtttacgcgccagtctgacaatcagaccgtctatattccgatgaatattatcggt

SEQ ID NO: 479442 - DNA, 75 bp, synthetic construct
  source 1..75: mol_type = other DNA
aatgccttcgttcgtatgtatggcgcagatgccgtagaagccgccagtgcggcaatgagcggtgaatcggcgttt

SEQ ID NO: 479443 - DNA, 75 bp, synthetic construct
  source 1..75: mol_type = other DNA
atgaactgaccggcagcatgctgattgacctacaatccggtaacgaagatcgtggtatttgcggtctgccgttta

SEQ ID NO: 479444 - DNA, 75 bp, synthetic construct
  source 1..75: mol_type = other DNA
ttctgaatttgttcagccgctgccgtttaccttaccggaaaccgtgccgctggaaacgctacaacgattctgggc

SEQ ID NO: 479445 - DNA, 75 bp, synthetic construct
  source 1..75: mol_type = other DNA
gctctggcggcaattaacgccagagacaatggaagccatcgttgatcagtcgcagcgtttcttgttaccgctatt

SEQ ID NO: 479446 - DNA, 75 bp, synthetic construct
  source 1..75: mol_type = other DNA
ggtattcgctggggtattgacgatgacaacgttcgggagctggagttgcctgctaccgggcaacacacctggcga

SEQ ID NO: 479447 - DNA, 75 bp, synthetic construct
  source 1..75: mol_type = other DNA
gtgttaccggagatccccaaagagagcgcctttaacaaacagagcatgagctggaaactgatgactctgctgccg

SEQ ID NO: 479448 - DNA, 75 bp, synthetic construct
  source 1..75: mol_type = other DNA
taactgtgatgaaagcgaggtacgggtaaaagagcatcttacttgcctccatacccggatgccgtttgatccgca

SEQ ID NO: 479449 - DNA, 75 bp, synthetic construct
  source 1..75: mol_type = other DNA
attaaagatcctgcttatctggcgaaactgctgacccgccagcgtcgacacagttttgaagatcgcgaattgccg

SEQ ID NO: 479450 - DNA, 75 bp, synthetic construct
  source 1..75: mol_type = other DNA
ataccatcaagcagtcagcaactggcaaagtcagagcaagaggctcttgatgtaaccatcaatgtacttaaacgt

SEQ ID NO: 479451 - DNA, 75 bp, synthetic construct
  source 1..75: mol_type = other DNA
tacgcatcgagcggttgtttgatgctgtttacccagttcttgaacgaaagctcgaagaaaaacttgggaaaaaat

SEQ ID NO: 479452 - DNA, 75 bp, synthetic construct
  source 1..75: mol_type = other DNA
tcatctggcctgacttcctcgcgtgggacaccaccacgaacgccaccgcaacggcatacgcaactgcgcgcgcac

SEQ ID NO: 479453 - DNA, 75 bp, synthetic construct
  source 1..75: mol_type = other DNA
taactgtgatgaaagcgaggcaagagtaaaagagcatcttacgtgcctccatacccggatgccgtttgatccgca

SEQ ID NO: 479454 - DNA, 75 bp, synthetic construct
  source 1..75: mol_type = other DNA
acaggatattggcaacccgctgctggcctcatggggtaagctgggacgcgactatatctatctactttccgatct

SEQ ID NO: 479455 - DNA, 75 bp, synthetic construct
  source 1..75: mol_type = other DNA
gagactgcaataaaatctctcagagaacatacagttcaacttgtaaataaaggtgtgagtgcgcaggagatatat

SEQ ID NO: 479456 - DNA, 75 bp, synthetic construct
  source 1..75: mol_type = other DNA
gcgccttcaacaaacagagcatgagctggaaactgatgactctgctgccgcaactgctggatcgcgaagatttta

SEQ ID NO: 479457 - DNA, 75 bp, synthetic construct
  source 1..75: mol_type = other DNA
agaatgcactggctgatcgaataaacgggatcctgaaaaatgagtttttacttccgcgtcctacagaccttgctc

SEQ ID NO: 479458 - DNA, 75 bp, synthetic construct
  source 1..75: mol_type = other DNA
tggctgaagtacgggcgcagggcgtggagatgctggcaaaaaatcatcagagtatcgtcaatgcacttaagggag

SEQ ID NO: 479459 - DNA, 75 bp, synthetic construct
  source 1..75: mol_type = other DNA
gtctgaagtgcgggcacagggtgtggagatgtttgcggagtgtgcatacacacttgaacatcatgatcacgcagt

SEQ ID NO: 479460 - DNA, 75 bp, synthetic construct
  source 1..75: mol_type = other DNA
gttcagcaatgatgctgcaatacaccattattgccgaactgcacggcaaatacctgataacgccttaccacacaa

SEQ ID NO: 479461 - DNA, 75 bp, synthetic construct
  source 1..75: mol_type = other DNA
cgccgggttacaggataaatacctgatcactcctcaccccataagggaatcagaaattctgacaaatctccgcct

SEQ ID NO: 479462 - DNA, 75 bp, synthetic construct
  source 1..75: mol_type = other DNA
cgtggcaatttataaccatgagcgaccacacctggctttgaaatacaaaacgcccgatgatgttcatcgggcgtt

SEQ ID NO: 479463 - DNA, 75 bp, synthetic construct
  source 1..75: mol_type = other DNA
tgttctgctacatcgtcggtgtgagtaaatgcctgcgtgatatccagactcacgcggagtacatcaacgacaagg

SEQ ID NO: 479464 - DNA, 75 bp, synthetic construct
  source 1..75: mol_type = other DNA
gagatgggaattgatccacaggaagagtggagaaattacagcttcagtgacgcaggtgacgattcagcgctaccg

SEQ ID NO: 479465 - DNA, 75 bp, synthetic construct
  source 1..75: mol_type = other DNA
cagttttgaagatcgcgaattgccgctattccgcgatagcgaaaacgccggacagttgtttaacagcgacggcga

SEQ ID NO: 479466 - DNA, 75 bp, synthetic construct
  source 1..75: mol_type = other DNA
tgaagtgcaactggtgcgtgctaatgcgctggccgaagaccaccagagagcgattgagtcaattaagcaggctga

SEQ ID NO: 479467 - DNA, 75 bp, synthetic construct
  source 1..75: mol_type = other DNA
ggcgaaaaaccgttggcggcggcgctcaaaggcgcgggtgaaatcggctttaccattatctcgctgaccttctcg

SEQ ID NO: 479468 - DNA, 75 bp, synthetic construct
  source 1..75: mol_type = other DNA
tggtcgaaatgaccattcagctccccggtgatactcagcgtcgtctggttatctgtcttgctttacgcaaacttg

SEQ ID NO: 479469 - DNA, 75 bp, synthetic construct
  source 1..75: mol_type = other DNA
atgagtgattttcaccacggcgtgcaggtgctcgaaattaacgacggcacccgcgtcatttccactgttgcaacc

SEQ ID NO: 479470 - DNA, 75 bp, synthetic construct
  source 1..75: mol_type = other DNA
ccccctcaatgagccggtactgattaccaatgtgcagagcgccattgcgaaagccggtaaaaaaggcacgctggc

SEQ ID NO: 479471 - DNA, 75 bp, synthetic construct
  source 1..75: mol_type = other DNA
actaaaagccctgctggcagcggagtcggtaaccggtgttaaaccgcgtattctcggtgtgccggggctggatac

SEQ ID NO: 479472 - DNA, 75 bp, synthetic construct
  source 1..75: mol_type = other DNA
tgagctgatgagtattgcgcagagcctgcgcgggtttgcctacctgtctgcctatggctgcaagacgctggagga

SEQ ID NO: 479473 - DNA, 75 bp, synthetic construct
  source 1..75: mol_type = other DNA
agctgatggttatctggcctgacttcctcgcatgggacactaccgcgaacgccaccgcgacggcctacgccactg

SEQ ID NO: 479474 - DNA, 75 bp, synthetic construct
  source 1..75: mol_type = other DNA
tctaacgtcggcgtgcagggtgtcaccggcatcagcgcctcagtgttttgggatttgcaggcatctggtaccgat

SEQ ID NO: 479475 - DNA, 75 bp, synthetic construct
  source 1..75: mol_type = other DNA
tgcgtgttgccgaaggtaccggagaagacgcggaagcgcagaccatttcaaatatcatcggcggcacggatgaga

SEQ ID NO: 479476 - DNA, 75 bp, synthetic construct
  source 1..75: mol_type = other DNA
ggcatcgttgcaggccatcgctgaccagtcaaaaccggtcaccgttgtcgtgcgcgtggaagacggaaccggcga

SEQ ID NO: 479477 - DNA, 75 bp, synthetic construct
  source 1..75: mol_type = other DNA
gccgggcgtgtcgtttgtggtgctgctggcaacgctgggtagcgtaggtattccgctggaaggcctggcgtttat

SEQ ID NO: 479478 - DNA, 75 bp, synthetic construct
  source 1..75: mol_type = other DNA
tccgttgaatccgatctcaaatatagatccattaggattagaaacactaaaatgcattaagccactgcattcaat

SEQ ID NO: 479479 - DNA, 75 bp, synthetic construct
  source 1..75: mol_type = other DNA
gtaaagcaggcgagtccggcacgctggcccgttcgcttgatgcgattgccgaccagtcaaagcccgtaacggttg

SEQ ID NO: 479480 - DNA, 75 bp, synthetic construct
  source 1..75: mol_type = other DNA
tgagttgctgggcgtggcgcaaagcctgcgtgggtttgcttacctgtcagcgtatggctgcaagacggtgcagga

SEQ ID NO: 479481 - DNA, 75 bp, synthetic construct
  source 1..75: mol_type = other DNA
aactgttgattccggacgcatcatgttggataacgaggacatcacccacgttccggcggaaaaccgctatgtgaa

SEQ ID NO: 479482 - DNA, 75 bp, synthetic construct
  source 1..75: mol_type = other DNA
aggtgctggagattaacgacggcacccgcgtcatttccactgtatccaccgccattgttggcatggtctgcacgg

SEQ ID NO: 479483 - DNA, 75 bp, synthetic construct
  source 1..75: mol_type = other DNA
cagcttcagatgaaagcagaggttgaggcgctgacagagctgaagtccatcagaagttatgttgttggctggcct

SEQ ID NO: 479484 - DNA, 75 bp, synthetic construct
  source 1..75: mol_type = other DNA
agcgctcacggaaaggcattatgggcaggcctgaccggaggaacatacggtcaggtcgcagcgtttacggtcacg

SEQ ID NO: 479485 - DNA, 75 bp, synthetic construct
  source 1..75: mol_type = other DNA
cagcttcagatgaaagcagaggttgaagcgctgacagagctgaaggcgatccgcagttatgttatcggatggcct

SEQ ID NO: 479486 - DNA, 75 bp, synthetic construct
  source 1..75: mol_type = other DNA
aagccggtaaaaaaggcacgctgtctgcctccctgcaggctatcgccgaccagtcaaaaccagtcaccgttgttg

SEQ ID NO: 479487 - DNA, 75 bp, synthetic construct
  source 1..75: mol_type = other DNA
acgtaagaatgccaagtgaaatcaagcagcagcttactcacattgcggcaacaaacaggcgctctatcaatgctg

SEQ ID NO: 479488 - DNA, 75 bp, synthetic construct
  source 1..75: mol_type = other DNA
aaaacgctgtccaacgtcggggtaaacggtgttaccggcatcagcgcatctgtattctgggatttgcaggagtcc

SEQ ID NO: 479489 - DNA, 75 bp, synthetic construct
  source 1..75: mol_type = other DNA
acccgcttttcctgtatgagaactacacccgcaccgcgcaggtgctggccgacacgatggcggatgcgcatgcgt

SEQ ID NO: 479490 - DNA, 75 bp, synthetic construct
  source 1..75: mol_type = other DNA
gcaccaccgacgaaaacggcaaatataccgggctgaaagccctgctgacggcgaaaaccgtcaccggcgttaagc

SEQ ID NO: 479491 - DNA, 75 bp, synthetic construct
  source 1..75: mol_type = other DNA
accgtttccaatatcatcggcaccaccgacgaaaacggtcagtataccggactgaaagccctgctggcggcagag

SEQ ID NO: 479492 - DNA, 75 bp, synthetic construct
  source 1..75: mol_type = other DNA
agcctggtcagtcagggctatctcattggtggtgattgctggctggacgagtcggtgaatgacaaagacacgctg

SEQ ID NO: 479493 - DNA, 75 bp, synthetic construct
  source 1..75: mol_type = other DNA
ggcccgttcgctggatgccatcgctgaccaggcaaaacccgtgaccgttgttgtgcgtgtgccgcagggggaaac

SEQ ID NO: 479494 - DNA, 75 bp, synthetic construct
  source 1..75: mol_type = other DNA
tgagttgctgagtgtggcgcaaagcctgcgtgggtttgcttacttgtcagcgtatggctgcaagacggtgcagga

SEQ ID NO: 479495 - DNA, 75 bp, synthetic construct
  source 1..75: mol_type = other DNA
gcatggccgggcgatctgttttgcggatggatggtttgaatggaagaaggaaggcgacaagaaacagccctactt

SEQ ID NO: 479496 - DNA, 75 bp, synthetic construct
  source 1..75: mol_type = other DNA
gcacggtctgaaactgcagccaccagcagaatgtttaaactgctctggcagcatggtcgggcaatctgttttgcc

SEQ ID NO: 479497 - DNA, 75 bp, synthetic construct
  source 1..75: mol_type = other DNA
ggaggatattgggatcatatgcaggaaatgcaaaatacgctcagaggattaagaaatcatgcggatacgttgaaa

SEQ ID NO: 479498 - DNA, 75 bp, synthetic construct
  source 1..75: mol_type = other DNA
gcggccgacaaagggctggtagatatacacgacaggcggcctctggtactgtccccagaagctgctcgcgaatgg

SEQ ID NO: 479499 - DNA, 75 bp, synthetic construct
  source 1..75: mol_type = other DNA
cacagtggacgccgacaagtttatctggcacgcagtgtcgcgtgccgttgataatccaaaaaatcagggtgctga

SEQ ID NO: 479500 - DNA, 75 bp, synthetic construct
  source 1..75: mol_type = other DNA
cgcctttcgaacgcggcgatgaagcggaaggatttctgatagtgacgtctgcagctgacaaaggcctggtcgata

SEQ ID NO: 479501 - DNA, 75 bp, synthetic construct
  source 1..75: mol_type = other DNA
atgaactgaccggtagtatgctgattgacctgcaatccggtaacgaagatcgtggtatttgcggtctaccgttta

SEQ ID NO: 479502 - DNA, 75 bp, synthetic construct
  source 1..75: mol_type = other DNA
atgacgcaaacatttatccccggcaaagatgccgctctggaagattccatcgcacgcttccagcaaaaactttca

SEQ ID NO: 479503 - DNA, 75 bp, synthetic construct
  source 1..75: mol_type = other DNA
atctacatgcgtttgccgcacatcagtcactgctgaaagcttacgaaaaactgcaacacgccaaagcggcattct

SEQ ID NO: 479504 - DNA, 75 bp, synthetic construct
  source 1..75: mol_type = other DNA
cagcaaaatgaaaaacctgtagataagcttaatcagaagcaagaaagtgcgattaagaagatcgataacactata

SEQ ID NO: 479505 - DNA, 75 bp, synthetic construct
  source 1..75: mol_type = other DNA
tattgatgacaatacagcggcaaaagccattgcccatgccattctcggtggtgtgacagcagcccttcagggcaa

SEQ ID NO: 479506 - DNA, 75 bp, synthetic construct
  source 1..75: mol_type = other DNA
ttaatgaaacaacaatatgaacaatcaaagaaacaattctcatctctgcccgaggcaagccaggatgctgcctgt

SEQ ID NO: 479507 - DNA, 75 bp, synthetic construct
  source 1..75: mol_type = other DNA
aaacccgtgaagaatacctggcatacctggccgatgaggctgatcgcgatatcgcatacgacccggagcctattg

SEQ ID NO: 479508 - DNA, 75 bp, synthetic construct
  source 1..75: mol_type = other DNA
ttagcgcaaccattatcggtcagctggatacgaactttaaaattggtcgtcgtgcggcgttacgtgagatcgagg

SEQ ID NO: 479509 - DNA, 75 bp, synthetic construct
  source 1..75: mol_type = other DNA
gaggcagacggcgaaattgagccggaagagcgcaaggttctggaagagattgccggtgttctgggtcttcgtctg

SEQ ID NO: 479510 - DNA, 75 bp, synthetic construct
  source 1..75: mol_type = other DNA
aatgaaacaaagaaattcatctggctagcctcaacatgcctaacggaatgctacaatataaaagttcacgagcaa

SEQ ID NO: 479511 - DNA, 75 bp, synthetic construct
  source 1..75: mol_type = other DNA
gtggctggattatctggacgcactggtgctagtcgatacttccggtgcgccagatattgaatggcctacgcctcc

SEQ ID NO: 479512 - DNA, 75 bp, synthetic construct
  source 1..75: mol_type = other DNA
aggcgtgagctggcttatctgcgggccgtcggcgatttaccgcgcgattatccgacgctgcgcgacgtggtggat

SEQ ID NO: 479513 - DNA, 75 bp, synthetic construct
  source 1..75: mol_type = other DNA
cacttcagaaatgaactcacgaccagaaccggcagagtcttcagactccttgcgggcaaaggtctggcggggttt

SEQ ID NO: 479514 - DNA, 75 bp, synthetic construct
  source 1..75: mol_type = other DNA
gatggcggtcctgggggctatttgcggaactgcgggcgtggcgctgttggtgttgacaccaaacgcagcgctaga

SEQ ID NO: 479515 - DNA, 75 bp, synthetic construct
  source 1..75: mol_type = other DNA
aagcgcgaagccacgccggaaggcgaccgttgggtcgaagctcgggagagcgatcagcaggcggcaaaacgctgg

SEQ ID NO: 479516 - DNA, 75 bp, synthetic construct
  source 1..75: mol_type = other DNA
taactgctaaaatatttcataatttagctaaagctctgtctgcttcgcatcatgttgacgtcatacaccgggacc

SEQ ID NO: 479517 - DNA, 75 bp, synthetic construct
  source 1..75: mol_type = other DNA
ttcaagagcgactgtagcagctattaccgattgaatatggagagtttatggcttacacagcaactgttatccctg

SEQ ID NO: 479518 - DNA, 75 bp, synthetic construct
  source 1..75: mol_type = other DNA
tttgaaatgctcagcaaaatccgcgatggggaaacgttggtagttgcaaagctggaccgcctcgggcgtgatgca

SEQ ID NO: 479519 - DNA, 75 bp, synthetic construct
  source 1..75: mol_type = other DNA
ggcggcggtctggtgactgcaatggttcgcggcgatgtcgcagcctgtaaagcagcgaccgatgccggtgctgcg

SEQ ID NO: 479520 - DNA, 75 bp, synthetic construct
  source 1..75: mol_type = other DNA
ggggccagatgtgccaggtcagaatccctggttactgtaatcacaatcctgaaacatctgtactggcacattaca

SEQ ID NO: 479521 - DNA, 75 bp, synthetic construct
  source 1..75: mol_type = other DNA
aagttgatcttcaggaagcgcgtaacgcggtagataacgcgagccgtgaagtggagtcccgttttgacttccgta

SEQ ID NO: 479522 - DNA, 75 bp, synthetic construct
  source 1..75: mol_type = other DNA
tcgtccaggaaggacgggtaaataaatttattcgggaactaccggaaattacttttagcggaaaaatcgcgctcg

SEQ ID NO: 479523 - DNA, 75 bp, synthetic construct
  source 1..75: mol_type = other DNA
gggggcagatgtgcaccgtcagaattcctggctactgcaatcacaatcccgaaacgtctgtgctggcgcattacc

SEQ ID NO: 479524 - DNA, 75 bp, synthetic construct
  source 1..75: mol_type = other DNA
gcgattgcctgtagctcatgccacgatttaatcgacgggcgtgtaaaaacaagcgattacaccaaagaagaatta

SEQ ID NO: 479525 - DNA, 75 bp, synthetic construct
  source 1..75: mol_type = other DNA
cgcctgatgcatgctgaaggggttttcgcacacaagaaatctggagaaagaaaggtcatttatgatttacccaac

SEQ ID NO: 479526 - DNA, 75 bp, synthetic construct
  source 1..75: mol_type = other DNA
ggcgcgtaaaaaccagctcacgtttacggaggactgggagcatcgccactggtccggcgtcgaattactgcgtga

SEQ ID NO: 479527 - DNA, 75 bp, synthetic construct
  source 1..75: mol_type = other DNA
caagcagtgaaaccactcaaatttgccaaccagatgtatatcgatactggcgcagtgttctgcggaaacctcaca

SEQ ID NO: 479528 - DNA, 75 bp, synthetic construct
  source 1..75: mol_type = other DNA
atggctgggatcctaagtacgatccaacatggcataaaatatgctgaagtaaatcgtaacgatatcattcgagaa

SEQ ID NO: 479529 - DNA, 75 bp, synthetic construct
  source 1..75: mol_type = other DNA
aatcatgggcaccggtggatttattgatatcagtgccacttcgaagaaaatcattttctgcggcacattaactgc

SEQ ID NO: 479530 - DNA, 75 bp, synthetic construct
  source 1..75: mol_type = other DNA
ggcaaattgaatatcgtccaggaaggacgggtgaagaaatttattcgggaactaccggaaattacttttagcgga

SEQ ID NO: 479531 - DNA, 75 bp, synthetic construct
  source 1..75: mol_type = other DNA
acccatgcagacattactaccgaccgtcttatcaccaccattattaaagatgccttcggcccgatgttgattgga

SEQ ID NO: 479532 - DNA, 75 bp, synthetic construct
  source 1..75: mol_type = other DNA
atgcagattaaaatcgcagcgccattaggtggagatgccattatcgaatttgatgataatgaagaagtttccggg

SEQ ID NO: 479533 - DNA, 75 bp, synthetic construct
  source 1..75: mol_type = other DNA
cggcgatggataccgctgattatccatgtaccgtcggcttcccgtttgccttcaaagagggagaattacgtcgat

SEQ ID NO: 479534 - DNA, 75 bp, synthetic construct
  source 1..75: mol_type = other DNA
atacaatgaagacgttggtgaactacaccgaaccgacgccaacggtaatcgtattaaactacgttttgctaccat

SEQ ID NO: 479535 - DNA, 75 bp, synthetic construct
  source 1..75: mol_type = other DNA
atgatcattcgtgacgaaaactattttactgataaatatgaattaacccgcacacactctgaagtactggaagcg

SEQ ID NO: 479536 - DNA, 75 bp, synthetic construct
  source 1..75: mol_type = other DNA
tacccgcgtacgtgagctgctgggtctggcaacggggtcggacaacggctggtataccctgcgtatcggtgaact

SEQ ID NO: 479537 - DNA, 75 bp, synthetic construct
  source 1..75: mol_type = other DNA
atgtgcaataacacccgtccggacgcagccgccgaagctatcaaaacgctaatgcacgcgctgattgatatttct

SEQ ID NO: 479538 - DNA, 75 bp, synthetic construct
  source 1..75: mol_type = other DNA
atgatcattcgtgacgaaaactactttactaacaaatacgaattaacccgtacacactccgaagttctggaagcg

SEQ ID NO: 479539 - DNA, 75 bp, synthetic construct
  source 1..75: mol_type = other DNA
gcagcatctggcgctgctgcaaaaaatggatcaccgcagcactctgctttcccggagctcccccagcaaattgcc

SEQ ID NO: 479540 - DNA, 75 bp, synthetic construct
  source 1..75: mol_type = other DNA
acctcagtcgcaagaatcctgccagcagtggctggaagcccactggcgtactctgacgcccgcgaattttaccca

SEQ ID NO: 479541 - DNA, 75 bp, synthetic construct
  source 1..75: mol_type = other DNA
ttacgctggctggtttgttgattggccagcagtagatggtggcgatgaggacgacgacgatgattttggtgatca

SEQ ID NO: 479542 - DNA, 75 bp, synthetic construct
  source 1..75: mol_type = other DNA
acccgcgcgaaccggatgcccgcgccctgactgaactttatcgccaggcctggagcggcaatatcgctcaatgcc

SEQ ID NO: 479543 - DNA, 75 bp, synthetic construct
  source 1..75: mol_type = other DNA
agctgattgaaattccggccggaaaacgcggcaagaatgcggacatcaagcgcatactcgacaaagagggtgagc

SEQ ID NO: 479544 - DNA, 75 bp, synthetic construct
  source 1..75: mol_type = other DNA
aaccggttttaccgagtacctgcgtcgttttccgaaagatatgcccttcgagctgattgaaattccggccggaaa

SEQ ID NO: 479545 - DNA, 75 bp, synthetic construct
  source 1..75: mol_type = other DNA
cagaggcgggattatggatggggattcaacacgggcatctggtactgcatgatggatttgataaacaacagacac

SEQ ID NO: 479546 - DNA, 75 bp, synthetic construct
  source 1..75: mol_type = other DNA
ggccagcgatggtctgtatatcacgatgcaggaaggggaactggtggtgaaggatggctgggacagagcgcggga

SEQ ID NO: 479547 - DNA, 75 bp, synthetic construct
  source 1..75: mol_type = other DNA
tcacagcgggagaatgacgtcgcctcctccctgcagtcctgcctgtcccgcatcaaggacgtcagcatcactctt

SEQ ID NO: 479548 - DNA, 75 bp, synthetic construct
  source 1..75: mol_type = other DNA
atgaccggaaatcaccccgccgcgctgctgcgtcgccttaacccatactgtgcacgggcgctggacgctgccgcc

SEQ ID NO: 479549 - DNA, 75 bp, synthetic construct
  source 1..75: mol_type = other DNA
gctgatggcgctgacagaaaaaccgatgctgcccgcctgtaatgacctgtgggtattgctgagcctgagccgcgt

SEQ ID NO: 479550 - DNA, 75 bp, synthetic construct
  source 1..75: mol_type = other DNA
atgtcagggaagagcgactggcgctgatggtggagggtaagtggtatccgttgtcctaccggcagtgggtggaac

SEQ ID NO: 479551 - DNA, 75 bp, synthetic construct
  source 1..75: mol_type = other DNA
cggctcttcccgcatgattgaaatcagcaagcgcgaacaattctatcagcaggaatattgtggctgcgtgtattc

SEQ ID NO: 479552 - DNA, 75 bp, synthetic construct
  source 1..75: mol_type = other DNA
aggaatggaatgggagcccgagagggggatccgttgtaccatgtgttttgacatgcgttttgagcggacagcgct

SEQ ID NO: 479553 - DNA, 75 bp, synthetic construct
  source 1..75: mol_type = other DNA
ttctgactggaaagataatggtgacggaagctatacccaagtcctgaccacaggagcgatgtctggcacgctaac

SEQ ID NO: 479554 - DNA, 75 bp, synthetic construct
  source 1..75: mol_type = other DNA
aattttgaaaaagtttatggaagtataggtaaaaactatatacaagttcatcatataaaaccattacaccatatt

SEQ ID NO: 479555 - DNA, 75 bp, synthetic construct
  source 1..75: mol_type = other DNA
atgtctactactgcaagcgtccgtaaaacaccgcgagaaaatcagattaacattcgggcaactgatgaggaacga

SEQ ID NO: 479556 - DNA, 75 bp, synthetic construct
  source 1..75: mol_type = other DNA
atgtccactgcagcaagcatccgtaaaataccgcgaggaaatcagattaacatccgggcaactgatgaggaaaga

SEQ ID NO: 479557 - DNA, 75 bp, synthetic construct
  source 1..75: mol_type = other DNA
attctgatgaccgccaatctgggcagcgaccacatcatgcaactgctggaggaaaaaccggacgccacggacgca

SEQ ID NO: 479558 - DNA, 75 bp, synthetic construct
  source 1..75: mol_type = other DNA
aacagtagatataacgctggtggcaggcccggcagacgcctcgcagtccgtccttaagaacaaccggtcatcact

SEQ ID NO: 479559 - DNA, 75 bp, synthetic construct
  source 1..75: mol_type = other DNA
cggaacttgctgccagcgatgaagtggaacccggcttccggcgcgatcctgtactgcgtcgtgaacgccgtgaag

SEQ ID NO: 479560 - DNA, 75 bp, synthetic construct
  source 1..75: mol_type = other DNA
aaactcatggaggcgctggtcagcatcggtcataacgcctcggggatcatccctgataacaccaaaatcgaattt

SEQ ID NO: 479561 - DNA, 75 bp, synthetic construct
  source 1..75: mol_type = other DNA
cctggagccaggaaaaactcagccgtgcatgccgtgaacttgaacttaagcacggattcgcgccggataatggct

SEQ ID NO: 479562 - DNA, 75 bp, synthetic construct
  source 1..75: mol_type = other DNA
aacaggcggctcagggagacagggctgcagtatcgcagttacgtggctgggattatcgtgatcgtcgctcgcgta

SEQ ID NO: 479563 - DNA, 75 bp, synthetic construct
  source 1..75: mol_type = other DNA
tgcggctgcagatattttcgaacgggtgaagcctgaatgtcgttacaatccggaacttgctgccagtgatgaagt

SEQ ID NO: 479564 - DNA, 75 bp, synthetic construct
  source 1..75: mol_type = other DNA
gctgaccgccgcctgcctgctgccggacaccggggcgcgcaatatcgacagcctgctgaaccagcagattttacc

SEQ ID NO: 479565 - DNA, 75 bp, synthetic construct
  source 1..75: mol_type = other DNA
gcagagcgacctgctcagtatggaacagagccttgaaaaccgcgttgtcgggcaaagcccggcgctctgcgccat

SEQ ID NO: 479566 - DNA, 75 bp, synthetic construct
  source 1..75: mol_type = other DNA
cgacaccctgccggagccgctgacacagcttcatgcgcgtctggccgcgctggatatcgagcgggaggcgattga

SEQ ID NO: 479567 - DNA, 75 bp, synthetic construct
  source 1..75: mol_type = other DNA
cgcccttggtaatgtgcataacgaagtccgtcacgatctcctgaccgctgatgcccgacagctggaagggtttta

SEQ ID NO: 479568 - DNA, 75 bp, synthetic construct
  source 1..75: mol_type = other DNA
caccattaatctttcggaatatcaggaaccgcataccgtttcccagttgaaaggttcgcctccgggctatgtcgg

SEQ ID NO: 479569 - DNA, 75 bp, synthetic construct
  source 1..75: mol_type = other DNA
gccttgaaaaccgcgttgtcgggcaaagcccggcgctctgcgccatcgcacagcggctgcgggcggctaaaaccg

SEQ ID NO: 479570 - DNA, 75 bp, synthetic construct
  source 1..75: mol_type = other DNA
gggattataactggcgcaagcagggcggctcgtcccgcatgattgaaatcagcaagcgcgaaaaattctatcagc

SEQ ID NO: 479571 - DNA, 75 bp, synthetic construct
  source 1..75: mol_type = other DNA
gcgggtagcagcgatattattttcggtctgttctggctactggggtatcagttttccccccggcttgccgatgca

SEQ ID NO: 479572 - DNA, 75 bp, synthetic construct
  source 1..75: mol_type = other DNA
tgcgccgccgggacatctggcttgaaagcagtgatcgctggggagatcctcgcgagaagttgttgcaaggcgaag

SEQ ID NO: 479573 - DNA, 75 bp, synthetic construct
  source 1..75: mol_type = other DNA
agcttgctggtcgttggggaggtggagaagtggcatcagctgacggcatgcgctttgtcacaccagtgaagacca

SEQ ID NO: 479574 - DNA, 75 bp, synthetic construct
  source 1..75: mol_type = other DNA
gcgaatggaccatgatgccgactatggcgtgctgaatgatattgccagagggcaatcagatccccgaaaaatagg

SEQ ID NO: 479575 - DNA, 75 bp, synthetic construct
  source 1..75: mol_type = other DNA
ataccagcactgacccgtcatcggctcagttgggtaaaacagaattaccttcgtgcagaaatgctagtcagcgcc

SEQ ID NO: 479576 - DNA, 75 bp, synthetic construct
  source 1..75: mol_type = other DNA
tgaaaagctcgcgcccatcaggactggcacaggcaattatggaagtagggcgtgtaaacaaaacgctatatctcc

SEQ ID NO: 479577 - DNA, 75 bp, synthetic construct
  source 1..75: mol_type = other DNA
gtggatgtgctggtgaccaaacagtcgggcagcgtgttcctgatccgcaacaccaacacggtgagctacggcacc

SEQ ID NO: 479578 - DNA, 75 bp, synthetic construct
  source 1..75: mol_type = other DNA
ccgcacaccagtaacccaaaattccacctgcactacggcgacctgaccgacagctccaacctgacccgtattctg

SEQ ID NO: 479579 - DNA, 75 bp, synthetic construct
  source 1..75: mol_type = other DNA
tgtttaatcatgaatcgccgcgccgtggcgaaaccttcgtcacccgcaaaattactcgcgcaatcgccaacatcg

SEQ ID NO: 479580 - DNA, 75 bp, synthetic construct
  source 1..75: mol_type = other DNA
caaactacggagtactggataagttggcccgaggatatgcagatctgtcaaaagcggagagtcagtgggatgaga

SEQ ID NO: 479581 - DNA, 75 bp, synthetic construct
  source 1..75: mol_type = other DNA
tggtataacttcgtatctgatcagtactctgggttccatggcattgtggtacccggtacattacgggattcgatt

SEQ ID NO: 479582 - DNA, 75 bp, synthetic construct
  source 1..75: mol_type = other DNA
caggcgcaggatgatattgatactgtatttatttcaacgcctgagatagcagattatgaaattataaacgaccac

SEQ ID NO: 479583 - DNA, 75 bp, synthetic construct
  source 1..75: mol_type = other DNA
agctcacggcggcagttttttgacgacgcaccaacggaaatcatcagtcagtcatggaaacggctggtgattaac

SEQ ID NO: 479584 - DNA, 75 bp, synthetic construct
  source 1..75: mol_type = other DNA
gaaaacctgtgtggcgggatgggcacatcggcatttgtggcgctgttaatgacgctgtgtaataagtcattttcc

SEQ ID NO: 479585 - DNA, 75 bp, synthetic construct
  source 1..75: mol_type = other DNA
agtcggggttttagtcgccctttctggcgtcgtgcttggtggtttgctggattatctggcgctacgaaaaacgca

SEQ ID NO: 479586 - DNA, 75 bp, synthetic construct
  source 1..75: mol_type = other DNA
ggataaatggctgggctggcaaggcatgtactggttgatggcggccctgttgatcccttgtattatcgcgacatt

SEQ ID NO: 479587 - DNA, 75 bp, synthetic construct
  source 1..75: mol_type = other DNA
tgtcggtagatctgtggcgaaacgcggctggtgaaactcgcgaaatctgtcgttttcctccggcaaaacgtgatt

SEQ ID NO: 479588 - DNA, 75 bp, synthetic construct
  source 1..75: mol_type = other DNA
gaaagtcagaattgccgaacgtacgtttactacctttggctcacgcggcggggtggtgtccgaattaacgttgtc

SEQ ID NO: 479589 - DNA, 75 bp, synthetic construct
  source 1..75: mol_type = other DNA
tttgcaaccgcaaggtaaactgttgttcagtgaaatcaactggcttgctggtcattcaccggatcaagttcagta

SEQ ID NO: 479590 - DNA, 75 bp, synthetic construct
  source 1..75: mol_type = other DNA
cggcggcagttttttgacgacgcaccaacggaaattatcagtcggtcatggaaacggctggtgattaacaaggaa

SEQ ID NO: 479591 - DNA, 75 bp, synthetic construct
  source 1..75: mol_type = other DNA
aaggaatttatcggaaaaagcagaggtgatcacaaccgtctgggcattgccctgcaaattggatgtgtccgtttt

SEQ ID NO: 479592 - DNA, 75 bp, synthetic construct
  source 1..75: mol_type = other DNA
gaatccaaccgaaattatgaccgatacagcaggtgccagcgaacttgtctttggccttttctggctgctgggata

SEQ ID NO: 479593 - DNA, 75 bp, synthetic construct
  source 1..75: mol_type = other DNA
ggatggcggcactggcggtggttatcgctttttgctccgcttctcaggatattgtctttgatgcgtggaaaacgg

SEQ ID NO: 479594 - DNA, 75 bp, synthetic construct
  source 1..75: mol_type = other DNA
cgcggtgtcggatttgatgccggcgaagtgggcgtggttaacaaaacgctcggcttgctggcgaccatcgtcggc

SEQ ID NO: 479595 - DNA, 75 bp, synthetic construct
  source 1..75: mol_type = other DNA
tgctcgccacacaaatcctgttattagtcgctattgcggcgatggggtttctcgaacctggcacccaactccgct

SEQ ID NO: 479596 - DNA, 75 bp, synthetic construct
  source 1..75: mol_type = other DNA
tgggccggagtatctctacaacgaccgccagattatccgcgcaggcttagaagatcactttatgggcaaactgag

SEQ ID NO: 479597 - DNA, 75 bp, synthetic construct
  source 1..75: mol_type = other DNA
gcgtggaactggcgatgcttgacgaagcgcgcgcagtgggcgcggagttcaaccgtattgccggggaaaactgcc

SEQ ID NO: 479598 - DNA, 75 bp, synthetic construct
  source 1..75: mol_type = other DNA
gagtttgaacgctggctggaaagcatgggcattatggcaaacggtcgcttgaccaaacgggcgggcgatccgtca

SEQ ID NO: 479599 - DNA, 75 bp, synthetic construct
  source 1..75: mol_type = other DNA
gttactgaatctgcgtccgtcaccggagtttgaacgctggctggaaagcatgggcattatggcaaacggtcgcct

SEQ ID NO: 479600 - DNA, 75 bp, synthetic construct
  source 1..75: mol_type = other DNA
gaagggctttccttcggggtgggcgatgcggtgatcggcgttaacccggtgactgacgacgtggaaaacttaagc

SEQ ID NO: 479601 - DNA, 75 bp, synthetic construct
  source 1..75: mol_type = other DNA
taataccaatgagtctggcatcgcgcaggccactctcgcaggcgttgcctttggtgagcagacggtcactgcatc

SEQ ID NO: 479602 - DNA, 75 bp, synthetic construct
  source 1..75: mol_type = other DNA
caggcggtgattaacgctgcatacctggtggcctatgcagatggtgaatgcgaggcatccgagaaagcgaagatc

SEQ ID NO: 479603 - DNA, 75 bp, synthetic construct
  source 1..75: mol_type = other DNA
atctagctttaacaacccccaccagttcgcacccggctcagtgtttcacttgctggagcctgacatcaatcagga

SEQ ID NO: 479604 - DNA, 75 bp, synthetic construct
  source 1..75: mol_type = other DNA
catctgttcgtgatggcagacagctttttgcatcaggcagggatgaccgccgggctgacgcgcagcctggctgtt

SEQ ID NO: 479605 - DNA, 75 bp, synthetic construct
  source 1..75: mol_type = other DNA
gcgcacgtcaccacccagatcgaagcgattcgtcgcggcgcaccgggcgggctgattttccagagtatttgcggc

SEQ ID NO: 479606 - DNA, 75 bp, synthetic construct
  source 1..75: mol_type = other DNA
aaaagaggtgctggctaaagccaacgaactgtgttcgggggatgtgctggcaggcgttgcagcggcaagttcaca

SEQ ID NO: 479607 - DNA, 75 bp, synthetic construct
  source 1..75: mol_type = other DNA
tcttatgcacaagaataaattatatgcatatgataatttctcattcaatgcggacgtgcattatggttatggaaa

SEQ ID NO: 479608 - DNA, 75 bp, synthetic construct
  source 1..75: mol_type = other DNA
aatggctttccggtaaaaggtgtgactgtgagctttaccagcagaacaaaatctgccgaaatgacgaacggcggc

SEQ ID NO: 479609 - DNA, 75 bp, synthetic construct
  source 1..75: mol_type = other DNA
attgcagtgaagtgcaacattctgaccagcacctacatccctcacccgctgctcagccagcaggctttttcacgt

SEQ ID NO: 479610 - DNA, 75 bp, synthetic construct
  source 1..75: mol_type = other DNA
cacgtccattcaagtcgacgctgatgcgtctacggcacatctcacctcgctttataccctttatgacacacaatt

SEQ ID NO: 479611 - DNA, 75 bp, synthetic construct
  source 1..75: mol_type = other DNA
aatgccattgcaaaagcgactgcaggagctaaacaattggttggacgaagaaataattcgcttcgaatcttataa

SEQ ID NO: 479612 - DNA, 75 bp, synthetic construct
  source 1..75: mol_type = other DNA
atcgctgatccatcgactatcgccgccaccaacagtgatttaagtaccttaaaggcaacggttgaggatggcagt

SEQ ID NO: 479613 - DNA, 75 bp, synthetic construct
  source 1..75: mol_type = other DNA
tctacggcttgcccggctatctttctgccattccatccgccctgctcaacgaatccgccacgctgttccgccgta

SEQ ID NO: 479614 - DNA, 75 bp, synthetic construct
  source 1..75: mol_type = other DNA
aaaggatgactttttcaacattaagaaagccagcgccgccgacctgatggacgcgcaccgcgtgccgttccagct

SEQ ID NO: 479615 - DNA, 75 bp, synthetic construct
  source 1..75: mol_type = other DNA
gtggaaaacttcacccagccgcacgagttcgcgcctgataccgtgtttcacctgctggagcccgacattaatcag

SEQ ID NO: 479616 - DNA, 75 bp, synthetic construct
  source 1..75: mol_type = other DNA
gtgcagtggttcttttttaatcgtaacaaataacatacggttagattatataagaaaaattacatgccgatttga

SEQ ID NO: 479617 - DNA, 75 bp, synthetic construct
  source 1..75: mol_type = other DNA
taaaagccagacttcagccgaaacattcagctttggcgatcccgttcctgttctggaccgccgtgaactgctgga

SEQ ID NO: 479618 - DNA, 75 bp, synthetic construct
  source 1..75: mol_type = other DNA
catcacagctcaccgatttatgttaagcgcaacgtactcgcaagcacctacattccgcacccgttgctatcccgt

SEQ ID NO: 479619 - DNA, 75 bp, synthetic construct
  source 1..75: mol_type = other DNA
atgcgcaccgcgtgccgttccagctaatgggtggcaagcccgagaatatcggctcactcggtgacgttgagaagg

SEQ ID NO: 479620 - DNA, 75 bp, synthetic construct
  source 1..75: mol_type = other DNA
gtcgtggcgttgaggatggtgtttactggtacgtgtcgagctttaacaacccacatcagttcgcacccggctcgg

SEQ ID NO: 479621 - DNA, 75 bp, synthetic construct
  source 1..75: mol_type = other DNA
ctgtgtcgtgctttgtgaaccgggcggaacgccggtatacggtaataccggtgatctcgaggcccgtttgcagaa

SEQ ID NO: 479622 - DNA, 75 bp, synthetic construct
  source 1..75: mol_type = other DNA
catcagtatgtctctgccgtgcataccgatactgataacctgcatgttcacgttgcggtcaaccgggtgcatccg

SEQ ID NO: 479623 - DNA, 75 bp, synthetic construct
  source 1..75: mol_type = other DNA
gccttcgaaatgaatcattcgtggcgctggttgatgtcatgaaggacggctgcgaatgggttaacttttacggtg

SEQ ID NO: 479624 - DNA, 75 bp, synthetic construct
  source 1..75: mol_type = other DNA
atactgataacctgcatgttcacgttgcggtcaaccgggtacatccggttacaggttatctcaattgcctttcat

SEQ ID NO: 479625 - DNA, 75 bp, synthetic construct
  source 1..75: mol_type = other DNA
tatcgttcatacaaattctactaaaccgggtattgttgctagaatagctgcgcgtattgctggtgtcaaaaaaat

SEQ ID NO: 479626 - DNA, 75 bp, synthetic construct
  source 1..75: mol_type = other DNA
cagtaatgaaaaaagattcttgtttgtaggacggctagatgagcaaaaagatccgctcacacttatcaaagcttt

SEQ ID NO: 479627 - DNA, 75 bp, synthetic construct
  source 1..75: mol_type = other DNA
ttctggccgccgatgcccgccagttgtccggcatgttcagcagtctgatccagatgatggccagcctgaatggct

SEQ ID NO: 479628 - DNA, 75 bp, synthetic construct
  source 1..75: mol_type = other DNA
gccttactcactttcccgtcacatcctggaacatctgcgcaaactcaccagtcacgaaccgcactggatattctg

SEQ ID NO: 479629 - DNA, 75 bp, synthetic construct
  source 1..75: mol_type = other DNA
catcagtacgtggctgccgttcatacggacacggataacctgcatgtacatgtcgcagtgaatcgtgttcatcct

SEQ ID NO: 479630 - DNA, 75 bp, synthetic construct
  source 1..75: mol_type = other DNA
ggcaggatatcccgtcacgccgtcttccgcgactggtgtttgatgtgcagcaggaagccgacattaagggcgtgg

SEQ ID NO: 479631 - DNA, 75 bp, synthetic construct
  source 1..75: mol_type = other DNA
gacacgctgcggcagttgctgacgcaggcattctttgtggcggatatctgggggcgactgaatgccgacagctga

SEQ ID NO: 479632 - DNA, 75 bp, synthetic construct
  source 1..75: mol_type = other DNA
gtatccccaccccgaaagacggcgaagaggtactggtaccagtggcacagcgtctccctgcgcaggcgggcctca

SEQ ID NO: 479633 - DNA, 75 bp, synthetic construct
  source 1..75: mol_type = other DNA
gcgaacagcaatgatgatgcgtcattgcctccgccggagcaggataaactctgggaaccgccttctccgatgaga

SEQ ID NO: 479634 - DNA, 75 bp, synthetic construct
  source 1..75: mol_type = other DNA
agtggatactaaaccgcagctggaaatctatgcagatgatgtgaaatgcagccacggcgcgacggtggggcgtat

SEQ ID NO: 479635 - DNA, 75 bp, synthetic construct
  source 1..75: mol_type = other DNA
tgcgcctgccgagcagttgcgtgccgggtttaacgccgcggcagggcacgaactggtgaaaggatttgccgtggg

SEQ ID NO: 479636 - DNA, 75 bp, synthetic construct
  source 1..75: mol_type = other DNA
cgctggtgaaaggcttcgccgtggggcgcacgctgtttggcgatgcctcccgcgcatggctgaaacacgatattg

SEQ ID NO: 479637 - DNA, 75 bp, synthetic construct
  source 1..75: mol_type = other DNA
gtcgcgtcaggatttcagccgcctcgtgctggattatctggtctttgcgaacggttatcttgagaagcgcatgag

SEQ ID NO: 479638 - DNA, 75 bp, synthetic construct
  source 1..75: mol_type = other DNA
ctttgctgccgaactgacggaagcactgcgtgatgaagggcttaaacagcaggtgctggcccgaatcggtcaacg

SEQ ID NO: 479639 - DNA, 75 bp, synthetic construct
  source 1..75: mol_type = other DNA
atagccagtttgtctgcattgcgggagagatatccccacagcagcgagatgccttagcgttaacgttagacgctg

SEQ ID NO: 479640 - DNA, 75 bp, synthetic construct
  source 1..75: mol_type = other DNA
gacgcgacggaaagtcttcctttgaagacctgattgcgtacacctcagtgcgggatgatgtgccggaagatgaac

SEQ ID NO: 479641 - DNA, 75 bp, synthetic construct
  source 1..75: mol_type = other DNA
gaattactgtctaatgccgattccattgaaaggcagttttccatctatgaacgcatccagacgaagattgcgttc

SEQ ID NO: 479642 - DNA, 75 bp, synthetic construct
  source 1..75: mol_type = other DNA
taaccagactcccgttcgtgctgacagcgtatggtcactgctgacgctcgacaatgtgaatcaactcgatggtgg

SEQ ID NO: 479643 - DNA, 75 bp, synthetic construct
  source 1..75: mol_type = other DNA
ctgcagtgcggcgcgtcgcttaagcgtattccggcgctgaaacagctgatcctgcaggccagccgagaggcggca

SEQ ID NO: 479644 - DNA, 75 bp, synthetic construct
  source 1..75: mol_type = other DNA
ggcggtcatatcgccagacgctgcagtgagcagaagcgggtacgtacccccgccatgaaagtcagcgaatggggc

SEQ ID NO: 479645 - DNA, 75 bp, synthetic construct
  source 1..75: mol_type = other DNA
acccacaagtgcgtaaactgcattaccatattgcagaagtgcaacgtatgcaggcgctgatcagactgaaggaaa

SEQ ID NO: 479646 - DNA, 75 bp, synthetic construct
  source 1..75: mol_type = other DNA
aactcggcatgaatgatgtagacagggttgggggcaaaaatgcctccctgggtgaaatgattactaacctttccg

SEQ ID NO: 479647 - DNA, 75 bp, synthetic construct
  source 1..75: mol_type = other DNA
ttgataccgaatccggctttgaccaggtggtgtttatcacttccgcatggggccttggtgaaatggtcgtgcagg

SEQ ID NO: 479648 - DNA, 75 bp, synthetic construct
  source 1..75: mol_type = other DNA
gataccttctgtaggaaagccagggtattattcacctgtgacctcgactactgaaggaattcatctcggtgagcg

SEQ ID NO: 479649 - DNA, 75 bp, synthetic construct
  source 1..75: mol_type = other DNA
gaaacagggcaaatatgtcgggatttgcggtcagggcccgtccgaccacgaagactttgctgcatggttgatgga

SEQ ID NO: 479650 - DNA, 75 bp, synthetic construct
  source 1..75: mol_type = other DNA
aagaactggcgcgtcaggggctgaaacgtggcgagaacgggctgaaaatcatcatgatgtgtgaaattccgtcca

SEQ ID NO: 479651 - DNA, 75 bp, synthetic construct
  source 1..75: mol_type = other DNA
ggtgaaatgattactaacctttccggaatgggtgtttccgttccgaatggtttcgccacaaccgccgacgcgttt

SEQ ID NO: 479652 - DNA, 75 bp, synthetic construct
  source 1..75: mol_type = other DNA
cataaagctaaccgacgccgggttaaggctggctcctatgctgactccacccggcgagctgatggctatcgtcaa

SEQ ID NO: 479653 - DNA, 75 bp, synthetic construct
  source 1..75: mol_type = other DNA
gagaaacatgctgcagccactctctcaggagactcgcaaactggatgatatgacgatacgcctcccgttaaagcg

SEQ ID NO: 479654 - DNA, 75 bp, synthetic construct
  source 1..75: mol_type = other DNA
gtctggcggggcaatggttgccacggatggagcatggaactattcagatgaacagattgagcgtgcaaagcaaaa

SEQ ID NO: 479655 - DNA, 75 bp, synthetic construct
  source 1..75: mol_type = other DNA
gataaattcattccgtcactacatgacctggggaatgtgaaaatgacggcgtcaaatgccaccctgacggcaggt

SEQ ID NO: 479656 - DNA, 75 bp, synthetic construct
  source 1..75: mol_type = other DNA
aaggtaacgctgggtagttcaagtgtttatgttgatcgtaatgacggtacaggagagtcagttaactcaacatct

SEQ ID NO: 479657 - DNA, 75 bp, synthetic construct
  source 1..75: mol_type = other DNA
aactaggaagcggcaagctgattattaatggtaatggtataaatacagggggattaaaagtaggtgatggcactg

SEQ ID NO: 479658 - DNA, 75 bp, synthetic construct
  source 1..75: mol_type = other DNA
ccgcgtgagttttacgtaggccgtctgacggaagggatcgcgacgctgggggcggcgttttatccgaagcgcgtc

SEQ ID NO: 479659 - DNA, 75 bp, synthetic construct
  source 1..75: mol_type = other DNA
ttctatccgcgatctccgtatgcggtcgccaaactgtatgcctactggatcaccgttaactaccgcgaatcctac

SEQ ID NO: 479660 - DNA, 75 bp, synthetic construct
  source 1..75: mol_type = other DNA
cctggaggaaggcctgtttatctggcctgcggtgcgtgacggtaaggtatccattacccgctcgcagctggcaat

SEQ ID NO: 479661 - DNA, 75 bp, synthetic construct
  source 1..75: mol_type = other DNA
gatgagttgaatttaatcgttcagcgcgctttacaactccagtcaatgaaaaaagagatccgtcatctgcactag

SEQ ID NO: 479662 - DNA, 75 bp, synthetic construct
  source 1..75: mol_type = other DNA
ggtgacaccgtcaaaattctttgggctgatgctgatggtctgtgcctgttcaccaaacgcctggaggaagaccag

SEQ ID NO: 479663 - DNA, 75 bp, synthetic construct
  source 1..75: mol_type = other DNA
tggtctattttccccgtacgccgtcggtatcgacgacggggatcattgaggtgattagggggaattatataaagt

SEQ ID NO: 479664 - DNA, 75 bp, synthetic construct
  source 1..75: mol_type = other DNA
taccctcaggatgaccgcatggcgattatcgccgggctggcgtgcgtggatggcgtatttctcgaggaatcgctg

SEQ ID NO: 479665 - DNA, 75 bp, synthetic construct
  source 1..75: mol_type = other DNA
gacaacaccaggtgaaataccagtagttgccaatggaccaattcctacttattttcatagcgagagcaacagaca

SEQ ID NO: 479666 - DNA, 75 bp, synthetic construct
  source 1..75: mol_type = other DNA
ggcctcggtgaaatggtggtgcagggcgcggttaatccggatgaattttacgtgcataaaccgacgctggcggcg

SEQ ID NO: 479667 - DNA, 75 bp, synthetic construct
  source 1..75: mol_type = other DNA
acgccttgctggcagaacagttcctcgaatatttcgacggcttctctatcggctcaaacgacatgacgcagctga

SEQ ID NO: 479668 - DNA, 75 bp, synthetic construct
  source 1..75: mol_type = other DNA
gtgctggcgctgtttatccacaccaccggcgtgctctccaagctgctttccgaagcggtggaagcgattgagccc

SEQ ID NO: 479669 - DNA, 75 bp, synthetic construct
  source 1..75: mol_type = other DNA
gtgacctgcgtgacatcaacggcgaagccggtgcatgggcacgcatcatgagcggtactggctctgccagtggtg

SEQ ID NO: 479670 - DNA, 75 bp, synthetic construct
  source 1..75: mol_type = other DNA
gctatgataaaaataattatactgtagtaaagaacaacaaacattcgggccttgatttttctctgcatcggttca

SEQ ID NO: 479671 - DNA, 75 bp, synthetic construct
  source 1..75: mol_type = other DNA
cagtggttgctgcggatgggatatggaactattcagatgaacaggtggagcgtgcaaagcaaaacgggtggcttg

SEQ ID NO: 479672 - DNA, 75 bp, synthetic construct
  source 1..75: mol_type = other DNA
cgaaacggcggcacgtgctgcctatctagaagctaaagctagataccatccctcaacaccagccgatttattgca

SEQ ID NO: 479673 - DNA, 75 bp, synthetic construct
  source 1..75: mol_type = other DNA
ccaacctgacgcgcattttgtgtgaagtgcagccggatgaagtgtacaacctgggcgcaatgagtcacgttgcgg

SEQ ID NO: 479674 - DNA, 75 bp, synthetic construct
  source 1..75: mol_type = other DNA
cgtgaatcttatggtatatatgcttgtaatggtattctttttaaccatgaatcgccacgccgtggagaaactttt

SEQ ID NO: 479675 - DNA, 75 bp, synthetic construct
  source 1..75: mol_type = other DNA
atgaataacatattccacccccgactttatcaaaacctcataatcaatcaccaaaccgacattctgcgcggcaac

SEQ ID NO: 479676 - DNA, 75 bp, synthetic construct
  source 1..75: mol_type = other DNA
tggtgaaacatttgtaacaagaaaaatcacccgagcattagcaaatattgcgtacggattagagccatgtttgta

SEQ ID NO: 479677 - DNA, 75 bp, synthetic construct
  source 1..75: mol_type = other DNA
cttgggaaatatggattctctgcgtgattggggacatgctaaggattatgtcaaaatgcaatggatgatgctgca

SEQ ID NO: 479678 - DNA, 75 bp, synthetic construct
  source 1..75: mol_type = other DNA
aagttggcttggaacttcagttctctggtaaaggtattgatgaaatagctactgttgtaaacaaaacatctgact

SEQ ID NO: 479679 - DNA, 75 bp, synthetic construct
  source 1..75: mol_type = other DNA
tccgtcagtttgtcgaaatggcagcagcacaacttggtattaagatgagctttgttggtaaaggaatcgaagaaa

SEQ ID NO: 479680 - DNA, 75 bp, synthetic construct
  source 1..75: mol_type = other DNA
cgggccatgctgatggcgatggagccgaaatgggagagtgattttcatacactctcatatggcttccggcctgag

SEQ ID NO: 479681 - DNA, 75 bp, synthetic construct
  source 1..75: mol_type = other DNA
tgcagaaatggttgccagtgatctggcgaaagcaaaacagtatgcactacttaaaagccatggttatgatgtttc

SEQ ID NO: 479682 - DNA, 75 bp, synthetic construct
  source 1..75: mol_type = other DNA
atccacgctatttccgccctgcggaagttgaaacacttcttggtgatccaagtaaagctaaaaaattattgggtt

SEQ ID NO: 479683 - DNA, 75 bp, synthetic construct
  source 1..75: mol_type = other DNA
gatcgtcataatgaaaacccagatttcatacttcattatggtgacttaacggactcatcaaacctgatacgcttg

SEQ ID NO: 479684 - DNA, 75 bp, synthetic construct
  source 1..75: mol_type = other DNA
gttatccgcgtggacatgccgccgaaggcctgccagcagtatcgcgaaatggaaaaggaaatgttcctcgaactc

SEQ ID NO: 479685 - DNA, 75 bp, synthetic construct
  source 1..75: mol_type = other DNA
accctaatctagatgcttataaaacaattcttgaaattatattcctaagaatacaacataatcgtgaaaaatgcg

SEQ ID NO: 479686 - DNA, 75 bp, synthetic construct
  source 1..75: mol_type = other DNA
acggaagtagccttacaaatcgaatcaatgaaatccagaatgaagtaggaacttcgagtattccagagcgtaatg

SEQ ID NO: 479687 - DNA, 75 bp, synthetic construct
  source 1..75: mol_type = other DNA
agcgttccattctctttatgtacaagaaagttggtaatgatgttcgcagtacaattctcgtgaaggatctacaag

SEQ ID NO: 479688 - DNA, 75 bp, synthetic construct
  source 1..75: mol_type = other DNA
tgtttattcagggcaacggtatattgcttccgatatcgcccaacaaatggcattaagccagatcgaaccagagaa

SEQ ID NO: 479689 - DNA, 75 bp, synthetic construct
  source 1..75: mol_type = other DNA
cgttaagccagatcgaaccagaaaaacagaaagcccatttgccagtttgtctgaacgtgaattgcagattatgct

SEQ ID NO: 479690 - DNA, 75 bp, synthetic construct
  source 1..75: mol_type = other DNA
agctcaagatcctcgctatgaaagccctaaatggttggtgaattgtcaacaagccaaaaatgatgaaaaaaaata

SEQ ID NO: 479691 - DNA, 75 bp, synthetic construct
  source 1..75: mol_type = other DNA
ccgcactcatcaaatccgaagttccatcttcattatggcgatttaactgatacttctaacctgacgagactttta

SEQ ID NO: 479692 - DNA, 75 bp, synthetic construct
  source 1..75: mol_type = other DNA
aattccacaaaaagagactacgccattttatccacgttcgccttatgctgttgcaaaattatatgcctattggat

SEQ ID NO: 479693 - DNA, 75 bp, synthetic construct
  source 1..75: mol_type = other DNA
acatgcaggacggcggaaatatactggtatttttctcacactggtgggacctggagcaatatcagcaaattattg

SEQ ID NO: 479694 - DNA, 75 bp, synthetic construct
  source 1..75: mol_type = other DNA
ccagaagaagaaagaaaagcgagtaattggattacgtgaaagtaagaaacgtaaaatcatttatgatttctatgc

SEQ ID NO: 479695 - DNA, 75 bp, synthetic construct
  source 1..75: mol_type = other DNA
tatgcttttggttcttgggaattctttatctcattctttgaagtaatagacttccttaaagaggatggaatttac

SEQ ID NO: 479696 - DNA, 75 bp, synthetic construct
  source 1..75: mol_type = other DNA
gtatcactgggcaagatggttcatatctcgctgaatttcttttagaaaagggttatgaagttcacgggattaaga

SEQ ID NO: 479697 - DNA, 75 bp, synthetic construct
  source 1..75: mol_type = other DNA
ggtgataatgtgctgcattatactgcgattgttaagaagtcgtcagccaataatgcccaagttactgagggtgct

SEQ ID NO: 479698 - DNA, 75 bp, synthetic construct
  source 1..75: mol_type = other DNA
ttactgcctttaaaggtggtaatggcgccaaaaaagggactgttaagctggcttttactggcccgatagttaatg

SEQ ID NO: 479699 - DNA, 75 bp, synthetic construct
  source 1..75: mol_type = other DNA
gttcaggctgcaggcaaaaacgtttctttcgatgggactgcaggtgacgcttatcccctgaaagatggtgataat

SEQ ID NO: 479700 - DNA, 75 bp, synthetic construct
  source 1..75: mol_type = other DNA
catcggaatgctgaaattctggaagaactgtcacagtcgaaagaacaggttacagtactgaataacgaaaaagtt

SEQ ID NO: 479701 - DNA, 75 bp, synthetic construct
  source 1..75: mol_type = other DNA
attgaacaaatctgcctcgataagggcatcagcaccgaaaacctcgatcagtttttcaaagcccactggctgcgg

SEQ ID NO: 479702 - DNA, 75 bp, synthetic construct
  source 1..75: mol_type = other DNA
ccgccctcaacagccagaatgaaaacttacaacggaccgtgtctgatttaaagtccagtgtcagtcagcttgaac

SEQ ID NO: 479703 - DNA, 75 bp, synthetic construct
  source 1..75: mol_type = other DNA
gatgatctcttcacattccattgaattcattaaccacctgaccgttgatgtgttgattaaacatattacgactca

SEQ ID NO: 479704 - DNA, 75 bp, synthetic construct
  source 1..75: mol_type = other DNA
tagcgacgttaatccaaaaacttcatgatatctccagtctgacatccagtattggcggtgatgtggctgctgatc

SEQ ID NO: 479705 - DNA, 75 bp, synthetic construct
  source 1..75: mol_type = other DNA
aacggttacctggcagataacccgtttaaggggatctcgccattaaaggaatcaagaaccattccggatcctctt

SEQ ID NO: 479706 - DNA, 75 bp, synthetic construct
  source 1..75: mol_type = other DNA
gcgtcatccagaacgcttcccggatgcgattaaccttgttcgccaggctggtctaagctatatcacacgctcttc

SEQ ID NO: 479707 - DNA, 75 bp, synthetic construct
  source 1..75: mol_type = other DNA
gtgttgattatggaaaccgagttgtggccaaacctgattgcggcgctacataaacgtaaaattccgctggtcatc

SEQ ID NO: 479708 - DNA, 75 bp, synthetic construct
  source 1..75: mol_type = other DNA
gtaaaaacgtttctttcgatggcacagaaggtgatgctaataccctgaaagatgaaccgccccgggtttcctgga

SEQ ID NO: 479709 - DNA, 75 bp, synthetic construct
  source 1..75: mol_type = other DNA
atggcgcagtcaacccttctgccgccacccctgcggcctgtttcccgctgtggactttccgggggctgaagcggc

SEQ ID NO: 479710 - DNA, 75 bp, synthetic construct
  source 1..75: mol_type = other DNA
aaagcgcacgaaaaactgggctggaaaccggaaatcaccctcagagagatggtgtctgaaatggtggctaatgac

SEQ ID NO: 479711 - DNA, 75 bp, synthetic construct
  source 1..75: mol_type = other DNA
attaaaggttatcggtagcggcaatgaaatcatcactggcgcagtcttgtcggcctctgtaccggtactcgtgag

SEQ ID NO: 479712 - DNA, 75 bp, synthetic construct
  source 1..75: mol_type = other DNA
caacgctggatgcgcaggccggaaacatcggtgattttgtcaaagtcacccagagcggcagcgacactatcgtgc

SEQ ID NO: 479713 - DNA, 75 bp, synthetic construct
  source 1..75: mol_type = other DNA
ggtagcggaaatgatggcaaaggatctgcaggaagcgaagaaatattcgctgcttaaattacatggttatgaagt

SEQ ID NO: 479714 - DNA, 75 bp, synthetic construct
  source 1..75: mol_type = other DNA
gactggggccatgccaaagattacgtaaaaatgcagtggatgatgctgcaacaggagaagccggaagattttgtt

SEQ ID NO: 479715 - DNA, 75 bp, synthetic construct
  source 1..75: mol_type = other DNA
tactctgcgtaaacagcaggcaacctggaaagaaaaagacggcgctgttgaagcagaagaccgcgtaaccatcga

SEQ ID NO: 479716 - DNA, 75 bp, synthetic construct
  source 1..75: mol_type = other DNA
gtcgccaggctgcacagcgtttcggtggcaacgaaaaacaagctctggaactgccgcgcgaactgttcgaagaac

SEQ ID NO: 479717 - DNA, 75 bp, synthetic construct
  source 1..75: mol_type = other DNA
aagctgtactggcgaaagcgaaagcgaaagtgactgaaaaagaaaccactttcaacgagctgatgaaccagcagg

SEQ ID NO: 479718 - DNA, 75 bp, synthetic construct
  source 1..75: mol_type = other DNA
aagcactcaacgattaccgctcggcgataaaaagctggctgacactacgtaatacgcaaagtacctgccagcttc

SEQ ID NO: 479719 - DNA, 75 bp, synthetic construct
  source 1..75: mol_type = other DNA
gcgaactgttcgaagaacaggctaaacgccgcgtagttgttggcctgctgctgggcgaagttattcgcgccaacg

SEQ ID NO: 479720 - DNA, 75 bp, synthetic construct
  source 1..75: mol_type = other DNA
gggtgacctgatgagccgtaacttcattgacgccatcattaaagaaaaaatcaatccggctggagcaccgactta

SEQ ID NO: 479721 - DNA, 75 bp, synthetic construct
  source 1..75: mol_type = other DNA
agaaacggaagtcgcaaaaacgtcactcaacacgtaccgtgccgtcatcaaaaatattctgagcataatcggtga

SEQ ID NO: 479722 - DNA, 75 bp, synthetic construct
  source 1..75: mol_type = other DNA
actaaatcagtaagttggcagcatcacctagcgggtaatcaaaccctcgataaaacattaattaatggcctgaat

SEQ ID NO: 479723 - DNA, 75 bp, synthetic construct
  source 1..75: mol_type = other DNA
ctccggcgttccattagtgatgatgggcctcgatcttaccaaccagaccgtttgcaccccggatgtgattgctcg

SEQ ID NO: 479724 - DNA, 75 bp, synthetic construct
  source 1..75: mol_type = other DNA
acccagttcgaaaactacggcctggctggcggcccggtgcacgacgccacctgcattggttatctgattaaccct

SEQ ID NO: 479725 - DNA, 75 bp, synthetic construct
  source 1..75: mol_type = other DNA
tgataaagagggcgacggctatctcgacttctggattggcgacgcgggcgggccggactccaacaccttcctgtg

SEQ ID NO: 479726 - DNA, 75 bp, synthetic construct
  source 1..75: mol_type = other DNA
gcatctggctggtcgccggggccacggatatgcgtaaatccttcaacgggctgggcgaacagatacaccacgttc

SEQ ID NO: 479727 - DNA, 75 bp, synthetic construct
  source 1..75: mol_type = other DNA
atttggcaaataacatatatgaaatttataccgttttatattatcactatgagatattcattcatggatataacc

SEQ ID NO: 479728 - DNA, 75 bp, synthetic construct
  source 1..75: mol_type = other DNA
atgagacccccttctccggtcacctgttcatcttccgtggccgacggggtgacatgattaaaatcctctgggctg

SEQ ID NO: 479729 - DNA, 75 bp, synthetic construct
  source 1..75: mol_type = other DNA
actggtaatgctcctcgataagctggactggcgtcagccaaaaacatcccgccttaacgtaagcgtcaacggagc

SEQ ID NO: 479730 - DNA, 75 bp, synthetic construct
  source 1..75: mol_type = other DNA
tatccattacccgctcgcaactggcaatgctcctcgataagctggactggcgtcagccaaaaacatcccgcctta

SEQ ID NO: 479731 - DNA, 75 bp, synthetic construct
  source 1..75: mol_type = other DNA
tgcgcatgcagcccgcaatcctgccgaaaatccgtgaaattgtgctgatgggcggcgcttacggtactggcaact

SEQ ID NO: 479732 - DNA, 75 bp, synthetic construct
  source 1..75: mol_type = other DNA
atgatctcgctcccatcaggcactcgaatctggctcgttgctggcgttaccgatatgcgtaaatctttcaacggt

SEQ ID NO: 479733 - DNA, 75 bp, synthetic construct
  source 1..75: mol_type = other DNA
cctgttcatcttccgtggccgacggggtgacatgattaaaatcctctgggctgatgctgatggtctgtgcctgtt

SEQ ID NO: 479734 - DNA, 75 bp, synthetic construct
  source 1..75: mol_type = other DNA
caatggctccgccattatatcaggtataccgatgattactggggctgacctgctggcacagtatcgatatatgga

SEQ ID NO: 479735 - DNA, 75 bp, synthetic construct
  source 1..75: mol_type = other DNA
agacaattacgggtagtacagcgatgaataaattgaatgttgactctggcaactccattgttagccgtccacgta

SEQ ID NO: 479736 - DNA, 75 bp, synthetic construct
  source 1..75: mol_type = other DNA
tacttatatcggggttgactggaagaatgacacgcaggcaacggtagtattagcaacagcaactgcttatgacct

SEQ ID NO: 479737 - DNA, 75 bp, synthetic construct
  source 1..75: mol_type = other DNA
taccctaaactggcactagcctatccagacatgaaacttccagacctgcggggggagtttattcgtggatgggat

SEQ ID NO: 479738 - DNA, 75 bp, synthetic construct
  source 1..75: mol_type = other DNA
aacggcgatatggtcggtcacaccggggtgatggaagccgcagttaaagcggttgaggccctggatcactgcgtg

SEQ ID NO: 479739 - DNA, 75 bp, synthetic construct
  source 1..75: mol_type = other DNA
aacagccggaatgttcagctttgccgccgaaaacgggtatctggagaaaaacccgtttaattcaataacaccgct

SEQ ID NO: 479740 - DNA, 75 bp, synthetic construct
  source 1..75: mol_type = other DNA
ctcaacacgtaccgtgccgtcatcaaaaatattctgagcataatcggtgaaaaaaatcttgcctcgtcgattaat

SEQ ID NO: 479741 - DNA, 75 bp, synthetic construct
  source 1..75: mol_type = other DNA
catcgcagcgggttctcgcccgatccaactgccgtttattccgcatgaagatccgcgtatctgggactccactga

SEQ ID NO: 479742 - DNA, 75 bp, synthetic construct
  source 1..75: mol_type = other DNA
tgttggcgcagtatcgctatctcgggcttggcttttcgctttatgttggctgtgacaaccagtccagcgaaaatc

SEQ ID NO: 479743 - DNA, 75 bp, synthetic construct
  source 1..75: mol_type = other DNA
cagcggatccggacgaggcggaaggctggttgcccggaggtgtcctccataccgatttgctggttctgctgcgcg

SEQ ID NO: 479744 - DNA, 75 bp, synthetic construct
  source 1..75: mol_type = other DNA
ctcttttgaagcgcacaggcatgagtcctttttttacgcgggtatttctcgcaatgaaacactcgcaatgaaaca

SEQ ID NO: 479745 - DNA, 75 bp, synthetic construct
  source 1..75: mol_type = other DNA
ctgaaccgcagcgttacgacgccgtgctggtagcgattggccgtgtgccgaacggtaaaaacctcgacgcaggca

SEQ ID NO: 479746 - DNA, 75 bp, synthetic construct
  source 1..75: mol_type = other DNA
ggcctggcaatcgaaatgggttgtgatgctgaagacatcgcactgaccatccatgcgcacccgactctgcacgag

SEQ ID NO: 479747 - DNA, 75 bp, synthetic construct
  source 1..75: mol_type = other DNA
aacgccgtttgagctgggcgtgtgcgtacaaaaaaagcggctgcatgagccgctgattgaggcattctggaagat

SEQ ID NO: 479748 - DNA, 75 bp, synthetic construct
  source 1..75: mol_type = other DNA
aacgccgtttgagctgggcgtgtgtgcgcaaaaaaagcggctgcatgagccgctgattgaggcattctggaagat

SEQ ID NO: 479749 - DNA, 75 bp, synthetic construct
  source 1..75: mol_type = other DNA
tcagcggggtgaacgcgttcccacgccaggcgagctacccgcaaacattgatgaacgggtcatgatttgtccgtt

SEQ ID NO: 479750 - DNA, 75 bp, synthetic construct
  source 1..75: mol_type = other DNA
gccgcttacagccatctgccaccgattctcgatcgcttccgcgccgagcacccatcggtggagattaagctcact

SEQ ID NO: 479751 - DNA, 75 bp, synthetic construct
  source 1..75: mol_type = other DNA
ttttggccgtagcgcgcgggcaatgcacgtcagcccctccacgctttcccgacagattcagcgcctggaagaaga

SEQ ID NO: 479752 - DNA, 75 bp, synthetic construct
  source 1..75: mol_type = other DNA
accttgcccggcgcagtggcgttttcgatgctggagaatctggcagtagtgctgattgcccccgcgctgccctgc

SEQ ID NO: 479753 - DNA, 75 bp, synthetic construct
  source 1..75: mol_type = other DNA
atcgtgcaagccgttaatgcctgcctgcaatataccaactggtatgggctggttgtcgctgatgatgttgtcgct

SEQ ID NO: 479754 - DNA, 75 bp, synthetic construct
  source 1..75: mol_type = other DNA
aaactttttcagaatacctggcgcgccgtggttgaaggtatggcttacaacccggacgaaatcatctcaatcagc

SEQ ID NO: 479755 - DNA, 75 bp, synthetic construct
  source 1..75: mol_type = other DNA
acgtcgacagcaccggtgacccgaaagcattgttctggaaggcgcgcaagttcgtggaaacactgcctgtagagt

SEQ ID NO: 479756 - DNA, 75 bp, synthetic construct
  source 1..75: mol_type = other DNA
ggcttcggctcccgtaaagaggaatacgtcgacagtaccggtgacccgaaggcgctgttctggaaggcgcgaaag

SEQ ID NO: 479757 - DNA, 75 bp, synthetic construct
  source 1..75: mol_type = other DNA
ggaatgcgagaaaatcgacaatccggtggtggtagcgcaggaacttgacctgaactacagcgcatctgcggaagg

SEQ ID NO: 479758 - DNA, 75 bp, synthetic construct
  source 1..75: mol_type = other DNA
gataacggtaaagcggcgcgcctgaataaagacttcttcgcgaacgcgaaagcgcagagctggtggcatctccgc

SEQ ID NO: 479759 - DNA, 75 bp, synthetic construct
  source 1..75: mol_type = other DNA
gtacgccgccgcatcgaattgtggtttcgacgcaacaaaatcagcaacccgctgatttacgccacagtcggcgga

SEQ ID NO: 479760 - DNA, 75 bp, synthetic construct
  source 1..75: mol_type = other DNA
tcggccggcatgttgcgccggaaaaccgcatccgtaccggtatcaccacactgtggatgtggccggggccgtggt

SEQ ID NO: 479761 - DNA, 75 bp, synthetic construct
  source 1..75: mol_type = other DNA
acaccgtagagcgcgaggatactcctgctattcgcggtatgatcaacgcggtttccttcatggttaaagttgagg

SEQ ID NO: 479762 - DNA, 75 bp, synthetic construct
  source 1..75: mol_type = other DNA
gacacaccccctttcaaccagcgtggtcatgcttgccaccgtcgcggttgtggtggcaacacataatctggcctt

SEQ ID NO: 479763 - DNA, 75 bp, synthetic construct
  source 1..75: mol_type = other DNA
gcgaacttgttgatgccgcgattgaacttgctggcgatttttattccatgatggggtacacgcatcgcccaggct

SEQ ID NO: 479764 - DNA, 75 bp, synthetic construct
  source 1..75: mol_type = other DNA
ggtttcgcgctctttcagagaagctgcagagggcgatgcgcagtcgctgcgcagagtggcagtgacactgctgct

SEQ ID NO: 479765 - DNA, 75 bp, synthetic construct
  source 1..75: mol_type = other DNA
ctgtggatgtggccggggccgtggtgcggttgcacactggcctgagcgtgacagtgatgcgacatcacagaaggg

SEQ ID NO: 479766 - DNA, 75 bp, synthetic construct
  source 1..75: mol_type = other DNA
cgcccagcaaacgctgttgcagtatcagcaactgcgccacaccatcgatcagcaagggccgtcgctctctggcga

SEQ ID NO: 479767 - DNA, 75 bp, synthetic construct
  source 1..75: mol_type = other DNA
cgatgctggagaatctggcagtagtgctgattgcccccgcgctaccctgcccggtgcgtaaccaagtttcggcag

SEQ ID NO: 479768 - DNA, 75 bp, synthetic construct
  source 1..75: mol_type = other DNA
aaaaggtggtcactggcgaagcggatctggcgattgccgggaagccggagactctgcctggtgcggtggcgtttt

SEQ ID NO: 479769 - DNA, 75 bp, synthetic construct
  source 1..75: mol_type = other DNA
agtcgatgatgaccgccactatcgtggatgacatgaccgacacgccaagcgacaaaaaccgggaatgcaaagctc

SEQ ID NO: 479770 - DNA, 75 bp, synthetic construct
  source 1..75: mol_type = other DNA
ttctgtattcccttggttatggccttccttggtggccgcccggcaatgatatcgtccgctacaggcgcgatggca

SEQ ID NO: 479771 - DNA, 75 bp, synthetic construct
  source 1..75: mol_type = other DNA
ttggatttacgcgatctgaaaaccttcctgaatctggcggaaagccgccattttggccgtagcgcgcgagcaatg

SEQ ID NO: 479772 - DNA, 75 bp, synthetic construct
  source 1..75: mol_type = other DNA
aaggcgaggctggcgataatattggtcgtggtgaccgtaccacgctttatctggttgatgaggctgcattccttc

SEQ ID NO: 479773 - DNA, 75 bp, synthetic construct
  source 1..75: mol_type = other DNA
caaggatatttatccatttattattaatggtgactttatttcattgaaagaaaacctcactgagatacaaagaat

SEQ ID NO: 479774 - DNA, 75 bp, synthetic construct
  source 1..75: mol_type = other DNA
cttttaaaaaagacaaaccattgccctaaaatagtttcagaacaatggtttcttgatttcgaacaaattatcaat

SEQ ID NO: 479775 - DNA, 75 bp, synthetic construct
  source 1..75: mol_type = other DNA
gataaggcaaaccaatgggaagcgataactacctctgattggtttcgcgaatttgaggaagagctttatacatta

SEQ ID NO: 479776 - DNA, 75 bp, synthetic construct
  source 1..75: mol_type = other DNA
atggcggaagttacccaattgaagcgttatgacgcgcgcccgattaactggggcaaatggtttctgattggcacc

SEQ ID NO: 479777 - DNA, 75 bp, synthetic construct
  source 1..75: mol_type = other DNA
cattggccagggtattttaatcactcactcgatgggcggcactattggctggagaacccccttttataccgacaa

SEQ ID NO: 479778 - DNA, 75 bp, synthetic construct
  source 1..75: mol_type = other DNA
aagtgcattttgacataccaactctaatgtttacccccgtattctatcgaaactcagatggtcaatgggtagaca

SEQ ID NO: 479779 - DNA, 75 bp, synthetic construct
  source 1..75: mol_type = other DNA
gctcttccggcaaagggcagacgtttattcgttccgccgagcagcttacacatgcgtgggaatacgctcagcaag

SEQ ID NO: 479780 - DNA, 75 bp, synthetic construct
  source 1..75: mol_type = other DNA
gctggcgaccgctgagagtgttgatgaagcgattgagcgcgcgaagcacgccgccggacaggtaaaagtacaggg

SEQ ID NO: 479781 - DNA, 75 bp, synthetic construct
  source 1..75: mol_type = other DNA
tcgctatgccgacgcgccagccatgcatgtcacgcatcgttctcatgtcatcaatatgctggatggcgatgcgtt

SEQ ID NO: 479782 - DNA, 75 bp, synthetic construct
  source 1..75: mol_type = other DNA
cgttaagccaggcgacatcctgcgtgtgaaagtcgaacatgccgacgagtatgatttgtggggaagtcgggttta

SEQ ID NO: 479783 - DNA, 75 bp, synthetic construct
  source 1..75: mol_type = other DNA
atgaaaaaaattatcgcattgatgttgtttttgacattctttgcccacgcgaacgactccgagcctggcagtcag

SEQ ID NO: 479784 - DNA, 75 bp, synthetic construct
  source 1..75: mol_type = other DNA
ggttgtcgctgatgatgttgtcgctggtggcgatgtgcttgatgctgatgacgtgattgaggtcgccaaacttat

SEQ ID NO: 479785 - DNA, 75 bp, synthetic construct
  source 1..75: mol_type = other DNA
cgtttgccgtatcgccggtggttgccggtctggtctatctgctgttttacggctcgaatggcccgctgggcggtt

SEQ ID NO: 479786 - DNA, 75 bp, synthetic construct
  source 1..75: mol_type = other DNA
tgcgtaaaacaggaaaaggattaaaagttgggctgctatatctgctgctcctggcactgatgatgaccgtgggac

SEQ ID NO: 479787 - DNA, 75 bp, synthetic construct
  source 1..75: mol_type = other DNA
attctgtatctgctgctactggcaggtatcaccgtgttttctttgtggctggcaaataccggtattcgccatgca

SEQ ID NO: 479788 - DNA, 75 bp, synthetic construct
  source 1..75: mol_type = other DNA
aagcaatgggaaaagctacatccatagaacttgctgcgcgacttgatatcagccgtgaagaagtgctgaacgaac

SEQ ID NO: 479789 - DNA, 75 bp, synthetic construct
  source 1..75: mol_type = other DNA
ttgctggatgattatctgcatgtggtggataccgcgctgtggttgtcgggcggcaaagcctctctggatggcggt

SEQ ID NO: 479790 - DNA, 75 bp, synthetic construct
  source 1..75: mol_type = other DNA
ctacagcaatcccacgccggagctgctgaccatggcaatccaggcggggataaaaacatccggatttgcggccta

SEQ ID NO: 479791 - DNA, 75 bp, synthetic construct
  source 1..75: mol_type = other DNA
aaaccattgaaatgaatctgctgatgaagatcctggagaaaagccttgagaagatgacgcccgatcagctaaaga

SEQ ID NO: 479792 - DNA, 75 bp, synthetic construct
  source 1..75: mol_type = other DNA
cggtctggtgtatctgctgttctacggctctaacggcccgctcggcggctggctggatgaacataatctgcaaat

SEQ ID NO: 479793 - DNA, 75 bp, synthetic construct
  source 1..75: mol_type = other DNA
gggatgctggtatcggcgttcatcctgctggtgccgatgatttatatcttcgtacaggcgttcagcaaagggctg

SEQ ID NO: 479794 - DNA, 75 bp, synthetic construct
  source 1..75: mol_type = other DNA
gggcctggtttatctgctgttctacggctccaacggtccgctgggcggttggctcgacgagcataatctgcaaat

SEQ ID NO: 479795 - DNA, 75 bp, synthetic construct
  source 1..75: mol_type = other DNA
gttatgacgcgcgcccgattaactggggcaaatggtttctgattggcatcgggatgctggtttcggcgttcatcc

SEQ ID NO: 479796 - DNA, 75 bp, synthetic construct
  source 1..75: mol_type = other DNA
ctggtcaccatcttcgtgacgtgtccgtttgtggtgcgcgagctggtgccggtaatgttaagtcagggcagccag

SEQ ID NO: 479797 - DNA, 75 bp, synthetic construct
  source 1..75: mol_type = other DNA
gcgcgtctggctggcagatgtttcgccgcgttacgttgccgaacatccgctgggcgctgctgtatggtgtggtgc

SEQ ID NO: 479798 - DNA, 75 bp, synthetic construct
  source 1..75: mol_type = other DNA
tggctgtacggtcgctcgctgcgattcctcagccgctggggcggtgatgaacccgcgacgcagatcgtcctgctg

SEQ ID NO: 479799 - DNA, 75 bp, synthetic construct
  source 1..75: mol_type = other DNA
tcgcttccgtctggcggcattgcgttctgaacgtgctgaactgtaccacctgcgcgccacgcgggagatcagcaa

SEQ ID NO: 479800 - DNA, 75 bp, synthetic construct
  source 1..75: mol_type = other DNA
gtggccgacgtttggtttgcatgtggagtttgatcctgaactctttttagtcttgtttatcccgccgttgctgtt

SEQ ID NO: 479801 - DNA, 75 bp, synthetic construct
  source 1..75: mol_type = other DNA
aggagcgaatcgcgcgcgcggcaaccgctgaagtggcgattgtggcgatccagaaaatggaggagcgtctggcgg

SEQ ID NO: 479802 - DNA, 75 bp, synthetic construct
  source 1..75: mol_type = other DNA
tgtttgtcggcgtggtgatgttgcctattctgctacaacacattgaagtcgcggaccattcgcaacaattgaaag

SEQ ID NO: 479803 - DNA, 75 bp, synthetic construct
  source 1..75: mol_type = other DNA
ttcctgctgccattcgcttcttatctgattgccgaacatattggcgtttccggtattcttgctgcggttgccgcc

SEQ ID NO: 479804 - DNA, 75 bp, synthetic construct
  source 1..75: mol_type = other DNA
tgcaaggtaaaccaacgtcgctgccgtttgagaaaaccgagtgcggtatgtattacctgccgtatgcgacctctc

SEQ ID NO: 479805 - DNA, 75 bp, synthetic construct
  source 1..75: mol_type = other DNA
tccgcaattactatcgtttcggttgggtcattccttatctgtttggcgcgtctccggcgatttgttcttctttcc

SEQ ID NO: 479806 - DNA, 75 bp, synthetic construct
  source 1..75: mol_type = other DNA
cggtcatcctgaagcattaggttccgcactgacgcataaatggatcaccaccgattttgccgaagcgttgctgga

SEQ ID NO: 479807 - DNA, 75 bp, synthetic construct
  source 1..75: mol_type = other DNA
tgctgagcgcgaagtggcatcactgaccgaagattcgctgattgagatgatggtgggtcgcaagctggaagatca

SEQ ID NO: 479808 - DNA, 75 bp, synthetic construct
  source 1..75: mol_type = other DNA
caatgattccctctgatgagtcttctacgggttacaaatgcactttttgtcagaatgaagatagtgatgatattg

SEQ ID NO: 479809 - DNA, 75 bp, synthetic construct
  source 1..75: mol_type = other DNA
taggctctctgaagccaagaaagaagttgaagaaagagaggctgaagctttttatggggttaggcctaaatttta

SEQ ID NO: 479810 - DNA, 75 bp, synthetic construct
  source 1..75: mol_type = other DNA
aatttatgaaagtagccattggcggtattctcgccggttttgtggtgagctggctgtacggtcgctcgctgcgat

SEQ ID NO: 479811 - DNA, 75 bp, synthetic construct
  source 1..75: mol_type = other DNA
tgtcgggcagatcccggtgtactacagccatctgaacaccggtcgtccgtataatgccgacaagccgaacaaata

SEQ ID NO: 479812 - DNA, 75 bp, synthetic construct
  source 1..75: mol_type = other DNA
acgccagccacctccgactcctggctgctgaaagatgttctgcgcgaccaatggggctttaaaggcatcaccgtt

SEQ ID NO: 479813 - DNA, 75 bp, synthetic construct
  source 1..75: mol_type = other DNA
tgatgtggtggtggctgtggtcggtgaagctcaggggatggcgcacgaggcctccagccgtaccgatattactat

SEQ ID NO: 479814 - DNA, 75 bp, synthetic construct
  source 1..75: mol_type = other DNA
caaagtgactgccagcgtacaggtgacgaacaccggcaaacgcgaaggggcgacggtggttcagatgtatttgca

SEQ ID NO: 479815 - DNA, 75 bp, synthetic construct
  source 1..75: mol_type = other DNA
ggggctggacgcaggcagcggtgcggtgatggtggcgctgaactcgctgaacggcacgccagccacctccgactc

SEQ ID NO: 479816 - DNA, 75 bp, synthetic construct
  source 1..75: mol_type = other DNA
cgtctctgatgtgaaactttctgcgccgaccatgaagcgtgacggcaaagtgaccgccagcgtgcaggtgacgaa

SEQ ID NO: 479817 - DNA, 75 bp, synthetic construct
  source 1..75: mol_type = other DNA
gcttcttcgaaatgctgggtgagtacattctggcgggcttcaaagtagccattatcgttgcagcaatgctaatcg

SEQ ID NO: 479818 - DNA, 75 bp, synthetic construct
  source 1..75: mol_type = other DNA
accgtttctatgtccatcgttggtgcatacatgaccatgctggagccgaaatatgtcgttgcggcgctggtactg

SEQ ID NO: 479819 - DNA, 75 bp, synthetic construct
  source 1..75: mol_type = other DNA
tggcacttgccgttgttgcgattctcgcactgctggtaagcagcgaccgcaaaaaaattcgtatccgttatgtta

SEQ ID NO: 479820 - DNA, 75 bp, synthetic construct
  source 1..75: mol_type = other DNA
gagcatgagtgacgagtattactcgaagtatctgcctggtttgatcaaatccggcaaagtgacgatggaagaact

SEQ ID NO: 479821 - DNA, 75 bp, synthetic construct
  source 1..75: mol_type = other DNA
ctggcgtcctcttttaacctcgatgcagtgaaaaccgtggggcgcgtttcagcttatgaagcggcagacgatggc

SEQ ID NO: 479822 - DNA, 75 bp, synthetic construct
  source 1..75: mol_type = other DNA
tttctcgcttcggtctgaaactggtttacggctctaccctggtgagtgtgctgtctgcgtcaatcgcagcactgg

SEQ ID NO: 479823 - DNA, 75 bp, synthetic construct
  source 1..75: mol_type = other DNA
agatgaacagcaggtgcgattcctcgacctgtttatggtctggtgtgcgctggctgatgcaccggaaatgagcag

SEQ ID NO: 479824 - DNA, 75 bp, synthetic construct
  source 1..75: mol_type = other DNA
gatggtgatcaccgcaatgtacacactgaactacaaccgactgcataaaaacccctatcctttagatgcaccaat

SEQ ID NO: 479825 - DNA, 75 bp, synthetic construct
  source 1..75: mol_type = other DNA
ggccacggtcactttggtaaagcacgcccggcatatctggcagttactaccattgccttcctctactgcatctgg

SEQ ID NO: 479826 - DNA, 75 bp, synthetic construct
  source 1..75: mol_type = other DNA
ctactggctggcctgctggatcggcaatatcgccatggtggtcattggcgtaggatatttaagttacttcttccc

SEQ ID NO: 479827 - DNA, 75 bp, synthetic construct
  source 1..75: mol_type = other DNA
ttaaactaaatcgttcgttaccaagaaaaggtatctggaaaataggtgattatcaggggatttattattacggta

SEQ ID NO: 479828 - DNA, 75 bp, synthetic construct
  source 1..75: mol_type = other DNA
cgtatcaggaaacgtccgggaagaattgacagagttatttctattggtgctttcaggactaaagatgctgctagt

SEQ ID NO: 479829 - DNA, 75 bp, synthetic construct
  source 1..75: mol_type = other DNA
caccgccatgtatgcgctgaattacaaccggctgcataaaaacccgtatcccttagatgcaccaataagcaaaga

SEQ ID NO: 479830 - DNA, 75 bp, synthetic construct
  source 1..75: mol_type = other DNA
taacgcggaggcgaaacgtaaatcgaccttcccgtcttcgctgcccgctgatgctcagccatttgaactactggt

SEQ ID NO: 479831 - DNA, 75 bp, synthetic construct
  source 1..75: mol_type = other DNA
actacaaagcgcgggcgcagaagttctttgatgaactggacgccttctttaccgagctggagaaatcggaccgta

SEQ ID NO: 479832 - DNA, 75 bp, synthetic construct
  source 1..75: mol_type = other DNA
gcgaacttgttgatgccgcgattgaacttgctggcgatttttattccatgttgggttacgagcatcgacctggtt

SEQ ID NO: 479833 - DNA, 75 bp, synthetic construct
  source 1..75: mol_type = other DNA
cgtcgccattctggtgtggttgaacgtacttaccctggcgggtccaagtttctccctctggccagccggtcaacc

SEQ ID NO: 479834 - DNA, 75 bp, synthetic construct
  source 1..75: mol_type = other DNA
aacggtcaattcggcggcttcctgaaagaagtgcgcgaaaatggcggtatgcagacagaattgatggatcaaacg

SEQ ID NO: 479835 - DNA, 75 bp, synthetic construct
  source 1..75: mol_type = other DNA
atgactcaatttacccaaaacaccgctatgccttcttccctctggcaatactggcgcggcctttctggctggaac

SEQ ID NO: 479836 - DNA, 75 bp, synthetic construct
  source 1..75: mol_type = other DNA
aaattttctgaactggagaacgattttaatcagtttttttctgatattgattactatacgcgttatggtcagtct

SEQ ID NO: 479837 - DNA, 75 bp, synthetic construct
  source 1..75: mol_type = other DNA
ccgacgttcggggagtcctgcgcaccgtgggtgtttgacctggtggcggccctgtttggctcctacgatgcgcag

SEQ ID NO: 479838 - DNA, 75 bp, synthetic construct
  source 1..75: mol_type = other DNA
atcctcttgctatcgcagcaattcgtaatttattgatcaaaaacgatattgaaatcttagcagagttgactgaag

SEQ ID NO: 479839 - DNA, 75 bp, synthetic construct
  source 1..75: mol_type = other DNA
cggcaggcggcgggttacacgattctggccccgactgtggaggtggcggccaacgccttcaaccctgcccgggat

SEQ ID NO: 479840 - DNA, 75 bp, synthetic construct
  source 1..75: mol_type = other DNA
gaatttaccccgcttgtggctcgcatacagcttatgcaaaaagacctacgccacggcctgaaaatgtctattgag

SEQ ID NO: 479841 - DNA, 75 bp, synthetic construct
  source 1..75: mol_type = other DNA
attggctcaagtgataagtgctttcaggataataaaaattatgttggtgatgttggttacagcattacgcgcggg

SEQ ID NO: 479842 - DNA, 75 bp, synthetic construct
  source 1..75: mol_type = other DNA
aacacttaagcctgatatcgtcatcattgatgtcgatatccctggagttaacggtatccaggtgttagaaacgct

SEQ ID NO: 479843 - DNA, 75 bp, synthetic construct
  source 1..75: mol_type = other DNA
atactgaattaatttttggtgcaatatctgaaaaaacagaaataaagagtaaaaaacttaaaagaagatgtaatg

SEQ ID NO: 479844 - DNA, 75 bp, synthetic construct
  source 1..75: mol_type = other DNA
attgaggacattggcgaagacttcggtgtcgacagcccggaatataaagcagcgcaggttttcttcagccagtca

SEQ ID NO: 479845 - DNA, 75 bp, synthetic construct
  source 1..75: mol_type = other DNA
ggaagcagatgaagatatagaaaaaagggaagagctttataaacagaatggggcgcaacctgactattttagtta

SEQ ID NO: 479846 - DNA, 75 bp, synthetic construct
  source 1..75: mol_type = other DNA
tgaataatgataatacagttggtaaactgtatacccagacaaacccgccaaatcagataatacctgttaaagaat

SEQ ID NO: 479847 - DNA, 75 bp, synthetic construct
  source 1..75: mol_type = other DNA
tcacggcttgtcatcgagattacagagggcattcaggacgcctctctcgcatcgagatgggaggctctgaccgaa

SEQ ID NO: 479848 - DNA, 75 bp, synthetic construct
  source 1..75: mol_type = other DNA
gacagtcctgtaaaagcaataactcaatttacaaaggtaaatatattgtattgggatgaaatgttaaagcaactt

SEQ ID NO: 479849 - DNA, 75 bp, synthetic construct
  source 1..75: mol_type = other DNA
ggcgcttcgccacggcgataacccactgaatggttattccatttgcgcattcccagacgccgcagacaaacaaac

SEQ ID NO: 479850 - DNA, 75 bp, synthetic construct
  source 1..75: mol_type = other DNA
cgagggctggaaagcgccctcagccagccactggcgcggattctggaacaggtgcaactggccctggataacgcc

SEQ ID NO: 479851 - DNA, 75 bp, synthetic construct
  source 1..75: mol_type = other DNA
tataccgatgatggcattaaaactttttactggggatatagactgcgcataggaagcattttaggaatgatatct

SEQ ID NO: 479852 - DNA, 75 bp, synthetic construct
  source 1..75: mol_type = other DNA
taaggaaaacaccgggcacggtactgcgcgatcagaataagagcgtggtgtatacgcccccggtgggtgaagata

SEQ ID NO: 479853 - DNA, 75 bp, synthetic construct
  source 1..75: mol_type = other DNA
cggatgttgtcgccagcctcaacgctgacagcgaatatgcagcaatctttgttcctggtggtcatggcgcactta

SEQ ID NO: 479854 - DNA, 75 bp, synthetic construct
  source 1..75: mol_type = other DNA
ttgttccgcaatccgaagaaactcgcggatgttgtcgccagcctcaacgctgacagcgaatatgcagcaatcttt

SEQ ID NO: 479855 - DNA, 75 bp, synthetic construct
  source 1..75: mol_type = other DNA
tttgaaccaggaatgacggtctccctcgttgcccggcaacatggtgtagcagccagttacttctctggcgcaagc

SEQ ID NO: 479856 - DNA, 75 bp, synthetic construct
  source 1..75: mol_type = other DNA
gttacagaattatgtgcagaccaacctctataacctgctttataccagcgccacgaaagttccccagactgaagc

SEQ ID NO: 479857 - DNA, 75 bp, synthetic construct
  source 1..75: mol_type = other DNA
aaaattaaagtggatgtttgaaaataagttaaaaatcctagcagaattctcagagcaatcattttatagagattt

SEQ ID NO: 479858 - DNA, 75 bp, synthetic construct
  source 1..75: mol_type = other DNA
agagtcgcgcaatatgagccgtagcgaactgatcgaagagattttgatgcagcagttggcggcactgcgtagtca

SEQ ID NO: 479859 - DNA, 75 bp, synthetic construct
  source 1..75: mol_type = other DNA
aaagatcgcaattgttcagcagagctttgaaccggggatgacggtctctctcgttgcccggcaacatggtgtagc

SEQ ID NO: 479860 - DNA, 75 bp, synthetic construct
  source 1..75: mol_type = other DNA
aaagatcgctattgttcagcagagttttgaaccgggaatgacggtctcccttgttgcccggcaacatggtgtagc

SEQ ID NO: 479861 - DNA, 75 bp, synthetic construct
  source 1..75: mol_type = other DNA
gatttagacccattggtgaaaatggctattgcgcactatcagtttgagtgtatccacccttttccggatgggaat

SEQ ID NO: 479862 - DNA, 75 bp, synthetic construct
  source 1..75: mol_type = other DNA
gtgcgtgccggtgtgtatgttggtgatacatcaaaacgtattcgggagatgatctggcagcaaattacccaactg

SEQ ID NO: 479863 - DNA, 75 bp, synthetic construct
  source 1..75: mol_type = other DNA
catagagtggtgcatgaatagagcaatgttttgcgaggcttatataagcagaaatcaggacggtcagaaactgta

SEQ ID NO: 479864 - DNA, 75 bp, synthetic construct
  source 1..75: mol_type = other DNA
gtacgtgcaggggtgtatgtaggtgttgtatccgcaagaatccgtgaaatgatctgggaacaaatatctggactg

SEQ ID NO: 479865 - DNA, 75 bp, synthetic construct
  source 1..75: mol_type = other DNA
ctgaatgatgtgcatgaggcggtgaccaccgtcagcgaacatgtgcagaccaacctgaccaagcaagacgagcgc

SEQ ID NO: 479866 - DNA, 75 bp, synthetic construct
  source 1..75: mol_type = other DNA
gttcgcgcaggtgtatatgtcggagatacgtcaaaacgtattcgggagatgatctggcagcaaatcactcaactg

SEQ ID NO: 479867 - DNA, 75 bp, synthetic construct
  source 1..75: mol_type = other DNA
gctggttgcggaaatgtggtgatggcctgggcgaccaataccgagtcgggttttgaatttcagacctggggagaa

SEQ ID NO: 479868 - DNA, 75 bp, synthetic construct
  source 1..75: mol_type = other DNA
gttagcagcattaggcacagaatcatgcattaacgatgatcctactgtctctatcaccaaaatggaaagcggtaa

SEQ ID NO: 479869 - DNA, 75 bp, synthetic construct
  source 1..75: mol_type = other DNA
tgatattgccgagcaaaaaagtattcggcaaaaattcaacgatcaaataaaggcagctacgaatagtgagattga

SEQ ID NO: 479870 - DNA, 75 bp, synthetic construct
  source 1..75: mol_type = other DNA
actctcactgccgattctgtatctgtcgcgttacattctcgaaaatcgcacggcttattacacccatctgcgcag

SEQ ID NO: 479871 - DNA, 75 bp, synthetic construct
  source 1..75: mol_type = other DNA
gacattatccgccgttataaagcggaatacgtggtgatcctggcgggcgaccatatctacaagcaagactactcg

SEQ ID NO: 479872 - DNA, 75 bp, synthetic construct
  source 1..75: mol_type = other DNA
gaatatatgcaggaaaaccgctgggatgaggagtcagcttcctttgtaccggtcgaaccagaatccgatccgatg

SEQ ID NO: 479873 - DNA, 75 bp, synthetic construct
  source 1..75: mol_type = other DNA
atgaaaagaaaaattgaagaaccaaaaacgacccttaataaacatggggaaaaaattcaaacacatccagcgttc

SEQ ID NO: 479874 - DNA, 75 bp, synthetic construct
  source 1..75: mol_type = other DNA
agaagaagataaaggtttaacattattagaaattgccggcgcaatgattatcatcgcaatagttgtcgcgctcgc

SEQ ID NO: 479875 - DNA, 75 bp, synthetic construct
  source 1..75: mol_type = other DNA
cgagcgcatcgcgattgtgcttggcaccagcacctccggcctgcatgaaggcgacacgcacgttaacctgcacac

SEQ ID NO: 479876 - DNA, 75 bp, synthetic construct
  source 1..75: mol_type = other DNA
gtggtattgtcgtcatggttacgcatgaccttgagctcatatcccctaacatgacagttttaaaaattaattcat

SEQ ID NO: 479877 - DNA, 75 bp, synthetic construct
  source 1..75: mol_type = other DNA
aaagaccgctacggacgcattatcggtcatgtgttcacgacgaacggcacggatgccagccgctttatggttcag

SEQ ID NO: 479878 - DNA, 75 bp, synthetic construct
  source 1..75: mol_type = other DNA
taaaaagtaaaaagattcgtgcgcgcagtgcactgcgtctattggatgttgcaggcttgagccagcttctggtgc

SEQ ID NO: 479879 - DNA, 75 bp, synthetic construct
  source 1..75: mol_type = other DNA
gcaagctcgggtttaacgttgatatccagctcgaagaggggatcgttgggcttacgctaaatcttgcccagcgcg

SEQ ID NO: 479880 - DNA, 75 bp, synthetic construct
  source 1..75: mol_type = other DNA
tatattaaaacgctggatattctgctccacagccaggattttgacgcgctgatggttattcattcgcccagcgcc

SEQ ID NO: 479881 - DNA, 75 bp, synthetic construct
  source 1..75: mol_type = other DNA
ttatatggtcggcccaaatggtccggttaatctgcaaatcatcgttaaccaactgtacgcagacgtttcccaggg

SEQ ID NO: 479882 - DNA, 75 bp, synthetic construct
  source 1..75: mol_type = other DNA
cagtgtgctgaccgataccatcgctgatatgtctcaggacaccagcattcacgaatttatcaagcagaacgcgcg

SEQ ID NO: 479883 - DNA, 75 bp, synthetic construct
  source 1..75: mol_type = other DNA
cagcgtgctgaccgacaccatcgctgacatgtctcaggacaccagcatccacgaattcattaagcagaacgcacg

SEQ ID NO: 479884 - DNA, 75 bp, synthetic construct
  source 1..75: mol_type = other DNA
ttccgatccgagtccgattgataaacatcgatgcccctgaaaagaaacaaccttttggacgctggtcaactagtc

SEQ ID NO: 479885 - DNA, 75 bp, synthetic construct
  source 1..75: mol_type = other DNA
ttttggacgctggtcaagaaatcaacttaaagccttgctcgccggacaatccgttaccgtctcttatacgcaaac

SEQ ID NO: 479886 - DNA, 75 bp, synthetic construct
  source 1..75: mol_type = other DNA
accttttggacgctggtcaacaaatcaacttaaaaccctgctcgtaggccaatccgttaccgtctcttatacgca

SEQ ID NO: 479887 - DNA, 75 bp, synthetic construct
  source 1..75: mol_type = other DNA
tccggttttcgggccgcttatcatgcttggtgaaggcggtgtggagtggcgtcctgaagatcaagccgtcgtggc

SEQ ID NO: 479888 - DNA, 75 bp, synthetic construct
  source 1..75: mol_type = other DNA
tttttggcagcaaaacaaaacttgccaatgccgcaggagtgaaactggcaagtgttgctgcatggggggaactgg

SEQ ID NO: 479889 - DNA, 75 bp, synthetic construct
  source 1..75: mol_type = other DNA
tttttggttcaaagacagccacagccaaggtgctgggtatatcacaagtggcggttactcgttggggggcaacag

SEQ ID NO: 479890 - DNA, 75 bp, synthetic construct
  source 1..75: mol_type = other DNA
tagtacctgaaggtcgcgcgatgcgcctgcaagaggcatccggcggggaacttcagtacgaccccaaagtttatg

SEQ ID NO: 479891 - DNA, 75 bp, synthetic construct
  source 1..75: mol_type = other DNA
gccaacattgagctggtgctcgataaggctgtgcaaaacggtctctttgcgccgggtaaatggactggtggcccg

SEQ ID NO: 479892 - DNA, 75 bp, synthetic construct
  source 1..75: mol_type = other DNA
ttcctgaaggtcgcgcgatgcgtctacaggaggcatctggcggggagcttcagtatgatcccaaagtttatgacg

SEQ ID NO: 479893 - DNA, 75 bp, synthetic construct
  source 1..75: mol_type = other DNA
atgcttaaagttgacgcaattactttttttggcagcaaaacaaagcttgccaatgccgcaggagtgaaactaagt

SEQ ID NO: 479894 - DNA, 75 bp, synthetic construct
  source 1..75: mol_type = other DNA
gcgctattaatcaggcgctgaccgatgcgcagcttacgccggatgacgtcggctatatcaacctgcacggcaccg

SEQ ID NO: 479895 - DNA, 75 bp, synthetic construct
  source 1..75: mol_type = other DNA
cctgaagatcaagccgtcgtcgcactgccgccgctgaacatgaacctggcccgctatctggttattcaggggatc

SEQ ID NO: 479896 - DNA, 75 bp, synthetic construct
  source 1..75: mol_type = other DNA
cagtgcactgcgtccactcgacgtcgcgggcttaagccagttactggtgcaggtttccaacctgattgtcgattg

SEQ ID NO: 479897 - DNA, 75 bp, synthetic construct
  source 1..75: mol_type = other DNA
atgttctcaggaaccacactcaacggagaatatggtgaatggcaagacttacacgcgccattcgctcctttctgc

SEQ ID NO: 479898 - DNA, 75 bp, synthetic construct
  source 1..75: mol_type = other DNA
ggcagaaaacgttgatgaccagcttcaggtcgatcgcgaagcgcggaaaggtgtgccaattcaggttgccgggaa

SEQ ID NO: 479899 - DNA, 75 bp, synthetic construct
  source 1..75: mol_type = other DNA
agaagctcgcaaagcaccgttaatccaggtggcctgtaagctggctggcgcagttcattatgccgatgtgcagat

SEQ ID NO: 479900 - DNA, 75 bp, synthetic construct
  source 1..75: mol_type = other DNA
gtttgatcaggattcatctgttgaaaatgggttagttcaatcattatatgaagagtatttaaaagtaaaagatga

SEQ ID NO: 479901 - DNA, 75 bp, synthetic construct
  source 1..75: mol_type = other DNA
cccggaatccgagccgtactggcgtgacgtgggtacgctggaagcctactggaaggcgaacctcgatctggcttc

SEQ ID NO: 479902 - DNA, 75 bp, synthetic construct
  source 1..75: mol_type = other DNA
atggttagtttagagaagaacgatcacttaatgttggcgcgccaactgccattgaaatctgttgccctgatactg

SEQ ID NO: 479903 - DNA, 75 bp, synthetic construct
  source 1..75: mol_type = other DNA
tttagtgaagatggcctctatgctgtgcgcgttgagaatgggggtattacctacacagcgttaattcctgatgat

SEQ ID NO: 479904 - DNA, 75 bp, synthetic construct
  source 1..75: mol_type = other DNA
atggttaaatttccaggtgaagttatgagttcgtccgctgctgtaaccgttataactggtgttcttgtttttgtt

SEQ ID NO: 479905 - DNA, 75 bp, synthetic construct
  source 1..75: mol_type = other DNA
atgagaggaacaacgcacgatatgaaaaatatttcaaaaatagcacgcaattaaatgagtctgtatatagtgtaa

SEQ ID NO: 479906 - DNA, 75 bp, synthetic construct
  source 1..75: mol_type = other DNA
gcgcggctgatgcgccgcatattgttccgtctgattccgttgagcgccagacggcagaacggttgattaacgcct

SEQ ID NO: 479907 - DNA, 75 bp, synthetic construct
  source 1..75: mol_type = other DNA
aaactgggggccgttaatgcgggaggtcgagtcctgggttgtcagtggtattgcttctgctgtggctcttgctat

SEQ ID NO: 479908 - DNA, 75 bp, synthetic construct
  source 1..75: mol_type = other DNA
ggcatgctgtggcgaaggacagctggacaggggctggtccagtgaatgtagggctggttaataacgccatcaaaa

SEQ ID NO: 479909 - DNA, 75 bp, synthetic construct
  source 1..75: mol_type = other DNA
gccgctgggcgaagacgctgacctcttccgaaggtggaagcgtggaaaccattgtgcaagctgttaatgcctgcc

SEQ ID NO: 479910 - DNA, 75 bp, synthetic construct
  source 1..75: mol_type = other DNA
gtccggctggtcttttttcgctcacaccggaaggtgacttacgcgttgattatcacggctgcctggagtgtggca

SEQ ID NO: 479911 - DNA, 75 bp, synthetic construct
  source 1..75: mol_type = other DNA
tatcgcagttgcctggagtgtggcacctgccgtttgctgtgcgacgaatcaacactacaacagtggcgctatcca

SEQ ID NO: 479912 - DNA, 75 bp, synthetic construct
  source 1..75: mol_type = other DNA
cgatgcccaaatgctgcttggtttgatttacgccaacggcgtgggcattaaggccgacgatgacaaagcaacctg

SEQ ID NO: 479913 - DNA, 75 bp, synthetic construct
  source 1..75: mol_type = other DNA
ggttgcagttttggttttgggcgcagccatattgcgccagccattaccgaacttatgcgcaattatcctgagtta

SEQ ID NO: 479914 - DNA, 75 bp, synthetic construct
  source 1..75: mol_type = other DNA
tcaacccgttctcgccgattggtgtagatgaacaacaggtgcgattcctcgacctgtttatggtctggtgtgcgc

SEQ ID NO: 479915 - DNA, 75 bp, synthetic construct
  source 1..75: mol_type = other DNA
atgagcgagatctaccgacaattcgaagagtggtggtcaaaacacaaaagcccgttcacggaagacgatgagcta

SEQ ID NO: 479916 - DNA, 75 bp, synthetic construct
  source 1..75: mol_type = other DNA
gttcttccggtaaagggcagacgtttattcgttctgcagagcaacttgctcatgcatgggagtacgctcagcaag

SEQ ID NO: 479917 - DNA, 75 bp, synthetic construct
  source 1..75: mol_type = other DNA
gccgttgttcgaccgtgaagttgaaggttttggtgaagtgttccggatgttgtcgtttgaagagattggcacttc

SEQ ID NO: 479918 - DNA, 75 bp, synthetic construct
  source 1..75: mol_type = other DNA
gtggcgctgactgaaagtggccaacgttgttacgaacatgcgctggaaatcctcacccaatatcagcgactggtc

SEQ ID NO: 479919 - DNA, 75 bp, synthetic construct
  source 1..75: mol_type = other DNA
ccctgatgctcaatcggatccctcctcatgatgcctgttcccgcaccatgagcgcgcttattcagctactctccc

SEQ ID NO: 479920 - DNA, 75 bp, synthetic construct
  source 1..75: mol_type = other DNA
gtgtctacttatgagaatatacttcgcataacggatactctgatccagcaacgcggatttttggggttcagttac

SEQ ID NO: 479921 - DNA, 75 bp, synthetic construct
  source 1..75: mol_type = other DNA
gcgccgggcaaagcgacgctggcatggcgttctccgcccagtatgccgatttcaacttctgtttcggcaaaggcg

SEQ ID NO: 479922 - DNA, 75 bp, synthetic construct
  source 1..75: mol_type = other DNA
atatatacagaaagaagtttgggattatcttgagaatgttagaggaaatagctctcaaagtagagtcctatcact

SEQ ID NO: 479923 - DNA, 75 bp, synthetic construct
  source 1..75: mol_type = other DNA
taggttgagagttaaaaaaattgcacttttttcaatttctgatttgggtaaagatgctcagtcaacgcttgagga

SEQ ID NO: 479924 - DNA, 75 bp, synthetic construct
  source 1..75: mol_type = other DNA
aagatttgatagtttgtgtacctagtaattattccaatacctcgagagggaagtttttcgagaatttttgcgctg

SEQ ID NO: 479925 - DNA, 75 bp, synthetic construct
  source 1..75: mol_type = other DNA
ccgtaaacgacccggcaaacatccgatgctgtttgctggatataaaacgcgtcatatgctgctggcgacctttgc

SEQ ID NO: 479926 - DNA, 75 bp, synthetic construct
  source 1..75: mol_type = other DNA
tctggcaggcgtgggtggcaaaaaaagaggggcagatagtcgggcgcattacggcgcaaatcgataccttgcacc

SEQ ID NO: 479927 - DNA, 75 bp, synthetic construct
  source 1..75: mol_type = other DNA
aaaattgctgtggcgtttgaaagtcagcggtgtgcgaactgcgcgagtaccgctgatgggcgtgcgcgacgagta

SEQ ID NO: 479928 - DNA, 75 bp, synthetic construct
  source 1..75: mol_type = other DNA
atcaggagagtgggttactgattgaagggtttgatacgccgccctgcgcgatgatgccgcacggcaaaccgtggt

SEQ ID NO: 479929 - DNA, 75 bp, synthetic construct
  source 1..75: mol_type = other DNA
acgcgtaccgttgattgtaggtcgtaaccccaataacgaacattatctcgataccaaagccgagaaaatgggtca

SEQ ID NO: 479930 - DNA, 75 bp, synthetic construct
  source 1..75: mol_type = other DNA
aaaaagcccaggacctcagcaaacacctgtatccgatcatgaaagagctgaactcctcatacacgaacaagctgt

SEQ ID NO: 479931 - DNA, 75 bp, synthetic construct
  source 1..75: mol_type = other DNA
gatgatccgcaggtttttgccgctttgtttggcgcagcggaagcatggttgaagttacaaggtgccagtatgatc

SEQ ID NO: 479932 - DNA, 75 bp, synthetic construct
  source 1..75: mol_type = other DNA
agcctggagcgaaaacgcctaattgctgcctatattgatcagcaacttagtccattgaatttacggccaaaagaa

SEQ ID NO: 479933 - DNA, 75 bp, synthetic construct
  source 1..75: mol_type = other DNA
tagcgtcaccaattatgacactcctgacttttacaaatttaggaaaaaagacaacggtgaattagaacctgttag

SEQ ID NO: 479934 - DNA, 75 bp, synthetic construct
  source 1..75: mol_type = other DNA
tgagctggaattcgaggatgttcccgagaccatgctcaacagcctgaccgacaaggtcaaatcgattttcagccg

SEQ ID NO: 479935 - DNA, 75 bp, synthetic construct
  source 1..75: mol_type = other DNA
attcacagacgaggaaatcatcctcctctgctacatgcaggtacagatggagaatgcacaggacatctgcaaacg

SEQ ID NO: 479936 - DNA, 75 bp, synthetic construct
  source 1..75: mol_type = other DNA
atgtcggtctatctgattatcagcctgactatctcgctgctgatgaatatctataaccgccgcatcgcgatcgtt

SEQ ID NO: 479937 - DNA, 75 bp, synthetic construct
  source 1..75: mol_type = other DNA
ctgcctatattgatcagcaacttagtccattgaatttacggccaaaagaaaaacagcaatacgttaaccgtaaaa

SEQ ID NO: 479938 - DNA, 75 bp, synthetic construct
  source 1..75: mol_type = other DNA
tttagtgtggagcctatctctggtggacttcgggaccgtcttggagcaagagggactcaccatctcgcagacagc

SEQ ID NO: 479939 - DNA, 75 bp, synthetic construct
  source 1..75: mol_type = other DNA
aaaaacattccctcagttacgggctgaagaggggggatatcatgcatttaaaataggcatctcaaaggatgtcat

SEQ ID NO: 479940 - DNA, 75 bp, synthetic construct
  source 1..75: mol_type = other DNA
gaagatgctcgttgcaaccaatcatcgacaaactgtcacactggacagcaatttgaaggacgcctgcattcataa

SEQ ID NO: 479941 - DNA, 75 bp, synthetic construct
  source 1..75: mol_type = other DNA
gacacagtctggactgtgttaaaaaaacattccctcagttacgggctgaagaggggggatatcatgcatttaaaa

SEQ ID NO: 479942 - DNA, 75 bp, synthetic construct
  source 1..75: mol_type = other DNA
ttgcttgcaatagcgcatggcaaacgtaaaaataaaatcagcgcgtcgatggttagtttttatgtttccctcgta

SEQ ID NO: 479943 - DNA, 75 bp, synthetic construct
  source 1..75: mol_type = other DNA
ccagcatccgaactaccaggttctgctgatgaaagcgctgctggcgttagcctgccagccacaccgtcagattat

SEQ ID NO: 479944 - DNA, 75 bp, synthetic construct
  source 1..75: mol_type = other DNA
actttgggaaatcaacgcttctggaagcgctggctattttttttgaaacagaaggaatgaaggctgacaagaatg

SEQ ID NO: 479945 - DNA, 75 bp, synthetic construct
  source 1..75: mol_type = other DNA
gaagcaactctcgtttgtgtttcaggacaacttcctttttgccgacacgatagccaataacattcgtctgggcgc

SEQ ID NO: 479946 - DNA, 75 bp, synthetic construct
  source 1..75: mol_type = other DNA
cctgggggcgctcctttttctggcgtggagctgcgtgacattcgcgcgacgcctgacgctattccggcctggccg

SEQ ID NO: 479947 - DNA, 75 bp, synthetic construct
  source 1..75: mol_type = other DNA
ctccagaaatgattataagcaaagacaagtgtcattttaatataacaaaacaatgtttttacgcattacctatat

SEQ ID NO: 479948 - DNA, 75 bp, synthetic construct
  source 1..75: mol_type = other DNA
cgcagcgttataacgccaggatgaaagagacagaggatgtgctcgccgcaatcaaccatcgacagactgaccccg

SEQ ID NO: 479949 - DNA, 75 bp, synthetic construct
  source 1..75: mol_type = other DNA
tacaactctggcttctgaacatctattaaacagccatgggtatttcgaaattgtaaaaacattcaaagcaacaac

SEQ ID NO: 479950 - DNA, 75 bp, synthetic construct
  source 1..75: mol_type = other DNA
tggcaacactatcagcaggcgcagcattgggtgccgggtggaacacaggaagaggtggtggaaaatgaaagacaa

SEQ ID NO: 479951 - DNA, 75 bp, synthetic construct
  source 1..75: mol_type = other DNA
cgaacgccgacgcgaagcgttggccgatctggaagtgcagttggccgcgatgccgaccgcgccggcccagcaagc

SEQ ID NO: 479952 - DNA, 75 bp, synthetic construct
  source 1..75: mol_type = other DNA
cgagcgtcggcgcgaggccctggccagcctcgaaatgcaactggccgccatgccaaccgaaccggcacagcacgc

SEQ ID NO: 479953 - DNA, 75 bp, synthetic construct
  source 1..75: mol_type = other DNA
tcttccaatgccatcgtgcttaccaccattaaagacgggcaatgcctgacatcaacgcgtaaaaatcacgatcgc

SEQ ID NO: 479954 - DNA, 75 bp, synthetic construct
  source 1..75: mol_type = other DNA
agacgatcctgactttgaccactctctcgaccaaaaaatggccattaattgggtagaaagctgggaggtcgtact

SEQ ID NO: 479955 - DNA, 75 bp, synthetic construct
  source 1..75: mol_type = other DNA
ctcaggattacggcattgataaagccatccgcgaaagtcttcctccggggaaaaaactggtcaagtatcatgccg

SEQ ID NO: 479956 - DNA, 75 bp, synthetic construct
  source 1..75: mol_type = other DNA
acgagccaacgttgaaggccgcgaatgtaatatctacgttaacttcgctgttgaaccagggcaaaagttgcatgt

SEQ ID NO: 479957 - DNA, 75 bp, synthetic construct
  source 1..75: mol_type = other DNA
atgcaggctgaaggctgcgaagcctggtacgaaatggaagaactggcagtgatgggcattgttgaagtgctcggt

SEQ ID NO: 479958 - DNA, 75 bp, synthetic construct
  source 1..75: mol_type = other DNA
tgctggggatccctcacgatgctcactgtcttgcgttgctgccgggaagtcgtggtgcggaagtggagatgctta

SEQ ID NO: 479959 - DNA, 75 bp, synthetic construct
  source 1..75: mol_type = other DNA
gaatgggccgtgaggcgatggtcgccagtgatgcggcgctactggcgtcgggtacggcagccctggagtgtatgc

SEQ ID NO: 479960 - DNA, 75 bp, synthetic construct
  source 1..75: mol_type = other DNA
ttttacaagagaatttaaaaaaatacttggagttccgccccagaaatacagaaacagaaattattggaatctgcc

SEQ ID NO: 479961 - DNA, 75 bp, synthetic construct
  source 1..75: mol_type = other DNA
tcgcagaaaaccgtttatcttcagataaagaatacctccgacaaagacatgtccggtctgcaggcgaaagtgact

SEQ ID NO: 479962 - DNA, 75 bp, synthetic construct
  source 1..75: mol_type = other DNA
atgacaaatacaacgtaccgtgccgctttatcggtcataccatggctgatgccatgccattagatccagataaaa

SEQ ID NO: 479963 - DNA, 75 bp, synthetic construct
  source 1..75: mol_type = other DNA
atgacacccgcagagtttagagcatggtttgccaccctgccgccgaattatcagagcgccgcacgcaccatgtac

SEQ ID NO: 479964 - DNA, 75 bp, synthetic construct
  source 1..75: mol_type = other DNA
taaaggttcagacggcgcggtgggaacgccagcgtttaccgaaggttactgggtcgccgatgccaaactggggta

SEQ ID NO: 479965 - DNA, 75 bp, synthetic construct
  source 1..75: mol_type = other DNA
agcaggattatctgatgacggcgattatgggcggagcatcgaatattacccagcccaccagcaatgtggatagct

SEQ ID NO: 479966 - DNA, 75 bp, synthetic construct
  source 1..75: mol_type = other DNA
ctcaactatttacacgttacccagcacaacacgccggacggcggcattccgaccattggtttgccgggttattcc

SEQ ID NO: 479967 - DNA, 75 bp, synthetic construct
  source 1..75: mol_type = other DNA
accagtactgaatacggtaaccagcataaatatcagacccgtgtggtttccagtgcaaacaaggtcaatctgaaa

SEQ ID NO: 479968 - DNA, 75 bp, synthetic construct
  source 1..75: mol_type = other DNA
ggatggctgaaccgtggttatgaaggcgcagcagttggtgcagcgttaggtgccggtatcaccggatataattcc

SEQ ID NO: 479969 - DNA, 75 bp, synthetic construct
  source 1..75: mol_type = other DNA
caaagatgtgagtaataaaattctcaccaaccagaccaacctgacctcgacgttctataccggcgctatcggtca

SEQ ID NO: 479970 - DNA, 75 bp, synthetic construct
  source 1..75: mol_type = other DNA
gtggcacgcatgcccgcgtgggcttcacccggtcaccgggtcgtctgttctcactgggcgtgctggccatcccgg

SEQ ID NO: 479971 - DNA, 75 bp, synthetic construct
  source 1..75: mol_type = other DNA
tttgtcaccctgcaggacggcggagaaaaagcccaggcaggttacagcctgagcatgacgaccggaacggatgaa

SEQ ID NO: 479972 - DNA, 75 bp, synthetic construct
  source 1..75: mol_type = other DNA
tcaaaattgcactggcatcgctggaagcagagccggtggcctggaaggcaaccttcacgcaaattgaccatgaat

SEQ ID NO: 479973 - DNA, 75 bp, synthetic construct
  source 1..75: mol_type = other DNA
tctgtccgtcgcatgagtgatatggggatgtcaacagaagttattaagcaagctcttcagctttctgatgaacag

SEQ ID NO: 479974 - DNA, 75 bp, synthetic construct
  source 1..75: mol_type = other DNA
gcgaagacggcgaactcacctggaaaacccgtggccagacctgggccacgcaggcacaacaacccacggagaaca

SEQ ID NO: 479975 - DNA, 75 bp, synthetic construct
  source 1..75: mol_type = other DNA
ttgcccgcttcctggcccccttccagcgcggggaccgcccgctgcagatggaaacggagaaaatgccggatatcg

SEQ ID NO: 479976 - DNA, 75 bp, synthetic construct
  source 1..75: mol_type = other DNA
tgtttttgtcggtattgatgcgcctgacttcaatattactcttgaaggtaacctcaaaaagcagggtatcaaaac

SEQ ID NO: 479977 - DNA, 75 bp, synthetic construct
  source 1..75: mol_type = other DNA
aagttaacctcaagttccctgaagcccagcctgttcttgaagaccagctggcaaaatcgatcgctaatattctgt

SEQ ID NO: 479978 - DNA, 75 bp, synthetic construct
  source 1..75: mol_type = other DNA
tcattttgacagcatctgcttcagccactgccgctcaaatctcactggaaaccgcaggtcgttgctatgaagcca

SEQ ID NO: 479979 - DNA, 75 bp, synthetic construct
  source 1..75: mol_type = other DNA
ttcaggcgaatgtgctgaaggctgataagatggatctgcgggagtctcagggatggctgaaccgtggttatgaag

SEQ ID NO: 479980 - DNA, 75 bp, synthetic construct
  source 1..75: mol_type = other DNA
aagacaaaagtagatacgacattgttgctgatctgcgcaaaagaggaaaaagcctagcagctcttggtcgtgaga

SEQ ID NO: 479981 - DNA, 75 bp, synthetic construct
  source 1..75: mol_type = other DNA
caacaaggttaacctgaagtttgaagaagcgaagccagtgctcgaggcgcagctggctaaatccatttccgctat

SEQ ID NO: 479982 - DNA, 75 bp, synthetic construct
  source 1..75: mol_type = other DNA
aggtgtctcgattgttatctcatcattaggcattggtcgactaagcgtcctgtttctttctggcttattatccga

SEQ ID NO: 479983 - DNA, 75 bp, synthetic construct
  source 1..75: mol_type = other DNA
agctgtatgatcccattctggatggtctgcgtagcgcggtacgatatgaccgtacctattttgataaaattgtgg

SEQ ID NO: 479984 - DNA, 75 bp, synthetic construct
  source 1..75: mol_type = other DNA
gcaacaggtggagaatctggcgcaaattctggatgagcgcgatattccccggcatatggaaggtcgttcgctgcg

SEQ ID NO: 479985 - DNA, 75 bp, synthetic construct
  source 1..75: mol_type = other DNA
cctggctgcgaccggccgttgaactgaacagtgccctggtgtccggcggggcagcgtttgtgtgtgcggtggccc

SEQ ID NO: 479986 - DNA, 75 bp, synthetic construct
  source 1..75: mol_type = other DNA
gtgggtatggctgcagatgcgatggtggaagatgtgaactataccatgatcacggatgtacagattgcagagcgt

SEQ ID NO: 479987 - DNA, 75 bp, synthetic construct
  source 1..75: mol_type = other DNA
tggaagatgtgaactataccatgatcacggatgtgcagattgcagagcgtactaagtcaacggtgacaacggata

SEQ ID NO: 479988 - DNA, 75 bp, synthetic construct
  source 1..75: mol_type = other DNA
cttataactctaattctgccggggccacgttgggtgtaggactggctgccggccttgtgggaatggcggctgatg

SEQ ID NO: 479989 - DNA, 75 bp, synthetic construct
  source 1..75: mol_type = other DNA
aaagatcgctattgttcagcagagccttcgggtaggcagcctgacggctgcggcttgtcatggtctgcaattacc

SEQ ID NO: 479990 - DNA, 75 bp, synthetic construct
  source 1..75: mol_type = other DNA
taagatggatctgcgggagtctcagggatggctgaaccgtggttatgaaggcgcagctgttggtgcagcgttagg

SEQ ID NO: 479991 - DNA, 75 bp, synthetic construct
  source 1..75: mol_type = other DNA
aggttaacctgaaatttgaagaagcgaagcctgtactggaagaccagctggctaaatccatcgcgaacatcctgt

SEQ ID NO: 479992 - DNA, 75 bp, synthetic construct
  source 1..75: mol_type = other DNA
atgaagctaatggcaatgactgccgtactatcctctgtgttagtcctctctggttgtggtgcgatgagcacagca

SEQ ID NO: 479993 - DNA, 75 bp, synthetic construct
  source 1..75: mol_type = other DNA
tggcgaaatgcccgatggtggtgggatatcgcatgaagccttttaccttctggctggcgaagcggctggtgaaaa

SEQ ID NO: 479994 - DNA, 75 bp, synthetic construct
  source 1..75: mol_type = other DNA
ctgtctggcattgttgccgggcagccgtggtgcggaagtcgagatgctgagcgccgatttcctgaaaacggccca

SEQ ID NO: 479995 - DNA, 75 bp, synthetic construct
  source 1..75: mol_type = other DNA
gaacaaggttaacctgaaatttgaagaggcgaagcctgttctcgaagaccagctggccaaatcaatcgcaaacat

SEQ ID NO: 479996 - DNA, 75 bp, synthetic construct
  source 1..75: mol_type = other DNA
tgcttgatctgcattatcaggatcttgaccttaatgaaggtcgaataaatattcgccgactgaagaacggatttt

SEQ ID NO: 479997 - DNA, 75 bp, synthetic construct
  source 1..75: mol_type = other DNA
actcaaattctgccggtgccacactcggtgtgggccttgctgctggtctggtgggtatggctgcagatgcgatgg

SEQ ID NO: 479998 - DNA, 75 bp, synthetic construct
  source 1..75: mol_type = other DNA
aaaacacgtctgataaagacatgagtgggctgcagggcaaaattgctgatgctgtgaaagcaaaaggatatcagg

SEQ ID NO: 479999 - DNA, 75 bp, synthetic construct
  source 1..75: mol_type = other DNA
tcgcatcattcgtgatgccggtattgaagctggaaccgtgacgcagactcaccctcatatgttaagacatgcttg

SEQ ID NO: 480000 - DNA, 75 bp, synthetic construct
  source 1..75: mol_type = other DNA
cggattttctacagttcacccattacgttttgatgagcgtgaagctgtagaacgctggacccaggaacgtgctaa

SEQ ID NO: 480001 - DNA, 75 bp, synthetic construct
  source 1..75: mol_type = other DNA
tactgtgcgttatacagccagtaatgctgcacggtttgccggattatgggaaagaagcaatctaataaacgaaaa

SEQ ID NO: 480002 - DNA, 75 bp, synthetic construct
  source 1..75: mol_type = other DNA
gatcaggcaaaacccgtgaccgttgttgtgcgagtgccgcagggtgaaacggaagaagaaactacgaccaatatc

SEQ ID NO: 480003 - DNA, 75 bp, synthetic construct
  source 1..75: mol_type = other DNA
gaagccgagtcaaatcgacagtctggtgctggttggcggcgcgtcacaaatgccgctggtgcagcgaatcgcagt

SEQ ID NO: 480004 - DNA, 75 bp, synthetic construct
  source 1..75: mol_type = other DNA
cactcaccgcgctggtattaagctcaatgctgggcgcgggtgttttcagtctgccgcaaaatatggcggcaggtg

SEQ ID NO: 480005 - DNA, 75 bp, synthetic construct
  source 1..75: mol_type = other DNA
gtaaagcgggtgagtccggcacattggcccgctcgttggatgccatcgctgaccaggcaaaacccgtgaccgttg

SEQ ID NO: 480006 - DNA, 75 bp, synthetic construct
  source 1..75: mol_type = other DNA
attggccgacggatgtgccttacccgcgaaggaaaaaagttgctgccgcacatttatgaacttacccgagtgatg

SEQ ID NO: 480007 - DNA, 75 bp, synthetic construct
  source 1..75: mol_type = other DNA
gtcacgataacaaaaccgttgctactgagttgctgagtgtggcgcaaagcctgcgtgggtttgcttacctgtcag

SEQ ID NO: 480008 - DNA, 75 bp, synthetic construct
  source 1..75: mol_type = other DNA
ataactactacgcttccgtttattctgttgatcagggtgtaaaacgcattctcgaacaactaaagaaaaacggac

SEQ ID NO: 480009 - DNA, 75 bp, synthetic construct
  source 1..75: mol_type = other DNA
tacttccgataacggggcggttatcgatggcccactgccgctgaatggcgcgcaaaaaggctataagagtcagac

SEQ ID NO: 480010 - DNA, 75 bp, synthetic construct
  source 1..75: mol_type = other DNA
ttcaataccggtagccaaactgcagataattactacgcatcggtttactccgtcgatcaaggtgtaaaacggatt

SEQ ID NO: 480011 - DNA, 75 bp, synthetic construct
  source 1..75: mol_type = other DNA
gcaaagcaaggtcaggactttgtgtttgaacactacagttgggatggcgtaactcaaagattcgaagaggttatt

SEQ ID NO: 480012 - DNA, 75 bp, synthetic construct
  source 1..75: mol_type = other DNA
gtatctgccattactacggacgtgaagttcaggatatcagcggcgttctcgctgtttttgttgaacgtcgtcagg

SEQ ID NO: 480013 - DNA, 75 bp, synthetic construct
  source 1..75: mol_type = other DNA
gagccgctggagatggggccgacagaatttaaactgctgcacttttttatgacgcatcctgagcgcgtgtacagc

SEQ ID NO: 480014 - DNA, 75 bp, synthetic construct
  source 1..75: mol_type = other DNA
tccggcggcgatgatggatgacgcggaaaccgccttaaaagcactgggaatgccagataaaaccattcatctgga

SEQ ID NO: 480015 - DNA, 75 bp, synthetic construct
  source 1..75: mol_type = other DNA
ccgcgtcatttccaccgtatccacagccattgtcggcatggtctgcacggccagcgatgcggatgcggaaacctt

SEQ ID NO: 480016 - DNA, 75 bp, synthetic construct
  source 1..75: mol_type = other DNA
atgagcctcttttcaaaaaatgattatgccggtgcgcttggtgcgctgctaccgacgggcagggcgtggccccgg

SEQ ID NO: 480017 - DNA, 75 bp, synthetic construct
  source 1..75: mol_type = other DNA
atctgcccagtcacagctcggcgttaaaccgcgcattctgggtgtaccaggtcacgacaccaaggcggtagctac

SEQ ID NO: 480018 - DNA, 75 bp, synthetic construct
  source 1..75: mol_type = other DNA
atcggcgcagtgactgctgaaggtaaaaaaactggtatgaaagccctgttatctgcccagtcacagctcggtgtt

SEQ ID NO: 480019 - DNA, 75 bp, synthetic construct
  source 1..75: mol_type = other DNA
gtaaagcgggtgagtccggcacgctggcccgttcgctggacgccatcgctgaccaggcaaaacccgtgaccgttg

SEQ ID NO: 480020 - DNA, 75 bp, synthetic construct
  source 1..75: mol_type = other DNA
cagtcaaaaccggtcaccgttgtcgtgcgtgtggaagacggcaccggcgacgacgaggaaacgaaacttgcgcag

SEQ ID NO: 480021 - DNA, 75 bp, synthetic construct
  source 1..75: mol_type = other DNA
accgccatcgtgggtatggtctgcacgggcgatgatgccgatgcaaaaatgttccctcttaataaacccgtgctg

SEQ ID NO: 480022 - DNA, 75 bp, synthetic construct
  source 1..75: mol_type = other DNA
tgtattctgggatttgcaggagtccggcaccgatgctgacctgttgaacgagtcaggtgtcacaacgctgattcg

SEQ ID NO: 480023 - DNA, 75 bp, synthetic construct
  source 1..75: mol_type = other DNA
aaattcagaaaatgcgggagcttggcggagagctgaaacgccacggcatttccctgacaggcagcgataacacca

SEQ ID NO: 480024 - DNA, 75 bp, synthetic construct
  source 1..75: mol_type = other DNA
agatcgccgtactgctgggcgggcgtgccgccgaaaagctggtgttcggcgagttgtctaccggggcggcggacg

SEQ ID NO: 480025 - DNA, 75 bp, synthetic construct
  source 1..75: mol_type = other DNA
tgcgtgcgagctgctggcgcgggaaacgctcgacgaaagcgatatccgtcaattgactcaaggacttgttcggaa

SEQ ID NO: 480026 - DNA, 75 bp, synthetic construct
  source 1..75: mol_type = other DNA
agccagcgcgaaggaatgctgatctggcccgactttactggctgggatacggtgttgaatgccgaagcaacggca

SEQ ID NO: 480027 - DNA, 75 bp, synthetic construct
  source 1..75: mol_type = other DNA
caacacgttttcttgacgtttttatcgaaaaagcagaacaccctttctaccgtgcactgggtgaactggctcgct

SEQ ID NO: 480028 - DNA, 75 bp, synthetic construct
  source 1..75: mol_type = other DNA
ttggaggtaaatcagaagatgctctggcggaatttcagaaatatgggaagaaccataacgagaaacagttaatgc

SEQ ID NO: 480029 - DNA, 75 bp, synthetic construct
  source 1..75: mol_type = other DNA
atggtgactggtcaaaggtgaatggcaagagcgacaaatcaccatcactgaccgtaacagtatcggcagtactga

SEQ ID NO: 480030 - DNA, 75 bp, synthetic construct
  source 1..75: mol_type = other DNA
gatgatgacctgctggcaaaagcaactgacgtttacaccatccgctgcgacgaactgaacgaagtaccgatgtaa

SEQ ID NO: 480031 - DNA, 75 bp, synthetic construct
  source 1..75: mol_type = other DNA
acgattagcatcattattgcgctattcacgattgttccggcgatctgttatttgctgagcgcgattatcgctaaa

SEQ ID NO: 480032 - DNA, 75 bp, synthetic construct
  source 1..75: mol_type = other DNA
caggtcagctggacaaaaatgcaaagataattgttcctagcaagtttctgttcgatttctattcggaaaaaatgc

SEQ ID NO: 480033 - DNA, 75 bp, synthetic construct
  source 1..75: mol_type = other DNA
atacataaagcaagtttctaaggcaatgggggttgatgcaaatgaaaaactcgacctttcagacccgtctgttat

SEQ ID NO: 480034 - DNA, 75 bp, synthetic construct
  source 1..75: mol_type = other DNA
aaatttcaccttaagtatgcactgaagtgctataaatggggtgaattagttatatcagacaacgaggatgttgca

SEQ ID NO: 480035 - DNA, 75 bp, synthetic construct
  source 1..75: mol_type = other DNA
aaacgcagttatctcaacgatgtcgccaacaaaagatcgcatcaactacgagtggttcgggccgtgggaacgcgt

SEQ ID NO: 480036 - DNA, 75 bp, synthetic construct
  source 1..75: mol_type = other DNA
tatggctgcagatgcgatggtggaagatgtgaactataccatgatcacggatgtgcagattgcagagcgtactaa

SEQ ID NO: 480037 - DNA, 75 bp, synthetic construct
  source 1..75: mol_type = other DNA
ccgtggcaatgcaggctgcgcagtggggaatgaacccgtttgccgtggctcagaaaacccatgttgtgaacggca

SEQ ID NO: 480038 - DNA, 75 bp, synthetic construct
  source 1..75: mol_type = other DNA
ggaaacggcaccgcgcgttgagcgagacattactccgcaaacgactactgctgcgggaatgaacagtctgatcaa

SEQ ID NO: 480039 - DNA, 75 bp, synthetic construct
  source 1..75: mol_type = other DNA
tcgtataaggaacgtcgagttattaatacaccactagagacacggataagagtcattgatggcgtactgacatgt

SEQ ID NO: 480040 - DNA, 75 bp, synthetic construct
  source 1..75: mol_type = other DNA
tgggtacgccggaagtgtttgtcgcttttctcaccacttattgcgtgggtaacctgattggttccgcactggcaa

SEQ ID NO: 480041 - DNA, 75 bp, synthetic construct
  source 1..75: mol_type = other DNA
tcagtcgcacaggtggtagcctgaaacatgcggatgagcagcaggcggtcagtgattttatccgtctgttcaacg

SEQ ID NO: 480042 - DNA, 75 bp, synthetic construct
  source 1..75: mol_type = other DNA
tgttgatcctcgatgagcctacccgtggcgtagatgtcggcgcgaaaaaagagatctatcaactgattaaccagt

SEQ ID NO: 480043 - DNA, 75 bp, synthetic construct
  source 1..75: mol_type = other DNA
gcaaacggcattgtgtatatctccgaagaccgcaaacgtgacggtttagtgctgggtatgtcagtcaaagagaat

SEQ ID NO: 480044 - DNA, 75 bp, synthetic construct
  source 1..75: mol_type = other DNA
agtgcaggatattcccggcgttcttgccgtgtttgcagaacgccgtaaggacagttttggtccgtatgtccggct

SEQ ID NO: 480045 - DNA, 75 bp, synthetic construct
  source 1..75: mol_type = other DNA
gtggatgtcggcgcgaaaaaagaaatttatcaactgattaaccagttcaaagccgatggtttgagcatcattctg

SEQ ID NO: 480046 - DNA, 75 bp, synthetic construct
  source 1..75: mol_type = other DNA
tgaaaacgccgtcgatggaacaggcaattggtctgctttccggtggcaatcagcaaaaagtggcgattgcccgtg

SEQ ID NO: 480047 - DNA, 75 bp, synthetic construct
  source 1..75: mol_type = other DNA
gacgtgcgcaggcgattgccgaattttcattttgctcagcacaggaccgcaatcttatttcggtaaaaggaaata

SEQ ID NO: 480048 - DNA, 75 bp, synthetic construct
  source 1..75: mol_type = other DNA
ctttattttttatatgaatacaatataggcaatataaacaatggtataagttggtttaattatagattgtttgtt

SEQ ID NO: 480049 - DNA, 75 bp, synthetic construct
  source 1..75: mol_type = other DNA
aagcaccacctacaacgacgtctatgcgggaagatttacgtgatatctggcaaaacgaccagtggcgtattgtcg

SEQ ID NO: 480050 - DNA, 75 bp, synthetic construct
  source 1..75: mol_type = other DNA
tagtgctgggcatgtcagtaaaagagaacatgtcgctgaccgcgctgcgctacttcagccgcgctggcggcagtt

SEQ ID NO: 480051 - DNA, 75 bp, synthetic construct
  source 1..75: mol_type = other DNA
cgccagctggttgccgaaggcaaatttcgcgaagatctgtacgcgcggatcaatctctggaccttcaccctgccg

SEQ ID NO: 480052 - DNA, 75 bp, synthetic construct
  source 1..75: mol_type = other DNA
cgcagaggcagaaaacatcgatctcttcgaccgtatgcaactggaacacgttatcgctatctgccgccaggcaaa

SEQ ID NO: 480053 - DNA, 75 bp, synthetic construct
  source 1..75: mol_type = other DNA
caatttcggtgagccgatgccgttgatgacctatctcaaccagcacgtgccagactggcgtgaatcgattgatcc

SEQ ID NO: 480054 - DNA, 75 bp, synthetic construct
  source 1..75: mol_type = other DNA
tcctgcgctgggatcgcgacgagttgccggacgttattgatgcgctggcaaatgagatgcaacgtcaggggctga

SEQ ID NO: 480055 - DNA, 75 bp, synthetic construct
  source 1..75: mol_type = other DNA
caacgtccataacgccgagcgcgttcgccagctggcccacgacggtcatgagctggtgtatgtgccttgccaccg

SEQ ID NO: 480056 - DNA, 75 bp, synthetic construct
  source 1..75: mol_type = other DNA
gcggcgcagccaaaagcaacaaggacaaccagacggactatacggcgaacagtcgccaggcttttgctgatatag

SEQ ID NO: 480057 - DNA, 75 bp, synthetic construct
  source 1..75: mol_type = other DNA
aaggcaatggcgtaaatcaacatgttctggcgatcctcgctgccgatcaacaggccgatctgagccaactcgcca

SEQ ID NO: 480058 - DNA, 75 bp, synthetic construct
  source 1..75: mol_type = other DNA
gctggtatatgtgccttgccaccgcagtcacatggactacctgctgctttcttacgtgctgtatcaccaggggct

SEQ ID NO: 480059 - DNA, 75 bp, synthetic construct
  source 1..75: mol_type = other DNA
atggctgatgaacacggcacggataaaattatcgcccagaaactggcgcgcgtggcacgtatgcactttgcccgc

SEQ ID NO: 480060 - DNA, 75 bp, synthetic construct
  source 1..75: mol_type = other DNA
gagcaagcggtgctgatgacctactatcgcaacaacattgcgcatatgttggtgctgccttcgctgatggcggca

SEQ ID NO: 480061 - DNA, 75 bp, synthetic construct
  source 1..75: mol_type = other DNA
gcggatttgctgacgttgcgcgcccagtgtctggcacatgatctgcccgacccattagagccgctggagatcgac

SEQ ID NO: 480062 - DNA, 75 bp, synthetic construct
  source 1..75: mol_type = other DNA
caacgtctggctgccgtaggcccacgtctgcctgctcgtcaggatctgtttaataagctgctcgcctcccgcgcc

SEQ ID NO: 480063 - DNA, 75 bp, synthetic construct
  source 1..75: mol_type = other DNA
gctggcccacgacggtcatgagctggtatatgtgccttgccaccgcagtcacatggactacctgctgctttctta

SEQ ID NO: 480064 - DNA, 75 bp, synthetic construct
  source 1..75: mol_type = other DNA
gcgacgaattaccgggtgtgattgatgcgctggcgaatgagatgcaacgtcaggggctgattacgctgcaagatg

SEQ ID NO: 480065 - DNA, 75 bp, synthetic construct
  source 1..75: mol_type = other DNA
tctgatctggctggcaagctggtctgtacgattaatgaggacgtatacagtgcaaacaggaatgtaaagctaatt

SEQ ID NO: 480066 - DNA, 75 bp, synthetic construct
  source 1..75: mol_type = other DNA
aaggtgcgccgggttcctttgtagccggttacgccaaccctgcacagttcaccaccaaccgattggcgtcggtag

SEQ ID NO: 480067 - DNA, 75 bp, synthetic construct
  source 1..75: mol_type = other DNA
agtaacaccaggcactatcccctaccgctttcgtaaatgggttacaggtgaggttcttcctcagatccgccgcac

SEQ ID NO: 480068 - DNA, 75 bp, synthetic construct
  source 1..75: mol_type = other DNA
accatgttctgctacatcgtcggtgtgagcaaatgcctgcgtgatatccagacccacgcggaatacatcaacgac

SEQ ID NO: 480069 - DNA, 75 bp, synthetic construct
  source 1..75: mol_type = other DNA
acggaacatcgctgttcaattatcgatttagccagttataccttatatggctatatttcaatggcaacgttttat

SEQ ID NO: 480070 - DNA, 75 bp, synthetic construct
  source 1..75: mol_type = other DNA
ttaggcattggccgattaagcgtcctgtttctttctggcttattatccgatcgcttcggtcgacgaccgtttatc

SEQ ID NO: 480071 - DNA, 75 bp, synthetic construct
  source 1..75: mol_type = other DNA
tctattacgtgattattggctggcttccggcgatcctcatcagtcacggctatagcgaagcacaggcgggttcac

SEQ ID NO: 480072 - DNA, 75 bp, synthetic construct
  source 1..75: mol_type = other DNA
cttgatggcagccaggcaggaaacagcagcagttcagcgggaacgtcagtttcacatactgcggccagtgagcca

SEQ ID NO: 480073 - DNA, 75 bp, synthetic construct
  source 1..75: mol_type = other DNA
tcagggacgagtgtttgttatggcttacaagttacgcacccgcagcaggccgttcattgatattcccctgattga

SEQ ID NO: 480074 - DNA, 75 bp, synthetic construct
  source 1..75: mol_type = other DNA
aggtaaaagctgaggaaaagccacaaaacatgcagcacagttacagccgcgctcttgatgttgcctatggcggta

SEQ ID NO: 480075 - DNA, 75 bp, synthetic construct
  source 1..75: mol_type = other DNA
tcaacggcactatatctaacgaaacagccctactttgtaatgcccgcgatctgcacacttttttaggtgttaaaa

SEQ ID NO: 480076 - DNA, 75 bp, synthetic construct
  source 1..75: mol_type = other DNA
tcaggtaaaagatgaaaacattaccgttgtttgggtgccaggtgcctatgagctgccgctggcggcgggtgcact

SEQ ID NO: 480077 - DNA, 75 bp, synthetic construct
  source 1..75: mol_type = other DNA
cttgatggcagccaggcgggaaacagccgcagttcagcggaaacgtcagcctcacatactgcggccagtgagcca

SEQ ID NO: 480078 - DNA, 75 bp, synthetic construct
  source 1..75: mol_type = other DNA
atatcaatgttgtaacgatctgtgataagtttacttatgaatgctttcgttatgaagcaaactttattccgttaa

SEQ ID NO: 480079 - DNA, 75 bp, synthetic construct
  source 1..75: mol_type = other DNA
attcaacggtcggcgtcgtgcaaacgcgcaaggcgctgcaagcagcgggcatggcttttcgcgtctcggatattc

SEQ ID NO: 480080 - DNA, 75 bp, synthetic construct
  source 1..75: mol_type = other DNA
ttgggcttattgccggtattctggcgaagtggatcatgccaggtaaagatggtggtggattctttatgactattc

SEQ ID NO: 480081 - DNA, 75 bp, synthetic construct
  source 1..75: mol_type = other DNA
ctgggtacggttaaagcacgggcggcggaacgcgagcaaacccgccaattgctggctggcagcgtagcccgcctg

SEQ ID NO: 480082 - DNA, 75 bp, synthetic construct
  source 1..75: mol_type = other DNA
tccagcctgattatttcgccattgaacaagtctttatggcgaagaacgctgactcagccctgaaactgggccagg

SEQ ID NO: 480083 - DNA, 75 bp, synthetic construct
  source 1..75: mol_type = other DNA
cctccactctcgtctactggagcgtgctgcgcgtgttaacgccgaatacgttgaagccttcaccaaaggtgaagt

SEQ ID NO: 480084 - DNA, 75 bp, synthetic construct
  source 1..75: mol_type = other DNA
aacagtatgcgccgatgtccgtagcgcaacagtctctggttctgttcgcagcagaacgtggttacctggcggatg

SEQ ID NO: 480085 - DNA, 75 bp, synthetic construct
  source 1..75: mol_type = other DNA
gagcatgagcgatgagtattactcgaagtatctgcccgggttgattaagtccggtaaagtgacgatggcagagct

SEQ ID NO: 480086 - DNA, 75 bp, synthetic construct
  source 1..75: mol_type = other DNA
ttgatgtctcgcgcgatcctcgctggggacgcgcctctgaaggttttggtgaagatacctatctcacctcggtta

SEQ ID NO: 480087 - DNA, 75 bp, synthetic construct
  source 1..75: mol_type = other DNA
ggggctggatgcaggcagcggcgcggtgatggtggcgttgaactcgctgaacggcacgccagccacctccgattc

SEQ ID NO: 480088 - DNA, 75 bp, synthetic construct
  source 1..75: mol_type = other DNA
ggtgaaaacggtaaagtgctgtacgccaaaggggcgaacgttaccagtgacaaaggcattatcgatttcctgaat

SEQ ID NO: 480089 - DNA, 75 bp, synthetic construct
  source 1..75: mol_type = other DNA
gaaccgggcaagttcaacgtctttatcggcaccgattccgcacgcgttaagaaaggcgagtttgagttgctgtaa

SEQ ID NO: 480090 - DNA, 75 bp, synthetic construct
  source 1..75: mol_type = other DNA
aatcttccaccattgcggtcgttggtccgctggcggacagtaaacgtgatgtcatgggcagttggtcagcggcag

SEQ ID NO: 480091 - DNA, 75 bp, synthetic construct
  source 1..75: mol_type = other DNA
ccgcgatggtgacgcctttcgatgaaacggaaaaaatggatattccggcagcgaaaaatatggcgcgttggttag

SEQ ID NO: 480092 - DNA, 75 bp, synthetic construct
  source 1..75: mol_type = other DNA
gcgtgttatcgtttcccagctgcaccgtagtccgggcggcttctttgactccgacaaaggtaaaacccactcttc

SEQ ID NO: 480093 - DNA, 75 bp, synthetic construct
  source 1..75: mol_type = other DNA
tggataccctgatgcctcaggacatgatcaacgccaaaccgatttctgcagcagtgaaagagttcttcggttcca

SEQ ID NO: 480094 - DNA, 75 bp, synthetic construct
  source 1..75: mol_type = other DNA
ggggctgatgttattggtaaggattcttacttctgctatgtagagtccaaaaatgtcatggctattaaacaaccg

SEQ ID NO: 480095 - DNA, 75 bp, synthetic construct
  source 1..75: mol_type = other DNA
ttaatctgcacagcttcctggtggcggtggtgggagctattctcgttctgggcatattccgcctcctgcgaagag

SEQ ID NO: 480096 - DNA, 75 bp, synthetic construct
  source 1..75: mol_type = other DNA
ttaatttacatagcttcctggtggcggtggtcggcgctatcctggtgctgggggtattccgcctcctgcgaagag

SEQ ID NO: 480097 - DNA, 75 bp, synthetic construct
  source 1..75: mol_type = other DNA
aaacgctgttcaccaacgatctggatcacggcccgtatatctctgaaaccttacgtgtcgacccaactaacgacc

SEQ ID NO: 480098 - DNA, 75 bp, synthetic construct
  source 1..75: mol_type = other DNA
gatgccatgtgtttctctgggtgagccggtagaacgtggcgacgtgctggcagacggtccgtccaccgacctcgg

SEQ ID NO: 480099 - DNA, 75 bp, synthetic construct
  source 1..75: mol_type = other DNA
acctgtctgaagaactgcaaatcctcgaagcgggtctgttcagccgtatccgtgctgtgctggtagccggtggcg

SEQ ID NO: 480100 - DNA, 75 bp, synthetic construct
  source 1..75: mol_type = other DNA
cgaattcatccagcgtgcgtacgatctgggcgctgacgttcgtcagaaagttgacctgagtaccttcagcgatga

SEQ ID NO: 480101 - DNA, 75 bp, synthetic construct
  source 1..75: mol_type = other DNA
acctgtatcaaccagatgccgtgtgtgtctctgggtgaaccggtagaacgtggcgacgtgctggcagacggtccg

SEQ ID NO: 480102 - DNA, 75 bp, synthetic construct
  source 1..75: mol_type = other DNA
ttgaagctgagaaactcgacaaactgccgcgcgatcgctggctggagctgggcctgaccgacgaagagaaacaaa

SEQ ID NO: 480103 - DNA, 75 bp, synthetic construct
  source 1..75: mol_type = other DNA
ccataccggttttgttcgccggtttgtttacctcacaggtttcgatcgcagcgggctcagtgtctgcagaccccc

SEQ ID NO: 480104 - DNA, 75 bp, synthetic construct
  source 1..75: mol_type = other DNA
gaatcaactttacgggaaaacatccgatatggcgaaaagagaaggtgagaaagaccatcaggtagtattcctggc

SEQ ID NO: 480105 - DNA, 75 bp, synthetic construct
  source 1..75: mol_type = other DNA
gccgtcggtttccaggggttggccctttacaactttgaatccgaaatcacggggtttgtcagtgatggcggaaag

SEQ ID NO: 480106 - DNA, 75 bp, synthetic construct
  source 1..75: mol_type = other DNA
cggtagaccgcgtcattgccgcgttttctgtcgccgtcatgcttgctctggttgtatgcgtagtctggcaagtat

SEQ ID NO: 480107 - DNA, 75 bp, synthetic construct
  source 1..75: mol_type = other DNA
atggcttccgttcattcgctcctcagtgcatgtcagacgacaccccgggatgtggctgaacctgctcaggcgcgt

SEQ ID NO: 480108 - DNA, 75 bp, synthetic construct
  source 1..75: mol_type = other DNA
aagtacattaaccgatgagctggcacgatttttgatgatctgggtagggttattaggtgctgcaggtgatgctgc

SEQ ID NO: 480109 - DNA, 75 bp, synthetic construct
  source 1..75: mol_type = other DNA
gctgatcactcttttttccacggcaagattcatggactatatcatagaaaaaataagaacaatctccgcgaaata

SEQ ID NO: 480110 - DNA, 75 bp, synthetic construct
  source 1..75: mol_type = other DNA
ggtttgcctttactggcgcaatggctttttggcgcagcactacactgggatgtcccagccttcgaggctttaatt

SEQ ID NO: 480111 - DNA, 75 bp, synthetic construct
  source 1..75: mol_type = other DNA
tcggtctggcgagactttcggataactggctgctacgaaagctttccacaatttatattgagatcttccgtaata

SEQ ID NO: 480112 - DNA, 75 bp, synthetic construct
  source 1..75: mol_type = other DNA
acgatgagtttgtcacttctgtcgcagagtcagacgaattgccggatgtaagtgactggaatgaaatttacaagg

SEQ ID NO: 480113 - DNA, 75 bp, synthetic construct
  source 1..75: mol_type = other DNA
agtacaactgacgtagttctaaacgaaaccggcagtgatgatggatacgatttactgcacctgataaaaaaacac

SEQ ID NO: 480114 - DNA, 75 bp, synthetic construct
  source 1..75: mol_type = other DNA
aggaattttcaaaaatagtaattacattgatcaccttgttttccactgctaaatttacagatatagttttagcaa

SEQ ID NO: 480115 - DNA, 75 bp, synthetic construct
  source 1..75: mol_type = other DNA
ggcccgacgcctgaagctgctacggatgaaagccggtcgcagtgaatctgataaagcccgtctgatgcctgagat

SEQ ID NO: 480116 - DNA, 75 bp, synthetic construct
  source 1..75: mol_type = other DNA
gcgctcagcagtgaagccgggaagaaactttatgacccgatactggatggtctgcgaagtgcggtacgttatgac

SEQ ID NO: 480117 - DNA, 75 bp, synthetic construct
  source 1..75: mol_type = other DNA
tgaggagaatattatttctggtggcactcaggaagagttaataaatacatatactcacgtgtgtgggtctggaaa

SEQ ID NO: 480118 - DNA, 75 bp, synthetic construct
  source 1..75: mol_type = other DNA
atagcaccaatctggaattgtctgcctgtcaccgatataggcaatatgctggaggagaacattctttctggcgac

SEQ ID NO: 480119 - DNA, 75 bp, synthetic construct
  source 1..75: mol_type = other DNA
tattgaggcccggctggggaatgccgcaaaatcggcgcaggtcaccggtaactttaacaccctggtgatgttgcg

SEQ ID NO: 480120 - DNA, 75 bp, synthetic construct
  source 1..75: mol_type = other DNA
ggtatccgaagtggccgggcgggttgccggccagttatccggggaagggaacagtgcggcgttccgggagtttgc

SEQ ID NO: 480121 - DNA, 75 bp, synthetic construct
  source 1..75: mol_type = other DNA
ggtggcgaaacccttgctgttaccggcagatattattcagttaccgaaggggcaggcgtttgccctgctggaagg

SEQ ID NO: 480122 - DNA, 75 bp, synthetic construct
  source 1..75: mol_type = other DNA
atatcactgctatagaggaaaatgcttttcgaaaagccgctccccatgtcctcaatcttactgatgaacagctgg

SEQ ID NO: 480123 - DNA, 75 bp, synthetic construct
  source 1..75: mol_type = other DNA
ccaatcattatccatgcactggtggagttaaaaccgcaggcacgtcgtatgcaagaacgtgctgcggctggctgg

SEQ ID NO: 480124 - DNA, 75 bp, synthetic construct
  source 1..75: mol_type = other DNA
ccttatcctttttgcgctctgtgttgggatattttgttacctcgcacaatggatgagttatgaagaagtcgatca

SEQ ID NO: 480125 - DNA, 75 bp, synthetic construct
  source 1..75: mol_type = other DNA
atgattatttatataactttgctgatttactgatcgtcgatgaagcagggcaggtgctcccggaggttgctgcgg

SEQ ID NO: 480126 - DNA, 75 bp, synthetic construct
  source 1..75: mol_type = other DNA
cgttatcaagcaacgtctgccacgagtcggtggcggcaaatctggcggttatcgcacaatcattttctatcgcgt

SEQ ID NO: 480127 - DNA, 75 bp, synthetic construct
  source 1..75: mol_type = other DNA
ttgaacgcttcgcacgaaaaaatcggatttccgataaagctctgcgagaagtcgtggaactagctgataagggac

SEQ ID NO: 480128 - DNA, 75 bp, synthetic construct
  source 1..75: mol_type = other DNA
agctggcacaggtggcgtatggagtgctgaagtcaggcgtgccgttcgatgcgtcacggcataatccggtagctg

SEQ ID NO: 480129 - DNA, 75 bp, synthetic construct
  source 1..75: mol_type = other DNA
cgcgcgctggctatttttctacaaaaccaggtctctgtaacgttccaggttgatatacacccggcagcaaaaatt

SEQ ID NO: 480130 - DNA, 75 bp, synthetic construct
  source 1..75: mol_type = other DNA
gataagccatcaatggatatggaccagcacttcaacggtattaaccatacgtttgagtatggtgatgggatctga

SEQ ID NO: 480131 - DNA, 75 bp, synthetic construct
  source 1..75: mol_type = other DNA
tcggcaatattgaagtcgggcgtggcgcgaagattggcgcgggttctgtcgtgctgcaaccagtgccgccgcata

SEQ ID NO: 480132 - DNA, 75 bp, synthetic construct
  source 1..75: mol_type = other DNA
cgcgaagattggcgcaggttccgtggtgctgcaaccggtgccgccgcataccaccgccgctggcgttccggcacg

SEQ ID NO: 480133 - DNA, 75 bp, synthetic construct
  source 1..75: mol_type = other DNA
atgccttgcaggcctatcgtatcggtcactggctgtggaatcagggccgccgcgcactggcaatctttctgcaaa

SEQ ID NO: 480134 - DNA, 75 bp, synthetic construct
  source 1..75: mol_type = other DNA
gataagccatcaatggatatggatcagcatttcaacggcattaaccatacgtttgaatatggggatgggatctga

SEQ ID NO: 480135 - DNA, 75 bp, synthetic construct
  source 1..75: mol_type = other DNA
ctggttagccagtggctggcacaatacgggcaatttgtcgctggcatgtcatacaccatgtcgatcaaattactc

SEQ ID NO: 480136 - DNA, 75 bp, synthetic construct
  source 1..75: mol_type = other DNA
gttttacctctgctggaggagttgtacaaattggcctgacgttaatggctgagcgttttccctacgctaaaggta

SEQ ID NO: 480137 - DNA, 75 bp, synthetic construct
  source 1..75: mol_type = other DNA
gatattatgtggttcgataccgccatcgctgccatcggctttttactggcactgtttatcggcttacgcagccgc

SEQ ID NO: 480138 - DNA, 75 bp, synthetic construct
  source 1..75: mol_type = other DNA
gtgatcgcttttgctttcgtcatcggttttacctccgcaggcggtgttgtacaaattggcctgacgttaatggcc

SEQ ID NO: 480139 - DNA, 75 bp, synthetic construct
  source 1..75: mol_type = other DNA
gaataacatcattaccgcttatgtttttggttttctggctggaatggcaaatagttttcttgatgccggaaccta

SEQ ID NO: 480140 - DNA, 75 bp, synthetic construct
  source 1..75: mol_type = other DNA
ggatttttactggcgctgtttattggcttacgcagtcacaaggaaacacaacatccatcgctaaaagaaaatgtc

SEQ ID NO: 480141 - DNA, 75 bp, synthetic construct
  source 1..75: mol_type = other DNA
cagtgcactgagctacatgctggcgaacaagctgtcatcgccaattatgcctgctattgctatccgtgaagtggt

SEQ ID NO: 480142 - DNA, 75 bp, synthetic construct
  source 1..75: mol_type = other DNA
tgacgctcattgtgttagtgggatgttcggcaccaccacccgaacagaaagcgcaacgggtaaaggttgaaccgc

SEQ ID NO: 480143 - DNA, 75 bp, synthetic construct
  source 1..75: mol_type = other DNA
atgatgatgaactctttctttccggtaatggcgcttatggtgttagtaggatgctcaacaacgccacccgtacag

SEQ ID NO: 480144 - DNA, 75 bp, synthetic construct
  source 1..75: mol_type = other DNA
caatggcgcttatggtgctagtgggttgttctacaccgtcacccgtgcagaaagcacaacgggtaaaggttgatc

SEQ ID NO: 480145 - DNA, 75 bp, synthetic construct
  source 1..75: mol_type = other DNA
gcgcgactccgttggtgcagtagtaatgggtccgtacgctgaccttgccgaaggcatgaaagttaagtgtactgg

SEQ ID NO: 480146 - DNA, 75 bp, synthetic construct
  source 1..75: mol_type = other DNA
aagactgagtggggacgggcgttccgcgaccgtctggcggctaatggcaagaaaggaaaggtgattctcggcgcg

SEQ ID NO: 480147 - DNA, 75 bp, synthetic construct
  source 1..75: mol_type = other DNA
atgggaatatttaagggcaagaaataaaaaattaaaaatatgggttgctagtatggcaactgtaactattatatg

SEQ ID NO: 480148 - DNA, 75 bp, synthetic construct
  source 1..75: mol_type = other DNA
ggtacacaccagaaaattattgatatggccatgaatggcgtcggatgccgcgccagtgcacgcattatgggcatt

SEQ ID NO: 480149 - DNA, 75 bp, synthetic construct
  source 1..75: mol_type = other DNA
ggaagaagcctacgccgctgacccggaaatgatcgcttctgcggcctgcgatattcaggcggtgcgtacccgtga

SEQ ID NO: 480150 - DNA, 75 bp, synthetic construct
  source 1..75: mol_type = other DNA
tcggtaatattgaagttggacgcggtgcgaaaattggcgcggggtctgtggtgctgcaaccggtgccgccgcaca

SEQ ID NO: 480151 - DNA, 75 bp, synthetic construct
  source 1..75: mol_type = other DNA
aactgtaccgcgaaatgtgcagagttgtgggtaaagtcgtgctggagatgcgcgatctgggacaagagcccaggc

SEQ ID NO: 480152 - DNA, 75 bp, synthetic construct
  source 1..75: mol_type = other DNA
gcgtaaaaagaaggggcgttaatcagcgcctgccgcgcgtcgacgtatttgctgaccagctaaatgacgcctcag

SEQ ID NO: 480153 - DNA, 75 bp, synthetic construct
  source 1..75: mol_type = other DNA
ggctgaaccgtcagatccgtcgcatgtgcgaacactttggctatgaagtgaaaaagctggaacgtacgcgcatta

SEQ ID NO: 480154 - DNA, 75 bp, synthetic construct
  source 1..75: mol_type = other DNA
gtcgaaaagctacaacatggcaggctggcgtattggctttatggttggcaacaaaacgctggtcagcgccctggc

SEQ ID NO: 480155 - DNA, 75 bp, synthetic construct
  source 1..75: mol_type = other DNA
tggcgaattggttttatggttggtaacaagacgctggtcagcgcgctggcgcgtatcaaaagctatcacgattac

SEQ ID NO: 480156 - DNA, 75 bp, synthetic construct
  source 1..75: mol_type = other DNA
ggtatcagatgcggtaaacggcggagggatcgttgagaaactattctgggattttgacgggaaaactattgcgtt

SEQ ID NO: 480157 - DNA, 75 bp, synthetic construct
  source 1..75: mol_type = other DNA
aggcaattgccaatataaaaatctggcacaagggtgaacagcgcgcgccgcataaaccattgttattgctatacg

SEQ ID NO: 480158 - DNA, 75 bp, synthetic construct
  source 1..75: mol_type = other DNA
cgttgagatcgacccggaatcagaagctatcgtcaccattggttcgaaagagggactggcgcatctgatgctggc

SEQ ID NO: 480159 - DNA, 75 bp, synthetic construct
  source 1..75: mol_type = other DNA
ctggtgccgaatccaagttatccgattcatatctacggcgctgtgattgccggtgcgcaggtacgttcagtgccg

SEQ ID NO: 480160 - DNA, 75 bp, synthetic construct
  source 1..75: mol_type = other DNA
ttaccacaggtgcgtaaaaattacccttttgaggggtttgtagagtggcatcggaaagaggtttttagggggtga

SEQ ID NO: 480161 - DNA, 75 bp, synthetic construct
  source 1..75: mol_type = other DNA
attttgatgggaaaactattgcgttgccacaggtgcgtaaaaattacccttttgaggggtttgtggagtggcatc

SEQ ID NO: 480162 - DNA, 75 bp, synthetic construct
  source 1..75: mol_type = other DNA
gaacagaggtgcttgaatcagccttagctcatactaaaaacaatgaaatcatagccgcttacaatcgtgctggtg

SEQ ID NO: 480163 - DNA, 75 bp, synthetic construct
  source 1..75: mol_type = other DNA
cataaaccattgttattgctatacgtattagcgggatacctgaatggacatccacgccttttcgattatggatcg

SEQ ID NO: 480164 - DNA, 75 bp, synthetic construct
  source 1..75: mol_type = other DNA
aaagcctttgataaaggatcgattggcctggatgaaaatatgcgggtactggtctcggatgcggttaacggcgga

SEQ ID NO: 480165 - DNA, 75 bp, synthetic construct
  source 1..75: mol_type = other DNA
tctggcaattacacaatgccgagctttgctcaacagcagggagcagccgacaaccgccagtgaaggaactgactg

SEQ ID NO: 480166 - DNA, 75 bp, synthetic construct
  source 1..75: mol_type = other DNA
gaggctctctggataaatatatcgtcagtccactattcactgttcctcagataccgccagtgagaacagaacagg

SEQ ID NO: 480167 - DNA, 75 bp, synthetic construct
  source 1..75: mol_type = other DNA
gccgcgtagcgatttccatctcattcgccatcgaatgttggcgcctgagaaaatgggctggaaatacaaagacac

SEQ ID NO: 480168 - DNA, 75 bp, synthetic construct
  source 1..75: mol_type = other DNA
aattagttgggcgaatggatgccaaaatgcatcgccagacaggcatccttgaagttatctctctgtggttacagg

SEQ ID NO: 480169 - DNA, 75 bp, synthetic construct
  source 1..75: mol_type = other DNA
atggtgattgaacggcgcaacttccagcgcgtttatgatttaacccaccgtgtcatgcctgactgggatgatgag

SEQ ID NO: 480170 - DNA, 75 bp, synthetic construct
  source 1..75: mol_type = other DNA
actcttttgatggtgctgttccttcgaaagagatgttggaggatacgttaagaagtatcaagagtgcaaagtcgg

SEQ ID NO: 480171 - DNA, 75 bp, synthetic construct
  source 1..75: mol_type = other DNA
aatgcatcgccagacaggcatccttgaagttatctctctgtggttacaggaaggtattaaaccaacgacaacgct

SEQ ID NO: 480172 - DNA, 75 bp, synthetic construct
  source 1..75: mol_type = other DNA
caacgcgggtgacattaggacgctgcccgcaaggtctctttactgattgccgcaccggctgggaaatagaccccg

SEQ ID NO: 480173 - DNA, 75 bp, synthetic construct
  source 1..75: mol_type = other DNA
caacagataatctggacgcggttcagtcagcatttgtcatgcgtacagaccttaacaaggcagacaaactggtga

SEQ ID NO: 480174 - DNA, 75 bp, synthetic construct
  source 1..75: mol_type = other DNA
ctgatgaggtatctcacacacttttacctgtatacgattatgccggttcatggaacctgaagggagacgatgccc

SEQ ID NO: 480175 - DNA, 75 bp, synthetic construct
  source 1..75: mol_type = other DNA
acagcggcgaaaagaggctacatgctgacactggcagaggaagaacgcgcacagggtgaatgtgacgatctgatg

SEQ ID NO: 480176 - DNA, 75 bp, synthetic construct
  source 1..75: mol_type = other DNA
gttgccctgctgtacagttccgcgtgaattataagaacggcggtatcttttatcgttcagcgcgtgatggttatg

SEQ ID NO: 480177 - DNA, 75 bp, synthetic construct
  source 1..75: mol_type = other DNA
attcgatgacattcaggtgcgcatagtgagtatcaacggcgagccgtggtttgttggcgctgatgtgtgtgctgc

SEQ ID NO: 480178 - DNA, 75 bp, synthetic construct
  source 1..75: mol_type = other DNA
cagatgggggctgaccgtaagcacgaactgggaagtatggacctgtttaccggcgtgatggccacctacactgac

SEQ ID NO: 480179 - DNA, 75 bp, synthetic construct
  source 1..75: mol_type = other DNA
gattcacaacaacgataaagccaacgcccttaaggatgccactgagcacacgctacaggcagttgctaagaaatg

SEQ ID NO: 480180 - DNA, 75 bp, synthetic construct
  source 1..75: mol_type = other DNA
atggacatattgagtcattcagatcaggctgagcaggacaaagagcagttcttcagggcgcaaattattttctgg

SEQ ID NO: 480181 - DNA, 75 bp, synthetic construct
  source 1..75: mol_type = other DNA
aaagattatttcgcgttgtaattacgcagagcgttacgccccaacacaatccccgcgcccaccataccgcccagc

SEQ ID NO: 480182 - DNA, 75 bp, synthetic construct
  source 1..75: mol_type = other DNA
atgaaaaaattgatcaatgatgtgcaagacgttctggacgaacaactggcgggtctggcgaaagcacattcatcg

SEQ ID NO: 480183 - DNA, 75 bp, synthetic construct
  source 1..75: mol_type = other DNA
tcgatggtcgattcggtgatccactctgcggtgatggcggcctgtttgtggcagttacccggcattcgtacccat

SEQ ID NO: 480184 - DNA, 75 bp, synthetic construct
  source 1..75: mol_type = other DNA
aatatcgcggtggtggagcgttttttgtcagtgcggtttagtctgactgaagcagacggcgtaacgcgggtgagc

SEQ ID NO: 480185 - DNA, 75 bp, synthetic construct
  source 1..75: mol_type = other DNA
gtgtgccgcgccatgttgctgagcgtgaaatcgctacactggcgggtagtttttccttgcatgaacagaatattc

SEQ ID NO: 480186 - DNA, 75 bp, synthetic construct
  source 1..75: mol_type = other DNA
atgaaaaaattgatcaatgatgtgcaagacgtactgaacgaacaactggcagggctggcgaaagcgcatccttcg

SEQ ID NO: 480187 - DNA, 75 bp, synthetic construct
  source 1..75: mol_type = other DNA
atcattcgtttaccccaggaggatatgtgtcaggccctgggcgtttcgccattacgaaaatatcaggcggacggc

SEQ ID NO: 480188 - DNA, 75 bp, synthetic construct
  source 1..75: mol_type = other DNA
ccagttcccccagcagcttgcggaaagtatttttgatggaatgaggcagcaatgcaggcgcctggctgagaaatg

SEQ ID NO: 480189 - DNA, 75 bp, synthetic construct
  source 1..75: mol_type = other DNA
ggcgatattttcagcaccgagagcgagtatcttaccggactggatcgcgaaattggcgatgctgaccacgggcta

SEQ ID NO: 480190 - DNA, 75 bp, synthetic construct
  source 1..75: mol_type = other DNA
cgactcactggacgcctgtgcggaactggggcgtaagttgaataatcaaggccactcaataggtatcgctctcgg

SEQ ID NO: 480191 - DNA, 75 bp, synthetic construct
  source 1..75: mol_type = other DNA
aggtatcgctctcggtgcctgtaccgttcctgccgcgggcaaaccttcttttaccctggcggataatgagatgga

SEQ ID NO: 480192 - DNA, 75 bp, synthetic construct
  source 1..75: mol_type = other DNA
gacgcatcaggtgaaaaagtgtgtccagagcggcatcaaagtgctggggctggcagcgctcgacagcaccgcaac

SEQ ID NO: 480193 - DNA, 75 bp, synthetic construct
  source 1..75: mol_type = other DNA
tgctcactcgaagaaagatgaaataattgccgcatataatcgcgcagattatcttgcagaacgagtggttctcat

SEQ ID NO: 480194 - DNA, 75 bp, synthetic construct
  source 1..75: mol_type = other DNA
gccttacgagatgaatacctttccttgcttgctaatggcattgatccccaagttcataacaacgataaagctaat

SEQ ID NO: 480195 - DNA, 75 bp, synthetic construct
  source 1..75: mol_type = other DNA
gaatcaatcagtgggcaccgcgagtgggtatttcccagcataaagactcccttaaatcatatgcatgaacaaaca

SEQ ID NO: 480196 - DNA, 75 bp, synthetic construct
  source 1..75: mol_type = other DNA
tagtcagacagctaatgctgcattaaaaagaattggttatggaggaaagcttgttgcacatggtttgcgttctat

SEQ ID NO: 480197 - DNA, 75 bp, synthetic construct
  source 1..75: mol_type = other DNA
atggcaaaaatcgctaagaagctcactgacactgaaatcaaaagcaccaagccagccgacaaagaaatcaacttg

SEQ ID NO: 480198 - DNA, 75 bp, synthetic construct
  source 1..75: mol_type = other DNA
gggtgttccccagtatcaaagctccactcaatcacatgcatgaacaaacagctaatgcggccataatccgtatgg

SEQ ID NO: 480199 - DNA, 75 bp, synthetic construct
  source 1..75: mol_type = other DNA
atttttggcgcatctgtagctattttgtcggtgcttcaattggtataccaatttgggcaggaagctggcttatca

SEQ ID NO: 480200 - DNA, 75 bp, synthetic construct
  source 1..75: mol_type = other DNA
ggtgctgcgctacggcattgaagatgtggtgacaaatcttgaggtgctggaacgtatgcagccctctgaaagcct

SEQ ID NO: 480201 - DNA, 75 bp, synthetic construct
  source 1..75: mol_type = other DNA
caacccgtgaactgcaacgctggcgattgattcttggcgaggcggcagaaaccacactttgtggtcttgatagta

SEQ ID NO: 480202 - DNA, 75 bp, synthetic construct
  source 1..75: mol_type = other DNA
tgaatatggattcgattatttcaaagacaaacagagtgcaattgataccgctcaggcagagattgatgcttaccg

SEQ ID NO: 480203 - DNA, 75 bp, synthetic construct
  source 1..75: mol_type = other DNA
ttccctccatgcatatgatagttcatatgccggaaggtcagagaataagattacattgtcttcatcctgttccac

SEQ ID NO: 480204 - DNA, 75 bp, synthetic construct
  source 1..75: mol_type = other DNA
tttcggttcttcagttggtctatcagttcggccaggaggctgggatgtctaaagaacaagcgaggcattacaaaa

SEQ ID NO: 480205 - DNA, 75 bp, synthetic construct
  source 1..75: mol_type = other DNA
gtcagtttaggccatgagattgttacattcctttttatcatggagatatgggggaaagcaggaaacgattttttc

SEQ ID NO: 480206 - DNA, 75 bp, synthetic construct
  source 1..75: mol_type = other DNA
gagcacgtctggccgcggctgaataaagctgacttaatcgccaccgcgcgtaaaacctggaatgaacgccgtggc

SEQ ID NO: 480207 - DNA, 75 bp, synthetic construct
  source 1..75: mol_type = other DNA
attgccgaacgtagcccgacaatgagagcggatatttttacccgcatggaattactgattgaagatgatgaacgc

SEQ ID NO: 480208 - DNA, 75 bp, synthetic construct
  source 1..75: mol_type = other DNA
ctggctggcgggcatcacctggttccgtaacgattatcgcaataagattgaagcgggctatgtggctgtagggca

SEQ ID NO: 480209 - DNA, 75 bp, synthetic construct
  source 1..75: mol_type = other DNA
atgtcagcactgaaaaagcagcgcattgacctgagattaaatgaagacgacaaacacatgatcgaagaagctgca

SEQ ID NO: 480210 - DNA, 75 bp, synthetic construct
  source 1..75: mol_type = other DNA
tacgcgccgaaaatcttcgaactggcgggttataccaacactaccgagcaaatgtgggggacggtgatcgtcggc

SEQ ID NO: 480211 - DNA, 75 bp, synthetic construct
  source 1..75: mol_type = other DNA
gcatgtgacggcagagacacaggattttggacgcataaacaccagagtgaactatgaaagggaaaccggacgttg

SEQ ID NO: 480212 - DNA, 75 bp, synthetic construct
  source 1..75: mol_type = other DNA
tcactgaaaggaaatcttttcacttttctggagaattcaaataccgaaagaatcctgcgtatcattagagataaa

SEQ ID NO: 480213 - DNA, 75 bp, synthetic construct
  source 1..75: mol_type = other DNA
actgttaaggatatatcttctgttcatggtggttatttttcaaaagataatagtgataaagatgataaaattgag

SEQ ID NO: 480214 - DNA, 75 bp, synthetic construct
  source 1..75: mol_type = other DNA
gtgaagaaagtcagaagcggttgtgggtaaccgcgagtacatacgattttggcgggatctctgcgcaggtggatt

SEQ ID NO: 480215 - DNA, 75 bp, synthetic construct
  source 1..75: mol_type = other DNA
cgcctgctggctgaaaaaagcccgacgcttcgtgccgacctcataatgcagatgacactactgattgaagatgat

SEQ ID NO: 480216 - DNA, 75 bp, synthetic construct
  source 1..75: mol_type = other DNA
gatgggctgtattaacgtcatcgtgggcgtaccgggtgtgggtaaaacggccactgcccgtaattactgccagga

SEQ ID NO: 480217 - DNA, 75 bp, synthetic construct
  source 1..75: mol_type = other DNA
tattgatggtgtgagtgccaccgaccgtagcccatattcaaaagcagaaattttctcgctgtttgccgaaaacaa

SEQ ID NO: 480218 - DNA, 75 bp, synthetic construct
  source 1..75: mol_type = other DNA
attgcatggcaaaaccaggcgcagaacagagtgtgcatagtgactggaaagcaacgcagatcaaagttgaagatg

SEQ ID NO: 480219 - DNA, 75 bp, synthetic construct
  source 1..75: mol_type = other DNA
ggcaggagccaactatatcgcgggggctggcgcgtatacctataacgaaccgggacgtacatggtatatgagcat

SEQ ID NO: 480220 - DNA, 75 bp, synthetic construct
  source 1..75: mol_type = other DNA
tccaacacccaggcgctgaccggaacgaataccggcggtgctattgatggtgtgagtgccaccgaccgtagccca

SEQ ID NO: 480221 - DNA, 75 bp, synthetic construct
  source 1..75: mol_type = other DNA
ggcgatgtgcaaaagtatgatctggtgatgttgctcaaacgttttggcaaatttggccacattttatgggagcgt

SEQ ID NO: 480222 - DNA, 75 bp, synthetic construct
  source 1..75: mol_type = other DNA
atcgcctctgacatgaacaaacccaacggtcagtttgtgattacacctgctgacgttcctgcatttctggaaacg

SEQ ID NO: 480223 - DNA, 75 bp, synthetic construct
  source 1..75: mol_type = other DNA
tgaaaatcgcccagctgtttcgctgaaaaccagcccggagctggcagagttgttacgtcagcagcacagtgatgt

SEQ ID NO: 480224 - DNA, 75 bp, synthetic construct
  source 1..75: mol_type = other DNA
tccggaaaccaaagagattagcccgtacagtattgttggcctgagtgcgacctgggacgtgacgaagaacgtcag

SEQ ID NO: 480225 - DNA, 75 bp, synthetic construct
  source 1..75: mol_type = other DNA
tcgtcgatatcgatctcgatgatgtgatgctgcacagcgaagttaacctgccgattgatttcctcgttaaccaga

SEQ ID NO: 480226 - DNA, 75 bp, synthetic construct
  source 1..75: mol_type = other DNA
gatgctgcacagcgaagttaacctgccgattgatttcctcgtaaaccaaacgctgacgctgggtacagagtggaa

SEQ ID NO: 480227 - DNA, 75 bp, synthetic construct
  source 1..75: mol_type = other DNA
gaccttcacctggtacggcaagcagcagccgaagaagtacaactataaaggtcagccagcggttggaccggaaac

SEQ ID NO: 480228 - DNA, 75 bp, synthetic construct
  source 1..75: mol_type = other DNA
cggcaccgatctctatcagtgggataacgtgccgaaagcggtggttgaaggtctggaaggatcgttaaacgtacc

SEQ ID NO: 480229 - DNA, 75 bp, synthetic construct
  source 1..75: mol_type = other DNA
gtaatgcccagaccacgggcgatctggcagggccaactatatcgcgggtgccggggcgtatacctataacgagcc

SEQ ID NO: 480230 - DNA, 75 bp, synthetic construct
  source 1..75: mol_type = other DNA
aacagccgtggacgcatttaacgaagatctcgttaaaggtattgatgcatatattgaggatatagtcggcgatgg

SEQ ID NO: 480231 - DNA, 75 bp, synthetic construct
  source 1..75: mol_type = other DNA
gtttaattacggtattcagtgacatcgtggactgcgattttagtgaagacagcgcattatatgatggcttattgg

SEQ ID NO: 480232 - DNA, 75 bp, synthetic construct
  source 1..75: mol_type = other DNA
tgtctgagcaggctaatgctgccaatgtccaacgaattattcaagataatgcagcgctacataatacgttagata

SEQ ID NO: 480233 - DNA, 75 bp, synthetic construct
  source 1..75: mol_type = other DNA
atggaagaagccaaagatgaactacgactgatggggggatggagtccgacaagtcaaatgcctgatctatatgca

SEQ ID NO: 480234 - DNA, 75 bp, synthetic construct
  source 1..75: mol_type = other DNA
aactggactttcattttctaaatatatatatccataaaatccgccctcaagcctcccatagttttctgttcactt

SEQ ID NO: 480235 - DNA, 75 bp, synthetic construct
  source 1..75: mol_type = other DNA
caatggagaataaatgttgagaagcgtgctggcgcgggtgtgatgttaagcgcggagaatattgctgatttgctg

SEQ ID NO: 480236 - DNA, 75 bp, synthetic construct
  source 1..75: mol_type = other DNA
acggtattcagtgacatcgtggactgcgattttagtgaagacagcgcattatatgatggcttgttggttcatatt

SEQ ID NO: 480237 - DNA, 75 bp, synthetic construct
  source 1..75: mol_type = other DNA
ctcggtctgaaatgtcgcatctatatgggtgccaaagatgtcgaacgccagtcgccaaacgtttttcggatgcgt

SEQ ID NO: 480238 - DNA, 75 bp, synthetic construct
  source 1..75: mol_type = other DNA
aagcgcgaagatttgctgcacggcggcgcgcataaaactaaccaggtgctcggccaggctttactggcgaagcgg

SEQ ID NO: 480239 - DNA, 75 bp, synthetic construct
  source 1..75: mol_type = other DNA
agcagccaatgtttctggtggtgtcggtattgttggtgcttgtcagcctgtgtcttatgtacgattaattggcga

SEQ ID NO: 480240 - DNA, 75 bp, synthetic construct
  source 1..75: mol_type = other DNA
tcatacagtcagagttcgtgctgtgatccatttcatttcttttttgattaacacctacatatcacctgcataccg

SEQ ID NO: 480241 - DNA, 75 bp, synthetic construct
  source 1..75: mol_type = other DNA
agctctgttgcggcttaatctgcaggatgaagggtatcagatagttcatgaagcggatggcgccagagctcgttt

SEQ ID NO: 480242 - DNA, 75 bp, synthetic construct
  source 1..75: mol_type = other DNA
agatgcctgtaatgaggcgctgcgcgactggtccggcagttatgaaaccgcgcactatatgctgggcaccgcagc

SEQ ID NO: 480243 - DNA, 75 bp, synthetic construct
  source 1..75: mol_type = other DNA
atgattgttaaggaaaactcgtgctattttgatttcacatcaggaagtattaaaaatgttcgtggtgagataact

SEQ ID NO: 480244 - DNA, 75 bp, synthetic construct
  source 1..75: mol_type = other DNA
ctttttgaagaagtcttttatgactcagagcttgaacggctcaacataacagatggagagatccagtctgtagct

SEQ ID NO: 480245 - DNA, 75 bp, synthetic construct
  source 1..75: mol_type = other DNA
tgcggtaaaaccattcattatcattgatgaaccacataaatttcctactggtaaaaagacatgggaaaatataga

SEQ ID NO: 480246 - DNA, 75 bp, synthetic construct
  source 1..75: mol_type = other DNA
gaagcgatcgctgacaaaaaactgctggataacgcagcagcagacctggcagcaatctccggtcaaaaaccgctg

SEQ ID NO: 480247 - DNA, 75 bp, synthetic construct
  source 1..75: mol_type = other DNA
aaataaaacatgcacagaaactcttcgaacaaatcagtaaatccataaagataactttcatgacccagttttcag

SEQ ID NO: 480248 - DNA, 75 bp, synthetic construct
  source 1..75: mol_type = other DNA
tatctttttgaagaagtattttatgattcagaacttgaaaaactcaatatgacagagggtgaggtcaggtcagtc

SEQ ID NO: 480249 - DNA, 75 bp, synthetic construct
  source 1..75: mol_type = other DNA
caaaatcgtatatgcctcaagctatccatgattttgttgaagcaagtaatttcaataagaaatatatacacattc

SEQ ID NO: 480250 - DNA, 75 bp, synthetic construct
  source 1..75: mol_type = other DNA
aatattttgcttaacacatctgcaattccggataattgtaagcgtgcagcaagaaccgtattgacggggatgtgt

SEQ ID NO: 480251 - DNA, 75 bp, synthetic construct
  source 1..75: mol_type = other DNA
cagccactagtggtaacgctaaatcgtcagctattactcctgctgaggcggcaactgtatgtgataagactgatt

SEQ ID NO: 480252 - DNA, 75 bp, synthetic construct
  source 1..75: mol_type = other DNA
aaatgaatctaagaaaaaataaaatggaaaagggtctttcacttattgaagcatcgatggtgctggctttgtctg

SEQ ID NO: 480253 - DNA, 75 bp, synthetic construct
  source 1..75: mol_type = other DNA
gactgagtttaactacaattctgtcatgcaagtccctcgggtcgagaagatcaccctgaacatgggtgttggtga

SEQ ID NO: 480254 - DNA, 75 bp, synthetic construct
  source 1..75: mol_type = other DNA
tgcgataaaaccattcattatcattgatgagcctcataaatttcctactggtaaaaaaacatgggaacatattca

SEQ ID NO: 480255 - DNA, 75 bp, synthetic construct
  source 1..75: mol_type = other DNA
gcgaaaatgaattcttatccattttcaagtcattcatgctcgaagaaacagaaagatttactaaatcaggcgttc

SEQ ID NO: 480256 - DNA, 75 bp, synthetic construct
  source 1..75: mol_type = other DNA
gacgcatcaggtgaaaaagtgtgtccagagcggcatcaaagtgctgggagctggcagcgctcgacagcaccgcaa

SEQ ID NO: 480257 - DNA, 75 bp, synthetic construct
  source 1..75: mol_type = other DNA
gtgccaacctgcaacactggcatccgcaacacggcaagttgtatatagaatccccccgctttaacagtcgcatta

SEQ ID NO: 480258 - DNA, 75 bp, synthetic construct
  source 1..75: mol_type = other DNA
atcattgctgacgcatcaggtgaaaaagtgtgtccagagcggcatcaaagtgctggggctggcagcgctcgacag

SEQ ID NO: 480259 - DNA, 75 bp, synthetic construct
  source 1..75: mol_type = other DNA
taaagcaacagacggatccggttattgagttttgccagttcctgaattttctggaggaagcacgcggcctgatga

SEQ ID NO: 480260 - DNA, 75 bp, synthetic construct
  source 1..75: mol_type = other DNA
cgcgacggtgatgaagcactggcaataaagcaacagacggatccggttattgagttttgccagttcctgaatttt

SEQ ID NO: 480261 - DNA, 75 bp, synthetic construct
  source 1..75: mol_type = other DNA
tattgatacacaaacgcttgaaattaatatgacaggtggcgcggcctcaaggattacagcgagagtcagaaagga

SEQ ID NO: 480262 - DNA, 75 bp, synthetic construct
  source 1..75: mol_type = other DNA
atctcgggaacgacggcggctacccgcgcaagcgatatagttacagttccaattaataataatctttataatctt

SEQ ID NO: 480263 - DNA, 75 bp, synthetic construct
  source 1..75: mol_type = other DNA
aatgatggaagaataaaattatataatcaccagaagaaagaaattaagggttcaaacgtcgaaaaaaatatttct

SEQ ID NO: 480264 - DNA, 75 bp, synthetic construct
  source 1..75: mol_type = other DNA
aaagcatttccgtttcctcagtatagtttggggcatgatttatggattggtttaattgcaataaaatttggtctc

SEQ ID NO: 480265 - DNA, 75 bp, synthetic construct
  source 1..75: mol_type = other DNA
ttggtgagtttggcggcatgtacgtgccacaaatcctgatgcccgctctgcgccagctggaagaagcttttgtca

SEQ ID NO: 480266 - DNA, 75 bp, synthetic construct
  source 1..75: mol_type = other DNA
tagatattcaactggaaggtactcgactgagcgtaaaaggcacgccggagcagcccaaagaagagaaaaaatggc

SEQ ID NO: 480267 - DNA, 75 bp, synthetic construct
  source 1..75: mol_type = other DNA
tgatgcgtcaatggatcggttttgacaaaatggccaacgcactgcaaaacgccggtgaaagccagagcttcccgc

SEQ ID NO: 480268 - DNA, 75 bp, synthetic construct
  source 1..75: mol_type = other DNA
cgatgatatcgccgccgcctgcgatacgttgcacgaatttgatttaccagaacatctggtggtggatttcagcca

SEQ ID NO: 480269 - DNA, 75 bp, synthetic construct
  source 1..75: mol_type = other DNA
tgacaaggtggcaattgacccgaaacacaaagccccctactcaacgcgtattccggcagtagtgctggcggttaa

SEQ ID NO: 480270 - DNA, 75 bp, synthetic construct
  source 1..75: mol_type = other DNA
ggggaaacgctggcaacacatgcgccgaatttctggaagtggttgcgccgttcggtggctgagaatgaccgcaag

SEQ ID NO: 480271 - DNA, 75 bp, synthetic construct
  source 1..75: mol_type = other DNA
ttatacaaaggtatcaccgaccaggaaccggagaactggcgcgactacctgcaacggatccgcgaacaggctgag

SEQ ID NO: 480272 - DNA, 75 bp, synthetic construct
  source 1..75: mol_type = other DNA
agactctggcaacccatgcgccgaacttctggaaatggctccgccgctctgtggcggataatgacagaaaatcag

SEQ ID NO: 480273 - DNA, 75 bp, synthetic construct
  source 1..75: mol_type = other DNA
accagccgcgtgacaaaatgacggaagtcatcatttttgcgggtagtgatgcgtgggcacatgcgaatcagtggc

SEQ ID NO: 480274 - DNA, 75 bp, synthetic construct
  source 1..75: mol_type = other DNA
aatactctggtatcgcgcggtcgcgtaacggccctggaggcgaatgcacagggaacatccgggattcagctgtat

SEQ ID NO: 480275 - DNA, 75 bp, synthetic construct
  source 1..75: mol_type = other DNA
ctaatattggtggagcatctacgttgattctccatttttatatgggagctggtagttgtccggctgttcagttcc

SEQ ID NO: 480276 - DNA, 75 bp, synthetic construct
  source 1..75: mol_type = other DNA
cgcaaatttttattgatgccgaagtagcctattcgcagaacgcgattaaatccgctgtcgatacaatgaagctgg

SEQ ID NO: 480277 - DNA, 75 bp, synthetic construct
  source 1..75: mol_type = other DNA
cacctatggtcagtcgatcaccgatccgtgcttaggttgggaagatactgaaagcctggtcgaaaaactcgccgc

SEQ ID NO: 480278 - DNA, 75 bp, synthetic construct
  source 1..75: mol_type = other DNA
ggatgatagtaggtaatgcagaaatagtgccatttagcccgaggcgatatctgtatcatgcttatttggcttata

SEQ ID NO: 480279 - DNA, 75 bp, synthetic construct
  source 1..75: mol_type = other DNA
ccaggacgaagcgaaaagactactttatgagcagcaaaaatcagaagaagcactgttaataaagcgtgaaggtga

SEQ ID NO: 480280 - DNA, 75 bp, synthetic construct
  source 1..75: mol_type = other DNA
caggcggtgacaaggtggcaatcgacccgaaacataaagccccctactccacacgtattccggcggtagtgctgg

SEQ ID NO: 480281 - DNA, 75 bp, synthetic construct
  source 1..75: mol_type = other DNA
gctacgcgccgttttgcacaccaaacatctgatgaatcccgaagtgctggctgccgcccgccggatagtgcgcca

SEQ ID NO: 480282 - DNA, 75 bp, synthetic construct
  source 1..75: mol_type = other DNA
gggtagccaggttcagcgagataaagggtacgaaacaagcactatccgccctggctacatgaaacccaaacacga

SEQ ID NO: 480283 - DNA, 75 bp, synthetic construct
  source 1..75: mol_type = other DNA
gcttatcaattttcctctcgtcagagagctttttcttacggaactcaatgtgggaaaataaaagatgcagtccta

SEQ ID NO: 480284 - DNA, 75 bp, synthetic construct
  source 1..75: mol_type = other DNA
aaaaacactttactccaagtatattagatagagatttgcatacgaaactatgcttaactatgtgtattgacttta

SEQ ID NO: 480285 - DNA, 75 bp, synthetic construct
  source 1..75: mol_type = other DNA
ttccttgagcctgatttgcttgttctgggtaataccagcaataaaggactggtggcctatggcgcgattatggat

SEQ ID NO: 480286 - DNA, 75 bp, synthetic construct
  source 1..75: mol_type = other DNA
ctggattgaggacggcgatccggcgattgagtacgtgcagacacacagtgcaccgcagccggtaccggcagatat

SEQ ID NO: 480287 - DNA, 75 bp, synthetic construct
  source 1..75: mol_type = other DNA
tgtcggcgttttgttcgcctatggtgggtagtcaggtccagcgcgataaagggtacgaaaccagcacgattaaac

SEQ ID NO: 480288 - DNA, 75 bp, synthetic construct
  source 1..75: mol_type = other DNA
gggttagccgcagcagtaccatcaatgtgaagcacgtcgtctacagcgtaccttcccggcttgtaggtcaactgt

SEQ ID NO: 480289 - DNA, 75 bp, synthetic construct
  source 1..75: mol_type = other DNA
tgctgtttgtgtgccgggtaatcaggtgctgccgtttggcgaccttgccaccatcggcttctttgtggcgatggc

SEQ ID NO: 480290 - DNA, 75 bp, synthetic construct
  source 1..75: mol_type = other DNA
ggatggtttaacgcccatcgctaagcaggcccgtagtcgtttacaggcgaagttcggcggtcaggagttcctgat

SEQ ID NO: 480291 - DNA, 75 bp, synthetic construct
  source 1..75: mol_type = other DNA
attgagggcgaaggcatagaacgctatgaaatcgactggaagatcccaagtaaaaatatcgccagacagggacat

SEQ ID NO: 480292 - DNA, 75 bp, synthetic construct
  source 1..75: mol_type = other DNA
gtgccagagatgttgaaactgccactcaggcgatgaaatcacattttgacagcccggtaagtgcgctaattaatc

SEQ ID NO: 480293 - DNA, 75 bp, synthetic construct
  source 1..75: mol_type = other DNA
gtcagtaagggcgttgtccgtgaggcctatcgttcacttgccgcccttggaatactcgaaaccaaaagtggtaaa

SEQ ID NO: 480294 - DNA, 75 bp, synthetic construct
  source 1..75: mol_type = other DNA
aaattcagtccgctgtttacgtcgctgtttttcccgaacgtggcaaccttcaacacgcaggacatcatgttagat

SEQ ID NO: 480295 - DNA, 75 bp, synthetic construct
  source 1..75: mol_type = other DNA
gtacgcatcgtcaaacgctggcagcgtggtcagccactgaacgtcgcagaaacgttgtatgaagcgcagcacgaa

SEQ ID NO: 480296 - DNA, 75 bp, synthetic construct
  source 1..75: mol_type = other DNA
gccatgcccagcgcaaggcagactaatcgctggacgaacgaacagagccgggaaaacgccattaagcgcgcaaaa

SEQ ID NO: 480297 - DNA, 75 bp, synthetic construct
  source 1..75: mol_type = other DNA
ttgggcggcgggaccaatatcgccagtgccgtggagtatggtcggcaacttattgaacaaccagcgaaaagcgtc

SEQ ID NO: 480298 - DNA, 75 bp, synthetic construct
  source 1..75: mol_type = other DNA
gacacaatgctgccgcagataaacaacaatcagcatttatcagtgcgctggtgagcgagtttatgtggtctcatt

SEQ ID NO: 480299 - DNA, 75 bp, synthetic construct
  source 1..75: mol_type = other DNA
ggctgcacgcatgcaggcgatggggcatcagcaggtctacttttatgagaatacgaaaggggggcacaatgctgc

SEQ ID NO: 480300 - DNA, 75 bp, synthetic construct
  source 1..75: mol_type = other DNA
cgttgtatccgcatttgttcggatgcattgtctgtggcgtgcctttactggatatgaaacgctacacgcagcttt

SEQ ID NO: 480301 - DNA, 75 bp, synthetic construct
  source 1..75: mol_type = other DNA
tatcatggatcagcacgaagagattgaggcagttgagccagaagcttctgctgagcaggtggacccgcgcgatga

SEQ ID NO: 480302 - DNA, 75 bp, synthetic construct
  source 1..75: mol_type = other DNA
ctgtccctgcgacgaactatgaaacagccatcgcgctgcgtggtatggcgctgctgcagccatatctccctaaat

SEQ ID NO: 480303 - DNA, 75 bp, synthetic construct
  source 1..75: mol_type = other DNA
gacgtttacactccggacatcctgcgttgccgtaaatctggtgttctgaccggtctgccagatgcttatggccgt

SEQ ID NO: 480304 - DNA, 75 bp, synthetic construct
  source 1..75: mol_type = other DNA
acgacgtcgcagtaaaagacagcctttataccgccgggcggcgcggcgttgccaatacagtattaattgaaaagc

SEQ ID NO: 480305 - DNA, 75 bp, synthetic construct
  source 1..75: mol_type = other DNA
gaaattttcacctcaccgacgcccgataaaatctttgaatgcgccatgcaaattgatggcggcgaaggtgtactg

SEQ ID NO: 480306 - DNA, 75 bp, synthetic construct
  source 1..75: mol_type = other DNA
caacgaattgctgccggtgattgatagtctggatcgcgcgctggaagtggctgataaagctaacccggatatgtc

SEQ ID NO: 480307 - DNA, 75 bp, synthetic construct
  source 1..75: mol_type = other DNA
ttacacaggggcttactatcttgcgattgcctttaaacgctggggatactcatggcgggcagtcggtgcttataa

SEQ ID NO: 480308 - DNA, 75 bp, synthetic construct
  source 1..75: mol_type = other DNA
gaggccagactacagcaggcttacgtcatttatttggtcatatcaggaatttcagaatatggcataaagcattaa

SEQ ID NO: 480309 - DNA, 75 bp, synthetic construct
  source 1..75: mol_type = other DNA
attgtctgaaatcatttgaaagtataatgaaagcaatacatgataagaataactggaaatatagtcctaatgata

SEQ ID NO: 480310 - DNA, 75 bp, synthetic construct
  source 1..75: mol_type = other DNA
atcaggcgattaacgtggtgccgggcatgacgccgaaaaccattcttcacgccgggccgccgatcacctgggaaa

SEQ ID NO: 480311 - DNA, 75 bp, synthetic construct
  source 1..75: mol_type = other DNA
ctcccagcattttaaggagttgtcacgttacggaataaaaccagaacacctggttacagacccgtgcatgaatat

SEQ ID NO: 480312 - DNA, 75 bp, synthetic construct
  source 1..75: mol_type = other DNA
cgaagccgccgattgttttgatcttgcaggtcgggattacaaaatagacccggatttactgagagcgatatcatg

SEQ ID NO: 480313 - DNA, 75 bp, synthetic construct
  source 1..75: mol_type = other DNA
ttatctggcaatagcttttaaaaaatggggcgtctcctgggaggccgttggtgcatacaatgcaggattcaggaa

SEQ ID NO: 480314 - DNA, 75 bp, synthetic construct
  source 1..75: mol_type = other DNA
ttatctggcaatagcatttaaaaaatggggcgtcgcctgggaggccgttggtgcatacaatgcgggattcaggaa

SEQ ID NO: 480315 - DNA, 75 bp, synthetic construct
  source 1..75: mol_type = other DNA
ttatctggcaatagcatttaaaaaatggggcgtcccctgggaggccgttggtgcatacaatgccggattcaggaa

SEQ ID NO: 480316 - DNA, 75 bp, synthetic construct
  source 1..75: mol_type = other DNA
ttatctggcaatagcgtttaaaaaatggggcgtcgcctgggaggccgttggtgcatacaatgcaggattcaggaa

SEQ ID NO: 480317 - DNA, 75 bp, synthetic construct
  source 1..75: mol_type = other DNA
ttatctggcaatagcctttaaaaaatggggcgtcccctgggaggccgttggtgcatacaatgcaggattcaggaa

SEQ ID NO: 480318 - DNA, 75 bp, synthetic construct
  source 1..75: mol_type = other DNA
ttatctggcaatagcttttaaaaaatggggcgtcgcctgggaggccgttggtgcatacaatgctggattcaggaa

SEQ ID NO: 480319 - DNA, 75 bp, synthetic construct
  source 1..75: mol_type = other DNA
tcaccgaaacctacggcattggcggatttgctatggcgaccgcgcccgctatcgtcgcgctggtgggcggcacgg

SEQ ID NO: 480320 - DNA, 75 bp, synthetic construct
  source 1..75: mol_type = other DNA
ttagtgagccgggaattatttcagttgaggatttacctcctggctggggattacttcacgttgttaacggaagag

SEQ ID NO: 480321 - DNA, 75 bp, synthetic construct
  source 1..75: mol_type = other DNA
aaaactacgcttaaaaggttatttaccggtgacctgcctggaggggacgcgtaatcagcgcatcgccgcgactat

SEQ ID NO: 480322 - DNA, 75 bp, synthetic construct
  source 1..75: mol_type = other DNA
taccgggataaagagcagtaaaggcatccaggttccgacaacgaagaaatcacttccggaaattaacagcgtgca

SEQ ID NO: 480323 - DNA, 75 bp, synthetic construct
  source 1..75: mol_type = other DNA
gtggcagtcggagaaacagatccgctgttagcaggtctgctgcctcgttatcccgcttgggtgctggttccgtca

SEQ ID NO: 480324 - DNA, 75 bp, synthetic construct
  source 1..75: mol_type = other DNA
gtcagattgcgtacaagttccttaagcgcaacgggttcaaggtttgctttcatgaccgctttatagccgtaacca

SEQ ID NO: 480325 - DNA, 75 bp, synthetic construct
  source 1..75: mol_type = other DNA
cggacttgttggcagatagaaaaaagcgtttccgtaaaaatccctcacttggcatgggcgactggcgattcttta

SEQ ID NO: 480326 - DNA, 75 bp, synthetic construct
  source 1..75: mol_type = other DNA
aagagcagtaaaggcatccaggttccgaccacgaagaaatcacttccggaaattaacagcgtgcagaacaattaa

SEQ ID NO: 480327 - DNA, 75 bp, synthetic construct
  source 1..75: mol_type = other DNA
tttaccggatttataccgggataaagagcagtaaaggcatccgggttccgaccacgaagaaatcactttcccaaa

SEQ ID NO: 480328 - DNA, 75 bp, synthetic construct
  source 1..75: mol_type = other DNA
gggttacctcggcctcgatgtttatgcacatcgtgaaaaacaaaacctacggcaacatcgcttacaccaacatga

SEQ ID NO: 480329 - DNA, 75 bp, synthetic construct
  source 1..75: mol_type = other DNA
cgacagaaccagcgacgtctcgcctatgcatcagacgtttaccggatttattcagggataaaaagcagtaaaggt

SEQ ID NO: 480330 - DNA, 75 bp, synthetic construct
  source 1..75: mol_type = other DNA
atgagaaaatggcttctgacgatctgtcttttattgataaacaatttctgttttgcagcagactgctttgaactg

SEQ ID NO: 480331 - DNA, 75 bp, synthetic construct
  source 1..75: mol_type = other DNA
catataaaaagattgttattggcgacgacgaaataacaatgcctggcgacaaggttgttaagtttaaacgcgcat

SEQ ID NO: 480332 - DNA, 75 bp, synthetic construct
  source 1..75: mol_type = other DNA
ttatctggcaatagcatttaaaaaatggggcgtctcctgggaggccgttggtgcatacaatgctggattcaggaa

SEQ ID NO: 480333 - DNA, 75 bp, synthetic construct
  source 1..75: mol_type = other DNA
actggcgataaagcgtgagggggattcgctggtggacttctgcggctatctcatgtcgtcggtaatgtgtgacgg

SEQ ID NO: 480334 - DNA, 75 bp, synthetic construct
  source 1..75: mol_type = other DNA
gcaagcatgaaggcgctggaagatgcaagggaacgcgcgttagtggttggcttttcgctgattatcatgccggat

SEQ ID NO: 480335 - DNA, 75 bp, synthetic construct
  source 1..75: mol_type = other DNA
aacagattgggggattccgtttgggagtagaaggaagtcaggatcaggatctactgctgcgttgtctgcctcatg

SEQ ID NO: 480336 - DNA, 75 bp, synthetic construct
  source 1..75: mol_type = other DNA
agcggtaaaagcgtaatggcagagatttgcaccatgctggcgggtaaggccaacacggtatcggcaagcatgaag

SEQ ID NO: 480337 - DNA, 75 bp, synthetic construct
  source 1..75: mol_type = other DNA
taattgccagtgaattaccgttcagcccgccagcagagggggaaacgctggcaacgcatgcgccgaatttctgga

SEQ ID NO: 480338 - DNA, 75 bp, synthetic construct
  source 1..75: mol_type = other DNA
gtgtgatggcctgttagtgggtaatgctgaaattgtaccattcagcccacgcaggtatctctatcatgcctatct

SEQ ID NO: 480339 - DNA, 75 bp, synthetic construct
  source 1..75: mol_type = other DNA
ctcggggtctatcgccgcactctgcttcagcaaattggtggcttccgtctgggtgttgaaggtagccaggatcag

SEQ ID NO: 480340 - DNA, 75 bp, synthetic construct
  source 1..75: mol_type = other DNA
agtgttggcgtacgacttccctttcaactactcagcgattaacaacttcggtgcacgtcatgccagaggttctgt

SEQ ID NO: 480341 - DNA, 75 bp, synthetic construct
  source 1..75: mol_type = other DNA
agttacccgcactgggaactgtgcattgcagatgacaaatcgccaaaagaacatgttcagcgtgtgctacgtgaa

SEQ ID NO: 480342 - DNA, 75 bp, synthetic construct
  source 1..75: mol_type = other DNA
aatcagtttgaaatagcggctgttgatgtgaaagtagtcgagtctgcactattggctcgcattcaaaaagaacac

SEQ ID NO: 480343 - DNA, 75 bp, synthetic construct
  source 1..75: mol_type = other DNA
cttaaccagatgggagcaagccagcgcggcgaagttctcctggcacattatggcggtgaactggcaatcaatgcg

SEQ ID NO: 480344 - DNA, 75 bp, synthetic construct
  source 1..75: mol_type = other DNA
atgctggcggaaaaaatagaaggtgagctggcggtagtgattcgtcatctgcttacacggtttgctgaccaggac

SEQ ID NO: 480345 - DNA, 75 bp, synthetic construct
  source 1..75: mol_type = other DNA
aacagcctcgagggaaaaaacacgccgatacggaagtgattattttcgctggcagtgatgcgtgggcacatgcga

SEQ ID NO: 480346 - DNA, 75 bp, synthetic construct
  source 1..75: mol_type = other DNA
aaacgaaggagcgagcgtttagtgaccagctgcgacatgtaaaacataatcttgccattgacggaaaaacagtgc

SEQ ID NO: 480347 - DNA, 75 bp, synthetic construct
  source 1..75: mol_type = other DNA
aactacaaccagaattcggttagctcaaacaatgcgagctttcgtccgtgcgctgaatcgtggcctgaatggtac

SEQ ID NO: 480348 - DNA, 75 bp, synthetic construct
  source 1..75: mol_type = other DNA
ctgacgaagctatgtttgagtccataactacaaccagaattcggttagctcaaacaatgcgagctttcgtccgtg

SEQ ID NO: 480349 - DNA, 75 bp, synthetic construct
  source 1..75: mol_type = other DNA
ttatctggcaatagcatttaaaaaatggggcgtcacctgggaggccgttggtgcatacaatgcaggattcaggaa

SEQ ID NO: 480350 - DNA, 75 bp, synthetic construct
  source 1..75: mol_type = other DNA
taatacgaatcctgaacggtggaatactattaaaccaggtcgtagttttttgttgagtataaccttaaatgatat

SEQ ID NO: 480351 - DNA, 75 bp, synthetic construct
  source 1..75: mol_type = other DNA
atttaacgtcagtcggccgtaatattctggctaaaacaagtgtccttgctgttatccagtaccttggtttaagag

SEQ ID NO: 480352 - DNA, 75 bp, synthetic construct
  source 1..75: mol_type = other DNA
tgccagagtcaggtgtggattgtcatgcgccagaatgcccagggaattattgaattgcagggcgacagcgatgcg

SEQ ID NO: 480353 - DNA, 75 bp, synthetic construct
  source 1..75: mol_type = other DNA
ggtgatttatatctatccgcatatggcaggaaatgagcctgcgccggtgccgggatacagctcggtcttctcttt

SEQ ID NO: 480354 - DNA, 75 bp, synthetic construct
  source 1..75: mol_type = other DNA
actgcggcgtccgctgacagaaacggaacagcaggacgctgcgcagacggaccgcagttacagccggacacagga

SEQ ID NO: 480355 - DNA, 75 bp, synthetic construct
  source 1..75: mol_type = other DNA
tggtcttcagaagaattaagcgaagatgacctgatttttgaggcggcgaccttagaagatattgagcttgcctat

SEQ ID NO: 480356 - DNA, 75 bp, synthetic construct
  source 1..75: mol_type = other DNA
ttctgtataggtgttaagcaggggaatatggtacccactgttaatactatgtgcaaatttgatgtattcggcaat

SEQ ID NO: 480357 - DNA, 75 bp, synthetic construct
  source 1..75: mol_type = other DNA
aattgctgcgtaactttttacgttgcgccaactgggaagagaagtatctctacattattgaactgggccagcgtc

SEQ ID NO: 480358 - DNA, 75 bp, synthetic construct
  source 1..75: mol_type = other DNA
gattttcatcgtactaatcctgcaacagggttacctatgtcaggtatggggtttgagggccaatggaacgaaaac

SEQ ID NO: 480359 - DNA, 75 bp, synthetic construct
  source 1..75: mol_type = other DNA
tttttatcattggtacactatacgaattaaggcgagttagtggttgtgtaagtgtaagagaatggatgcaatctc

SEQ ID NO: 480360 - DNA, 75 bp, synthetic construct
  source 1..75: mol_type = other DNA
aaaaaacggcatgtgtcggatgagtttaaattcagtaaaggcgtttggtatatactgatgccagtatcttcctta

SEQ ID NO: 480361 - DNA, 75 bp, synthetic construct
  source 1..75: mol_type = other DNA
tccaagtgctgcaagattagaggaaattacacgccgagctgaaaaatatcttaatgatatgacggatgatgattt

SEQ ID NO: 480362 - DNA, 75 bp, synthetic construct
  source 1..75: mol_type = other DNA
cctgatgatgacatgcggtatccattccatggacagccagatgctcaatgggcatgggatatccatgcaacttca

SEQ ID NO: 480363 - DNA, 75 bp, synthetic construct
  source 1..75: mol_type = other DNA
tggcgggtatttacgagatggcagcgccagatggcatcatctgtaacgaggtttccaaattccttgcggccaacc

SEQ ID NO: 480364 - DNA, 75 bp, synthetic construct
  source 1..75: mol_type = other DNA
ttaagtttagtaaaggcgtttggtatataacgatgccagtatcttccttactctctccgttattaagcctgatgg

SEQ ID NO: 480365 - DNA, 75 bp, synthetic construct
  source 1..75: mol_type = other DNA
tggtaacggtgatacagtttatcgcctgctatctggttggttgggggaaggccgaaacagtttttatgctgttct

SEQ ID NO: 480366 - DNA, 75 bp, synthetic construct
  source 1..75: mol_type = other DNA
gcattaggcggtgcagtactgaccgatggcagtacgctgggtacattaggtggtgcagccgtcggtggtgttatt

SEQ ID NO: 480367 - DNA, 75 bp, synthetic construct
  source 1..75: mol_type = other DNA
atgaaaaatatagctcatatagctcatattgctctggtgacggtgatacagttcattgcctgttatctggctgat

SEQ ID NO: 480368 - DNA, 75 bp, synthetic construct
  source 1..75: mol_type = other DNA
atgagatgtttaacccatattactctggtaacggtgatacagtttatcgcctgttatctggctggttgggggaat

SEQ ID NO: 480369 - DNA, 75 bp, synthetic construct
  source 1..75: mol_type = other DNA
aaaaaacggaatgtgtcggatgagtttaagtttagtaaaggcgtttggtatataacgataccagtatcttcctta

SEQ ID NO: 480370 - DNA, 75 bp, synthetic construct
  source 1..75: mol_type = other DNA
gcattaacccggatgttgttgagcagtttctggcccttatgaacacacattgtaaatcctcagaagaggcactcg

SEQ ID NO: 480371 - DNA, 75 bp, synthetic construct
  source 1..75: mol_type = other DNA
atcagtttagtgctgtagaacaagacgatcagcgtagcagttatcagctaaaatcccagcaaaatggcgcagtgg

SEQ ID NO: 480372 - DNA, 75 bp, synthetic construct
  source 1..75: mol_type = other DNA
gacgaaagcattctggtttctgatggtaaaaccttatggttctacaatccgtttgttgaacaggctacggcaacc

SEQ ID NO: 480373 - DNA, 75 bp, synthetic construct
  source 1..75: mol_type = other DNA
gtgactgacggtagcggcgcggcggtgcaggaaggtcagggcgatctgtgggtgaaacgtccaaacttattcaac

SEQ ID NO: 480374 - DNA, 75 bp, synthetic construct
  source 1..75: mol_type = other DNA
gtggtcgcggcgctgggcgtgtcgatggtgggaatgtggcatctgtataacgtcggttcgctaccgccgctgggg

SEQ ID NO: 480375 - DNA, 75 bp, synthetic construct
  source 1..75: mol_type = other DNA
gcgatatcatgttaatggctgaacattttgccattcagatgtgccgtgagatcgggttaccgttgtttcctgggt

SEQ ID NO: 480376 - DNA, 75 bp, synthetic construct
  source 1..75: mol_type = other DNA
aatctgcacaccgctgcctggcgcggtttccctgcttaacgccattcgcggcaatgccaaaatcggcatcatcac

SEQ ID NO: 480377 - DNA, 75 bp, synthetic construct
  source 1..75: mol_type = other DNA
cgatgacacatatggcgagtgcactgatgcgcagtcgccgtggtgaagaaatagagccgctggatgacgaattgc

SEQ ID NO: 480378 - DNA, 75 bp, synthetic construct
  source 1..75: mol_type = other DNA
atgcggaagtcccggaagagatgaagcgcaaatggcagcgcgcgctcggcgaatacctcgaaaaacgtcagagcc

SEQ ID NO: 480379 - DNA, 75 bp, synthetic construct
  source 1..75: mol_type = other DNA
gcaagcggcgcacgtaaagcgcaattgaatatggtgcgtgaagctgtactggcgtttaacggtgatgtgcaggtt

SEQ ID NO: 480380 - DNA, 75 bp, synthetic construct
  source 1..75: mol_type = other DNA
aaatcccagcaaaatggggctgtggatgcagcgaaatttaccttccccccgccgcaaggcgtcacggtagatgat

SEQ ID NO: 480381 - DNA, 75 bp, synthetic construct
  source 1..75: mol_type = other DNA
cgggatgacgattaacggaaaccctgtgccaactcaggccgcgctactgggcgttaactccaggcttaaggataa

SEQ ID NO: 480382 - DNA, 75 bp, synthetic construct
  source 1..75: mol_type = other DNA
tatttcttgaaaccgaagaaatggccggaatgacgatcaacggaaatcaggtcccaacccaggctgcgttacagg

SEQ ID NO: 480383 - DNA, 75 bp, synthetic construct
  source 1..75: mol_type = other DNA
atgaaaatatactggacaagaaaaaacattcctgaactttcagcacttccaccttcattaagaaagaaaaatttt

SEQ ID NO: 480384 - DNA, 75 bp, synthetic construct
  source 1..75: mol_type = other DNA
atgcgaactttctatttctctctgttccttctggtcggggggggagtcaacgcttctgttcagaaaaccgtattc

SEQ ID NO: 480385 - DNA, 75 bp, synthetic construct
  source 1..75: mol_type = other DNA
catgtatgaggctgccggtggcgataagaagttttatcgcgaagggacatttgttaacggcgctgcgcagggata

SEQ ID NO: 480386 - DNA, 75 bp, synthetic construct
  source 1..75: mol_type = other DNA
aactgaaagatccgaagatcgccaaactgttcgataccaacggcgacggtaaagcggatttgactggctgtaacc

SEQ ID NO: 480387 - DNA, 75 bp, synthetic construct
  source 1..75: mol_type = other DNA
atgaaaaatttatcgctttcagtacttctgcttctggcaggggggggttctcacgccgctgttcagaaaaccgta

SEQ ID NO: 480388 - DNA, 75 bp, synthetic construct
  source 1..75: mol_type = other DNA
cagtttcgttttcgtgcacaaccagtgtttccggaaaatgtgaaggcgggagaatacacgggtgcactgaccttt

SEQ ID NO: 480389 - DNA, 75 bp, synthetic construct
  source 1..75: mol_type = other DNA
atgaaaaaagcgctcttattagtatgtgtgtttttttttacagggggcggggtttctcacgccgctgttcagaaa

SEQ ID NO: 480390 - DNA, 75 bp, synthetic construct
  source 1..75: mol_type = other DNA
tccggcgatgcgacctttaccgccgtaaactggacgccgctgcatgacaacatgtacgaagctgccggtggcgat

SEQ ID NO: 480391 - DNA, 75 bp, synthetic construct
  source 1..75: mol_type = other DNA
aacatcctagttttatcgaagagaatgaatttagattggtatttactccgtggatgcaaatgccagatgtgcact

SEQ ID NO: 480392 - DNA, 75 bp, synthetic construct
  source 1..75: mol_type = other DNA
tttttttcttgtaatggtattaatattaaagaaatgaatgatcattttgtaacaatggtctctacgtatcaattt

SEQ ID NO: 480393 - DNA, 75 bp, synthetic construct
  source 1..75: mol_type = other DNA
ggacaccgtactgggtgagtaacgaactgaagccgggcaaagatgtggtctggttgcaggtgccgttctccgcat

SEQ ID NO: 480394 - DNA, 75 bp, synthetic construct
  source 1..75: mol_type = other DNA
gttggatcaaagcccaccagcagcagttcgatggctgggtgaatgaagcgctgggctggcagcgcagaagtaatt

SEQ ID NO: 480395 - DNA, 75 bp, synthetic construct
  source 1..75: mol_type = other DNA
gcgctggagaaattaggttataccgtcaataaacccagcgaagtagattacaacgttggctacacctcgcttgct

SEQ ID NO: 480396 - DNA, 75 bp, synthetic construct
  source 1..75: mol_type = other DNA
atgaaaaaagcattcttattagcatgtgttttttttctcactgggggcggggtttctcacgctgcggttcagaaa

SEQ ID NO: 480397 - DNA, 75 bp, synthetic construct
  source 1..75: mol_type = other DNA
gtggcatttggcgcgatggggattcagattctggtcgccgggcaggtcacaggcatcgacagctttgagattagc

SEQ ID NO: 480398 - DNA, 75 bp, synthetic construct
  source 1..75: mol_type = other DNA
tagcttttgaaaattatctgatagaatcaaatataaatcttatcgaaagaattagagctaagacattccttagcg

SEQ ID NO: 480399 - DNA, 75 bp, synthetic construct
  source 1..75: mol_type = other DNA
cgtccggtccgtcgctttttctccattatttttctcattgttctattagtttgcattcattcactgataacaact

SEQ ID NO: 480400 - DNA, 75 bp, synthetic construct
  source 1..75: mol_type = other DNA
acaagttgtagagttacctttttgaaaaccaaaaacggtaaaaagcgaaccgtgccgatttctgaggaactagag

SEQ ID NO: 480401 - DNA, 75 bp, synthetic construct
  source 1..75: mol_type = other DNA
cgtcgctttttctccattctttttctcattgttctattagtttgcattcattcactgataacaactataaaataa

SEQ ID NO: 480402 - DNA, 75 bp, synthetic construct
  source 1..75: mol_type = other DNA
atgccgatgaaacgctgtttacctttgactcgttcaccggactgcagcggatgtttcttgattacagcgtcactt

SEQ ID NO: 480403 - DNA, 75 bp, synthetic construct
  source 1..75: mol_type = other DNA
cgtctgtacgaaaacggggccacggttcagggctgttctgcttttcaggccggacagatcgccactctggatttt

SEQ ID NO: 480404 - DNA, 75 bp, synthetic construct
  source 1..75: mol_type = other DNA
tctctgctttattaatttccaatacgggaaaggggggcgaacagcgagttgttttcaatgtggatattgtaggtt

SEQ ID NO: 480405 - DNA, 75 bp, synthetic construct
  source 1..75: mol_type = other DNA
gcaaataagtagaattgaattcaatggagtatcttttcaaaatttcacagggcattgtctacggcatacatggaa

SEQ ID NO: 480406 - DNA, 75 bp, synthetic construct
  source 1..75: mol_type = other DNA
acatacatggaactatatatacagcttaaagtatataggtgtaacagacccatataaattaaacgagttagatag

SEQ ID NO: 480407 - DNA, 75 bp, synthetic construct
  source 1..75: mol_type = other DNA
tgccgttatactatcaaaatgtatatcttggtttgcttgggcgacagaaaaataagtcgttcaatactatattga

SEQ ID NO: 480408 - DNA, 75 bp, synthetic construct
  source 1..75: mol_type = other DNA
gataaacttgaaagattcgaagtagaacctcatgagttagctttttggtcgttagaaaaaaacgatattctaatt

SEQ ID NO: 480409 - DNA, 75 bp, synthetic construct
  source 1..75: mol_type = other DNA
actgctcaaacgaattgcgcaggaaaaagctcaactggtgaaagaagggaaaataaaaaaacaaaaaccgttgcc

SEQ ID NO: 480410 - DNA, 75 bp, synthetic construct
  source 1..75: mol_type = other DNA
gaattaagccaggcttgaatcgtaacgatgcttatagtttagtaattgctattccacctcgaagcgaacagaaag

SEQ ID NO: 480411 - DNA, 75 bp, synthetic construct
  source 1..75: mol_type = other DNA
tgctaatggatataaattactgacgactgcaactcctcacatatatatcagagtctctgacatgaaagatggaac

SEQ ID NO: 480412 - DNA, 75 bp, synthetic construct
  source 1..75: mol_type = other DNA
aaaatttaaaaattatgcaaacactgtgtctaactccttcttgacaatatggttgcaatcttatttcttcataaa

SEQ ID NO: 480413 - DNA, 75 bp, synthetic construct
  source 1..75: mol_type = other DNA
atttggacaggagaaaaagtaatttatcactaccatatatggaaattaaatttatttgcagaagagtactcaaac

SEQ ID NO: 480414 - DNA, 75 bp, synthetic construct
  source 1..75: mol_type = other DNA
agctaccgggccagtgggctgacattgctgactgcggcgatctcactgtggaatacgatatatatagaaagagcc

SEQ ID NO: 480415 - DNA, 75 bp, synthetic construct
  source 1..75: mol_type = other DNA
ctaaatgaacagctgatttctcatctgtccccgctgggatgggaacacatcaacttgagtggagattacgtctgg

SEQ ID NO: 480416 - DNA, 75 bp, synthetic construct
  source 1..75: mol_type = other DNA
agcagcagttaagggctgagcaagagtcgcttcagcaggcccagtctgcattgctctcagcagcaaaagaaaagc

SEQ ID NO: 480417 - DNA, 75 bp, synthetic construct
  source 1..75: mol_type = other DNA
aaaagatctaattctggtgaatataatgtttatggctccaatggagttgtaggtacacacaatgaagcatgtatt

SEQ ID NO: 480418 - DNA, 75 bp, synthetic construct
  source 1..75: mol_type = other DNA
gaatggtttcgaaagatatataattgagaatttaacaaaaacaggaactactgttgaaagcctgttgtttgaaga

SEQ ID NO: 480419 - DNA, 75 bp, synthetic construct
  source 1..75: mol_type = other DNA
tggaaaaatgtagatttttatttttaggacttcaatccgcccaacaaacccaactgcaccttgcagacgcactga

SEQ ID NO: 480420 - DNA, 75 bp, synthetic construct
  source 1..75: mol_type = other DNA
gctgattctggaactggctgtgcgcggtaaactggtgccgcaggatccgaatgacgaaccagcgtcggagctgtt

SEQ ID NO: 480421 - DNA, 75 bp, synthetic construct
  source 1..75: mol_type = other DNA
tcgtggcataacttttccaggaaatgagaagtctcaatttcaagccccaggtaaaatagcttgtttacgaacagc

SEQ ID NO: 480422 - DNA, 75 bp, synthetic construct
  source 1..75: mol_type = other DNA
atttcgacactctatttaccaccgaagccagcgtggatgcgttaaaacagaccattctgcaactggccgtaatgg

SEQ ID NO: 480423 - DNA, 75 bp, synthetic construct
  source 1..75: mol_type = other DNA
cgtcatcgtacacctttcctgaactactgccagcaagcgtggcaattgcaaaacggagcgctccagccactatgt

SEQ ID NO: 480424 - DNA, 75 bp, synthetic construct
  source 1..75: mol_type = other DNA
aaaccatttcccttatttgcgggttgctaatgtccaaagaggtgatattaacattgataagcttgaaagattcga

SEQ ID NO: 480425 - DNA, 75 bp, synthetic construct
  source 1..75: mol_type = other DNA
atttcccttatttgcgggttgctaatgtccaaagaggtgatattaatattgataaacttgaaagattcgaagtag

SEQ ID NO: 480426 - DNA, 75 bp, synthetic construct
  source 1..75: mol_type = other DNA
tctatttctttaggtagtgcaataccaaatattagcacagcacaaataaacaatatcattattccaatcccccca

SEQ ID NO: 480427 - DNA, 75 bp, synthetic construct
  source 1..75: mol_type = other DNA
caggccagcgaaatgctgttgcagcgcttacaacactgggcgttgaaacgtgattcgctgattattctttttgaa

SEQ ID NO: 480428 - DNA, 75 bp, synthetic construct
  source 1..75: mol_type = other DNA
agaaagtctattagagtgcactaaatccgcccaacaaacccaactgcaccttgcagacgcactgactgacgcggc

SEQ ID NO: 480429 - DNA, 75 bp, synthetic construct
  source 1..75: mol_type = other DNA
cgtttatctcatgtttcaaagtattattatctatttttaaagagcctattcgtattaaaacattaccaagataga

SEQ ID NO: 480430 - DNA, 75 bp, synthetic construct
  source 1..75: mol_type = other DNA
attgcccgacacactcaacaattcctccgttctgttatgacttttactatgacgaaccagggatgatcgccatct

SEQ ID NO: 480431 - DNA, 75 bp, synthetic construct
  source 1..75: mol_type = other DNA
tggttcgctgattattctttttgaacgtcatcacacacctttcctgaactactgccagcaagcgtggcaattgca

SEQ ID NO: 480432 - DNA, 75 bp, synthetic construct
  source 1..75: mol_type = other DNA
gccctgaccctgaccgagtgccaaccgttgcgccatcgtcatccagcaacgctctccggcggagagacccaacgc

SEQ ID NO: 480433 - DNA, 75 bp, synthetic construct
  source 1..75: mol_type = other DNA
ttacagcttcagttggaacaagcgctacatatccaggatacacaggttcgtacactggccgagcgagacaatatg

SEQ ID NO: 480434 - DNA, 75 bp, synthetic construct
  source 1..75: mol_type = other DNA
acactaagcatatcggcgagagcgcatccgacattttacggcgtatgttgaaattttccgccgcatcacagcctg

SEQ ID NO: 480435 - DNA, 75 bp, synthetic construct
  source 1..75: mol_type = other DNA
gccaacggtgaaaacgcgtggaaaatcggtatcatcaaagcttctgattccgaacaacgcgtggttatcgaataa

SEQ ID NO: 480436 - DNA, 75 bp, synthetic construct
  source 1..75: mol_type = other DNA
atcgcggaagggtgtctgcaatcgggctgctcgctagtgggtggcgaaacggcagagatgccggggatgtatcac

SEQ ID NO: 480437 - DNA, 75 bp, synthetic construct
  source 1..75: mol_type = other DNA
tttgacgccctgctgcaactggcaggaagctccctttcaagtgacagtgtcacaaaacaaattcgcagtgaggag

SEQ ID NO: 480438 - DNA, 75 bp, synthetic construct
  source 1..75: mol_type = other DNA
agagctgattgccagccgtctgcattatctctcctcccgttggcaagggccgtttatttcccttaactgcgcggc

SEQ ID NO: 480439 - DNA, 75 bp, synthetic construct
  source 1..75: mol_type = other DNA
tatctgattgatgataaagaacaatgcagagtctacgaactggaggaacgagttaaggaactggatgctcgggaa

SEQ ID NO: 480440 - DNA, 75 bp, synthetic construct
  source 1..75: mol_type = other DNA
cgttcacgctggcgatgggacatgacgaagcggtaaaagcctacgagcagaatatttccgcgctggcgattgccg

SEQ ID NO: 480441 - DNA, 75 bp, synthetic construct
  source 1..75: mol_type = other DNA
ggtaaaagcctacgagcagaatatttccgcgctggcgattgccgcacagtttattagcggtgacggcgcagcgtg

SEQ ID NO: 480442 - DNA, 75 bp, synthetic construct
  source 1..75: mol_type = other DNA
gatttcctatcgctcgcgggaaaaatcgatagaagtggcgcgacacaaggcgctacgggcgatgaatattgcgtt

SEQ ID NO: 480443 - DNA, 75 bp, synthetic construct
  source 1..75: mol_type = other DNA
gacttaaaacgtcacgacaccattggtattgatctggtcgccatgtgcgttaatgacctggtggtgcaaggtgca

SEQ ID NO: 480444 - DNA, 75 bp, synthetic construct
  source 1..75: mol_type = other DNA
ggttgtttattaatacgctggcagaatcaccagaatgtaaagattacccgagcgtcatcagcggttatttaggta

SEQ ID NO: 480445 - DNA, 75 bp, synthetic construct
  source 1..75: mol_type = other DNA
cacagtttattagcggtgacggcgcagcgtgggtgaaagtggtcagcgtcattctcaatatctttgctgtaatga

SEQ ID NO: 480446 - DNA, 75 bp, synthetic construct
  source 1..75: mol_type = other DNA
gggaagctgagagttgagcttgaggaagtaaaacaacacgctgaagaattatccgaaaccaaggctgttcgtaac

SEQ ID NO: 480447 - DNA, 75 bp, synthetic construct
  source 1..75: mol_type = other DNA
ggattaaaggcagcgatggcatcgcacgcgtcttttactgcaccctggcaggaaaacgcatcatcatgctgcata

SEQ ID NO: 480448 - DNA, 75 bp, synthetic construct
  source 1..75: mol_type = other DNA
gtgagcgaaattgactatcaggcactgcgtgctaaggcagagaaagcaacgtgtggtgcgtggtcgctcgaatat

SEQ ID NO: 480449 - DNA, 75 bp, synthetic construct
  source 1..75: mol_type = other DNA
caacattggggaatgtgccgacatatggtggcccattagatagttacaccattccaacaaaggacggtgacggtg

SEQ ID NO: 480450 - DNA, 75 bp, synthetic construct
  source 1..75: mol_type = other DNA
gctgcagtgggctccgctacggtggcaatgatgggggcaacggcaattgttgcacccatgctgccgctgtatccc

SEQ ID NO: 480451 - DNA, 75 bp, synthetic construct
  source 1..75: mol_type = other DNA
tgaatatggcgcgtgagagtggtttgtatatcttggttgagtttattggcaaccctatcactgccatgtttatcg

SEQ ID NO: 480452 - DNA, 75 bp, synthetic construct
  source 1..75: mol_type = other DNA
ctggactgagtgcaataccttcgaagggtattacgattggtcgagaaacaaatggtgggcagttactgacgatgg

SEQ ID NO: 480453 - DNA, 75 bp, synthetic construct
  source 1..75: mol_type = other DNA
acggccttcgatatggacatccgataaatgatgatgagcgccacgtcatgatacctaaagaaaatggctgctggc

SEQ ID NO: 480454 - DNA, 75 bp, synthetic construct
  source 1..75: mol_type = other DNA
cggttgggtagaaagcgaatgtcttgggttatatctgattgatgatagagaacaatgcagggtctacgaactgga

SEQ ID NO: 480455 - DNA, 75 bp, synthetic construct
  source 1..75: mol_type = other DNA
gggtagaaagcgaatgtcttgggttatatctgattgatgatagagaacaatgcagggtctacgaactggaggaac

SEQ ID NO: 480456 - DNA, 75 bp, synthetic construct
  source 1..75: mol_type = other DNA
ggagcgcgttaaggaactggatgctcgggaaatatcgctcccggaacgtagcagcatgcttcatcgaacagattt

SEQ ID NO: 480457 - DNA, 75 bp, synthetic construct
  source 1..75: mol_type = other DNA
aaacaacacgctgaaaaattatccgaaaccaaggctgttcgtaaccaatggcggccagatatttgcccaataacc

SEQ ID NO: 480458 - DNA, 75 bp, synthetic construct
  source 1..75: mol_type = other DNA
atacctaaagaaaatggctgctggctttatctggctgacttagaacatgcactacgtgttgctggcattcgcatc

SEQ ID NO: 480459 - DNA, 75 bp, synthetic construct
  source 1..75: mol_type = other DNA
caataaatcaagtaagctgcctgataaggcgatggattatcttttgcggaacggactggtaagtgtggaggggag

SEQ ID NO: 480460 - DNA, 75 bp, synthetic construct
  source 1..75: mol_type = other DNA
gcgcgaacaactggcaagtctcgacaaatacgcgacaaaatatcctgatgcattcaatgcagcctgcaagttaca

SEQ ID NO: 480461 - DNA, 75 bp, synthetic construct
  source 1..75: mol_type = other DNA
catcatcctgctgacgtccgacattggcagtgtattccagcgccgggacttcgcaaaaattatcgggacgctggt

SEQ ID NO: 480462 - DNA, 75 bp, synthetic construct
  source 1..75: mol_type = other DNA
ctgattggtgctgcagccttatggatactgataaaagacaacaaacagacagatgatcacagtcacaacaacaaa

SEQ ID NO: 480463 - DNA, 75 bp, synthetic construct
  source 1..75: mol_type = other DNA
cttgacgggaaggctgggatttctcaacacataatgcaacggcagcgtgggcacggtctgttcctgggtaaagca

SEQ ID NO: 480464 - DNA, 75 bp, synthetic construct
  source 1..75: mol_type = other DNA
tatgggcagagctaaactctatcagtgaacatttccataaaatatattatgatagtaagtgtggtcaatgtgttt

SEQ ID NO: 480465 - DNA, 75 bp, synthetic construct
  source 1..75: mol_type = other DNA
gatttgctcgatagtgcaaaacgctacataaaagagaacacaggtgaagatatcaatctcgacgctatcccactg

SEQ ID NO: 480466 - DNA, 75 bp, synthetic construct
  source 1..75: mol_type = other DNA
gagtctggcagtctgccagcgacagatccggaacggctgcgcgaccaggcagagttgatgggtaatctggtgatc

SEQ ID NO: 480467 - DNA, 75 bp, synthetic construct
  source 1..75: mol_type = other DNA
tatgtactgacgtgtggcagccgggcgacgtcgctcttcaacaacaagagcaaaccatccgacctggttggacgc

SEQ ID NO: 480468 - DNA, 75 bp, synthetic construct
  source 1..75: mol_type = other DNA
ctgttgcagggctgcgtaagcgtcttaccacaaaagagtttggctatataccaccggcttctgagaacagggttt

SEQ ID NO: 480469 - DNA, 75 bp, synthetic construct
  source 1..75: mol_type = other DNA
tgggcttaggtgatgaactaatccgccccagcattggcattaagccgaaaatcatgatcattctggacaatgcga

SEQ ID NO: 480470 - DNA, 75 bp, synthetic construct
  source 1..75: mol_type = other DNA
tgtcacaggcgtttgcaaaaaggtgaaagacaaagaaaaggactacaccaaagacgagatcggccagttcaccga

SEQ ID NO: 480471 - DNA, 75 bp, synthetic construct
  source 1..75: mol_type = other DNA
atagaaagaatgtggaaattaatgaacgaacatgtccggaataatcactacttcagcagtacgcgagagttcagg

SEQ ID NO: 480472 - DNA, 75 bp, synthetic construct
  source 1..75: mol_type = other DNA
cttactctgcgcgtaaccgttctgcgtctatccgtattccggtggtttcttctccgaaagcacgtcgtatcgaag

SEQ ID NO: 480473 - DNA, 75 bp, synthetic construct
  source 1..75: mol_type = other DNA
caggcgacaaatacgcaggtctgtctgagcaggcgctgtactatattggcggcgtaatcaaacacgctaaagcga

SEQ ID NO: 480474 - DNA, 75 bp, synthetic construct
  source 1..75: mol_type = other DNA
tgctgaacgagcacgaagtgaagtttgttgatttgcgcttcaccgatactaaaggtaaagaacagcacgtcacta

SEQ ID NO: 480475 - DNA, 75 bp, synthetic construct
  source 1..75: mol_type = other DNA
tagccctgcgattctttttcggtgtggaagaagatgaaaacgtaaatgagattatcgggcaagaccatgacccga

SEQ ID NO: 480476 - DNA, 75 bp, synthetic construct
  source 1..75: mol_type = other DNA
ttcactgcattgaagaataacgatattgtcgaaaatgaagtggctagatccgaaagcattgaaaatgtaatgaat

SEQ ID NO: 480477 - DNA, 75 bp, synthetic construct
  source 1..75: mol_type = other DNA
cggtatgcactgccacatgtcgctgtctaaaaacggcgtcaacctgtttgctggcgacaaatacgcaggtctgtc

SEQ ID NO: 480478 - DNA, 75 bp, synthetic construct
  source 1..75: mol_type = other DNA
ccaaacaccatggtgccgccaaaaggtgaagtatcggtggatatcccgcatgctgcaaccggggatatcagtttt

SEQ ID NO: 480479 - DNA, 75 bp, synthetic construct
  source 1..75: mol_type = other DNA
ttaattggcgcagctgctttatggatcttgataaaagaaaacaaatcaacagatgatggtgagctggtttcaact

SEQ ID NO: 480480 - DNA, 75 bp, synthetic construct
  source 1..75: mol_type = other DNA
cgacgtattacttttactattggtgctatattaatgacaactattggtctggttagcattatagagaacccatat

SEQ ID NO: 480481 - DNA, 75 bp, synthetic construct
  source 1..75: mol_type = other DNA
tggcgacaggtgttttcaatatgggcacctcactcggcgcgatgcttgctccaccgttgattgcctggtgcatta

SEQ ID NO: 480482 - DNA, 75 bp, synthetic construct
  source 1..75: mol_type = other DNA
agagaatacgctgcggataatcaacgctactaatcatcagttaccaggcgaccgtgaaagcctgttctgggtgaa

SEQ ID NO: 480483 - DNA, 75 bp, synthetic construct
  source 1..75: mol_type = other DNA
gatagaaaatgcaggtgaccaaaaagacacccagtttgtcattaccccaccgcttttttccatgtttctcctggt

SEQ ID NO: 480484 - DNA, 75 bp, synthetic construct
  source 1..75: mol_type = other DNA
agctccggcatcaactttttctgccagttcccctctgcgaaactttccaccaacgcgtgctggaaagctacgccc

SEQ ID NO: 480485 - DNA, 75 bp, synthetic construct
  source 1..75: mol_type = other DNA
ctgcaattctggctgaatggtgttaatcgtcaggagttactgcatttaatccgcaaacagtccaaaggtgaggag

SEQ ID NO: 480486 - DNA, 75 bp, synthetic construct
  source 1..75: mol_type = other DNA
gacaggcgaggtatcggtgattgtctggatgaggccgagcaagagcttatcgttaccattaacaaatatgccagt

SEQ ID NO: 480487 - DNA, 75 bp, synthetic construct
  source 1..75: mol_type = other DNA
ccggtatggtggtctttcagccacggcaatgttccggtcacgattgtctctctttctctggcgttgggtgttggg

SEQ ID NO: 480488 - DNA, 75 bp, synthetic construct
  source 1..75: mol_type = other DNA
ggacgatatggaaaatcgccagtcgtatgatgcaccagtggcactcgatagcgatattcgtcagcgtttagaact

SEQ ID NO: 480489 - DNA, 75 bp, synthetic construct
  source 1..75: mol_type = other DNA
ttgagattctggctggatggtgtaaatcgcaaagagttacttcacttaacgctgaaacaagcaaaaggcaaaata

SEQ ID NO: 480490 - DNA, 75 bp, synthetic construct
  source 1..75: mol_type = other DNA
cgttttacggtaacctgttacgtgtttatttgagctcccctgtctggtggctggtgaactattcattgcgccata

SEQ ID NO: 480491 - DNA, 75 bp, synthetic construct
  source 1..75: mol_type = other DNA
ctgaaaggcgggatttccggtcgcagtgcaaaaggaaaacgtatccacacccgtgccattcacagcatcgacacc

SEQ ID NO: 480492 - DNA, 75 bp, synthetic construct
  source 1..75: mol_type = other DNA
tgtgtgatagagatggaagttacatggatgtaatgaaatttaatgagttaaaaataaaaagaacgatatctttca

SEQ ID NO: 480493 - DNA, 75 bp, synthetic construct
  source 1..75: mol_type = other DNA
ccactgcggtggttttcggtggataaaacgcaaatcgccggtgaaagtttgcatctcaaccttcaacagcggctg

SEQ ID NO: 480494 - DNA, 75 bp, synthetic construct
  source 1..75: mol_type = other DNA
gtaatgttcctgtcactattgtctctctttctctggccttagggattggagcctggggtatgtttggtgcacaag

SEQ ID NO: 480495 - DNA, 75 bp, synthetic construct
  source 1..75: mol_type = other DNA
atttcgcactttacagcctggcatccgccattatttttggtccactcttttttcctaatcaggaaccgggaatgg

SEQ ID NO: 480496 - DNA, 75 bp, synthetic construct
  source 1..75: mol_type = other DNA
atgcacaccccagcgccgctgagaaaaagcgaagcggtactgctctttaacaatttatcagacaatctgtgtggg

SEQ ID NO: 480497 - DNA, 75 bp, synthetic construct
  source 1..75: mol_type = other DNA
ggatgatatggaaaaccgccagtcgtatgatgcaccgatggcgctggatagcgatattcgccagcgcttagagct

SEQ ID NO: 480498 - DNA, 75 bp, synthetic construct
  source 1..75: mol_type = other DNA
tgctggatagtcgtcgtgtgattcaaagcattcagttgatgaaatcgctgggcggcgggtatcaggcagagccca

SEQ ID NO: 480499 - DNA, 75 bp, synthetic construct
  source 1..75: mol_type = other DNA
gatgcaggttcgcaattacaggtggcggcgttagggatgctcaatcgccagcgcgtctcggcgaacggattttta

SEQ ID NO: 480500 - DNA, 75 bp, synthetic construct
  source 1..75: mol_type = other DNA
agcaacatgatgattgaacgttacaaccagtcagtactgaacgcggtgcgcgacgttgccgtcaacggcacgcgt

SEQ ID NO: 480501 - DNA, 75 bp, synthetic construct
  source 1..75: mol_type = other DNA
atgcctaaccctcttagcatgtacgcggtcgatgctgttgccgctattgcagaggtgagaggctggaacgcctgc

SEQ ID NO: 480502 - DNA, 75 bp, synthetic construct
  source 1..75: mol_type = other DNA
ggcattccggcgacactctcttatgagttgctcgccagacgcccggatctgcaagccatgcgctggtatgttcag

SEQ ID NO: 480503 - DNA, 75 bp, synthetic construct
  source 1..75: mol_type = other DNA
ctttccacggcgcgcgggcacagattctggcggtcgataaacaaattgctgccgttaaaagcaaatcaccgaaac

SEQ ID NO: 480504 - DNA, 75 bp, synthetic construct
  source 1..75: mol_type = other DNA
atgatcaatcgtcaactttcacgtctgctgttgtgcagcattctcggcagcacgacgctgatttccggctgtgcc

SEQ ID NO: 480505 - DNA, 75 bp, synthetic construct
  source 1..75: mol_type = other DNA
cgtaacggtaagaaaaatatcgtgtcgtattacggtaacctgttacggatttatttaagctctccggtctggtcg

SEQ ID NO: 480506 - DNA, 75 bp, synthetic construct
  source 1..75: mol_type = other DNA
aaccgcgactaaccggcagggaatttcatgatgtgcgaaaaaatcatcagccaacaggtttcttattacgacacc

SEQ ID NO: 480507 - DNA, 75 bp, synthetic construct
  source 1..75: mol_type = other DNA
tacggaagccacagtcggtttgtttgccggactggatcttgatttgtggggtgtgcatcgctcagcggttgccgc

SEQ ID NO: 480508 - DNA, 75 bp, synthetic construct
  source 1..75: mol_type = other DNA
tgttgttgtgcagcattctcagcagcgcgacgctgatttctggttgtgcgttggtgcgtaaggattcagcccctc

SEQ ID NO: 480509 - DNA, 75 bp, synthetic construct
  source 1..75: mol_type = other DNA
cacgacgctgatttccggctgtgccctggtacgtaaggattctgcacctcatcaacagctcaaaccggaacaaat

SEQ ID NO: 480510 - DNA, 75 bp, synthetic construct
  source 1..75: mol_type = other DNA
ttacgaacaaaggctatgttccatttgtacatttttttgttgtgatgactggcaatgcggacttcagtgagttac

SEQ ID NO: 480511 - DNA, 75 bp, synthetic construct
  source 1..75: mol_type = other DNA
attaatcgtttgtttgattttttcttttatttatgcgtatttaattatgtatataattacgcatgttttggatgt

SEQ ID NO: 480512 - DNA, 75 bp, synthetic construct
  source 1..75: mol_type = other DNA
ccgttccggatacgctttcagagtatgcgtttgccggattgctgcgcggcaccaagaccgaagtggtgaagtgta

SEQ ID NO: 480513 - DNA, 75 bp, synthetic construct
  source 1..75: mol_type = other DNA
agacagcgcccaaagctctgagggttaatggcttcgaagctaaagatatgattttcgagcatcctaaaaaggtgt

SEQ ID NO: 480514 - DNA, 75 bp, synthetic construct
  source 1..75: mol_type = other DNA
tctgttcttaaacaggtgtcagagaatgaagaatttgtagctaagctttcaaaacttgttagcaaagatgaagcc

SEQ ID NO: 480515 - DNA, 75 bp, synthetic construct
  source 1..75: mol_type = other DNA
agaataccaaacgcattttactggtcagccagtcacacgaggctgtaaatacagcggccgagcgcatcagaaagc

SEQ ID NO: 480516 - DNA, 75 bp, synthetic construct
  source 1..75: mol_type = other DNA
aactatgtttaaaatgaaactcgataacagagtcaatgctgttaaaatctttcttgataacatagtaacaaagag

SEQ ID NO: 480517 - DNA, 75 bp, synthetic construct
  source 1..75: mol_type = other DNA
tatatatcatactaacattttctgctgtcgtaacatgctttatgctgtcaaaacgtaacttttattcacgaagca

SEQ ID NO: 480518 - DNA, 75 bp, synthetic construct
  source 1..75: mol_type = other DNA
actactatctgacagaagcacttttaaatatattcgaaaacaaaaagcagaaccttgcctttatgctttttttat

SEQ ID NO: 480519 - DNA, 75 bp, synthetic construct
  source 1..75: mol_type = other DNA
ttgtttgaaaatcctaaaggttattcaatgccggtgctgtgcaacctgtttggtacgccgaaacgtgtcgctatg

SEQ ID NO: 480520 - DNA, 75 bp, synthetic construct
  source 1..75: mol_type = other DNA
tcactctacctacaccgggcgtccgccggatgaacctgcggtgctgggcgtggcattgaacgaagtgttcgtgcc

SEQ ID NO: 480521 - DNA, 75 bp, synthetic construct
  source 1..75: mol_type = other DNA
acagcagggtgagctaaaacgtatcacgctcccggtggatccgcatctggaaatcactgaaattgctgaccgcac

SEQ ID NO: 480522 - DNA, 75 bp, synthetic construct
  source 1..75: mol_type = other DNA
catcaattcgtaagcaagatattgatgaaagccagttcgaaattggtacgggtatcaggattactccaggcagcc

SEQ ID NO: 480523 - DNA, 75 bp, synthetic construct
  source 1..75: mol_type = other DNA
ggcagcctgagttcacagataaaacactctccaggaaacccggggcggttcatattgctaaacgccgtggctacc

SEQ ID NO: 480524 - DNA, 75 bp, synthetic construct
  source 1..75: mol_type = other DNA
ggctggtggtgtttctgtagcatcgctatttatggcgggatatttgccagggatcttaatgggtctcgcggtaat

SEQ ID NO: 480525 - DNA, 75 bp, synthetic construct
  source 1..75: mol_type = other DNA
tattgtttgtcgtgagcttggcgttgatgattcagcggttattccacagcgtcagtatctgtgtgctctgatgag

SEQ ID NO: 480526 - DNA, 75 bp, synthetic construct
  source 1..75: mol_type = other DNA
gaatgtgatgaatgcactcagaagtcttcctgtgctggttatttcagttcctcaacaggccgttttcatcaacca

SEQ ID NO: 480527 - DNA, 75 bp, synthetic construct
  source 1..75: mol_type = other DNA
ctctgttattagcactgaattatatgagtcaattgaagatggagatattgggataatcaacaatggcaatatgat

SEQ ID NO: 480528 - DNA, 75 bp, synthetic construct
  source 1..75: mol_type = other DNA
taacaatcttcaattacccattgtgccatcttcctgaaagagcttggggatttgctactcagtcaatttctgact

SEQ ID NO: 480529 - DNA, 75 bp, synthetic construct
  source 1..75: mol_type = other DNA
aagaagtggcagctattgagaaaataaaggctgcgttttcggataatctatccaagtctgacaagcctgttcgtg

SEQ ID NO: 480530 - DNA, 75 bp, synthetic construct
  source 1..75: mol_type = other DNA
tcccctggcctgaaagatgtgtattcaaacgcgatcacaacggagaagcgtgaactatttaatgctgaaattaag

SEQ ID NO: 480531 - DNA, 75 bp, synthetic construct
  source 1..75: mol_type = other DNA
gttcgctatatgactgaacgaggtcaggacgctggatatgtgttcctctccgctcaacagggagggaaaaagaaa

SEQ ID NO: 480532 - DNA, 75 bp, synthetic construct
  source 1..75: mol_type = other DNA
ctaaacacctggatgaggagctggtgaaggcaggaatgctggagcgtatgcgggatatcattgagtttgcaattg

SEQ ID NO: 480533 - DNA, 75 bp, synthetic construct
  source 1..75: mol_type = other DNA
cggcgctgattgtgctgtggctgttgtcccgcgtactggaaaacaactatttgctggcaattgcagggctggcga

SEQ ID NO: 480534 - DNA, 75 bp, synthetic construct
  source 1..75: mol_type = other DNA
tccttgctggcccggcggtagtgtctttgctggcgaaagataaaaaattacatcaccttgcgtctaaacatcgcg

SEQ ID NO: 480535 - DNA, 75 bp, synthetic construct
  source 1..75: mol_type = other DNA
ttcattaatcaaaagcaaccggtgattgtcagctatcggacgcactatccagccattgatggactgattaaggca

SEQ ID NO: 480536 - DNA, 75 bp, synthetic construct
  source 1..75: mol_type = other DNA
ttatccctgcgtcagattggtattttcgtcacgaaaatgtctctggtgtggcagaaaagtcaacactgtaccaac

SEQ ID NO: 480537 - DNA, 75 bp, synthetic construct
  source 1..75: mol_type = other DNA
ctggaaaatctcaatggtatctataacctacgctttgtcagtgaaccagataacggtatctacgacgccatgaac

SEQ ID NO: 480538 - DNA, 75 bp, synthetic construct
  source 1..75: mol_type = other DNA
gccagcaacgtgtttttgtctgggccacagaaaccccgggcctgatggccgcgctcagggaacagagtaatgact

SEQ ID NO: 480539 - DNA, 75 bp, synthetic construct
  source 1..75: mol_type = other DNA
caggaaaggcgcacgcagacgcgttaaaagccgcctggacagaaaaccacggggcggcgggtcgtgaatgggtta

SEQ ID NO: 480540 - DNA, 75 bp, synthetic construct
  source 1..75: mol_type = other DNA
atgcagttaagcggaaaccatgaggaatggcagttaagcacaacaacggggtggcattttggtgcgtacatcatg

SEQ ID NO: 480541 - DNA, 75 bp, synthetic construct
  source 1..75: mol_type = other DNA
cacggcgcagcggggcgtgagtggattaaatggcttgcggagaaccagcaggaagctaaggacgcggttagagag

SEQ ID NO: 480542 - DNA, 75 bp, synthetic construct
  source 1..75: mol_type = other DNA
tgaagtctcctgcctgaaagcgatgctgacgctgatgctgcaggcgatgggacaagctgacgcgggccgcgtgat

SEQ ID NO: 480543 - DNA, 75 bp, synthetic construct
  source 1..75: mol_type = other DNA
cctgaatggacttaatcatattgcggagttaagggcgaaagtttttggtctgaatattgagtcagagctggagcg

SEQ ID NO: 480544 - DNA, 75 bp, synthetic construct
  source 1..75: mol_type = other DNA
attatcgggcaagaccatgacccgatagggactattgcagctgcacttgacgattacaggagcgtaaatggtgag

SEQ ID NO: 480545 - DNA, 75 bp, synthetic construct
  source 1..75: mol_type = other DNA
cggtcgcctcctggacacccgtgggcggcgtatttccgtcacgctccctgctgtgatccccgatcaggtcatcat

SEQ ID NO: 480546 - DNA, 75 bp, synthetic construct
  source 1..75: mol_type = other DNA
acatttatgaaagtccgtggacaacgatttttctgctaattgttgtcagtacgtgcctcaacagtgtgattggta

SEQ ID NO: 480547 - DNA, 75 bp, synthetic construct
  source 1..75: mol_type = other DNA
tacgtgatgaatataaaagaaaagccattgcagaaaaaataataagtttgctagagtctaatattcctgtttcac

SEQ ID NO: 480548 - DNA, 75 bp, synthetic construct
  source 1..75: mol_type = other DNA
ctgtcagatgaacacctgaaagatattaccggttatcaaattattgatgatagccgtcagtgtgtgcgtgtttac

SEQ ID NO: 480549 - DNA, 75 bp, synthetic construct
  source 1..75: mol_type = other DNA
atggaaaaagccacgaaatttcacgaatacagcaacggtaaggaacatgctgacgcgttaaaggatgcctggaca

SEQ ID NO: 480550 - DNA, 75 bp, synthetic construct
  source 1..75: mol_type = other DNA
taatccgtccatgatgctgggtgtggcggtatcgttatctgcaccattaatcgggctggtgggcgctgacggctt

SEQ ID NO: 480551 - DNA, 75 bp, synthetic construct
  source 1..75: mol_type = other DNA
aatggcacttaagcacgaaagctggctggcactttggcgcgtacatcatgccggacggtacggttatcggcgaat

SEQ ID NO: 480552 - DNA, 75 bp, synthetic construct
  source 1..75: mol_type = other DNA
aaccgggctggtatatttatcacagcctgcccgccagtcatcaggcgatattttttccggtatccggcttgaaaa

SEQ ID NO: 480553 - DNA, 75 bp, synthetic construct
  source 1..75: mol_type = other DNA
tgacccgcgcgatttacccatccgtgatttagccgggtacaggaagaaggggaaccacgacggcgacccgataat

SEQ ID NO: 480554 - DNA, 75 bp, synthetic construct
  source 1..75: mol_type = other DNA
cagggaagtcctgatggtgggaaccgtgaaattaaatatttcgaaacggttgttatcagtacaggagagaaaagt

SEQ ID NO: 480555 - DNA, 75 bp, synthetic construct
  source 1..75: mol_type = other DNA
tccgtggcgggaacagcggagggctggcgcgataccgtggcgcggctggctggtggtaatccgtccatgatgctg

SEQ ID NO: 480556 - DNA, 75 bp, synthetic construct
  source 1..75: mol_type = other DNA
atactgggtgtggcaacgtcactggcagcgcctttaattggccttgtgggtgctgacggcttcggggtgcatctt

SEQ ID NO: 480557 - DNA, 75 bp, synthetic construct
  source 1..75: mol_type = other DNA
gctggctggcggtaatgcctcaatgatactgggtgtggcaacgtcactggcagcgcctttaattggccttgtggg

SEQ ID NO: 480558 - DNA, 75 bp, synthetic construct
  source 1..75: mol_type = other DNA
cataactttaatgcctgggtgaaggaattcggcacgggcaacagggaatttaaacagatggttgaacaggctgag

SEQ ID NO: 480559 - DNA, 75 bp, synthetic construct
  source 1..75: mol_type = other DNA
taccggagagctacggcgagcaggttcaccgtgtgggggaaagattcgccgtactggaggccgcgcttgtgcttt

SEQ ID NO: 480560 - DNA, 75 bp, synthetic construct
  source 1..75: mol_type = other DNA
tggcaatccgtccatgatgctgggggtggcggtatcgttatcagcgccattaatcgggctggtgggcgctgacgg

SEQ ID NO: 480561 - DNA, 75 bp, synthetic construct
  source 1..75: mol_type = other DNA
gcagatacacccgcgacggttttaacagccgatggaggcaagctaaagagagtgcagcaaaaaagcacccagatt

SEQ ID NO: 480562 - DNA, 75 bp, synthetic construct
  source 1..75: mol_type = other DNA
gtcattaaagacgtgattgctgatgcattcctgcaacagatcctgctgcgtccggctgaatatgatgttatcgcc

SEQ ID NO: 480563 - DNA, 75 bp, synthetic construct
  source 1..75: mol_type = other DNA
aacctatgacttcgaacgtctgatggacggcgctaatctgctgaaatgttcagagtttggtgaagcgatcatcga

SEQ ID NO: 480564 - DNA, 75 bp, synthetic construct
  source 1..75: mol_type = other DNA
cgtactgcgctgaacgttgtgggtaatgcgctggcggtgctggtgattgccaagtgggaacacaaatttgaccgc

SEQ ID NO: 480565 - DNA, 75 bp, synthetic construct
  source 1..75: mol_type = other DNA
gcaaacagggaaaaaagctttatgtcccgggtattccgttggggttatgaacgaggttatgttcagaggaatcct

SEQ ID NO: 480566 - DNA, 75 bp, synthetic construct
  source 1..75: mol_type = other DNA
tgttggcatttcacttcacgctctattcggcagaaggaatctatggtcaacagattcagacattttgtagttcct

SEQ ID NO: 480567 - DNA, 75 bp, synthetic construct
  source 1..75: mol_type = other DNA
ccgctgagatgatgctgcgccatatgggttggacggaagcggctgactttattgttaaaggtatggaaggcgcaa

SEQ ID NO: 480568 - DNA, 75 bp, synthetic construct
  source 1..75: mol_type = other DNA
ccgctgagatgatgctgcgccaaatgggttggacggaagcggctgacattattgttaaaggtatggaaggcgcaa

SEQ ID NO: 480569 - DNA, 75 bp, synthetic construct
  source 1..75: mol_type = other DNA
attgttaaaggtatggaaggcgcgatcaacgccaagaccgtaacctatgacttcgagcgtctgatggaaggcgct

SEQ ID NO: 480570 - DNA, 75 bp, synthetic construct
  source 1..75: mol_type = other DNA
aacctatgacttcgaacgtctgatggaaggcgctaatctgctgaaatgttcagagtttggtgacgcgatcatcga

SEQ ID NO: 480571 - DNA, 75 bp, synthetic construct
  source 1..75: mol_type = other DNA
ccgctgagatgatgctgcgccagatgggttggacggaagcggctgacgttattgttaaaggtatggaaggcgcaa

SEQ ID NO: 480572 - DNA, 75 bp, synthetic construct
  source 1..75: mol_type = other DNA
ccgctgagatgatgctgcgccacatgggttggacggaagcggctgaccttattgttaaaggtatggaaggcgcaa

SEQ ID NO: 480573 - DNA, 75 bp, synthetic construct
  source 1..75: mol_type = other DNA
gccgctgcaggctctttgtccagaatcatgaaagttctcggcggagtgatgaatatgacgcctgctaaggggctg

SEQ ID NO: 480574 - DNA, 75 bp, synthetic construct
  source 1..75: mol_type = other DNA
aaaataatatacgaggtacttataatcatgctatttaccttccggaaaggcagaaaatgatgcaatggtactgcg

SEQ ID NO: 480575 - DNA, 75 bp, synthetic construct
  source 1..75: mol_type = other DNA
gtgcgttggagaaaatgcggaaagtgcgtcagcgttgctctgaagtgtttcgctacgcaattgcaacgggtagag

SEQ ID NO: 480576 - DNA, 75 bp, synthetic construct
  source 1..75: mol_type = other DNA
aaatggttttaatactgcttggattgaaatgcagttggctcatgtggataaaaacacgatacgtggtgtatataa

SEQ ID NO: 480577 - DNA, 75 bp, synthetic construct
  source 1..75: mol_type = other DNA
accggcattcgtactgaaaatataccgccattcaatccgctgacagacgaagataatgaacccgttatggttttt

SEQ ID NO: 480578 - DNA, 75 bp, synthetic construct
  source 1..75: mol_type = other DNA
atactttttctactatccttcacgatcatgattttgatactgcttggattgagcttcagttggcccatgttgaca

SEQ ID NO: 480579 - DNA, 75 bp, synthetic construct
  source 1..75: mol_type = other DNA
aggatatgcatcagacatcatggaagcgtttaagaacgacatttttccttatgttggaacaaggcctgtgggaga

SEQ ID NO: 480580 - DNA, 75 bp, synthetic construct
  source 1..75: mol_type = other DNA
aggtcgtaaaaaccatcgcgaaaactggtgcggcattactgacgatgggcgtggcgattggcacattgacacgca

SEQ ID NO: 480581 - DNA, 75 bp, synthetic construct
  source 1..75: mol_type = other DNA
ctgggggaaaccttcctgccttcaatcaatgaaggcataaaagagatgaagccttttctggaagaagtgcgcacg

SEQ ID NO: 480582 - DNA, 75 bp, synthetic construct
  source 1..75: mol_type = other DNA
ggcattgcgttttctgcggatcaatccgaagaaattagctgctgatatgcagaaagatgcccggggcaccatgct

SEQ ID NO: 480583 - DNA, 75 bp, synthetic construct
  source 1..75: mol_type = other DNA
gaccaattaaaattgctttgtgcggcagatttgattataagtgatttttctggggctatatttgacggtatgtat

SEQ ID NO: 480584 - DNA, 75 bp, synthetic construct
  source 1..75: mol_type = other DNA
atataaccaaaaagacattgctttacatgcctacttggggggagttgggttcatattttgaacttctggatacaa

SEQ ID NO: 480585 - DNA, 75 bp, synthetic construct
  source 1..75: mol_type = other DNA
tattaagagcatcaaatcttcgtgaaagtcttttttacgtagataaagaggtaaatgcttcacagctatgtatta

SEQ ID NO: 480586 - DNA, 75 bp, synthetic construct
  source 1..75: mol_type = other DNA
gcgccgtgaagccgagggagatgtggaaataaccgcgcttccgaaaaatagcaacaaaaacagagggaaaaaata

SEQ ID NO: 480587 - DNA, 75 bp, synthetic construct
  source 1..75: mol_type = other DNA
gtactctgccttggatactgttaaaagtaccttacagcaatggcacgatcattactgtcacggattattatttta

SEQ ID NO: 480588 - DNA, 75 bp, synthetic construct
  source 1..75: mol_type = other DNA
acatcaacagggagtattgtttgcactggatgattttggtactggctatgcaacccacagctacctgcagtcgtt

SEQ ID NO: 480589 - DNA, 75 bp, synthetic construct
  source 1..75: mol_type = other DNA
aaagggtttgtacaaatggtcggcgtggatgaaatctccgggcatatagtagaaaatgttattgagctggctcgc

SEQ ID NO: 480590 - DNA, 75 bp, synthetic construct
  source 1..75: mol_type = other DNA
aaaagacttcagctatggtgttcggtagcctgatatttctattcattattctgctgacatttttctggaaaaaag

SEQ ID NO: 480591 - DNA, 75 bp, synthetic construct
  source 1..75: mol_type = other DNA
ttttaccagatcactttcatattgggatcaatatatcaccagcgcactttctgtccctgggactggagaatgact

SEQ ID NO: 480592 - DNA, 75 bp, synthetic construct
  source 1..75: mol_type = other DNA
aaaaagaaagtcattcaaaaaaatatccgttctccctgatttatatcatcccggtgaaaatgcaacttacctacg

SEQ ID NO: 480593 - DNA, 75 bp, synthetic construct
  source 1..75: mol_type = other DNA
atatcgacgaaaaacggctggagcaggtgcagaagctgctgccggcggcaatggcggccagtaaaggcattgagc

SEQ ID NO: 480594 - DNA, 75 bp, synthetic construct
  source 1..75: mol_type = other DNA
gcaaaaccgatccgctgtttaaagagttggcgcggctggttgaggaaacgggtaatgactccaacttattgatag

SEQ ID NO: 480595 - DNA, 75 bp, synthetic construct
  source 1..75: mol_type = other DNA
acaacgtccattacaacagcacgcacgtcgtcggtacatccggcggttcaacggacgacatgaaagaggcgattg

SEQ ID NO: 480596 - DNA, 75 bp, synthetic construct
  source 1..75: mol_type = other DNA
aacaccttacaaaaacggcacggtcattaccgccacggattattattttattcaggacatcatctctgtggttca

SEQ ID NO: 480597 - DNA, 75 bp, synthetic construct
  source 1..75: mol_type = other DNA
cgattacgccattaacggcggtatgcaaccgtcgcgggtggtggtggttgatattgacgaaaaacgcctggcaca

SEQ ID NO: 480598 - DNA, 75 bp, synthetic construct
  source 1..75: mol_type = other DNA
cacggcatctggaatgaacaggccgagaaatatctgctggcgcaatttggcgttgatatcggggaggccgcgcaa

SEQ ID NO: 480599 - DNA, 75 bp, synthetic construct
  source 1..75: mol_type = other DNA
tcatcaacaaccaattatctaacttgcgatagttacttagagtggatacatgatacaccttatggttgtgttata

SEQ ID NO: 480600 - DNA, 75 bp, synthetic construct
  source 1..75: mol_type = other DNA
ttaatttcactaaaaaaatcacatttgacggtggtgagttaactcctattttcagttcatggagtgagttaaaaa

SEQ ID NO: 480601 - DNA, 75 bp, synthetic construct
  source 1..75: mol_type = other DNA
tttccgtgtaggatttaatagcgcgttatattctatctatctccgtagagatggaaccttacccatgaccggaaa

SEQ ID NO: 480602 - DNA, 75 bp, synthetic construct
  source 1..75: mol_type = other DNA
tcgcaagtgggtctgatgcttgtactgaggacgggaatgattgttcagtggacaatgttagatgttttgcaataa

SEQ ID NO: 480603 - DNA, 75 bp, synthetic construct
  source 1..75: mol_type = other DNA
aaatcacttaccagacgttaattaatgaaggtctgttgcctgtcggctatacaggaactaacgcgcaaaaagcat

SEQ ID NO: 480604 - DNA, 75 bp, synthetic construct
  source 1..75: mol_type = other DNA
ggctatacaggaactaacgcgcaaaaagcatcctacaagattgtgttaaagcgttcaggaacagcacctgattat

SEQ ID NO: 480605 - DNA, 75 bp, synthetic construct
  source 1..75: mol_type = other DNA
aatgtacgcctaatggtctggtggggcgagacagtgtggggaaaatattatcatgtgtcagtggtaagtggtcgg

SEQ ID NO: 480606 - DNA, 75 bp, synthetic construct
  source 1..75: mol_type = other DNA
caacatcaaatccgtggtcagaaggcggtaaaacacgttttgatttgttaggcaaggccatgcaaacagcaggta

SEQ ID NO: 480607 - DNA, 75 bp, synthetic construct
  source 1..75: mol_type = other DNA
accaaatggggataatagttggtatgcaggatgtgatacaacaaagagtattacagcatcgataactgtttatgc

SEQ ID NO: 480608 - DNA, 75 bp, synthetic construct
  source 1..75: mol_type = other DNA
taatggtcttataacgacatcgacggcatggattgaaggcggtaaaacacgttatgatttattagggaaagccat

SEQ ID NO: 480609 - DNA, 75 bp, synthetic construct
  source 1..75: mol_type = other DNA
aatcctcgtataaaatcatattaaaacgtgatggaactacacctaactatgttattaatggtcttataacgacat

SEQ ID NO: 480610 - DNA, 75 bp, synthetic construct
  source 1..75: mol_type = other DNA
tctgctggaacagtaactgctgaaagagtagatgttgttgattacgtatgggcatcaggaaacatcagctctaac

SEQ ID NO: 480611 - DNA, 75 bp, synthetic construct
  source 1..75: mol_type = other DNA
agctggagtgagcagtccacttcatttaataatataactaaagctggacaattagtatttagagcggggtataat

SEQ ID NO: 480612 - DNA, 75 bp, synthetic construct
  source 1..75: mol_type = other DNA
cagcgtcacaaaaatctgcagccacttctgcatccaccgcgaccacgaaggcgtcagaagctgccacctcagccc

SEQ ID NO: 480613 - DNA, 75 bp, synthetic construct
  source 1..75: mol_type = other DNA
cgcgggcattcaaatccatgtgggattcggtgctggatattggtcgcccggacactgcccgggaaatgctggaga

SEQ ID NO: 480614 - DNA, 75 bp, synthetic construct
  source 1..75: mol_type = other DNA
gctacatgctggcgcacgacgtttatcgcagtttcgttcgccgtatctgtctgcttggtggcgaatcaaccggta

SEQ ID NO: 480615 - DNA, 75 bp, synthetic construct
  source 1..75: mol_type = other DNA
aataactgtgagtttaatggttttgtttgcgcaggcggctggacggaccggggtagctatgcctgtggtatgttc

SEQ ID NO: 480616 - DNA, 75 bp, synthetic construct
  source 1..75: mol_type = other DNA
ttcgttaatagcacgctgcaaagccttaagccgttgagtgtaacgggtgacatcacgtcaagtgcgtgggtttac

SEQ ID NO: 480617 - DNA, 75 bp, synthetic construct
  source 1..75: mol_type = other DNA
tcctcaagagatggctatggttttgaaagtggttgggagcaggtttacacgactggatttatgcctcagccggct

SEQ ID NO: 480618 - DNA, 75 bp, synthetic construct
  source 1..75: mol_type = other DNA
atgcaaatctccttgccttcatatcatgttttgcaatatcaatttattgttattgggggtggttgtacgatggaa

SEQ ID NO: 480619 - DNA, 75 bp, synthetic construct
  source 1..75: mol_type = other DNA
ttgttgctggacgacgagaagtggtgccagcttgcgcaattttgtgatttctcgatctttatcaacgcgccagct

SEQ ID NO: 480620 - DNA, 75 bp, synthetic construct
  source 1..75: mol_type = other DNA
tatgcgttacgcagaaaacgcataacatcaaatgcactgatgcttcttgagattaatgatatcggcagtagacct

SEQ ID NO: 480621 - DNA, 75 bp, synthetic construct
  source 1..75: mol_type = other DNA
ggcggagcgggaatactctctggtggtgctttgcggcgcagaatttcccttcgtgcaggatggcacccggcaagg

SEQ ID NO: 480622 - DNA, 75 bp, synthetic construct
  source 1..75: mol_type = other DNA
tctattaactggttgttcgtcaagaaaaaatagagctcatcctgaccccaaagttttccctcctcaaattgaagg

SEQ ID NO: 480623 - DNA, 75 bp, synthetic construct
  source 1..75: mol_type = other DNA
ttgggcgcagtgcctggcggcaccgaacgtaactttgccagctacggtcatctgatgggtgaaatgccgcgtgaa

SEQ ID NO: 480624 - DNA, 75 bp, synthetic construct
  source 1..75: mol_type = other DNA
taatggagcctttaacacaaaggcatggattgctcgatgtgcgtgggcctatgccaatagcgcaaccataccaaa

SEQ ID NO: 480625 - DNA, 75 bp, synthetic construct
  source 1..75: mol_type = other DNA
cctacgggcaaccaaagagctgggcacaattcgtgatgccacggtatttgcgatgacgccgccagccgttgatgg

SEQ ID NO: 480626 - DNA, 75 bp, synthetic construct
  source 1..75: mol_type = other DNA
ctcacgccagcctgcagccaggtggtcaggcgccagtggcaccgtctgcgcttagtgctggcacccgaacttctc

SEQ ID NO: 480627 - DNA, 75 bp, synthetic construct
  source 1..75: mol_type = other DNA
ttgaacaactgggtaaacgcggcattgcttatctgcatatgtcagaaccagattgggcggggggtgaaccgtata

SEQ ID NO: 480628 - DNA, 75 bp, synthetic construct
  source 1..75: mol_type = other DNA
tttctgtacgtgccaatgacctgccgcaaatgccgcaattgcaggtagatattgataacaataaagctgtatcgc

SEQ ID NO: 480629 - DNA, 75 bp, synthetic construct
  source 1..75: mol_type = other DNA
attctggtggttttcctctgccttgcagcactgtacgaaagctggtcagtcccgttctcggtcattctggtgatc

SEQ ID NO: 480630 - DNA, 75 bp, synthetic construct
  source 1..75: mol_type = other DNA
ggtacttatgtgaatgactttattgaccgtggtcgtgtgaaaaaagtctacattcagggcgacagtgaatttcgt

SEQ ID NO: 480631 - DNA, 75 bp, synthetic construct
  source 1..75: mol_type = other DNA
tggggcgccgatcgcattggtattcgtgtttcaccaatcggtacgttccagaacactgataatggtccgaatgaa

SEQ ID NO: 480632 - DNA, 75 bp, synthetic construct
  source 1..75: mol_type = other DNA
cgctgccgcaggatgacgcgcagcaggtggcggaggagctggaacgctacgcgcagcgcgaactcctgccgcaaa

SEQ ID NO: 480633 - DNA, 75 bp, synthetic construct
  source 1..75: mol_type = other DNA
ctggactaccgctgaatttatcgcatggctgaaggagcgtggtgctttcgccgtaccgtattggatgatgaaagg

SEQ ID NO: 480634 - DNA, 75 bp, synthetic construct
  source 1..75: mol_type = other DNA
ccgaaacgctgatcggcaaagggttaattgatgcggtggcatttggtcgtgactggattgcaaacccggatctgg

SEQ ID NO: 480635 - DNA, 75 bp, synthetic construct
  source 1..75: mol_type = other DNA
agtgcaggtttgatcattagcgaagccacccaggtttccgcccaggcaaaagggtatgcgggcgcgccaggcatt

SEQ ID NO: 480636 - DNA, 75 bp, synthetic construct
  source 1..75: mol_type = other DNA
cagctgtggcacaccggacgcatttctcacgccagcctgcaacctggcggtcaggcaccggtagcgccttcagca

SEQ ID NO: 480637 - DNA, 75 bp, synthetic construct
  source 1..75: mol_type = other DNA
tcgctgtgggtctgccgggtcaaagagttcggtccgctgattgtctctattgatacccacggcaacaacctgata

SEQ ID NO: 480638 - DNA, 75 bp, synthetic construct
  source 1..75: mol_type = other DNA
ctccctataatcagttgaatgggaaaaaggctctggttcaccttattctgatgaagcatcactggatgccaaaac

SEQ ID NO: 480639 - DNA, 75 bp, synthetic construct
  source 1..75: mol_type = other DNA
ggggtagtgtcatcagtcgaaataagcaaagttgaatcaagggcaacattacttactcttctggaccttgtctta

SEQ ID NO: 480640 - DNA, 75 bp, synthetic construct
  source 1..75: mol_type = other DNA
tgcgtgaggcggcagaaaaggcaatgcatgacgactggggatttgacacggaccttttctatgagctggtagaac

SEQ ID NO: 480641 - DNA, 75 bp, synthetic construct
  source 1..75: mol_type = other DNA
aactatcatcatggcttcgtcgttttcgtgtgtctcagacctcggatactatgagtgatattcgtgttgagaaag

SEQ ID NO: 480642 - DNA, 75 bp, synthetic construct
  source 1..75: mol_type = other DNA
gcacaaaagataaggttgtcagggctgtcttaaaatcaatgttgcgtgagtggtctgcggctgttattcgtgaac

SEQ ID NO: 480643 - DNA, 75 bp, synthetic construct
  source 1..75: mol_type = other DNA
tttgaactcagtcgggttttatttacatgctgggttcctgttcaacgtttttatacacttccggcccgccctcaa

SEQ ID NO: 480644 - DNA, 75 bp, synthetic construct
  source 1..75: mol_type = other DNA
tataaggattcatttgatgagtcatttatgcgctttattgaaagtacaaaaaaagaattaaaagaaataaggcgg

SEQ ID NO: 480645 - DNA, 75 bp, synthetic construct
  source 1..75: mol_type = other DNA
ccccgtcgccgtgaggtggctgcaataccacagccggacgaaaaaaatccggagatgcctccgcccgcggtgata

SEQ ID NO: 480646 - DNA, 75 bp, synthetic construct
  source 1..75: mol_type = other DNA
atgctttacttttctgactatgggatgtcggtcagcgatagtgctaatcctgttcatcatgatggccatatacaa

SEQ ID NO: 480647 - DNA, 75 bp, synthetic construct
  source 1..75: mol_type = other DNA
ttatccgtgaatggactgatgaagatatgagaagctacgcgcgagatatgttacaactaatatacacagaacttt

SEQ ID NO: 480648 - DNA, 75 bp, synthetic construct
  source 1..75: mol_type = other DNA
aaaagctattttgattatggatgatcctgtgacaagttttgatgaggaaagaatatcttgtattttgcagagatt

SEQ ID NO: 480649 - DNA, 75 bp, synthetic construct
  source 1..75: mol_type = other DNA
aaattggaatcatacaatagcattattaatcagctcaataatgagttggtgaagtataaagaaagtatcaattcc

SEQ ID NO: 480650 - DNA, 75 bp, synthetic construct
  source 1..75: mol_type = other DNA
aaggacctcgtaagaaacctttttttaaattggtatcagactacactttgtttgatgctttggatttatctacta

SEQ ID NO: 480651 - DNA, 75 bp, synthetic construct
  source 1..75: mol_type = other DNA
tatttctcgcattaatgaattatataaagatccaaaatcaccaaaaacacggaattattcagatgatgccgccca

SEQ ID NO: 480652 - DNA, 75 bp, synthetic construct
  source 1..75: mol_type = other DNA
tggagagattggtcctcaggcaataaaagcacttatggggatggttgatcagcgggtgcagggcactctgttaaa

SEQ ID NO: 480653 - DNA, 75 bp, synthetic construct
  source 1..75: mol_type = other DNA
ttcgacaactggcgctgcggcggcagtattaaaccagcttgtgcgttcgggaaaggtagcgagcagttcgctgga

SEQ ID NO: 480654 - DNA, 75 bp, synthetic construct
  source 1..75: mol_type = other DNA
actgaaacgtccgatcccttacgatctcaacggcaaagcgattttccacgctggccccatcgtgcgcaaaaacgg

SEQ ID NO: 480655 - DNA, 75 bp, synthetic construct
  source 1..75: mol_type = other DNA
tcgaagcaatgattgatgcgaatatgcgtccttgtgggatcaatccaaccattatttatcgtccctatagtttta

SEQ ID NO: 480656 - DNA, 75 bp, synthetic construct
  source 1..75: mol_type = other DNA
gcccggtggtgtctttacaccgacgctatttatcggtcttgccattggcatgttgtatggtcgtagcctgggatt

SEQ ID NO: 480657 - DNA, 75 bp, synthetic construct
  source 1..75: mol_type = other DNA
aagtaaaacaaatagcaatttcattcgatgtttttttagagttggcaggaaatggagaaattataagtaataatt

SEQ ID NO: 480658 - DNA, 75 bp, synthetic construct
  source 1..75: mol_type = other DNA
gcattagctatggacacacttgcagcgatgccagtcgaagaccgaggtgagatgcttaattacattaatgattat

SEQ ID NO: 480659 - DNA, 75 bp, synthetic construct
  source 1..75: mol_type = other DNA
gtatcgatatactgtataaagaagctaccgaagaagaagttaagtcgtttttaagtgaatccttcattgtacttt

SEQ ID NO: 480660 - DNA, 75 bp, synthetic construct
  source 1..75: mol_type = other DNA
tattttaggaactatcgggagtgctattagtaaatttattccgaatgcaaagggcggtgtttatgagtctccgtc

SEQ ID NO: 480661 - DNA, 75 bp, synthetic construct
  source 1..75: mol_type = other DNA
tcctggagagtattttatctgtgaactcaggctgccagatcatcgtttccgatggaagcataataagctttttct

SEQ ID NO: 480662 - DNA, 75 bp, synthetic construct
  source 1..75: mol_type = other DNA
agaaatcttgaacaacagcaggatgaacttaatgctgcgtttgcatccgggaaaataaatggttctcagtttgag

SEQ ID NO: 480663 - DNA, 75 bp, synthetic construct
  source 1..75: mol_type = other DNA
agcacggaggcgggtaatatcctcggcggtttatccccgctggcgcggggaacactcccccttaattgctctcaa

SEQ ID NO: 480664 - DNA, 75 bp, synthetic construct
  source 1..75: mol_type = other DNA
ccggtgaatcgctgcgtcgcggttcatgtggtgcggtttatccccgctggcgcggggaacacatcgacggactga

SEQ ID NO: 480665 - DNA, 75 bp, synthetic construct
  source 1..75: mol_type = other DNA
ggtttatccccgctggcgcggggaacacccgtgtgacgctcagcggcagagagtaaaaaccggtttatccccgct

SEQ ID NO: 480666 - DNA, 75 bp, synthetic construct
  source 1..75: mol_type = other DNA
agttgtctgatgtgtcgctggcctggcggcacggtttatccccgctggcgcggggaacacaattgagacgttcca

SEQ ID NO: 480667 - DNA, 75 bp, synthetic construct
  source 1..75: mol_type = other DNA
ctggcgcggggaacacttttgctgacaccggcaatactgaacggctggcggtttatccccgctggcgcggggaac

SEQ ID NO: 480668 - DNA, 75 bp, synthetic construct
  source 1..75: mol_type = other DNA
cccgctggcgcggggaacacactgtcatctctctcccactgggagatagaaacggtttatccccgctggcgcggg

SEQ ID NO: 480669 - DNA, 75 bp, synthetic construct
  source 1..75: mol_type = other DNA
cgcgttgacagctatattcgccgtcggtttatccccgctggcgcggggaacactatccagtacccgccagcgggt

SEQ ID NO: 480670 - DNA, 75 bp, synthetic construct
  source 1..75: mol_type = other DNA
ggggactcttttgtgccctggcgttttgctggctctcgcgcggtttatccccgctggcgcggggaacactttgcc

SEQ ID NO: 480671 - DNA, 75 bp, synthetic construct
  source 1..75: mol_type = other DNA
gtcatcacggtttatccccgctggcgcggggaacacgcatcgtcatgataataggatttagcgagttccggttta

SEQ ID NO: 480672 - DNA, 75 bp, synthetic construct
  source 1..75: mol_type = other DNA
ccccgctggcgcggggaacacctggtcatggtggaaaccaacggtcccggtagcggtttatccccgctggcgcgg

SEQ ID NO: 480673 - DNA, 75 bp, synthetic construct
  source 1..75: mol_type = other DNA
gtttatccccgctggcgcggggaacactgcctttatatatgccggagtgtcgttgttatcggtttatccccgctg

SEQ ID NO: 480674 - DNA, 75 bp, synthetic construct
  source 1..75: mol_type = other DNA
atccccgcaggcgcggggaactcaagccgtggcgcgggtccccgctggcgtcaaccggtttatccccgcaggcgc

SEQ ID NO: 480675 - DNA, 75 bp, synthetic construct
  source 1..75: mol_type = other DNA
cggggaacacaattgagacgttccacgcaattaaacaagccgcggtttatccccgctggcgcggggaacacttgt

SEQ ID NO: 480676 - DNA, 75 bp, synthetic construct
  source 1..75: mol_type = other DNA
acctcgatgaaagccttttactgcttggcgcggtgctcaacgctttaaagaaagccgaaccaacttctaaaaggt

SEQ ID NO: 480677 - DNA, 75 bp, synthetic construct
  source 1..75: mol_type = other DNA
ggagccaaaagcggtcacccgcgccccgcgtaagacccggagtgcgacaccggcaaaacgtggacgcccgaaaaa

SEQ ID NO: 480678 - DNA, 75 bp, synthetic construct
  source 1..75: mol_type = other DNA
cgcgccccgtaaaacgactaaaccgcgcacgcgcaaacctgccaccaaaccggcggcaaagcgcgggcgtccacc

SEQ ID NO: 480679 - DNA, 75 bp, synthetic construct
  source 1..75: mol_type = other DNA
gtctgtggatccccgcctgctgacggagacccttgaactgactgccgctgctgacatgcctgatgaagtgcgcgc

SEQ ID NO: 480680 - DNA, 75 bp, synthetic construct
  source 1..75: mol_type = other DNA
ggagattgcccgttatgccctgaagtacggtctgaccatgccgggtaaacaccgccgtaccccgccgtacatgtt

SEQ ID NO: 480681 - DNA, 75 bp, synthetic construct
  source 1..75: mol_type = other DNA
aaagagctgaaggccgcgaaaaagcgcgaactgctgccgttctggttgccgtgggtgaacggcgtgctggagcag

SEQ ID NO: 480682 - DNA, 75 bp, synthetic construct
  source 1..75: mol_type = other DNA
cccgctggcgcggggaactcttgatgaagcggcgcgtgttatagctgatggccggtttatccccgctggcgcggg

SEQ ID NO: 480683 - DNA, 75 bp, synthetic construct
  source 1..75: mol_type = other DNA
aacaccccgggccgaccaagcgattattttggagtttcggtttatccccgctggcgcggggaacacgtgactccg

SEQ ID NO: 480684 - DNA, 75 bp, synthetic construct
  source 1..75: mol_type = other DNA
cggggaacacctgtgctcctgttttgtgccgtagttaccgatcggtttatccccgctggcgcggggaacactcta

SEQ ID NO: 480685 - DNA, 75 bp, synthetic construct
  source 1..75: mol_type = other DNA
agctaaaccctaaaaaactggatttaggttcgctacaggtagcaaaggccactgattcagaaaatgaattcgaag

SEQ ID NO: 480686 - DNA, 75 bp, synthetic construct
  source 1..75: mol_type = other DNA
ctcatgccgataatcgggctcggcggtttatccccgctggcgcggggaacacgtcggcagagaatcgttcgattg

SEQ ID NO: 480687 - DNA, 75 bp, synthetic construct
  source 1..75: mol_type = other DNA
gtttatccccgctggcgcggggaacacgtcgcgcttcccgcaaacggaaaacgcggtgcaggtttatccccgctg

SEQ ID NO: 480688 - DNA, 75 bp, synthetic construct
  source 1..75: mol_type = other DNA
atccccgctggcgcggggaactctgggcggcttgccttgcagccagctccagcagcggtttatccccgctggcgc

SEQ ID NO: 480689 - DNA, 75 bp, synthetic construct
  source 1..75: mol_type = other DNA
aacttaccggggatctctggcctgcttacctttccggcagggaaaccacgcgacgcgaacatttaaccgaactgt

SEQ ID NO: 480690 - DNA, 75 bp, synthetic construct
  source 1..75: mol_type = other DNA
acagctggtttcaccgatcatgtctttgccctgatgcatctgctggggtttgcgttctgtccgcgaatcagggat

SEQ ID NO: 480691 - DNA, 75 bp, synthetic construct
  source 1..75: mol_type = other DNA
attttcgggttggcagccatggccgctatgccggtcaggtcaacctgaagtacggtcaggagccgggggtgcagt

SEQ ID NO: 480692 - DNA, 75 bp, synthetic construct
  source 1..75: mol_type = other DNA
aacgggaaagcttattcagagcaagctgaagcagtacgttaccgtcgggcaggcgttacttaacgccagagaatc

SEQ ID NO: 480693 - DNA, 75 bp, synthetic construct
  source 1..75: mol_type = other DNA
tcaccaccattcttgcggatggcatcaatcttggcctgaccaaaatggcagaagcctgccccgggagcaccaaat

SEQ ID NO: 480694 - DNA, 75 bp, synthetic construct
  source 1..75: mol_type = other DNA
ctgaacagcctgttcagcaaagccaaaagaacacaggctgagcgccttcaacagaccggaaagctaatccagtca

SEQ ID NO: 480695 - DNA, 75 bp, synthetic construct
  source 1..75: mol_type = other DNA
ccactattgcagccaataacaccgagtttgaaccggaacctgcaccggtcgccccaccgaagccgaaaccggtgg

SEQ ID NO: 480696 - DNA, 75 bp, synthetic construct
  source 1..75: mol_type = other DNA
gtttttagcctagtggatgcctgcggtcagcagcgttttttcttcagcatggataacgccctgctggtcagccat

SEQ ID NO: 480697 - DNA, 75 bp, synthetic construct
  source 1..75: mol_type = other DNA
tactgaaggactagtagaaagtacagaaacatttctatcagtgaagactgacgatctaactactttcagtatcgc

SEQ ID NO: 480698 - DNA, 75 bp, synthetic construct
  source 1..75: mol_type = other DNA
ggaaatttcagataaaggtgtaaagatcaccccactggataacagtgttccttcaacagtctctcctttagcaga

SEQ ID NO: 480699 - DNA, 75 bp, synthetic construct
  source 1..75: mol_type = other DNA
caactgaaagctacttcggcagctttgccgcttaatgatgctcttgaaactattcgtgatatgtaccgtaaacag

SEQ ID NO: 480700 - DNA, 75 bp, synthetic construct
  source 1..75: mol_type = other DNA
attgtatccccgaacttacgagagaaattaccgtaaagaatgattttaaagcattgttcaagctttataagttca

SEQ ID NO: 480701 - DNA, 75 bp, synthetic construct
  source 1..75: mol_type = other DNA
ggtgagcaaccttcacggctggcctggatgctccagcctccgggaaaaattaatggtaagaatgtcctgcaacat

SEQ ID NO: 480702 - DNA, 75 bp, synthetic construct
  source 1..75: mol_type = other DNA
agctggacggggtttacgcgtcacttcgcgcacctcaaaaataataacgtcagaccaaaagacggaagactgttg

SEQ ID NO: 480703 - DNA, 75 bp, synthetic construct
  source 1..75: mol_type = other DNA
tgggaacatctgaccgaactttatcgctacctggaactatccccgttcagccggtcaatgcaaaaagactgtatc

SEQ ID NO: 480704 - DNA, 75 bp, synthetic construct
  source 1..75: mol_type = other DNA
ccgaaggccagcgaatcgcctgggctttgctgtattactctgttatctgcgtggacctggatttattccggacaa

SEQ ID NO: 480705 - DNA, 75 bp, synthetic construct
  source 1..75: mol_type = other DNA
tatccccgctggcgcggggaacacttgttgataaagtggcgcgccaggtgcgtttacggtttatccccgctggcg

SEQ ID NO: 480706 - DNA, 75 bp, synthetic construct
  source 1..75: mol_type = other DNA
ctgaaactgggggcacgcgcgcataaggttcttgatgtaacgctgctcaacgagctggcggtcagcagcctgacg

SEQ ID NO: 480707 - DNA, 75 bp, synthetic construct
  source 1..75: mol_type = other DNA
gaacacgttatttgaatcaagttttgctaattttgactcggtttatccccgctggcgcggggaacacaaaacatg

SEQ ID NO: 480708 - DNA, 75 bp, synthetic construct
  source 1..75: mol_type = other DNA
aaatttgcgcaatgaacgagctgaagggggcactgcgggccggtgatatctgggcccggggctcccggcgctaca

SEQ ID NO: 480709 - DNA, 75 bp, synthetic construct
  source 1..75: mol_type = other DNA
tgtctccgctgggctgggagcacataaatctgacaggagactatatctggagaaacaataagaagctggcaaaag

SEQ ID NO: 480710 - DNA, 75 bp, synthetic construct
  source 1..75: mol_type = other DNA
ttcgaaaagttattaaataataacctgttaaatttacctgttggcacagaatgcggggcttatcttaatgccaga

SEQ ID NO: 480711 - DNA, 75 bp, synthetic construct
  source 1..75: mol_type = other DNA
gcactttgtagcgacacctgcggcacagccgctcagcgatgcactggatactataagggaaatataccgtaagca

SEQ ID NO: 480712 - DNA, 75 bp, synthetic construct
  source 1..75: mol_type = other DNA
acaaaacggcctggcaaaagcgttacgggaaattggccgtatcgagcgaacgttgtttatgctggactggtttcg

SEQ ID NO: 480713 - DNA, 75 bp, synthetic construct
  source 1..75: mol_type = other DNA
tttgccgttttactctgttatctgcgagggccgggttttactccagacaaaaacagtctccctcacgatggcgtt

SEQ ID NO: 480714 - DNA, 75 bp, synthetic construct
  source 1..75: mol_type = other DNA
cccttgctgaactaatgagtcgttactggattcttgagcgtggatttctgaatggtgaatataaattaatatcag

SEQ ID NO: 480715 - DNA, 75 bp, synthetic construct
  source 1..75: mol_type = other DNA
gtggctttaccggaagccatggtgaagggatatatcacccgcctggagaaccagcctgtgcagggggaagtatcg

SEQ ID NO: 480716 - DNA, 75 bp, synthetic construct
  source 1..75: mol_type = other DNA
gcctgaatgaggggctggccctgattgtggcgctgacccggcatcactggtcagtgatgtggcccctgaatcccc

SEQ ID NO: 480717 - DNA, 75 bp, synthetic construct
  source 1..75: mol_type = other DNA
tgacaccttaacggcgctggttaaccagacgcagagtaataacattcagtacaacagcacagaaaacagcggtgg

SEQ ID NO: 480718 - DNA, 75 bp, synthetic construct
  source 1..75: mol_type = other DNA
atggcccgtaaaagtgtcgatgtagatcaggaactcgatgaaaacaccggagacggtgaatttgaaagcgagcgt

SEQ ID NO: 480719 - DNA, 75 bp, synthetic construct
  source 1..75: mol_type = other DNA
caccataaaaaacaggcagaaacggtacttaatcagttgagatatcgctatcagataataaactcagaaaagcgg

SEQ ID NO: 480720 - DNA, 75 bp, synthetic construct
  source 1..75: mol_type = other DNA
ctgaatgaagggctggctctgattgtggcgctgacccggcatcactggccagtgatgtggccgctgaatacccac

SEQ ID NO: 480721 - DNA, 75 bp, synthetic construct
  source 1..75: mol_type = other DNA
ccttcagaaatccccgcccacgtttctgaaaccgtttgtggctggtgtctgtgcggcattgctggcggtctgcgt

SEQ ID NO: 480722 - DNA, 75 bp, synthetic construct
  source 1..75: mol_type = other DNA
caactgatggtacttttccccgacaatcgtaagcgtaaactgaccgccgtatgtagccatcagacgagaattggt

SEQ ID NO: 480723 - DNA, 75 bp, synthetic construct
  source 1..75: mol_type = other DNA
gctgagcgcctgaaccgtctggatgagcagcggggaaaatacatgacggtcagtgaactgaaaacggaggtgttt

SEQ ID NO: 480724 - DNA, 75 bp, synthetic construct
  source 1..75: mol_type = other DNA
cggaagccatagtgaagggatatatcacccgtctggaaaatcagctggtgcagggcgaagcgtcgtctccggtaa

SEQ ID NO: 480725 - DNA, 75 bp, synthetic construct
  source 1..75: mol_type = other DNA
cacccgcctggagaaccagcctgtgcagggtgaagtatcgtctccggtaacccttccggctcaggcactccggtc

SEQ ID NO: 480726 - DNA, 75 bp, synthetic construct
  source 1..75: mol_type = other DNA
gggtttttgcgacagaggaagacgcagaaacggaagcaagaaagatgggagataagtacgaggttcactatggac

SEQ ID NO: 480727 - DNA, 75 bp, synthetic construct
  source 1..75: mol_type = other DNA
tgtttcagaaaagtctatcgcgattgcatgagcaacggcaccggtgtagtagaaacgaacaatacagcagccaga

SEQ ID NO: 480728 - DNA, 75 bp, synthetic construct
  source 1..75: mol_type = other DNA
aaatatgtccgtatggcgctgggcggcgtgcgtgacgaagcggaaatccgtggtcaccgccgtacttacatcggt

SEQ ID NO: 480729 - DNA, 75 bp, synthetic construct
  source 1..75: mol_type = other DNA
aaactggggatcaatccagatttttacgaaaaacgcgacatccacgtgcacgtaccggaaggtgcgacgccgaaa

SEQ ID NO: 480730 - DNA, 75 bp, synthetic construct
  source 1..75: mol_type = other DNA
atatcgacgacaaacgcctggcgcaggtgcagaagctgctgccggtggatctggcggccagtaaaggcattgagc

SEQ ID NO: 480731 - DNA, 75 bp, synthetic construct
  source 1..75: mol_type = other DNA
atgacgaacgctaacgcaaatgacgggaagaccagcccggtattacccactctcgaacaggtctatgctctgctc

SEQ ID NO: 480732 - DNA, 75 bp, synthetic construct
  source 1..75: mol_type = other DNA
gaattgtttttgctcatatggaagccattaacggtgctggtgatcttgattctgaattggctgtaaatggattga

SEQ ID NO: 480733 - DNA, 75 bp, synthetic construct
  source 1..75: mol_type = other DNA
ctgtgaagcgcattgaggaagttctgactctggcgctacaaaatgaaccgtctggcatgcaggttgtgactgcaa

SEQ ID NO: 480734 - DNA, 75 bp, synthetic construct
  source 1..75: mol_type = other DNA
gacaaaatgtcttctgacatgcgtggcgatccggcctccgcactgcttgaagtgctggatccagagcagaacgta

SEQ ID NO: 480735 - DNA, 75 bp, synthetic construct
  source 1..75: mol_type = other DNA
agatataacgctggtggcaggcccggcagacacctcgcagtccgtccttaagagcaatcggtcatcactgaaagg

SEQ ID NO: 480736 - DNA, 75 bp, synthetic construct
  source 1..75: mol_type = other DNA
ctggcgtggacggaagtgggcggtgacttgctgaccattgaaaccgcgtgcgttccgggtaaaggcaaactgacc

SEQ ID NO: 480737 - DNA, 75 bp, synthetic construct
  source 1..75: mol_type = other DNA
tcaaaaaagacctgcgtcaggcgcaagaaatccttgataccgaccattatggtctggagcgcgtgaaagatcgca

SEQ ID NO: 480738 - DNA, 75 bp, synthetic construct
  source 1..75: mol_type = other DNA
tactattgccgcgcatatgccgctgaaactggctgacaaacagtccgttcttgagatgtccgacgttaacgaacg

SEQ ID NO: 480739 - DNA, 75 bp, synthetic construct
  source 1..75: mol_type = other DNA
aatacatgacggtcagtgaactgaaaacggaggtgtttggcatcatacaggcttttaaccgacacatcccggcag

SEQ ID NO: 480740 - DNA, 75 bp, synthetic construct
  source 1..75: mol_type = other DNA
acgctgaaagaaatagcggctgcgatcaataacgacccgaatttcagcacaactatcaacaatgctctggctctt

SEQ ID NO: 480741 - DNA, 75 bp, synthetic construct
  source 1..75: mol_type = other DNA
atgaaaaacaataccgcacaagcaacaaaagtcattaccgcgcatgtgccattacctatggctgataaagtcgac

SEQ ID NO: 480742 - DNA, 75 bp, synthetic construct
  source 1..75: mol_type = other DNA
ccggtgcgctgattaccccgccatttaacccgttgcaacgtacaccgattgaacatgtgctggacaccggcgtgc

SEQ ID NO: 480743 - DNA, 75 bp, synthetic construct
  source 1..75: mol_type = other DNA
tgtgtctaatggcacaagttattcaccaggatggcgcagagcgtataacactaaaaacaaacctactgcggctga

SEQ ID NO: 480744 - DNA, 75 bp, synthetic construct
  source 1..75: mol_type = other DNA
attcgggtaacagcctaggaacctataataggttaaggccgcttatcattaacaatgccaatggtgctgttacga

SEQ ID NO: 480745 - DNA, 75 bp, synthetic construct
  source 1..75: mol_type = other DNA
tatgcgtggctggacgattaagggcaaacctgccagtggtcgggccgtattgtctcaggaacaggacggcattaa

SEQ ID NO: 480746 - DNA, 75 bp, synthetic construct
  source 1..75: mol_type = other DNA
ggaaggcgcaatcaatgcgaagaccgtaacctatgacttcgaacgtctgatggaaggcgctaaactggtgaaatg

SEQ ID NO: 480747 - DNA, 75 bp, synthetic construct
  source 1..75: mol_type = other DNA
ctttaaatttatcgtgattcctgctctgggtgctgagtccaaccgcttggcaaagaacttgtactgcgcgaaaga

SEQ ID NO: 480748 - DNA, 75 bp, synthetic construct
  source 1..75: mol_type = other DNA
cccggacttcgcactgatgttcgttgcgccaatggatgccgatggcgtcaaattaatctcccgcgcctcttatga

SEQ ID NO: 480749 - DNA, 75 bp, synthetic construct
  source 1..75: mol_type = other DNA
ccgcagcttgagggttatttgcaacaaggtatttttgaacgcgcggactgggaagactctctccagggactggag

SEQ ID NO: 480750 - DNA, 75 bp, synthetic construct
  source 1..75: mol_type = other DNA
ttgccaaattaccggcactggtcgagcgtgccggaaatggcattagcggcggcggatcgattaccgcgttttata

SEQ ID NO: 480751 - DNA, 75 bp, synthetic construct
  source 1..75: mol_type = other DNA
gcaacaaaagtaattaccgcgcatgtgccattacctatggctgataaagtcgaccagatggccgccagactggaa

SEQ ID NO: 480752 - DNA, 75 bp, synthetic construct
  source 1..75: mol_type = other DNA
tatcgttctgcgcgtgacggttatggttttgaagccgactggtcggaattttatactacaacacgtaaaccatct

SEQ ID NO: 480753 - DNA, 75 bp, synthetic construct
  source 1..75: mol_type = other DNA
agcagaacgcatatcagtattcagaactgggcaccatccggtgagggtaccgaagattgttgttttattgcactg

SEQ ID NO: 480754 - DNA, 75 bp, synthetic construct
  source 1..75: mol_type = other DNA
agactgcaagaaaaatatccggtgttccatttgatggttctactgatatcactttaaccgccgcgcatgtggctg

SEQ ID NO: 480755 - DNA, 75 bp, synthetic construct
  source 1..75: mol_type = other DNA
ttgatggttcatcaagtggcacggtcgtggggaatggaacagtgccttcttctggtgcacacacccactcagtat

SEQ ID NO: 480756 - DNA, 75 bp, synthetic construct
  source 1..75: mol_type = other DNA
gtgacacactggcccggcacgaactaaaacagagcagtaaagtggctttaccggaagccatggtgaagggatata

SEQ ID NO: 480757 - DNA, 75 bp, synthetic construct
  source 1..75: mol_type = other DNA
gtcctcatgccggacgttacgccgatttgctgggacccaaaaagattgtcgtcttcggtttatgcggctgctttt

SEQ ID NO: 480758 - DNA, 75 bp, synthetic construct
  source 1..75: mol_type = other DNA
agaactatcggcggagttagctttgatggtactgcgaatattaatttacctggtgttaacgttgcgggtaatcag

SEQ ID NO: 480759 - DNA, 75 bp, synthetic construct
  source 1..75: mol_type = other DNA
atgtcgttcgggatattcgtcttggcagcattgaatataaaaacgtatggcgcgactacggctttggcgatgcgt

SEQ ID NO: 480760 - DNA, 75 bp, synthetic construct
  source 1..75: mol_type = other DNA
acggtgaatgcgcttcggatatttgatgaagcattcggtcttattttccgtcgttcagaagattttcttcatttc

SEQ ID NO: 480761 - DNA, 75 bp, synthetic construct
  source 1..75: mol_type = other DNA
caacggtgcacctggcacactggatacacttaaagaaatagctgctgcgatcaataacgacccgaatttcagcac

SEQ ID NO: 480762 - DNA, 75 bp, synthetic construct
  source 1..75: mol_type = other DNA
ttacttatataaaccacggtggagattatgcgccaggctggcggcgtgactacagtaccaaaaatcagcagcctg

SEQ ID NO: 480763 - DNA, 75 bp, synthetic construct
  source 1..75: mol_type = other DNA
accaaagcgccaatagaaagcccgagtctgacaggaacgccaagcgcgccgacggcagcgcaaggtacaaacagc

SEQ ID NO: 480764 - DNA, 75 bp, synthetic construct
  source 1..75: mol_type = other DNA
caataccttggtttaagagaactcggtaccagcggtgaaaagatccccctgttgagcacggctaacacatggagt

SEQ ID NO: 480765 - DNA, 75 bp, synthetic construct
  source 1..75: mol_type = other DNA
gaaaaagagaaagtcatcattctgggatggatgaacgatgaaaacacgctgcgcacctacggtaaaaaaacagat

SEQ ID NO: 480766 - DNA, 75 bp, synthetic construct
  source 1..75: mol_type = other DNA
gggcgtcggcatgattggcgcgggcattgtgcatccaccattcgcctgcttcgagaaagccattctcggctggtg

SEQ ID NO: 480767 - DNA, 75 bp, synthetic construct
  source 1..75: mol_type = other DNA
ccaccatggcgcgtaacggcgtcgagttcggcctgcgggtcagcggcctgccggggcagtggtttaccggcccag

SEQ ID NO: 480768 - DNA, 75 bp, synthetic construct
  source 1..75: mol_type = other DNA
atcgttatgctgggcgccagtcttgccggcaccggcgcgacgggttattacgtgctgattctgtctctggtatcc

SEQ ID NO: 480769 - DNA, 75 bp, synthetic construct
  source 1..75: mol_type = other DNA
aatggggaaatacaaacttcccgaattctgggtgttctctgtaccaatgtatctcatccgcattctggcgctttg

SEQ ID NO: 480770 - DNA, 75 bp, synthetic construct
  source 1..75: mol_type = other DNA
gatggttggcgatgccgttgcaggtgtgctcggttctggcgtctcaccgtttgtatttattgtcgcctttgcttt

SEQ ID NO: 480771 - DNA, 75 bp, synthetic construct
  source 1..75: mol_type = other DNA
acagcggtgaaaaaagatgcgccttctgaagttactaaagcggcctcttcagaaaacgtgagttcagcaaaactt

SEQ ID NO: 480772 - DNA, 75 bp, synthetic construct
  source 1..75: mol_type = other DNA
actcagcttaatcaattacttgaaaatgttctcgaaaaatactccagtttaaaagatccatattttactaacttc

SEQ ID NO: 480773 - DNA, 75 bp, synthetic construct
  source 1..75: mol_type = other DNA
tctgatcgacagggatgaactgcaaaagtatctggatgattacaatcagaagataatcgaagatttccagtcaaa

SEQ ID NO: 480774 - DNA, 75 bp, synthetic construct
  source 1..75: mol_type = other DNA
acccggcggcagaagtagcgaaagcgcgtgattgggtgaaagcgcgcatggccaaagcgggcatggtggaggcgg

SEQ ID NO: 480775 - DNA, 75 bp, synthetic construct
  source 1..75: mol_type = other DNA
tgccgtctatgtgcctttctgctcatcgtcgtttcccgctgggcagcgaagatgacgcggtgcgggcgcaggggc

SEQ ID NO: 480776 - DNA, 75 bp, synthetic construct
  source 1..75: mol_type = other DNA
ggctgccggtaatggcgcttaacgttaacaatgtcgatgttaacttcttccgtgtgaaaccagaatcactgcccg

SEQ ID NO: 480777 - DNA, 75 bp, synthetic construct
  source 1..75: mol_type = other DNA
tggtgcgtggcgtttacgcgacaataccagctggagctataacagtagcgacagttcatcaggtagcaaaaatag

SEQ ID NO: 480778 - DNA, 75 bp, synthetic construct
  source 1..75: mol_type = other DNA
cgcagcaggtcatcggcccgatgtttgccggttataagccggaagattcggggctggatatcggcgacagcgcca

SEQ ID NO: 480779 - DNA, 75 bp, synthetic construct
  source 1..75: mol_type = other DNA
ctgcgtcggtaaactggctgctgctatccagatgatcccattgccggtgatgggcggcgtttcgctgctgcttta

SEQ ID NO: 480780 - DNA, 75 bp, synthetic construct
  source 1..75: mol_type = other DNA
cggaattaattttccctgatggagagacattgcaaagtttattaacgagcaatgcttcttgtcccttaccacgct

SEQ ID NO: 480781 - DNA, 75 bp, synthetic construct
  source 1..75: mol_type = other DNA
gaaaaagagaaagtcatcattctgggtaatgactccaacttattgatagtgttttatgttcagataatgcccgat

SEQ ID NO: 480782 - DNA, 75 bp, synthetic construct
  source 1..75: mol_type = other DNA
cacgggtaaaatttggtgctggtcgttatcgtctcttctttcgttatagtgaaaagagaaagtcatcattctggg

SEQ ID NO: 480783 - DNA, 75 bp, synthetic construct
  source 1..75: mol_type = other DNA
cgcgatgaaaattatcggcgaaatcgatctgcgcttaatgctggcgcaggcgctgcatatgggcgatgaatgcca

SEQ ID NO: 480784 - DNA, 75 bp, synthetic construct
  source 1..75: mol_type = other DNA
ccattccgcagcaactgattttacccgccactgtgcgaaaagggattgtggttaatgtcgccgagatgcgtctgt

SEQ ID NO: 480785 - DNA, 75 bp, synthetic construct
  source 1..75: mol_type = other DNA
atacctgttcgataacgtgcctgtaggtacacgcgtacagattattgatcaaccgataaaatatacgacggagcc

SEQ ID NO: 480786 - DNA, 75 bp, synthetic construct
  source 1..75: mol_type = other DNA
tgctactgcccgaaaggggattgtcgttaacgtcgctgagatgcgtctttattattacccgccagacagcaatac

SEQ ID NO: 480787 - DNA, 75 bp, synthetic construct
  source 1..75: mol_type = other DNA
cggagttggtgtttcctgatggggaaacattacgtgaaatactcacttcactagcagtaccacaacctgccatct

SEQ ID NO: 480788 - DNA, 75 bp, synthetic construct
  source 1..75: mol_type = other DNA
cggagttttaataaaaccttgcatatccccgccttctttagactggaaaaaaatttcacgcatgacaaattatgc

SEQ ID NO: 480789 - DNA, 75 bp, synthetic construct
  source 1..75: mol_type = other DNA
gatatgccttttgattctgtgataaatcagataaaccaacatgcagataattcaggttttatagctgctctggat

SEQ ID NO: 480790 - DNA, 75 bp, synthetic construct
  source 1..75: mol_type = other DNA
agatgcagttaagattattggtgcgctgattactgaatatgtcaaaagcacctctggttttgataagcctcatga

SEQ ID NO: 480791 - DNA, 75 bp, synthetic construct
  source 1..75: mol_type = other DNA
atctttctttgcaaactttttgccgtgctggccagcagtggttccggcgcgccaggcggtgtgtttacgccaaca

SEQ ID NO: 480792 - DNA, 75 bp, synthetic construct
  source 1..75: mol_type = other DNA
atggtggaaacgaggcgcattggtcgcttcggcaacattcattccacaattgatgctgttcaccaccatttgcag

SEQ ID NO: 480793 - DNA, 75 bp, synthetic construct
  source 1..75: mol_type = other DNA
taagctgggcagaagctcccgctggcttgaaagcgaagtggaagcctggctacagcagcgtatcaccgactccag

SEQ ID NO: 480794 - DNA, 75 bp, synthetic construct
  source 1..75: mol_type = other DNA
aagaccagttcgttgatatggcttttatcacccgcctgctgggggtcagcgataaatggatttaccgactcatta

SEQ ID NO: 480795 - DNA, 75 bp, synthetic construct
  source 1..75: mol_type = other DNA
ttaaccgccccgccgctgtttacgatcattgccggaatattcctttgtaaactgttcgcagtacttgccagtagt

SEQ ID NO: 480796 - DNA, 75 bp, synthetic construct
  source 1..75: mol_type = other DNA
ggtagcctggtcaatgctgccgcgaatctttctccgtggcgtcggctattaactccggcgctcggtggattagcg

SEQ ID NO: 480797 - DNA, 75 bp, synthetic construct
  source 1..75: mol_type = other DNA
ggcgttggcaaccatcgtcggcattggcttaagcctgatcttcaaactgattagcatactgcgcccggaagaagt

SEQ ID NO: 480798 - DNA, 75 bp, synthetic construct
  source 1..75: mol_type = other DNA
cggcgattttcgccatcctgctctcttgcgtcggtaaactggctgccgcgattcagatgatcccattaccggtta

SEQ ID NO: 480799 - DNA, 75 bp, synthetic construct
  source 1..75: mol_type = other DNA
aatcggcagaacagggaaattccgatggtcagtattatttggcacatctgtatgataaaggcgcagaaggtgtag

SEQ ID NO: 480800 - DNA, 75 bp, synthetic construct
  source 1..75: mol_type = other DNA
gcgacaaattcgttgatatggcctttatcacgcaactcaccggtttaacagacaaatggttttataaactgatac

SEQ ID NO: 480801 - DNA, 75 bp, synthetic construct
  source 1..75: mol_type = other DNA
ggccgcagctcccgatggctgaaaagcgaagtggaagcctggctgcaggcgcgtattgcacaatcccgtccgtaa

SEQ ID NO: 480802 - DNA, 75 bp, synthetic construct
  source 1..75: mol_type = other DNA
ttccgtggtttcctggcgattatcccgattttgattggcgtgctggtgggttatgcgctctcctttgcgatgggg

SEQ ID NO: 480803 - DNA, 75 bp, synthetic construct
  source 1..75: mol_type = other DNA
ctcatcaaagatgggggctttcctgcgcccatcaaaatggggcgcagctcccgctggctgaaaagtgaagtggaa

SEQ ID NO: 480804 - DNA, 75 bp, synthetic construct
  source 1..75: mol_type = other DNA
aacgccagtctgcagatcactgatatggcactcagccccgtatccggggagcaaccgaagacagcagcgcaaact

SEQ ID NO: 480805 - DNA, 75 bp, synthetic construct
  source 1..75: mol_type = other DNA
gcggctgggcagctggtggcgcgcgccgtgtttctctcgccgccctattcggttgcagaagaggaactgtcagtt

SEQ ID NO: 480806 - DNA, 75 bp, synthetic construct
  source 1..75: mol_type = other DNA
tcatcctctgctttattgccaccgttacgctggttaacgcctgctcttataccctggcgatgtccacttgccgcg

SEQ ID NO: 480807 - DNA, 75 bp, synthetic construct
  source 1..75: mol_type = other DNA
ttggagcgtctgctcggagctggggagcagagtaaaaggaaaaagtcccgggctgttttaattagcgcgataagt

SEQ ID NO: 480808 - DNA, 75 bp, synthetic construct
  source 1..75: mol_type = other DNA
acatgccagaaaaaacaatccccatcactgtatcttgcttgattcggctgttgtctttcaggtatcccgtcgcca

SEQ ID NO: 480809 - DNA, 75 bp, synthetic construct
  source 1..75: mol_type = other DNA
actatcgcggttctttcctgattgagatgtggaccgaaaaagccaaagagccggtgctggagattattcaggcgc

SEQ ID NO: 480810 - DNA, 75 bp, synthetic construct
  source 1..75: mol_type = other DNA
aggatggtgcctttcctgcccccatcaaactgggccgtagctcccgatggctgaaaagcgaagtggaagcctggc

SEQ ID NO: 480811 - DNA, 75 bp, synthetic construct
  source 1..75: mol_type = other DNA
ggccgcagctcccgctggctgaaaagtgaagtggaagcctggctacaggcgcgtattgcacagccccgtccgtaa

SEQ ID NO: 480812 - DNA, 75 bp, synthetic construct
  source 1..75: mol_type = other DNA
atgaccagatggtcgacatggcatttatcactcaactgactggcttaaccgataagtggttttataagctcatca

SEQ ID NO: 480813 - DNA, 75 bp, synthetic construct
  source 1..75: mol_type = other DNA
tcctggcgcgtatttcccgtggtcgtaccgtgcgtgaactgtgcttcggcatggtgctggggctgacagcctcca

SEQ ID NO: 480814 - DNA, 75 bp, synthetic construct
  source 1..75: mol_type = other DNA
tgcccgctgttcttcgtcaacatcatggtgacgctctcctttattaaagacgcgaaacagaactggaaagattaa

SEQ ID NO: 480815 - DNA, 75 bp, synthetic construct
  source 1..75: mol_type = other DNA
actacttcaccgattcggtggggatgttgctgatgtatctgccgcgcatgttgttctataccgatcccatcgcta

SEQ ID NO: 480816 - DNA, 75 bp, synthetic construct
  source 1..75: mol_type = other DNA
aaatataggtacagcagagatcaacaaccgcgggaaattacacctgaaggctgacgatagcatgacctttgccaa

SEQ ID NO: 480817 - DNA, 75 bp, synthetic construct
  source 1..75: mol_type = other DNA
gcaagttatgtggtggtgaatgccaatgcaacatccggcactgcaaatgcattggtcaacttttctgtcgagtat

SEQ ID NO: 480818 - DNA, 75 bp, synthetic construct
  source 1..75: mol_type = other DNA
gggcaatcgagtggccggtgactggtgtaacatctcaacttcattacgtcgcaagttatgtggtggtgaatgcca

SEQ ID NO: 480819 - DNA, 75 bp, synthetic construct
  source 1..75: mol_type = other DNA
tatcgctcactgaagtcgatgatggtaacagcaccattaagttggttgatgcgcaaggtgcggaagttctgggcg

SEQ ID NO: 480820 - DNA, 75 bp, synthetic construct
  source 1..75: mol_type = other DNA
agaaaaaccgaacagtgcctatttcaaaggatttatatgaagaactgcctaagaataggggaaaattatttacac

SEQ ID NO: 480821 - DNA, 75 bp, synthetic construct
  source 1..75: mol_type = other DNA
gaaaaaacatccgcataaaatcgccttttttaattatcagaactatttatctgacgtaaatctggtggcaaccgc

SEQ ID NO: 480822 - DNA, 75 bp, synthetic construct
  source 1..75: mol_type = other DNA
cgagcagcggcaagctgttgctgaaggcttgctgattgagccgctgataggaaggtgccccaacattatgtgtct

SEQ ID NO: 480823 - DNA, 75 bp, synthetic construct
  source 1..75: mol_type = other DNA
gctggaggcccggatttgttggaagtcggagaatttactgttgggccagttatctatcttcccgcagaagatcct

SEQ ID NO: 480824 - DNA, 75 bp, synthetic construct
  source 1..75: mol_type = other DNA
caggggtagtagcgtcctggttgataatatacggtggcaatcttatctggcgggcatgaccgccttagaagcgaa

SEQ ID NO: 480825 - DNA, 75 bp, synthetic construct
  source 1..75: mol_type = other DNA
ggacggtattcctgatacgaatgattcctcgcttttttccctggattcgggaggagcaataggtgttgcccttaa

SEQ ID NO: 480826 - DNA, 75 bp, synthetic construct
  source 1..75: mol_type = other DNA
agcctcggtgaagcaggaaaactgacgttttctctttcagtcgtggccaaagggtgtgagtttgaagccgctgat

SEQ ID NO: 480827 - DNA, 75 bp, synthetic construct
  source 1..75: mol_type = other DNA
tgttaccctttttagctctggcatattttcccggcgctgaagccaaaataagcctcggtgaagcaggaaaactga

SEQ ID NO: 480828 - DNA, 75 bp, synthetic construct
  source 1..75: mol_type = other DNA
atgactgtcagaaaacagccaaacggcaaatggttgtgtgagtgctatcccaatggacgcaatggcaagcgcgtg

SEQ ID NO: 480829 - DNA, 75 bp, synthetic construct
  source 1..75: mol_type = other DNA
attccgtaaagccgtgcaacctctgtttgacgacttcaaaaaagatccaaaacaagctgctttgttagagaaatt

SEQ ID NO: 480830 - DNA, 75 bp, synthetic construct
  source 1..75: mol_type = other DNA
gtatccgttgaatccggtcataaatgtagatccgcaaggtttggttgatataaatttataccccgaaagtgatct

SEQ ID NO: 480831 - DNA, 75 bp, synthetic construct
  source 1..75: mol_type = other DNA
cacgatacagaacgacaggagccgcatccagacgatttatcagccggggagcttcacaccactcatcagagttga

SEQ ID NO: 480832 - DNA, 75 bp, synthetic construct
  source 1..75: mol_type = other DNA
cctgtggattgcgacgcaaactattggcctgcatacccaactggctgccaatgcgggcgcgttaaaagccggagg

SEQ ID NO: 480833 - DNA, 75 bp, synthetic construct
  source 1..75: mol_type = other DNA
tagggcagtcaattggtagcgtcaccattactgaaaccgataaaggtctggagttttcgcccgatctgaaagcat

SEQ ID NO: 480834 - DNA, 75 bp, synthetic construct
  source 1..75: mol_type = other DNA
cagcatggctgttgttatgttcgccatatctatgtgaaaacagaaggtaaggcagaagctggttttcttgatctg

SEQ ID NO: 480835 - DNA, 75 bp, synthetic construct
  source 1..75: mol_type = other DNA
ttgctggaacggcgatttccatccacaacggtacagggccgtaaggctaagatacatctggttcggtatgcagac

SEQ ID NO: 480836 - DNA, 75 bp, synthetic construct
  source 1..75: mol_type = other DNA
gtactacgcgatattctgggccatgtggatataaaaatgacgatgatttatgcccacttttcccctgaccaccta

SEQ ID NO: 480837 - DNA, 75 bp, synthetic construct
  source 1..75: mol_type = other DNA
ctgggccactggtcagcacccaatccgctcgccggactgccaacatttaaaatcgcagagggcgaactggcgttt

SEQ ID NO: 480838 - DNA, 75 bp, synthetic construct
  source 1..75: mol_type = other DNA
cctgctgagtgatgagaacccgcatcatctgcagcagctcattcgcctgccgggtcagcagtatgatgaggagtc

SEQ ID NO: 480839 - DNA, 75 bp, synthetic construct
  source 1..75: mol_type = other DNA
cagacaatgggctggtaatggaacacctataacatcccttcctattgagaatggggtaagccttttagttccaca

SEQ ID NO: 480840 - DNA, 75 bp, synthetic construct
  source 1..75: mol_type = other DNA
catgcagaaaagcttttgagcgcgcagtgaaacgagctggtatcgacttgccagagggccaatgtacccacgtgc

SEQ ID NO: 480841 - DNA, 75 bp, synthetic construct
  source 1..75: mol_type = other DNA
ggtgactggcaaacagtatctgaggtaataaataaatcgggagtatatttgtcaaaaattgatttagaaaccgac

SEQ ID NO: 480842 - DNA, 75 bp, synthetic construct
  source 1..75: mol_type = other DNA
agtctgctggtattcatttttgttaaaaataaaggattgaaagtcaatgaaagtcaaagctgtgtacatcaataa

SEQ ID NO: 480843 - DNA, 75 bp, synthetic construct
  source 1..75: mol_type = other DNA
ttaaattgaagaatggagatgaatgggaggtgtatttcgttacgcttgatgaaggtcactatatattttcctcac

SEQ ID NO: 480844 - DNA, 75 bp, synthetic construct
  source 1..75: mol_type = other DNA
gcgcgagcgacagcgagtttacgccgtcctggtgcattgcagcagggcggggcgctgtactgcgcgtgtgagcgt

SEQ ID NO: 480845 - DNA, 75 bp, synthetic construct
  source 1..75: mol_type = other DNA
acgtgataaagctcgtttgttaggactgtcgctggcgctgatcatgcgtctgggactgctgtcgctgatttcatg

SEQ ID NO: 480846 - DNA, 75 bp, synthetic construct
  source 1..75: mol_type = other DNA
ggggggaatattcttgctgtttaaagcgacgaccgagcttcatgaaaggctggaaaaccgcaatcatgattctgg

SEQ ID NO: 480847 - DNA, 75 bp, synthetic construct
  source 1..75: mol_type = other DNA
gttagtcatgcgcagggaatgggtaacgcaaacattgagaacaacggcaccctggcgctgaataatagcgctgaa

SEQ ID NO: 480848 - DNA, 75 bp, synthetic construct
  source 1..75: mol_type = other DNA
gacaggagccgcatccagacgatttatcagccggggagcttcacgccactcatcagggtcgaaactgccaccggt

SEQ ID NO: 480849 - DNA, 75 bp, synthetic construct
  source 1..75: mol_type = other DNA
gataacatatgggccatctgggcaccccatttctaatatgcaaggtacgccagaaaaacccagtgatataagata

SEQ ID NO: 480850 - DNA, 75 bp, synthetic construct
  source 1..75: mol_type = other DNA
actcaggatccgattggactgaaggggggatggaatttttatcagtatccgttgaatccggtcataaatgtagat

SEQ ID NO: 480851 - DNA, 75 bp, synthetic construct
  source 1..75: mol_type = other DNA
cgctcatcagcacggaaggggcaacagcgtggtgcgcagaatatgatgaatggggcaacctgctgagtgatgaga

SEQ ID NO: 480852 - DNA, 75 bp, synthetic construct
  source 1..75: mol_type = other DNA
ctatgacccgctacaggggaggtatattacacaagaccccattgggctggcggggggatggaacctgtataatta

SEQ ID NO: 480853 - DNA, 75 bp, synthetic construct
  source 1..75: mol_type = other DNA
atagattcaatgggactggcatcaaaatatggacacttaaataatggcggatatggagcgagacccaacaaaccg

SEQ ID NO: 480854 - DNA, 75 bp, synthetic construct
  source 1..75: mol_type = other DNA
tccttgatgccgttttctcgctggatgcggtgattaccgcggtcggaatggtcaaccatctgccggtaatgatgg

SEQ ID NO: 480855 - DNA, 75 bp, synthetic construct
  source 1..75: mol_type = other DNA
gaggtgggcatgatcgctggccaggctggctggaaagagtgaatacagcaggccttattcactcaatgtcccgta

SEQ ID NO: 480856 - DNA, 75 bp, synthetic construct
  source 1..75: mol_type = other DNA
agaaaaaataaagatcgctgatgccctgagacaaacatatcctctgacagaattactgcatgttctgggccttgc

SEQ ID NO: 480857 - DNA, 75 bp, synthetic construct
  source 1..75: mol_type = other DNA
ccgctggcgctcatcagcacggaaggggcaacagcgtggtgcgcagaatatgatgaatggggcaacctgctgagt

SEQ ID NO: 480858 - DNA, 75 bp, synthetic construct
  source 1..75: mol_type = other DNA
accggcgccgatttatctaccggtaacgcgctggatatatttggcgacacagcccagtttggcgctcttgattcg

SEQ ID NO: 480859 - DNA, 75 bp, synthetic construct
  source 1..75: mol_type = other DNA
ggataacgacgtgcagatggaattacaggctggaatagggcacatcgtcgcggtgcatgtgaaagacaccaaacc

SEQ ID NO: 480860 - DNA, 75 bp, synthetic construct
  source 1..75: mol_type = other DNA
gtgagcattatcgctggtcaggctggctggaaagagtgaatgcagaaggtcttattcgctcaatgtcccgcaaag

SEQ ID NO: 480861 - DNA, 75 bp, synthetic construct
  source 1..75: mol_type = other DNA
aagaacgttacatgattaacggcgtactgacgctggcgtcgcgttctctgcgcgggatcatgacgccgcgcggtg

SEQ ID NO: 480862 - DNA, 75 bp, synthetic construct
  source 1..75: mol_type = other DNA
atggtgttgatgtcgcggcgattgcctcggcttctcctgcgattatcgtgccggaaacccttgacccgatcaatt

SEQ ID NO: 480863 - DNA, 75 bp, synthetic construct
  source 1..75: mol_type = other DNA
atggaattcttaatggacccctcgatttgggcggggctactcacgcttgtcgttcttgaaatcgtgctgggtatc

SEQ ID NO: 480864 - DNA, 75 bp, synthetic construct
  source 1..75: mol_type = other DNA
gtcgggtacaaaaagtgcagggctggagctggttgatatatatctctggatcttcaaacgctttatggaagggaa

SEQ ID NO: 480865 - DNA, 75 bp, synthetic construct
  source 1..75: mol_type = other DNA
tggttagtatggttcgctaacaggcataataaggccattgactgtgagtacgggatatggattgtcgagccgtct

SEQ ID NO: 480866 - DNA, 75 bp, synthetic construct
  source 1..75: mol_type = other DNA
tggtacggatttacatgctttgcagcaggcgcttgatgttgagtatttgacagatgacgatgatattgcaacggt

SEQ ID NO: 480867 - DNA, 75 bp, synthetic construct
  source 1..75: mol_type = other DNA
gtgcagaactggatgttgatggcaaattgcaaattaatgccaacaaagattgggtatttgataacgatcttgaag

SEQ ID NO: 480868 - DNA, 75 bp, synthetic construct
  source 1..75: mol_type = other DNA
atatcggttacggcctgacccagcttgatttacacgctaccgacagcgatgctctggtgctgagctctaacggta

SEQ ID NO: 480869 - DNA, 75 bp, synthetic construct
  source 1..75: mol_type = other DNA
caacggtacaataagtatcgacagtgggacggtggagttgaccggcaataactatgcattcagcggatatattga

SEQ ID NO: 480870 - DNA, 75 bp, synthetic construct
  source 1..75: mol_type = other DNA
tcacatcgcctctgttcggcatcgtctggctggcagacagtgccggagcatcatgccccgctctggcagcaggtc

SEQ ID NO: 480871 - DNA, 75 bp, synthetic construct
  source 1..75: mol_type = other DNA
gcagatctggaaattgcaacggaggaagaaatctcgttgctggaagcctggaaaaagtatcgggtgttgctgaac

SEQ ID NO: 480872 - DNA, 75 bp, synthetic construct
  source 1..75: mol_type = other DNA
tataaatttgatccctttagtccggtaacgcaccgctttaaccctttgtattatgtcagcatgggaacgagtgaa

SEQ ID NO: 480873 - DNA, 75 bp, synthetic construct
  source 1..75: mol_type = other DNA
ggcggagacgcatgcccatgtgagatagtccctcgccaaggagccgcagacccaagctggcgatatgtgttaatc

SEQ ID NO: 480874 - DNA, 75 bp, synthetic construct
  source 1..75: mol_type = other DNA
caaaggtaaggtggaacggatggtgaaatacctcaaggaaaacttcttcgtccggtaccgccggttcgacagctt

SEQ ID NO: 480875 - DNA, 75 bp, synthetic construct
  source 1..75: mol_type = other DNA
atcgcaccgtctctgttcggctgcatccggctggcagaccgtgccggagcatcacgccccgctctggcagcaggt

SEQ ID NO: 480876 - DNA, 75 bp, synthetic construct
  source 1..75: mol_type = other DNA
ctggctggcagacagtgccggagcatcacaccccgctctggcagcaggtcagtcaggtggaacatcgactactga

SEQ ID NO: 480877 - DNA, 75 bp, synthetic construct
  source 1..75: mol_type = other DNA
taatgatgctcgtcatttcaccggagcgcgctttaccatcaatgtcgcagcgaacgcccacttgcagcatatcaa

SEQ ID NO: 480878 - DNA, 75 bp, synthetic construct
  source 1..75: mol_type = other DNA
atggctggcttaccgaacagcagtaacgcgctgcaacagtggcatcacttgtttgaagctgaaggggtgaaacgt

SEQ ID NO: 480879 - DNA, 75 bp, synthetic construct
  source 1..75: mol_type = other DNA
tcacatcgcctctgttcggcatcgtctggctggcagacagtgccggagcatcacgcccgctctggtagcaggtca

SEQ ID NO: 480880 - DNA, 75 bp, synthetic construct
  source 1..75: mol_type = other DNA
acaacctgaacggttgggcgaagaaagagaatctgaaaaactacgttgtctatgaaacgacgcgtaatggtcagc

SEQ ID NO: 480881 - DNA, 75 bp, synthetic construct
  source 1..75: mol_type = other DNA
acaacgtgttgaagtgcagggtgacctgaataacgcgctgacccagccgcaaaatcagcaacagctgaacaatgt

SEQ ID NO: 480882 - DNA, 75 bp, synthetic construct
  source 1..75: mol_type = other DNA
agctgaaacccgatcccagcgatcgtcgtactggtcgttctcgtcaatcttctgaacgttctgagcgtactgaac

SEQ ID NO: 480883 - DNA, 75 bp, synthetic construct
  source 1..75: mol_type = other DNA
ggtgcaaagttaactttgcggttaattcgctggggttctcccgccgcttccatgtcttcgcagcaccaaaacagg

SEQ ID NO: 480884 - DNA, 75 bp, synthetic construct
  source 1..75: mol_type = other DNA
tccacgcagggccagaacaaaaggtaaggttgagcggatggtgaaatacctcagggagaacttcttcgtccggta

SEQ ID NO: 480885 - DNA, 75 bp, synthetic construct
  source 1..75: mol_type = other DNA
caactccgggttcctgctgctggccgatcactatggcttcctgccacgggcctgccgtccacgaagggccagaac

SEQ ID NO: 480886 - DNA, 75 bp, synthetic construct
  source 1..75: mol_type = other DNA
tcgtgctttgtccagtcatcagaagctggcaacccaggtgctcaagtctgaccgtcagggcatgaccgcattggt

SEQ ID NO: 480887 - DNA, 75 bp, synthetic construct
  source 1..75: mol_type = other DNA
tatgttgcggatatcacgcttaatacgctcgatcccaaccatatcgatatcttctttcctgagtttgcccacgcc

SEQ ID NO: 480888 - DNA, 75 bp, synthetic construct
  source 1..75: mol_type = other DNA
ctggcctgttaaattgaaagggtatatgaatgcagaggtttgggacaacaattcatgtaagggatggagcacgca

SEQ ID NO: 480889 - DNA, 75 bp, synthetic construct
  source 1..75: mol_type = other DNA
gttagtcacggtacaacatggtcaatttatcaatgcagttttcctgatttgcagcagagctgtacgtcatcaggt

SEQ ID NO: 480890 - DNA, 75 bp, synthetic construct
  source 1..75: mol_type = other DNA
tcatcaaagaactaatgcgcagtatcccagaggattatcagataatactgtgtgcaatggagaataatgcattaa

SEQ ID NO: 480891 - DNA, 75 bp, synthetic construct
  source 1..75: mol_type = other DNA
atatttatgatcttgaaaggcaatatgagttagctactagttcggcaaacgaactcgaagaggattataaatttg

SEQ ID NO: 480892 - DNA, 75 bp, synthetic construct
  source 1..75: mol_type = other DNA
taactatgctcaggatctgaccacgctggatatgtgcctgtacgatggttttaacggcaacgctatcagttatga

SEQ ID NO: 480893 - DNA, 75 bp, synthetic construct
  source 1..75: mol_type = other DNA
cttcccggagttcgcccacgccacgccacgcgtacaactggatttgcatccaacaggcagcgttaacggcaacaa

SEQ ID NO: 480894 - DNA, 75 bp, synthetic construct
  source 1..75: mol_type = other DNA
aaagcttaagggatatcaatctgtcactacgacaccgaatggtactcaatgtgatggttactctaaacagcgacc

SEQ ID NO: 480895 - DNA, 75 bp, synthetic construct
  source 1..75: mol_type = other DNA
atcaatgcagaagtctggcaagatgggccatgtaaaggatggagcaagcaattagcattaaacaatggttcgggt

SEQ ID NO: 480896 - DNA, 75 bp, synthetic construct
  source 1..75: mol_type = other DNA
acaagacctgaccatgctggatatgtgcctgtatgacggttttaacggtaatggcctcagctatgaaatcttgct

SEQ ID NO: 480897 - DNA, 75 bp, synthetic construct
  source 1..75: mol_type = other DNA
atcaatcttaaacgagtacgtccggtagtgttgcccggcattcgttacgcagtgatgtgtgtccccacaccactg

SEQ ID NO: 480898 - DNA, 75 bp, synthetic construct
  source 1..75: mol_type = other DNA
tttgggggatgtttttctccgctcagtatgcccagtctgcgcctgttgtcactgcagaagtgacatatgatttag

SEQ ID NO: 480899 - DNA, 75 bp, synthetic construct
  source 1..75: mol_type = other DNA
gtcgggaaggtgttaaggaacaaaatataaacgcattattgcactggaaattatctccattacaggctcttatat

SEQ ID NO: 480900 - DNA, 75 bp, synthetic construct
  source 1..75: mol_type = other DNA
ccgttacgctgatggggtatgcgtttttgcgtgcatggcaatactggctggcgcgttaccagacgccgcatcatc

SEQ ID NO: 480901 - DNA, 75 bp, synthetic construct
  source 1..75: mol_type = other DNA
ctcagccgatgccggctactgtcaacgacggatgaaaagtgatccacttatatctccaccaacggcccaatattg

SEQ ID NO: 480902 - DNA, 75 bp, synthetic construct
  source 1..75: mol_type = other DNA
tctgccagccggatgcctggctgcggattttccatagttttgtctacgtcgagaaaaaggacgtggtggatattc

SEQ ID NO: 480903 - DNA, 75 bp, synthetic construct
  source 1..75: mol_type = other DNA
gtcccatgacatgatgcaaaacagcaattctgctgcccaccaggacagtaagcgtcgtctcagcaccgtctggca

SEQ ID NO: 480904 - DNA, 75 bp, synthetic construct
  source 1..75: mol_type = other DNA
ccttgatcggtcacggtgagaaagcattacctgcctggtttgcttcgctgggtgatttccatacttcgcaatatc

SEQ ID NO: 480905 - DNA, 75 bp, synthetic construct
  source 1..75: mol_type = other DNA
tctctcaactggaagagtggggggctgtaaaagccaccggggatcaggggagagttgccgattatatgtatccgc

SEQ ID NO: 480906 - DNA, 75 bp, synthetic construct
  source 1..75: mol_type = other DNA
gcactggcggggccgatctcctttattgcgctggtcgcgccgcatattgcccgacgcattagcggcaccgctcgc

SEQ ID NO: 480907 - DNA, 75 bp, synthetic construct
  source 1..75: mol_type = other DNA
aacttgaggactggggggctgttaaagccaccggagaccagctcgctgtcgccgaccacatctatccgcagcaga

SEQ ID NO: 480908 - DNA, 75 bp, synthetic construct
  source 1..75: mol_type = other DNA
ctggcctgtggccgtcgttttcgcacgttcaatgtcgttgatgactttaatcgtgaggcgttatcgattgaaatc

SEQ ID NO: 480909 - DNA, 75 bp, synthetic construct
  source 1..75: mol_type = other DNA
ttctggtgtctcctgacagcaacatcacgctgtcgcagggagagctgccggtcaccggcagcatcacatgggcaa

SEQ ID NO: 480910 - DNA, 75 bp, synthetic construct
  source 1..75: mol_type = other DNA
accgtgcggacgggtatcagtacacgctggatgaggatgtgagcattgacagtgacggcagcggcacggggagta

SEQ ID NO: 480911 - DNA, 75 bp, synthetic construct
  source 1..75: mol_type = other DNA
cgaaatgatgatggcagtcatcgaacaggcagaggaagactacgaatgcaaatcacttgaatttgcacgcatggc

SEQ ID NO: 480912 - DNA, 75 bp, synthetic construct
  source 1..75: mol_type = other DNA
acggcttcgatgatgcaaaccatatgattaacaacgtggtgatgcaggcagaggaagactacgaatgcaaatcac

SEQ ID NO: 480913 - DNA, 75 bp, synthetic construct
  source 1..75: mol_type = other DNA
ctgatttcggaaagcggagccaatccattcggtctgacggtggatgccgtgatggaggagtaccgtcgctggcgc

SEQ ID NO: 480914 - DNA, 75 bp, synthetic construct
  source 1..75: mol_type = other DNA
gaagcgtttcgtatgacgcagaaagacattgatgacgcgccaatggtgccgagcattccgccgctgctggcggaa

SEQ ID NO: 480915 - DNA, 75 bp, synthetic construct
  source 1..75: mol_type = other DNA
ggaccgctgccgggcgggtgaaacgtggcctccggatctggctgagtttgtggcgttgatttcggagagcggggc

SEQ ID NO: 480916 - DNA, 75 bp, synthetic construct
  source 1..75: mol_type = other DNA
cacggaccataaaaatttataatctactgaccggaaccaatgagtttattggtgaaggtgatgcatacattccac

SEQ ID NO: 480917 - DNA, 75 bp, synthetic construct
  source 1..75: mol_type = other DNA
gggaggcggaagaaacaaaaaacagcctcatgcaggtagccagtgagcatatttcgccacttcaagatgccgtag

SEQ ID NO: 480918 - DNA, 75 bp, synthetic construct
  source 1..75: mol_type = other DNA
gggacatgttctccgtttatctctccggcccgccgcagacgcagcatatgtttggtgtatccccggcggcccggg

SEQ ID NO: 480919 - DNA, 75 bp, synthetic construct
  source 1..75: mol_type = other DNA
ctggcttcgggacgtgtgtttatcttccccgaaaatccccggcacatagtgcatcagttcttcgtgtgtcagcgg

SEQ ID NO: 480920 - DNA, 75 bp, synthetic construct
  source 1..75: mol_type = other DNA
cggaacaactcgtcgcggctggctggtttaacgccgatgaaatgcagtggcgtgaaggtgaagggttatttatcc

SEQ ID NO: 480921 - DNA, 75 bp, synthetic construct
  source 1..75: mol_type = other DNA
atgtcgatgcctgcaacgtcaactaaaaccacaaagcttgcgacgtcattaatcaatgactacgccctgctgggc

SEQ ID NO: 480922 - DNA, 75 bp, synthetic construct
  source 1..75: mol_type = other DNA
cctactgatggcgatcaacggcgataccaacgttgcatcgcgcggtggcgaggggggcctgcgctggctacagcg

SEQ ID NO: 480923 - DNA, 75 bp, synthetic construct
  source 1..75: mol_type = other DNA
aagcgggttatccactggtgatcaaccacgccctgccgcattacctcactctgctggatcaggggttagatcctg

SEQ ID NO: 480924 - DNA, 75 bp, synthetic construct
  source 1..75: mol_type = other DNA
cgaaatgcagcgcagggagaagtaataaaacagatattaatcaaaccactttctgaggatgaagcaaaaaaggaa

SEQ ID NO: 480925 - DNA, 75 bp, synthetic construct
  source 1..75: mol_type = other DNA
caggaagtaatccaacatctaaatcttcattatcggttgacttgactccattgacaatttttgtggggccgaata

SEQ ID NO: 480926 - DNA, 75 bp, synthetic construct
  source 1..75: mol_type = other DNA
cgttatttatttctgaactcggcccattaccggaaaatgtcacctggttgtcgccggaaggggagtttcagaagt

SEQ ID NO: 480927 - DNA, 75 bp, synthetic construct
  source 1..75: mol_type = other DNA
atggtcgtccgtttgatgtgacaggcggtcaggggtggttcatcgacggtgagattgccgggcgtctggttgaag

SEQ ID NO: 480928 - DNA, 75 bp, synthetic construct
  source 1..75: mol_type = other DNA
cagaaccgttgaaggacacaacatgatcaagattcttggctatgacagagatggagaataccaatttacaagcat

SEQ ID NO: 480929 - DNA, 75 bp, synthetic construct
  source 1..75: mol_type = other DNA
cgatttctttgcggcatgacgatgagggggagagaaataaacttaacccagtcatggcagatgaagaacaggctt

SEQ ID NO: 480930 - DNA, 75 bp, synthetic construct
  source 1..75: mol_type = other DNA
ggcagtgtgaaaacggtgctggttgataaccagaaagcggcggtgctgaagaataacaacgggaaagtggtgttc

SEQ ID NO: 480931 - DNA, 75 bp, synthetic construct
  source 1..75: mol_type = other DNA
tccggtaccgcaggttcgacagcttcactcatgtcaatcaacaactggagcaatggatagccgatgtggctgaca

SEQ ID NO: 480932 - DNA, 75 bp, synthetic construct
  source 1..75: mol_type = other DNA
gatccgcgctgatggcctgttggtgagcgacttgctccaggcgattatcccgttatttgaactggacagttatgc

SEQ ID NO: 480933 - DNA, 75 bp, synthetic construct
  source 1..75: mol_type = other DNA
tgcagaagcagaaaaactgttccggatccgagaggcggaagaaataaaaaacagcctgatgcaggtagccagtga

SEQ ID NO: 480934 - DNA, 75 bp, synthetic construct
  source 1..75: mol_type = other DNA
atccgggaggcggaagagaaaaagacaagattaatccaggaagcgactgataacataacaattctgcaggatgct

SEQ ID NO: 480935 - DNA, 75 bp, synthetic construct
  source 1..75: mol_type = other DNA
atgacattcagaatgagtgaacaatcacggaccataaaaatttataatctactgaccggaaccaatgagtttatt

SEQ ID NO: 480936 - DNA, 75 bp, synthetic construct
  source 1..75: mol_type = other DNA
acctggctggaacacaataaaggtttttgtaacagccgacagttgcacaaaactatcgtcagcgacaaaggccgc

SEQ ID NO: 480937 - DNA, 75 bp, synthetic construct
  source 1..75: mol_type = other DNA
gcactgcgtgatgaggggcttaaacagcaggtgctggcccgaatcggtcaacgactgccaggaggtgcaagatga

SEQ ID NO: 480938 - DNA, 75 bp, synthetic construct
  source 1..75: mol_type = other DNA
acggatggtcagatgaccaacaataatctgctgatgggcaaactggcggaagtggatacaaaacccgcagctgga

SEQ ID NO: 480939 - DNA, 75 bp, synthetic construct
  source 1..75: mol_type = other DNA
ttgatcaacgtcgcgcagcacgccatcaaaacggatggtcagatgaccaacaataatctgctgatgggcaaactg

SEQ ID NO: 480940 - DNA, 75 bp, synthetic construct
  source 1..75: mol_type = other DNA
ctttgccgccgaactgacggaagccttgcgcgatgagggtcttaaacagcaggtgctggctcgaatcggccaacg

SEQ ID NO: 480941 - DNA, 75 bp, synthetic construct
  source 1..75: mol_type = other DNA
cggatcaatagcctggcgatgccggtgaaaaacgaggtgtgtgatacccgtacctggctggaacacaataaaggt

SEQ ID NO: 480942 - DNA, 75 bp, synthetic construct
  source 1..75: mol_type = other DNA
acagcctgatgcaggcagcgaatgagcatattgcgccacttcaggatgctgtagatctggaaatcgcaacggagg

SEQ ID NO: 480943 - DNA, 75 bp, synthetic construct
  source 1..75: mol_type = other DNA
attgcaacggaggaagaaatctcgttgctggaagcctggaaaaagtatcgggtattgctgaaccgtgttgatacg

SEQ ID NO: 480944 - DNA, 75 bp, synthetic construct
  source 1..75: mol_type = other DNA
gaaaaaataccgtgtgctacttaatcgcgttcagccggaaaatgctccggatatagaatggcctgaaatgccgca

SEQ ID NO: 480945 - DNA, 75 bp, synthetic construct
  source 1..75: mol_type = other DNA
tgatggaagaccaccgagggaaaacggtttattcaacagaaaccggagtagctgtaacagtgtctgaactgggaa

SEQ ID NO: 480946 - DNA, 75 bp, synthetic construct
  source 1..75: mol_type = other DNA
atcggtttccagggcgcttatctggtgctgggtctggtggcgctgggcttcaccttaatttccgtgttcacgctt

SEQ ID NO: 480947 - DNA, 75 bp, synthetic construct
  source 1..75: mol_type = other DNA
atcgcatcggtgggaaaaacgccctgctgctggctggcactattatgtcagtacgtattattggctcatcgttcg

SEQ ID NO: 480948 - DNA, 75 bp, synthetic construct
  source 1..75: mol_type = other DNA
cgttatttatttctgaactcggacctctaccggaaaatatcacctggttatccccggaaggggagtttcagaagt

SEQ ID NO: 480949 - DNA, 75 bp, synthetic construct
  source 1..75: mol_type = other DNA
cgttgattttggtgaagcgacgccagaagaacaggaacagctgacagccctcaggaaattacgaataaagttaaa

SEQ ID NO: 480950 - DNA, 75 bp, synthetic construct
  source 1..75: mol_type = other DNA
ctgcgcatcgacctgcttctcgccagccaaccgctggcagaatgttgcgtagaaaccggcatcgactatgaaatc

SEQ ID NO: 480951 - DNA, 75 bp, synthetic construct
  source 1..75: mol_type = other DNA
aatgctgggcgcgggtgttttcagtctgccgcaaaatatggcggcagttgccagcccggcagcactgctcatcgg

SEQ ID NO: 480952 - DNA, 75 bp, synthetic construct
  source 1..75: mol_type = other DNA
gcgagctcctcaggcaagagtggttatacatatgcataatgcatttgaaccaaaattgcttgagcaaaatgttaa

SEQ ID NO: 480953 - DNA, 75 bp, synthetic construct
  source 1..75: mol_type = other DNA
gaagcgaacttaatatctcccctgaagagaaaattatttttatgctgggcgtatcgtccctgacaaaggcatatt

SEQ ID NO: 480954 - DNA, 75 bp, synthetic construct
  source 1..75: mol_type = other DNA
tggatggcacaaaagcctgtccaacgtgggcgtgaacggtgtcaccggaatttctgctgatgtgttctgggatct

SEQ ID NO: 480955 - DNA, 75 bp, synthetic construct
  source 1..75: mol_type = other DNA
tcaatttcaaatccttcacctcttctgtgctgtcagatatggcgaaaatcctggcgcaggcaaccatgatgaaat

SEQ ID NO: 480956 - DNA, 75 bp, synthetic construct
  source 1..75: mol_type = other DNA
agccagcgtgaagggatgctgatctggccggattttatcagctgggacacggtgctgaatgccgaagcaacggca

SEQ ID NO: 480957 - DNA, 75 bp, synthetic construct
  source 1..75: mol_type = other DNA
gactcaccccgagcgtgtgtacagtcgcgaacagctattaaaccacgtctggggaaccaatgtttatgtagaaga

SEQ ID NO: 480958 - DNA, 75 bp, synthetic construct
  source 1..75: mol_type = other DNA
atctcaccgagtgatggcgggcgaagagccgctggagatggggccgacagaatttaaactgctgcacttttttat

SEQ ID NO: 480959 - DNA, 75 bp, synthetic construct
  source 1..75: mol_type = other DNA
gggataattaccacaaatttgttcgccatcagtcagacgattacccgcataaccccaacactgaggacttaagcc

SEQ ID NO: 480960 - DNA, 75 bp, synthetic construct
  source 1..75: mol_type = other DNA
tttttcgaatttaaaaatactgtcgatatgatgggaagcgaagacttttgtcagttcctgcgggatgatgaggag

SEQ ID NO: 480961 - DNA, 75 bp, synthetic construct
  source 1..75: mol_type = other DNA
cgaggaagctgtaaaagatttaatccgtgaagtgcagaatataacctgtgattttgtcctgaaatcatatgatga

SEQ ID NO: 480962 - DNA, 75 bp, synthetic construct
  source 1..75: mol_type = other DNA
cgatggcaattcagcgacagcatccgtattcccggatctttcgttactgcacaggcaaataccagtggcacggca

SEQ ID NO: 480963 - DNA, 75 bp, synthetic construct
  source 1..75: mol_type = other DNA
cagtcaaaaccggtcaccgttgtcgtgcgcgtggaagacggcaccggcgacgacgaagaaacgaaactcgcgcag

SEQ ID NO: 480964 - DNA, 75 bp, synthetic construct
  source 1..75: mol_type = other DNA
tatgcagcgttttatggagcgtcagactcaggccgcccggcagacaatgcaggcggcttcttcggctgcaacagc

SEQ ID NO: 480965 - DNA, 75 bp, synthetic construct
  source 1..75: mol_type = other DNA
atggctgaggcgcacatgtgggcggtggacaagcccatcactgcaacgctgattcgcgacatcgttgacggcatc

SEQ ID NO: 480966 - DNA, 75 bp, synthetic construct
  source 1..75: mol_type = other DNA
gcgcacatgtgggcggtcgataagcccattaccgcatcgctcatccgtgacattgtcgacggcattaatgccaaa

SEQ ID NO: 480967 - DNA, 75 bp, synthetic construct
  source 1..75: mol_type = other DNA
gtaaagcgggtgagtccggtacgctggcccgttcgctggatgccatcgctgaccaggcaaaacccgtgaccgttg

SEQ ID NO: 480968 - DNA, 75 bp, synthetic construct
  source 1..75: mol_type = other DNA
caatggcacttatcgggctgctgttggccgcctgttccagtagcccgacgccgccgccagaacccaacatgaaaa

SEQ ID NO: 480969 - DNA, 75 bp, synthetic construct
  source 1..75: mol_type = other DNA
gaatcaagtattatcttattggaaatagaataaaaagtctgtgtgaggttaaaaaactaattaaaatacactact

SEQ ID NO: 480970 - DNA, 75 bp, synthetic construct
  source 1..75: mol_type = other DNA
ccggtgttacaacgctgattcgtgccgatggtttccgcttctggggtaaccgtaattgctccgatgacccgctgt

SEQ ID NO: 480971 - DNA, 75 bp, synthetic construct
  source 1..75: mol_type = other DNA
cgtaattgctccgatgacccgctgtttcagtttgagaactacacccgcaccgcacaggtcatacccgacacaata

SEQ ID NO: 480972 - DNA, 75 bp, synthetic construct
  source 1..75: mol_type = other DNA
atgagtgactatcatcacggcgtgcaggtgctggagattaacgacggcacccgcgtcatttccaccgtatccacg

SEQ ID NO: 480973 - DNA, 75 bp, synthetic construct
  source 1..75: mol_type = other DNA
gtaaagcgggtgagtccggtactctggcccgttcgctggatgccatctctgaccaggcaaaacccgtgaccgttg

SEQ ID NO: 480974 - DNA, 75 bp, synthetic construct
  source 1..75: mol_type = other DNA
gtctgcactggcagaggaaaccggtcggcgtactgcggatattgataataacctcaatgcgcttggcagtacgct

SEQ ID NO: 480975 - DNA, 75 bp, synthetic construct
  source 1..75: mol_type = other DNA
gcgcgtattaatgccatgcagtacgccgatcaggctgtcagggatgcggcgatacaacgtgaaaatgaacgttac

SEQ ID NO: 480976 - DNA, 75 bp, synthetic construct
  source 1..75: mol_type = other DNA
ttatgacaagctgatttccgcaatggatttctacccgacagctcttgatgcagccgatatcagcattccaaaaga

SEQ ID NO: 480977 - DNA, 75 bp, synthetic construct
  source 1..75: mol_type = other DNA
caatgacgatataccgccagcatcctgagtcccgaatctttctctactgcaccggcaaataccagtggcacggta

SEQ ID NO: 480978 - DNA, 75 bp, synthetic construct
  source 1..75: mol_type = other DNA
aactgggcgcagacgaacaggcaatgctgctaaaagccattgaagagaaaaccttttacccgtttggcagcgatc

SEQ ID NO: 480979 - DNA, 75 bp, synthetic construct
  source 1..75: mol_type = other DNA
gtgtctgccattactacggacgtgaagttcaggatatcagcggcgttctcgctgtttttgttgaacgtcgtcagg

SEQ ID NO: 480980 - DNA, 75 bp, synthetic construct
  source 1..75: mol_type = other DNA
aagaccgtaaacgtgacggtttagtgctgggcatgtcagtaaaagagaacatgtcgctgacagcgctgcgctact

SEQ ID NO: 480981 - DNA, 75 bp, synthetic construct
  source 1..75: mol_type = other DNA
tgtttggtgcactgccattcgggatcgtctgtgtactggcctatagcacgccagatctcagtatgaacggaaaaa

SEQ ID NO: 480982 - DNA, 75 bp, synthetic construct
  source 1..75: mol_type = other DNA
gagtggtgcaatggtaaacgcctgaccgggatcagttttgctggcacgctgtttgtgctcaaactggggttggcc

SEQ ID NO: 480983 - DNA, 75 bp, synthetic construct
  source 1..75: mol_type = other DNA
ggcagaaaaagcgcagaacagcgccacgattagcatcattattgcgctattcacgattgttccggcgatctgtta

SEQ ID NO: 480984 - DNA, 75 bp, synthetic construct
  source 1..75: mol_type = other DNA
ggcggtgtgcgtacgcggtggggcgatgatgtattacgtcacatggattttgggcacgccggaagtgtttgtcgc

SEQ ID NO: 480985 - DNA, 75 bp, synthetic construct
  source 1..75: mol_type = other DNA
gcatggccgtgaaccgggatgtacagatggaaataataattttgttccatttacaattcttcgtgttcaaacagt

SEQ ID NO: 480986 - DNA, 75 bp, synthetic construct
  source 1..75: mol_type = other DNA
cgctactggcaggagcaggaattgatgcaggcagactggaaaaacggtgccatgcgggcatttcagaattttaca

SEQ ID NO: 480987 - DNA, 75 bp, synthetic construct
  source 1..75: mol_type = other DNA
tttaaaatattctctgtttgattacggcgagtccgggttaacaaatacagaattacgggcaccgagaagtaatga

SEQ ID NO: 480988 - DNA, 75 bp, synthetic construct
  source 1..75: mol_type = other DNA
gatgttctggcccccctggcaagtgattttcaggctgaaagtgaagagagtctgtcgcaggcatggcaacgctta

SEQ ID NO: 480989 - DNA, 75 bp, synthetic construct
  source 1..75: mol_type = other DNA
attatccaccaggaactgaacctgatcccgcagttaaccattgccgaaaacattttcctcggtcgtgagtttgtt

SEQ ID NO: 480990 - DNA, 75 bp, synthetic construct
  source 1..75: mol_type = other DNA
tattacaccgcggctgtgggtaaatggcatctgtctaaaatcagtaatgtcccggttccggaagataaacaaacc

SEQ ID NO: 480991 - DNA, 75 bp, synthetic construct
  source 1..75: mol_type = other DNA
gggcgcgctgttttattacgctccagagagtgctgaagccgcacctctggttgcggtactcaccagtgacggctg

SEQ ID NO: 480992 - DNA, 75 bp, synthetic construct
  source 1..75: mol_type = other DNA
gccgtcttttctgaacgcagcaagaactgtaacagccccctatgtcctcctgtgcagcgttaccctgaattaact

SEQ ID NO: 480993 - DNA, 75 bp, synthetic construct
  source 1..75: mol_type = other DNA
tacaacaaaaagagaatctcgctgcagctaaaccacaagttgttaaagagatgcaaggtgtggtaagcgagttta

SEQ ID NO: 480994 - DNA, 75 bp, synthetic construct
  source 1..75: mol_type = other DNA
caagataagaagcaaggcgaaccccataaaaacctgacctgggtaacgtcctactctcactggtttgatgaggaa

SEQ ID NO: 480995 - DNA, 75 bp, synthetic construct
  source 1..75: mol_type = other DNA
tacgtctgataatggtgcggtcatcgatggcccactaccgctaaatggtgcgcaaaaaggctataagagtcagac

SEQ ID NO: 480996 - DNA, 75 bp, synthetic construct
  source 1..75: mol_type = other DNA
tataacacggatgactacagaaaggccgagcaggcgctgacggagagtgaaccgccccgggtttcctggagagtg

SEQ ID NO: 480997 - DNA, 75 bp, synthetic construct
  source 1..75: mol_type = other DNA
tcagccgtactggcggcagtctgaagcatactgatgaacagcaggcggtgagtgattttattcgcctgttcaatg

SEQ ID NO: 480998 - DNA, 75 bp, synthetic construct
  source 1..75: mol_type = other DNA
catgcatgaagggcatctcagcggggaatttactcgagagcaggccactcaggaagtgttaatggctgccgctgt

SEQ ID NO: 480999 - DNA, 75 bp, synthetic construct
  source 1..75: mol_type = other DNA
cgatgacgatttaccgtcagcatccggcctcccgcattgttcgattctgcactggcagataccagtggcatggca

SEQ ID NO: 481000 - DNA, 75 bp, synthetic construct
  source 1..75: mol_type = other DNA
atgaaaattatcagtaaacgccgggcgatgacgatttaccgtcagcatccggcctcccgtatttttcgctactgc

SEQ ID NO: 481001 - DNA, 75 bp, synthetic construct
  source 1..75: mol_type = other DNA
tgtgccggatatcacaggagtcctcgcggtatacgccgaacgccgccaggaccgtaacgggccttatgcctgcct

SEQ ID NO: 481002 - DNA, 75 bp, synthetic construct
  source 1..75: mol_type = other DNA
tggcagcatggctggcagagaacggtcgtcagaccgagtgcgaagagttgttggcctggcatcttttaccgtggt

SEQ ID NO: 481003 - DNA, 75 bp, synthetic construct
  source 1..75: mol_type = other DNA
acgtcattagcaccgctggtaacgacttttaaggaagagtgtgaagagtcgcgtaatcaggcctggcaacggctg

SEQ ID NO: 481004 - DNA, 75 bp, synthetic construct
  source 1..75: mol_type = other DNA
gcgtcattagcgccgctggtgacggcttttcagacacagtgtgaagagactcacgcccaggcctggcagcgtttg

SEQ ID NO: 481005 - DNA, 75 bp, synthetic construct
  source 1..75: mol_type = other DNA
cagccagtcaggcaggcaaggcgcattctgaatttgtccagccgctgccgtttactttgccagaaaccgtaccgc

SEQ ID NO: 481006 - DNA, 75 bp, synthetic construct
  source 1..75: mol_type = other DNA
gtgttaccggaaatccccaaagagagcgcctttaacaaacagagcatgagctggaaactgatgactctgctgccg

SEQ ID NO: 481007 - DNA, 75 bp, synthetic construct
  source 1..75: mol_type = other DNA
tggcagaagcgcacatgtgggcggtggacaaaccgctgaacccgtcgctggcgcgcgacattatcgaaggtatcc

SEQ ID NO: 481008 - DNA, 75 bp, synthetic construct
  source 1..75: mol_type = other DNA
ttgtgcgtgtgccgcagggtgaaacggaagacgaaaccacgaccaatatcatcggcgctgtgactgctgaaggta

SEQ ID NO: 481009 - DNA, 75 bp, synthetic construct
  source 1..75: mol_type = other DNA
aaagtggcttccggtatggctattcacaagaaatggcgacagacctatttttccacgccatccagtctgacacac

SEQ ID NO: 481010 - DNA, 75 bp, synthetic construct
  source 1..75: mol_type = other DNA
atgacgcatttctcacaacaagataatttttctgtcgcggcgcgcgtgctgggcgcgctgttttattacgctcct

SEQ ID NO: 481011 - DNA, 75 bp, synthetic construct
  source 1..75: mol_type = other DNA
ccctctcgaaaacctgacgctacgccagcgcattaccgataaatacctggcgaatctggtgtcatcggttaacag

SEQ ID NO: 481012 - DNA, 75 bp, synthetic construct
  source 1..75: mol_type = other DNA
atggcagagacggtaactggtgttattgccgttcgtaatgctgcgtataacgaaaatggcgggataaactgcgag

SEQ ID NO: 481013 - DNA, 75 bp, synthetic construct
  source 1..75: mol_type = other DNA
tgacgctgatcgaacaacaatggcaggcgattatcgccgaaggtttaggtgcgcagtatggcgacgcggtgccgc

SEQ ID NO: 481014 - DNA, 75 bp, synthetic construct
  source 1..75: mol_type = other DNA
actacatctatctgcttgccgatctccagagcagtcaggagctggacgcattcgttgatgttacgccagacagcc

SEQ ID NO: 481015 - DNA, 75 bp, synthetic construct
  source 1..75: mol_type = other DNA
atgttaagggtctaccattccaatcgtctggacgtgctggaagcgttgatggagtttatcgtcgaacgcgaacgg

SEQ ID NO: 481016 - DNA, 75 bp, synthetic construct
  source 1..75: mol_type = other DNA
ggtactggtgcaggaactgatcgactacatcgggcaaagtcattatctaccgggcgatgaagcgctcaactgtga

SEQ ID NO: 481017 - DNA, 75 bp, synthetic construct
  source 1..75: mol_type = other DNA
tgttctgctacatcgtcggtgtgagcaaatgcctgcgtgatatccagacgcacgcggaatacatcaacgacaaag

SEQ ID NO: 481018 - DNA, 75 bp, synthetic construct
  source 1..75: mol_type = other DNA
cctttggcgatgtgaaaaaggccgcagacagaacgctgaaagagatggggattaatccgcaggatgaatggaaaa

SEQ ID NO: 481019 - DNA, 75 bp, synthetic construct
  source 1..75: mol_type = other DNA
cagaacgctgaaagagatggggattgaccagaaaaaagaagatcctttacggggcacgaagtacaggggtgaaac

SEQ ID NO: 481020 - DNA, 75 bp, synthetic construct
  source 1..75: mol_type = other DNA
gtgcctttaacaagcagagcatgagctggaaactgatgactctgctgccgcaactgttggattgcgaagatttta

SEQ ID NO: 481021 - DNA, 75 bp, synthetic construct
  source 1..75: mol_type = other DNA
ttgccgacagagtcattgcctgtcgccagccggggcagagtatggaaattgatctcgcctgcaacggtgtgcaga

SEQ ID NO: 481022 - DNA, 75 bp, synthetic construct
  source 1..75: mol_type = other DNA
aaactctatatcagctatatcgggcgttccattcaggataacagtgaacgtttcccgtcggtactggtgcaggaa

SEQ ID NO: 481023 - DNA, 75 bp, synthetic construct
  source 1..75: mol_type = other DNA
agcggcttaattgcagaactggtggggcatctggcttcactgctaatgcagctaaacatctggcgtcgcgggctg

SEQ ID NO: 481024 - DNA, 75 bp, synthetic construct
  source 1..75: mol_type = other DNA
gctctggcggcaattaacgccagagacaatggaagccatcgttgagcagtcgcaacgtttcctgttaccgctgtt

SEQ ID NO: 481025 - DNA, 75 bp, synthetic construct
  source 1..75: mol_type = other DNA
atgcgtttgcaggtgaacttccgtactgaagacagcgaaatccccgacaccgagccatttattctggaagggctt

SEQ ID NO: 481026 - DNA, 75 bp, synthetic construct
  source 1..75: mol_type = other DNA
agcaatcacttaccgtaaaaacttcagccagcgtgaagggatgctgatctggcccgactttactggctgggacac

SEQ ID NO: 481027 - DNA, 75 bp, synthetic construct
  source 1..75: mol_type = other DNA
gactttgaccactctctcgaccaaaaaatggccattaattgggtagaaaactgggaggtcgtactggctgatgaa

SEQ ID NO: 481028 - DNA, 75 bp, synthetic construct
  source 1..75: mol_type = other DNA
cgggactggataccaaagaggtggctgttgcactggcatccgtctgtcagaagctgcgcgctttcgggtatatca

SEQ ID NO: 481029 - DNA, 75 bp, synthetic construct
  source 1..75: mol_type = other DNA
ttggtggtgattgctggctggacgagtcggtgaacgacaaagacaccctgaaagccggaaaactcaccatcgact

SEQ ID NO: 481030 - DNA, 75 bp, synthetic construct
  source 1..75: mol_type = other DNA
agctgatggtcatctggccggatttcctcgcatgggatacggtcagcagcaccaccgccaccgcgtatgccaccg

SEQ ID NO: 481031 - DNA, 75 bp, synthetic construct
  source 1..75: mol_type = other DNA
tgcaggactgtcagttgaggatatcaagcgccaggtgatggaaaacagtgaagaggaaattgattatcagatata

SEQ ID NO: 481032 - DNA, 75 bp, synthetic construct
  source 1..75: mol_type = other DNA
acgactacacacctgtgccgccgcttgaaaatctgatgctgcgccagcgcatcaccgatcgctacctggtcgatt

SEQ ID NO: 481033 - DNA, 75 bp, synthetic construct
  source 1..75: mol_type = other DNA
tgcgggactgcttaaccagaacgacgtcaccacgcttgtgcgcaaggatggtttccgcttctggggttcccgctg

SEQ ID NO: 481034 - DNA, 75 bp, synthetic construct
  source 1..75: mol_type = other DNA
accggtgcctcctcttgaaaatctgaccctgcgccagcgtattacttccagatacctggcaagtctggtcacttc

SEQ ID NO: 481035 - DNA, 75 bp, synthetic construct
  source 1..75: mol_type = other DNA
ttgataagcccatcaccgcaacgctgattcgcgacatcattgacggcatcaatgccaaattccgtgaactgaaaa

SEQ ID NO: 481036 - DNA, 75 bp, synthetic construct
  source 1..75: mol_type = other DNA
acccgtcgctggcccgcgacattatcgaaggtatccgcgccaaaatgcgcagcctggtaagtcaggggtatctca

SEQ ID NO: 481037 - DNA, 75 bp, synthetic construct
  source 1..75: mol_type = other DNA
cctcgcatgggatacggtcagcagcaccaccgccaccgcgtatgccaccgcccgtgcgctggggctgcgcgctaa

SEQ ID NO: 481038 - DNA, 75 bp, synthetic construct
  source 1..75: mol_type = other DNA
tcggtaaccggtgttaaaccgcgtattctcggcgtgccgggactggacaccaaagaggtggctgttgcactggca

SEQ ID NO: 481039 - DNA, 75 bp, synthetic construct
  source 1..75: mol_type = other DNA
ttctcggtgtgccgggactggacaccaaagaggtggctgttgcactggcatcagtctgtcagaagctgcgcgctt

SEQ ID NO: 481040 - DNA, 75 bp, synthetic construct
  source 1..75: mol_type = other DNA
aggcgtcactacgctgattcgccgcgacggtttccgcttctggggtaaccgtacctgctctgatgacccgctgtt

SEQ ID NO: 481041 - DNA, 75 bp, synthetic construct
  source 1..75: mol_type = other DNA
gtgttaccggcatcagcgcatctgtattctgggatttgcaggagtccggcaccgatgctgacctgcttaacgagt

SEQ ID NO: 481042 - DNA, 75 bp, synthetic construct
  source 1..75: mol_type = other DNA
gtatatcgactacgactataccccggtgcctcctcttgaaaatctgaccctgcgccagcgtattacttccagata

SEQ ID NO: 481043 - DNA, 75 bp, synthetic construct
  source 1..75: mol_type = other DNA
ttccacgccatccagtctgacacacagtgcttatccgttctggtccggtgcgctgttcaaccgtgggcgcaacag

SEQ ID NO: 481044 - DNA, 75 bp, synthetic construct
  source 1..75: mol_type = other DNA
cttccgcttttggggtaaccgcacctgctctgatgacccgcttttcctgtttgagaactacacccgcaccgcgca

SEQ ID NO: 481045 - DNA, 75 bp, synthetic construct
  source 1..75: mol_type = other DNA
tggccggatttcctcgcatgggatacggtcaccagtaccaccgccaccgcgtatgccaccgcccgtgcgctgggt

SEQ ID NO: 481046 - DNA, 75 bp, synthetic construct
  source 1..75: mol_type = other DNA
accaatgtgcagagcgccattgcgaaagccggtaaaaaaggcacgctggccgcatccctgcaggctatcgccgac

SEQ ID NO: 481047 - DNA, 75 bp, synthetic construct
  source 1..75: mol_type = other DNA
acggtgttaccggtatcagcgcgtccgtattctgggatttgcaggagtccggtaccgatgctgacctgcttaacg

SEQ ID NO: 481048 - DNA, 75 bp, synthetic construct
  source 1..75: mol_type = other DNA
aaccgtacctgctctgatgacccgctgttcctctttgaaaactatacccgcaccgcgcaggtgctggccgacacg

SEQ ID NO: 481049 - DNA, 75 bp, synthetic construct
  source 1..75: mol_type = other DNA
tatgccaccgcccgtgcacttggtctgcgcgccaaaattgacgagcagaccggatggcacaaaagcctgtccaac

SEQ ID NO: 481050 - DNA, 75 bp, synthetic construct
  source 1..75: mol_type = other DNA
acccgtcgctggcccgcgacattatcgaaggtatccgggccaaaatgcgcaacctggtcagtcagggctatctca

SEQ ID NO: 481051 - DNA, 75 bp, synthetic construct
  source 1..75: mol_type = other DNA
gcaggaagtcgcaaccgcgctcgcgtcggtctgtatcagtctgcgcgcgtttggttatgtcagcgcatggggctg

SEQ ID NO: 481052 - DNA, 75 bp, synthetic construct
  source 1..75: mol_type = other DNA
atttctggggaaggggttcatgtgggagcaaaagcacacccagcgactactggataccctgcgcccggaagttgc

SEQ ID NO: 481053 - DNA, 75 bp, synthetic construct
  source 1..75: mol_type = other DNA
tctgccctgcggctaaagcagggattacgcatcctgcgctttcgccgtcgcgtgcgtcatctgccgctctggaca

SEQ ID NO: 481054 - DNA, 75 bp, synthetic construct
  source 1..75: mol_type = other DNA
ggatgagttgtatatctttcaccttggctggcctgaaatttcagcccgttacaatgcggtgggacgctttggtcg

SEQ ID NO: 481055 - DNA, 75 bp, synthetic construct
  source 1..75: mol_type = other DNA
atgttgttaaatcgtaaaaataactttatcgcagctgttgttctgggagcgtttctcctgtctggctgtggtgcg

SEQ ID NO: 481056 - DNA, 75 bp, synthetic construct
  source 1..75: mol_type = other DNA
tgaaaccatctggcttgaaccttccacggatcgcaccgtttatctgcaaatcaaaaacacctccgataaggatat

SEQ ID NO: 481057 - DNA, 75 bp, synthetic construct
  source 1..75: mol_type = other DNA
gggaaactcgatgtttgccgatctggtctccgtggcggggcatatctacaaatttggcgtaaatgatggcctgcc

SEQ ID NO: 481058 - DNA, 75 bp, synthetic construct
  source 1..75: mol_type = other DNA
acgaagagaaagcggaacgccatgccaggtatcgtcagcattggcaaaattatcttcaacagtcagataaccttt

SEQ ID NO: 481059 - DNA, 75 bp, synthetic construct
  source 1..75: mol_type = other DNA
ttgaacgcttcgcacgaaaaaatcggatttccaataaagctctgcgagaagtcgtggaactagctgataagggac

SEQ ID NO: 481060 - DNA, 75 bp, synthetic construct
  source 1..75: mol_type = other DNA
tgctgacaatccagcagtggcgcgaaacatacggacctggtagcaacgttgtattgccagcagaagaagcggaag

SEQ ID NO: 481061 - DNA, 75 bp, synthetic construct
  source 1..75: mol_type = other DNA
cactcagtgacagtgaggtggccagtgccgtgggaaactccatgtttgcagacctggtgagtgtggccggacata

SEQ ID NO: 481062 - DNA, 75 bp, synthetic construct
  source 1..75: mol_type = other DNA
gaaagggcgattgttctcttttctccagtctactcaaaacatgaagatggcaggtttcttgatagcaacagcagt

SEQ ID NO: 481063 - DNA, 75 bp, synthetic construct
  source 1..75: mol_type = other DNA
gattagtgtcaaggcccgatggcgaagaagaatgaaacttaccccctgtgtggtgatgacctgctacatgttgcc

SEQ ID NO: 481064 - DNA, 75 bp, synthetic construct
  source 1..75: mol_type = other DNA
aggtgaagactcagatgagtgagaccatctggcttgaacccgccagcgaacgcacggtatttctgcaaatcaaaa

SEQ ID NO: 481065 - DNA, 75 bp, synthetic construct
  source 1..75: mol_type = other DNA
atgaagcttaataaagtcatggctgtgatggtcgtcagctctgctctggtgttgtctggatgtagtgcaatggga

SEQ ID NO: 481066 - DNA, 75 bp, synthetic construct
  source 1..75: mol_type = other DNA
attaaataaattgatgactgttatggttgtcagctctgcgctggcgttgtctggatgtagtgcaatgggaaccgc

SEQ ID NO: 481067 - DNA, 75 bp, synthetic construct
  source 1..75: mol_type = other DNA
actcaaattctgccggtgccacactcggtgtaggccttgctgctggtctggtgggtatggctgcagatgcgatgg

SEQ ID NO: 481068 - DNA, 75 bp, synthetic construct
  source 1..75: mol_type = other DNA
ggggtatcagggggcagcaatgggagctgcgttaggggcaggtattacggcctataactccaactctgcgggggc

SEQ ID NO: 481069 - DNA, 75 bp, synthetic construct
  source 1..75: mol_type = other DNA
ctgaaagccgataaaatggatttgcgggaagcacagggctttctgagtcgggggtacgagggggctgttcaggct

SEQ ID NO: 481070 - DNA, 75 bp, synthetic construct
  source 1..75: mol_type = other DNA
tcaaaaatacttccgataaggacatgagtggccttcaggggaaaattaacagccaggtgcaggcgaaaggctatc

SEQ ID NO: 481071 - DNA, 75 bp, synthetic construct
  source 1..75: mol_type = other DNA
atgaaacaaaacattaagttaatggcagcgaccgccatattgtcttccactctggtcttgtctggttgtggagcg

SEQ ID NO: 481072 - DNA, 75 bp, synthetic construct
  source 1..75: mol_type = other DNA
gtggcatcagaccactacgccttatctttttttacatacgccagacattgcccaggccccggaactggtacatac

SEQ ID NO: 481073 - DNA, 75 bp, synthetic construct
  source 1..75: mol_type = other DNA
gacattaggtgtgggtcttgctgccggtctcgtgggtatggccgctgatgcgatggttgaagatattaactacac

SEQ ID NO: 481074 - DNA, 75 bp, synthetic construct
  source 1..75: mol_type = other DNA
tgacttctccggataaagcctactactggattcaggcgaatgtgctgaaggccgataagatggatctgcgggagt

SEQ ID NO: 481075 - DNA, 75 bp, synthetic construct
  source 1..75: mol_type = other DNA
aacgggtaaccagcataaataccagacccgtgtggtctcaaatgcgaacaaggttaacctgaaatttgaagaggc

SEQ ID NO: 481076 - DNA, 75 bp, synthetic construct
  source 1..75: mol_type = other DNA
ataattccagttctgcaggtgccacgctcggtgtgggtcttgctgctggtctggctggtatggcagctgatgcgc

SEQ ID NO: 481077 - DNA, 75 bp, synthetic construct
  source 1..75: mol_type = other DNA
gtgaaccctggcgcttattgagcagtgtctttctgcacagtagtttttcccatttgctgatgaatatgtttgcac

SEQ ID NO: 481078 - DNA, 75 bp, synthetic construct
  source 1..75: mol_type = other DNA
cgtttcaataaaacgcaccagataaagaccggtcaactacgacgtacatggcctgtcgccgttgggttgatcatt

SEQ ID NO: 481079 - DNA, 75 bp, synthetic construct
  source 1..75: mol_type = other DNA
gcctgtcgccgttgggttgatcattggtttgcctttactggcacactggcttttcggtgcagcagtgcactggaa

SEQ ID NO: 481080 - DNA, 75 bp, synthetic construct
  source 1..75: mol_type = other DNA
aaaggaaaggtgattctcggcgcgatgatgcgcaagctggcacaggtggcgtatggagtgctgaagtcaggcgtg

SEQ ID NO: 481081 - DNA, 75 bp, synthetic construct
  source 1..75: mol_type = other DNA
tccgcctgttaccgatgccgaccggaaggctgcattcggcaatttacaggggcatgcgattcacgacagtgcgat

SEQ ID NO: 481082 - DNA, 75 bp, synthetic construct
  source 1..75: mol_type = other DNA
cgccttatattggcgtttcctggaatcagctgtacggaacaacgtccgacatggcgaaaagggaaggcgaaaaag

SEQ ID NO: 481083 - DNA, 75 bp, synthetic construct
  source 1..75: mol_type = other DNA
cgtttatcctgactgttgttattgctatagccatttctgttggactattccgttttaataaaacgtaccagataa

SEQ ID NO: 481084 - DNA, 75 bp, synthetic construct
  source 1..75: mol_type = other DNA
caaccgcccattgagacccgcctgaccgaaggtgaaaaccgtcgcacattgtgcgccattgccagactcgtaaac

SEQ ID NO: 481085 - DNA, 75 bp, synthetic construct
  source 1..75: mol_type = other DNA
agtggctgcatatcaatggacgtgaatggaagcatatccgcgaagtgctgatttacgcctttatttatgaaggtg

SEQ ID NO: 481086 - DNA, 75 bp, synthetic construct
  source 1..75: mol_type = other DNA
attctcggctcgataatgcgcaagctggcacaggtggcgtatggagtgctgaagtcaggcgtgcgttcgatgcgt

SEQ ID NO: 481087 - DNA, 75 bp, synthetic construct
  source 1..75: mol_type = other DNA
cctccactctcgtctgctggagcgtgctgcacgtgttaacgccgaatacgttgagccttcaccaaaggtgaagtg

SEQ ID NO: 481088 - DNA, 75 bp, synthetic construct
  source 1..75: mol_type = other DNA
aatcgcgggggcgcggcaggggattagctgacacagagctggggctccggttgcgctatgaaatacgccgcgagt

SEQ ID NO: 481089 - DNA, 75 bp, synthetic construct
  source 1..75: mol_type = other DNA
ccgcagggctggctggcttctcatcggctgatgaagacggtgcggtgggatacggttgatcagctcccttcactg

SEQ ID NO: 481090 - DNA, 75 bp, synthetic construct
  source 1..75: mol_type = other DNA
gactggccggaagcggagaagccgtcttttgcggggctttgttccgcgcttgaaaaccgcctggcacgttcaggg

SEQ ID NO: 481091 - DNA, 75 bp, synthetic construct
  source 1..75: mol_type = other DNA
agggtgcgtctgcagcctgatatggaacatcttcttgccgggctcatcgccattgatgctgccagagctgctgtg

SEQ ID NO: 481092 - DNA, 75 bp, synthetic construct
  source 1..75: mol_type = other DNA
gccaatgacattgcaggaaaagggatcgcagaccctgtcagtatgattgaagctgtccggctggcagcgctatat

SEQ ID NO: 481093 - DNA, 75 bp, synthetic construct
  source 1..75: mol_type = other DNA
tatctttgttaccttcagaatagtatgaaaaaacatccactcaatgtgatggcaaactggactcgggaaaagtca

SEQ ID NO: 481094 - DNA, 75 bp, synthetic construct
  source 1..75: mol_type = other DNA
gtcatgaaaaaaaactattgggactcgaccaatggcaaaataaatgttgtgggaatattacaatccgtaaatgaa

SEQ ID NO: 481095 - DNA, 75 bp, synthetic construct
  source 1..75: mol_type = other DNA
atcattaaaacctactacgtcgataaaggttttgagcgcatcgccgcaggttgcccggtcccgattgttattgcg

SEQ ID NO: 481096 - DNA, 75 bp, synthetic construct
  source 1..75: mol_type = other DNA
ctggtggtgctaatgaccttaccgcgcacactggtcgaactttcgccgtttatcgcgttattgggtggtattgtt

SEQ ID NO: 481097 - DNA, 75 bp, synthetic construct
  source 1..75: mol_type = other DNA
tttactggtcaggcatttgaggctgaaggatatgaagtggaatacagagggctcacagcagggtttaatgatggt

SEQ ID NO: 481098 - DNA, 75 bp, synthetic construct
  source 1..75: mol_type = other DNA
atggcttccattcattcgctcctcagcgcatgccagacgacaccccgggatgtggctgaaccggctcaggtgcgt

SEQ ID NO: 481099 - DNA, 75 bp, synthetic construct
  source 1..75: mol_type = other DNA
gcccccctgtttccgctcgccgatgtgctgatgtgcacacgtggtattctgcgcagtgtggtaccacctgccacc

SEQ ID NO: 481100 - DNA, 75 bp, synthetic construct
  source 1..75: mol_type = other DNA
cattcgcagcacggggttttctatcttccgcattgcactggtggcgctggttgccgggatactgtggactgtttc

SEQ ID NO: 481101 - DNA, 75 bp, synthetic construct
  source 1..75: mol_type = other DNA
tacaacctgtttgataccgattacgtcgcctcaatcaacaagagcggctaccgttatcatccgggcgagccaaga

SEQ ID NO: 481102 - DNA, 75 bp, synthetic construct
  source 1..75: mol_type = other DNA
cttaattatctgcatgtcacccagcacaacacgccagacggcggcattccgaccatcggtttaccgggctattct

SEQ ID NO: 481103 - DNA, 75 bp, synthetic construct
  source 1..75: mol_type = other DNA
caatctcgacttccagctaaacgtctacaacctgtttgataccgattacgtcgcctcaatcaacaagagcggcta

SEQ ID NO: 481104 - DNA, 75 bp, synthetic construct
  source 1..75: mol_type = other DNA
gaacccgttcgctgtggcccagaagacgcacgttgtaaacggcactcttggctatgaagcgcagcttgttaacgc

SEQ ID NO: 481105 - DNA, 75 bp, synthetic construct
  source 1..75: mol_type = other DNA
agtgctataaatggggtgaattagttatatcagacaacgaggatgttgcatttgaagcatttaaaaaagcatctg

SEQ ID NO: 481106 - DNA, 75 bp, synthetic construct
  source 1..75: mol_type = other DNA
gggctgcagtgggcgctgccctgggaagcggtatcaccggctataactccagctcagccggcgccacgctgggtg

SEQ ID NO: 481107 - DNA, 75 bp, synthetic construct
  source 1..75: mol_type = other DNA
cgggaaaaaaagggttcgtcaaccaataattttcgggaaatctcggaaacgtcaaccaactatccggtaactctg

SEQ ID NO: 481108 - DNA, 75 bp, synthetic construct
  source 1..75: mol_type = other DNA
cagggtaaaccttattactttacctggggctatgcggacatcgccaaaaagcagcccgtcacacagcaaacgttg

SEQ ID NO: 481109 - DNA, 75 bp, synthetic construct
  source 1..75: mol_type = other DNA
acaccgcgtcaagccttgcgctgattcacacgttggttactgaccagatcaaatttgattcggagtttaatttat

SEQ ID NO: 481110 - DNA, 75 bp, synthetic construct
  source 1..75: mol_type = other DNA
attttgagctgaacggcgggatccgtctggataattatcatactgaatatgacagtgccaccgcctgcggcggca

SEQ ID NO: 481111 - DNA, 75 bp, synthetic construct
  source 1..75: mol_type = other DNA
acacccagcaaaaagcgactatcaaaaacggcgctgacgttgctcaggatggttcctcatcactgccgtatacgc

SEQ ID NO: 481112 - DNA, 75 bp, synthetic construct
  source 1..75: mol_type = other DNA
gtggggctacaaccgctggcaggaagagcagcggctgcatcagctgcaggacatgaatctccggcaaatgcagga

SEQ ID NO: 481113 - DNA, 75 bp, synthetic construct
  source 1..75: mol_type = other DNA
gtccgtaactctccactgtgggaacaggatccacgtcagcaacttgcttatctgtgcgttaagcgctgggcgcgc

SEQ ID NO: 481114 - DNA, 75 bp, synthetic construct
  source 1..75: mol_type = other DNA
ggtaaacctgttcttgcaagtcaaaaaggtgggataaacgagtttgttctggaaggaataacaggatatcacctt

SEQ ID NO: 481115 - DNA, 75 bp, synthetic construct
  source 1..75: mol_type = other DNA
agctattgttggctttaatgccggcattaagcctgtcggtattttctgtcggggcgtatgccagtggttattccg

SEQ ID NO: 481116 - DNA, 75 bp, synthetic construct
  source 1..75: mol_type = other DNA
ggtgtatatccaaaagagggaggggatcctttaattaagcttgttgatggtaaggttactcctcttaacgggaat

SEQ ID NO: 481117 - DNA, 75 bp, synthetic construct
  source 1..75: mol_type = other DNA
ttggtttaattatagattgtttgttccagcaggattaggagcaataatattttcactatttccggcaaccatgca

SEQ ID NO: 481118 - DNA, 75 bp, synthetic construct
  source 1..75: mol_type = other DNA
tgcagaagcaataaatacagtttcaagcatattcaatttaccccaatgttatcaagaaggaaatttcataacaac

SEQ ID NO: 481119 - DNA, 75 bp, synthetic construct
  source 1..75: mol_type = other DNA
caaaaaccaatcaaattctctttagtgcagatggcgaaggcgtggtcacgacagtgggcgctgatggaaaaacgt

SEQ ID NO: 481120 - DNA, 75 bp, synthetic construct
  source 1..75: mol_type = other DNA
cctcagtatcagctgcgaggtaacgttccggtacgggacgctccgcctcaatggcaatgtctgcgaaaagcgcca

SEQ ID NO: 481121 - DNA, 75 bp, synthetic construct
  source 1..75: mol_type = other DNA
agcggaaaagctgtgcagatggtatctgaggaagaaaaacgatggcagatgaccaaagagcaggaagaagcacag

SEQ ID NO: 481122 - DNA, 75 bp, synthetic construct
  source 1..75: mol_type = other DNA
gtgggcagttactgacaatggggaagaaccggcatcgaaagtaacccactggatgccgctaccggagccgccgca

SEQ ID NO: 481123 - DNA, 75 bp, synthetic construct
  source 1..75: mol_type = other DNA
cgttgctgcctcctgtgaacccgggatatccatctcaaaacttgctcttgaaaatggcattaacgccaatctgtt

SEQ ID NO: 481124 - DNA, 75 bp, synthetic construct
  source 1..75: mol_type = other DNA
tctcagtatcagctgtgaggtaacgctccggcacgggacgctccgtctcaacggcactgtcagtgaaaagctcct

SEQ ID NO: 481125 - DNA, 75 bp, synthetic construct
  source 1..75: mol_type = other DNA
agcggcagtcaggttaaactgctgtggtccaccggtgacggactgtgcctcctgaccaaacggctggagcgtggg

SEQ ID NO: 481126 - DNA, 75 bp, synthetic construct
  source 1..75: mol_type = other DNA
atttacacaaggtattcaacatcgcttatttggttagaggtgaagcggtgatgataagacctgatgatgttccgt

SEQ ID NO: 481127 - DNA, 75 bp, synthetic construct
  source 1..75: mol_type = other DNA
atgccaaacgccgcgagcagtttgaacgcatcaaagctgaagtcgcgccagacctgtcggttcatttgctggatg

SEQ ID NO: 481128 - DNA, 75 bp, synthetic construct
  source 1..75: mol_type = other DNA
ttgccctggtcgccggagaaacctccggcgatatcctgggggccggtttaatccgcgctctgaaagaacgtgtgc

SEQ ID NO: 481129 - DNA, 75 bp, synthetic construct
  source 1..75: mol_type = other DNA
gtgagtaaacgtcgttatcttaccggtaaagaagttcaggccatgatgcaggcggtttgttacggggcaacggga

SEQ ID NO: 481130 - DNA, 75 bp, synthetic construct
  source 1..75: mol_type = other DNA
tggcgaaatgcccgatggtggtggggtatcgcatgaagcctttcaccttctggttggcgaagcgactggtgaaaa

SEQ ID NO: 481131 - DNA, 75 bp, synthetic construct
  source 1..75: mol_type = other DNA
acgcatcaaagctgaagttgcgccagacctgtcggttcatatgctggatggaatgggccgtgaggcgatggtcgc

SEQ ID NO: 481132 - DNA, 75 bp, synthetic construct
  source 1..75: mol_type = other DNA
gcgccgatttcctgaaaacggcccagcttttgcgccagacgtaccccgatctggagatcgtggtgccgctggtga

SEQ ID NO: 481133 - DNA, 75 bp, synthetic construct
  source 1..75: mol_type = other DNA
gcagacaaaatggatctgcgtgaatctcagggatggctgagtcgcggttatgaaggtgcagcagtcggagctgct

SEQ ID NO: 481134 - DNA, 75 bp, synthetic construct
  source 1..75: mol_type = other DNA
atgattgctgcaggcattatgtttattaacgctctgtttttataccgttgtacgttcccaccccatccgggtcgt

SEQ ID NO: 481135 - DNA, 75 bp, synthetic construct
  source 1..75: mol_type = other DNA
atgaaacaaaacattaagttaatggcaatgactgccatattatcttccactctggtgttatctggttgtggagcg

SEQ ID NO: 481136 - DNA, 75 bp, synthetic construct
  source 1..75: mol_type = other DNA
aacaaggttaacctgaaatttgaagaagcgaagcctgtactggaagaccagctggctaaatccatcgcgaacatc

SEQ ID NO: 481137 - DNA, 75 bp, synthetic construct
  source 1..75: mol_type = other DNA
acatcgtgcaaccgccgacggtgacggtaggtaaaaagagtttgctgtggatccccttctttggtcagttgtact

SEQ ID NO: 481138 - DNA, 75 bp, synthetic construct
  source 1..75: mol_type = other DNA
ccagacctggctgaacagcggttatgaaggtgccattgccggtgcagcattgggcaccggcatcacaggatataa

SEQ ID NO: 481139 - DNA, 75 bp, synthetic construct
  source 1..75: mol_type = other DNA
cctataactccaactctgcgggggcaacattaggtgtgggccttgctgccggtctcgtgggaatggccgctgatg

SEQ ID NO: 481140 - DNA, 75 bp, synthetic construct
  source 1..75: mol_type = other DNA
tttcagtcctatgccctgttcccgcatatgtcgctgggagagaatgtcggttatggcctgaaaatgctcggcgta

SEQ ID NO: 481141 - DNA, 75 bp, synthetic construct
  source 1..75: mol_type = other DNA
acgcaaaccgcatcaactctctggcggtcagcagcaacgcgtggccattgcccgcgcggtggttaacaagcctcg

SEQ ID NO: 481142 - DNA, 75 bp, synthetic construct
  source 1..75: mol_type = other DNA
tttgctgcgcccggaagacttacgcgttgacgaaatcaacgatgacaaccacgtcgaagggctgattggctacgt

SEQ ID NO: 481143 - DNA, 75 bp, synthetic construct
  source 1..75: mol_type = other DNA
taaatacatttacctgtaaaattactggaataatcagttttaatattgagcggcaatggcatttaaaagatattg

SEQ ID NO: 481144 - DNA, 75 bp, synthetic construct
  source 1..75: mol_type = other DNA
ggatctgccgccggtactggctgaaccgcacgcaggatgggtgaatgcactggaacaagaatggttacgccgtta

SEQ ID NO: 481145 - DNA, 75 bp, synthetic construct
  source 1..75: mol_type = other DNA
atttaacaaatttgttttctaatgccaccgacacaacgttttatatattttcaggtgagcttgacataatcgatc

SEQ ID NO: 481146 - DNA, 75 bp, synthetic construct
  source 1..75: mol_type = other DNA
aacggcagtgacaataaaattgcactggcagcacgccccgtaaaagcgattacgcccccaactcctgcagtacgc

SEQ ID NO: 481147 - DNA, 75 bp, synthetic construct
  source 1..75: mol_type = other DNA
gttccggtacgggacgctccgcctcaatggcaatgtctgcgaaaagcgccaggctctgctgatacaggaactgaa

SEQ ID NO: 481148 - DNA, 75 bp, synthetic construct
  source 1..75: mol_type = other DNA
ttcctgcacgggacgctccgcttcaatggcaatgtcagcgaaaagctcctgactctgctgatacaggaactgaag

SEQ ID NO: 481149 - DNA, 75 bp, synthetic construct
  source 1..75: mol_type = other DNA
cggcgcgaggccctggccagcctcgaaatgcaactggccgccatgccaaccgaaccggcacagcacgcggagagt

SEQ ID NO: 481150 - DNA, 75 bp, synthetic construct
  source 1..75: mol_type = other DNA
gaaagcgcgttggttgatgagctttcctcacgactgggtcgggcgctgggaatggacagcgtcgaaagttctatc

SEQ ID NO: 481151 - DNA, 75 bp, synthetic construct
  source 1..75: mol_type = other DNA
tcaagggcgcaggtgaaatcggctttaccattatctcgctgaccttctcactgattgcggtgttgatcccactgc

SEQ ID NO: 481152 - DNA, 75 bp, synthetic construct
  source 1..75: mol_type = other DNA
taaaaagtgtggctatagccaatgcccggaacctgtgtcgtgctgcattaacagaactgcaagaaaacaccacgg

SEQ ID NO: 481153 - DNA, 75 bp, synthetic construct
  source 1..75: mol_type = other DNA
ccccattgtgctgcatgaaggatcgcttgctggcgtatggaaagtagagcgaatttcaagctacatgcctttcca

SEQ ID NO: 481154 - DNA, 75 bp, synthetic construct
  source 1..75: mol_type = other DNA
ggatcgcttgctggcgtgtggaaagtagagcgtatctctaactacatgcccttccacttccacgttaacggcgta

SEQ ID NO: 481155 - DNA, 75 bp, synthetic construct
  source 1..75: mol_type = other DNA
gtcctggttggcggcgcgtcgcaaatgccgttggtacagcgaatcgccgtgcgtctgtttggcaagttaccgtat

SEQ ID NO: 481156 - DNA, 75 bp, synthetic construct
  source 1..75: mol_type = other DNA
caatcaaacgatatggcccgcgtcgatgaagttcgtcgacgggcgagcgattatttggccattgagatcccttaa

SEQ ID NO: 481157 - DNA, 75 bp, synthetic construct
  source 1..75: mol_type = other DNA
gagcaggattcaataacgattaatgtttatcagggagaaaatcacaaagttaagaataatatactggttgaatcc

SEQ ID NO: 481158 - DNA, 75 bp, synthetic construct
  source 1..75: mol_type = other DNA
acctgagttcgatttaccgggctgataaaaaactgccttatctgactatcattgataagggctacagtgcaaaag

SEQ ID NO: 481159 - DNA, 75 bp, synthetic construct
  source 1..75: mol_type = other DNA
gactcgtattgcgatcctggatatgcaaaacgtgctcggtgacagaacgacacctgcaggcaagctcaaatccgg

SEQ ID NO: 481160 - DNA, 75 bp, synthetic construct
  source 1..75: mol_type = other DNA
agtagtgatattgcagaaaacattcgttattcacggccatccgccaccaatgaagacgttgaaattgcctcacag

SEQ ID NO: 481161 - DNA, 75 bp, synthetic construct
  source 1..75: mol_type = other DNA
cgccagaaacaggggatagagaaagcaaggaaagacggcaaatataaagagcgtaaacctaatcaggccagacat

SEQ ID NO: 481162 - DNA, 75 bp, synthetic construct
  source 1..75: mol_type = other DNA
gttgatgtggactctctcgcccgctttctgcaaaacggccttgccggtgcggccaccagtctggtgacgatgttc

SEQ ID NO: 481163 - DNA, 75 bp, synthetic construct
  source 1..75: mol_type = other DNA
gctaacttgtttaagtataacgacccggtgattaatgaagctctgaaagaatcaggtctggataaagagctcggt

SEQ ID NO: 481164 - DNA, 75 bp, synthetic construct
  source 1..75: mol_type = other DNA
cttgaagttgatgtgctgctggaagacgggagcgttaagtcaagagtgatcaaccacagtccggtgacgttaagt

SEQ ID NO: 481165 - DNA, 75 bp, synthetic construct
  source 1..75: mol_type = other DNA
cctctatacccgcttatggcatgacagcgtcagcagtactgctctccatcgccagcacaacatgaaggaggaaac

SEQ ID NO: 481166 - DNA, 75 bp, synthetic construct
  source 1..75: mol_type = other DNA
catcccctcctcgtgatacaaccccttttttcagtgacctactgagttgcggggtgatgagtccgtgcgccggac

SEQ ID NO: 481167 - DNA, 75 bp, synthetic construct
  source 1..75: mol_type = other DNA
gtccagtcaaggagtcgctctatctgggtctgcaaacgctaggcacgttgtccgatgatctggctgcttcacgtc

SEQ ID NO: 481168 - DNA, 75 bp, synthetic construct
  source 1..75: mol_type = other DNA
gctctatcgtcgttgcgctggtggatggagagtttacggtaaagatcttacacacgtatcctgagctgcttttga

SEQ ID NO: 481169 - DNA, 75 bp, synthetic construct
  source 1..75: mol_type = other DNA
atgtctgttatccttgagcacattagcaacaagccttacgaaatggcaccttttttcagtgatttactaagctgt

SEQ ID NO: 481170 - DNA, 75 bp, synthetic construct
  source 1..75: mol_type = other DNA
ttaacagtcaggttgtcggactggaactggagaatatgagctttgactaccaccatggcgacagacatatcctca

SEQ ID NO: 481171 - DNA, 75 bp, synthetic construct
  source 1..75: mol_type = other DNA
ttttctggtacacatatgcaggattatgcagtgcccggcttcattatgcactgggcttcggtaaccattatgaca

SEQ ID NO: 481172 - DNA, 75 bp, synthetic construct
  source 1..75: mol_type = other DNA
catatccccgcttttggagcttcatcgacaaggttgatccggagcaggttggtttcgtcgagatctacgctcgtc

SEQ ID NO: 481173 - DNA, 75 bp, synthetic construct
  source 1..75: mol_type = other DNA
agccactctacgactgagtgatatggaaccattggcaagaaaagtgtcggcagagttcttcactgcacaactgaa

SEQ ID NO: 481174 - DNA, 75 bp, synthetic construct
  source 1..75: mol_type = other DNA
tttttacgcaggaaacctggacaatcagggcaacaaaatttcatttgtccccacagcagcaccgaatgatacctt

SEQ ID NO: 481175 - DNA, 75 bp, synthetic construct
  source 1..75: mol_type = other DNA
atcatccatgcccttgcctgctgctacaaaccccgcaatactacttcgaaagaaaataaccgattctctgatttc

SEQ ID NO: 481176 - DNA, 75 bp, synthetic construct
  source 1..75: mol_type = other DNA
atacggctgcgcgctggcactggttcagatggttttattttctcctgtatcccgggcaagcggattttatctggt

SEQ ID NO: 481177 - DNA, 75 bp, synthetic construct
  source 1..75: mol_type = other DNA
cattccggtactgccagtggtaaaaggcatttcggtggcgaagaatcacatcacgctgtatatcatcgcctttgc

SEQ ID NO: 481178 - DNA, 75 bp, synthetic construct
  source 1..75: mol_type = other DNA
tatacagctccgtattaataaattatccgatatagaatcactacctactgatcgggaatctgtattcagtataaa

SEQ ID NO: 481179 - DNA, 75 bp, synthetic construct
  source 1..75: mol_type = other DNA
caattaatatcgactggaaaggagctcgtgattttacattccagacaatcaatgactatggcggtttaaccagac

SEQ ID NO: 481180 - DNA, 75 bp, synthetic construct
  source 1..75: mol_type = other DNA
cttagcgattcatcatccttgccatcagaccgtgaatcagtatttagcattaatgttatggcaataccaccacag

SEQ ID NO: 481181 - DNA, 75 bp, synthetic construct
  source 1..75: mol_type = other DNA
gaacattccggtcaatggaaggtttttctgacgtcacatcacgagcggaagacatcatctacgaccagaaattct

SEQ ID NO: 481182 - DNA, 75 bp, synthetic construct
  source 1..75: mol_type = other DNA
caccaaacgtctggaggaaggccagtttatctggcctgcagtgcgtgacggtaaggtatccattacccgctcgca

SEQ ID NO: 481183 - DNA, 75 bp, synthetic construct
  source 1..75: mol_type = other DNA
gcacctgggtttatgatgtgaaatccaccagcggtggaaaagctatcggcattgcctctggcgatgattacttag

SEQ ID NO: 481184 - DNA, 75 bp, synthetic construct
  source 1..75: mol_type = other DNA
cctggattaattctggtatgagtgagtttgacagccggttgtttgcagccattaacgatatgctgctggatatgc

SEQ ID NO: 481185 - DNA, 75 bp, synthetic construct
  source 1..75: mol_type = other DNA
ggaagaacgcgatcggcaagtggcaggagtacgtgcagcagtttgattctcaggcgcagagcattgcagcaagcc

SEQ ID NO: 481186 - DNA, 75 bp, synthetic construct
  source 1..75: mol_type = other DNA
gacgtcaggttgagagtcgtggagttcagtcagcaggcttgcagacgttttctcagccaggtattggtgatgctt

SEQ ID NO: 481187 - DNA, 75 bp, synthetic construct
  source 1..75: mol_type = other DNA
taaatcacaagctgagcttgaagaaatggctagagagcgactgatgaaggtaagagaaaccgagattaatttggt

SEQ ID NO: 481188 - DNA, 75 bp, synthetic construct
  source 1..75: mol_type = other DNA
gagattccaagagttgaaattgatttttcgatgaatgaggaatgtgagcttgatttgaaactgaagctgcaacgc

SEQ ID NO: 481189 - DNA, 75 bp, synthetic construct
  source 1..75: mol_type = other DNA
ctgcctgtcggagtcgggcctgacgaccggatgccgccaggcagccgggagccgaaggtgtccccgcccccggga

SEQ ID NO: 481190 - DNA, 75 bp, synthetic construct
  source 1..75: mol_type = other DNA
attgatgtgacgcttgaaacatggcgcacatatcgcctgagagaagatttatctgaagtcgttacgcgagcagag

SEQ ID NO: 481191 - DNA, 75 bp, synthetic construct
  source 1..75: mol_type = other DNA
gatgtgtttactccgccaaccttcgatgatgaagaagtcgctgaacatactaacctcgaaacgcactttatcgat

SEQ ID NO: 481192 - DNA, 75 bp, synthetic construct
  source 1..75: mol_type = other DNA
cgccgacattatcgacgcaaacaatgagaattacattcagcatccctttccccaaaaaagcggactgcgccatgc

SEQ ID NO: 481193 - DNA, 75 bp, synthetic construct
  source 1..75: mol_type = other DNA
cattccggtactgccggtggtaagaggcatttcggtagcgaagaaccacattacgctgtatatcatcgcctttgc

SEQ ID NO: 481194 - DNA, 75 bp, synthetic construct
  source 1..75: mol_type = other DNA
taacgaaaccaggcatcatctttggcaacctgatctcggtgattgggggattcttgctggcctcaaagggcagca

SEQ ID NO: 481195 - DNA, 75 bp, synthetic construct
  source 1..75: mol_type = other DNA
atggcgtacatactttcgatgagtgagcaggttaaactgaaggcgtttttggcggcagtactcgatgactacaaa

SEQ ID NO: 481196 - DNA, 75 bp, synthetic construct
  source 1..75: mol_type = other DNA
ttacattgtcgagttgattttctcccagcctaacctggcgcagctgggtaaaggaatggtaatcccgagtttacc

SEQ ID NO: 481197 - DNA, 75 bp, synthetic construct
  source 1..75: mol_type = other DNA
tacttcggaagcggtcttcctggcagcaggcgtgttaggggcgacgattatgccgcatgtgatttatttgcactc

SEQ ID NO: 481198 - DNA, 75 bp, synthetic construct
  source 1..75: mol_type = other DNA
tatctatcgcgctgatggacaacctgtttttatagccgcgataggtagcacaccgtttgagcgtggtgacgaagc

SEQ ID NO: 481199 - DNA, 75 bp, synthetic construct
  source 1..75: mol_type = other DNA
cggatcgggtattacatatgttgcgtaaccagtcggcgctggaagtgaaagagcagcataaagccgcggatacca

SEQ ID NO: 481200 - DNA, 75 bp, synthetic construct
  source 1..75: mol_type = other DNA
ctggcgatgatggctacagctgcggcggcgttccacttttccggtcatactggtgttgccgatcttgatgaggct

SEQ ID NO: 481201 - DNA, 75 bp, synthetic construct
  source 1..75: mol_type = other DNA
aacgcgtaaaacagactggctgggtgattgtggtgttggtagtggcgctgaatatctggttactggtgggaacgg

SEQ ID NO: 481202 - DNA, 75 bp, synthetic construct
  source 1..75: mol_type = other DNA
cgaaacgcaacagcagatcgggcaatcctcaccccgttgcccggtttagcgaccgtaacacccacgccgtgagac

SEQ ID NO: 481203 - DNA, 75 bp, synthetic construct
  source 1..75: mol_type = other DNA
gtgcagacagaaagcatgagctgaacggtatagatttattcaccggtgcattactgacttatacagacaacaatg

SEQ ID NO: 481204 - DNA, 75 bp, synthetic construct
  source 1..75: mol_type = other DNA
ttgatatggcaaagaataataaactgacatcaagtgcacaggcttcatatctttatcacggtaagctcctgggga

SEQ ID NO: 481205 - DNA, 75 bp, synthetic construct
  source 1..75: mol_type = other DNA
gtgcgctcctccgctactgcagaagatatgccggacgcttcctttgccggtcagcaggaaaccttcctcaacgtt

SEQ ID NO: 481206 - DNA, 75 bp, synthetic construct
  source 1..75: mol_type = other DNA
attgatcataaaaccgatcatgaaatcgatcatgacatctcagatgaagaaccctgcaatgacgcgggttccggc

SEQ ID NO: 481207 - DNA, 75 bp, synthetic construct
  source 1..75: mol_type = other DNA
ttaaagccgaacaggctcttgaccggaatattgcccgtatagaatcaattgaacgttctttgctgacactggacg

SEQ ID NO: 481208 - DNA, 75 bp, synthetic construct
  source 1..75: mol_type = other DNA
gtgccgggcaaacaccgttgacgtcgtgctaatggacatgagtatgcctggcattggcggtcttgaggcgacgcg

SEQ ID NO: 481209 - DNA, 75 bp, synthetic construct
  source 1..75: mol_type = other DNA
atacagaaaaccctttaccagcgaaagtcatgcaggccggtgctgcgggctacctcagcaaaggtgcggctccgc

SEQ ID NO: 481210 - DNA, 75 bp, synthetic construct
  source 1..75: mol_type = other DNA
gcagtggttgctgcggatgggatatggaactattcagatgaacaggtggagcgtgcaaagcaaaacgggtggctt

SEQ ID NO: 481211 - DNA, 75 bp, synthetic construct
  source 1..75: mol_type = other DNA
cgacattaatgctgtttttgtctctgaacgttaaggtagtagtcatcattaaccatgttgccagtggcaacagtg

SEQ ID NO: 481212 - DNA, 75 bp, synthetic construct
  source 1..75: mol_type = other DNA
gaatttaggagatgacgtcgaactctttgaagagtatcaagaggattttctagaggatgtatcatatttagcaga

SEQ ID NO: 481213 - DNA, 75 bp, synthetic construct
  source 1..75: mol_type = other DNA
agtgggcggtctgatgaaaaagctctcgattatgtgtttatagatgaaagccaagattttccacaaagcttcatt

SEQ ID NO: 481214 - DNA, 75 bp, synthetic construct
  source 1..75: mol_type = other DNA
gaactggcaaaacaggccgtacaaattgagaaacactacggtcgcccgatggatattgagtgggcgaaagatggc

SEQ ID NO: 481215 - DNA, 75 bp, synthetic construct
  source 1..75: mol_type = other DNA
ggaagggatcgatagcttgtccctgaacccggataccgtggtgcaaacatggttaagtctggctgaactgaagaa

SEQ ID NO: 481216 - DNA, 75 bp, synthetic construct
  source 1..75: mol_type = other DNA
ggctcaaacgatatgacacagttggcgctcggtctggatcgtgactccggcgtagtttctgaactgttcgatgag

SEQ ID NO: 481217 - DNA, 75 bp, synthetic construct
  source 1..75: mol_type = other DNA
accatggggtcgaaaaaaatccgcatggtttacgcgccgacccaggagcacggcaagcaggttaaaatcgaagac

SEQ ID NO: 481218 - DNA, 75 bp, synthetic construct
  source 1..75: mol_type = other DNA
gaggcagataacctcatggatgatgcgtccgacatggtgctgttcgatggactggtgttcacccgggccgcgcac

SEQ ID NO: 481219 - DNA, 75 bp, synthetic construct
  source 1..75: mol_type = other DNA
agacagcaccaaaacttcgtgctgaccgggaaagaatcaacgccgccagagataaactcagagcggaaaccgata

SEQ ID NO: 481220 - DNA, 75 bp, synthetic construct
  source 1..75: mol_type = other DNA
tccgccagtggattatcgacactcccttccagcctgagctggaaaacgccatccgcgaagcctatgcacagcttt

SEQ ID NO: 481221 - DNA, 75 bp, synthetic construct
  source 1..75: mol_type = other DNA
ggtggtgtttatcacttccgcatgggggcttggtgaaatggtggtgcagggggctgttaacccggatgaattcta

SEQ ID NO: 481222 - DNA, 75 bp, synthetic construct
  source 1..75: mol_type = other DNA
tgtgaagcagtgaaacgtgtgcgcaacgacatggggctgaccaacgttgagatcatgatcccgttcgtgcgtacc

SEQ ID NO: 481223 - DNA, 75 bp, synthetic construct
  source 1..75: mol_type = other DNA
tcaccgctggtgctttggtataaccaactcggcatgaatgatgtagacagggttgggggcaaaaatgcctccctg

SEQ ID NO: 481224 - DNA, 75 bp, synthetic construct
  source 1..75: mol_type = other DNA
cgcatcatctggcgtgatgttctccattgataccgaatccggctttgaccaggtggtgtttatcacttccgcatg

SEQ ID NO: 481225 - DNA, 75 bp, synthetic construct
  source 1..75: mol_type = other DNA
tcagcggatggtgcgttccgacctcgcgtcctctggcgtgatgttctccattgataccgaatccggtttcgatca

SEQ ID NO: 481226 - DNA, 75 bp, synthetic construct
  source 1..75: mol_type = other DNA
cgtggtgtctgaactgttcgatgagcgcaacgacgccgtgaaagcattgctgtcgatggctatccgtgctgcgaa

SEQ ID NO: 481227 - DNA, 75 bp, synthetic construct
  source 1..75: mol_type = other DNA
ttatccactaaacgcctttgccatgctgatgatccgtgtggatgattcaggggataccatcgacatcggtctgct

SEQ ID NO: 481228 - DNA, 75 bp, synthetic construct
  source 1..75: mol_type = other DNA
agggaatcgaaaaatgtctctatcttggcaatatggattcactgcgcgactggggacatgcgaaagattacgtgc

SEQ ID NO: 481229 - DNA, 75 bp, synthetic construct
  source 1..75: mol_type = other DNA
agcaccacctcaatcatgtgcatatcagtgcacgtcgttttcccgagatttttcaatggatcacagggatacaaa

SEQ ID NO: 481230 - DNA, 75 bp, synthetic construct
  source 1..75: mol_type = other DNA
aaaatcggtgagcaggcattagaaattgattttttagaaggtgtgttgaagaaactgggtcgcttcaaccacaaa

SEQ ID NO: 481231 - DNA, 75 bp, synthetic construct
  source 1..75: mol_type = other DNA
gtgtgcagaaatggttgccagcgatttggtgaaagcaaaacagcatgcattactcaaaagccatggttatgaagt

SEQ ID NO: 481232 - DNA, 75 bp, synthetic construct
  source 1..75: mol_type = other DNA
gtcgagcatcttcttttaacaccgatcgcgtagaccatatatatcaagatcgccacaatgataatccaaattttc

SEQ ID NO: 481233 - DNA, 75 bp, synthetic construct
  source 1..75: mol_type = other DNA
gcaggccgggcgactaattgcatcaggcgttcctcgccagaatgtggagatcatctatgatgttggcgtatcgac

SEQ ID NO: 481234 - DNA, 75 bp, synthetic construct
  source 1..75: mol_type = other DNA
gtagatcgcgttactgacggcgggcgtaaccgcctggtgtttggctgggagagctaccgggcaaatatcggaggt

SEQ ID NO: 481235 - DNA, 75 bp, synthetic construct
  source 1..75: mol_type = other DNA
ttaatttcctgaacaaacaacacatgcaacacgacaaagcgcaattactcaaccgcagtgcggagctggaggagg

SEQ ID NO: 481236 - DNA, 75 bp, synthetic construct
  source 1..75: mol_type = other DNA
atagcccggctttcaaggcgaaggtggcacttgccgccatccgaggtgagcagacgctggtggagttgtcccagc

SEQ ID NO: 481237 - DNA, 75 bp, synthetic construct
  source 1..75: mol_type = other DNA
aaggcagtctgaaactcaggctgaacatggataagactaaaatcccccatgttaatgacggctttatctttctgg

SEQ ID NO: 481238 - DNA, 75 bp, synthetic construct
  source 1..75: mol_type = other DNA
ttatttccaatataaacaatgcaaaagggcttgagttcccatttgttatttgttttgctatgaaattagtaaaga

SEQ ID NO: 481239 - DNA, 75 bp, synthetic construct
  source 1..75: mol_type = other DNA
tttatcaaaacctcataatcaatcaccaaactaacattctgcgcggcaacatctgggcgggtatgggaatgggta

SEQ ID NO: 481240 - DNA, 75 bp, synthetic construct
  source 1..75: mol_type = other DNA
caaagaacgctgtactgtacttttataacaagtccggtactagtgtaagctgtactatcatgattaaagatattc

SEQ ID NO: 481241 - DNA, 75 bp, synthetic construct
  source 1..75: mol_type = other DNA
gctcgtgaattttgggagaaaactggtgaaaaaccaagtgaggacgacattagtacgtttgcaacgggtatcatg

SEQ ID NO: 481242 - DNA, 75 bp, synthetic construct
  source 1..75: mol_type = other DNA
tgctgtttctttcgaatcaccagaatatacagcggatgttgatgctattggtactcttcgtctactagaggcaat

SEQ ID NO: 481243 - DNA, 75 bp, synthetic construct
  source 1..75: mol_type = other DNA
actgattggtttgcaagctttcttcagcatggattgcaatggcccggcttttcatcttcatatataaatcaagaa

SEQ ID NO: 481244 - DNA, 75 bp, synthetic construct
  source 1..75: mol_type = other DNA
gcgtttgatattagtgatgaggtcactagttggtcaagtgaggccgtaaataggaatctgtctaaaagtgatatt

SEQ ID NO: 481245 - DNA, 75 bp, synthetic construct
  source 1..75: mol_type = other DNA
gcctatccagtgcaaagggctatctaaatcaacagggaaaattatatggtaatcaattccaagatgaactaatca

SEQ ID NO: 481246 - DNA, 75 bp, synthetic construct
  source 1..75: mol_type = other DNA
tctgcaaatcgccagtggcgcagtatacacagacgacaccggaagttggtcagaactgcatgacaccaaactaca

SEQ ID NO: 481247 - DNA, 75 bp, synthetic construct
  source 1..75: mol_type = other DNA
gtaaaaccgtggcgacgctcaccacgctggaagatctctttatagcgggagcggagactcagcccgcgctggttc

SEQ ID NO: 481248 - DNA, 75 bp, synthetic construct
  source 1..75: mol_type = other DNA
aacgcaagcgtgttcaccatcaactacgataaccttgtctggctggttgaagaattgggagaacgatggccgttc

SEQ ID NO: 481249 - DNA, 75 bp, synthetic construct
  source 1..75: mol_type = other DNA
gatgtgatcgttcgtgttgatcctcgttatttccgtcctgcagaagttgaaactcttcttggtgatccagcaaaa

SEQ ID NO: 481250 - DNA, 75 bp, synthetic construct
  source 1..75: mol_type = other DNA
gcggagacacagcccgcgctggtgttggcaccgctgcgcgtagccgccagcacatggccggatgaagcggttaaa

SEQ ID NO: 481251 - DNA, 75 bp, synthetic construct
  source 1..75: mol_type = other DNA
cggggcagagctggacgaagctggagcctttcgcacactcgcaggacgaaatacagcgtgcactggccgacgtga

SEQ ID NO: 481252 - DNA, 75 bp, synthetic construct
  source 1..75: mol_type = other DNA
cgccggtcgtcaggagtgggagcgaaggcttacggcgatggtgaaccgcagacacggggagcccgggtttaaact

SEQ ID NO: 481253 - DNA, 75 bp, synthetic construct
  source 1..75: mol_type = other DNA
aatggggacgccgtgaattctctaatggctcaattcctgacaaccgaacgataaaacgttgggtcgagaacggtc

SEQ ID NO: 481254 - DNA, 75 bp, synthetic construct
  source 1..75: mol_type = other DNA
aaatatgattagaaagcgttatgaacacgctggtttaactatgtatgaaaaactaaagggtgttaaattaataag

SEQ ID NO: 481255 - DNA, 75 bp, synthetic construct
  source 1..75: mol_type = other DNA
atgcagggaatccggggcaggtactggctggcggtctgaatccggcagtggcacagcttataaaacaggccaccg

SEQ ID NO: 481256 - DNA, 75 bp, synthetic construct
  source 1..75: mol_type = other DNA
tggagacggtgtatttaacccccgcgatgcatttatagaccataaatctcttcctgagcagtcaggaggtgagtc

SEQ ID NO: 481257 - DNA, 75 bp, synthetic construct
  source 1..75: mol_type = other DNA
tcagcatgaaaacaatgctcttttcttaaatgtaaaacaattcggagcaattggggatgggaaatatcatccatt

SEQ ID NO: 481258 - DNA, 75 bp, synthetic construct
  source 1..75: mol_type = other DNA
atggcattcagtaatcccttcgatgatccgcagggagcgttttacatattgcgcaatgcgcaggggcaattcagt

SEQ ID NO: 481259 - DNA, 75 bp, synthetic construct
  source 1..75: mol_type = other DNA
atatattgcatttttttgcggcttacaaagcattaaaaaataatgtccaaccaggggatgccaatgcgtcagtat

SEQ ID NO: 481260 - DNA, 75 bp, synthetic construct
  source 1..75: mol_type = other DNA
gaaacatctgtactggcacattacaggctggcggggacgtgcggaacggcaataaagccgcacgatacgcaggca

SEQ ID NO: 481261 - DNA, 75 bp, synthetic construct
  source 1..75: mol_type = other DNA
gtttctcggtggtgaaagcccatgccgaaaaactggtgctggttgactcgtcgctgctaccggatatcgccattc

SEQ ID NO: 481262 - DNA, 75 bp, synthetic construct
  source 1..75: mol_type = other DNA
tgtaaagcagcagcagaacaaagctggtcgctttccgcgctgacactcccccatccgctggttcgcgtactggtc

SEQ ID NO: 481263 - DNA, 75 bp, synthetic construct
  source 1..75: mol_type = other DNA
taggcgggaatgccattgtcgagtttgatgataatgaagaagtttccgggcgtttaagcattatctccggtgaca

SEQ ID NO: 481264 - DNA, 75 bp, synthetic construct
  source 1..75: mol_type = other DNA
tggcacgccgtgacgcgtgccgtgggaaatacaaaaaatcaaggtgctgaattaatactacctataaaacaagag

SEQ ID NO: 481265 - DNA, 75 bp, synthetic construct
  source 1..75: mol_type = other DNA
atggcagaaaccaaaattgttgtcggacctcagccttttagcgttggggaagagtacccgtggctggctgagcgt

SEQ ID NO: 481266 - DNA, 75 bp, synthetic construct
  source 1..75: mol_type = other DNA
aagcgcgaagccacgccggaaggcgaccgctgggttgaagctcgggagagcgatcagcaggcggcaaaacgctgg

SEQ ID NO: 481267 - DNA, 75 bp, synthetic construct
  source 1..75: mol_type = other DNA
agagtacccgtggctggctgagcgtgacgaagacggtgcagtagtcacctttaccggtaaggtgcgcaaccataa

SEQ ID NO: 481268 - DNA, 75 bp, synthetic construct
  source 1..75: mol_type = other DNA
ctgcgccgcgctcggtggtaaagagtgggatcattctgcgttaattcgggcgcttgaaacacaagccaatttcac

SEQ ID NO: 481269 - DNA, 75 bp, synthetic construct
  source 1..75: mol_type = other DNA
ctttgttattctctgtgatatcaatatcatccattgctgatgatacaacgcatacaggtgttgtacgtatagaag

SEQ ID NO: 481270 - DNA, 75 bp, synthetic construct
  source 1..75: mol_type = other DNA
agggaactgccaggcatcaaattaagcagtaagccggtcataaaaccggtggttgtaaaagaattcggtggagcg

SEQ ID NO: 481271 - DNA, 75 bp, synthetic construct
  source 1..75: mol_type = other DNA
gctcgctaatgaatcagaacgcgacataccatacgatcccgaaccaatcggtcgttttaacgtcgcgccaggcac

SEQ ID NO: 481272 - DNA, 75 bp, synthetic construct
  source 1..75: mol_type = other DNA
atgcgtcaggatgtaggcgggaaagaagctgaggagataattgccgacggtacagtgcccgccgacaagtttatc

SEQ ID NO: 481273 - DNA, 75 bp, synthetic construct
  source 1..75: mol_type = other DNA
gacgagcagctgcatctcgatccggttctgtggtcgtacgcgcccgggtggtgggataagcagccgctgattaac

SEQ ID NO: 481274 - DNA, 75 bp, synthetic construct
  source 1..75: mol_type = other DNA
aaccttctaacataatggttattggaggagttagtgctacaggtgttaaaatcaccgattttggaatttcaaaaa

SEQ ID NO: 481275 - DNA, 75 bp, synthetic construct
  source 1..75: mol_type = other DNA
acttattcaagtgttgatccatatttaactgctaaaatatttcataatttagctaaagctctgtctgcttcgcat

SEQ ID NO: 481276 - DNA, 75 bp, synthetic construct
  source 1..75: mol_type = other DNA
aaaagttctgctactcagcgaacgtgatgagcagttgcatcttgatccagttatctggggatacgcccccggttg

SEQ ID NO: 481277 - DNA, 75 bp, synthetic construct
  source 1..75: mol_type = other DNA
gtggggacgctggtcgtatattggttgcggcaggccaaggagtatgttctatcagttgttttcgtcaaaaaaatt

SEQ ID NO: 481278 - DNA, 75 bp, synthetic construct
  source 1..75: mol_type = other DNA
acaaatctccgcctgatagagcgctctcaagttgcattcattgatgacgcccaacacaccgtatttaacgcatag

SEQ ID NO: 481279 - DNA, 75 bp, synthetic construct
  source 1..75: mol_type = other DNA
caccggactggatttatctgacaccggacgccttatttacactattggctcggagtcacagcgatacaccattat

SEQ ID NO: 481280 - DNA, 75 bp, synthetic construct
  source 1..75: mol_type = other DNA
ccacagctggctctgaaatacaaaacgcccgatgacgttcatcaggcgttttacagacagaaaagtgtcaactta

SEQ ID NO: 481281 - DNA, 75 bp, synthetic construct
  source 1..75: mol_type = other DNA
atggctaaagatgccgtgaagcgtagccaacatatggcagcacttcacgcactgaccattgcaaaaatcaccgct

SEQ ID NO: 481282 - DNA, 75 bp, synthetic construct
  source 1..75: mol_type = other DNA
caccggactggatttatctaacaccggacgccttatttacacaattggctcggagctacagcgatcaccattatt

SEQ ID NO: 481283 - DNA, 75 bp, synthetic construct
  source 1..75: mol_type = other DNA
tcagagcactgaaagaaatttcaaagatggaaagcgaagtagcgaaaaaagccgtagcaaataatcatatagacg

SEQ ID NO: 481284 - DNA, 75 bp, synthetic construct
  source 1..75: mol_type = other DNA
gtggtcactaaaaaaaaggacaaaattaacagggatgtcgttatatccttaagattgacagagaaagaatttggc

SEQ ID NO: 481285 - DNA, 75 bp, synthetic construct
  source 1..75: mol_type = other DNA
gtggtcactaaaaaaaaggaaaaggacaaagttaacagggatgttgttatatccttaagattgacagagaaagaa

SEQ ID NO: 481286 - DNA, 75 bp, synthetic construct
  source 1..75: mol_type = other DNA
aacattatctccaccgccgacagcatccggcagatgctaccacagctcaccgagagtctgccgaaatcggtgaag

SEQ ID NO: 481287 - DNA, 75 bp, synthetic construct
  source 1..75: mol_type = other DNA
catgaaagaaatggaataacctgttcaatgacggatggttatgactgctaccagaacgcactggctgagcgaata

SEQ ID NO: 481288 - DNA, 75 bp, synthetic construct
  source 1..75: mol_type = other DNA
aatctggataatttacacacccgggtcgttgatctgaataacctcacatttgatggacagtacgattttattctt

SEQ ID NO: 481289 - DNA, 75 bp, synthetic construct
  source 1..75: mol_type = other DNA
taccggctcccacaccttctgagcacgccgcagcagtgctaaatctggttgatgacggtgttatcgaatggaatg

SEQ ID NO: 481290 - DNA, 75 bp, synthetic construct
  source 1..75: mol_type = other DNA
gcctggcatgtttatgacaataaagagtaccgtcatgcatcatggcgaacaggaaattacagtgccgtcttaccg

SEQ ID NO: 481291 - DNA, 75 bp, synthetic construct
  source 1..75: mol_type = other DNA
ggatttattgatatcagtgccacttcgaagaaaatcattttctgcggcacattaactgcgggcagtttaaaaaca

SEQ ID NO: 481292 - DNA, 75 bp, synthetic construct
  source 1..75: mol_type = other DNA
ccacctcgaagaaaattattttctgcggcacgttaactgcgggcagtttaaaaacagaaattgccgatggcaaat

SEQ ID NO: 481293 - DNA, 75 bp, synthetic construct
  source 1..75: mol_type = other DNA
tgttcatgtatttagatgttattttggtatttctccaaaccagtattcacagaagaactcagaaagtgagattat

SEQ ID NO: 481294 - DNA, 75 bp, synthetic construct
  source 1..75: mol_type = other DNA
ttgcaggctgtgatggcgatggtacgcggtggcgatctcggccagccgttccagttcaaaaacttccgcgattaa

SEQ ID NO: 481295 - DNA, 75 bp, synthetic construct
  source 1..75: mol_type = other DNA
acgttgaagcgtcgtttgagctgaacgacgctaacaaaactatcaaagtgctgagtgagtccgatttccaggtca

SEQ ID NO: 481296 - DNA, 75 bp, synthetic construct
  source 1..75: mol_type = other DNA
aaggccatatgtgtacagtcagaatccccggttactgtaatcacaatcctgaaacatctgtgctggcgcactaca

SEQ ID NO: 481297 - DNA, 75 bp, synthetic construct
  source 1..75: mol_type = other DNA
gactatgatgcgaaagagataagattaaaaccaacagattcacccggggagggattgaagttgtcttcaggtaca

SEQ ID NO: 481298 - DNA, 75 bp, synthetic construct
  source 1..75: mol_type = other DNA
aaactcaagcagattaacaaaaagtttttatgaaataacagaaaactacattcaagataattgtgattctttaga

SEQ ID NO: 481299 - DNA, 75 bp, synthetic construct
  source 1..75: mol_type = other DNA
tttagatatcgcagttaaattaagcaaagcacaaaccagtaagaaataccccgaaggggttctagtcatagccag

SEQ ID NO: 481300 - DNA, 75 bp, synthetic construct
  source 1..75: mol_type = other DNA
gcggattttggtggtgaatttattagccgctatttgaaagctaataatctaaggggtttttctgattgtagggaa

SEQ ID NO: 481301 - DNA, 75 bp, synthetic construct
  source 1..75: mol_type = other DNA
gtgagcactgaagaagtcagagaaatgatacagcggtaccgtgaagcggaaagggcggtactggaggggaagtct

SEQ ID NO: 481302 - DNA, 75 bp, synthetic construct
  source 1..75: mol_type = other DNA
caagacccggttatcgataagacgaacagactcaggctctgccgggtgttatgtgacggttgccgttcgggggaa

SEQ ID NO: 481303 - DNA, 75 bp, synthetic construct
  source 1..75: mol_type = other DNA
gcttaacagtgaaaaagttcgcccggtggcagaccgcctgacggtgcgcagcgcagaaattattccgtacagcgt

SEQ ID NO: 481304 - DNA, 75 bp, synthetic construct
  source 1..75: mol_type = other DNA
cctttgtctccctggtggggtatctgccgcttagctctgccagttacggtataccgggtctgctgatgctcgccg

SEQ ID NO: 481305 - DNA, 75 bp, synthetic construct
  source 1..75: mol_type = other DNA
accgttcagttctgccagttacggcatccccggtctgctgatgcttgccggggcgctgctggtctggcaggtcag

SEQ ID NO: 481306 - DNA, 75 bp, synthetic construct
  source 1..75: mol_type = other DNA
cagcggcaaaagccagcctgcagaagtatatcgccagtcagacgaggcttggtcgggatattcgccgtagcgcca

SEQ ID NO: 481307 - DNA, 75 bp, synthetic construct
  source 1..75: mol_type = other DNA
ctttgccgcactgcatgttgagggggtgcagcgtgtggagctggcttctcctctggcggatgtggtcctgaacaa

SEQ ID NO: 481308 - DNA, 75 bp, synthetic construct
  source 1..75: mol_type = other DNA
gtacggggtattcaaatttattttatctagaatgttttacagtggactttataaaagtagataagatgtttacac

SEQ ID NO: 481309 - DNA, 75 bp, synthetic construct
  source 1..75: mol_type = other DNA
tctgcgccagcgtattaacgaagccgcgcaggctgtgatggtggcttacgcgatgggcggcgatcttgaccagct

SEQ ID NO: 481310 - DNA, 75 bp, synthetic construct
  source 1..75: mol_type = other DNA
atgcatacagtttctgaaaacaagtgcggtaaatacgcattactgctgcaacgggccagagccgaagcacaggcc

SEQ ID NO: 481311 - DNA, 75 bp, synthetic construct
  source 1..75: mol_type = other DNA
gaaataccagtggcagaactatggcgcagcgaacgaaaacgagtgggacggttaccgtttcaaaattaaatactt

SEQ ID NO: 481312 - DNA, 75 bp, synthetic construct
  source 1..75: mol_type = other DNA
ggactcactgcggccagccctgtttgctttctggctgttgctggtcgccctgcttaatgcccgacatggtgatgt

SEQ ID NO: 481313 - DNA, 75 bp, synthetic construct
  source 1..75: mol_type = other DNA
gtggctgaccgtctgacggttcgcagtgcagaaatcatcccgtaccgtgtggaagccaccatttttctctatccg

SEQ ID NO: 481314 - DNA, 75 bp, synthetic construct
  source 1..75: mol_type = other DNA
cgtgatccgcacgctggaactggaatctgaacccgtcactaaattgttgcaggagaacgcttaccgtgagttgct

SEQ ID NO: 481315 - DNA, 75 bp, synthetic construct
  source 1..75: mol_type = other DNA
gccggactttgagacgctgcttgccgaacgcaaggcagaatttgtagcgcttcatccgaaagatgagcaggaagc

SEQ ID NO: 481316 - DNA, 75 bp, synthetic construct
  source 1..75: mol_type = other DNA
actaaaatcggtatgttggcggaaaccgatattgttgaagcggtggcagaacggttgcaacgttatcagatccaa

SEQ ID NO: 481317 - DNA, 75 bp, synthetic construct
  source 1..75: mol_type = other DNA
ttcgtgaaggtgaacgggcggcggcggacggcagtatcaccggaacgccacgaaactcccggattgcgtcatttt

SEQ ID NO: 481318 - DNA, 75 bp, synthetic construct
  source 1..75: mol_type = other DNA
gcgagcagcgggcggcgatgttgcaggattgggccgatatgattgatgagtggacttcgggaggcagtaagggtt

SEQ ID NO: 481319 - DNA, 75 bp, synthetic construct
  source 1..75: mol_type = other DNA
gatgggctgtggcgcagtgctaatgaaaggtggtcatctggatgatgagcaaagcccggactggctgtttactcg

SEQ ID NO: 481320 - DNA, 75 bp, synthetic construct
  source 1..75: mol_type = other DNA
aaaggtgggcatctggatgatgaacaaagcccggactggctgtttacccgcgacggcgaacaacgttttaccgcg

SEQ ID NO: 481321 - DNA, 75 bp, synthetic construct
  source 1..75: mol_type = other DNA
ttcaccttcggcggttgccacgctacgcagtcgattattgccacaggtttcattaataacgccaaacttgcccga

SEQ ID NO: 481322 - DNA, 75 bp, synthetic construct
  source 1..75: mol_type = other DNA
ggatgccaccatttttctctatcctggaccggaagcagagccggtaatggtagcggcaaaagccagcctgcagaa

SEQ ID NO: 481323 - DNA, 75 bp, synthetic construct
  source 1..75: mol_type = other DNA
gtgcaaccagtccggcgcctgcagaggtggtgctgactgtccttagccgcgaaggcgacggaacagcagaaaaag

SEQ ID NO: 481324 - DNA, 75 bp, synthetic construct
  source 1..75: mol_type = other DNA
tctttgccgcccttcatgttgagggagtgcagcgtgtagagctggcttctcctctggcggatgtggtcctgaaca

SEQ ID NO: 481325 - DNA, 75 bp, synthetic construct
  source 1..75: mol_type = other DNA
tttctatccaggcaggccatggacattctcatcgctttgaagacgttctccggtggatcggattatgttctgccg

SEQ ID NO: 481326 - DNA, 75 bp, synthetic construct
  source 1..75: mol_type = other DNA
ggcttctttactcgaagagtggcaccttgaaacgttgcacatccctgaaacagagcgtgacctctatcgcgtaca

SEQ ID NO: 481327 - DNA, 75 bp, synthetic construct
  source 1..75: mol_type = other DNA
agcttatgaatttcatgcccgaagcgccgacggtcgcgtggcggatgccagtgcaaccagcccggcacctgcaga

SEQ ID NO: 481328 - DNA, 75 bp, synthetic construct
  source 1..75: mol_type = other DNA
cgatgggcggcgatcttgaccagctcgctgccaactacaacgtgaaacgcctgacggtgacgactgctgataatg

SEQ ID NO: 481329 - DNA, 75 bp, synthetic construct
  source 1..75: mol_type = other DNA
ataacggccaacaggttgatgctatgcttggtattatttcaagcatcatggcaaaaaaccctacaacgtacccag

SEQ ID NO: 481330 - DNA, 75 bp, synthetic construct
  source 1..75: mol_type = other DNA
ttccaacctgactccaagtcattgatggggaagaatataaattacgaggttttagtcagcaaagatggcttatat

SEQ ID NO: 481331 - DNA, 75 bp, synthetic construct
  source 1..75: mol_type = other DNA
catgcaggtgttgtacgcatcgaaggaattataacagcaaagacttgtattgttgctgatgagtctaaaaatttc

SEQ ID NO: 481332 - DNA, 75 bp, synthetic construct
  source 1..75: mol_type = other DNA
atcagcccgcagggagaagtgatcaacgacaccctggaagacgatcaggattttgaggtcgccgactttaaccgt

SEQ ID NO: 481333 - DNA, 75 bp, synthetic construct
  source 1..75: mol_type = other DNA
gaaggcgatgctgcaaagaacctttgacgataatctcgacaacctgctcgataaattcagcgattacatttggga

SEQ ID NO: 481334 - DNA, 75 bp, synthetic construct
  source 1..75: mol_type = other DNA
tggcgcactgacgattgccaccacacataccctggcacgctatagtttgccggatgttattaaagcttttcgtga

SEQ ID NO: 481335 - DNA, 75 bp, synthetic construct
  source 1..75: mol_type = other DNA
tttcgacatcccagcaggatactgagaaccagcgcatggaacttgaacaagctgggtggacgttcgacttttggt

SEQ ID NO: 481336 - DNA, 75 bp, synthetic construct
  source 1..75: mol_type = other DNA
tgatatgagttcaatttccccggttgccaccaaagcatttgcacaacgtattatcgcgggaggcgcggaatatat

SEQ ID NO: 481337 - DNA, 75 bp, synthetic construct
  source 1..75: mol_type = other DNA
ctgcaccgcaagagcttattggtgaacgtggcattgtttgctctacaccgcgtgaagtcgcgcaggagtgtgagg

SEQ ID NO: 481338 - DNA, 75 bp, synthetic construct
  source 1..75: mol_type = other DNA
tgaatggttttttacttgaggcgacagcagaagaatatgacggggaggatttaacagaggttagtcaggacgtat

SEQ ID NO: 481339 - DNA, 75 bp, synthetic construct
  source 1..75: mol_type = other DNA
cacaccgcaaactgctgttgctgccgtgctgtgtgccgcgatgataggctgtttagctgaagctcgttgtttacg

SEQ ID NO: 481340 - DNA, 75 bp, synthetic construct
  source 1..75: mol_type = other DNA
tattgtccatcagcttggcaccactgatctcacctctgctgccggtaagctcctgttgtcgatgctagcagcggt

SEQ ID NO: 481341 - DNA, 75 bp, synthetic construct
  source 1..75: mol_type = other DNA
gtgagaatcaacacgatctcctgcgcgaactcggcaaaatcgccttcgttgatgacaacattctctctgtattcc

SEQ ID NO: 481342 - DNA, 75 bp, synthetic construct
  source 1..75: mol_type = other DNA
tgtgcagcgtgtggagctggcttcgccgttggcggatgtgatcctgaacaaaacgcaggcggcatcatgtacgca

SEQ ID NO: 481343 - DNA, 75 bp, synthetic construct
  source 1..75: mol_type = other DNA
gacacaaaggccatgatgattgcggcttatcccaccgaacagcgtgaagccgtctccgccgcgctggaactggaa

SEQ ID NO: 481344 - DNA, 75 bp, synthetic construct
  source 1..75: mol_type = other DNA
gtatatcacggcacagcaccggctggggcgtgacatccgtctttctgccatttatgccgctttgcatgtggaagg

SEQ ID NO: 481345 - DNA, 75 bp, synthetic construct
  source 1..75: mol_type = other DNA
gttaccgtttcaaagtgaagtactttgtgccgattaccgatctgtggggcggccagctgagctacatcggcttca

SEQ ID NO: 481346 - DNA, 75 bp, synthetic construct
  source 1..75: mol_type = other DNA
gtggccgaccgcgtgaccgtgcagtctgccgccattgttgaatatcagataaacgccacgctttacctttaccca

SEQ ID NO: 481347 - DNA, 75 bp, synthetic construct
  source 1..75: mol_type = other DNA
gcagcgaatgaaaacgagtgggacggttaccgtttcaaaattaaatactttgtgccggtgatgctgccaacttac

SEQ ID NO: 481348 - DNA, 75 bp, synthetic construct
  source 1..75: mol_type = other DNA
caaagaacctttgacgataatctcgacaacctgctcgataaattcagcgattatatctgggacgagctggcctga

SEQ ID NO: 481349 - DNA, 75 bp, synthetic construct
  source 1..75: mol_type = other DNA
gagtcgtatcgctacagtaaatgcttcgataatggcttcctgcgggaaaccttgcttgagcactactcaccggat

SEQ ID NO: 481350 - DNA, 75 bp, synthetic construct
  source 1..75: mol_type = other DNA
cgtcgacctgctgacgaccggcgtcgatattccgtcgatctgtaacatcgtgttcctgcgtaaagtacgcagccg

SEQ ID NO: 481351 - DNA, 75 bp, synthetic construct
  source 1..75: mol_type = other DNA
gctggcaatgttcctcgataaactggactggcgtcaacccaaaacatcccgccttaatgcactgacaatgttgta

SEQ ID NO: 481352 - DNA, 75 bp, synthetic construct
  source 1..75: mol_type = other DNA
gcttaccacttcgcaaaaccagcgccaagtcaatatgactatcgctcaatgaatatgaaacaaatgagcggtaat

SEQ ID NO: 481353 - DNA, 75 bp, synthetic construct
  source 1..75: mol_type = other DNA
gatccgccgattcagatcatcacccgcaacgcccaggagggggtttatctctccaagggcgaacaggtagagcgc

SEQ ID NO: 481354 - DNA, 75 bp, synthetic construct
  source 1..75: mol_type = other DNA
atgcaagcgctttatctggaaattaaaaacctcatcatcagcaccctcaatctggacgagttgactcctgatgat

SEQ ID NO: 481355 - DNA, 75 bp, synthetic construct
  source 1..75: mol_type = other DNA
ttcccagtcgtcatcaaactatttgacccactctccctctctgctgttttccaggaaagggagtgaagagaaaca

SEQ ID NO: 481356 - DNA, 75 bp, synthetic construct
  source 1..75: mol_type = other DNA
catcgggaaacgaaagaaattctgggtatccactgctttggtgagcgcgcagccgaaattattcatatcggtcaa

SEQ ID NO: 481357 - DNA, 75 bp, synthetic construct
  source 1..75: mol_type = other DNA
tacaccatcccggaaatcagctccgtgggcaaaaccgaacaacaactcactgcgatgaaagtgccgtatgaagtg

SEQ ID NO: 481358 - DNA, 75 bp, synthetic construct
  source 1..75: mol_type = other DNA
gatgtcagattctctctcctatcacttctggaacagtggcgtagtgattcgtcacaacgaagagtacgagaagat

SEQ ID NO: 481359 - DNA, 75 bp, synthetic construct
  source 1..75: mol_type = other DNA
attgaaacgttgctgccgttgtatcatctccatgctgcaggtttcgaattcgaagtggcgaccatttccggtctg

SEQ ID NO: 481360 - DNA, 75 bp, synthetic construct
  source 1..75: mol_type = other DNA
ggaacaattacaggcacaacgataacagttgctgctgtcgtttttaaactgattgatgcatttaacgctcgtaaa

SEQ ID NO: 481361 - DNA, 75 bp, synthetic construct
  source 1..75: mol_type = other DNA
tcaacgccccacaaattccttcgatgaaagccattctcggcgcggcgaaaaagccagttcaggtgtggtcggcgg

SEQ ID NO: 481362 - DNA, 75 bp, synthetic construct
  source 1..75: mol_type = other DNA
agttgggcaaagagaaatttccttttctctcgtttctttcccagtcgtcatcaaactatttgacccattctccct

SEQ ID NO: 481363 - DNA, 75 bp, synthetic construct
  source 1..75: mol_type = other DNA
cgccgtagcgctcgacattaccgatgaacaaccggtgacctggtttagcccgttagatggcgataataccctttc

SEQ ID NO: 481364 - DNA, 75 bp, synthetic construct
  source 1..75: mol_type = other DNA
tcccagacgccgcagacaaacaaacgccagatattggctatatgccgggtcatctcacctggtacttcggcgaag

SEQ ID NO: 481365 - DNA, 75 bp, synthetic construct
  source 1..75: mol_type = other DNA
gtattcgttgagattactctgaatcgtggcgctccggatgtgtttgaacaattcaataccgctgtacaaaaactt

SEQ ID NO: 481366 - DNA, 75 bp, synthetic construct
  source 1..75: mol_type = other DNA
cacaaaaacgaggtttgtgggctgaccccaatcccgttccaccgtgggaatggagacataagtataaggtgacaa

SEQ ID NO: 481367 - DNA, 75 bp, synthetic construct
  source 1..75: mol_type = other DNA
tggcgataccatcgaagttttacaggacaaacaggacaaaaagcctgtcaggattcgcctggcaaacatcgatgc

SEQ ID NO: 481368 - DNA, 75 bp, synthetic construct
  source 1..75: mol_type = other DNA
ggcaaacatcgatgcgccggaaaagaaacaggctttcgggcgctggtcggcaaatcagcttaaagctctgcttgc

SEQ ID NO: 481369 - DNA, 75 bp, synthetic construct
  source 1..75: mol_type = other DNA
gttacaacgtggatgagtcattaccggctctgcaacgggaagcgcaggaacaaaaacgcggtttgtgggccgatg

SEQ ID NO: 481370 - DNA, 75 bp, synthetic construct
  source 1..75: mol_type = other DNA
ctttgcaacgggaagcgcaggaacaaaaacgcggtttatgggctgatacaaatccggttccaccgtgggaatggc

SEQ ID NO: 481371 - DNA, 75 bp, synthetic construct
  source 1..75: mol_type = other DNA
atatcgatgcaccggaaaaaaaacaaccctttggtcgctggtcaaccaatcaacttaaagccctgctggcagggc

SEQ ID NO: 481372 - DNA, 75 bp, synthetic construct
  source 1..75: mol_type = other DNA
ctgccgccgtacaaggatgcaaaaacctaataaaagctaatatcgcaaagcgcattgctgagcttaaagccgagc

SEQ ID NO: 481373 - DNA, 75 bp, synthetic construct
  source 1..75: mol_type = other DNA
gcggcctctctggatgatcttaaccgggcgatcaatgatgcggagtcagtgctggggacaacaagccgccgccgt

SEQ ID NO: 481374 - DNA, 75 bp, synthetic construct
  source 1..75: mol_type = other DNA
atgggcgtatttctaacgtcgagctttctaaacgtgtgggactttccccaacgccgtgtgcgtcggctggaaaga

SEQ ID NO: 481375 - DNA, 75 bp, synthetic construct
  source 1..75: mol_type = other DNA
gcgctgcatgggtatatgaacgttacaacacagataaatcattaccagctttgcaacgggaagcgcaggaacaaa

SEQ ID NO: 481376 - DNA, 75 bp, synthetic construct
  source 1..75: mol_type = other DNA
aaaaatgaagtgactggtgctgacggaggaccagtcagaacagaaattaccaacttaacgccggagcaggctgca

SEQ ID NO: 481377 - DNA, 75 bp, synthetic construct
  source 1..75: mol_type = other DNA
tacggacgcattatcggtcgtgtgttcacgacgaacggcacagatgccagccgctttatggttaagtctggtgct

SEQ ID NO: 481378 - DNA, 75 bp, synthetic construct
  source 1..75: mol_type = other DNA
gcgaccgcactggctgcggctgcccagaaagcaggctttgatctgatcctctgcggcgatggttcttccgacctt

SEQ ID NO: 481379 - DNA, 75 bp, synthetic construct
  source 1..75: mol_type = other DNA
accgaaccggtggtgcggttgaatgtggaatcgcgcggcgatgtaccgctgatggaagaaaagacaaaacttatc

SEQ ID NO: 481380 - DNA, 75 bp, synthetic construct
  source 1..75: mol_type = other DNA
tggtggaaatatatgaccgacgttatgccagctaacccggataacagcccagtcagtagcgagctgcaagaagtg

SEQ ID NO: 481381 - DNA, 75 bp, synthetic construct
  source 1..75: mol_type = other DNA
ggaatcaatcacgatggatggaagaacaaataagaaatacatggggatcaatggtattacgtcaggttgtacgcg

SEQ ID NO: 481382 - DNA, 75 bp, synthetic construct
  source 1..75: mol_type = other DNA
cgcctgcgccgccgttacccattcctgaccgaatcgctggcacgtcattacgcacggacctatggcagcaacact

SEQ ID NO: 481383 - DNA, 75 bp, synthetic construct
  source 1..75: mol_type = other DNA
cgataagcgacctcggggaggatttcggtcatgagttctacgaagcggaactgaaatacctggtggatcacgaat

SEQ ID NO: 481384 - DNA, 75 bp, synthetic construct
  source 1..75: mol_type = other DNA
atggaaaccaaagatctgattgtgatagggggcggcatcaatggtgctggtatcgcggcagacgccgctggacgc

SEQ ID NO: 481385 - DNA, 75 bp, synthetic construct
  source 1..75: mol_type = other DNA
gatttccggggcggttcagccgcaggtatcttcctgatgatgtgcggtgtctggttagggttaggtggtgtactc

SEQ ID NO: 481386 - DNA, 75 bp, synthetic construct
  source 1..75: mol_type = other DNA
gcttaatacccgtgctgatgtcacgcttggcggcggcgcaaaaacctttgcagaaattgcaaccgctggcgaatg

SEQ ID NO: 481387 - DNA, 75 bp, synthetic construct
  source 1..75: mol_type = other DNA
ggcaaattggcgagacggtcgatctcgatgaagccgtacaacgggcgctggaattcgctaaaaaggagggtaaca

SEQ ID NO: 481388 - DNA, 75 bp, synthetic construct
  source 1..75: mol_type = other DNA
cgatctcccactttttcgtgcaacgcgcttttgacaaaaaagataaaaaatatcaatcacgaacaggcagagcaa

SEQ ID NO: 481389 - DNA, 75 bp, synthetic construct
  source 1..75: mol_type = other DNA
gatgtgcaggcgttttttgacggcatgggtacgcagtttgccaacgtggtaacgctggtggtcgcgggggaatat

SEQ ID NO: 481390 - DNA, 75 bp, synthetic construct
  source 1..75: mol_type = other DNA
ttctggtctgggcggtattggcgtgatgattattatggcgctggtcattgccatttgtgccattgtgatgggctc

SEQ ID NO: 481391 - DNA, 75 bp, synthetic construct
  source 1..75: mol_type = other DNA
cgcctgcgccgccgctatccgttcattacggaatcgctggcgcgtcattacgcacgcacttacggcagcaacagc

SEQ ID NO: 481392 - DNA, 75 bp, synthetic construct
  source 1..75: mol_type = other DNA
ggaatttgcgttatgtgacctctcagccgtggccgtttcctcagtcgctgatgactgcgtttatggcggagtatg

SEQ ID NO: 481393 - DNA, 75 bp, synthetic construct
  source 1..75: mol_type = other DNA
tatcgctacgacgatttacccttactgccaccgcccggcaccgtggcgcgccgcctgatagaagatacggtggcg

SEQ ID NO: 481394 - DNA, 75 bp, synthetic construct
  source 1..75: mol_type = other DNA
aaaacttgcgttacgtgacttctcagccgtggccgtttcctcagtctttaatgaccgcgtttatggcggaatatg

SEQ ID NO: 481395 - DNA, 75 bp, synthetic construct
  source 1..75: mol_type = other DNA
gaaagccattctcggcgcggcgaaaaagcccgtccaggtatggtcggcggcggatattggttttaacgcagaggc

SEQ ID NO: 481396 - DNA, 75 bp, synthetic construct
  source 1..75: mol_type = other DNA
ggtcaataatgctgatggttcattagacttcagcaaagccgatgccaaaataagccaatacgatctgaacgctat

SEQ ID NO: 481397 - DNA, 75 bp, synthetic construct
  source 1..75: mol_type = other DNA
gaagatgggggcatgtgtgttgacgggttcggtgagtatgttggtcactcgctgcctgatggaacgcaccagctt

SEQ ID NO: 481398 - DNA, 75 bp, synthetic construct
  source 1..75: mol_type = other DNA
cggtggtgcgcctgaatgtggaatcacgcggtgatgtaaagctaatggaaaagaaaactaaagctcttcttaaat

SEQ ID NO: 481399 - DNA, 75 bp, synthetic construct
  source 1..75: mol_type = other DNA
aatgcggatcaacaatctcgtgtgagtcagtggctggtggagtatacgcagcagaagttgtcgctggcgtcgtaa

SEQ ID NO: 481400 - DNA, 75 bp, synthetic construct
  source 1..75: mol_type = other DNA
cgagctgctgctcggcaatgcgggggcgataagcgacctcggggaggatttcggtcatgagttctacgaagcgga

SEQ ID NO: 481401 - DNA, 75 bp, synthetic construct
  source 1..75: mol_type = other DNA
aacggtgtccatacagtacttgccggattcgtcgaagtgggtgaaaccctcgagcaggcagtcgcgcgggaagtg

SEQ ID NO: 481402 - DNA, 75 bp, synthetic construct
  source 1..75: mol_type = other DNA
catttacctcgacaaagcgcgtaatctgctgtttgccatggtagagattgaatctgaagaacgctggaatgcggt

SEQ ID NO: 481403 - DNA, 75 bp, synthetic construct
  source 1..75: mol_type = other DNA
aagtcaacccggacgctcacgaagagtatcagcgtcggcataacccgatctggccggaactggaagcggtgttga

SEQ ID NO: 481404 - DNA, 75 bp, synthetic construct
  source 1..75: mol_type = other DNA
tatccggcggttgtgtgatctccggttcggtggtggtgcagtccgttctgttctcgcgcgttcgcgtgaattcat

SEQ ID NO: 481405 - DNA, 75 bp, synthetic construct
  source 1..75: mol_type = other DNA
cgaagttgcgaccatctccggcctgatgacgaagtttgaatactgggctatgccgcacaaagatgaaaaagtgat

SEQ ID NO: 481406 - DNA, 75 bp, synthetic construct
  source 1..75: mol_type = other DNA
ttggtttacctgaaagccaggacgtggctgccgctttacagtgggcaatcaaaaatgaccgttttgttatctccc

SEQ ID NO: 481407 - DNA, 75 bp, synthetic construct
  source 1..75: mol_type = other DNA
aacaaacagattatgacaaatgcataacagaagaagaaatcaggttgcttcgagacgaaaagaataagctcgacg

SEQ ID NO: 481408 - DNA, 75 bp, synthetic construct
  source 1..75: mol_type = other DNA
caataccgagtcgggttttgaatttcagacctggggagaaaacagacgtattccggtggatttggatgggttacg

SEQ ID NO: 481409 - DNA, 75 bp, synthetic construct
  source 1..75: mol_type = other DNA
tcgggatttgagttccagacatttggggtaaacaggcgtaccccggtagatttggatggtttaaggttggtgtct

SEQ ID NO: 481410 - DNA, 75 bp, synthetic construct
  source 1..75: mol_type = other DNA
aactcagacggcatactgcacaggaaaagatcgctaatgttcagaagagctttgaaccaggaatgacggtctccc

SEQ ID NO: 481411 - DNA, 75 bp, synthetic construct
  source 1..75: mol_type = other DNA
cgaccgatcgtcctttattaccggcggagcacaatgcgctcaaacagctggtgaccaaacttgcggcggcaacgg

SEQ ID NO: 481412 - DNA, 75 bp, synthetic construct
  source 1..75: mol_type = other DNA
ggcgcgtgaaaaagcccttctttctgaagttcaggatagggtgatcgatttcgttaaatgccacccactacaatg

SEQ ID NO: 481413 - DNA, 75 bp, synthetic construct
  source 1..75: mol_type = other DNA
ttatgggttcatccctgttttcattccatatggtagacgcagtaaaaaaagcagtaaccatcgttaaagcaaatg

SEQ ID NO: 481414 - DNA, 75 bp, synthetic construct
  source 1..75: mol_type = other DNA
ctttgttacttatcataactctggcgatcgcgattttatttttaatatcaagaatgccgcttgcggtaaattatc

SEQ ID NO: 481415 - DNA, 75 bp, synthetic construct
  source 1..75: mol_type = other DNA
cagcaacacacaccgacgctggagtcgctccagatggcgctaaaacagccactggatgccagcgagctgacggta

SEQ ID NO: 481416 - DNA, 75 bp, synthetic construct
  source 1..75: mol_type = other DNA
aacagaagaagaaatcaggttgcttcgagacgaaaagaataagctcgacgattttgtcgtaccaccagaagaata

SEQ ID NO: 481417 - DNA, 75 bp, synthetic construct
  source 1..75: mol_type = other DNA
atcatcctcctctgctacatgcaactctggatggaaaaagcccaggacctcagcaaacacctgtatccgatcatg

SEQ ID NO: 481418 - DNA, 75 bp, synthetic construct
  source 1..75: mol_type = other DNA
atgaccagtcaactcatccccgtattcaacggcactatcgccaacgaaacagccctactctgcaatgcccgcgat

SEQ ID NO: 481419 - DNA, 75 bp, synthetic construct
  source 1..75: mol_type = other DNA
ggatcacgccgggtgagcacattatcattgctgactctgcgctcagcagaaatatccggcattgtttctgccttt

SEQ ID NO: 481420 - DNA, 75 bp, synthetic construct
  source 1..75: mol_type = other DNA
aaccgtggtatgccgcgcatattgaacaattgggttatcacaaaggcattgatttactggcgtggtggatgcagc

SEQ ID NO: 481421 - DNA, 75 bp, synthetic construct
  source 1..75: mol_type = other DNA
ttgctccgcgaagcagcaaaacttgatcccgccaactatatggtgcacagggccagaagtatgctggcgcaacta

SEQ ID NO: 481422 - DNA, 75 bp, synthetic construct
  source 1..75: mol_type = other DNA
gccgcaattcacagccgaggaaataatcctcctctgctacatgcagctctggatggaaaaagcccaggaccttag

SEQ ID NO: 481423 - DNA, 75 bp, synthetic construct
  source 1..75: mol_type = other DNA
cccgtcaggccttgctggccagaaaccagcagttgcaggcggaagtcagtgagctgcgagaccaactggcgcaga

SEQ ID NO: 481424 - DNA, 75 bp, synthetic construct
  source 1..75: mol_type = other DNA
caacggtggtctaagcacgctgagtaatcttgaacgtaaacaactgattgctgcctatgtcgatcagcaactcag

SEQ ID NO: 481425 - DNA, 75 bp, synthetic construct
  source 1..75: mol_type = other DNA
tcccctaaatcttcgccccaaagaaaagcagcagtatgtgaatcgtaagacccgtcaggctttgcttggtcgtaa

SEQ ID NO: 481426 - DNA, 75 bp, synthetic construct
  source 1..75: mol_type = other DNA
tggcgatatttacccacatcctgcagtggggggaagttattccctgtcacattgcgaggtctgttctctcttcag

SEQ ID NO: 481427 - DNA, 75 bp, synthetic construct
  source 1..75: mol_type = other DNA
tgaccacatcatgtatatctgcagcgcgttagttattcttctgcttgttttcatcgcaggtgtctttttccgaaa

SEQ ID NO: 481428 - DNA, 75 bp, synthetic construct
  source 1..75: mol_type = other DNA
caaagcggtaaaaatcaatacggttattccggtggaaagtctgttggccaaacatgtaattcgggagttacacaa

SEQ ID NO: 481429 - DNA, 75 bp, synthetic construct
  source 1..75: mol_type = other DNA
tcctcttcagacaaccagaaggaactcaaaaacctgcagacaatcgccaccaaaatgaaagcccagaaattccag

SEQ ID NO: 481430 - DNA, 75 bp, synthetic construct
  source 1..75: mol_type = other DNA
aggcattaattgaagcagtaaaacatcatcctcgcagcaagtatgtctctctgctgactaactggtgcggcgaac

SEQ ID NO: 481431 - DNA, 75 bp, synthetic construct
  source 1..75: mol_type = other DNA
gccgcactggcgctggatgccttatggtcgcgcaatggtaaactggcaacgttaagtgaagaggcctgccagaaa

SEQ ID NO: 481432 - DNA, 75 bp, synthetic construct
  source 1..75: mol_type = other DNA
tacgacgaattgatcaaacggaagagatcctcggcgtcacgcgtgcgatctccgaccctgataacatcgatgccg

SEQ ID NO: 481433 - DNA, 75 bp, synthetic construct
  source 1..75: mol_type = other DNA
ctactgacgaactggtgtggcgagcactcctcgcaagaggcacgacgtttattcagcgaagctggactgccaacc

SEQ ID NO: 481434 - DNA, 75 bp, synthetic construct
  source 1..75: mol_type = other DNA
accggtactcccggtgacgcctgcctggaaagcggtgttgggtgtgttggcctggccggatattgccagcttgcc

SEQ ID NO: 481435 - DNA, 75 bp, synthetic construct
  source 1..75: mol_type = other DNA
tacggcgtattgatcaaaaagaagagatccttggcgtcactcgggcgatctccgatcctgataacattgatgccg

SEQ ID NO: 481436 - DNA, 75 bp, synthetic construct
  source 1..75: mol_type = other DNA
catccgcagggcgaaggagcgatccgcgctattaatcaggcgctgaccgatgcgcagcttacgccggatgacgtc

SEQ ID NO: 481437 - DNA, 75 bp, synthetic construct
  source 1..75: mol_type = other DNA
tgggagcctcgctgccagctgatgtcggtaaaacccgccgtcgatggtgaacatcttacgctccgggtgagctgg

SEQ ID NO: 481438 - DNA, 75 bp, synthetic construct
  source 1..75: mol_type = other DNA
gatactgaatttgatggagaatacattattgataatagtattattgatttaaataatcctgtcaacacaacgttt

SEQ ID NO: 481439 - DNA, 75 bp, synthetic construct
  source 1..75: mol_type = other DNA
tgtgtcggctgcccgtagtgcctcgcgaaataagccgattctggtgattaaaagcggacgtagtccggcggcgca

SEQ ID NO: 481440 - DNA, 75 bp, synthetic construct
  source 1..75: mol_type = other DNA
agtctgggtttactggctccctggcaaggtctgaatgccagcttttcacctgtgccgattaaacgcggcaagctg

SEQ ID NO: 481441 - DNA, 75 bp, synthetic construct
  source 1..75: mol_type = other DNA
cgcttaatggaaaagttgattacctatacgcgagatcacggactacaacgtctgaatggtattacgatgccaaac

SEQ ID NO: 481442 - DNA, 75 bp, synthetic construct
  source 1..75: mol_type = other DNA
ctgcgcgatgcgctgccagaacatgttgctatctctaacccgctcgatctgcgcgatgacgccagcagtgaacat

SEQ ID NO: 481443 - DNA, 75 bp, synthetic construct
  source 1..75: mol_type = other DNA
cactatgaccccaaagtttatgacgaatatcgtaaggcaaagcgggcggggaaggtgattcatgaaaatcaagca

SEQ ID NO: 481444 - DNA, 75 bp, synthetic construct
  source 1..75: mol_type = other DNA
gctgtttctcaatggggagaactggtacctgaaggtcgcgcgatgcgcctgcaagaggcatctggcggggagctt

SEQ ID NO: 481445 - DNA, 75 bp, synthetic construct
  source 1..75: mol_type = other DNA
tttttggcagcaaaacaaagcttgccaatgccgcaggagtgaggctggcaagtgttgctgcttgggggatactgg

SEQ ID NO: 481446 - DNA, 75 bp, synthetic construct
  source 1..75: mol_type = other DNA
agcgttgctgcatggggggaactggttcctgaaggtcgcgcgatgcgcctgcaagaggcatccggcggggaactt

SEQ ID NO: 481447 - DNA, 75 bp, synthetic construct
  source 1..75: mol_type = other DNA
tctacaggaggcatctggcggggagcttcagtatgatcccaaagtttatgacgaatatcgtaagacgaagcgggc

SEQ ID NO: 481448 - DNA, 75 bp, synthetic construct
  source 1..75: mol_type = other DNA
cttcagtatgatcccaaagtttatgatgaatatcgtaagacgaagcgggcggggtggttgaacaatgaaaatcac

SEQ ID NO: 481449 - DNA, 75 bp, synthetic construct
  source 1..75: mol_type = other DNA
catccgcagggcgaaggggcgatccgcgctattaatcaggcgctgaccgatgcgcagcttacgccagatgacgtc

SEQ ID NO: 481450 - DNA, 75 bp, synthetic construct
  source 1..75: mol_type = other DNA
atcgatggtggttaacgccctgtttggcgaacgcgtaccttgcagttccaccaaacatttgaccggacacacgct

SEQ ID NO: 481451 - DNA, 75 bp, synthetic construct
  source 1..75: mol_type = other DNA
tgatcaacgccctgggaaataaccttgacgaaatcgcagccaacctggctcgcggtgtcgcccccggcatgcgcc

SEQ ID NO: 481452 - DNA, 75 bp, synthetic construct
  source 1..75: mol_type = other DNA
gtctgcctctccacgcaaaggctttttgcctttagaaaatgtgctggaagttattgccgattatgacatcagcat

SEQ ID NO: 481453 - DNA, 75 bp, synthetic construct
  source 1..75: mol_type = other DNA
tatcagatacccctgatattcgcggtctggaacaaccctgcctggaaaacttccatcctcttggcgatcaatggt

SEQ ID NO: 481454 - DNA, 75 bp, synthetic construct
  source 1..75: mol_type = other DNA
atgcttaaagctgacgcaattactttttttggcagcaaaacaaagcttgccaatgccgcaggagtgagactggca

SEQ ID NO: 481455 - DNA, 75 bp, synthetic construct
  source 1..75: mol_type = other DNA
atgaaaaacaaacacactttaacccgtatttcagaagaagcctttcacgagcttacccgaattaaacagacaact

SEQ ID NO: 481456 - DNA, 75 bp, synthetic construct
  source 1..75: mol_type = other DNA
gaaggggcttaacaactttaagattgatattgcccgactattgagtcttaagattcacaagctatcgatggaggt

SEQ ID NO: 481457 - DNA, 75 bp, synthetic construct
  source 1..75: mol_type = other DNA
gaagggacttaacggctttaaaattgatatcgcccgactattgagtattaagattcacaagttaaagttagagat

SEQ ID NO: 481458 - DNA, 75 bp, synthetic construct
  source 1..75: mol_type = other DNA
tgtcgccctgtgttatggtgcgtactacctgacccgaaatatgacatcgcaggagcctgaacatgtcgcagaata

SEQ ID NO: 481459 - DNA, 75 bp, synthetic construct
  source 1..75: mol_type = other DNA
tggggcaccgcaatatcagacacactgtgatatacacggccagtaatgtggaaaggttcaggaatatctggtcaa

SEQ ID NO: 481460 - DNA, 75 bp, synthetic construct
  source 1..75: mol_type = other DNA
acttcccggtgcggaaagtcaatggctgtttgtatcccggcaggggggagggctgacacggcagcgggtgtggca

SEQ ID NO: 481461 - DNA, 75 bp, synthetic construct
  source 1..75: mol_type = other DNA
actctacaggaattaagcgaacgtaaatcatttggcgaagatgccgaacgactggcgaataacaaatggcttgat

SEQ ID NO: 481462 - DNA, 75 bp, synthetic construct
  source 1..75: mol_type = other DNA
aaaagaggagcttctaagcagaaacagttttggtagtgacaaagaacggctggctaataacaaatggcttgataa

SEQ ID NO: 481463 - DNA, 75 bp, synthetic construct
  source 1..75: mol_type = other DNA
gctcgcgcagtttgccatgattttctggcacgacctggcagcaccgatcctggcgggaattattaccgcagcgat

SEQ ID NO: 481464 - DNA, 75 bp, synthetic construct
  source 1..75: mol_type = other DNA
tctaaaggtcgtaaacacatccgaattactcaggacgctttagatactttgaagggacttaacggctttaaaatt

SEQ ID NO: 481465 - DNA, 75 bp, synthetic construct
  source 1..75: mol_type = other DNA
gcgcaaggaattaagcgaacgtaaatcatttggcgaggatgccgaacgactggcgaataacaaatggcttgataa

SEQ ID NO: 481466 - DNA, 75 bp, synthetic construct
  source 1..75: mol_type = other DNA
aatcatttggcgaagatgccgaacgactggcgaataacaaatggcttgataaattcattgcggagggcgggaaat

SEQ ID NO: 481467 - DNA, 75 bp, synthetic construct
  source 1..75: mol_type = other DNA
ttgaatctgatgcgctttttacgccaaccaatatcactacgtcaacggctgatattgaccattggggctattctg

SEQ ID NO: 481468 - DNA, 75 bp, synthetic construct
  source 1..75: mol_type = other DNA
tgaagatctcacggtgatggaaaacctcaatttgtacgcggatttacgcagcgtcaccggtgaagcacgtaaaca

SEQ ID NO: 481469 - DNA, 75 bp, synthetic construct
  source 1..75: mol_type = other DNA
aaggcacacccggcgagacggtgatcgaagcgaaagaactgaccaagaaatttggtgattttgccgccaccgatc

SEQ ID NO: 481470 - DNA, 75 bp, synthetic construct
  source 1..75: mol_type = other DNA
tcggcaactttgccgttacctgcggtgattctggagaaagtgcgtgagggcgaggcgcttggccccgtgatgtcg

SEQ ID NO: 481471 - DNA, 75 bp, synthetic construct
  source 1..75: mol_type = other DNA
tgccgccaccgatcacgtcaactttgccgtcaaacgcggtgaaatctttggtttgctcgggccaaacggcgcagg

SEQ ID NO: 481472 - DNA, 75 bp, synthetic construct
  source 1..75: mol_type = other DNA
tgccgccaccgatcacgtcaactttgctgttaaacgcggggaaatttttggtttgctcgggccaaacggcgcggg

SEQ ID NO: 481473 - DNA, 75 bp, synthetic construct
  source 1..75: mol_type = other DNA
aaaagttttcgctctacggcaacctgacggtcgaacagaatttacgctttttctctggtgtgtatggcttacgcg

SEQ ID NO: 481474 - DNA, 75 bp, synthetic construct
  source 1..75: mol_type = other DNA
aggtacggcgcaggagctgacagaagcgacatttcccgacttccaggatagcgatattctgaaggcgtcggattt

SEQ ID NO: 481475 - DNA, 75 bp, synthetic construct
  source 1..75: mol_type = other DNA
catattgatgtggcgccgttagtggcgcggcttgatcaaatgatggagagcgtctcccagttgttgcaactggcg

SEQ ID NO: 481476 - DNA, 75 bp, synthetic construct
  source 1..75: mol_type = other DNA
ggcgtatttatggtcagcctgacactatttatctgctatcaggcggtgcaccgcatcacacgcccgctggcggaa

SEQ ID NO: 481477 - DNA, 75 bp, synthetic construct
  source 1..75: mol_type = other DNA
cgttataccggtattgatgagattggtcgtaaggaaggggcgatcgggtgtttaccgccgggaaactcactcgcg

SEQ ID NO: 481478 - DNA, 75 bp, synthetic construct
  source 1..75: mol_type = other DNA
cattggattaatatggattctgatgtttaaacaatggaagttactattagtaggagtaatggtttccatcattgc

SEQ ID NO: 481479 - DNA, 75 bp, synthetic construct
  source 1..75: mol_type = other DNA
ctttcgcaaacagggtaatcatcgctgggatactgctgttcatcaggacaatggcggcaagtatacggttgtttt

SEQ ID NO: 481480 - DNA, 75 bp, synthetic construct
  source 1..75: mol_type = other DNA
gcattattaaatctttggtttatcaagaagacatcttataaaataggttttgtaattttcagtgccgttttcctg

SEQ ID NO: 481481 - DNA, 75 bp, synthetic construct
  source 1..75: mol_type = other DNA
atgctacaaaaaagtaccggggtagaaatgagtacaagagtagcatttggtattggtggattgctggggctttca

SEQ ID NO: 481482 - DNA, 75 bp, synthetic construct
  source 1..75: mol_type = other DNA
cgtatgctataaatgagttagataatctgaaagtaaagatatcagaagctataaatgaatcaattaaaaattcta

SEQ ID NO: 481483 - DNA, 75 bp, synthetic construct
  source 1..75: mol_type = other DNA
ttaaacaaacattccgtagggacctgatggagcaacttaatcaattacgggacactatccaacaagtaacccatg

SEQ ID NO: 481484 - DNA, 75 bp, synthetic construct
  source 1..75: mol_type = other DNA
gagctgggatggaccgttcccgaattgcaggcagctgcgcaggttggtcgcccgatcgacacgcagaagtacgac

SEQ ID NO: 481485 - DNA, 75 bp, synthetic construct
  source 1..75: mol_type = other DNA
tcgactccaccggcgcgtttctcgtcggcgaactggagcgcatggatcagacgctgaacatgcctttagtgtcct

SEQ ID NO: 481486 - DNA, 75 bp, synthetic construct
  source 1..75: mol_type = other DNA
taagtctgctatgtgagcaaacacctgaaatattctgcaccatccaagcaagcgtcagtacgttcattgcgctat

SEQ ID NO: 481487 - DNA, 75 bp, synthetic construct
  source 1..75: mol_type = other DNA
atgagcataaaatcaattccgggagggtatcttcttgacatacgcccggaggggcgtaaaggcaaacgcattcgt

SEQ ID NO: 481488 - DNA, 75 bp, synthetic construct
  source 1..75: mol_type = other DNA
ggttacgggccgatcgttatgaactgcgtaatgccaggacctggggactggcactgcgtgagcaggagttctgga

SEQ ID NO: 481489 - DNA, 75 bp, synthetic construct
  source 1..75: mol_type = other DNA
tgataacaacgcacagactctgatgggcggaggaagaatgaccgtcaccgttatccgtgaaaacggggagggtga

SEQ ID NO: 481490 - DNA, 75 bp, synthetic construct
  source 1..75: mol_type = other DNA
ggtcaaaaaggggcagttgttgatctctctttctgcgataggtgcggaagctgagaatgcccaaaataaaagcgt

SEQ ID NO: 481491 - DNA, 75 bp, synthetic construct
  source 1..75: mol_type = other DNA
tccggccattttcttaacgataaccccgttcaaggccttaaaggaatgaaggttaacgagcgcgaaatgggatat

SEQ ID NO: 481492 - DNA, 75 bp, synthetic construct
  source 1..75: mol_type = other DNA
catgatgaacggcggcaatattctgacgctccagaaaattctggggcacgcaaagattcagacaacgatgattta

SEQ ID NO: 481493 - DNA, 75 bp, synthetic construct
  source 1..75: mol_type = other DNA
acgcccgatcgatacgcagaagtatgacgggatgcagctcaaatggcagatggacaacgacgagcaggtgtatgt

SEQ ID NO: 481494 - DNA, 75 bp, synthetic construct
  source 1..75: mol_type = other DNA
ccattcatgaatatacgccgctgatggactcttctgatatgacgccagaagactggcaacatatcgctgaagata

SEQ ID NO: 481495 - DNA, 75 bp, synthetic construct
  source 1..75: mol_type = other DNA
tgcattacctgcttagccaggaactggatactgaaaccattcgcaaggccatgagccaaaacctgcgtggcgaac

SEQ ID NO: 481496 - DNA, 75 bp, synthetic construct
  source 1..75: mol_type = other DNA
tgactgtggaagccactctcaccaagctgcactatctacttagccagggactggatactgaaaccattcgcaagg

SEQ ID NO: 481497 - DNA, 75 bp, synthetic construct
  source 1..75: mol_type = other DNA
aaaattgtactatactcattagttaccggacttggcttacgttgtcttgttgaacttattctttatattcaggat

SEQ ID NO: 481498 - DNA, 75 bp, synthetic construct
  source 1..75: mol_type = other DNA
aatatctactcgaccaggggtatcacgtcattccggtttcgccaaaagttgccggcaaaacactgctgggccagc

SEQ ID NO: 481499 - DNA, 75 bp, synthetic construct
  source 1..75: mol_type = other DNA
gccggcaaaacgctgctgggccagcaggggtatggcacgctggcagacgttccggaaaaagtcgatatggtcgat

SEQ ID NO: 481500 - DNA, 75 bp, synthetic construct
  source 1..75: mol_type = other DNA
gtaaatatcacctcactttctacttttaccaaaggaaatttagtcgcgatgcccatatgggtggcttttttgcag

SEQ ID NO: 481501 - DNA, 75 bp, synthetic construct
  source 1..75: mol_type = other DNA
cctttcgatgaagcgaataaattagtttttgctaccggcccattaactggatctggtgccccctgtagttctcgc

SEQ ID NO: 481502 - DNA, 75 bp, synthetic construct
  source 1..75: mol_type = other DNA
aaagatgtgcaggtcgaaatgactctgcgcttcgccacgccgcgcacgtcactactggaaaccaaaatcaccagc

SEQ ID NO: 481503 - DNA, 75 bp, synthetic construct
  source 1..75: mol_type = other DNA
atgcaggactgtcagttgaggatattaagcggcaggtgatggaaaacagtgaagaggaaattgattatcagatat

SEQ ID NO: 481504 - DNA, 75 bp, synthetic construct
  source 1..75: mol_type = other DNA
gttgctcttgggcttgggatcggattagttgccgagcaatccagtggcgaacaagaggaagagaatttaatccgc

SEQ ID NO: 481505 - DNA, 75 bp, synthetic construct
  source 1..75: mol_type = other DNA
tctaccaaacaacgccgtatcaccaacgtagctgccggtgttaatgccaccgatgcggttaacgtgtcgcagctg

SEQ ID NO: 481506 - DNA, 75 bp, synthetic construct
  source 1..75: mol_type = other DNA
atgcggaaactctggaacgcgctacgccgacccagtgctcgttggtcggtactggcgctggtcgctattgggatt

SEQ ID NO: 481507 - DNA, 75 bp, synthetic construct
  source 1..75: mol_type = other DNA
gccggacgtcagcgtgtactcacccaattcccaggtaaacgcatctttgttgcctcgattcgtggtgatgtgcag

SEQ ID NO: 481508 - DNA, 75 bp, synthetic construct
  source 1..75: mol_type = other DNA
gtgattggcattgcgctgattgtattgccacacgttgggatcaaagtcaccagcacaaccgaattttgtgtcagt

SEQ ID NO: 481509 - DNA, 75 bp, synthetic construct
  source 1..75: mol_type = other DNA
tctgacaccgcaggtaaaatctgcaatctgtgcatccggatttccgacttcactcgcagttatgtgagtcggaaa

SEQ ID NO: 481510 - DNA, 75 bp, synthetic construct
  source 1..75: mol_type = other DNA
ttctgaccgagttacccggcaaacggatttttgtcgcttccattcgcggcgatatccagcagcaggcgaaaatgc

SEQ ID NO: 481511 - DNA, 75 bp, synthetic construct
  source 1..75: mol_type = other DNA
tcaatcctgcatcgactgtcataaaggtattgcccaccagttgccggatatgagtagcggcttccgtaagcagtt

SEQ ID NO: 481512 - DNA, 75 bp, synthetic construct
  source 1..75: mol_type = other DNA
agcgttactggatatgaccgctcaagtgctggcgcaagagcactcgcaaccgcagctgattgttctacatctgat

SEQ ID NO: 481513 - DNA, 75 bp, synthetic construct
  source 1..75: mol_type = other DNA
ccagtggttccacgcaaaaatcgctcggcttaacgcttaaccgcgtggtcgatggcaagccacagtttcaggata

SEQ ID NO: 481514 - DNA, 75 bp, synthetic construct
  source 1..75: mol_type = other DNA
gcaacagcggtagcagtttctcgctggtttacttttctgaccacggtctggcctttaaagaacgcggtaaagaag

SEQ ID NO: 481515 - DNA, 75 bp, synthetic construct
  source 1..75: mol_type = other DNA
tcgatacggatgatggcttattcttttaccgccccggatattatgaaagcactggtagcagccaaaaaacgggga

SEQ ID NO: 481516 - DNA, 75 bp, synthetic construct
  source 1..75: mol_type = other DNA
tcttgatcccaaaaataccggtaaacatgaagggccagaaggtgcagggcatttaggcgatctgcctgcgctggt

SEQ ID NO: 481517 - DNA, 75 bp, synthetic construct
  source 1..75: mol_type = other DNA
atccgcaggcgggcatcttgatccacaaaataccggtaaacatgaagggccagaaggtgccgggcatttaggcga

SEQ ID NO: 481518 - DNA, 75 bp, synthetic construct
  source 1..75: mol_type = other DNA
aaaggtcaaactgctctttttacctgtaatgtacccgaagctatacaggcaatgattgacgctgacattgacatt

SEQ ID NO: 481519 - DNA, 75 bp, synthetic construct
  source 1..75: mol_type = other DNA
tgcgcaatgaaggctatgcactcggtgaacctgaactgtacgcggctgtcgatgagagcgccctgacgtttgcgg

SEQ ID NO: 481520 - DNA, 75 bp, synthetic construct
  source 1..75: mol_type = other DNA
aacagtgaatacgtacattcctacctgcgcaatgaaggctatgcactcggtgaacctgaactgtacgcggctgtt

SEQ ID NO: 481521 - DNA, 75 bp, synthetic construct
  source 1..75: mol_type = other DNA
tgaggaagactgccttactcctgaaatgatgcagctgttccgtaaaggtatccaggctcttcagaaagagcatga

SEQ ID NO: 481522 - DNA, 75 bp, synthetic construct
  source 1..75: mol_type = other DNA
gatcacccaacgattctggaaatggcaaaagccgcaggtctggcgaccggtaacgtttctaccgcagagttgcag

SEQ ID NO: 481523 - DNA, 75 bp, synthetic construct
  source 1..75: mol_type = other DNA
ccaccaaatcatggagcgtttgatcatggatcaaatcatcctgcagatggggcagaaaatgggagtgaaaatctc

SEQ ID NO: 481524 - DNA, 75 bp, synthetic construct
  source 1..75: mol_type = other DNA
taaaacgacttttgctgccgcagcgaaagagttctctcaggatccaggctctgctaaccagggcggcgatctcgg

SEQ ID NO: 481525 - DNA, 75 bp, synthetic construct
  source 1..75: mol_type = other DNA
tgtggatcactattgcaccgttcgtgacaaatgaacttgaacgctggagaacgaatctgtttgttcgcaccacga

SEQ ID NO: 481526 - DNA, 75 bp, synthetic construct
  source 1..75: mol_type = other DNA
accagtacccgcaggaacgccggaaggaacaggccgaaatcgagaagaaacggattgaggctctcaacaagcggc

SEQ ID NO: 481527 - DNA, 75 bp, synthetic construct
  source 1..75: mol_type = other DNA
acataagcagtacatatctactgacgcactatgcaggaagactgctaattaaattggatttgcccctatatttcc

SEQ ID NO: 481528 - DNA, 75 bp, synthetic construct
  source 1..75: mol_type = other DNA
aactgactgagattattaccggtttactgcttaaacctgaactccttggtgagctggactcaccagaaaagcatc

SEQ ID NO: 481529 - DNA, 75 bp, synthetic construct
  source 1..75: mol_type = other DNA
cgcgatgaaagtgccgtatgaagtgggccgcgcccagtttaaacatctggctcgtgcgcaaattgtcgggatgaa

SEQ ID NO: 481530 - DNA, 75 bp, synthetic construct
  source 1..75: mol_type = other DNA
agctgaaagcagactgcctgctctatgccaacggtcgcaccggtaataccgattcactggcgttacagaacattg

SEQ ID NO: 481531 - DNA, 75 bp, synthetic construct
  source 1..75: mol_type = other DNA
cccgtttatatctgagaagaaagccgggccgatatacatcaccaacttccagttacagaaggtggattacaacca

SEQ ID NO: 481532 - DNA, 75 bp, synthetic construct
  source 1..75: mol_type = other DNA
tgtcattacaacaaggcggctatatgacgctcgcgcagtttgccatgattttctggcacgacctggcagcaccga

SEQ ID NO: 481533 - DNA, 75 bp, synthetic construct
  source 1..75: mol_type = other DNA
actggaacttgcacgtaagtcagagagattaaacgaagtgcgttaccggcatggtgcaatacgtatttcattctg

SEQ ID NO: 481534 - DNA, 75 bp, synthetic construct
  source 1..75: mol_type = other DNA
aaggaagcctgcctaaggtcaatacgaatattcctgccagcgttctgatgcgtcggcctgacatcagcgctaaag

SEQ ID NO: 481535 - DNA, 75 bp, synthetic construct
  source 1..75: mol_type = other DNA
caggatatcagagatgctggtttgctgaatgatgaaggtgtttatgttggtgcgtgggaagacaaaaacggtcag

SEQ ID NO: 481536 - DNA, 75 bp, synthetic construct
  source 1..75: mol_type = other DNA
agacaacggttatcaaagagcagatcacaaccagcgggaaacgtgccagcgcgatactgggtggcgtgtccaaaa

SEQ ID NO: 481537 - DNA, 75 bp, synthetic construct
  source 1..75: mol_type = other DNA
aaggcttgattacggagcgtggcgacatggtggtttatgtcgctggcttcccggccatttatggcaaacagcctc

SEQ ID NO: 481538 - DNA, 75 bp, synthetic construct
  source 1..75: mol_type = other DNA
aatcactggatgaagtcaaagacaaagcgctgatagtccacgttggcggcgataatatgtccgatcaacccaaac

SEQ ID NO: 481539 - DNA, 75 bp, synthetic construct
  source 1..75: mol_type = other DNA
ctgtttacacctgatctgaaagaactgtcacccggtatacacggttttcacatccatgaaaatgcgagttgcgca

SEQ ID NO: 481540 - DNA, 75 bp, synthetic construct
  source 1..75: mol_type = other DNA
tggcgcgggtaaaaccacgttgatgcggatgctggccggattactgaaacccgacaacggcagtgctacggtcat

SEQ ID NO: 481541 - DNA, 75 bp, synthetic construct
  source 1..75: mol_type = other DNA
agctggatctctggggaaaaattgcccgtcagcgtgatgttgctgagtgggcagtccatgccagtgaagaagatt

SEQ ID NO: 481542 - DNA, 75 bp, synthetic construct
  source 1..75: mol_type = other DNA
gagtggccttaccgcctgcattgatgctttcgagaaaaagttaatcgaagatatgctgcgacaaacggaaggcca

SEQ ID NO: 481543 - DNA, 75 bp, synthetic construct
  source 1..75: mol_type = other DNA
tggtcatgaggcgggcgcatttaccggtgcggttaaaaagcgtattggaaaaattgaacatgcaaatggtggtac

SEQ ID NO: 481544 - DNA, 75 bp, synthetic construct
  source 1..75: mol_type = other DNA
atgagaaagccgaataatgccgtagggccgcaggtccgttcgaaaaataaagccgtaaaaggaaagctggtccct

SEQ ID NO: 481545 - DNA, 75 bp, synthetic construct
  source 1..75: mol_type = other DNA
gtggtacagctacatggtcggcatatttatttttgtgctcggcgtaatagcaatcaggcgaaaaaagagagtgaa

SEQ ID NO: 481546 - DNA, 75 bp, synthetic construct
  source 1..75: mol_type = other DNA
tcgtgggagtaattcagcaggtaaactggagcatatcagtagtacgttgcagcgagttattattcctttcagaag

SEQ ID NO: 481547 - DNA, 75 bp, synthetic construct
  source 1..75: mol_type = other DNA
tagtatggctaacattggttcaggaattacctgttataaaaccgatttatctgaactcaaaattaatcttgtaag

SEQ ID NO: 481548 - DNA, 75 bp, synthetic construct
  source 1..75: mol_type = other DNA
tccgcaggcctgcgacaggacacaaggcaaatacgaaacctttgtgcaatcgaaagaaacgtcgtgctatctcta

SEQ ID NO: 481549 - DNA, 75 bp, synthetic construct
  source 1..75: mol_type = other DNA
cgaaagaaacatcatgctatctctataccatgacacaaacggacgatttgttgcgtaagctgtacgaccagttac

SEQ ID NO: 481550 - DNA, 75 bp, synthetic construct
  source 1..75: mol_type = other DNA
gcaacagcggtagcagtttctctatggtctatttttccgaccacggcctggcctttaaagaacgcggaaaagaag

SEQ ID NO: 481551 - DNA, 75 bp, synthetic construct
  source 1..75: mol_type = other DNA
aactgctggcagcgatgatcaaccacgaatgggataaattctggccgcagggtggcccggcgcggactgagatgc

SEQ ID NO: 481552 - DNA, 75 bp, synthetic construct
  source 1..75: mol_type = other DNA
gtgaaagaacttaatcctgaccaaatcttttctgaaaccgaaaagacagcagtaaatgaacttaatgaaattgca

SEQ ID NO: 481553 - DNA, 75 bp, synthetic construct
  source 1..75: mol_type = other DNA
cattattgaggagaacaattgaacaaataggtgaacatggtaatgttattaataggttatctgaagatattagtg

SEQ ID NO: 481554 - DNA, 75 bp, synthetic construct
  source 1..75: mol_type = other DNA
atgaacgcatacctcacctgcgaccgcatagaggagcgtcgctgggttaatcagcaaattcaggatgaaaaggat

SEQ ID NO: 481555 - DNA, 75 bp, synthetic construct
  source 1..75: mol_type = other DNA
tggagggcaacctgcttgagtttcgcacaaaggtggcaaacagcggcccctttgaagaaatcaagaacgagatgc

SEQ ID NO: 481556 - DNA, 75 bp, synthetic construct
  source 1..75: mol_type = other DNA
acctgggtgcgcccaacaaagcgttccggagcgtgtatctctgcaactcgccgaccgttgtgtcggatgcgacgt

SEQ ID NO: 481557 - DNA, 75 bp, synthetic construct
  source 1..75: mol_type = other DNA
accgatctcactttctcaccagcgctaaagaaactgatggatcaagttcgcaaaaaggtgaccatacgctgtatt

SEQ ID NO: 481558 - DNA, 75 bp, synthetic construct
  source 1..75: mol_type = other DNA
taaatatgatatggggttgtttaacgacccatacagccatctcggtccgaaagagtctgacccggtggataccaa

SEQ ID NO: 481559 - DNA, 75 bp, synthetic construct
  source 1..75: mol_type = other DNA
tcgcggtgagtctggccctgcaaccagcactggcggatgatttattcggcaaccatccattaacgcctgaagcgc

SEQ ID NO: 481560 - DNA, 75 bp, synthetic construct
  source 1..75: mol_type = other DNA
gatcagtggggttttaaaggcatcacggtttccgatcatggtgcaatcaaagagctgatcaaacacggcacggcg

SEQ ID NO: 481561 - DNA, 75 bp, synthetic construct
  source 1..75: mol_type = other DNA
aaccatacattaacgcccgaagcgcgtgatgcgttcgtcaccgaactgctcaaaaaaatgacggttgatgagaag

SEQ ID NO: 481562 - DNA, 75 bp, synthetic construct
  source 1..75: mol_type = other DNA
gtggggctttaaaggcatcaccgtttccgatcacggcgcaatcaaagaactgattaaacatggcacggcggcaga

SEQ ID NO: 481563 - DNA, 75 bp, synthetic construct
  source 1..75: mol_type = other DNA
gcattatcgatttcctgaatcagtatgaagaagcggtcaaagtcgatccgcgctcgccgcaagagatgattgatg

SEQ ID NO: 481564 - DNA, 75 bp, synthetic construct
  source 1..75: mol_type = other DNA
gtagtgcagatgtacctgcaggatgtgacggcttctatgagtcgcccggtgaaacaactgaaaggttttgagaaa

SEQ ID NO: 481565 - DNA, 75 bp, synthetic construct
  source 1..75: mol_type = other DNA
tactccttactggcgcggcgggcagatttgcaggcggcgcactggtacgttgagtcatcgttaagcactattgat

SEQ ID NO: 481566 - DNA, 75 bp, synthetic construct
  source 1..75: mol_type = other DNA
tttattgcctataaagatatcctcggcaaaatctcccgtaatcgtatgtacaccatggcagcaacggcgatgtcc

SEQ ID NO: 481567 - DNA, 75 bp, synthetic construct
  source 1..75: mol_type = other DNA
cttacgacgtgctgcacggtcagcgcacggtgttcccgattagtctcggtctggcctcgtcttttaacctcgatg

SEQ ID NO: 481568 - DNA, 75 bp, synthetic construct
  source 1..75: mol_type = other DNA
tccgcaaagccaacgtgacttgattgcggcgctgaaagccaccggtaaaccgctggtgctggtgctgatgaacgg

SEQ ID NO: 481569 - DNA, 75 bp, synthetic construct
  source 1..75: mol_type = other DNA
acgccagccacctccgattcctggctgctgaaagatgttctgcgcgaccagtggggttttaaaggcatcaccgtt

SEQ ID NO: 481570 - DNA, 75 bp, synthetic construct
  source 1..75: mol_type = other DNA
gccaccattgcggtggttgggccactggcggacagcaaacgtgacgtgatgggcagctggtccgcagccggtgtt

SEQ ID NO: 481571 - DNA, 75 bp, synthetic construct
  source 1..75: mol_type = other DNA
tgttgctgcaacgtcaaacgtcctgccgactattgaagtcgacttatataactactttatggctggcgaactgga

SEQ ID NO: 481572 - DNA, 75 bp, synthetic construct
  source 1..75: mol_type = other DNA
atggcgattattctcggcattgacccgggttcacgcgttaccggttacggcgttatccgccaggtgggcagacaa

SEQ ID NO: 481573 - DNA, 75 bp, synthetic construct
  source 1..75: mol_type = other DNA
tacgcaccaaagtggatgatttaccgtctcgtctgaagctcatctatgcgggcgtgacggaaatcatcacccagt

SEQ ID NO: 481574 - DNA, 75 bp, synthetic construct
  source 1..75: mol_type = other DNA
cgccgtaaactgcctgctaccatcattctgcgcgccctgaactacaccacagagcagatcctcgacctgttcttt

SEQ ID NO: 481575 - DNA, 75 bp, synthetic construct
  source 1..75: mol_type = other DNA
aagcgtctgacgttaaagactcttctctacgtgtaccaaacggtgtatccggtacggttatcgacgttcaggtct

SEQ ID NO: 481576 - DNA, 75 bp, synthetic construct
  source 1..75: mol_type = other DNA
taaacctgatgggcgtgaaagccggtattacccgtagaccaattcatatgccaaacgacgcgatcgtcgaagaca

SEQ ID NO: 481577 - DNA, 75 bp, synthetic construct
  source 1..75: mol_type = other DNA
taaaccgctggtgctggtgctgatgaacggtcgtccgctggcgctggtgaaagaagatcagcaggccgacgcgat

SEQ ID NO: 481578 - DNA, 75 bp, synthetic construct
  source 1..75: mol_type = other DNA
tgatgaagcggtgcagaccgcgaaacaatctgatgtggtggtggcggtagtcggtgaagctcaggggatggcgca

SEQ ID NO: 481579 - DNA, 75 bp, synthetic construct
  source 1..75: mol_type = other DNA
tgagcgacgagtattactcgaagtatctgcctgggttgatcaaatccggcaaagtgacgatggcagagctggacg

SEQ ID NO: 481580 - DNA, 75 bp, synthetic construct
  source 1..75: mol_type = other DNA
tcagctgcgcttaatcagcgtcggcccggataatccgaaagaggcgatccgcgagatgatcaaagacgggcaggt

SEQ ID NO: 481581 - DNA, 75 bp, synthetic construct
  source 1..75: mol_type = other DNA
actacagccatctgaataccggtcgtccgtataacgccgacaagccgaataaatacacgtcgcgttattttgatg

SEQ ID NO: 481582 - DNA, 75 bp, synthetic construct
  source 1..75: mol_type = other DNA
aaagtgacgatggaagagctggatgacgctgcccgtcatgtactgaacgttaaatatgatatggggttgtttaac

SEQ ID NO: 481583 - DNA, 75 bp, synthetic construct
  source 1..75: mol_type = other DNA
tatccgcgcgattggcttcctgctttccaaagtcaacggaatgggcaagctggaatcttttaacgccgtcagctc

SEQ ID NO: 481584 - DNA, 75 bp, synthetic construct
  source 1..75: mol_type = other DNA
ctcgggcgttgacgccaaagagaaaatctctgcgggctacttccgcgctattcgtaactactatcgcttcggttg

SEQ ID NO: 481585 - DNA, 75 bp, synthetic construct
  source 1..75: mol_type = other DNA
gcgccgattcgtccaaaacgcgttacccgcagcggcgagtcgccttctgatgcgctgttacgtggcggcattgaa

SEQ ID NO: 481586 - DNA, 75 bp, synthetic construct
  source 1..75: mol_type = other DNA
ccgttaagtatgccatgctacatcgcagaaggtcaggacatcgaactggcacagtacggcacttctaacaccgga

SEQ ID NO: 481587 - DNA, 75 bp, synthetic construct
  source 1..75: mol_type = other DNA
ggcgcgaaaaaagagatctatcaactgattaaccagttcaaagccgatggcttgagcatcattctggtgtcatcg

SEQ ID NO: 481588 - DNA, 75 bp, synthetic construct
  source 1..75: mol_type = other DNA
tgtattggacgcctagtccggggggtagctgagtttattgatatcttcgatctttttaatcttgaagatgaagtc

SEQ ID NO: 481589 - DNA, 75 bp, synthetic construct
  source 1..75: mol_type = other DNA
gctcctgggctttgatccggtaagccgccgccgcaatccggtagaaacggaagaggaggacgatcttgaccgtct

SEQ ID NO: 481590 - DNA, 75 bp, synthetic construct
  source 1..75: mol_type = other DNA
aggataataaaaattatgttggtgatgttggttacagcattacgcgcggggcggtagttgtcggaaagctacgag

SEQ ID NO: 481591 - DNA, 75 bp, synthetic construct
  source 1..75: mol_type = other DNA
gtgagtcagagaaaagataaatttgttactgactggttttatgtgccttgcgcatcacaaaaaaaactacagcga

SEQ ID NO: 481592 - DNA, 75 bp, synthetic construct
  source 1..75: mol_type = other DNA
atcctcttgctatcgcagcaattcgtaatttattgatcaaaaacgatattgaaatcttagcggagttgactgaag

SEQ ID NO: 481593 - DNA, 75 bp, synthetic construct
  source 1..75: mol_type = other DNA
tgaactcgctttatgcacggcgcttaaagacgatccggaggacttcacgcaggccgctaaccgacgctttgacat

SEQ ID NO: 481594 - DNA, 75 bp, synthetic construct
  source 1..75: mol_type = other DNA
cttcacagcctgaaatagaaattcagtttcatgcacctactgtgaaagatgccctgaaatattcagacatcaatc

SEQ ID NO: 481595 - DNA, 75 bp, synthetic construct
  source 1..75: mol_type = other DNA
aacgacgatccagaagacttcacacaagctgcaaacagacgattcgatatcattgaaaacatggcactggaaacc

SEQ ID NO: 481596 - DNA, 75 bp, synthetic construct
  source 1..75: mol_type = other DNA
ttcctactgccgttcgcttcttatctgattgctgaacatattggcgtttccggcattctcgcggcggttgccgcc

SEQ ID NO: 481597 - DNA, 75 bp, synthetic construct
  source 1..75: mol_type = other DNA
tcgcgctggttgaggcgatgaatgaggcactggataaacaacgctggcgacgccttccggcactgcatcagcaat

SEQ ID NO: 481598 - DNA, 75 bp, synthetic construct
  source 1..75: mol_type = other DNA
acgacgcgagcagcgcgcagaagtgttgaaagcgcgtatggagcagcatcaacggcatcaggaaggtgtgctggc

SEQ ID NO: 481599 - DNA, 75 bp, synthetic construct
  source 1..75: mol_type = other DNA
cggcatcctcgcagcggttgccgccggtatgaccatcacccgctccggtgtgatgcgccgtgcgccgctggcgat

SEQ ID NO: 481600 - DNA, 75 bp, synthetic construct
  source 1..75: mol_type = other DNA
tacagcatctccttccagggcatcctgggctacatcttctatccgattgcatgggtgatgggtgttccttccagt

SEQ ID NO: 481601 - DNA, 75 bp, synthetic construct
  source 1..75: mol_type = other DNA
ttggatgcggtgaaggcacaactgtacggcgcgtttaatgccctgattaaacggcgcgagcagcgcgcagaagtg

SEQ ID NO: 481602 - DNA, 75 bp, synthetic construct
  source 1..75: mol_type = other DNA
atggaaaaacaacgcaggcaactttttgcactggtcgaagcgatgaatgacgccctcgacaagcaacgctggcga

SEQ ID NO: 481603 - DNA, 75 bp, synthetic construct
  source 1..75: mol_type = other DNA
gcgatgctggaatttgtctttaacggcatggtgttcttgctgctgggcctgcaactgccagggattctggaaacg

SEQ ID NO: 481604 - DNA, 75 bp, synthetic construct
  source 1..75: mol_type = other DNA
ggcagaagtggcgattgtggcgatccagaaaatggaggagcgtctggcggcggataccgaagagaatatcgataa

SEQ ID NO: 481605 - DNA, 75 bp, synthetic construct
  source 1..75: mol_type = other DNA
gccggtgtgctctctatcccgcttctcttgccggatggtaacgtcttcccggcgcgctatgagttggtgttcctg

SEQ ID NO: 481606 - DNA, 75 bp, synthetic construct
  source 1..75: mol_type = other DNA
ggtggtggttaccgtcgtcggcattggctttcttatttactgggttgtgccgggtatcccgctggttcctgcctt

SEQ ID NO: 481607 - DNA, 75 bp, synthetic construct
  source 1..75: mol_type = other DNA
cgctgaagtggcaattgtggcgatccagaaaatggaggagcgtctggcggcggataccgaagagaatatcgacaa

SEQ ID NO: 481608 - DNA, 75 bp, synthetic construct
  source 1..75: mol_type = other DNA
tcgctgatggcggcagaaatcgaccctaacgtcgaaatctggatgctgtttaccgatatcattctgatttatgcg

SEQ ID NO: 481609 - DNA, 75 bp, synthetic construct
  source 1..75: mol_type = other DNA
gaaatgatcgcctctgcggcctgtgatattcaggcggtgcgtacccgcgacccggcagtcgataaatactcaact

SEQ ID NO: 481610 - DNA, 75 bp, synthetic construct
  source 1..75: mol_type = other DNA
cattgtcggtaaaccagacagcgataagccatcaatggatatggaccagcatttcaacggtattaaccatacatt

SEQ ID NO: 481611 - DNA, 75 bp, synthetic construct
  source 1..75: mol_type = other DNA
ctatatttcaatggcaacattctatctgataagccaatggctggcgcaatatgggcaatttgttgccggaatgcc

SEQ ID NO: 481612 - DNA, 75 bp, synthetic construct
  source 1..75: mol_type = other DNA
atcctgcgtgctggcaatgatcatgagaaagagtatctggtgacggtcgataaaccgattaccgaggagtttatt

SEQ ID NO: 481613 - DNA, 75 bp, synthetic construct
  source 1..75: mol_type = other DNA
cggttgttaagatggaaaaaacagcggaaaaaggcggtcgcccggcgtcaaacggtaaacgtttcacctcgccgg

SEQ ID NO: 481614 - DNA, 75 bp, synthetic construct
  source 1..75: mol_type = other DNA
accgtgatgctggcctttgatcatggttattttcaggggccgactaccggacttgaacgcattgatataaatatc

SEQ ID NO: 481615 - DNA, 75 bp, synthetic construct
  source 1..75: mol_type = other DNA
agccttttctgcacaatcattggctgaatcattaacggtggaacatcgccttgagttattagaaaaagcgttaag

SEQ ID NO: 481616 - DNA, 75 bp, synthetic construct
  source 1..75: mol_type = other DNA
attgcagcgttcgttgccttgatgtgcgcagtgggcgcggttgggctctgctttatgccagcacacgcgatcacc

SEQ ID NO: 481617 - DNA, 75 bp, synthetic construct
  source 1..75: mol_type = other DNA
agctaactcttatgcaaaaaagatatatggcaaacttaatgatattaaggttaagatatcatctaattcaatagt

SEQ ID NO: 481618 - DNA, 75 bp, synthetic construct
  source 1..75: mol_type = other DNA
gtgataatatttgctttcgtcatcggttttacctccgcaggcggtgttgtacaaattggcctgacgttaatggcg

SEQ ID NO: 481619 - DNA, 75 bp, synthetic construct
  source 1..75: mol_type = other DNA
acaaattggcctgacgttaatggctgagcgttttccctacgctaaaggtaaagcaaccgggatttattacagtgc

SEQ ID NO: 481620 - DNA, 75 bp, synthetic construct
  source 1..75: mol_type = other DNA
gcaggcatgtcatacactatgtcgatcaaactactcagtatctacaccgtgggttcgctgctttgtgtatttatt

SEQ ID NO: 481621 - DNA, 75 bp, synthetic construct
  source 1..75: mol_type = other DNA
taaaccgattaccgatgaatttattcgtggcatgggcgcaggcgtgccgatcctcgggacggtgaccaaaaaatg

SEQ ID NO: 481622 - DNA, 75 bp, synthetic construct
  source 1..75: mol_type = other DNA
gaaaacggcgcaattaaagtcgagcgaattaaccagtacttcaaaggccaggacgaaatggaccgggcatttggc

SEQ ID NO: 481623 - DNA, 75 bp, synthetic construct
  source 1..75: mol_type = other DNA
caatggcgcttatggcgcttatggcgctagtgggttgttctacaccgccacccgtgcagaaagcacaacgggtaa

SEQ ID NO: 481624 - DNA, 75 bp, synthetic construct
  source 1..75: mol_type = other DNA
cggtgtacctttccggatacaagagtatgtgctgcactggatagccgtggcggacgatgagataacccggctggg

SEQ ID NO: 481625 - DNA, 75 bp, synthetic construct
  source 1..75: mol_type = other DNA
acggtcatgctcgcgtttgaccacggctattttcaggggccgacaacgggactggagcgtatcgatattaatatc

SEQ ID NO: 481626 - DNA, 75 bp, synthetic construct
  source 1..75: mol_type = other DNA
gtggatcgttaccattcgtcggggattatcgcctcgctggaagccgggtatcagtggttaccggggcgtggtgtg

SEQ ID NO: 481627 - DNA, 75 bp, synthetic construct
  source 1..75: mol_type = other DNA
ctttcaagtccatttgttaataactatgcaagatggactatgtcactattaatgattttttattttattttatta

SEQ ID NO: 481628 - DNA, 75 bp, synthetic construct
  source 1..75: mol_type = other DNA
acgactgaacatcagcctttacagcctcgggctgtgggggccgaacggcccgctaccgctgcactacacagaact

SEQ ID NO: 481629 - DNA, 75 bp, synthetic construct
  source 1..75: mol_type = other DNA
cacggctttagccaataaacgcattcaacgtagtgaactggaaaaacaggcgatggaaaccgtcattaacgcgct

SEQ ID NO: 481630 - DNA, 75 bp, synthetic construct
  source 1..75: mol_type = other DNA
gtctttcgcattaccctggtgcaggggctgaaccgacagattcgtcgcatgtgtgagcactttggctacgaagtg

SEQ ID NO: 481631 - DNA, 75 bp, synthetic construct
  source 1..75: mol_type = other DNA
atgagcaacgatttcactcaggcgcaggaaaccccctggcgttacggttttctgaacctgatgcgccgcgttgat

SEQ ID NO: 481632 - DNA, 75 bp, synthetic construct
  source 1..75: mol_type = other DNA
cggtgtacctttccggatacaggagtatgtcctgcactggatagccgtggcggacgatgagatcacccggctggg

SEQ ID NO: 481633 - DNA, 75 bp, synthetic construct
  source 1..75: mol_type = other DNA
ggacaggatttgcgggaatgcgccgacagcccgttgccggatcacgttcgccttgcggcatcggctcatctggtg

SEQ ID NO: 481634 - DNA, 75 bp, synthetic construct
  source 1..75: mol_type = other DNA
agctgatttttatgcaaaaaagatatatggcaaacttaatgatattaaggacaagatatcatttaactcaatagt

SEQ ID NO: 481635 - DNA, 75 bp, synthetic construct
  source 1..75: mol_type = other DNA
accgcactggctatcgatgccatcatcaaccagcgcgattccggtatcaaatgtatctatgtcgctatcggccaa

SEQ ID NO: 481636 - DNA, 75 bp, synthetic construct
  source 1..75: mol_type = other DNA
taagtgacggtgttatccgcattcacggcctggccgattgtatgcagggtgaaatgatttccctgccgggtaacc

SEQ ID NO: 481637 - DNA, 75 bp, synthetic construct
  source 1..75: mol_type = other DNA
aaagcgtccaccatttctaacgtggtacgtaaactggaagagcacggcgcactggctaacaccatagttgtggta

SEQ ID NO: 481638 - DNA, 75 bp, synthetic construct
  source 1..75: mol_type = other DNA
cgtggttattccgttgagtactttgtggagggtgggcgttcgcgaacggggcgtctgcttgatccaaaaaccggc

SEQ ID NO: 481639 - DNA, 75 bp, synthetic construct
  source 1..75: mol_type = other DNA
gaaccggcagaaacgatgaaggtttatcaattgctggcggagttgattacgtcagatgtacgtttgacgattgag

SEQ ID NO: 481640 - DNA, 75 bp, synthetic construct
  source 1..75: mol_type = other DNA
gaggaaatacaatgggtgatccctgggctgactgagtcaatttattgccagcaggatggtgtctggcgctgcatt

SEQ ID NO: 481641 - DNA, 75 bp, synthetic construct
  source 1..75: mol_type = other DNA
agaccgctatgacctgtctgcggttggtcgcatgaagttcaaccgttctctgctgcgcgatgaaatcgaaggttc

SEQ ID NO: 481642 - DNA, 75 bp, synthetic construct
  source 1..75: mol_type = other DNA
cgtaccaagatgtataaaaacattgtggacggcaaccatcagatggagccgggcatgccagaatccttcaacgta

SEQ ID NO: 481643 - DNA, 75 bp, synthetic construct
  source 1..75: mol_type = other DNA
atttctaagatcaacccgatcgaagatatgccttacgatgaaaacggtacgccggtagacatcgtactgaacccg

SEQ ID NO: 481644 - DNA, 75 bp, synthetic construct
  source 1..75: mol_type = other DNA
gcagtgaaagagttctttggttccagtcagttgtctcagtttatggaccagaacaacccactgtctgagattacg

SEQ ID NO: 481645 - DNA, 75 bp, synthetic construct
  source 1..75: mol_type = other DNA
gtacttttgttatcaatggtactgagcgtgttatcgtttcccagttgcaccgtagtccgggcgtcttcttcgact

SEQ ID NO: 481646 - DNA, 75 bp, synthetic construct
  source 1..75: mol_type = other DNA
tccgtgtacgcacagactaacgaatatggcttccttgagacgccgtaccgtaaagtgatcgacggtgttgtaacc

SEQ ID NO: 481647 - DNA, 75 bp, synthetic construct
  source 1..75: mol_type = other DNA
tccataacgccgagcgcgttcgccagttggcccacgacggtcatgagctggtatatgtgccttgccaccgcagtc

SEQ ID NO: 481648 - DNA, 75 bp, synthetic construct
  source 1..75: mol_type = other DNA
tatacgggtaatcgtcattaatggtgagccatggtttatcgcttcagatgtttgtcgggctataggcatagcaaa

SEQ ID NO: 481649 - DNA, 75 bp, synthetic construct
  source 1..75: mol_type = other DNA
ccacgctgctgacgattgccacctgcatgggcatggtaatggcaatgactttgtggggaggtcggatgtggcaat

SEQ ID NO: 481650 - DNA, 75 bp, synthetic construct
  source 1..75: mol_type = other DNA
accatgttctgctacatcgtcggtgtgagcaaatgcctgcgtgatatccagacccacgcggagtacatcaacgac

SEQ ID NO: 481651 - DNA, 75 bp, synthetic construct
  source 1..75: mol_type = other DNA
accaccatgttctgctacatcgtcggtgtgagcaaatgcctgcgtgatatccagacccacgcggagtacatcaac

SEQ ID NO: 481652 - DNA, 75 bp, synthetic construct
  source 1..75: mol_type = other DNA
ggcctctacacactgatcctccgctgccgcgatgcggtgacaccaggcactatcccctaccgctttcgtaaatgg

SEQ ID NO: 481653 - DNA, 75 bp, synthetic construct
  source 1..75: mol_type = other DNA
ttgccgaccaggtagccaacgccacggcgtcagcagtaatgcaggcgatgaagatagagaacaaaacctacagtg

SEQ ID NO: 481654 - DNA, 75 bp, synthetic construct
  source 1..75: mol_type = other DNA
tgctacctcgatttaatgcgcaacgtaccttactccccggactcaacggtgccttcagccagcgccagtgaactt

SEQ ID NO: 481655 - DNA, 75 bp, synthetic construct
  source 1..75: mol_type = other DNA
tatgagcacgtaatggaagtgggtacttacgctaaagaactgcgcggcgcgacgaaagaaaaagaaagtctagcg

SEQ ID NO: 481656 - DNA, 75 bp, synthetic construct
  source 1..75: mol_type = other DNA
cgtggcgcgtatgcactttgcccgtcagcgtctggctgccgtgggtccacgcttgcctgctcgtcaggatttgtt

SEQ ID NO: 481657 - DNA, 75 bp, synthetic construct
  source 1..75: mol_type = other DNA
agttacaggaagacgggcacgatgtatcgggcgcggcggcggagctgaccaccatgttctgctacatcgtcggtg

SEQ ID NO: 481658 - DNA, 75 bp, synthetic construct
  source 1..75: mol_type = other DNA
ggaagaaccggctaagacggaagaacggaaggaaagcagcggcaaagcggaaacgccaccggaaaaagtacaaca

SEQ ID NO: 481659 - DNA, 75 bp, synthetic construct
  source 1..75: mol_type = other DNA
gaacaagcggtgttgatgacctactatcgcaacaacattgcacatatgttggttctgccttcgctgatggcggcg

SEQ ID NO: 481660 - DNA, 75 bp, synthetic construct
  source 1..75: mol_type = other DNA
gggaacattaataaatgttttaatggatttgcagtattttgttctcatagacagagatttaaatgggaatatagt

SEQ ID NO: 481661 - DNA, 75 bp, synthetic construct
  source 1..75: mol_type = other DNA
cttgattcaataaaatcctatattgatcgcaatttctatgagccaattcggctggatacactggcgacgaaattt

SEQ ID NO: 481662 - DNA, 75 bp, synthetic construct
  source 1..75: mol_type = other DNA
taacaatatttcgtgtccgggtctacgtgagaatgcgctaataccggatgatattgtgccggttattccactgta

SEQ ID NO: 481663 - DNA, 75 bp, synthetic construct
  source 1..75: mol_type = other DNA
acaggtgcattttgaattgttcgatcggcaaattgatttagtgcaggataatattgatctggatattcgtattaa

SEQ ID NO: 481664 - DNA, 75 bp, synthetic construct
  source 1..75: mol_type = other DNA
gggcgctggagggcaaagggattatgctgcgttccgagtgggatgtgttgccgtttctggagagtggcaaactgg

SEQ ID NO: 481665 - DNA, 75 bp, synthetic construct
  source 1..75: mol_type = other DNA
tgcgctgttacgtggcggcattgaatatattgaagtccctcgctggacatcaacccgttctcgccgattggtgta

SEQ ID NO: 481666 - DNA, 75 bp, synthetic construct
  source 1..75: mol_type = other DNA
ggcgtgctgttgaccttcgatgattttctgtcgggaatcgaaaccttcggcgagcgcattcagccgctaatgcag

SEQ ID NO: 481667 - DNA, 75 bp, synthetic construct
  source 1..75: mol_type = other DNA
gttaagctggctgaccgaacaaagtcagaaagatacccgctccggcaccgataccaacgtccgccagatggccga

SEQ ID NO: 481668 - DNA, 75 bp, synthetic construct
  source 1..75: mol_type = other DNA
atgccgacctttgaactgaataaagccatcgtgcaaaaagcggagcactaccatttcgatttcgccctgtcgatg

SEQ ID NO: 481669 - DNA, 75 bp, synthetic construct
  source 1..75: mol_type = other DNA
tcccaggcgttaaccgaattaaatttagcgccgatgatattcagcgcaaatttggcccttttggcgaaccggtca

SEQ ID NO: 481670 - DNA, 75 bp, synthetic construct
  source 1..75: mol_type = other DNA
caggccgcagagcaaaccgggcgcgacgttggctcttatgtgttgtttatggtgattgccgatgaaaccgacgat

SEQ ID NO: 481671 - DNA, 75 bp, synthetic construct
  source 1..75: mol_type = other DNA
ttctgtcgggaatcgaaaccttcggcgagcgcattcagccgctaatgcagtgccgcgcccatctccctgcgctga

SEQ ID NO: 481672 - DNA, 75 bp, synthetic construct
  source 1..75: mol_type = other DNA
aaaactggtggtcaaaagacaaaagccagtttacagaagacgatgaattaaaagagtttacctgggtgatatggc

SEQ ID NO: 481673 - DNA, 75 bp, synthetic construct
  source 1..75: mol_type = other DNA
gcggttatggtctgtttggcgtcgagttgtttgtttgtggtgatgaggtgattttcagcgaagtctcccctcgcc

SEQ ID NO: 481674 - DNA, 75 bp, synthetic construct
  source 1..75: mol_type = other DNA
ggcaaccgcagcaaatgagtcagctggctctgaaacgtgcgcaggagattgcccgcaaagtagtactggcactgg

SEQ ID NO: 481675 - DNA, 75 bp, synthetic construct
  source 1..75: mol_type = other DNA
ttgccgatagcgaaagccttttccgcgaggcggttgctgacatcggctatccctgcattgttaaaccggtgatga

SEQ ID NO: 481676 - DNA, 75 bp, synthetic construct
  source 1..75: mol_type = other DNA
cgaaactggggatctggacacgtctgcactacgtttacccttatccgcatgtggacgacgtcatcccactgatgg

SEQ ID NO: 481677 - DNA, 75 bp, synthetic construct
  source 1..75: mol_type = other DNA
atttacgccaacggcgtgggcatcaaggccgacgatgacaaagcaacctggtatttcaagcgtagctctaccatt

SEQ ID NO: 481678 - DNA, 75 bp, synthetic construct
  source 1..75: mol_type = other DNA
cactctccatcacccgtgccacccgtgccctgacgttcctgtcagagctggggctgattagctaccagacggaat

SEQ ID NO: 481679 - DNA, 75 bp, synthetic construct
  source 1..75: mol_type = other DNA
tgatttcactggctgatgagtggagttccgtgaatgcccgactgaaacaggcgtcgcagtcatctgatgaatttt

SEQ ID NO: 481680 - DNA, 75 bp, synthetic construct
  source 1..75: mol_type = other DNA
tacttcatgggctatcacgcatccggcgtttcactttataactccccgtcattgttccgtaaccgtgaaaacatt

SEQ ID NO: 481681 - DNA, 75 bp, synthetic construct
  source 1..75: mol_type = other DNA
gtaagtggcacttatcaaaaatcagcaacgtaggtgtgcctgaagaaaaacaaacccgtgactaccacgataact

SEQ ID NO: 481682 - DNA, 75 bp, synthetic construct
  source 1..75: mol_type = other DNA
atcctgccgcaactgaccagtcagaatgtcacgtttgataatgtgcagaatgccgtaggcgcaggtctacagatt

SEQ ID NO: 481683 - DNA, 75 bp, synthetic construct
  source 1..75: mol_type = other DNA
ttaatatgcttgatggtgatgcattacgccgtgtggttgaactggaaaaaccacattatatcgtgccggagatcg

SEQ ID NO: 481684 - DNA, 75 bp, synthetic construct
  source 1..75: mol_type = other DNA
ccgtcgcctggcggcagaagagctgcagctgcccacttccacttatcgttttgccgatagcgaaaaccttttccg

SEQ ID NO: 481685 - DNA, 75 bp, synthetic construct
  source 1..75: mol_type = other DNA
tggactatccacaagcaaaagtgcttgccgagaaagcagcgcaagcgggcagtaaagaaggtgaagtaacgctgg

SEQ ID NO: 481686 - DNA, 75 bp, synthetic construct
  source 1..75: mol_type = other DNA
gcgctctgccagaaggttacaacactcgagtcggggaacgtggggtttttctctccggcggccagcggcagcgca

SEQ ID NO: 481687 - DNA, 75 bp, synthetic construct
  source 1..75: mol_type = other DNA
atggcgctggcggggctggcggcattaaccagcctgggggcgctcctttttctggcgtggagcctgcgtgacatt

SEQ ID NO: 481688 - DNA, 75 bp, synthetic construct
  source 1..75: mol_type = other DNA
cgttcaacacctctcattacgcggcttttcatctggagaacattctgcgcagcaggttagcccgtaaagcattgc

SEQ ID NO: 481689 - DNA, 75 bp, synthetic construct
  source 1..75: mol_type = other DNA
ggcttttatttcggccagtcctgagtgtggactaactgtaaaagaatggaattgtgctgtaaggatgattactgg

SEQ ID NO: 481690 - DNA, 75 bp, synthetic construct
  source 1..75: mol_type = other DNA
tgatctatgactttgtgttgacctttgacaaaagttgtccgcctgagattttggagatgatcgaaggattatcgg

SEQ ID NO: 481691 - DNA, 75 bp, synthetic construct
  source 1..75: mol_type = other DNA
ctaacttcaggggttacagaaatacaatagaaatccctgtcgatgaagccatgacgggaattgttggccgtaatg

SEQ ID NO: 481692 - DNA, 75 bp, synthetic construct
  source 1..75: mol_type = other DNA
accacagccgcaattcacagccgaagaaataatcctcctctgctacatgcagctctggatggaaaaagcccagga

SEQ ID NO: 481693 - DNA, 75 bp, synthetic construct
  source 1..75: mol_type = other DNA
ttttggtcgtgcactcggtgatgcagcatcgcgcaattctgcgtggcgtggcgcaacagcgggcgcgtgaggcgc

SEQ ID NO: 481694 - DNA, 75 bp, synthetic construct
  source 1..75: mol_type = other DNA
tcaggtgcgcaaaaaggtgaccattcgctgcatcaatcgtcagcggtttgccgaagaaatgcagatcctgcgtga

SEQ ID NO: 481695 - DNA, 75 bp, synthetic construct
  source 1..75: mol_type = other DNA
aatgctcgaaattcagaaatatgtgcattatatgatcaggaagcattgactgaacttatcctgcgtaacgctctc

SEQ ID NO: 481696 - DNA, 75 bp, synthetic construct
  source 1..75: mol_type = other DNA
gccgcaattcacagccgaggaaatcatcctcctttgctacatgcagctctggatggaaaaagcccaggacctcag

SEQ ID NO: 481697 - DNA, 75 bp, synthetic construct
  source 1..75: mol_type = other DNA
gtattttgctgtatcaccgtcaggaaggtcgtaacattggcctgctgaataaaattcgcgcttacgcattacaag

SEQ ID NO: 481698 - DNA, 75 bp, synthetic construct
  source 1..75: mol_type = other DNA
gtcagcttgggaagaaatgacctgcttattcgcaccttccctaagagaaggggacggccgttttgaaatagcctg

SEQ ID NO: 481699 - DNA, 75 bp, synthetic construct
  source 1..75: mol_type = other DNA
ccaactgtattaactccgggatccgccgtattggcgtgatcacccagtaccagtcccacacgctggtgcagcata

SEQ ID NO: 481700 - DNA, 75 bp, synthetic construct
  source 1..75: mol_type = other DNA
gcaggcctcgcctatgcgcatccattcccgctctcttgtgtacagtccgacccggacgccgagccgtactggcgt

SEQ ID NO: 481701 - DNA, 75 bp, synthetic construct
  source 1..75: mol_type = other DNA
acagttgcgccgtggcggcgcaggtgtatatcggcagtgagtatgagcaccagtcgatcaaaaatatcattcagt

SEQ ID NO: 481702 - DNA, 75 bp, synthetic construct
  source 1..75: mol_type = other DNA
caggtaatgataagtgaaaatgaaaacatcactctaatccagcttaatgaaaacaaaggtattgcttatgcacaa

SEQ ID NO: 481703 - DNA, 75 bp, synthetic construct
  source 1..75: mol_type = other DNA
atggaaacgataaaattatcgagtttgttgaaaaaccggctaacccgccgtcaatgccaaacgattcgagcaaat

SEQ ID NO: 481704 - DNA, 75 bp, synthetic construct
  source 1..75: mol_type = other DNA
agtatgtagtgatcctggcgggtgaccatatctacaagcaggactattcgcgaatgcttatcgaccacgtcgaaa

SEQ ID NO: 481705 - DNA, 75 bp, synthetic construct
  source 1..75: mol_type = other DNA
cctggacggggaaaatggcatccccatcaataagcgcggcagcgggataaggaggcttatcctgttgaatttttt

SEQ ID NO: 481706 - DNA, 75 bp, synthetic construct
  source 1..75: mol_type = other DNA
gcgtcaggccatcagggaagccgcagccccctatacctgttcggaaattatgctggatgtcgataaagagttcgg

SEQ ID NO: 481707 - DNA, 75 bp, synthetic construct
  source 1..75: mol_type = other DNA
gcggggacgcccagaaatgtgatttatgccatatctgaccaacactgtcacgtaacgccagataactacaaaaac

SEQ ID NO: 481708 - DNA, 75 bp, synthetic construct
  source 1..75: mol_type = other DNA
ttttgctggctttatcggtgcgctgattgatgatgattttgttgataagttaaataacgaaattattcgccctgc

SEQ ID NO: 481709 - DNA, 75 bp, synthetic construct
  source 1..75: mol_type = other DNA
ctgctgtgggacttatgggcattatttttgctggctttatcggtgcgctgattgatgatgattttgttgataagt

SEQ ID NO: 481710 - DNA, 75 bp, synthetic construct
  source 1..75: mol_type = other DNA
tcactgatccgtgcagaaaacgatccactggtagacaccggatcgctgctccttgatgtcatttggatctacctg

SEQ ID NO: 481711 - DNA, 75 bp, synthetic construct
  source 1..75: mol_type = other DNA
atttcgatattgagttcaagaactttaactccgccacctcctacagtggcccggcggcgatccgtttactgcgcg

SEQ ID NO: 481712 - DNA, 75 bp, synthetic construct
  source 1..75: mol_type = other DNA
ctgctcactctcctggtcggacattgaagctgccgggttaatgtcgcatccgttatggtcgcatttcgatattga

SEQ ID NO: 481713 - DNA, 75 bp, synthetic construct
  source 1..75: mol_type = other DNA
tgcttttattcagaacagtgattgtctggccatccgtgctgacgggatgcctgatgatgctgtatttcgttgagg

SEQ ID NO: 481714 - DNA, 75 bp, synthetic construct
  source 1..75: mol_type = other DNA
ctgtatcaaccggcaaataacgactgctatctgtttgataacctgtcgaaactgggctttacccagcacctgatg

SEQ ID NO: 481715 - DNA, 75 bp, synthetic construct
  source 1..75: mol_type = other DNA
cgaaaactcaaatgcggtagtcatccaataccagaacaagccctatgttcgtttaaatggcggcgactgggtgcc

SEQ ID NO: 481716 - DNA, 75 bp, synthetic construct
  source 1..75: mol_type = other DNA
ctttctgaaagaagtccgcgaaaacggtggtatgcaggcggaattgatggatcaaacccatcttccggttattct

SEQ ID NO: 481717 - DNA, 75 bp, synthetic construct
  source 1..75: mol_type = other DNA
tggcccgttttatggcggtgtcgtccgaacttaaagcgtcaacgcggatctacaccgtagccggtcaggtgttct

SEQ ID NO: 481718 - DNA, 75 bp, synthetic construct
  source 1..75: mol_type = other DNA
gtggatttacgcgacctgaaaatgtttctacatctggcagaaagccgccattttggccgtagcgcacgggcgatg

SEQ ID NO: 481719 - DNA, 75 bp, synthetic construct
  source 1..75: mol_type = other DNA
actggtgatgcggcagatgcgatggaaaaggtcgtcactggcgaagcggatctggcgattgccgggaaaccggag

SEQ ID NO: 481720 - DNA, 75 bp, synthetic construct
  source 1..75: mol_type = other DNA
gatggcagcgctggtcgcggtgatgattatggtttccatcgggacattctcctggcgctccattgccaacctgcg

SEQ ID NO: 481721 - DNA, 75 bp, synthetic construct
  source 1..75: mol_type = other DNA
gggtgacatgggcaaactgccggacagcctgccggtgtttctgatcccggatatcccgcttaacctcgacacgct

SEQ ID NO: 481722 - DNA, 75 bp, synthetic construct
  source 1..75: mol_type = other DNA
tgggcagcctgatgcgctacgtctcccgctcggtggtcaccggtttcgtgaacgcgctggccatcctgatattta

SEQ ID NO: 481723 - DNA, 75 bp, synthetic construct
  source 1..75: mol_type = other DNA
tcaggtgtttttctgttacctgcaaacctggcctcgactggcgggattgccatttatggatggttggtgacgatt

SEQ ID NO: 481724 - DNA, 75 bp, synthetic construct
  source 1..75: mol_type = other DNA
atgacatttgaagtcatcattacccccgaggccgaacagcagataataaacctgcacagatatataacggagaaa

SEQ ID NO: 481725 - DNA, 75 bp, synthetic construct
  source 1..75: mol_type = other DNA
ctaaagtggcagagatttttataaacagaaagaatcgtaaaatttattcgaatctggatatcgaacctgttgctt

SEQ ID NO: 481726 - DNA, 75 bp, synthetic construct
  source 1..75: mol_type = other DNA
ctaaagttgctgagatttttataaacagaaagaaccgtaaaatttactccaatctggatattgaacctgttgcct

SEQ ID NO: 481727 - DNA, 75 bp, synthetic construct
  source 1..75: mol_type = other DNA
cgccaaattacttggactgtcatggcaacaaggtttctatcacgggaagcctgctgtcatggagaaacacttgaa

SEQ ID NO: 481728 - DNA, 75 bp, synthetic construct
  source 1..75: mol_type = other DNA
ggcatccatcttattgcggaacaggttgagacaccaccattggaagagaatgccaaattacttggtttggtatgg

SEQ ID NO: 481729 - DNA, 75 bp, synthetic construct
  source 1..75: mol_type = other DNA
atgacatatgaagtcatcattactcctgaggccgaacagcagataatcaacctgcacagatacataacggagaaa

SEQ ID NO: 481730 - DNA, 75 bp, synthetic construct
  source 1..75: mol_type = other DNA
gcgaaagccgctgccgatgacggactgttcccaccaatttttgcccgtgtaaataaagcgggcacgccagtggcg

SEQ ID NO: 481731 - DNA, 75 bp, synthetic construct
  source 1..75: mol_type = other DNA
ttggaccctgctggcggggcaaacggcaaaagccgccgccgatgacggcctgttcccgccgatttttgcccgcgt

SEQ ID NO: 481732 - DNA, 75 bp, synthetic construct
  source 1..75: mol_type = other DNA
cggccctaaaatgatcacccgcgttcaggccgttgccaccgtactggcgctgatccctattgtcggaattgccgt

SEQ ID NO: 481733 - DNA, 75 bp, synthetic construct
  source 1..75: mol_type = other DNA
aaggaacccttgaccttagtgtgcaggaggcagaagaagacatagaggaaagggaagaaatctttaaaaagaatg

SEQ ID NO: 481734 - DNA, 75 bp, synthetic construct
  source 1..75: mol_type = other DNA
ttaaccgctcattgccacggaaaggtatctggaaaacagggtattcccacggagttttttatcacagcaaagcca

SEQ ID NO: 481735 - DNA, 75 bp, synthetic construct
  source 1..75: mol_type = other DNA
aatcttgatatcgaacctgtagcttcttctggagttgttcatacaggaagtaatccagtaatggttaaagtggga

SEQ ID NO: 481736 - DNA, 75 bp, synthetic construct
  source 1..75: mol_type = other DNA
gttgattgcgcctgcgctgccctgcccggtgcgtaaccaggtatccgttgaaaagcccgactggtcaacggtgcc

SEQ ID NO: 481737 - DNA, 75 bp, synthetic construct
  source 1..75: mol_type = other DNA
tgccaatgtcggcggttatgagataccggttacctgttacatagaagggcaaaaatcaatcgcatttcaggatct

SEQ ID NO: 481738 - DNA, 75 bp, synthetic construct
  source 1..75: mol_type = other DNA
atgaggaataaggttatgaaggtgaatacgggagcaggaatgcgcggccagctaaaaaggaagggaaagatgctt

SEQ ID NO: 481739 - DNA, 75 bp, synthetic construct
  source 1..75: mol_type = other DNA
agatattaaaacagaaactgtggcggacattgtgcagtcgttgccatcgtttactgaaacgcaagcggataacct

SEQ ID NO: 481740 - DNA, 75 bp, synthetic construct
  source 1..75: mol_type = other DNA
ggtgtggcgaaagccctgttaggcagagggctgaccgttgcaggaaatgccatgctgacgcgtaccatgggcgct

SEQ ID NO: 481741 - DNA, 75 bp, synthetic construct
  source 1..75: mol_type = other DNA
ccggttacctgttacatagaagggcaaaaatcaatcgcatttcaggatctgaccaccggcaccgccgataacagg

SEQ ID NO: 481742 - DNA, 75 bp, synthetic construct
  source 1..75: mol_type = other DNA
tattagagcaatatacctaaaacgtcatgagctacacctcgagtatcccccttacaagacacagaacgtctggca

SEQ ID NO: 481743 - DNA, 75 bp, synthetic construct
  source 1..75: mol_type = other DNA
ccgcgtcacgctgccgaacatccgctgggcgctgctttatggcgtggtgctgaccaacgcccgcgcgattggcga

SEQ ID NO: 481744 - DNA, 75 bp, synthetic construct
  source 1..75: mol_type = other DNA
cttagatcctttaagtcgattaaaggagcagcacaacgttgggcaaagagctttgccagagtatgtaaagtagca

SEQ ID NO: 481745 - DNA, 75 bp, synthetic construct
  source 1..75: mol_type = other DNA
atgagcaaagtaactccccagccgaaaatcggctttgtttcccttggctgtccgaaaaaccttgttgattcagag

SEQ ID NO: 481746 - DNA, 75 bp, synthetic construct
  source 1..75: mol_type = other DNA
ggtaatgttaagtcagggcagccaggaagacgaagcggcgattttacttggcgcgtccggctggcagatgttccg

SEQ ID NO: 481747 - DNA, 75 bp, synthetic construct
  source 1..75: mol_type = other DNA
cgtttgtggtgcgcgaactagtgccggtgatgttaagccagggcagtcaggaagacgaggcggcgattttgcttg

SEQ ID NO: 481748 - DNA, 75 bp, synthetic construct
  source 1..75: mol_type = other DNA
ggctggatgaacataatctgcaaattatgttctcctggcccggaatggtgctggtcaccatcttcgtgacgtgtc

SEQ ID NO: 481749 - DNA, 75 bp, synthetic construct
  source 1..75: mol_type = other DNA
gcagaacgttcacgaatggtctggcattggcagcgacatctacgcttctgtcgttaaatcgtttgggtactgtga

SEQ ID NO: 481750 - DNA, 75 bp, synthetic construct
  source 1..75: mol_type = other DNA
tgactttggtgccgatgagtttcgctttgatgaggacggattgggtgctggcgttcgtggtgatgcgcgcgctat

SEQ ID NO: 481751 - DNA, 75 bp, synthetic construct
  source 1..75: mol_type = other DNA
ttcgcggttcgtggagcgagaagaagcacgcgccatatatgcgtgttgagtttcctgaaactggtgccgttatca

SEQ ID NO: 481752 - DNA, 75 bp, synthetic construct
  source 1..75: mol_type = other DNA
ctggttgatgaggctgcattccttcagcgtcctctgctgattgatgcggcgttgtcacaaacgacgcgttgccgt

SEQ ID NO: 481753 - DNA, 75 bp, synthetic construct
  source 1..75: mol_type = other DNA
cgatgctggagaatctggcagtggtgctgatcgcgcctgccctaccgtgcccggtgcgtaatcaggtttcggtag

SEQ ID NO: 481754 - DNA, 75 bp, synthetic construct
  source 1..75: mol_type = other DNA
atctggcggaaagccgccattttggccgcagcgcgcgggcaatgcacgttagcccgtccacgctctcacggcaga

SEQ ID NO: 481755 - DNA, 75 bp, synthetic construct
  source 1..75: mol_type = other DNA
tccggggcagcgggagcgtgtttcatcctgaaaatgaagctgttcccggtgataatggtaaaccggctcgtctga

SEQ ID NO: 481756 - DNA, 75 bp, synthetic construct
  source 1..75: mol_type = other DNA
acgtcgacagcaccggtgacccgaaagcattgttctggaaggcgcgcaagttcgtggaaacactacctgtagagt

SEQ ID NO: 481757 - DNA, 75 bp, synthetic construct
  source 1..75: mol_type = other DNA
gttcatcatcgactggggcatgacaacggacccgcgtaatattgattatggcctgccggtgaccattccgttttt

SEQ ID NO: 481758 - DNA, 75 bp, synthetic construct
  source 1..75: mol_type = other DNA
ccgtggttgagggcatggcctacaacccggacgaaatcatctcaatcagcagcgccatggcgagcaaagacaaac

SEQ ID NO: 481759 - DNA, 75 bp, synthetic construct
  source 1..75: mol_type = other DNA
ggagaatgtgcgggaatggtccggtgtgggcagcgacatttatcagtccgtcgagaaggttttcggcttttgcga

SEQ ID NO: 481760 - DNA, 75 bp, synthetic construct
  source 1..75: mol_type = other DNA
atcgactggggtatgactactgacccgcgtaacatcgattatggcctgccggtcaccatcccttttctgctgttc

SEQ ID NO: 481761 - DNA, 75 bp, synthetic construct
  source 1..75: mol_type = other DNA
ggatgagattatttccatcagcagcacaatggaaaataaagaccggttgttgatggagctgtcacaacctacctg

SEQ ID NO: 481762 - DNA, 75 bp, synthetic construct
  source 1..75: mol_type = other DNA
aacaggcccttgaccggaatattgcccgtatcgagtcaattgaacgctcattgctgacgctggacgttctggcgg

SEQ ID NO: 481763 - DNA, 75 bp, synthetic construct
  source 1..75: mol_type = other DNA
gttcatttgttctgctttttgccagccatcatagtctggcggtaacttatccactacctccagagggtagccgtt

SEQ ID NO: 481764 - DNA, 75 bp, synthetic construct
  source 1..75: mol_type = other DNA
gtatctgtttgataatgttccggtaggcacgcgtgtgcaaattattgatcagcctgtgaaatacacaactgaacc

SEQ ID NO: 481765 - DNA, 75 bp, synthetic construct
  source 1..75: mol_type = other DNA
cggcagctatagggattcttgataaagcggtaagcatcactcagaagctggcaaataacagcgatgaactggaca

SEQ ID NO: 481766 - DNA, 75 bp, synthetic construct
  source 1..75: mol_type = other DNA
cgaagctggtctttcctgatggggagacactacaagttatacttacaaaattgaatacaatccaacctgaaatct

SEQ ID NO: 481767 - DNA, 75 bp, synthetic construct
  source 1..75: mol_type = other DNA
ctacaaccacccctacccaactggcaaaagagattgtcttttatcacggtgagtacgctgtcatcgcactgccgt

SEQ ID NO: 481768 - DNA, 75 bp, synthetic construct
  source 1..75: mol_type = other DNA
gtacagaagattttaatttagatgatttttctcaatttattaccgcctttgagaaggtatatatgcatgggtggt

SEQ ID NO: 481769 - DNA, 75 bp, synthetic construct
  source 1..75: mol_type = other DNA
gtacagaaaagactctaaatcactccaggcgcttgaagtggatctgcaaaacttatggaataccacgaccatcat

SEQ ID NO: 481770 - DNA, 75 bp, synthetic construct
  source 1..75: mol_type = other DNA
gatcgatgtactggacttcaaagaagttcgcgatcatatggggggctccggtcattttaatgatggcgggggtga

SEQ ID NO: 481771 - DNA, 75 bp, synthetic construct
  source 1..75: mol_type = other DNA
gcgagcagatggcgaagattttgcgtatgggtgccaacgatcagagcgtgatcgaccgcctcaactggatgcgcg

SEQ ID NO: 481772 - DNA, 75 bp, synthetic construct
  source 1..75: mol_type = other DNA
atgcctgggattttagcaagcacagctactgctgtaggtatcattgacaaagctgtaggtattgcaaagaagctc

SEQ ID NO: 481773 - DNA, 75 bp, synthetic construct
  source 1..75: mol_type = other DNA
tactcagggcgatattttcgatggtattaactttcgcggcgcacaattggcctcagatgacaatatgggtgatgc

SEQ ID NO: 481774 - DNA, 75 bp, synthetic construct
  source 1..75: mol_type = other DNA
acagatcatcaggtagcaaaaataaatggcagcatatcaatacctggcttgagcgagacataatacggctttgtt

SEQ ID NO: 481775 - DNA, 75 bp, synthetic construct
  source 1..75: mol_type = other DNA
aaaggctttaatgaattagatagaaatataatataccttcctgaagttctaattccatacaccacccccttaatt

SEQ ID NO: 481776 - DNA, 75 bp, synthetic construct
  source 1..75: mol_type = other DNA
gtttgctaacggcttgtcgaccgtgatctccggcttctttggctccacgccaaacaccacctacggggaaaacat

SEQ ID NO: 481777 - DNA, 75 bp, synthetic construct
  source 1..75: mol_type = other DNA
attgtcgataccacgccgattattaatgctcactggtttgcgctgccaactctctatacgccgcgcttcgagtgg

SEQ ID NO: 481778 - DNA, 75 bp, synthetic construct
  source 1..75: mol_type = other DNA
tccgtaaagctgaacgctggggaccgcgcacgctggatctcgacatcatgctgtttggtaatgaagtaataaata

SEQ ID NO: 481779 - DNA, 75 bp, synthetic construct
  source 1..75: mol_type = other DNA
atcgtcgcgctggtgggcggtacggtggaagaggctatcgatttctcccgccagatgcgtgaaatcactctcggt

SEQ ID NO: 481780 - DNA, 75 bp, synthetic construct
  source 1..75: mol_type = other DNA
gataacattgccgattcgccgctggcagacaaaatcaccgccgctaaccagcaggcgctggagcgcattatccag

SEQ ID NO: 481781 - DNA, 75 bp, synthetic construct
  source 1..75: mol_type = other DNA
gtgaaagaccgccacttttacagacaatcccgcttagtttacaacatttgttcgccatgtttggtgcaaccgtcc

SEQ ID NO: 481782 - DNA, 75 bp, synthetic construct
  source 1..75: mol_type = other DNA
ttcttgccgtttcttcgttttaccgcaccccaccgctggggccgcaagatcaacccgattacttaaatgcagccg

SEQ ID NO: 481783 - DNA, 75 bp, synthetic construct
  source 1..75: mol_type = other DNA
gcagcaatctggcctctccgctggagcaggtcaatgctgccgtaaaagcattagctgatattcccgaaagtcgca

SEQ ID NO: 481784 - DNA, 75 bp, synthetic construct
  source 1..75: mol_type = other DNA
cgtattgaattgcagcaaggtcgcgtccgtaaagccgaacgctgggggccgcgcacgctcgatttagacattatg

SEQ ID NO: 481785 - DNA, 75 bp, synthetic construct
  source 1..75: mol_type = other DNA
ttaggcgatatccctgaaagccgcattattgccgtttcttcgttttatcgtaccccaccgctggggccgcaagat

SEQ ID NO: 481786 - DNA, 75 bp, synthetic construct
  source 1..75: mol_type = other DNA
atgacagtggcgtatattgccatcggcagcaatctggcctctccgctggagcaggtcaatgctgccctgaaggca

SEQ ID NO: 481787 - DNA, 75 bp, synthetic construct
  source 1..75: mol_type = other DNA
ctgagctggtgtttcctgacggtgattctttacagaagatacttattgagtcagatgcttccagacctgaacttt

SEQ ID NO: 481788 - DNA, 75 bp, synthetic construct
  source 1..75: mol_type = other DNA
ctgaagttactaaagcggcctcttcagaaaacgtgagttcagcaaaactttccgcgccggagcgacaaaaactgg

SEQ ID NO: 481789 - DNA, 75 bp, synthetic construct
  source 1..75: mol_type = other DNA
gcgggtagaaaaatcgcagtgcatcggctgcagttattgcattggcgcttgcccgtatcaggttcgctaccttaa

SEQ ID NO: 481790 - DNA, 75 bp, synthetic construct
  source 1..75: mol_type = other DNA
atgctcaccccagtttcactgatggatgaccagatggtcgacatggcatttatcactcaactgaccggcctgacc

SEQ ID NO: 481791 - DNA, 75 bp, synthetic construct
  source 1..75: mol_type = other DNA
gataagtggttttacaagctcatcaaggatggggcctttccggcacccatcaaactcggccgcagctcccgctgg

SEQ ID NO: 481792 - DNA, 75 bp, synthetic construct
  source 1..75: mol_type = other DNA
aaataaatactatcaatatcagctacctggtgccgggaaaccgcatctgtatcgccgattcggtcaacatttgat

SEQ ID NO: 481793 - DNA, 75 bp, synthetic construct
  source 1..75: mol_type = other DNA
gtcaccgataacgacaacgaaacgcagtatcacttttttcgccagtcatgccagcactgtgaagatgctccttgc

SEQ ID NO: 481794 - DNA, 75 bp, synthetic construct
  source 1..75: mol_type = other DNA
ttgatagggtggacagttgcagccactgcattaggggataatcagatgtccttcactcgacgcaaatttgttctg

SEQ ID NO: 481795 - DNA, 75 bp, synthetic construct
  source 1..75: mol_type = other DNA
gtgccgctggtgggtgaaaaacacgccaaagggttgttcggtactatcgtcgacaacttctatctcgtcgccttg

SEQ ID NO: 481796 - DNA, 75 bp, synthetic construct
  source 1..75: mol_type = other DNA
tattgttttgctggcgctcggcggcctgaaaccgattcaaactgccattatcgccggaggatgcccgctgttctt

SEQ ID NO: 481797 - DNA, 75 bp, synthetic construct
  source 1..75: mol_type = other DNA
aggcgatgcgattcaggactttgccgagcgtctgctggaagatccggtggaagtttctgccaatccctccacccg

SEQ ID NO: 481798 - DNA, 75 bp, synthetic construct
  source 1..75: mol_type = other DNA
ccagtttcgctgatggatgaccagatggtcgacatggcgtttatcactcaactgaccggcctaaccgataagtgg

SEQ ID NO: 481799 - DNA, 75 bp, synthetic construct
  source 1..75: mol_type = other DNA
tgcccgctgttcttcgtcaatattatggtgacgctctcctttattaaagacgcgaaacagaactggaaagattaa

SEQ ID NO: 481800 - DNA, 75 bp, synthetic construct
  source 1..75: mol_type = other DNA
tcggtatcgttctgttggcgctcggcggcctgaaaccgattcaaaccgccattatcgccggaggatgcccgctgt

SEQ ID NO: 481801 - DNA, 75 bp, synthetic construct
  source 1..75: mol_type = other DNA
tccgaaattcctgaccattacccgttcaaccgcagcgaatacactatccggcctccggaggcattttgctgcgtg

SEQ ID NO: 481802 - DNA, 75 bp, synthetic construct
  source 1..75: mol_type = other DNA
ggaagcatgaactaggtccgttccacgagcacactaaagggcttgttgaaggattgttagatggtaatgtagaga

SEQ ID NO: 481803 - DNA, 75 bp, synthetic construct
  source 1..75: mol_type = other DNA
atgatatctgataacaaagttacctatcatgaggttgacttcctgctgccagcacagaggtttaacattcagttt

SEQ ID NO: 481804 - DNA, 75 bp, synthetic construct
  source 1..75: mol_type = other DNA
acccggcggcagaagtggcgaaagcgcgtgattgggtgaaagcgcgcatggccaaagccggcatggtggaggcgg

SEQ ID NO: 481805 - DNA, 75 bp, synthetic construct
  source 1..75: mol_type = other DNA
atgatttatcaatgtgatacttgcagtagaacgacttttgaggttaattgtccctggtgtagtggagtttcgcct

SEQ ID NO: 481806 - DNA, 75 bp, synthetic construct
  source 1..75: mol_type = other DNA
ccctgctcttttcggcaacgctggaaggcgatgcgattcaggattttgccgagcgtctgctggaagatccggtgg

SEQ ID NO: 481807 - DNA, 75 bp, synthetic construct
  source 1..75: mol_type = other DNA
gcatcagggctttcttgtccggtcggcttcaaaaatggcaccgacggtacgattaaagtggctatcgatgccatt

SEQ ID NO: 481808 - DNA, 75 bp, synthetic construct
  source 1..75: mol_type = other DNA
gcaccgacacatatcaggatgaggatggtaaaacccagactcgtgatgattatccgtggggcctttgcattgagt

SEQ ID NO: 481809 - DNA, 75 bp, synthetic construct
  source 1..75: mol_type = other DNA
gtgccactacataccccggtttcgctgatggatgaccagctggtcgacatggcatttatcactcaactgaccggc

SEQ ID NO: 481810 - DNA, 75 bp, synthetic construct
  source 1..75: mol_type = other DNA
caaactgggccgcagctcccgctggctgaaaagtgaagtggaagcctggctgcaggcgcgtattacacagtcccg

SEQ ID NO: 481811 - DNA, 75 bp, synthetic construct
  source 1..75: mol_type = other DNA
aacggacgatcgcctgtcgcgcctcgactggagccgcgagcagcgtctggcgctggtgaatgcgattgttgaaac

SEQ ID NO: 481812 - DNA, 75 bp, synthetic construct
  source 1..75: mol_type = other DNA
atcgccgatggttatcccgagcatgtcgccgaaaagaatatgatcaagatgtacgtctggtttgactgcaatata

SEQ ID NO: 481813 - DNA, 75 bp, synthetic construct
  source 1..75: mol_type = other DNA
gcgaaagatctctcctggccggagcggctggtgctggcaaaaagctgcggttttgattttgtcgaaatgtcggtg

SEQ ID NO: 481814 - DNA, 75 bp, synthetic construct
  source 1..75: mol_type = other DNA
tggccttaattaccccctatccagcactggcagccgtagtgactgagcagtgcaccggtatttttaactgccatg

SEQ ID NO: 481815 - DNA, 75 bp, synthetic construct
  source 1..75: mol_type = other DNA
ctgggatgcgaccatccccattgttcaaaaggacttataaattagttcgggagattgacgaaagattaaccaaac

SEQ ID NO: 481816 - DNA, 75 bp, synthetic construct
  source 1..75: mol_type = other DNA
tttaaatattgatctggattatttgaatatttcattaatttcagtggatggaatatcatttaaaatatatgcagc

SEQ ID NO: 481817 - DNA, 75 bp, synthetic construct
  source 1..75: mol_type = other DNA
cttgatatcaaaaaagcaggaaatggcagtagttttactctttatgaacgcgtaccagcattaacgccaaaaatt

SEQ ID NO: 481818 - DNA, 75 bp, synthetic construct
  source 1..75: mol_type = other DNA
aagccccagcttattaatgattgccaaaatatgtttggctaccggcgcacgttggagcgaagccgaaaacctgca

SEQ ID NO: 481819 - DNA, 75 bp, synthetic construct
  source 1..75: mol_type = other DNA
ggaaaggacattatccctgtcgatgtgcggattattggtgccactaaccgatcgctggaaaaaatggcggaggaa

SEQ ID NO: 481820 - DNA, 75 bp, synthetic construct
  source 1..75: mol_type = other DNA
ctctcggtactatcttaaattcgttaatctaaaatatattcaatcacaacgagatttagaaaagtttatccgtaa

SEQ ID NO: 481821 - DNA, 75 bp, synthetic construct
  source 1..75: mol_type = other DNA
taatcaaagtgcaattgaatacttacaaaagaaaaaagcaataagaatgcgtatacttctaaaaaaaatcaaaaa

SEQ ID NO: 481822 - DNA, 75 bp, synthetic construct
  source 1..75: mol_type = other DNA
ttggaaatatcatatctgaaacttaaaggttttagaaactttaaagatgcacatatcaattttaattcgaacact

SEQ ID NO: 481823 - DNA, 75 bp, synthetic construct
  source 1..75: mol_type = other DNA
actggagccattggaataaatgactttattgataacctacaacttggagctaatacaaatggttctaacgtaatg

SEQ ID NO: 481824 - DNA, 75 bp, synthetic construct
  source 1..75: mol_type = other DNA
cgttagaaattccatgggtaatgagaaccgataacgatatatcaaaaataaaagataagtggcaatatgctggta

SEQ ID NO: 481825 - DNA, 75 bp, synthetic construct
  source 1..75: mol_type = other DNA
aaagagtagaagatgatgatttgttgagagagataagttcagatttacaagtaataaatgataagatatcgcaac

SEQ ID NO: 481826 - DNA, 75 bp, synthetic construct
  source 1..75: mol_type = other DNA
caaaattcatttgctagccaattagctaaagagttacatacaaatgtaatagacctgacacgctatggacgtggt

SEQ ID NO: 481827 - DNA, 75 bp, synthetic construct
  source 1..75: mol_type = other DNA
ctgattcgttctggcgctattcccctggtaaaaaccaatgcggcagaaatggaagcatttgaaaattcctataaa

SEQ ID NO: 481828 - DNA, 75 bp, synthetic construct
  source 1..75: mol_type = other DNA
cttgtaaccaggtgaatcatttgataccaacgagggttttagtgaaaggaggtgaaatcacctgtaagatactga

SEQ ID NO: 481829 - DNA, 75 bp, synthetic construct
  source 1..75: mol_type = other DNA
tcggcgactggtttgcccgcgatacccgaaatttctttgagctggaaggcattgctattccgcacggtacgtcgg

SEQ ID NO: 481830 - DNA, 75 bp, synthetic construct
  source 1..75: mol_type = other DNA
atgatcagcggacggaggtttcccgttttctgtcagtgcacggtttgttttttgatgccggttcaggttgtgtgc

SEQ ID NO: 481831 - DNA, 75 bp, synthetic construct
  source 1..75: mol_type = other DNA
ccgacatggcaggaaggctgatggtacatgccctgaaactggctgcaggatacgacgatatctcagtcgtggcaa

SEQ ID NO: 481832 - DNA, 75 bp, synthetic construct
  source 1..75: mol_type = other DNA
tggcgctgaccaccatgcgccacggtgaagtagcaaaatccttcagccttgacgaacacactatggttcctgatg

SEQ ID NO: 481833 - DNA, 75 bp, synthetic construct
  source 1..75: mol_type = other DNA
tccgccagctggaaaaatatctggagccaatccccaaagcggactgggagcaggtgaaagcgtattactacgcca

SEQ ID NO: 481834 - DNA, 75 bp, synthetic construct
  source 1..75: mol_type = other DNA
agaaagaaaaatattttaatttgctcaatgaggttgagaatcatcgtgacatagatgataaagtttcaagggtaa

SEQ ID NO: 481835 - DNA, 75 bp, synthetic construct
  source 1..75: mol_type = other DNA
ataaagcccgtatccaagcgcaccatcgactagaatggcttgaaaaacactctcaatttatcctcgtttggtatg

SEQ ID NO: 481836 - DNA, 75 bp, synthetic construct
  source 1..75: mol_type = other DNA
ggtttgcacacccaactggcggctaatgctggggcgttaaaagccggggtatggtggcttcaatggatcagggcg

SEQ ID NO: 481837 - DNA, 75 bp, synthetic construct
  source 1..75: mol_type = other DNA
ggtagtgaatgtcgatatctggaatatctggcatatgaccttcaccggagcgttgctgcacctggcgacaggttc

SEQ ID NO: 481838 - DNA, 75 bp, synthetic construct
  source 1..75: mol_type = other DNA
ctggcggtaaaaacggcggcggtgatgctgctgatgccacgggtgattaaacccatcatggatggtttaacgccc

SEQ ID NO: 481839 - DNA, 75 bp, synthetic construct
  source 1..75: mol_type = other DNA
gttcgcccaggatgtcggtattcgcgtgatccaactggcgggctatgacgtttactatcaggaagccaataacga

SEQ ID NO: 481840 - DNA, 75 bp, synthetic construct
  source 1..75: mol_type = other DNA
gcagccgcagaagaagcatttcagttcattggcactgacgaactgaagcttgagctattcaaaattcacttccag

SEQ ID NO: 481841 - DNA, 75 bp, synthetic construct
  source 1..75: mol_type = other DNA
agctgaaaacggatgacatgaaaacgggtaagaaggtttatctgaagtccggaaaagttcagctgactaacagcg

SEQ ID NO: 481842 - DNA, 75 bp, synthetic construct
  source 1..75: mol_type = other DNA
tgcagccatcagcagcggagatctggtgcaggtgggtgatgtttttgcggtggcgctgaccgatattccacaggg

SEQ ID NO: 481843 - DNA, 75 bp, synthetic construct
  source 1..75: mol_type = other DNA
caccattgtggaagctaacgactatcgtgttgatttggttcgtattgttaaagagcaaccgtcgcatgatgacga

SEQ ID NO: 481844 - DNA, 75 bp, synthetic construct
  source 1..75: mol_type = other DNA
cattgccggtgagttcccggacgctgatgaaacgccggaaattattaccgacggcgacggctggctggtaaaagg

SEQ ID NO: 481845 - DNA, 75 bp, synthetic construct
  source 1..75: mol_type = other DNA
tgttctcgaaattgtgctgggtatcgataacctggtcttcatcgccattcttgctgacaaactgccgccaaaaca

SEQ ID NO: 481846 - DNA, 75 bp, synthetic construct
  source 1..75: mol_type = other DNA
gccgtcaactggctactatcgacagtgattcaaaatcatccgtttctccaaacgaatcagaatcaaatgtctgtc

SEQ ID NO: 481847 - DNA, 75 bp, synthetic construct
  source 1..75: mol_type = other DNA
gcagcagctcattcgcctgccgggtcagcagtatgatgaggagtccggcctgtattacaaccgccaccgctatta

SEQ ID NO: 481848 - DNA, 75 bp, synthetic construct
  source 1..75: mol_type = other DNA
gaagggacaacagaatggtgcgcagaatacgatgaatggggcaacctgctgaatgaagagaacccgcatcagctg

SEQ ID NO: 481849 - DNA, 75 bp, synthetic construct
  source 1..75: mol_type = other DNA
cgtgctcggtgcctatatgccgcagtggtcgcatatcgtcgggcagatgcagtttgacttgttccacgcttacac

SEQ ID NO: 481850 - DNA, 75 bp, synthetic construct
  source 1..75: mol_type = other DNA
ctgatttttatacaatggctgaccacatggtaaatgaggcttgggaaaaaattgccgatttagcttatgattaca

SEQ ID NO: 481851 - DNA, 75 bp, synthetic construct
  source 1..75: mol_type = other DNA
cagcgagctacgggcgcaattgctcattgttcaatgcaactggggctattaagtccagccataaattcagttatg

SEQ ID NO: 481852 - DNA, 75 bp, synthetic construct
  source 1..75: mol_type = other DNA
cggtggtggtgctctgtctgagcttcctgctaatgataggtctgagtctggtggcagaaggtttcggtttccaca

SEQ ID NO: 481853 - DNA, 75 bp, synthetic construct
  source 1..75: mol_type = other DNA
ggatgcttacatcagagggtataacgagcggcgtataaaattatcgctgggtgaagacagccctgaaatgtaccg

SEQ ID NO: 481854 - DNA, 75 bp, synthetic construct
  source 1..75: mol_type = other DNA
gccagatggacccggtgtacacgccggcgcgaaaaatccacctgtaccactgcgaccatcgcggcctgccgctgg

SEQ ID NO: 481855 - DNA, 75 bp, synthetic construct
  source 1..75: mol_type = other DNA
gttcttcgaccaggtatttgatcagggaatgaatccagccgtaccctggtctgcatactggacccctctgcgcta

SEQ ID NO: 481856 - DNA, 75 bp, synthetic construct
  source 1..75: mol_type = other DNA
actgaaatgtataatgggcgtaaatggtcaggcatcacgcctgaaaagttcagcagcatgtggatgcttacatca

SEQ ID NO: 481857 - DNA, 75 bp, synthetic construct
  source 1..75: mol_type = other DNA
cgtcgccgctacagctcatattgcggagaaatcggaccggctccggataaccttatcgccagagattttaaggcg

SEQ ID NO: 481858 - DNA, 75 bp, synthetic construct
  source 1..75: mol_type = other DNA
gtagcagttatttttatcaccgggctgcactgaaagccggtgataaatacgccacgatacgtacgatgctgacag

SEQ ID NO: 481859 - DNA, 75 bp, synthetic construct
  source 1..75: mol_type = other DNA
tttaaccagattgcgcgtcgcaactttattcgtcaccagtcgactttgccgctgcgagcgcgtactgccgatgcc

SEQ ID NO: 481860 - DNA, 75 bp, synthetic construct
  source 1..75: mol_type = other DNA
taccattgttgaagctaacgattatcgtgttgacctggttcgtattgttaaagagcaactggctcacgacgaaga

SEQ ID NO: 481861 - DNA, 75 bp, synthetic construct
  source 1..75: mol_type = other DNA
tgattgatgtagggccactgcatatcaccatcattgaagccaatgattatcgtgttgatctggttcgcattgtta

SEQ ID NO: 481862 - DNA, 75 bp, synthetic construct
  source 1..75: mol_type = other DNA
ccaaacccctctcccgcctcgtctacaccaatcttaaaacagcgagaactgacagtgtttctctgcagtcagttg

SEQ ID NO: 481863 - DNA, 75 bp, synthetic construct
  source 1..75: mol_type = other DNA
gatatcacgatccgcacatttgaagcggtgcgtaaatcgaaggaagcgttagacctgttcactaccggagcataa

SEQ ID NO: 481864 - DNA, 75 bp, synthetic construct
  source 1..75: mol_type = other DNA
gtggtcgtcacacagattgtcatccttgacgccgtcttctcgttggatgcggtaattactgcagtagggatggtt

SEQ ID NO: 481865 - DNA, 75 bp, synthetic construct
  source 1..75: mol_type = other DNA
gatgttatatgctcaaaaagtcgaagcaacggatacatccactctgcctgttaaatttcctgaaaaaccgagttg

SEQ ID NO: 481866 - DNA, 75 bp, synthetic construct
  source 1..75: mol_type = other DNA
gtttatgacgtggcatcaggggatgcgttatttatttctgaacttggcccattaccggaaaatgttacctggttg

SEQ ID NO: 481867 - DNA, 75 bp, synthetic construct
  source 1..75: mol_type = other DNA
gtggatcactattgcaccgttcgtgacagctacctcaaataccctgaaccgccagccagaaagacccgccacaaa

SEQ ID NO: 481868 - DNA, 75 bp, synthetic construct
  source 1..75: mol_type = other DNA
ctgaactcggtccgttaccggaaaatgttacctggttatcgccggaaggggagtttcagaagtggaacggcacag

SEQ ID NO: 481869 - DNA, 75 bp, synthetic construct
  source 1..75: mol_type = other DNA
gcatatagcgccgcttcaggatgctgtggatctggagatcgcaacggagaaagaaaccttgttgctggaagcctg

SEQ ID NO: 481870 - DNA, 75 bp, synthetic construct
  source 1..75: mol_type = other DNA
ctggctggcagacagtgccggagcatcacgcctcgctctggcagcaggtcagtcagggtggaacatcgaccactg

SEQ ID NO: 481871 - DNA, 75 bp, synthetic construct
  source 1..75: mol_type = other DNA
agggcgtggcaggcgaagaggtgaataccgcccattatcgccatcatctggatctggcggaaggtgccgaggcga

SEQ ID NO: 481872 - DNA, 75 bp, synthetic construct
  source 1..75: mol_type = other DNA
gcccattaccgacatcatctggatctggcggaaggtgccgaagcaacggtgatcgaacattttgtcagccttaat

SEQ ID NO: 481873 - DNA, 75 bp, synthetic construct
  source 1..75: mol_type = other DNA
catcatgccccgctctggcagcaggtcagtcaggtggaacatcgaccactgagtgcctatgaggagctgttgtga

SEQ ID NO: 481874 - DNA, 75 bp, synthetic construct
  source 1..75: mol_type = other DNA
taaaatgcgtccgtcaaaaagaacagttcgcttcgaaactcagcctggataccagctccagcatgactggggcga

SEQ ID NO: 481875 - DNA, 75 bp, synthetic construct
  source 1..75: mol_type = other DNA
tgcgttactacatccagcccaaacgtaaaatgcgtccgtcaaaaagaacagttcgcttcgaaactcagcctggat

SEQ ID NO: 481876 - DNA, 75 bp, synthetic construct
  source 1..75: mol_type = other DNA
ctatttctgttgccttcttcagtagatctggagatcgcaacggaggaagaaaactcgttgctggaagcctggaag

SEQ ID NO: 481877 - DNA, 75 bp, synthetic construct
  source 1..75: mol_type = other DNA
gaagaagtatcgggtgttgctgaaccgtgttaatacaacaactgcacctgatattgagtggccggaagaaccaga

SEQ ID NO: 481878 - DNA, 75 bp, synthetic construct
  source 1..75: mol_type = other DNA
tgcaggtagccagtgagcatatagcgccacttcaggatgctgtagatctggagatcgcaacggaggaagaaacct

SEQ ID NO: 481879 - DNA, 75 bp, synthetic construct
  source 1..75: mol_type = other DNA
ctttatagagcataagcagcgcaacacccttattccagctggcttcgtggctgttttcaacagtgatgagtcatc

SEQ ID NO: 481880 - DNA, 75 bp, synthetic construct
  source 1..75: mol_type = other DNA
gaaaaaatatcgggtgttgctgaaccgtgttaatacaacaactgcacctgatattgagtggccggaagaaccaga

SEQ ID NO: 481881 - DNA, 75 bp, synthetic construct
  source 1..75: mol_type = other DNA
ggtctggtggcgctgggcttcaccttaatttccgtgttcacgcttagcggccccggcccgctttccctgctgcgt

SEQ ID NO: 481882 - DNA, 75 bp, synthetic construct
  source 1..75: mol_type = other DNA
gcttcaccttaatttccgtgttcacgcttagcggccccggcccgctttctctactgcgtcgtcaggtgaatgaag

SEQ ID NO: 481883 - DNA, 75 bp, synthetic construct
  source 1..75: mol_type = other DNA
gtacgtattattggctcatcgttcgccacctcagcgctggaagtggttattctgaaaacgctgcatatgtttgaa

SEQ ID NO: 481884 - DNA, 75 bp, synthetic construct
  source 1..75: mol_type = other DNA
ttaatgacgctcgtcacttcaccggcgcacggttcactatcaacgtcgcagcgaacgcccacttgcagcatatca

SEQ ID NO: 481885 - DNA, 75 bp, synthetic construct
  source 1..75: mol_type = other DNA
gtacccggaagggacaaccacgttagcaccggctaatgcctggcaaaaatggaatggtaaggcgtgggtgggtgg

SEQ ID NO: 481886 - DNA, 75 bp, synthetic construct
  source 1..75: mol_type = other DNA
tggaaaaaataccgggtattagtgagtcggattgatataaatacagccccggatatcgtatggccagagctgtga

SEQ ID NO: 481887 - DNA, 75 bp, synthetic construct
  source 1..75: mol_type = other DNA
tgatcagcagcggcagcgatatcaggtacaactgagtcttcgccagaaataccagcaacagctggagcagttgag

SEQ ID NO: 481888 - DNA, 75 bp, synthetic construct
  source 1..75: mol_type = other DNA
gaagaagtatcgggtgttgctgaaccgtgttgatacatcaactgcaccggatattgagtggccagaagaaccaga

SEQ ID NO: 481889 - DNA, 75 bp, synthetic construct
  source 1..75: mol_type = other DNA
gtcagcaggcattgccacggaaaggatgacagaagcgcataaacagcttctggctctgcagcagcgcatcagcga

SEQ ID NO: 481890 - DNA, 75 bp, synthetic construct
  source 1..75: mol_type = other DNA
cgttatttatttctgaactcggctcattaccggaaaatgttacctggttatccccggcaggggagtttcagaagt

SEQ ID NO: 481891 - DNA, 75 bp, synthetic construct
  source 1..75: mol_type = other DNA
tgataaagcaaatgcgccagcagggcgcgtacattgccgatattgcgactcagattggttgctctgaacgaacgg

SEQ ID NO: 481892 - DNA, 75 bp, synthetic construct
  source 1..75: mol_type = other DNA
gcctccacagaaagtatttgaaaatgaaatcgtcgcaaaagggtatctggcagtaaaagatgttcctgatctcga

SEQ ID NO: 481893 - DNA, 75 bp, synthetic construct
  source 1..75: mol_type = other DNA
tgttgcggcatggtttgcaggttcatttattttctttgtgctttacttcagccagataaagaatctgaaaccatt

SEQ ID NO: 481894 - DNA, 75 bp, synthetic construct
  source 1..75: mol_type = other DNA
agatctggaaatcgcaacggaggaagaaacctcattgctggaagcctggaaaaagtatcgggtgttgctgaaccg

SEQ ID NO: 481895 - DNA, 75 bp, synthetic construct
  source 1..75: mol_type = other DNA
gcaatggcaatgcatcgcgcgtgacacggcgaaaacgcaaaccgctgaacgtccggccactacgcgcccggctcg

SEQ ID NO: 481896 - DNA, 75 bp, synthetic construct
  source 1..75: mol_type = other DNA
tctggctggcagacagtgccggagcatcacgccccgctctggcagcaggtcagtcaggtggaacatcgaccactg

SEQ ID NO: 481897 - DNA, 75 bp, synthetic construct
  source 1..75: mol_type = other DNA
ttcgcggagattaaggcaatgggtgatacgggcggacgttccatgctgcgttactacatccagcccaaacgtaaa

SEQ ID NO: 481898 - DNA, 75 bp, synthetic construct
  source 1..75: mol_type = other DNA
cagtggatggctgacgttgctgacaggcgagaacttcgccagttcaggcagacaccggaacagcgcttcacgcag

SEQ ID NO: 481899 - DNA, 75 bp, synthetic construct
  source 1..75: mol_type = other DNA
gcattaacgacgaccgtcagggattgcccgacgccatacaggcggaagtgtttctccatctgacggaaagcctgg

SEQ ID NO: 481900 - DNA, 75 bp, synthetic construct
  source 1..75: mol_type = other DNA
gacacgtaaacatgaaaactggaaatatacgccgctggaagggctgaccaatagccagtttgtcagcattgcggg

SEQ ID NO: 481901 - DNA, 75 bp, synthetic construct
  source 1..75: mol_type = other DNA
atagccagtttgtcagcattgcgggagagatatccccacagcagcgtgatgccttagcgttaacattagacgctg

SEQ ID NO: 481902 - DNA, 75 bp, synthetic construct
  source 1..75: mol_type = other DNA
tgataaagcaaatgcgccagcagggcgcgtacattgtcgatattgcgactcagattggttgttctgaacgaacgg

SEQ ID NO: 481903 - DNA, 75 bp, synthetic construct
  source 1..75: mol_type = other DNA
atggttaagctgaaaccatttatggattacatcgacatgcgcctggcagagaatgtctggaatagcgaggttatc

SEQ ID NO: 481904 - DNA, 75 bp, synthetic construct
  source 1..75: mol_type = other DNA
gccccctcgacctcttccagcgatcaaaccgcgtctggcgagaagagtattgatcttgctggcaatgcgaccgat

SEQ ID NO: 481905 - DNA, 75 bp, synthetic construct
  source 1..75: mol_type = other DNA
cagtgccggagcatcacgccacgctctggcagcaggtcagtcaggtggaacatcggccactgagtgcctatgagg

SEQ ID NO: 481906 - DNA, 75 bp, synthetic construct
  source 1..75: mol_type = other DNA
gcaccaaaacaggatgctgagcatacctacgaatcactggttcgcgccttccgctacttcggtggttgtgtgaaa

SEQ ID NO: 481907 - DNA, 75 bp, synthetic construct
  source 1..75: mol_type = other DNA
gtggcaatttaggagcgctgaggggatccgggataacgctggctaaccgtgccggatggatagacacactgatgt

SEQ ID NO: 481908 - DNA, 75 bp, synthetic construct
  source 1..75: mol_type = other DNA
cggtgtcatcggtgcttccggtattcgtgtgttgatcgaatcgaaagtggattacaacaaagcacagaacctgat

SEQ ID NO: 481909 - DNA, 75 bp, synthetic construct
  source 1..75: mol_type = other DNA
atttttgttaatccggcgattaaacaacaactttgccttgatgcgggcaccgatcgcgactggttgcggaaagtg

SEQ ID NO: 481910 - DNA, 75 bp, synthetic construct
  source 1..75: mol_type = other DNA
tggcatttatcactcaactgaccggcctgaccgataagtggttttacaaactcatcaaggatggtgactttcctg

SEQ ID NO: 481911 - DNA, 75 bp, synthetic construct
  source 1..75: mol_type = other DNA
ggctgatcctcgacaatgtttctgccgggtatcacaagaaaatcattgttgatggtgtttctttctccgttccca

SEQ ID NO: 481912 - DNA, 75 bp, synthetic construct
  source 1..75: mol_type = other DNA
attcccgaagccaattaagctgggtcgcagctcccgctggcgacagagtgaagtcgaagactggctattagaacg

SEQ ID NO: 481913 - DNA, 75 bp, synthetic construct
  source 1..75: mol_type = other DNA
ggtatcggaacgctactgtatctcttcatttgtaaaggcaaaatcccggcttatctcggttccagctttgccttt

SEQ ID NO: 481914 - DNA, 75 bp, synthetic construct
  source 1..75: mol_type = other DNA
tattaggcgattacttaatcataagggagtgaatgaaataagtaatctctctcaaaaatttaatgcagattctcc

SEQ ID NO: 481915 - DNA, 75 bp, synthetic construct
  source 1..75: mol_type = other DNA
cccaattggtatggcctgtgaaggcgatatgttccgtgctactgcgggtgtgaacacccataaaggcagcatttt

SEQ ID NO: 481916 - DNA, 75 bp, synthetic construct
  source 1..75: mol_type = other DNA
aggggggcctgcgctggctacagcgcgaggcgcaaacattattaaacaatgggggcatccgaacccccgccgatc

SEQ ID NO: 481917 - DNA, 75 bp, synthetic construct
  source 1..75: mol_type = other DNA
ggggatgcgaatgcgcaggttaatctcggggtattattgtatcgacatggttccgaagaagaacagagaagggcc

SEQ ID NO: 481918 - DNA, 75 bp, synthetic construct
  source 1..75: mol_type = other DNA
tgctgacaggactgtttgctctcgtttctcttcccgctctgggaaatgtcaatctcgaacaattaaagcaaaaag

SEQ ID NO: 481919 - DNA, 75 bp, synthetic construct
  source 1..75: mol_type = other DNA
atggagcgacgccgatgagctggcggtagaagaggccctgaaattaacgggtacgcaggagtttgcacatttacc

SEQ ID NO: 481920 - DNA, 75 bp, synthetic construct
  source 1..75: mol_type = other DNA
tgcttgtgtgattgcgtcagtaacgtcgcggacgttacaccgtgactctatctaccgccaacacactgcgcagca

SEQ ID NO: 481921 - DNA, 75 bp, synthetic construct
  source 1..75: mol_type = other DNA
tggcgacactgttggcggcgaccacgcacgcgccgattatgtcgacgttgatgatatgtgaaatgaccggggagt

SEQ ID NO: 481922 - DNA, 75 bp, synthetic construct
  source 1..75: mol_type = other DNA
cccggtggtgtctttacaccgacgctatttatcggtcttgccattggcatgttgtatggtcgtagcctgggatta

SEQ ID NO: 481923 - DNA, 75 bp, synthetic construct
  source 1..75: mol_type = other DNA
atgaccagctggtcgacatggcgtttatcactcaactgaccggcttaaccgataagtggttttacaagctcatca

SEQ ID NO: 481924 - DNA, 75 bp, synthetic construct
  source 1..75: mol_type = other DNA
atgacccccccagtttcgctgatggatgaccagatggtcgatatggcgtttatcactcagctgaccggcctgacc

SEQ ID NO: 481925 - DNA, 75 bp, synthetic construct
  source 1..75: mol_type = other DNA
ggcgttgctgattagcaatctgattaatcatagcgatgcattactctacagcgtgcaactctcagtgacggttca

SEQ ID NO: 481926 - DNA, 75 bp, synthetic construct
  source 1..75: mol_type = other DNA
agctcggcgaatttcctaaacccattaagctgggcagaagctcccgctggcttgaaagcgaagtggaagcctggc

SEQ ID NO: 481927 - DNA, 75 bp, synthetic construct
  source 1..75: mol_type = other DNA
cagagaaaatgaccgttctggttggggcaaacggctgtggaaagtcgacgttgctcagtaccattgcgcgtatat

SEQ ID NO: 481928 - DNA, 75 bp, synthetic construct
  source 1..75: mol_type = other DNA
atggagcgacgccgacgagcaggcggtagaagaggccctgaaattaaccggtacgcaggagtttgcacatttacc

SEQ ID NO: 481929 - DNA, 75 bp, synthetic construct
  source 1..75: mol_type = other DNA
tgtcgacattgatgatatgcgaaatgaccggggagtatcagctactccccggcttattgattgcctgcgtgattg

SEQ ID NO: 481930 - DNA, 75 bp, synthetic construct
  source 1..75: mol_type = other DNA
taccaatgccaattttggtattgggctccgggtaagtcagggctgtattcgtctgcgcaatgacgatatcaaata

SEQ ID NO: 481931 - DNA, 75 bp, synthetic construct
  source 1..75: mol_type = other DNA
accgtatcggacgtaccgcgcgcgccggtcgtaaaggcaccgcaatttcgctggtggaagcccatgaccatctgc

SEQ ID NO: 481932 - DNA, 75 bp, synthetic construct
  source 1..75: mol_type = other DNA
atgggagttgagcagaatgatttcagggacatgttgtccggttatctctccggcccgccgcagacgcagcatgtg

SEQ ID NO: 481933 - DNA, 75 bp, synthetic construct
  source 1..75: mol_type = other DNA
cacggaccataaaaatttataatctactggccggaaccaatgagtttattggtgaaggtgatgcatacattccac

SEQ ID NO: 481934 - DNA, 75 bp, synthetic construct
  source 1..75: mol_type = other DNA
gctgccgggcgggtgaaacatggcctccggacctggctgagtttgtggcgctgatttcggagagtggggcaaatc

SEQ ID NO: 481935 - DNA, 75 bp, synthetic construct
  source 1..75: mol_type = other DNA
gacgaaatgggcgaagcatgttggtaacggcctgagtattccgccagtccggcggcaactggctgcaccaaagca

SEQ ID NO: 481936 - DNA, 75 bp, synthetic construct
  source 1..75: mol_type = other DNA
caggatgctgtagatctggaaatcgcaacggaggaagaaacctcattgctggaagcctggaaaaagtatcgggtg

SEQ ID NO: 481937 - DNA, 75 bp, synthetic construct
  source 1..75: mol_type = other DNA
tctggaaattgcaacggaggaagaaatctcgttgctggaagcatggaaaaagtatcgggtattgctgaaccgtgt

SEQ ID NO: 481938 - DNA, 75 bp, synthetic construct
  source 1..75: mol_type = other DNA
agtcctggcgatacgacggaagcgataaatacccgtggtctcagcctgtgctgtatcacatttgcctcgagatgc

SEQ ID NO: 481939 - DNA, 75 bp, synthetic construct
  source 1..75: mol_type = other DNA
cagaggcccgcttcaatgcaatttgggatctgattgaaaaagaggacggcgtttctagtccctacctgaacaatc

SEQ ID NO: 481940 - DNA, 75 bp, synthetic construct
  source 1..75: mol_type = other DNA
tcgaaatgcgtaccagagggattgagcgccagatgacgcagggtgagttaaaacgacttgcggaacggcaactga

SEQ ID NO: 481941 - DNA, 75 bp, synthetic construct
  source 1..75: mol_type = other DNA
atattgagtggcctgcaacccctgttatggataatcgttcctgttgtagccacagtcacgtcatatacaagaact

SEQ ID NO: 481942 - DNA, 75 bp, synthetic construct
  source 1..75: mol_type = other DNA
atcaagattcttggctatgacagagatggagaataccaatttacaagcatcaaccaggaccacaggccaataacg

SEQ ID NO: 481943 - DNA, 75 bp, synthetic construct
  source 1..75: mol_type = other DNA
attggtaagaaattctctttttcgtcatatttttagcattggtgtatttttgagtttattatatttcgtactgcc

SEQ ID NO: 481944 - DNA, 75 bp, synthetic construct
  source 1..75: mol_type = other DNA
aatgtaatctacggatcggctgtaccaaaaaagtcttcgacattcagtcttcacttatcggacgttacaatactg

SEQ ID NO: 481945 - DNA, 75 bp, synthetic construct
  source 1..75: mol_type = other DNA
accgatgaacaggcaacagcggcactgaccgcactggacacgctggaaagtaatgccgggaaagtggcgtcgtta

SEQ ID NO: 481946 - DNA, 75 bp, synthetic construct
  source 1..75: mol_type = other DNA
accgatgaacaggcaacagcggcactgaccgcgctggacacgctggaaattaatgccgggaaagtggcggcgttg

SEQ ID NO: 481947 - DNA, 75 bp, synthetic construct
  source 1..75: mol_type = other DNA
cagaactgttgaaggacacaacatgatcaaagttcttggctatgacagagacggagaataccaatttacaagcat

SEQ ID NO: 481948 - DNA, 75 bp, synthetic construct
  source 1..75: mol_type = other DNA
ttctggggatgggaacagtaatcttttttactggttctgcgtcttctctgttagcgaatacgaggcaagaaaagg

SEQ ID NO: 481949 - DNA, 75 bp, synthetic construct
  source 1..75: mol_type = other DNA
tccccggaaggggagtttcagaagtggaacggtacatcctgggtgaaagatgcagaagcagaaaaactgtttcgg

SEQ ID NO: 481950 - DNA, 75 bp, synthetic construct
  source 1..75: mol_type = other DNA
gaagaggtatcgggtgttgctgaaccgtgttgatacatcaactgcgcctgatattgagtggcctgcaagccctgt

SEQ ID NO: 481951 - DNA, 75 bp, synthetic construct
  source 1..75: mol_type = other DNA
gacagatgaacttcagggttccatgcaggctctgggggtgaatggcagcattgagcaccgctctttgcagaaagc

SEQ ID NO: 481952 - DNA, 75 bp, synthetic construct
  source 1..75: mol_type = other DNA
ttgatctttggtcacgaagatagcccagaaattcaggcgtggttgcaggaaaataaatactatcaatatcagcta

SEQ ID NO: 481953 - DNA, 75 bp, synthetic construct
  source 1..75: mol_type = other DNA
ccctgtcactaaagtggcagataaatgtgatttttgcgctgagacccgactggcaaaaggctttccgcccatttg

SEQ ID NO: 481954 - DNA, 75 bp, synthetic construct
  source 1..75: mol_type = other DNA
tattttggcaaccgcgttgttgagttggttcagatttcaggcgggttcgctgatacatcggtttctgtattattc

SEQ ID NO: 481955 - DNA, 75 bp, synthetic construct
  source 1..75: mol_type = other DNA
ttgctccaaaccggcggatttggacattggttgacgccactactaacttaccgcttctgtttccacttctctttc

SEQ ID NO: 481956 - DNA, 75 bp, synthetic construct
  source 1..75: mol_type = other DNA
atgctaacaggaacaatgactcaggatgagggtcaggagcgccaggaggcgaagacagaggattgtcaggaagat

SEQ ID NO: 481957 - DNA, 75 bp, synthetic construct
  source 1..75: mol_type = other DNA
atgaataacgtaaaaaaaatactgctgatggaagatgattatgatattgcagctctgttgcggcttaatctgcag

SEQ ID NO: 481958 - DNA, 75 bp, synthetic construct
  source 1..75: mol_type = other DNA
tggtgagctgttattgctagaatgcgtgtcggtaaaagctagtatcaaaggagataaatttagcttaatcattag

SEQ ID NO: 481959 - DNA, 75 bp, synthetic construct
  source 1..75: mol_type = other DNA
caaaagaggctctccgtttgcttggcggttggagcataaaaagccaaatgcctgatctttacgccaaaagatttt

SEQ ID NO: 481960 - DNA, 75 bp, synthetic construct
  source 1..75: mol_type = other DNA
ggtgctcagcctttatggaataataaccccctcttctgcccaaaagcataacccgctaaatcctttcccttccgg

SEQ ID NO: 481961 - DNA, 75 bp, synthetic construct
  source 1..75: mol_type = other DNA
tgaccaaatgccagaacattacagccgggacgaacaccacgctgtatctcaagcgcgaagatttgctgcacggcg

SEQ ID NO: 481962 - DNA, 75 bp, synthetic construct
  source 1..75: mol_type = other DNA
tgatttcatcaacgaaaccgacgtcggcctgattggtgtggagcctggcggtcacggtatcgaaactggcgagca

SEQ ID NO: 481963 - DNA, 75 bp, synthetic construct
  source 1..75: mol_type = other DNA
cgccgatgatgcagactgaagacgggcaaattgaagagtcttactcgatttctgccgggctggatttcccgtccg

SEQ ID NO: 481964 - DNA, 75 bp, synthetic construct
  source 1..75: mol_type = other DNA
gcagattgaagagtcttactccatttctgccgggctggatttcccgtccgtcggcccgcaacatgcgtatctcaa

SEQ ID NO: 481965 - DNA, 75 bp, synthetic construct
  source 1..75: mol_type = other DNA
tgaccaaatgtcagaacattacagccgggacgaacaccacactgtatctgaagcgtgaagatttactgcacggcg

SEQ ID NO: 481966 - DNA, 75 bp, synthetic construct
  source 1..75: mol_type = other DNA
cggcgcaccgttaaaacatggtcgcgtgggcatctatttcggtatgaaagcgccgatgatgcagaccgaagacgg

SEQ ID NO: 481967 - DNA, 75 bp, synthetic construct
  source 1..75: mol_type = other DNA
atgagtactcacatcgagttttggaactagacaaagtagattatgaatttctcatgatttatatgcaaaaaatac

SEQ ID NO: 481968 - DNA, 75 bp, synthetic construct
  source 1..75: mol_type = other DNA
attaggatcgaaacccctgctagtgcaagcaactttactgacgatttacaacaaggtaaaggaaagaaaacctct

SEQ ID NO: 481969 - DNA, 75 bp, synthetic construct
  source 1..75: mol_type = other DNA
ttagagcaaatagaaaaatgctcatttaatgttaactcgtcatctctgagggcgactgaagaggcattaacatgc

SEQ ID NO: 481970 - DNA, 75 bp, synthetic construct
  source 1..75: mol_type = other DNA
gttctgtctttttaggcttctttatgggaagtgtaagccctgaaggattatcagagagagctttacgaactgcat

SEQ ID NO: 481971 - DNA, 75 bp, synthetic construct
  source 1..75: mol_type = other DNA
taaattcctctgcgatacctgataattacaaggatcagcaaaatattaaaattcgtaatccatttggcggtaatt

SEQ ID NO: 481972 - DNA, 75 bp, synthetic construct
  source 1..75: mol_type = other DNA
acgattttacttaacacatctgcaattccggataattacaaagatacaacaaacagaaaaataaccaacccattt

SEQ ID NO: 481973 - DNA, 75 bp, synthetic construct
  source 1..75: mol_type = other DNA
atattgcttcaatgaaccttggcacttccttacagggtgtgggtgtggaggtaaaaagcggtactgctccaacac

SEQ ID NO: 481974 - DNA, 75 bp, synthetic construct
  source 1..75: mol_type = other DNA
aaccacaatccattgatcgccattgatgaactgacagccttttttcattatctggaaaatgggcattcatgtgta

SEQ ID NO: 481975 - DNA, 75 bp, synthetic construct
  source 1..75: mol_type = other DNA
cattgttactggatatggaaaatgaattaagttggtctttgggagaaccttattacgttaacatttttactcaca

SEQ ID NO: 481976 - DNA, 75 bp, synthetic construct
  source 1..75: mol_type = other DNA
aatccattgctggaagatattaaagcagaattagcggatgtctggcggttgacgcaatatgtggtgaatcaggta

SEQ ID NO: 481977 - DNA, 75 bp, synthetic construct
  source 1..75: mol_type = other DNA
tcacctcatcctctgagcagagaaaaaataacagagtcaatgattgttaaggaaaactcgtgctattttgatttc

SEQ ID NO: 481978 - DNA, 75 bp, synthetic construct
  source 1..75: mol_type = other DNA
ggcaagtatacccagcccgtatgtttttccacctcgtccttctgtaatgcaaacagagttggtgttagagcaaat

SEQ ID NO: 481979 - DNA, 75 bp, synthetic construct
  source 1..75: mol_type = other DNA
tttcattttctaaatatatatatcaataaaattcgccctcaagcctcccatagttttctgttcacttccacccaa

SEQ ID NO: 481980 - DNA, 75 bp, synthetic construct
  source 1..75: mol_type = other DNA
caaagtcggcaagaacattatttacattttcgcaagctgccaatgtttctggtggtgttggtattgttggtgctt

SEQ ID NO: 481981 - DNA, 75 bp, synthetic construct
  source 1..75: mol_type = other DNA
tgccaatccagcttccggggttggaatggcctttgagaagccaaaaaagcaaaacatgccaacactacgaccaga

SEQ ID NO: 481982 - DNA, 75 bp, synthetic construct
  source 1..75: mol_type = other DNA
aaagcccgaatgcttgttgaagccctagagccaatcaaagcacgtggggcgctagagacggtacgtcgtctggtg

SEQ ID NO: 481983 - DNA, 75 bp, synthetic construct
  source 1..75: mol_type = other DNA
atcgctctggacagtattttttcaacggtcgccgctaactggttccagctcaaaagcaaaagcgttacacctgat

SEQ ID NO: 481984 - DNA, 75 bp, synthetic construct
  source 1..75: mol_type = other DNA
atggcttccagtaaatcgctacagcaggcaattgccaacataaaaatctggcacaagggtgaacagcgcgcgccg

SEQ ID NO: 481985 - DNA, 75 bp, synthetic construct
  source 1..75: mol_type = other DNA
cgggcttaccattcgcgatgtgctttctgcggttactatctacgactcgatggtgcgctggttggtattgaagcc

SEQ ID NO: 481986 - DNA, 75 bp, synthetic construct
  source 1..75: mol_type = other DNA
cgactcgctgccttatcgaatggcagcttctaacacttgtacgcccttctgaagcctctggtactcaatgggcag

SEQ ID NO: 481987 - DNA, 75 bp, synthetic construct
  source 1..75: mol_type = other DNA
gttggatgagaaggtaaagacctctggtatctcacaagaccatgcagaagacatctggcgaagcttggagagaaa

SEQ ID NO: 481988 - DNA, 75 bp, synthetic construct
  source 1..75: mol_type = other DNA
ttcacaaagttcctttgagtaaagaagctttgcgcatccttgaattaatgaaatcaataagtgggcatagagaat

SEQ ID NO: 481989 - DNA, 75 bp, synthetic construct
  source 1..75: mol_type = other DNA
cggaggtggcactccgctttccaatatggtcaaagagatagcggccgattttgcggcgcaactccgcaaaggagg

SEQ ID NO: 481990 - DNA, 75 bp, synthetic construct
  source 1..75: mol_type = other DNA
tgagcaacgaggagtcctcgaaactttacggcgaatcatttcccgcctgaatgaaattttccgctatgcagcaac

SEQ ID NO: 481991 - DNA, 75 bp, synthetic construct
  source 1..75: mol_type = other DNA
accgaactcccccgcttccttacagtgttaaacaacgcatcagtccgtatggagacacgattgctgattgaatgg

SEQ ID NO: 481992 - DNA, 75 bp, synthetic construct
  source 1..75: mol_type = other DNA
gctaatgcggccataatccgtatgggtttcggaggtgagcttgtagctcacggtatgcgatccattgctagaacg

SEQ ID NO: 481993 - DNA, 75 bp, synthetic construct
  source 1..75: mol_type = other DNA
tatgtggctttaatatgcgccacgacgacaccaccgtcgcgcttgaagcggcgcatataaaatggaaacagcacg

SEQ ID NO: 481994 - DNA, 75 bp, synthetic construct
  source 1..75: mol_type = other DNA
tgggcaatctttggctgcatgctgatttgctgccgctactcgagcgtgcgctggccggaaagctcactgcaacgc

SEQ ID NO: 481995 - DNA, 75 bp, synthetic construct
  source 1..75: mol_type = other DNA
ctggatgaaatcgtaacgtcagagattagcccgaaggcctggctgaataaccttacgggggaagtttgcagtatt

SEQ ID NO: 481996 - DNA, 75 bp, synthetic construct
  source 1..75: mol_type = other DNA
cttcaccgagagtattcaggaagaaatcgctgacgagttgggttttgacctccagcaaatccgtaagcaacgcga

SEQ ID NO: 481997 - DNA, 75 bp, synthetic construct
  source 1..75: mol_type = other DNA
tcctgcgcagtggctggatgagtctctggcgcgtggcgaattaatggaatactgggcgcatgaagcctgctttat

SEQ ID NO: 481998 - DNA, 75 bp, synthetic construct
  source 1..75: mol_type = other DNA
cgattttgaacatccgcgcacaggagcgagcggctggtgggagtggaagccgcataaacggcatctggaaggact

SEQ ID NO: 481999 - DNA, 75 bp, synthetic construct
  source 1..75: mol_type = other DNA
attgaaaggcgtaatttccagcgcatttatgatttaacccatcgtgtcatgccgcactgggatgataagtgtgac

SEQ ID NO: 482000 - DNA, 75 bp, synthetic construct
  source 1..75: mol_type = other DNA
ccaccgcatattgtcgaaaaattatgtactgtggcgcagcgaccggacactcacggttactccacgtcacgcggt

SEQ ID NO: 482001 - DNA, 75 bp, synthetic construct
  source 1..75: mol_type = other DNA
gtcaggcagtcagaggcatcaaagcgatgttccgcgccgatggtttacttccagccagcagtaaacatattcacg

SEQ ID NO: 482002 - DNA, 75 bp, synthetic construct
  source 1..75: mol_type = other DNA
tccctgaaccgtatgcggcaatgggctcgctggagtttgccaaaaagctgcttaacgaagcgaaggtctgtgtct

SEQ ID NO: 482003 - DNA, 75 bp, synthetic construct
  source 1..75: mol_type = other DNA
gaacagtataagcgccgccgcgatgtgctggtaaaagggctgcatgaagcgggctggatggtcgaaatgccgaaa

SEQ ID NO: 482004 - DNA, 75 bp, synthetic construct
  source 1..75: mol_type = other DNA
taccagaaccatatgccgcaatggggtcgctcgaatttgccaggaaactgctcaatgaagcgaaggtgtgtgttt

SEQ ID NO: 482005 - DNA, 75 bp, synthetic construct
  source 1..75: mol_type = other DNA
tactggtaaaagggctgcatgaagcgggctggatggtcgaaatgccgaaggcttcgatgtatgtctgggcgaaaa

SEQ ID NO: 482006 - DNA, 75 bp, synthetic construct
  source 1..75: mol_type = other DNA
atcgctggaactggaagcgggttacagccgccagggcaacctgtatgcaggcgatacccagaacaccaactccga

SEQ ID NO: 482007 - DNA, 75 bp, synthetic construct
  source 1..75: mol_type = other DNA
tgccggtgcgaactatatcgcaggtgctggcgcgtatacctataacgaaccaggacggacatggtatatgagcat

SEQ ID NO: 482008 - DNA, 75 bp, synthetic construct
  source 1..75: mol_type = other DNA
agccgccagggtaacctgtatgcgggtgatacgcagaacaccaactctgacgcttacactcgctcgaaatatggc

SEQ ID NO: 482009 - DNA, 75 bp, synthetic construct
  source 1..75: mol_type = other DNA
aaggtaaaacctgatttactgattgcccgccagggggtgaaattaaagttcgacgattttcagcaaaccactcag

SEQ ID NO: 482010 - DNA, 75 bp, synthetic construct
  source 1..75: mol_type = other DNA
taccaaaaaaggcagcggtgagtggcacggctcctgggacgcttatttcaatgcgccagaacataaagaggaagg

SEQ ID NO: 482011 - DNA, 75 bp, synthetic construct
  source 1..75: mol_type = other DNA
gaatatacgttgaactcaacgctgagctggcaggcgcgggaagatttgtcgatgcaaacaaccttcacctggtac

SEQ ID NO: 482012 - DNA, 75 bp, synthetic construct
  source 1..75: mol_type = other DNA
ggtacggcaagcagcagccgaagaagtacaactataaaggtcagccagcggttggaccggaaaccaaagaaatca

SEQ ID NO: 482013 - DNA, 75 bp, synthetic construct
  source 1..75: mol_type = other DNA
atcgctggaactggaagcgggttacagccgccagggtaacctgtatgcgggcgacacccagaacaccaactccga

SEQ ID NO: 482014 - DNA, 75 bp, synthetic construct
  source 1..75: mol_type = other DNA
ctgaccggtccgctgggcgacgaattcagcttccgcttgtatggcaacctcgacaaaacccaggctgacgcgtgg

SEQ ID NO: 482015 - DNA, 75 bp, synthetic construct
  source 1..75: mol_type = other DNA
ttgttggcaataactggagtccggctctaaacatatcgcaaggtttaggtgatgacttcacgctgaaaatgggca

SEQ ID NO: 482016 - DNA, 75 bp, synthetic construct
  source 1..75: mol_type = other DNA
ttgtcggtaataactggagcccggcgttaaacgtatcgcaaggcttaggcgatgacttcacgctgaaaatgggta

SEQ ID NO: 482017 - DNA, 75 bp, synthetic construct
  source 1..75: mol_type = other DNA
attctctacagtaaaggtcagggctgctatgccagcgcgggcggctgctatctgcaaggtaacgatgacctgaaa

SEQ ID NO: 482018 - DNA, 75 bp, synthetic construct
  source 1..75: mol_type = other DNA
aaggtgaagcctgatttactgatcgcccgccagggagtgaaattaaagttcgatgattttcagcaaaccactcag

SEQ ID NO: 482019 - DNA, 75 bp, synthetic construct
  source 1..75: mol_type = other DNA
ggatgatatggaaaaccgccggtcatatgacgcaccggtggcgctggatagcgatattcgccagcgtttagagct

SEQ ID NO: 482020 - DNA, 75 bp, synthetic construct
  source 1..75: mol_type = other DNA
cttacggctgacgagcgcaaacaatttaaatacatgcgagcgcgctataagcatttacgttttgctcaacggttg

SEQ ID NO: 482021 - DNA, 75 bp, synthetic construct
  source 1..75: mol_type = other DNA
gtaccaccgaaatcatccatgataattacgcgttatgcctgaaattctggctggatggtgttaatcgtcaggagt

SEQ ID NO: 482022 - DNA, 75 bp, synthetic construct
  source 1..75: mol_type = other DNA
ttttcggtctggactccatccacctggataccttatttcaaaaaaaccagtcgccagttcaacttcatcccgggt

SEQ ID NO: 482023 - DNA, 75 bp, synthetic construct
  source 1..75: mol_type = other DNA
tgctggatagtcgccgcgtgattcaaagtattcagttgatgaaatcgctgggcggcgggtatcaggctgccccga

SEQ ID NO: 482024 - DNA, 75 bp, synthetic construct
  source 1..75: mol_type = other DNA
cagcgcgctgccgaggccgcctatcaacgcggcttaaccagccgcttacaggccaccgaagcccggttgccagtg

SEQ ID NO: 482025 - DNA, 75 bp, synthetic construct
  source 1..75: mol_type = other DNA
cgctgatcgccagttttggcacctactttctcggatttgccgtcagacctgtaggcggaattatcttcggctcat

SEQ ID NO: 482026 - DNA, 75 bp, synthetic construct
  source 1..75: mol_type = other DNA
cctgaatgccttgattcgtgaaaccaaagactggcaactggcggaatccccgccagacgaattgattatcccgct

SEQ ID NO: 482027 - DNA, 75 bp, synthetic construct
  source 1..75: mol_type = other DNA
agagtggcttatttctccccaacccagcatcaccgctttgcatttcctgcacgtctggtcacggcatcaggcagt

SEQ ID NO: 482028 - DNA, 75 bp, synthetic construct
  source 1..75: mol_type = other DNA
cgcatgctaaaagagattgtctccagcccactgctgactggcagggaatttcatgatgtgcgtaaaatcatcagc

SEQ ID NO: 482029 - DNA, 75 bp, synthetic construct
  source 1..75: mol_type = other DNA
ggatgatatggaaaaccgccagtcgtatgatgcaccggatagcgatattcgccagcgcttagagctgctgatttc

SEQ ID NO: 482030 - DNA, 75 bp, synthetic construct
  source 1..75: mol_type = other DNA
tgccaggattcgtgccgatttcgatgattttgacggtgacaggcgaggtgttggtgattgtctggatgaggccga

SEQ ID NO: 482031 - DNA, 75 bp, synthetic construct
  source 1..75: mol_type = other DNA
aggttcaattcctgcctttattttggggttaagcggatatatcgccaatcaggtgcaaacgccggaagttattat

SEQ ID NO: 482032 - DNA, 75 bp, synthetic construct
  source 1..75: mol_type = other DNA
gtgaggaaagccagaaacgattatggataacggccagcacctatgactttggcggcatatctgcgcaggtggatt

SEQ ID NO: 482033 - DNA, 75 bp, synthetic construct
  source 1..75: mol_type = other DNA
caggaaatcaacgaaatccttcatgataaagagcttctattgtctttagaaaatcctcgccgtttcattttctct

SEQ ID NO: 482034 - DNA, 75 bp, synthetic construct
  source 1..75: mol_type = other DNA
agaacttgccgcatcagaaagccggagtcgatgcggtgatgaatgtttttgtttccgcaatacctctcctgacgg

SEQ ID NO: 482035 - DNA, 75 bp, synthetic construct
  source 1..75: mol_type = other DNA
cccgtcagggagtgaaattaaagttcgacgattttcagcaaactactcaggagcacgtctggccacggctgaata

SEQ ID NO: 482036 - DNA, 75 bp, synthetic construct
  source 1..75: mol_type = other DNA
gccgcgaacgtcggggggtgatcagcaccgccaattatcccgcgcgtaaatttggcgtacgtagcgctatgccga

SEQ ID NO: 482037 - DNA, 75 bp, synthetic construct
  source 1..75: mol_type = other DNA
cccgccagggggtgaaattaaagttcgacgattttcagcaaaccactcaggaacacgtctggccgcggctgaata

SEQ ID NO: 482038 - DNA, 75 bp, synthetic construct
  source 1..75: mol_type = other DNA
agttagaaaaagagtttctgacacaaaggccacgcataaagcctcttactcttttctttattgatgatattgaag

SEQ ID NO: 482039 - DNA, 75 bp, synthetic construct
  source 1..75: mol_type = other DNA
ctttcatccagaacactcatgaatgaagtttttgatgataaaatcattgatgataatgacaactttaaagattct

SEQ ID NO: 482040 - DNA, 75 bp, synthetic construct
  source 1..75: mol_type = other DNA
actattaaggatatatcttctgttcatggtggttatttttcaaaagataatagtgataaagatgataaaattgag

SEQ ID NO: 482041 - DNA, 75 bp, synthetic construct
  source 1..75: mol_type = other DNA
aaaatttacctcatcaaaaggctggcgttgattcggtaatgaatgtctttgtatccgccatacctcatcagacgg

SEQ ID NO: 482042 - DNA, 75 bp, synthetic construct
  source 1..75: mol_type = other DNA
atatacgtactcccctgactttgcatatgttgtcaaaacaataaaaggtgattatttaaactttattatcgaaac

SEQ ID NO: 482043 - DNA, 75 bp, synthetic construct
  source 1..75: mol_type = other DNA
acgatgactttgctaagctaaacacaatgagttatcgagagtttctcgataacttatcacagactatttttgtta

SEQ ID NO: 482044 - DNA, 75 bp, synthetic construct
  source 1..75: mol_type = other DNA
tgaaaattgttaacggtgattttcttttgaataccggacgtgaaccaacgctatgtgacaaccgcgtcagcattg

SEQ ID NO: 482045 - DNA, 75 bp, synthetic construct
  source 1..75: mol_type = other DNA
gctgatgtttattgtcggttttgccatgagtgccggtccgctgatttgggtactgtgctccgaaattcagccgct

SEQ ID NO: 482046 - DNA, 75 bp, synthetic construct
  source 1..75: mol_type = other DNA
aaaatcttcgaactggcgggttataccaacaccacagagcaaatgtgggggacagtgattgtcggcctgaccaac

SEQ ID NO: 482047 - DNA, 75 bp, synthetic construct
  source 1..75: mol_type = other DNA
cggtgcggtaggcagtggctggctctcttttaaactcgggcgcaaaaagagcctgatgatcggcgcaatcctgtt

SEQ ID NO: 482048 - DNA, 75 bp, synthetic construct
  source 1..75: mol_type = other DNA
acctgcggttatctgctgttcttctgggtttccgtctggtcactgccggtggcgttggttgcgttggccatcgca

SEQ ID NO: 482049 - DNA, 75 bp, synthetic construct
  source 1..75: mol_type = other DNA
gttatggacgctataagcaatcctccggcaccgaacgacaagctgaaacgagctgctgatcgtctgaaaagcatg

SEQ ID NO: 482050 - DNA, 75 bp, synthetic construct
  source 1..75: mol_type = other DNA
tctacatccgttggtaaatatggctttggtcactacgacttaaaccttcctcaatcacagctattcgccgggcga

SEQ ID NO: 482051 - DNA, 75 bp, synthetic construct
  source 1..75: mol_type = other DNA
accactccctcaacgacatcgtcaatggcgatgcggatctcggtttctgcgcccgcgaaacccatggccgctccc

SEQ ID NO: 482052 - DNA, 75 bp, synthetic construct
  source 1..75: mol_type = other DNA
agaagaaacgacatcgaaaataaggtctattatattgataaataaattgataaaagaattcttatttcaccagtg

SEQ ID NO: 482053 - DNA, 75 bp, synthetic construct
  source 1..75: mol_type = other DNA
acgaggagggggcggggcggattattgtcacggctgaaacatatgaattcgggctaattgatccgatcgaggtgg

SEQ ID NO: 482054 - DNA, 75 bp, synthetic construct
  source 1..75: mol_type = other DNA
tctacatccgttggtaaatatggctttggtcactacgacttaaaccctcctcaatcacagctactcgccgggcga

SEQ ID NO: 482055 - DNA, 75 bp, synthetic construct
  source 1..75: mol_type = other DNA
cgctatatcgtgcatacacatctgaaattgcagcatatgcgcttattgttgatgcaaaagatgacacggcagtcg

SEQ ID NO: 482056 - DNA, 75 bp, synthetic construct
  source 1..75: mol_type = other DNA
cattttacaaacattatggatttatgacgctcccggagtcagggcgaactttattcatgccactggcatcattat

SEQ ID NO: 482057 - DNA, 75 bp, synthetic construct
  source 1..75: mol_type = other DNA
tatcatgccggatatgacccgctacgctggtgatggcgcggaattaaggctattacaggcggtgacaaggtggca

SEQ ID NO: 482058 - DNA, 75 bp, synthetic construct
  source 1..75: mol_type = other DNA
tcgtcatctgcttacacggtttgctgatcaggacgaagccagacgccttttatatgagcagcagaaatcagaaga

SEQ ID NO: 482059 - DNA, 75 bp, synthetic construct
  source 1..75: mol_type = other DNA
gattcgctggtggacttctgcggctatctcatgtcgtcggtaatgtgtgacggcctgttagtgggtaatgctgaa

SEQ ID NO: 482060 - DNA, 75 bp, synthetic construct
  source 1..75: mol_type = other DNA
aagcgccgtattcaacgcgtattccggcagtggtgctggccgtcaataacaatgccatgtcattcagcgaccgaa

SEQ ID NO: 482061 - DNA, 75 bp, synthetic construct
  source 1..75: mol_type = other DNA
ggctggcgttaccaatgctgagtttatcaacgaaaaaggtgagaaagaggactggacgccattaatgaagcgtct

SEQ ID NO: 482062 - DNA, 75 bp, synthetic construct
  source 1..75: mol_type = other DNA
cagctgtttcttgaggtaacggggccgggcggaagtggtaaaagtgttatggctgagatctgcacgatgctggcc

SEQ ID NO: 482063 - DNA, 75 bp, synthetic construct
  source 1..75: mol_type = other DNA
tagaccgccgcaatttaagtgtccacgacgcacaaattttcaccactcgcgacggtatggcgatggataccttca

SEQ ID NO: 482064 - DNA, 75 bp, synthetic construct
  source 1..75: mol_type = other DNA
gatgatatcgccgcagcctgcgatacgctgcacgagtttgatttacctgaacatctggtggtggatttcagccac

SEQ ID NO: 482065 - DNA, 75 bp, synthetic construct
  source 1..75: mol_type = other DNA
actggttgttaattgccagtgaattaccgttcaacccgccagcagagggggaaacgctggcaacgcatgcgccga

SEQ ID NO: 482066 - DNA, 75 bp, synthetic construct
  source 1..75: mol_type = other DNA
tatcgaccaactcctgcaacgattatggattgaagcgggattcagccagattgccgacctggcattggttgccgt

SEQ ID NO: 482067 - DNA, 75 bp, synthetic construct
  source 1..75: mol_type = other DNA
ggacgaccaggcacaaaaagtaggcgagttgttaacgctgctctgggatgtgaagctggaagtcggtcatagcgt

SEQ ID NO: 482068 - DNA, 75 bp, synthetic construct
  source 1..75: mol_type = other DNA
gcctgacatgacccgctacgcaggtgatggtgctgggattaaggccattacaggcggtgacaaggtggcaatcga

SEQ ID NO: 482069 - DNA, 75 bp, synthetic construct
  source 1..75: mol_type = other DNA
acctcgcgtgctctaccactggcgtaccatagagggctcaactgctcttgcttcaggcgagaaaagctataccac

SEQ ID NO: 482070 - DNA, 75 bp, synthetic construct
  source 1..75: mol_type = other DNA
tttcattattgatttagagcagcttttaaatattggcaaaggatggtatcagttcaatatctctattgattgcca

SEQ ID NO: 482071 - DNA, 75 bp, synthetic construct
  source 1..75: mol_type = other DNA
gaggtaatcaacccggattggctgaccgagatggtgagtcactgcatgcgaccagagattggttgtgtcggggcc

SEQ ID NO: 482072 - DNA, 75 bp, synthetic construct
  source 1..75: mol_type = other DNA
tttatgaaaagcaaatggggtaaacatctcgaactcgatcccttctacagtccaaacctatctaaagatagagaa

SEQ ID NO: 482073 - DNA, 75 bp, synthetic construct
  source 1..75: mol_type = other DNA
ggaataccgcccgcaacctgattggattcagtaacggggtatttgatacccgtacaggtgatttccgtgaacacg

SEQ ID NO: 482074 - DNA, 75 bp, synthetic construct
  source 1..75: mol_type = other DNA
gcagagggggaaacgctggcaacacatgcgccgaatttctggaaatggttgcgccgttcggtggctgagaatgac

SEQ ID NO: 482075 - DNA, 75 bp, synthetic construct
  source 1..75: mol_type = other DNA
attacctttcagcccaccagcagagggggaaacgctggcaacacatgcgccgaatttctggaagtggttacgccg

SEQ ID NO: 482076 - DNA, 75 bp, synthetic construct
  source 1..75: mol_type = other DNA
gtaatgctgaaattgtgccattcagcccacgcaggtatctctatcatgcctatctggcttatatgagggcacatg

SEQ ID NO: 482077 - DNA, 75 bp, synthetic construct
  source 1..75: mol_type = other DNA
agtcagttcgaaatcacggcaatcagcgacagccaaatagagcccgcattgctggcacgtattcagcaggaacac

SEQ ID NO: 482078 - DNA, 75 bp, synthetic construct
  source 1..75: mol_type = other DNA
aatttcatgaagtgcaagtggggcaagcaacttgaagttgatccatattacaatcagaacctcactttaagtaaa

SEQ ID NO: 482079 - DNA, 75 bp, synthetic construct
  source 1..75: mol_type = other DNA
cgttcagcgttaccccgtcttctgtcggttatgaggaatggatagaaacggtggaattaccttcgttgcctggca

SEQ ID NO: 482080 - DNA, 75 bp, synthetic construct
  source 1..75: mol_type = other DNA
atgagtttgaaacagtaacgttgccatataaacgagcggtcagcgtcagtcgtttgttctatctggaatcgcctc

SEQ ID NO: 482081 - DNA, 75 bp, synthetic construct
  source 1..75: mol_type = other DNA
gcggatcgtgtactggcggcattattcatggtgctggcgaacagatatgactggcagttattcattgaggtaact

SEQ ID NO: 482082 - DNA, 75 bp, synthetic construct
  source 1..75: mol_type = other DNA
atgaaggtgggtcatcatcattgctgacgcatcaggtgaaaaagtgtgtccagagcggcatcaaagtgctgggac

SEQ ID NO: 482083 - DNA, 75 bp, synthetic construct
  source 1..75: mol_type = other DNA
atggcagtcaaagcaatggcacttaacacacaccagcttttcgcgtacctgaatcgcgaggatattgcggaattt

SEQ ID NO: 482084 - DNA, 75 bp, synthetic construct
  source 1..75: mol_type = other DNA
ctggctacatgaagccaaagcacgaaatcgatccaacaaaaaccatcatgcgcatggctggagaagatccggcac

SEQ ID NO: 482085 - DNA, 75 bp, synthetic construct
  source 1..75: mol_type = other DNA
atgacagtaaaagcaacagcacttacaactaatcagcttttcacgtacctgaatcgcggggatattgcggaatat

SEQ ID NO: 482086 - DNA, 75 bp, synthetic construct
  source 1..75: mol_type = other DNA
agggagcgtggcaggaagtgaaacagagcaaaaccgcgctgcaaaacggcgatcgggttatcgcgctggtcaata

SEQ ID NO: 482087 - DNA, 75 bp, synthetic construct
  source 1..75: mol_type = other DNA
tgggcaacaccaacaataaagggctggtggcctatggtgcgattatggatcaggaagcggtaagaacgggcgcaa

SEQ ID NO: 482088 - DNA, 75 bp, synthetic construct
  source 1..75: mol_type = other DNA
aaacctgggcgaagtggtgagctttaaaggctatctgggcgatattgcccttatcgtctattccggcaaatacgc

SEQ ID NO: 482089 - DNA, 75 bp, synthetic construct
  source 1..75: mol_type = other DNA
aagaaacccacgatccaatctatgatatcgaactatacgccgatcaggctggttgccccgcaaacgtcatgatta

SEQ ID NO: 482090 - DNA, 75 bp, synthetic construct
  source 1..75: mol_type = other DNA
ggaacatctccccggctgataccgggatggcagttatgcgcaagctctgctttttcttcccggatgtggtcgcca

SEQ ID NO: 482091 - DNA, 75 bp, synthetic construct
  source 1..75: mol_type = other DNA
acgccgaacgctggggtaatctggaaaatgagaatggtgatatttctggtctgttccgtctggtgggactgagcg

SEQ ID NO: 482092 - DNA, 75 bp, synthetic construct
  source 1..75: mol_type = other DNA
ttcgacgcccctgatctggggcgtttgattcaggatgtctggaacaatccgggctttgtgtcaccgggcgcataa

SEQ ID NO: 482093 - DNA, 75 bp, synthetic construct
  source 1..75: mol_type = other DNA
gaaaatatggaagtctctggtgcaaccttcgtaaacggtttactgcatattgatttaattcgtaatgagcctgaa

SEQ ID NO: 482094 - DNA, 75 bp, synthetic construct
  source 1..75: mol_type = other DNA
caccgctgaccggcgtgcacttaataacgagttgcagcaggaagtgcatcagcggttgacagaggccctcaatcc

SEQ ID NO: 482095 - DNA, 75 bp, synthetic construct
  source 1..75: mol_type = other DNA
acttcaacaacgatgactacgctattgcttgctgcgtaagcccgatgatcgttggcaaacaaatgcagttcttcg

SEQ ID NO: 482096 - DNA, 75 bp, synthetic construct
  source 1..75: mol_type = other DNA
ctgacaaaggaagttcgtcaggctttttctggtgtccgcgatcgccgccgtcgctcatttattccactggcgcgt

SEQ ID NO: 482097 - DNA, 75 bp, synthetic construct
  source 1..75: mol_type = other DNA
atgaagggggttcatcatcattgctgacgcatcaggtgaaaaagtgtgtccagagcggcatcaaagtgctggggc

SEQ ID NO: 482098 - DNA, 75 bp, synthetic construct
  source 1..75: mol_type = other DNA
tctgctgaggctattgatgaagaaagcaacgactgttttctgaccgtcagcggatttctgcaacccaccactctg

SEQ ID NO: 482099 - DNA, 75 bp, synthetic construct
  source 1..75: mol_type = other DNA
tcgatggttgattcggtgatccactccgcagtgatggcggcctgtttatggcagttacccggcattcgtacccat

SEQ ID NO: 482100 - DNA, 75 bp, synthetic construct
  source 1..75: mol_type = other DNA
cggccaggcgttgctggcgaagcggatgggtaaaacggaaatcatcgccgaaaccggagccggtcagcatggcgt

SEQ ID NO: 482101 - DNA, 75 bp, synthetic construct
  source 1..75: mol_type = other DNA
gcagttacccggcattcgtacccatctggtggcgtttgacacaagcgtggttgatctcacggcagacgttgccga

SEQ ID NO: 482102 - DNA, 75 bp, synthetic construct
  source 1..75: mol_type = other DNA
tggactggctggctaaacagtacatcactgcactgaacatcattcactacatgcacgataagtacagctacgaag

SEQ ID NO: 482103 - DNA, 75 bp, synthetic construct
  source 1..75: mol_type = other DNA
ccacagcctgggaaggttttaccaagggtgactggcagaatgaagtaaacgtccgtgacttcattcagaaaaact

SEQ ID NO: 482104 - DNA, 75 bp, synthetic construct
  source 1..75: mol_type = other DNA
tcctgcgttgccgtaaatccggtgttctgaccggtctgccagatgcttatggccgtggccgtatcatcggtgact

SEQ ID NO: 482105 - DNA, 75 bp, synthetic construct
  source 1..75: mol_type = other DNA
tggattttcccggtgcgcgtgttgtctggtttggtttagcggcaagtgaagaagaagcctacaggctggccggga

SEQ ID NO: 482106 - DNA, 75 bp, synthetic construct
  source 1..75: mol_type = other DNA
acgctgaagtcgatgctggatgtagtacgtaagtttggcgttgatgtgattgccgaaacgaatgtaccgttggat

SEQ ID NO: 482107 - DNA, 75 bp, synthetic construct
  source 1..75: mol_type = other DNA
actcagtctgttctgaccatcacgtctaacgttgtgtatggtaagaaaactggtaacaccccagacggtcgtcgt

SEQ ID NO: 482108 - DNA, 75 bp, synthetic construct
  source 1..75: mol_type = other DNA
agcaggttgaatgcgattacatgttatctgcattaaggcgcatggagctaagaggacaccttaatgaaatatatg

SEQ ID NO: 482109 - DNA, 75 bp, synthetic construct
  source 1..75: mol_type = other DNA
gcgcacgcttgaagagtgcatgctggaagggttatcggatttaaccgtcgccaccaatttaatcgaatcccgctt

SEQ ID NO: 482110 - DNA, 75 bp, synthetic construct
  source 1..75: mol_type = other DNA
gggtaattgctgttggggtaatcctgacgataagccatttaccgggaataagcaggttgaatgcgattacatgtt

SEQ ID NO: 482111 - DNA, 75 bp, synthetic construct
  source 1..75: mol_type = other DNA
acaacttggggttcgggaggtgaggttgctgcctgacgtactgatgctgccgttggcaactgaaggatggagtgc

SEQ ID NO: 482112 - DNA, 75 bp, synthetic construct
  source 1..75: mol_type = other DNA
ggatccgggagcagatgtttttgccagatgtgttgatgctaccgctggcttccgagggatggagtgcagtaagtc

SEQ ID NO: 482113 - DNA, 75 bp, synthetic construct
  source 1..75: mol_type = other DNA
gcaactggctggggaaaaacaccctctacaatctggggagatccgacaaaattcagagggggtagaaagtcgaat

SEQ ID NO: 482114 - DNA, 75 bp, synthetic construct
  source 1..75: mol_type = other DNA
ctgacttgttggcagatagaaaaaagcgtttccgtaaaaatccctctcttggcatgggcgactggagattcttta

SEQ ID NO: 482115 - DNA, 75 bp, synthetic construct
  source 1..75: mol_type = other DNA
gacgataagccatttaccggaaataagcaggttgaatgcgattacatgttatctgcattaaggcgcatggagttg

SEQ ID NO: 482116 - DNA, 75 bp, synthetic construct
  source 1..75: mol_type = other DNA
atgagccagtcactgtttagccaaccgttgaacgttattaacgtcggcatcgccatgtttagcgatgacctgaaa

SEQ ID NO: 482117 - DNA, 75 bp, synthetic construct
  source 1..75: mol_type = other DNA
ttacttcacgttgttaacggaagagtacggaaagtacatggatggcccaaggggaattgctgttggggtaatcct

SEQ ID NO: 482118 - DNA, 75 bp, synthetic construct
  source 1..75: mol_type = other DNA
gagttgggaatggacagcgacgaagtgttgcgcctgaagcaaattaacggcctgcaagaactgtttgccgaccgc

SEQ ID NO: 482119 - DNA, 75 bp, synthetic construct
  source 1..75: mol_type = other DNA
cagcgtgcagaacaattaatcttacagacattgtcagataccggttatgccgcaaaagcggcatggaagggccac

SEQ ID NO: 482120 - DNA, 75 bp, synthetic construct
  source 1..75: mol_type = other DNA
gtctatcagcagctgtttccgagtgaaaaggcggtgaaggatccccgccggcagatgctgagacatctgcaacag

SEQ ID NO: 482121 - DNA, 75 bp, synthetic construct
  source 1..75: mol_type = other DNA
ggtggtagaagaaattatggcgcgattagcgaaggaggtccgtcaggctttttctggtgtccgcgatcgccgccg

SEQ ID NO: 482122 - DNA, 75 bp, synthetic construct
  source 1..75: mol_type = other DNA
aggttgttgaagaaattatggcgcgactggcaaaggaagttcgccaggctttttctggtgtccgcgatcgccgtc

SEQ ID NO: 482123 - DNA, 75 bp, synthetic construct
  source 1..75: mol_type = other DNA
cccctgttatgaccgggatatggcccaggcattggtcaatgtcggtgcacaaatagctgccatgacgccgggtga

SEQ ID NO: 482124 - DNA, 75 bp, synthetic construct
  source 1..75: mol_type = other DNA
atggtcgggaaaagtgttgcagattctgaattacctgtaatattagcgggggatctgaatgatgttgcgtggtct

SEQ ID NO: 482125 - DNA, 75 bp, synthetic construct
  source 1..75: mol_type = other DNA
gggacgtggtttttttagcacgtttcacagccattattttttcctgcgatggccgcttgaccatgtatttcacag

SEQ ID NO: 482126 - DNA, 75 bp, synthetic construct
  source 1..75: mol_type = other DNA
tcccccgctttaacagccgcattaaacgccaaagcgaacaatggcaactggtcttactggttgatcaaagcggat

SEQ ID NO: 482127 - DNA, 75 bp, synthetic construct
  source 1..75: mol_type = other DNA
cgccccttctcttcccttaatcaaaccgtcgatgaaatgttcgataccctgctggaaaatggcgcatatcatcgc

SEQ ID NO: 482128 - DNA, 75 bp, synthetic construct
  source 1..75: mol_type = other DNA
gccaacaccgtattaattgaaaaactcgtaggcgcagcggcggagcgtggcgactcactggacgcctgtgcggaa

SEQ ID NO: 482129 - DNA, 75 bp, synthetic construct
  source 1..75: mol_type = other DNA
atacgcttacaggcactcgcctgggacagtagcagccagactctgaaaatagatctgcaggcagcctcttttcag

SEQ ID NO: 482130 - DNA, 75 bp, synthetic construct
  source 1..75: mol_type = other DNA
agtttttccctgcatgaacagaatattcataacctgccgcgcgaccaggggccgggtaataccgtctcgcttgaa

SEQ ID NO: 482131 - DNA, 75 bp, synthetic construct
  source 1..75: mol_type = other DNA
attgagcgtgtatctatgttgcttccagagtcgtttccacctgagcttgctgagtgtatttttgaaggtatgcgg

SEQ ID NO: 482132 - DNA, 75 bp, synthetic construct
  source 1..75: mol_type = other DNA
gctggaaaatggcacataccaccgcacgctccgcttctgggattatcgacaaggtagctggcaggaagagacgca

SEQ ID NO: 482133 - DNA, 75 bp, synthetic construct
  source 1..75: mol_type = other DNA
ggtcaccggggcgctggtgttcgaagggctggcgaaagatctcgacgaggcggctgacttggcggcctccgggga

SEQ ID NO: 482134 - DNA, 75 bp, synthetic construct
  source 1..75: mol_type = other DNA
accccgagacgaacccagtatcacaaccagagagccaagatgtaggtaaataccactatgcacttcaatctcgcc

SEQ ID NO: 482135 - DNA, 75 bp, synthetic construct
  source 1..75: mol_type = other DNA
ctatgcaacaggtgaggatgtaagggtttattataaagagaatgtttggagtgatacggaattcaaaaatgcatt

SEQ ID NO: 482136 - DNA, 75 bp, synthetic construct
  source 1..75: mol_type = other DNA
agcgtgttacgccgggggctgacggattcggatctggcaacccgtcagtcactggaagagagctatacccgcgat

SEQ ID NO: 482137 - DNA, 75 bp, synthetic construct
  source 1..75: mol_type = other DNA
acgcatcagatgtttaccggatttataccgggataaaaagcagtaaaggtatccgggttccgaccacgaagaaat

SEQ ID NO: 482138 - DNA, 75 bp, synthetic construct
  source 1..75: mol_type = other DNA
tgaagttattcgatttggtctggagcaggtactgacacaaagtagctggcagccaccgcagccccgtcgccaacc

SEQ ID NO: 482139 - DNA, 75 bp, synthetic construct
  source 1..75: mol_type = other DNA
agcgaaaaatttaagaaagcaaaagagcgccaggacaaaatgaaggcagatattgagagttatctcaatgaagca

SEQ ID NO: 482140 - DNA, 75 bp, synthetic construct
  source 1..75: mol_type = other DNA
cgacagcgtgcctcctgtctggcttggagaacaacaacttgccgaactggataagctgcaaatcgtaccggacgg

SEQ ID NO: 482141 - DNA, 75 bp, synthetic construct
  source 1..75: mol_type = other DNA
atttttcggaggttgtaccggaaaacgaacgcgaccccatgctggcagaaaaaatagaaggagagctggcggttg

SEQ ID NO: 482142 - DNA, 75 bp, synthetic construct
  source 1..75: mol_type = other DNA
tcatggtgctggcgaaccggtacgactggcagttattcattgaggtaacagggccggggggaagcggtaaaagcg

SEQ ID NO: 482143 - DNA, 75 bp, synthetic construct
  source 1..75: mol_type = other DNA
atgagactgatgaaaggcagtgtgctgtgcgcactggtgtttttactggccggctgtgccacctccaaagaggaa

SEQ ID NO: 482144 - DNA, 75 bp, synthetic construct
  source 1..75: mol_type = other DNA
gtccggcagacaggctgatccgaacggtgcggcggacagccggacggtgacggagaccgcccgcagcgccctgcg

SEQ ID NO: 482145 - DNA, 75 bp, synthetic construct
  source 1..75: mol_type = other DNA
cgacatggtgatgtatgtgtttccgcatctggccggcggtacgtcgccggttccgggctacagcacggtatttcc

SEQ ID NO: 482146 - DNA, 75 bp, synthetic construct
  source 1..75: mol_type = other DNA
ggacgatcaggcgcaaaaagtgggcgagctgttaacgctgctctgggatgtaaagctggaagtcggtcatagcgt

SEQ ID NO: 482147 - DNA, 75 bp, synthetic construct
  source 1..75: mol_type = other DNA
cgccatgtttagcgatgacctgaaaaagcagcatgtagaagtgactcaactcgactggacgccgccggggcaggg

SEQ ID NO: 482148 - DNA, 75 bp, synthetic construct
  source 1..75: mol_type = other DNA
gatatggcagcggactgatgcaggtagattcccagcattttaacgaactggcccgctatggaattaaaccggaac

SEQ ID NO: 482149 - DNA, 75 bp, synthetic construct
  source 1..75: mol_type = other DNA
caggaacgacgcagaaaaatttatgccacaaaaatacagaacatttatcgcaatataaagaacaaacgagggtac

SEQ ID NO: 482150 - DNA, 75 bp, synthetic construct
  source 1..75: mol_type = other DNA
acattgccgattcgccgctggcagacaaaatcgccgccgctaaccagcaggcgctggagcgcattatccagtcgc

SEQ ID NO: 482151 - DNA, 75 bp, synthetic construct
  source 1..75: mol_type = other DNA
ccaccatggcgcgtaacggcgtcgagttcggcctgcgggtcagcggcctgccggggcagtggtttaccggcccgg

SEQ ID NO: 482152 - DNA, 75 bp, synthetic construct
  source 1..75: mol_type = other DNA
ctggacgccgccggggcagggcaatatgcaggtggtgcaggcgctggataacattgccgattcgccgctggcgga

SEQ ID NO: 482153 - DNA, 75 bp, synthetic construct
  source 1..75: mol_type = other DNA
ttatctggcaatagcgtttaaaaaatggggcgtcccctgggaggccgttggtgcatacaatgcgggattcaggaa

SEQ ID NO: 482154 - DNA, 75 bp, synthetic construct
  source 1..75: mol_type = other DNA
ttatctggcaatagcatttaaaaaatggggcgtcgcctgggaggccgttggtgcatacaatgcaggattcaggaa

SEQ ID NO: 482155 - DNA, 75 bp, synthetic construct
  source 1..75: mol_type = other DNA
acatgtaataatttgttattggatgaaaaaaacacttttttattaatcagttatgggcaattgaggatgaaaaaa

SEQ ID NO: 482156 - DNA, 75 bp, synthetic construct
  source 1..75: mol_type = other DNA
ccaactccaggcgctggcactactgcgcatggataacatcgacgaagaggcgctgcaccaaatttggtcacgctg

SEQ ID NO: 482157 - DNA, 75 bp, synthetic construct
  source 1..75: mol_type = other DNA
gagatgcagttattgaactaaatgaaaggtttagagaacatggggttggttatcagtttgaatctgaagagataa

SEQ ID NO: 482158 - DNA, 75 bp, synthetic construct
  source 1..75: mol_type = other DNA
aagaggttccggaagaattggtaagctatatgcttcatcttactgctacaaatttactatttctcttaaaatgcg

SEQ ID NO: 482159 - DNA, 75 bp, synthetic construct
  source 1..75: mol_type = other DNA
ggtgatgtggagaaggctagtcgtgtttttgtccgcaacgaactgatgcccctgcagaaacagctacaagaactt

SEQ ID NO: 482160 - DNA, 75 bp, synthetic construct
  source 1..75: mol_type = other DNA
gacactataagcagtgtaaaaacacttctggcattgttaggaagtatatctataagtcgtggcagttatgtgaga

SEQ ID NO: 482161 - DNA, 75 bp, synthetic construct
  source 1..75: mol_type = other DNA
ggtgcagatcaggtaacgatggaagcgcgtaactacgggctggcacgtcattacgatccgtttatcgtcaacacc

SEQ ID NO: 482162 - DNA, 75 bp, synthetic construct
  source 1..75: mol_type = other DNA
cgctggtatgagccgcccgtcagctttgacggactggcacgaaccttccgcgctgccgtgcatcacagctcacca

SEQ ID NO: 482163 - DNA, 75 bp, synthetic construct
  source 1..75: mol_type = other DNA
ggctaagcatcgcgtctaccagctagtgtttgcgggaacggtagcagcgggagttttgacactgctggcggcatg

SEQ ID NO: 482164 - DNA, 75 bp, synthetic construct
  source 1..75: mol_type = other DNA
tcgacggcctggcgcgaaccttccgtgccgccgtacaccacagctcaccgattgcagtaaagtgcaacattctga

SEQ ID NO: 482165 - DNA, 75 bp, synthetic construct
  source 1..75: mol_type = other DNA
taacccggtgactgatgacgtggaaaacttaagccgcgtgctggacaccatttacggtgttatcgacaaattcaa

SEQ ID NO: 482166 - DNA, 75 bp, synthetic construct
  source 1..75: mol_type = other DNA
ggttatcaaaaaggccaataccaccatcggtatcccaggcacttttagcgcccgtttgcagccaaacgacacccg

SEQ ID NO: 482167 - DNA, 75 bp, synthetic construct
  source 1..75: mol_type = other DNA
gtggtcggttttattgggccggagtatctctacaacgaccgccagattatccgtgcaggcttagaagatcacttt

SEQ ID NO: 482168 - DNA, 75 bp, synthetic construct
  source 1..75: mol_type = other DNA
aatatacccgccgcggcgtggatcttgatacttactggtttgtgcagtacggcatgaccacgcagccctacgaat

SEQ ID NO: 482169 - DNA, 75 bp, synthetic construct
  source 1..75: mol_type = other DNA
atcgtcttgaatgtagatgatgaatatatagcaataaacaaattaaaattcaagcgggataaagtttttttaatt

SEQ ID NO: 482170 - DNA, 75 bp, synthetic construct
  source 1..75: mol_type = other DNA
agcaaagttctttacggataagttaatcgtcttgaatgtagatgatgaatatatagcaataaacaaattaaaatt

SEQ ID NO: 482171 - DNA, 75 bp, synthetic construct
  source 1..75: mol_type = other DNA
ttctaaagagaagctgaaaggttcgctgggtgagttgaggcagctttctggcttgagcggcgtggtgatgggcta

SEQ ID NO: 482172 - DNA, 75 bp, synthetic construct
  source 1..75: mol_type = other DNA
agccgtgttcgtgattccacccacgtacttgatggcctgctgtatcacgaaagtgatcttgaaatcacggaacat

SEQ ID NO: 482173 - DNA, 75 bp, synthetic construct
  source 1..75: mol_type = other DNA
aacgtcagcaggccgaacgccttcagaaaacgggcaagctgatacagcagaaattacggcagtatgtttccgttg

SEQ ID NO: 482174 - DNA, 75 bp, synthetic construct
  source 1..75: mol_type = other DNA
atggtgaactaaaagaacagttagaaagcaggttcaaacggcaagatggacgtataatttttcatggatggtcag

SEQ ID NO: 482175 - DNA, 75 bp, synthetic construct
  source 1..75: mol_type = other DNA
gatgagcctgatatgatgccagccgccacccaggcgttgccgacgcagccgccggaaggcgcagcggaagaggtg

SEQ ID NO: 482176 - DNA, 75 bp, synthetic construct
  source 1..75: mol_type = other DNA
tcacgaactggcaacgctggtacagccgggtggtgatttgtacggccttgagaaagaaaaagatatctgctgctt

SEQ ID NO: 482177 - DNA, 75 bp, synthetic construct
  source 1..75: mol_type = other DNA
ggtacaaattacactgtatacaatatctataatgatttgagcggtatttgtgaagtttacataagaccatcaaca

SEQ ID NO: 482178 - DNA, 75 bp, synthetic construct
  source 1..75: mol_type = other DNA
atcaggatgagttcgcggctatcccgctggtgccaaaagcgggcgatcgcgatgagcctgatatgatgccagccg

SEQ ID NO: 482179 - DNA, 75 bp, synthetic construct
  source 1..75: mol_type = other DNA
caataataccgagtttgaaccggagcccgcgccggtcgcgccaccgaagccgaaaccggtggagccgcctaagcc

SEQ ID NO: 482180 - DNA, 75 bp, synthetic construct
  source 1..75: mol_type = other DNA
ccacccaggcgttgccgacgcagccgccggaaggcgcagcggaagaggtgcgggcaggtgatgccgcagcaccgt

SEQ ID NO: 482181 - DNA, 75 bp, synthetic construct
  source 1..75: mol_type = other DNA
attgagaaagtggcaaaggtctttgtccgcaatgagcttatcccgttacaggacaggatccgcgaaataaacggc

SEQ ID NO: 482182 - DNA, 75 bp, synthetic construct
  source 1..75: mol_type = other DNA
aaaaggtccttacccgtgttcgccgcattcggggtcagattgatgctctggaaagagcgctggaaaatggtgctg

SEQ ID NO: 482183 - DNA, 75 bp, synthetic construct
  source 1..75: mol_type = other DNA
gaagaccgggataacattcttgaggcgctggtcaatctgggtcatgaagcggtggcagccctgccgcagggtaac

SEQ ID NO: 482184 - DNA, 75 bp, synthetic construct
  source 1..75: mol_type = other DNA
gaggaccgggacaacattctcgaagccctggttaatctgggccatgaagcggtggcagccctgccgcagggtaac

SEQ ID NO: 482185 - DNA, 75 bp, synthetic construct
  source 1..75: mol_type = other DNA
cgataaaagggattggcagtgtactgggatttgatctcagcagcctttccctgaatgccaatggggggatttatc

SEQ ID NO: 482186 - DNA, 75 bp, synthetic construct
  source 1..75: mol_type = other DNA
cgatacagactctgctgagcttcatgaattactgtctaatgccgattccattgaaaggcagttttccatctatga

SEQ ID NO: 482187 - DNA, 75 bp, synthetic construct
  source 1..75: mol_type = other DNA
aatggagttgatttttctgcaatcgagagaagtttaacaaataaaggtgaaaaaaatccagatgagcgtactgta

SEQ ID NO: 482188 - DNA, 75 bp, synthetic construct
  source 1..75: mol_type = other DNA
aaggtcgggattccggtaccaaaagagaacgaagctgtgctgacaccgcctgctgctccctctccggtggggctg

SEQ ID NO: 482189 - DNA, 75 bp, synthetic construct
  source 1..75: mol_type = other DNA
tcggtcataacgcatcggggattattcctgacaacaccaaaatcgaatttaaggatgccgccgaggggcagtctg

SEQ ID NO: 482190 - DNA, 75 bp, synthetic construct
  source 1..75: mol_type = other DNA
tacgcacaacgccaagtcaggttatatcgcgcagtcagggttataccgcgtgctggtctggccgtatctgtttaa

SEQ ID NO: 482191 - DNA, 75 bp, synthetic construct
  source 1..75: mol_type = other DNA
gcctggccggaactgccggatgacacgctgcggcagttgctgacacaggcattctttgtggcggatatctggggg

SEQ ID NO: 482192 - DNA, 75 bp, synthetic construct
  source 1..75: mol_type = other DNA
caatgacgaactccggctggatgacggcggtcgcggggaagacggtaaggacggttccgcgctgtggccgttcgg

SEQ ID NO: 482193 - DNA, 75 bp, synthetic construct
  source 1..75: mol_type = other DNA
cccgtgcagctgcgcgggaagatttgcgtgcgcgttatcttgcatggaaggagcactggcgtaaacccgacttac

SEQ ID NO: 482194 - DNA, 75 bp, synthetic construct
  source 1..75: mol_type = other DNA
gacgtgacggcaggtcttcctttgaagacctgattgcgtacacatctgtgcgggatgatgtgcaggaaaatgagc

SEQ ID NO: 482195 - DNA, 75 bp, synthetic construct
  source 1..75: mol_type = other DNA
ggtaagtgcagaagacctgatgagtgcgcacagggtaccaccacaaatgatggggatgatgcctaatagcaccgg

SEQ ID NO: 482196 - DNA, 75 bp, synthetic construct
  source 1..75: mol_type = other DNA
ccgccggtcaatttctcgggactggcaaaaagcctgcgcgccgccgttcaccacagctcgccgatttacgtgaag

SEQ ID NO: 482197 - DNA, 75 bp, synthetic construct
  source 1..75: mol_type = other DNA
tatctggtctttgccaacggctatcttgagaagcgcatgagcgtcaccggccagcttataaaactggaaacatca

SEQ ID NO: 482198 - DNA, 75 bp, synthetic construct
  source 1..75: mol_type = other DNA
ggtaagcagtgctgcagaagtgtatatccgcaaaatggagcgggcaggaaaagccacgcattcgctgggtctgaa

SEQ ID NO: 482199 - DNA, 75 bp, synthetic construct
  source 1..75: mol_type = other DNA
ttttaaggcggagcaacctaatcagaaatggctgacagatatcacggagttccacctccctgcaggtaaagtctg

SEQ ID NO: 482200 - DNA, 75 bp, synthetic construct
  source 1..75: mol_type = other DNA
cgttgtccgcgtttacgtcagaaattaatgctatcagtgccacgatcacaggtcagcttgacaccaactttaaaa

SEQ ID NO: 482201 - DNA, 75 bp, synthetic construct
  source 1..75: mol_type = other DNA
tcgttccgcgcccggacattgacccgcgtcttaaccatctgcaccgggtgaccacccgccgccgcgaatggccgg

SEQ ID NO: 482202 - DNA, 75 bp, synthetic construct
  source 1..75: mol_type = other DNA
gtgagaccatcaattatctttgcaacggctgaatatgtaaagcgtctgcgtgaagagtgcctgcgggagaataaa

SEQ ID NO: 482203 - DNA, 75 bp, synthetic construct
  source 1..75: mol_type = other DNA
caacagaaaagcatatccggggggcatggcgcatcttatgctccagttcaggataatgagtggacgccaccatca

SEQ ID NO: 482204 - DNA, 75 bp, synthetic construct
  source 1..75: mol_type = other DNA
cctggctgaatgaatccgccaccctgtttcgtcgcaagtattaccagaatggcgcgcacgcgggttacatcatgt

SEQ ID NO: 482205 - DNA, 75 bp, synthetic construct
  source 1..75: mol_type = other DNA
atggaagctattgtcggtggttgtcttttggtatctgccgccgatggcgagatcgaaaaagaagaaaccagcaag

SEQ ID NO: 482206 - DNA, 75 bp, synthetic construct
  source 1..75: mol_type = other DNA
ctgcagtgcggggcgtcgctcaaacgtattccggtgctcaagcagctgatcctgcaggccagccgcgaggcggcg

SEQ ID NO: 482207 - DNA, 75 bp, synthetic construct
  source 1..75: mol_type = other DNA
tattgcagaatttgaaaagaaaacactcagtgataacaacagtctcctgaacctcgatgaaagccttttactgct

SEQ ID NO: 482208 - DNA, 75 bp, synthetic construct
  source 1..75: mol_type = other DNA
acctttcacgcgacaaggttccccgtgaatttcacaacatggaaggtgctttcctcttaacagaatttggtctgg

SEQ ID NO: 482209 - DNA, 75 bp, synthetic construct
  source 1..75: mol_type = other DNA
agtggcacggtggttaaccgtccgacgttttttgcttttgcaaaaggcgcgggtgtgatgggggaagcgggacct

SEQ ID NO: 482210 - DNA, 75 bp, synthetic construct
  source 1..75: mol_type = other DNA
gtcattaaagacgtgattgctgatgcattcctgcaacagatcctgctgcgtccggctgaatacgacgttatcgcc

SEQ ID NO: 482211 - DNA, 75 bp, synthetic construct
  source 1..75: mol_type = other DNA
ggagcagcaacccaaagcggccacccgtgccacgcgtaagacccggagcgtgacaccggcaaaacgtggacgccc

SEQ ID NO: 482212 - DNA, 75 bp, synthetic construct
  source 1..75: mol_type = other DNA
cttcgagcgtctgatggaaggcgctaaactgctgaaatgttcagaatttggtgatgcgatcatcaagaacatgta

SEQ ID NO: 482213 - DNA, 75 bp, synthetic construct
  source 1..75: mol_type = other DNA
tcgcgcggtttatccccgctggcgcggggaacactttgccgctgtcagcattgctggcgcgtaatacggtttatc

SEQ ID NO: 482214 - DNA, 75 bp, synthetic construct
  source 1..75: mol_type = other DNA
tccccgctggcgcggggaacacctgccgactgaccgccgacgctttcgcgttaacggtttatccccgctggcgcg

SEQ ID NO: 482215 - DNA, 75 bp, synthetic construct
  source 1..75: mol_type = other DNA
gcgcggggaacactggctctgcaacagcagcacccatgaccacgtcggtttatccccgctggcgcggggaacacg

SEQ ID NO: 482216 - DNA, 75 bp, synthetic construct
  source 1..75: mol_type = other DNA
gcggtttatccccgctggcgcggggaacactggtgtgattccaattgccgcacggaacgccgcggtttatccccg

SEQ ID NO: 482217 - DNA, 75 bp, synthetic construct
  source 1..75: mol_type = other DNA
acgcggtttatccccgctggcgcggggaacacgataaatcgctcacgaagaataattctacccccggtttatccc

SEQ ID NO: 482218 - DNA, 75 bp, synthetic construct
  source 1..75: mol_type = other DNA
gattacaactgacagggagccggtttatccccgctggcgcggggaacacccgaacggctcggcgctctcataccc

SEQ ID NO: 482219 - DNA, 75 bp, synthetic construct
  source 1..75: mol_type = other DNA
ggttagcaaaaaaatgcctggatagtaaaagttttcagaaagaaataacaatcagttttgagaattcgcctcgtc

SEQ ID NO: 482220 - DNA, 75 bp, synthetic construct
  source 1..75: mol_type = other DNA
atcgtactgtctcgtcgtctggcggaagccggacactatccggcaattgatattgaagcgtcaatcagccgtgca

SEQ ID NO: 482221 - DNA, 75 bp, synthetic construct
  source 1..75: mol_type = other DNA
ttctgatctggcaaaaatcatggcccagatgtccatgatgcaggcagttaaggggattggttcggcgtttggctg

SEQ ID NO: 482222 - DNA, 75 bp, synthetic construct
  source 1..75: mol_type = other DNA
gccgaaatatgccggacaggacaaagtaaacccaggctctattattctctccgctgagatgatgctgcgccacat

SEQ ID NO: 482223 - DNA, 75 bp, synthetic construct
  source 1..75: mol_type = other DNA
caacgtacaccgattgaacatgtgctggacaccggcgtgcgcccaatcaatgccctgcttaccgttgggcgcggg

SEQ ID NO: 482224 - DNA, 75 bp, synthetic construct
  source 1..75: mol_type = other DNA
tcgagcgtgccggaaacggcatcagcggcggcggctcgattaccgcgttttataccgtgctcaccgaaggcgatg

SEQ ID NO: 482225 - DNA, 75 bp, synthetic construct
  source 1..75: mol_type = other DNA
gcctatgccacgcgcattgccgaagattttcgcgatcgtggtcagcatgtgttgctgattatggattccctcacc

SEQ ID NO: 482226 - DNA, 75 bp, synthetic construct
  source 1..75: mol_type = other DNA
aaagcctaaacccaggactccagccaaactcaagcaatgccagccacctgccgaacgttactgtccgctgccagg

SEQ ID NO: 482227 - DNA, 75 bp, synthetic construct
  source 1..75: mol_type = other DNA
tcgcccgcttgcaacgcaaagctgagcttaacccacagcgtgccgaaagtttttacggtggcggcgcggaaggct

SEQ ID NO: 482228 - DNA, 75 bp, synthetic construct
  source 1..75: mol_type = other DNA
aggacaaatctacgacctgtggagcaagaagccactcaatacgatgtcacagatgcgagatgtggcggaacgcct

SEQ ID NO: 482229 - DNA, 75 bp, synthetic construct
  source 1..75: mol_type = other DNA
cttcgaacgtctgatggaaggcgctaaactgctgaaatgttcagagtttggtgatgcgatcatcaagaacatgta

SEQ ID NO: 482230 - DNA, 75 bp, synthetic construct
  source 1..75: mol_type = other DNA
ggaaggcgcaatcaatgcgaagaccgtaacctatgacttcgaacgtctgatggaaggcgctaaactgatgaaatg

SEQ ID NO: 482231 - DNA, 75 bp, synthetic construct
  source 1..75: mol_type = other DNA
atctgcctgcgtccggtacgttactatcagggcactccaagcccggttaaacaccctgaactgaccgatatggtt

SEQ ID NO: 482232 - DNA, 75 bp, synthetic construct
  source 1..75: mol_type = other DNA
gtgatatcgccaaaaccggtttatccccgctggcgcggggaacacactgtcatctctctcccactgggagataga

SEQ ID NO: 482233 - DNA, 75 bp, synthetic construct
  source 1..75: mol_type = other DNA
tcaaggtaaagctgataactatcctgctctacagtcaattatttccacaacccctctgaatctcaaagagataaa

SEQ ID NO: 482234 - DNA, 75 bp, synthetic construct
  source 1..75: mol_type = other DNA
tgctcaaaagtcacgaccgctggctgcgttatggggagacggttccacctcatcttctgacggtcagaattttag

SEQ ID NO: 482235 - DNA, 75 bp, synthetic construct
  source 1..75: mol_type = other DNA
gcccgatgccatcctcaccgagtcagggctgaaaatcaccccgctggatgcggcggtgccggatcgggcgcaggc

SEQ ID NO: 482236 - DNA, 75 bp, synthetic construct
  source 1..75: mol_type = other DNA
ctggcgtaataatcttaagctgggatccggtaaatatcgaccgttacgcacagttgatgtcagtctgtacaaaaa

SEQ ID NO: 482237 - DNA, 75 bp, synthetic construct
  source 1..75: mol_type = other DNA
cgcaaggttccgtcaacagcgccagtaaagtttatccctgagagctggaaaaagttggtaataacgccatcgggt

SEQ ID NO: 482238 - DNA, 75 bp, synthetic construct
  source 1..75: mol_type = other DNA
aaatgagtagcagggacctggcaaaattctccggcacacgtcgttatgccgtgctggtttgtattatctcagaag

SEQ ID NO: 482239 - DNA, 75 bp, synthetic construct
  source 1..75: mol_type = other DNA
ggcagctatctcgctgtggaataccatctatatggaaagagcggtcgatgccctgaagcgtaaagggatgaagat

SEQ ID NO: 482240 - DNA, 75 bp, synthetic construct
  source 1..75: mol_type = other DNA
gtacatccgcgacgaaacctattcagccgcgcttgctgagctggtaaatgcgcagggaaaaagaccactggcggc

SEQ ID NO: 482241 - DNA, 75 bp, synthetic construct
  source 1..75: mol_type = other DNA
gttaaaggctcacgccgctacaaaaattttgatgattacctcattcccgaaaaggactttgacaaactcacaccg

SEQ ID NO: 482242 - DNA, 75 bp, synthetic construct
  source 1..75: mol_type = other DNA
tattcagctgcactggccgagttggttaatgcccagaagaagcggcctctggcgggattctggggcgatggaaca

SEQ ID NO: 482243 - DNA, 75 bp, synthetic construct
  source 1..75: mol_type = other DNA
cgaaaagtaccgccttctgcgccaaccgggttcatcccggaaagctggagaaaagtggtgatcacgccctccggc

SEQ ID NO: 482244 - DNA, 75 bp, synthetic construct
  source 1..75: mol_type = other DNA
tccccgttaggctgggaacacatcaatctgacaggcgattatatatggaaaagcaaccggataccggcttccggt

SEQ ID NO: 482245 - DNA, 75 bp, synthetic construct
  source 1..75: mol_type = other DNA
ctgtttattcaaggaaaggctgagcgatatccagggcttcagtccgtcatatcaacaaccagcctgaatatcaaa

SEQ ID NO: 482246 - DNA, 75 bp, synthetic construct
  source 1..75: mol_type = other DNA
ccccgctggcgcggggaacactgactaaatcagcgcccggtccgggatattgtcggtttatccccgctggcgcgg

SEQ ID NO: 482247 - DNA, 75 bp, synthetic construct
  source 1..75: mol_type = other DNA
atgaggtgcaccatcagaagcgagatcggtttatccccgctggcgcggggaactcgacgtacagattggctgcgg

SEQ ID NO: 482248 - DNA, 75 bp, synthetic construct
  source 1..75: mol_type = other DNA
ggggaacaccttaccacccagacactgatactccacataaacggtttatccccgctggcgcggggaacactcacg

SEQ ID NO: 482249 - DNA, 75 bp, synthetic construct
  source 1..75: mol_type = other DNA
gctggcgcggggaacacgcgtgtcttcctgcggcgctggctcaccctggcggtttatccccgctggcgcggggaa

SEQ ID NO: 482250 - DNA, 75 bp, synthetic construct
  source 1..75: mol_type = other DNA
gggaactcgcgaccgctcagaaattccagacccgatccaaacggtttatccccgctggcgcggggaactctcaac

SEQ ID NO: 482251 - DNA, 75 bp, synthetic construct
  source 1..75: mol_type = other DNA
ggtttatccccgctggcgcggggaacacattgtccagggtatgtccggtcaggggaatagcggtttatccccgct

SEQ ID NO: 482252 - DNA, 75 bp, synthetic construct
  source 1..75: mol_type = other DNA
gacacctgcggcgcagacgctcagcgatgcgctggacaccatcagggaaatgtaccgtaaacaacttcgtaaagt

SEQ ID NO: 482253 - DNA, 75 bp, synthetic construct
  source 1..75: mol_type = other DNA
atattttactgtcggtcaggcactactgcatgccagagaatccggtgaagatccctgggcagcgatagaagatgt

SEQ ID NO: 482254 - DNA, 75 bp, synthetic construct
  source 1..75: mol_type = other DNA
ggtgaacaaccttcccgtctggcatggctgctacagcctccgggtaaaataaacggtaaaaatgtgctgcaacat

SEQ ID NO: 482255 - DNA, 75 bp, synthetic construct
  source 1..75: mol_type = other DNA
gtgccctggcgttttgctggctctcgcgcggtttatccccgctggcgcggggaacactccgcatcgctcatgcca

SEQ ID NO: 482256 - DNA, 75 bp, synthetic construct
  source 1..75: mol_type = other DNA
ccgccgcggactcacgagcaggccatcacagaccggtttatccccgctggcgcggggaacactctaaacataacc

SEQ ID NO: 482257 - DNA, 75 bp, synthetic construct
  source 1..75: mol_type = other DNA
atgaaacgtgctgtcgttgtattcagtgggggccaggactctacaacctgtctggtgcaggcattgcaacactat

SEQ ID NO: 482258 - DNA, 75 bp, synthetic construct
  source 1..75: mol_type = other DNA
gagcaaagagcatatcattgatgttcacctcagagagtatggcagaacagaaaaacaaaaatgcacctttgtttt

SEQ ID NO: 482259 - DNA, 75 bp, synthetic construct
  source 1..75: mol_type = other DNA
cggccttgccacttccagtctccgtacagcgcagatggcacaggataaccagatggcgagatacggggtaaaccg

SEQ ID NO: 482260 - DNA, 75 bp, synthetic construct
  source 1..75: mol_type = other DNA
ctggtcgtgctatcgcttccgactgcgcagacggtatgaccaagctgattttcgacaaagaatctcactgtgtga

SEQ ID NO: 482261 - DNA, 75 bp, synthetic construct
  source 1..75: mol_type = other DNA
tcgcaaggagagatttgttgaccggttaccaaaagctttctaatggaaagatttcttccataaaagggcgctcag

SEQ ID NO: 482262 - DNA, 75 bp, synthetic construct
  source 1..75: mol_type = other DNA
aaagaaaaattgctggcggtacgtaaagaattacttactggataccagatccccaaaagtaattatattgttacg

SEQ ID NO: 482263 - DNA, 75 bp, synthetic construct
  source 1..75: mol_type = other DNA
gtttgtttataaaggcgtaagagtcagggaaaatctgggggttcctgacacagcaaaaaacaggcgcgttgcagg

SEQ ID NO: 482264 - DNA, 75 bp, synthetic construct
  source 1..75: mol_type = other DNA
tcagctttttagagatgtacttagttcagggccatttagtcaacatggtcaagtattatctacaggcctaaagga

SEQ ID NO: 482265 - DNA, 75 bp, synthetic construct
  source 1..75: mol_type = other DNA
aaaactgggcacgaccagccatccgggcgatgatccggtgcgattcagaccctggcccgggatgggattcccggt

SEQ ID NO: 482266 - DNA, 75 bp, synthetic construct
  source 1..75: mol_type = other DNA
agtctgggctgctacgaagggctgaaatgtgctgcgttaccgcctgctgaagacggacattatcgcttcgaataa

SEQ ID NO: 482267 - DNA, 75 bp, synthetic construct
  source 1..75: mol_type = other DNA
cgatccgaaagttatcccgtctatcgcttataccgaaccagaagttgcatgggtgggtctgaccgagaaagaagc

SEQ ID NO: 482268 - DNA, 75 bp, synthetic construct
  source 1..75: mol_type = other DNA
cggcggcgagctgttgggtgaaatcggtctggcaattgaaatgggttgcgacgctgaagacatcgcgctgaccat

SEQ ID NO: 482269 - DNA, 75 bp, synthetic construct
  source 1..75: mol_type = other DNA
aagacatcgcactgaccatccacgcgcacccgactctgcacgagtctgtgggcctggcggcagaagtgttcgaag

SEQ ID NO: 482270 - DNA, 75 bp, synthetic construct
  source 1..75: mol_type = other DNA
gtcagatgggtaactccgaagtaggccacgttaacctgggtgccggccgcatcgtgtatcaggacctgactcgtc

SEQ ID NO: 482271 - DNA, 75 bp, synthetic construct
  source 1..75: mol_type = other DNA
taaaactgtaaaagttgctttcactggcacaactactggtcaaaatactgaattaggtacttctggtagcactgg

SEQ ID NO: 482272 - DNA, 75 bp, synthetic construct
  source 1..75: mol_type = other DNA
ttgtagctatggcgatgttttcttttggtgcccaggctaacggtcagggtgttgttaacttcaaaggttctgtaa

SEQ ID NO: 482273 - DNA, 75 bp, synthetic construct
  source 1..75: mol_type = other DNA
ctacatcaatactcatcagtggcctggcaaagcggcgattggtcgtctgaaaagtgaggaactggcgcaatataa

SEQ ID NO: 482274 - DNA, 75 bp, synthetic construct
  source 1..75: mol_type = other DNA
aaacactggcggcgatcccattagtgcgcgcgctacgtcatcgttatcctgatttgccgattaccgtcacaacca

SEQ ID NO: 482275 - DNA, 75 bp, synthetic construct
  source 1..75: mol_type = other DNA
ccatgacgccaaccggttcggagcgcgtacaatcggcgtttgggaaggatgttcaacacgtttatctgccttacg

SEQ ID NO: 482276 - DNA, 75 bp, synthetic construct
  source 1..75: mol_type = other DNA
tgctgctctaactactccacaggggcagggtagagtaacctttaacggaactgttgttgatgctccatgcagcat

SEQ ID NO: 482277 - DNA, 75 bp, synthetic construct
  source 1..75: mol_type = other DNA
aatgccgattttgacggcttcgcgcgtaagaaagtggttaacgtcgatttcgtgatgctgaccgaatacgctgcc

SEQ ID NO: 482278 - DNA, 75 bp, synthetic construct
  source 1..75: mol_type = other DNA
tgagtccgtgggtggacaactgctgatcaccgctgaccacggtaacgctgaacagatgcgcgatccggcaacggg

SEQ ID NO: 482279 - DNA, 75 bp, synthetic construct
  source 1..75: mol_type = other DNA
aattcgtgaaagcgaccgttatccgtgctgaaggccagccagacgcggcaatggaagacggcgatgcgctgattt

SEQ ID NO: 482280 - DNA, 75 bp, synthetic construct
  source 1..75: mol_type = other DNA
aaagacaacaatcacgaacagatagaacttcttaacagaagactatctgaaagtgtcccatgcatgccccataag

SEQ ID NO: 482281 - DNA, 75 bp, synthetic construct
  source 1..75: mol_type = other DNA
gcgaatgcacttaaccgttaccagtcagtaattaaaaacatgttaccaatgttaggtgaaaaaaaactggtttca

SEQ ID NO: 482282 - DNA, 75 bp, synthetic construct
  source 1..75: mol_type = other DNA
gcaataaaaaccggcgttttcgactatgcaaaacagtttccctcctcacacaatctggaaaaatttggtgaggcc

SEQ ID NO: 482283 - DNA, 75 bp, synthetic construct
  source 1..75: mol_type = other DNA
tccgtctttcgcagcgggccacgctgggtaaaacggcaggggaagcatgcagccggctcctgatgacactggaaa

SEQ ID NO: 482284 - DNA, 75 bp, synthetic construct
  source 1..75: mol_type = other DNA
gccccgcagtacaacatcacgatccataacgacggcacgaacgggcagatcggtccggctgccctgaaggtggtt

SEQ ID NO: 482285 - DNA, 75 bp, synthetic construct
  source 1..75: mol_type = other DNA
atatgagaaatggcttcaacggcctggcggcaaaggtgcagacgacgctgaaagacgatccgatgtcaggtcacg

SEQ ID NO: 482286 - DNA, 75 bp, synthetic construct
  source 1..75: mol_type = other DNA
gcatgacgcgccgggcgttaaaccgggtgatgtgattatcgccgttgacccgcgttacttccgtccggctgaagt

SEQ ID NO: 482287 - DNA, 75 bp, synthetic construct
  source 1..75: mol_type = other DNA
aaaacaggcgttactggcaacagcttgaagtggcgcagggcgactggaaaaacggtgccctgcgtgcatttcaga

SEQ ID NO: 482288 - DNA, 75 bp, synthetic construct
  source 1..75: mol_type = other DNA
cctgtttatcttccgtggccgacggggtgacaccgttaaaattctttgggctgatggtctgtgcctgttcaccaa

SEQ ID NO: 482289 - DNA, 75 bp, synthetic construct
  source 1..75: mol_type = other DNA
atgcgtaagtctttcaacgggctgggtgaacaggtacagcatgtgctgaatgataatcccttctccggtcacctg

SEQ ID NO: 482290 - DNA, 75 bp, synthetic construct
  source 1..75: mol_type = other DNA
tattgtcaattatggtacaactgtaaaatggggtataaacggggtttccggagatgaccttcataaagttgggga

SEQ ID NO: 482291 - DNA, 75 bp, synthetic construct
  source 1..75: mol_type = other DNA
ctcggaacccgtgattacagcacgcattcatggtatgccggtgcagaagcgggctaccgctatcatgtcactgag

SEQ ID NO: 482292 - DNA, 75 bp, synthetic construct
  source 1..75: mol_type = other DNA
gatgaaaaatgcgccaaaaactctgaaaaaaactgcgcaaattcggcagaaacgaaacgcaacagcagatcgggc

SEQ ID NO: 482293 - DNA, 75 bp, synthetic construct
  source 1..75: mol_type = other DNA
tgggagaacagggagttctcactcaacaatctgaatcttaataatgcggacttcagtctgtcccgtaatgcattt

SEQ ID NO: 482294 - DNA, 75 bp, synthetic construct
  source 1..75: mol_type = other DNA
ggactcggaacccgtgattacagtacgcattcatggtatgccggtgctgaagcaggctaccgctgtcatgtcact

SEQ ID NO: 482295 - DNA, 75 bp, synthetic construct
  source 1..75: mol_type = other DNA
tgtatccggtaaacagtttgcatggaaggaccagggaatgcatctgtccatgaaggacaaggactacaatccgct

SEQ ID NO: 482296 - DNA, 75 bp, synthetic construct
  source 1..75: mol_type = other DNA
caccaaacgcctggaggaaggtcagtttatctggcctgcggtgcgtgacggtaagatatccattacccgctcgca

SEQ ID NO: 482297 - DNA, 75 bp, synthetic construct
  source 1..75: mol_type = other DNA
aaattgtgctaatgggcggcgcttacggtacaggcaacttcacgccatctgccgagttcaacatctttgccgacc

SEQ ID NO: 482298 - DNA, 75 bp, synthetic construct
  source 1..75: mol_type = other DNA
ccgccaataccaaagtcggcatcactattgataccgactggttctggggattagtcgaagagtgcgttcgcggct

SEQ ID NO: 482299 - DNA, 75 bp, synthetic construct
  source 1..75: mol_type = other DNA
cccttgctatgggcgcaccgtctgcgacgagctgggcgttcttggcaagcccgccaataccaaagtcggcatcac

SEQ ID NO: 482300 - DNA, 75 bp, synthetic construct
  source 1..75: mol_type = other DNA
atggaaagagaatcacagcctgcacgtaccgggctgacgcggggcctggcccttaacaacgatatctggcgggtc

SEQ ID NO: 482301 - DNA, 75 bp, synthetic construct
  source 1..75: mol_type = other DNA
actggcaatgctcctcgataagctggactggcgtcagccaaaaacatcccaccgtaactcactgacaatgttgta

SEQ ID NO: 482302 - DNA, 75 bp, synthetic construct
  source 1..75: mol_type = other DNA
ggcaagcgatggcgatatcactctggtgccggttggtccgctttcaaatatcgcggtggcaatgcgtatgcaacc

SEQ ID NO: 482303 - DNA, 75 bp, synthetic construct
  source 1..75: mol_type = other DNA
aaagagtgtgctggcccgtaaagatgaactgattcaggcactgacgctgctggatgtaaaacagcaggagcttca

SEQ ID NO: 482304 - DNA, 75 bp, synthetic construct
  source 1..75: mol_type = other DNA
tttatctggcctgctgtgcgtgacggcaaggtatccattacccgctcacaactggcaatgctcctcgataagctg

SEQ ID NO: 482305 - DNA, 75 bp, synthetic construct
  source 1..75: mol_type = other DNA
actggcaatgctcctcgataagctggactggcgtcagccaaaaacatcccgccgtaactcactgacaatattgta

SEQ ID NO: 482306 - DNA, 75 bp, synthetic construct
  source 1..75: mol_type = other DNA
cgacatcatgaacttcactctcaaaacgcagttcgaaaactacggccttgctggcggcccggtgcatgacgccac

SEQ ID NO: 482307 - DNA, 75 bp, synthetic construct
  source 1..75: mol_type = other DNA
cctgttcatcttctgtggccgacggggtgacacgattaaaatcctgtgggctgatgctgatggtctgtgcctgtt

SEQ ID NO: 482308 - DNA, 75 bp, synthetic construct
  source 1..75: mol_type = other DNA
tggatgataaccccttctccggtcacctgtttatcttccgtggccgacggggagacacgattaaaatcctctggg

SEQ ID NO: 482309 - DNA, 75 bp, synthetic construct
  source 1..75: mol_type = other DNA
agccataccttaaaaccgctacagccttttgctttcgctgcggatcaggtggtaaaagcgaaactgactgaaggt

SEQ ID NO: 482310 - DNA, 75 bp, synthetic construct
  source 1..75: mol_type = other DNA
gcgtaccgaatatccgtcaggttatgcctttgccacgtggactctggcggcgggcgtctgcctgctggctgtgtg

SEQ ID NO: 482311 - DNA, 75 bp, synthetic construct
  source 1..75: mol_type = other DNA
gctgattttcggcattttacaaggtgcgtctaacgctggttactggctgctgtcgattactgataagcatctcta

SEQ ID NO: 482312 - DNA, 75 bp, synthetic construct
  source 1..75: mol_type = other DNA
gagtggtgtttgtgatcagcggggcgtggcaactgggtgataaactgttgacctccgaccagggcgcgtgctggt

SEQ ID NO: 482313 - DNA, 75 bp, synthetic construct
  source 1..75: mol_type = other DNA
actactgaccagggagcgtgctggtatgatggcaaacacaccctgcggcttttacaaccgcaaggtaaactgtta

SEQ ID NO: 482314 - DNA, 75 bp, synthetic construct
  source 1..75: mol_type = other DNA
tttgcaaccgcaaggcaaactgctgttcagtgaaattaactggctggcaggctattctccggatcaagttcagtg

SEQ ID NO: 482315 - DNA, 75 bp, synthetic construct
  source 1..75: mol_type = other DNA
gaacttgataaattcagagaatactactggaaattagctcagcaagaaaaaatgaactacagcgataaagctgga

SEQ ID NO: 482316 - DNA, 75 bp, synthetic construct
  source 1..75: mol_type = other DNA
tatcagttgtctggagaaacaggaagagccaccatcgttgcttcgtctaaataatcggatcaaacagctactccc

SEQ ID NO: 482317 - DNA, 75 bp, synthetic construct
  source 1..75: mol_type = other DNA
tattccggctttcatggcatcgttataccggggacgctgagggactctatctttgtgctggaaggtcttctggaa

SEQ ID NO: 482318 - DNA, 75 bp, synthetic construct
  source 1..75: mol_type = other DNA
gttgagtcacacggctggccgacattctatcttttctccgtcgccgccgccgtacctgggcttattttactgctg

SEQ ID NO: 482319 - DNA, 75 bp, synthetic construct
  source 1..75: mol_type = other DNA
ttcaacagccgcgttcagccatattgctgatcctgggttttgcttccgggctaccgctcgccctgacatccggca

SEQ ID NO: 482320 - DNA, 75 bp, synthetic construct
  source 1..75: mol_type = other DNA
attctgcggttccccctgaaacgactgagcaaaatgatcagtgatctactccctccggtggatttaacggagttg

SEQ ID NO: 482321 - DNA, 75 bp, synthetic construct
  source 1..75: mol_type = other DNA
ctcgattccggcactgtgtggttttgcgggcggcgtgctcggtggtgtcttctcggattatctgatcaaacgcgg

SEQ ID NO: 482322 - DNA, 75 bp, synthetic construct
  source 1..75: mol_type = other DNA
cgcagcagattatgacgttgcgtcaggaagggacagacagcactgaactgcaacagcaactgcgaacacatcagg

SEQ ID NO: 482323 - DNA, 75 bp, synthetic construct
  source 1..75: mol_type = other DNA
ccccagcggcaccggtaaaaccgaaactgcgctcacactggccgacaccctgtttggtggtgaaaaatcccttat

SEQ ID NO: 482324 - DNA, 75 bp, synthetic construct
  source 1..75: mol_type = other DNA
ccataccattatcggcgcgggtaatcaggcgggcggcgcggatgcggcgaacctgctgaaaccggcgctggcaag

SEQ ID NO: 482325 - DNA, 75 bp, synthetic construct
  source 1..75: mol_type = other DNA
actgcgcaccatcgcggcgaccacgtggagcgaatacaaacagtattttgagcgcgacgccgcgctggagcgccg

SEQ ID NO: 482326 - DNA, 75 bp, synthetic construct
  source 1..75: mol_type = other DNA
cagcaggccgtgcatcataagcctgcccgactgcggcttggctgggataaggaagacggcattgtgctggaattt

SEQ ID NO: 482327 - DNA, 75 bp, synthetic construct
  source 1..75: mol_type = other DNA
gacaccttaccccgcccggtccgcgaacgtcctcaactttctgaaccgctggcagcgcttatccgacaggcgtgg

SEQ ID NO: 482328 - DNA, 75 bp, synthetic construct
  source 1..75: mol_type = other DNA
cacgctggaaaaatatgcagcaggttaacgagtgtgggcggcgagctgttgcgcattatccgggtatggtgtact

SEQ ID NO: 482329 - DNA, 75 bp, synthetic construct
  source 1..75: mol_type = other DNA
tggaggcgcttcaggcctcgggaatcgactacaccatctttttctacaacccgaacattcatcctcagaaagagt

SEQ ID NO: 482330 - DNA, 75 bp, synthetic construct
  source 1..75: mol_type = other DNA
atattgtggctgtgtgtattctctgcgcgataccaatctacaccgcaaatctcagggacgccctcttatcaaaat

SEQ ID NO: 482331 - DNA, 75 bp, synthetic construct
  source 1..75: mol_type = other DNA
gctggcaggcatgtcatgagatgtttgcgcgtaaagggcttatgctgcagaaacagcatcatggtctcgtgattg

SEQ ID NO: 482332 - DNA, 75 bp, synthetic construct
  source 1..75: mol_type = other DNA
tcttcagaaaaatggaagtgttcatttcagggatacgcggacaggaaaaaatgtctgtacggattacggagatcg

SEQ ID NO: 482333 - DNA, 75 bp, synthetic construct
  source 1..75: mol_type = other DNA
acatgattaaagcggaaattgagaaggaaatgcatattgccagccttcgaaaaatgcgacgtacatcaatcaact

SEQ ID NO: 482334 - DNA, 75 bp, synthetic construct
  source 1..75: mol_type = other DNA
ttaaaagatgggtcctcgcccggctttacgcacgatataccgccgctgacaccgtgctttgcgaactgctaccgg

SEQ ID NO: 482335 - DNA, 75 bp, synthetic construct
  source 1..75: mol_type = other DNA
acgctgacgttgacggcatgctggatactctgcgtaaacagcaggcaccggggaaagaaaaagacggcgctgttg

SEQ ID NO: 482336 - DNA, 75 bp, synthetic construct
  source 1..75: mol_type = other DNA
aagcgctgcatcactaccgggatgcttctcagagctggctatcacttcgcaacgagcaaagtacagcccaactac

SEQ ID NO: 482337 - DNA, 75 bp, synthetic construct
  source 1..75: mol_type = other DNA
gcgcattattcggaactcaatgctccagaactgcttgagtcctgccgtgaaatccttgatgaatcaggtttatcg

SEQ ID NO: 482338 - DNA, 75 bp, synthetic construct
  source 1..75: mol_type = other DNA
cttcagccagtttcaccccggcacaacataaagttttcctggcccgccttaaccgacttaatgaaaaaggagtgt

SEQ ID NO: 482339 - DNA, 75 bp, synthetic construct
  source 1..75: mol_type = other DNA
gcgaactgttcgaagaacaggctaaacgtcgcgtagttgttggcctgctgctgggcgaagttatccgcaccaacg

SEQ ID NO: 482340 - DNA, 75 bp, synthetic construct
  source 1..75: mol_type = other DNA
cgcgagctgaagagcgccatccgtaaccgcgttaagtctcaggcgattgaaggtctggtaaaagctaacgacatc

SEQ ID NO: 482341 - DNA, 75 bp, synthetic construct
  source 1..75: mol_type = other DNA
agggactgttaagctggcttttactggcccgatagttaatggacattctgatgagctagatacaaatggtggtac

SEQ ID NO: 482342 - DNA, 75 bp, synthetic construct
  source 1..75: mol_type = other DNA
ttacagcttttaaacaaggtcaagcagctaaaaacggtaaggttcaattatcttttactgggccacaagtaacgg

SEQ ID NO: 482343 - DNA, 75 bp, synthetic construct
  source 1..75: mol_type = other DNA
tttcaaaaagttttcttgaaaatgatggtcgatccaagccaatgaacttggatattgaattagttaattgtgaca

SEQ ID NO: 482344 - DNA, 75 bp, synthetic construct
  source 1..75: mol_type = other DNA
agtagctttgattttcactttcatttcattttttacgctaaaggaaaaacaccatacaaaaataaacaccgataa

SEQ ID NO: 482345 - DNA, 75 bp, synthetic construct
  source 1..75: mol_type = other DNA
cagtttaagtgaagagacttcaaaaacgccccctctaagccccgagttactgaagaattccccttactcgtcaat

SEQ ID NO: 482346 - DNA, 75 bp, synthetic construct
  source 1..75: mol_type = other DNA
ttagcggcagtattgagcgaaaaacggctgttgcagcaactcattgtgctggattcgctgggctacagccgctgg

SEQ ID NO: 482347 - DNA, 75 bp, synthetic construct
  source 1..75: mol_type = other DNA
aagctctcaacgattaccgcgcggcgataaaaagctggctgacactacgtaatgtgcaaagtaccagccagcttc

SEQ ID NO: 482348 - DNA, 75 bp, synthetic construct
  source 1..75: mol_type = other DNA
tgcagccgtcgtttatggtgacccatatcggtgggctggatgcggtgcctgataccgtgctcaatctgccggata

SEQ ID NO: 482349 - DNA, 75 bp, synthetic construct
  source 1..75: mol_type = other DNA
attttgcgtgaagtacagccggatgaagtgtacaacctgggcgcaatgagccacgttgcggtctcttttgagtca

SEQ ID NO: 482350 - DNA, 75 bp, synthetic construct
  source 1..75: mol_type = other DNA
aatgagggtgatgcttcggctaaaatcatggcagagaagtccctaaagtctttgatccctggggatatagacagg

SEQ ID NO: 482351 - DNA, 75 bp, synthetic construct
  source 1..75: mol_type = other DNA
actgggacatcctgtcgatggacgtaaaggtgtgcaacaactggctattcagctggatgagacctggaaagccgt

SEQ ID NO: 482352 - DNA, 75 bp, synthetic construct
  source 1..75: mol_type = other DNA
gccttcagtcgtcgagatggctgatgaattactggctgaagatggctgcctgaacttctttgccggtccgacgga

SEQ ID NO: 482353 - DNA, 75 bp, synthetic construct
  source 1..75: mol_type = other DNA
ctcgctggcggaaccgatgtgctgcattattggcgcttatcatgccaattatcacaccacgcaatatgtttatga

SEQ ID NO: 482354 - DNA, 75 bp, synthetic construct
  source 1..75: mol_type = other DNA
tatttccgggaatggtatcacgcaacatgctgcagccggtgcgctggctcaggtggtggggagtggtgcatttcg

SEQ ID NO: 482355 - DNA, 75 bp, synthetic construct
  source 1..75: mol_type = other DNA
gtctggctgctttgctggatactgaagaaaaacccgcagcatatgccagccaacttgaggatcttcgtgagcgtc

SEQ ID NO: 482356 - DNA, 75 bp, synthetic construct
  source 1..75: mol_type = other DNA
actgacgctctggctccttttctttgcgcaccatacgggcttgaggcggcaatgaaaatattacgaaccgctgta

SEQ ID NO: 482357 - DNA, 75 bp, synthetic construct
  source 1..75: mol_type = other DNA
atacgaagccgcatccgtcttttgctctctcagggggttatccacaccaaacaaccccccctgaatacaaaagaa

SEQ ID NO: 482358 - DNA, 75 bp, synthetic construct
  source 1..75: mol_type = other DNA
tactccggtaagtctctggaggaatataaagccgaatatccattaatgctgctactgaccttaaatgaagttgag

SEQ ID NO: 482359 - DNA, 75 bp, synthetic construct
  source 1..75: mol_type = other DNA
aggcggcttcttcggctgcaacagccgcatccgtccatgcgcagacggtggagaagagcgcacaggctcatgaac

SEQ ID NO: 482360 - DNA, 75 bp, synthetic construct
  source 1..75: mol_type = other DNA
aaaccgcttgatggccttccctcccccgatacgaccgaaacaggtgcgctgatcaccccgccttttaacccgttg

SEQ ID NO: 482361 - DNA, 75 bp, synthetic construct
  source 1..75: mol_type = other DNA
ttatagctggtatcctgctccccattttattaaatggctgctcatcaggaaagaacaaagctcatcttgacccca

SEQ ID NO: 482362 - DNA, 75 bp, synthetic construct
  source 1..75: mol_type = other DNA
acggtaagctgattgcagatgaaatgagtcctgtagagtgggagcaaatattcattcgcataacaaaaggtgggt

SEQ ID NO: 482363 - DNA, 75 bp, synthetic construct
  source 1..75: mol_type = other DNA
ctggacagaactcgggatgccggagtcgctgtgggtctgccgggtcaaagagttcggcccgctgattgtctctat

SEQ ID NO: 482364 - DNA, 75 bp, synthetic construct
  source 1..75: mol_type = other DNA
ttacagtttcgttcgccgtatctgtctgcttggtggcgaatctaccggtaaaagcacgctttcaaaagcgctggc

SEQ ID NO: 482365 - DNA, 75 bp, synthetic construct
  source 1..75: mol_type = other DNA
ttccggagtcatttcaacgaattaaagaagaagaagaagcgaacaggcctgatcctaactggtttgcacatttac

SEQ ID NO: 482366 - DNA, 75 bp, synthetic construct
  source 1..75: mol_type = other DNA
tttattaaatggctgctcatcaggaaagaacaaagctcatcttgaccccaaagttttccctcctcaagtagaggg

SEQ ID NO: 482367 - DNA, 75 bp, synthetic construct
  source 1..75: mol_type = other DNA
atgaaaaagatcctgacaaccccgatcaaagctgaagatctgcaagatattcgcgtcggcgatgtgatctacctg

SEQ ID NO: 482368 - DNA, 75 bp, synthetic construct
  source 1..75: mol_type = other DNA
tgtcacgacaggtaaggcaaattttcgttctttcgctacctccgtgatttcagatcttagcagaatagcattaaa

SEQ ID NO: 482369 - DNA, 75 bp, synthetic construct
  source 1..75: mol_type = other DNA
atataacaatcagcgtctgcaacttgaacgtgactatgcagataaatcccgtggaatgtcagatcatgtttttca

SEQ ID NO: 482370 - DNA, 75 bp, synthetic construct
  source 1..75: mol_type = other DNA
acagactggcgtaaaactggtagtcggcaaaggcggaatggggccactgaccgaagaaggttgccagaaatttaa

SEQ ID NO: 482371 - DNA, 75 bp, synthetic construct
  source 1..75: mol_type = other DNA
tgatacccacggcaacaacctgatagccgaaaacaaaaagctgttcgccgaacgccgcgatcccatcgtggaaga

SEQ ID NO: 482372 - DNA, 75 bp, synthetic construct
  source 1..75: mol_type = other DNA
ctcaacggcaaagcgattttccacgcaggccccatcgtgcgcaaaaacggcgacaaatgggagatggtgtccgtc

SEQ ID NO: 482373 - DNA, 75 bp, synthetic construct
  source 1..75: mol_type = other DNA
caccgccgccggaaaatcggcagaaagtgccgcatcgtctgcttcaacagccacaacgaaggctggcgaagccac

SEQ ID NO: 482374 - DNA, 75 bp, synthetic construct
  source 1..75: mol_type = other DNA
tgaacaggccagcgcagcagcgaggtcagcttccgcagcgaagacatccgaaacgaacgcgaaagcgtcggaaac

SEQ ID NO: 482375 - DNA, 75 bp, synthetic construct
  source 1..75: mol_type = other DNA
aaattgcagacagcaaggaaaattgctggtgtggcgtttgatggctctgccgatataactttgactgcggctaac

SEQ ID NO: 482376 - DNA, 75 bp, synthetic construct
  source 1..75: mol_type = other DNA
taatgacggcggcagcacatatttcatgctaacagcatcaggagatacgttaggttcatggaacagtttgcgacc

SEQ ID NO: 482377 - DNA, 75 bp, synthetic construct
  source 1..75: mol_type = other DNA
ttgggccggaagtcatgcaggcggtttacaacctggggaaaagggctgcagaagattttatgcaacaacagtccc

SEQ ID NO: 482378 - DNA, 75 bp, synthetic construct
  source 1..75: mol_type = other DNA
ggaatggtatcacgcaacatgctgcagccggagcactggctcaggtggttggcagtggtgcatttcgtggaggtg

SEQ ID NO: 482379 - DNA, 75 bp, synthetic construct
  source 1..75: mol_type = other DNA
ttgatggtactgcaaatattaatttgccaggtgttaatacgactggtaatcagaatacaacaggtaatgcggcta

SEQ ID NO: 482380 - DNA, 75 bp, synthetic construct
  source 1..75: mol_type = other DNA
atggtatggtcgctgaaggagtgatgtatgagcgtttggttgtaccactcattcatcatattcagcaattgacca

SEQ ID NO: 482381 - DNA, 75 bp, synthetic construct
  source 1..75: mol_type = other DNA
ccgtaatgatggggcgaacacatatttcctgctaacagcatcaggagacacattaggttcatggaacggtttgcg

SEQ ID NO: 482382 - DNA, 75 bp, synthetic construct
  source 1..75: mol_type = other DNA
ggaatgttctggcaatatcaaaacaatgaacgagccatccactcaataatgatgagtaataagggcgatgatttg

SEQ ID NO: 482383 - DNA, 75 bp, synthetic construct
  source 1..75: mol_type = other DNA
ccagaatgttcagcctgaactggtaacggttgaccataacgatcagtcaggagagcctcgtctgcgtcttaacta

SEQ ID NO: 482384 - DNA, 75 bp, synthetic construct
  source 1..75: mol_type = other DNA
agcaaacgcaatattcgcaagattgaacgagcgctcgacaagctggatcggatcgaaggtgttctgtacgagatt

SEQ ID NO: 482385 - DNA, 75 bp, synthetic construct
  source 1..75: mol_type = other DNA
gtaaacattgctggtaaccagaacacaaccggtaatgcagcgacagcgaccaagttacaaaccgctagaactata

SEQ ID NO: 482386 - DNA, 75 bp, synthetic construct
  source 1..75: mol_type = other DNA
aagatccaaagcaaccaaaggcgaaaggttattcggatgatgcagcccaacgaatgattgatcatctgaatcaac

SEQ ID NO: 482387 - DNA, 75 bp, synthetic construct
  source 1..75: mol_type = other DNA
tgccaaaaatgtcaatgcatttgcactccgacaaacaggtaatactgttaatggtgatacatccgttggatggaa

SEQ ID NO: 482388 - DNA, 75 bp, synthetic construct
  source 1..75: mol_type = other DNA
gatgaactgtgtgcgcagggttaccattttaacggtaagcgtcaatggagcaccgcattgacgcttatttattgg

SEQ ID NO: 482389 - DNA, 75 bp, synthetic construct
  source 1..75: mol_type = other DNA
aactcccacctgccacctggatccgcgaaatgattcgccatttccaatacgacggccaggtaatagggacattat

SEQ ID NO: 482390 - DNA, 75 bp, synthetic construct
  source 1..75: mol_type = other DNA
ttatttttctcttagtttaaaaaagttattacatactcataatatattaacattgattagcaaatattattccta

SEQ ID NO: 482391 - DNA, 75 bp, synthetic construct
  source 1..75: mol_type = other DNA
aagtgctatgagaggattgttggctttatagatggtgtagataccgataaaacgataatacaatctttaaggcca

SEQ ID NO: 482392 - DNA, 75 bp, synthetic construct
  source 1..75: mol_type = other DNA
atggtcttcccgatccggtgaaagctatggggcagatcctggtggaaaacctgataattgacccgaaactggcac

SEQ ID NO: 482393 - DNA, 75 bp, synthetic construct
  source 1..75: mol_type = other DNA
tccaatcatttcccgttcttaaaagctgatgagatacccgaatttctgcgtaccttagagagttacaccgggagt

SEQ ID NO: 482394 - DNA, 75 bp, synthetic construct
  source 1..75: mol_type = other DNA
tactgatgattacgggtgtgagaaccatcgaattacgtgcggcattgtggtcagagtttgatctggataacgcta

SEQ ID NO: 482395 - DNA, 75 bp, synthetic construct
  source 1..75: mol_type = other DNA
gaaaagatagccagagagtggcatcaacagaagtctaccaaatggtcggcgggatatgcatcagacatcatggaa

SEQ ID NO: 482396 - DNA, 75 bp, synthetic construct
  source 1..75: mol_type = other DNA
agctacgctgggttgtgacgctcgccgccgggcttgaggatgagtctcagggtatgactgttggcaaaaaattaa

SEQ ID NO: 482397 - DNA, 75 bp, synthetic construct
  source 1..75: mol_type = other DNA
gccagcatcagtaaactggataactttctcggtcagcttgatggtatccttcgccggcattcccgtcatttcgcc

SEQ ID NO: 482398 - DNA, 75 bp, synthetic construct
  source 1..75: mol_type = other DNA
agggaactatcgttatgtttttccggggcggaatgatccgaacaaacctatgagtgaagctagtgttaatcaatt

SEQ ID NO: 482399 - DNA, 75 bp, synthetic construct
  source 1..75: mol_type = other DNA
ccgcccagaaatttttagattatcgagactggagatcacaaattcatcactttgaaccgccccgggtttcctgga

SEQ ID NO: 482400 - DNA, 75 bp, synthetic construct
  source 1..75: mol_type = other DNA
cagcagagagctagtgaacttgcaaaactggaaaagctaaagaatcagtattcaaaggaagaatataataatctt

SEQ ID NO: 482401 - DNA, 75 bp, synthetic construct
  source 1..75: mol_type = other DNA
ggtgaaagcatgcttgtcgcaatagaagatctggcattgaggaataaacgcaatggtaaagatccaaaaaatgta

SEQ ID NO: 482402 - DNA, 75 bp, synthetic construct
  source 1..75: mol_type = other DNA
aatggagaaagccggaaacaccacacattcgctgggactgaaaagtgcggcagctcgtcgggagctgggggtcat

SEQ ID NO: 482403 - DNA, 75 bp, synthetic construct
  source 1..75: mol_type = other DNA
gcgaagcaaaagccaaggggatgctttctcctgaaatgtatgaggagctttcaggaaaactccatgctatgcgga

SEQ ID NO: 482404 - DNA, 75 bp, synthetic construct
  source 1..75: mol_type = other DNA
aacgtgaatataacaatcagcgtctgcaacttgaacgtgactatgcagataaatcccgtgggatgtcaaatcatg

SEQ ID NO: 482405 - DNA, 75 bp, synthetic construct
  source 1..75: mol_type = other DNA
tctgcaacttgaacgtgactatgcagataaatcccgtgggatgtcaaatcatgttttcaggagaaaatgcaggct

SEQ ID NO: 482406 - DNA, 75 bp, synthetic construct
  source 1..75: mol_type = other DNA
catttctttttaggattagatgaaaatgataaagcaatctacgttacagatgactatttgtctaaagtaaatatt

SEQ ID NO: 482407 - DNA, 75 bp, synthetic construct
  source 1..75: mol_type = other DNA
tggagctaatattcgaacgcagcttaataaatggttagagcttccttgtctatctcccgctgatggtcagggatt

SEQ ID NO: 482408 - DNA, 75 bp, synthetic construct
  source 1..75: mol_type = other DNA
tagcgcactggcggcagattatgttgtgcaacaggacgcgttacagaaagagggtgatgcggtttccggcggcgt

SEQ ID NO: 482409 - DNA, 75 bp, synthetic construct
  source 1..75: mol_type = other DNA
aaactagagcaaaaaaacgcattttcaaattggtttctgatcaatctctttttgataccgtcacaatcgacttaa

SEQ ID NO: 482410 - DNA, 75 bp, synthetic construct
  source 1..75: mol_type = other DNA
gcgttggcgatagatacattaaaccaaatggatgaaattgacagagggaatatgttaacttatataaatgattat

SEQ ID NO: 482411 - DNA, 75 bp, synthetic construct
  source 1..75: mol_type = other DNA
agggtgcttgatatgctggcagcaagacaaaaacgggagcaacgccagagcgcggccccgtaccagtggaagacg

SEQ ID NO: 482412 - DNA, 75 bp, synthetic construct
  source 1..75: mol_type = other DNA
aaataaaatcgatatcacggagtttactaatttaatggaaaatggttatctattaaaaaatgaagtgattagact

SEQ ID NO: 482413 - DNA, 75 bp, synthetic construct
  source 1..75: mol_type = other DNA
acggcccggaatttatctccctggcactggctgaatgggcagagaaacatgcaataaaactggagtttatccagc

SEQ ID NO: 482414 - DNA, 75 bp, synthetic construct
  source 1..75: mol_type = other DNA
tggtagccgcagcccatgctgcggcggggaaactgccaccagcagaagcctctctgatgcgtgaggtagccactc

SEQ ID NO: 482415 - DNA, 75 bp, synthetic construct
  source 1..75: mol_type = other DNA
ggcttgaagctacgttcgcagcattaaccgaatcattggcgcaactggaacaggaacgtaaaggtaaaacgcaat

SEQ ID NO: 482416 - DNA, 75 bp, synthetic construct
  source 1..75: mol_type = other DNA
ctatcaaacaacgaaccagatcaaatcaataaaatattaaaaataaataataaccgagaaatgcttggtatgttc

SEQ ID NO: 482417 - DNA, 75 bp, synthetic construct
  source 1..75: mol_type = other DNA
tcagcgtgtgctgtatgcgtaccagaacccgcctcagggcggtgcggcggcggactatgtgcagtgggcactgga

SEQ ID NO: 482418 - DNA, 75 bp, synthetic construct
  source 1..75: mol_type = other DNA
gacggtaacgcggatgccggtacgacactgacaccggatgtcacctggtccggtattgactcaacggtgacgatg

SEQ ID NO: 482419 - DNA, 75 bp, synthetic construct
  source 1..75: mol_type = other DNA
ggcacgggtggagagtgccatcagcgaggtgctgtacaacgtgggtgaaccggacggcagcggggtgattcacct

SEQ ID NO: 482420 - DNA, 75 bp, synthetic construct
  source 1..75: mol_type = other DNA
tatccggccatgcttcgtctggataacggcccggaatttatctccctggcactggctgaatgggcagagaaacat

SEQ ID NO: 482421 - DNA, 75 bp, synthetic construct
  source 1..75: mol_type = other DNA
cgccagaagcgctgaaccagagctggtctgtcgattttatgcatgatgcgctggcctgtggccgtcgttttcgca

SEQ ID NO: 482422 - DNA, 75 bp, synthetic construct
  source 1..75: mol_type = other DNA
gagttcatccagccgggtaagccgacgcagaacgctttcattgagcgttttaacaggacataccgtacagaaata

SEQ ID NO: 482423 - DNA, 75 bp, synthetic construct
  source 1..75: mol_type = other DNA
atgaacatgagaaagccgctgtggtgcatgagaaggcaaataacggtcagtcatccgttatccatcagcagcagg

SEQ ID NO: 482424 - DNA, 75 bp, synthetic construct
  source 1..75: mol_type = other DNA
gggttgtggcaaatattggtggttcaggtatggcgatgtttgagcagaataaccatgtggtgattaacaacgacg

SEQ ID NO: 482425 - DNA, 75 bp, synthetic construct
  source 1..75: mol_type = other DNA
ttgaacaatatattaccgagcagttggtgaacaatggctggaaagaaggccattcctgccactatgaccagcaac

SEQ ID NO: 482426 - DNA, 75 bp, synthetic construct
  source 1..75: mol_type = other DNA
tttcctggacggcccatgacttggtgaaactgcgcgaagataacggcgacgcggtatttaacagcgtgatcattg

SEQ ID NO: 482427 - DNA, 75 bp, synthetic construct
  source 1..75: mol_type = other DNA
ttcgcaaatattaccctgaatacgctcgaccccaaccatattgacgtgttcttcccggagttcgcccacgccacg

SEQ ID NO: 482428 - DNA, 75 bp, synthetic construct
  source 1..75: mol_type = other DNA
actctggcagtcgataaattcagcgtgatggataaacaggccgggtactacatgggcaaattgtcagtaatcttt

SEQ ID NO: 482429 - DNA, 75 bp, synthetic construct
  source 1..75: mol_type = other DNA
gactatttcgcaaatattaccctgaatacgctcgaccccaaccatattgacgtgttcggtgatgctgtcaactta

SEQ ID NO: 482430 - DNA, 75 bp, synthetic construct
  source 1..75: mol_type = other DNA
aggcgcctgctcatcagatgcagtcaaccgctgaaaaaagcgctattcagggagacagtatgacgatgatggata

SEQ ID NO: 482431 - DNA, 75 bp, synthetic construct
  source 1..75: mol_type = other DNA
gataaggtggagacgccgaaggcagcggtttcaatggcgaagaaaacctcgttcgtggtcgtggtggtgattgcg

SEQ ID NO: 482432 - DNA, 75 bp, synthetic construct
  source 1..75: mol_type = other DNA
aggcaccggcccatcagatgcagtcttcaactgttaaaagcacagttgagggagagagcatgaaaatgatggata

SEQ ID NO: 482433 - DNA, 75 bp, synthetic construct
  source 1..75: mol_type = other DNA
tcataacctgtttgctgctgattaccgcctgtatcgtggcgggcatctggggattacgcagtggtgctgtgacac

SEQ ID NO: 482434 - DNA, 75 bp, synthetic construct
  source 1..75: mol_type = other DNA
caaactggcgtcttactcgctaatgccttcagacgtgcaaagtgctattgaagcgcaaaacgtgcaggttactgc

SEQ ID NO: 482435 - DNA, 75 bp, synthetic construct
  source 1..75: mol_type = other DNA
catagcccagagcaaattgccgcatggaaaaaaatcaccgcgggagtccatgctgaaaatggtcacatggccgtg

SEQ ID NO: 482436 - DNA, 75 bp, synthetic construct
  source 1..75: mol_type = other DNA
ataccaaagtgctgggcatgaaactgctgcgtaccagcgaaaacccggaatacaaatactcactggcgtttgttg

SEQ ID NO: 482437 - DNA, 75 bp, synthetic construct
  source 1..75: mol_type = other DNA
tcagccgtattcctgccgatggccttctttgggggatctacgggcgtaatttatcgtcagttctccatcaccatc

SEQ ID NO: 482438 - DNA, 75 bp, synthetic construct
  source 1..75: mol_type = other DNA
ctgcaagtttttggcgcagaatatgctatgcgcatctggcttgatccggccaaactggcgtcttactcgctgatg

SEQ ID NO: 482439 - DNA, 75 bp, synthetic construct
  source 1..75: mol_type = other DNA
tacccgaaagacagcactgaatttattaaaatctctgtagaggacgtaattcagacgctgtttgaagccatcgta

SEQ ID NO: 482440 - DNA, 75 bp, synthetic construct
  source 1..75: mol_type = other DNA
gtgtttagtaataagacaacaagcaattacactattcgtgttacaacgacaacaacatcgggtcatggtggcgtt

SEQ ID NO: 482441 - DNA, 75 bp, synthetic construct
  source 1..75: mol_type = other DNA
tattaaccttccaggtgtaaacactacgggtaatcagaacaccactggtaatgctgcaactgctacaaaacttca

SEQ ID NO: 482442 - DNA, 75 bp, synthetic construct
  source 1..75: mol_type = other DNA
aaaaatggacgaggttattactgttcacatccatttatttcaagtctttcaggaaatgctgctacagccacgaaa

SEQ ID NO: 482443 - DNA, 75 bp, synthetic construct
  source 1..75: mol_type = other DNA
ttcggtgcgcttcgtggctccgggatcaccctggctaaccgtgccggatggattgacgcgctgatgtccccgaaa

SEQ ID NO: 482444 - DNA, 75 bp, synthetic construct
  source 1..75: mol_type = other DNA
acgttgcaggtagaaagccatcgcgtgcagaaggtgcagattataccgctgcgtaaggatggcgagatggagtac

SEQ ID NO: 482445 - DNA, 75 bp, synthetic construct
  source 1..75: mol_type = other DNA
aaaggagacctcagttttcttcgtgtgcataaatttcagctgaataatcaactggtgcttctgggttacagctgg

SEQ ID NO: 482446 - DNA, 75 bp, synthetic construct
  source 1..75: mol_type = other DNA
catgacgccgttctctgcttttgccactacgcgttggatctatggcccggaaaaactggtgcgctacaacggttc

SEQ ID NO: 482447 - DNA, 75 bp, synthetic construct
  source 1..75: mol_type = other DNA
ggcacgacgggctatatccttaactctccgacggccaatatcacctttgctgttggcgaaattccggtgcttggc

SEQ ID NO: 482448 - DNA, 75 bp, synthetic construct
  source 1..75: mol_type = other DNA
acaacaggtacagaaaccaatgaaataagtccatactcaattctgggtattagtgcaaaatatgcaatcacaaaa

SEQ ID NO: 482449 - DNA, 75 bp, synthetic construct
  source 1..75: mol_type = other DNA
tgaacggtacatcacttgcgttagcattacttataccctgcttattaacgtcacgaatagtctgcgcagagataa

SEQ ID NO: 482450 - DNA, 75 bp, synthetic construct
  source 1..75: mol_type = other DNA
ggcattgtcacttcgctgctggtctggctgctcgcctggcgtaacggcatcgacacctttcggttgattattatc

SEQ ID NO: 482451 - DNA, 75 bp, synthetic construct
  source 1..75: mol_type = other DNA
ggcattgtcacctcgctgctggtctggctgctcgcctggcgtaacggtatcgacacctttcggttgattattatc

SEQ ID NO: 482452 - DNA, 75 bp, synthetic construct
  source 1..75: mol_type = other DNA
gccctggcggggccgatttcctttattgcgctggttgcaccacacattgcccggcgcatcagcggcactgcccgc

SEQ ID NO: 482453 - DNA, 75 bp, synthetic construct
  source 1..75: mol_type = other DNA
tcgttgaaaaactggtcacaacgtaagggtgcagaaaataccgcccaggccattgccttacgggcaaccaaagag

SEQ ID NO: 482454 - DNA, 75 bp, synthetic construct
  source 1..75: mol_type = other DNA
acaacaacttaccgggctggataatttgctctacttcagttccaccagtagttcggatggctcagtcagtattaa

SEQ ID NO: 482455 - DNA, 75 bp, synthetic construct
  source 1..75: mol_type = other DNA
ctggttgccattgcgctggtgttgtcagccgtattcctgcctatggccttctttgggggatctacgggggtaatt

SEQ ID NO: 482456 - DNA, 75 bp, synthetic construct
  source 1..75: mol_type = other DNA
acggttatatacaacatcttgcgagcgcaaagccgatgacgctctatcttgaacagtccgaaatgaaaaatttac

SEQ ID NO: 482457 - DNA, 75 bp, synthetic construct
  source 1..75: mol_type = other DNA
gtatttgggaaggttctgtgaaattgcgttttaccaccccaggaacagactataccgccaatatcacgcttaacg

SEQ ID NO: 482458 - DNA, 75 bp, synthetic construct
  source 1..75: mol_type = other DNA
catgacgccattctctgcttttgctactacgcgctggatctatggcccggaaaaactggtgcgttacaacggctc

SEQ ID NO: 482459 - DNA, 75 bp, synthetic construct
  source 1..75: mol_type = other DNA
ctgtgaagcgcattgaggaagttctgactctggcgctgcaaaatgaaccgtctggcatgcaggttgtgactgcaa

SEQ ID NO: 482460 - DNA, 75 bp, synthetic construct
  source 1..75: mol_type = other DNA
acctcatctgtgctgtcagatatggcaaaaattctggcgcaggcaaccatgatgaaggctgtcaaagggattggc

SEQ ID NO: 482461 - DNA, 75 bp, synthetic construct
  source 1..75: mol_type = other DNA
aaagctgctcttgctgctggtggttcaatcgctaaagtagccgctcaattcaacgttgccaagtcaactgtacag

SEQ ID NO: 482462 - DNA, 75 bp, synthetic construct
  source 1..75: mol_type = other DNA
caggagcaggaactgatgcaggcagactggaaaaacggtgccatgcgggcgtttcagaattttacagagagtgcg

SEQ ID NO: 482463 - DNA, 75 bp, synthetic construct
  source 1..75: mol_type = other DNA
acgcggcgaaaatgccaaaagaggcaaaagagaaagcggaagcagaattgcagaagctgaaaatgatgtctccaa

SEQ ID NO: 482464 - DNA, 75 bp, synthetic construct
  source 1..75: mol_type = other DNA
tgtgccggaaggtgcgacgccaaaagatggtccgagtgctggtatcgcgatgtgcaccgcactggtttcttgcct

SEQ ID NO: 482465 - DNA, 75 bp, synthetic construct
  source 1..75: mol_type = other DNA
agacggtgaatttgaaagcgagcgtggcggatttaatggcagtaaacgccgttcggctcctggtatgaaagcctt

SEQ ID NO: 482466 - DNA, 75 bp, synthetic construct
  source 1..75: mol_type = other DNA
aacccagaaacaaaatggcagtgaacaccataaaaaacaggcagaaacggtacttaatcagttgagatatcgcta

SEQ ID NO: 482467 - DNA, 75 bp, synthetic construct
  source 1..75: mol_type = other DNA
ggcatgctgacaagcttccggcagactgtgccggtggaagaacagattcggcagctgaagctgcttcctgaagac

SEQ ID NO: 482468 - DNA, 75 bp, synthetic construct
  source 1..75: mol_type = other DNA
taaatgctctgaattgaatggggagtatgaagttcgttatggctctcattgtttaggcagtgatgattttatatt

SEQ ID NO: 482469 - DNA, 75 bp, synthetic construct
  source 1..75: mol_type = other DNA
cgaagtcaataagcccgcagcagcgcagaaaagcgctactgatgcccgtgcggtacaggctgccgcccaggcaga

SEQ ID NO: 482470 - DNA, 75 bp, synthetic construct
  source 1..75: mol_type = other DNA
atcaggaactcgatgacaacaccgcagacggtgaatttgaaagcgagcgtggcgggtttaaaggcagtaaccgcc

SEQ ID NO: 482471 - DNA, 75 bp, synthetic construct
  source 1..75: mol_type = other DNA
caaccgtcgcgggtagtggtggtcgatatcgacgaaaaacgcctggcgcaggtgcagaagttgttgccggtggaa

SEQ ID NO: 482472 - DNA, 75 bp, synthetic construct
  source 1..75: mol_type = other DNA
atgttgctggcacattctgagcctgagtccgagccggtctttaacctgatgataccgcgctctcattgtccctac

SEQ ID NO: 482473 - DNA, 75 bp, synthetic construct
  source 1..75: mol_type = other DNA
ccccatcaacgggattatcccaccagatcagtttatcccgctggcagagtccaccggattaatcgtcccgataac

SEQ ID NO: 482474 - DNA, 75 bp, synthetic construct
  source 1..75: mol_type = other DNA
ctgattcgttttcctgaagatgctggtactctgccttggatactgttaaaagtaccttacagcaatggcacgatc

SEQ ID NO: 482475 - DNA, 75 bp, synthetic construct
  source 1..75: mol_type = other DNA
gaaattacttaccagacattgattaacgaaggtttgctaccttcaacctacacaggcactaatgctaataaatcc

SEQ ID NO: 482476 - DNA, 75 bp, synthetic construct
  source 1..75: mol_type = other DNA
atactaatgcaccgggagggcgggtatctgctttttcattttgatagtgatgccgattattatccaggtatagat

SEQ ID NO: 482477 - DNA, 75 bp, synthetic construct
  source 1..75: mol_type = other DNA
atgaataaaaaacagtttattaagtcaaaaacgtcaagcaaggaagaattagagaaggagctaaactccctgaaa

SEQ ID NO: 482478 - DNA, 75 bp, synthetic construct
  source 1..75: mol_type = other DNA
ccatcttcgttggaatactcaccgcctttcagctgtctcgccgtcgtccatcttccctgaacgatatgctgaaaa

SEQ ID NO: 482479 - DNA, 75 bp, synthetic construct
  source 1..75: mol_type = other DNA
caggcctggtatatgtttcctgttgccatcttcggtggaatactcacagcctttctgctgtcccgccgtcgtcca

SEQ ID NO: 482480 - DNA, 75 bp, synthetic construct
  source 1..75: mol_type = other DNA
atgattcgtttccccgaagatgaaggcactctgccctggatcctgttaaaaacaccttaccaaaatggctctgta

SEQ ID NO: 482481 - DNA, 75 bp, synthetic construct
  source 1..75: mol_type = other DNA
gaacgacagcggcatacaaaaagaaagtcattcaaaaaaatatccgttctccttgatttatatcatcccggtgaa

SEQ ID NO: 482482 - DNA, 75 bp, synthetic construct
  source 1..75: mol_type = other DNA
ttgggaaacacggtcctgtcagccagcggaaaaaatgtcactctgcccccgaacgacagcggcatacaaaaagaa

SEQ ID NO: 482483 - DNA, 75 bp, synthetic construct
  source 1..75: mol_type = other DNA
tgcactaagcctggcaaaacaagaggctgtattttgcagcacccaccccggtttgcctgtcggtccagttgctga

SEQ ID NO: 482484 - DNA, 75 bp, synthetic construct
  source 1..75: mol_type = other DNA
cccttccggctcaggcactccggtctgatgcttcggatgttcaggaacatcagaccctgccgcactcccgcctgg

SEQ ID NO: 482485 - DNA, 75 bp, synthetic construct
  source 1..75: mol_type = other DNA
ccactggctggcgcagttatagaggtatttaataatagcagtagcacgagttattttaccattcgtataacaacg

SEQ ID NO: 482486 - DNA, 75 bp, synthetic construct
  source 1..75: mol_type = other DNA
cagacttggggcatataaaactcataccatgcagaaaggcacgatgtttgaaactgctggctatgtcattacagg

SEQ ID NO: 482487 - DNA, 75 bp, synthetic construct
  source 1..75: mol_type = other DNA
ttaccattaacaacgccaacggggctgtttcaatcggtaatggactcaatgtaactggcgatataagaaccaatg

SEQ ID NO: 482488 - DNA, 75 bp, synthetic construct
  source 1..75: mol_type = other DNA
aataaggacgaacttattgatacaactcaggcaaggccggtgcagtattgtatcaatggtacatggtataacgcg

SEQ ID NO: 482489 - DNA, 75 bp, synthetic construct
  source 1..75: mol_type = other DNA
aatgacaaatgcgctggcaggcaaacagcctctggatgcaactttaaccgcgcttgctggtcttgctacaggcgc

SEQ ID NO: 482490 - DNA, 75 bp, synthetic construct
  source 1..75: mol_type = other DNA
tgaacctgttaatcacctcagtggatggagataaaaccgcaggcgcggcgtcggtggatattggtgaattctacc

SEQ ID NO: 482491 - DNA, 75 bp, synthetic construct
  source 1..75: mol_type = other DNA
aaaccctctgcgggagatgttggtgcatacacgcaggcagaatgtaactcaaggtttattacaggtattcgcctt

SEQ ID NO: 482492 - DNA, 75 bp, synthetic construct
  source 1..75: mol_type = other DNA
tgcaaataataaggtcattacagatacaggttgcggaaatatttgtcttgcaggtgctgtggtggaagttattgg

SEQ ID NO: 482493 - DNA, 75 bp, synthetic construct
  source 1..75: mol_type = other DNA
accagcaggacccgattgccgactccgcacgggcgatcctcgacggtcacattgtactttctcgtcgtctggcgg

SEQ ID NO: 482494 - DNA, 75 bp, synthetic construct
  source 1..75: mol_type = other DNA
atatgccgatgcggatggtggcgttccctggaatgccgaatcaggcgcttacaatgtcacccgctctggcgacag

SEQ ID NO: 482495 - DNA, 75 bp, synthetic construct
  source 1..75: mol_type = other DNA
aggcgtacaacaatagctacccgaccacgtatggcaacgtattgcacatgaaaggtgcgagtgctgctggtgagg

SEQ ID NO: 482496 - DNA, 75 bp, synthetic construct
  source 1..75: mol_type = other DNA
ccacatcgtcgtttgattacggtactaaaccaacgaataacacaggtgcacatacccacaatgtatctggtactg

SEQ ID NO: 482497 - DNA, 75 bp, synthetic construct
  source 1..75: mol_type = other DNA
ttcagttaacggaaaccgtgatgaattaattgatacaactcaggcaaggccaattcagtattgcattaatggaac

SEQ ID NO: 482498 - DNA, 75 bp, synthetic construct
  source 1..75: mol_type = other DNA
gacaacctgcccctgctgtatcagaccgaaacactcctgaaggctctgagtgacacgcttgcccgacacgagctt

SEQ ID NO: 482499 - DNA, 75 bp, synthetic construct
  source 1..75: mol_type = other DNA
gaacacaatggcgtggaattacagacggcatcctggtacaccattgcccggatgcatacaacagggttaagtggc

SEQ ID NO: 482500 - DNA, 75 bp, synthetic construct
  source 1..75: mol_type = other DNA
cggaagccatggtgaaggggtatatcacccgtctggagaaccagcctgtgcagggtgaagtatcgtcaccggtaa

SEQ ID NO: 482501 - DNA, 75 bp, synthetic construct
  source 1..75: mol_type = other DNA
gcatacaacctgcaacgcagtgcgcagctgctgcaacaactgatggttcttttccccgataatccccgtgtctag

SEQ ID NO: 482502 - DNA, 75 bp, synthetic construct
  source 1..75: mol_type = other DNA
aatagcagtgaacagcagcaaaaaaaggtggaaaatggtcttgtcgagctggtgagtcgttactgggttttgacg

SEQ ID NO: 482503 - DNA, 75 bp, synthetic construct
  source 1..75: mol_type = other DNA
atatcccggcggaagagcagttacgtgctataatgaagtccgtaaccagaatggcagtgaacagcagcaaaaaca

SEQ ID NO: 482504 - DNA, 75 bp, synthetic construct
  source 1..75: mol_type = other DNA
tcagtgggattataccagtaacgccagcgtaacgattcatacatcaccaacttatacagcgaataaaccaactgg

SEQ ID NO: 482505 - DNA, 75 bp, synthetic construct
  source 1..75: mol_type = other DNA
aaggatattacgcttacgcctaaagatctggatgcctacagcaaaagcgaagtacagagcgcactggcgggcaaa

SEQ ID NO: 482506 - DNA, 75 bp, synthetic construct
  source 1..75: mol_type = other DNA
cagaacgttattatgggacgtaatgcggtatccactgatggtgctcaggccttgctccgtcaggaccatgccgac

SEQ ID NO: 482507 - DNA, 75 bp, synthetic construct
  source 1..75: mol_type = other DNA
gtgtctattctcattttaccaagattctaaattattaaatgaacatagggatttaattttgcccctttttgaaat

SEQ ID NO: 482508 - DNA, 75 bp, synthetic construct
  source 1..75: mol_type = other DNA
atcattcagggagccaccctgacgtttcagtttatacagaacgctgtgcacaagaaacgtcgctttcaccggtcc

SEQ ID NO: 482509 - DNA, 75 bp, synthetic construct
  source 1..75: mol_type = other DNA
caagaaacgtcgctttcaccggtccatccgacccgacagtgtccagttcaatccactgattctgctgaaacggag

SEQ ID NO: 482510 - DNA, 75 bp, synthetic construct
  source 1..75: mol_type = other DNA
agaaagacgcccgtggggccatgctgcacgtactggattctctggcgaaagtgccgaaagaaaaacaggctgctg

SEQ ID NO: 482511 - DNA, 75 bp, synthetic construct
  source 1..75: mol_type = other DNA
cgaaagggattgctggcgtgccgggagtgtcgtttgtggtgttgctggcaacgctgggtagcgtaggtattccgc

SEQ ID NO: 482512 - DNA, 75 bp, synthetic construct
  source 1..75: mol_type = other DNA
atggaaacggcgattttagttgaaaacgggatccggagaatcatcacgctcgatgaatacgccaatttgatatcg

SEQ ID NO: 482513 - DNA, 75 bp, synthetic construct
  source 1..75: mol_type = other DNA
aagtggctgggctggctgacaaaatcaactaccttggtaataccggcccggcgaatgcgaagaaaatctccgata

SEQ ID NO: 482514 - DNA, 75 bp, synthetic construct
  source 1..75: mol_type = other DNA
atggctgataattttcagctgaaagccatcatcaccgccgttgacaggctgtccggcccgcttaaaggtatgcag

SEQ ID NO: 482515 - DNA, 75 bp, synthetic construct
  source 1..75: mol_type = other DNA
ctgatgtatgagccggttaaagatactctggaaagtgttgttcctgaagatacggttaactggctggataataaa

SEQ ID NO: 482516 - DNA, 75 bp, synthetic construct
  source 1..75: mol_type = other DNA
gaaaacttcataaacgatttaaaggttggtacgaacttcaacgcactttgtgaagaattctttaattccggtgat

SEQ ID NO: 482517 - DNA, 75 bp, synthetic construct
  source 1..75: mol_type = other DNA
gccgacgccgagaaagtgattaaattcctgcgtgaagagatgggggtgaagaaaattcgcttcccggaacattgt

SEQ ID NO: 482518 - DNA, 75 bp, synthetic construct
  source 1..75: mol_type = other DNA
cttcgaacgtctgatggaaggtgctaaactgctgaaatgttcagaatttggtgacgcaatcatcgaaaacatgta

SEQ ID NO: 482519 - DNA, 75 bp, synthetic construct
  source 1..75: mol_type = other DNA
aaaagttctgcctgtcttcgggaagatcgacccggataaaatcaaacctgaacatattcggcgctatatggatca

SEQ ID NO: 482520 - DNA, 75 bp, synthetic construct
  source 1..75: mol_type = other DNA
gaaaaagcggtcggtgacgaaaaagaaagaaatacttttcaggcgctcacggaacaattcatgacctcccctgat

SEQ ID NO: 482521 - DNA, 75 bp, synthetic construct
  source 1..75: mol_type = other DNA
gccgcatttgctggcattttacttcacactccattcggcagaaggaaatatcaacgggcaacagattcatgcatt

SEQ ID NO: 482522 - DNA, 75 bp, synthetic construct
  source 1..75: mol_type = other DNA
aagtgggtcaccgatgtcaccaaatcaatcagcattgtgacgaaggatatgcgcacactcggcaaggtcactgcc

SEQ ID NO: 482523 - DNA, 75 bp, synthetic construct
  source 1..75: mol_type = other DNA
atgattacggaaaccgaacaggcgtacatcgcccgcatccgggagtatttcgggaacgaactggtgtcggtggac

SEQ ID NO: 482524 - DNA, 75 bp, synthetic construct
  source 1..75: mol_type = other DNA
gccgctgcaggctctttgtccagaattatgaaagttctcggcggtgtgatgaatatgacgcctgctaaggggctg

SEQ ID NO: 482525 - DNA, 75 bp, synthetic construct
  source 1..75: mol_type = other DNA
actgcgtttaatatgacgcaggatgaagtggccgggctggctgacaaaatcaactaccttggtaataccggcccg

SEQ ID NO: 482526 - DNA, 75 bp, synthetic construct
  source 1..75: mol_type = other DNA
gccagacagtccgcgggactgaccacggaaaaaatgacggaagcgcataagcagcttctggccctgcagcagcgt

SEQ ID NO: 482527 - DNA, 75 bp, synthetic construct
  source 1..75: mol_type = other DNA
cagctctatgttagagagactgtgcaagagcttcgaacatgtaagccaaagctgaataaacttgaaaaatccatt

SEQ ID NO: 482528 - DNA, 75 bp, synthetic construct
  source 1..75: mol_type = other DNA
gactttatcagattgtggcccgcctgattaccgtgctggacggtttcaggacagaaaaaacctcaccgctttact

SEQ ID NO: 482529 - DNA, 75 bp, synthetic construct
  source 1..75: mol_type = other DNA
atcgatttgccgaaaacaggcgatccctttatgaaaatcacccatgatgttgggtattctccatttaaaaggtga

SEQ ID NO: 482530 - DNA, 75 bp, synthetic construct
  source 1..75: mol_type = other DNA
gagattgccgcaatgggggcaaccattgccggaatgggggtggaatcagaaattgcggcgacggggataaagaat

SEQ ID NO: 482531 - DNA, 75 bp, synthetic construct
  source 1..75: mol_type = other DNA
ctgccattgcccttgaatcaaaaatggcggatgtccggaaagtggtggatggtctggatacgccggaagcgttta

SEQ ID NO: 482532 - DNA, 75 bp, synthetic construct
  source 1..75: mol_type = other DNA
ctatgacatgaccggatggcagatgccacgtggtgatgggtatttatctcccgataaacgctacaccccgaatgt

SEQ ID NO: 482533 - DNA, 75 bp, synthetic construct
  source 1..75: mol_type = other DNA
cgatgttaactgggccagggatcatggcatatatctggcctctgactggaccccgttttttaatcgaaaaaatta

SEQ ID NO: 482534 - DNA, 75 bp, synthetic construct
  source 1..75: mol_type = other DNA
actgccgctaccggattgtttggtaaaggcgggggcgttatcggaaaagccggtgtatatggggtgctggcttct

SEQ ID NO: 482535 - DNA, 75 bp, synthetic construct
  source 1..75: mol_type = other DNA
attgttaaaggtatggaaggcgcaatcaatgccaagactgtaacctatgacttcgaacgtctgatggaaggcgct

SEQ ID NO: 482536 - DNA, 75 bp, synthetic construct
  source 1..75: mol_type = other DNA
ttaaagcttacatgaacaatgcgggtaatatttatgcttcaggtaatcttaccgccggaacgataaaatccaacg

SEQ ID NO: 482537 - DNA, 75 bp, synthetic construct
  source 1..75: mol_type = other DNA
actggcttaccgcgtggggtataactcttcaatgtattctgtttacctgcgtcgtgatggaacgttgccgatgac

SEQ ID NO: 482538 - DNA, 75 bp, synthetic construct
  source 1..75: mol_type = other DNA
atgataaagaaaaaaggatttaccttactggaagtgactattgtgttaggtattggaacgcttatcgcttttatg

SEQ ID NO: 482539 - DNA, 75 bp, synthetic construct
  source 1..75: mol_type = other DNA
cgctttcaacaacaggtctggcgaagtttggtagtcgtattgccacgaacggacttaatccaaacgatttgcctg

SEQ ID NO: 482540 - DNA, 75 bp, synthetic construct
  source 1..75: mol_type = other DNA
tattggaacacttatcgcttttatgaagtttcaggatatgagaaacaatcaggaagcggtattggctgataatgt

SEQ ID NO: 482541 - DNA, 75 bp, synthetic construct
  source 1..75: mol_type = other DNA
cagtttggttatatatctggaacccttattgcagaatatgatgaacaacgttgtagtggtagtaagaatacacat

SEQ ID NO: 482542 - DNA, 75 bp, synthetic construct
  source 1..75: mol_type = other DNA
caatacttatggtgatattcatgctgataggaatataaatgcatctggcaatattgatgctaatggtcgaataaa

SEQ ID NO: 482543 - DNA, 75 bp, synthetic construct
  source 1..75: mol_type = other DNA
atggaacaactacaacaggaatattaaaaactaatgctgctgctacagttggaacaacattaaatgtagcaggcg

SEQ ID NO: 482544 - DNA, 75 bp, synthetic construct
  source 1..75: mol_type = other DNA
tgctggtcatcaggtgaatactcaatatgtgtgggcatcaggaaatcttaactctaactatattcattcaaatgg

SEQ ID NO: 482545 - DNA, 75 bp, synthetic construct
  source 1..75: mol_type = other DNA
cacttgtactaatgaaattcataggatttgatgacaattatataaactgggactcatggattgataggaatccat

SEQ ID NO: 482546 - DNA, 75 bp, synthetic construct
  source 1..75: mol_type = other DNA
caatattacgacgacagggaatgtttttggaaaagatattaatgcaagcggcctattagcaacaaacgggttttc

SEQ ID NO: 482547 - DNA, 75 bp, synthetic construct
  source 1..75: mol_type = other DNA
agagttggttttaatagtgcgttatattctgtatatttaagacgtgatggaacattgccaatgactggcgattta

SEQ ID NO: 482548 - DNA, 75 bp, synthetic construct
  source 1..75: mol_type = other DNA
ttattgcggaatatgatgaacgtcgttgtagtggtagtaagaacgagcactgttatagtaatataagaagattat

SEQ ID NO: 482549 - DNA, 75 bp, synthetic construct
  source 1..75: mol_type = other DNA
ccgctgagatgatgctgcgccagatgggttggacggaagcggctgacattattgttaaaggtatggaaggcgcaa

SEQ ID NO: 482550 - DNA, 75 bp, synthetic construct
  source 1..75: mol_type = other DNA
ccgctgagatgatgctgcgccacatgggttggacggaagcggctgacttcattgttaaaggtatggaaggcgcaa

SEQ ID NO: 482551 - DNA, 75 bp, synthetic construct
  source 1..75: mol_type = other DNA
ccgctgagatgatgctgcgccatatgggttggacggaagcggctgacctaattgttaaaggtatggaaggcgcaa

SEQ ID NO: 482552 - DNA, 75 bp, synthetic construct
  source 1..75: mol_type = other DNA
aacctatgacttcgaacgtctgatggagggcgctaatctgctgaaatgttcagagtttggtgaggcgatcatcga

SEQ ID NO: 482553 - DNA, 75 bp, synthetic construct
  source 1..75: mol_type = other DNA
aacctatgacttcgaacgtctgatggacggcgctaacctgctgaaatgttcagagtttggtgatgcgatcatcga

SEQ ID NO: 482554 - DNA, 75 bp, synthetic construct
  source 1..75: mol_type = other DNA
aacctatgacttcgaacgtctgatggatggcgctaacctgctgaaatgttcagagtttggtgacgcgatcatcga

SEQ ID NO: 482555 - DNA, 75 bp, synthetic construct
  source 1..75: mol_type = other DNA
atcaatacagattcaactgaaacttgtacgggagttaaaaatacgcactgtagaacatcaacaaaatacttttat

SEQ ID NO: 482556 - DNA, 75 bp, synthetic construct
  source 1..75: mol_type = other DNA
tatctatgttcgctattataatagcatccagtggtcatgcccagtgcctaacagagcaaccggaggctgctcatg

SEQ ID NO: 482557 - DNA, 75 bp, synthetic construct
  source 1..75: mol_type = other DNA
caaagcaggtgaatatcttcatttgaatggtcaggcaacattgaactcaaaatgtacgcctaatggtctggtggg

SEQ ID NO: 482558 - DNA, 75 bp, synthetic construct
  source 1..75: mol_type = other DNA
attgttaaaggtatggaaggcgcaatcaacgccaagaccgtaacctatgacttcgagcgtctgatggaaggcgct

SEQ ID NO: 482559 - DNA, 75 bp, synthetic construct
  source 1..75: mol_type = other DNA
ggtaaagcggttcaggcggcaggtgttgatggtgggatgagcagaaacaccaagatagcttccggctatggtggt

SEQ ID NO: 482560 - DNA, 75 bp, synthetic construct
  source 1..75: mol_type = other DNA
agacagcaagtggtgatggcctgaaaggtatttttataacgataacagatcaaatctctggttataaatgcgtta

SEQ ID NO: 482561 - DNA, 75 bp, synthetic construct
  source 1..75: mol_type = other DNA
tctgggcccgggagtttggggagtgcaaaggtaaaaaacactatcacctgatgctgctggtcaaccgggatacct

SEQ ID NO: 482562 - DNA, 75 bp, synthetic construct
  source 1..75: mol_type = other DNA
tgaagtgactgaaggcgtattcgaaaaataccgtatcgcgacctacaaagaagccagctggaagccttatatcat

SEQ ID NO: 482563 - DNA, 75 bp, synthetic construct
  source 1..75: mol_type = other DNA
aaaagcactggaaaaacagtgtctggcacagaacgcgcaacacaaagactggcattgcactgaagagatgatgga

SEQ ID NO: 482564 - DNA, 75 bp, synthetic construct
  source 1..75: mol_type = other DNA
atgcctgtaacgaagtgtgaaccagaaaccacccgcaaagcaagccgtaaatctgcaaaaacgcaggaaacagtc

SEQ ID NO: 482565 - DNA, 75 bp, synthetic construct
  source 1..75: mol_type = other DNA
ttttccgtccaggccggtggtgtggttggatcgtggtgatgacgttggtttacgggatgcgctggatcgtgctgc

SEQ ID NO: 482566 - DNA, 75 bp, synthetic construct
  source 1..75: mol_type = other DNA
atgatgatgctggtttacgggatatgctgaagcgtgctgactatctcgcgaaagagtacaccaaagtcaacggta

SEQ ID NO: 482567 - DNA, 75 bp, synthetic construct
  source 1..75: mol_type = other DNA
aaccgggatacctggtgtcgtgccggcgattaccgcgctccggggtcactggccggaatgattaaacaggcctgg

SEQ ID NO: 482568 - DNA, 75 bp, synthetic construct
  source 1..75: mol_type = other DNA
atgattgtgggtatgcttggtacaatgccttttgttgcctcatcaatagtggtgaatacgttcaacaattttaaa

SEQ ID NO: 482569 - DNA, 75 bp, synthetic construct
  source 1..75: mol_type = other DNA
ttacgcctgggcccgggagttcggggagcttaaaggcaaaaaacactatcacctgctgctgctggtcaaccggga

SEQ ID NO: 482570 - DNA, 75 bp, synthetic construct
  source 1..75: mol_type = other DNA
cgtcaggtcaccagcatggaagaagccttcaaagacgcagacatcgtttatccgaagtcatgggcaccttacaaa

SEQ ID NO: 482571 - DNA, 75 bp, synthetic construct
  source 1..75: mol_type = other DNA
atgaaaactgttaatgagctgataaaggatatcaattcgctgacctctcacctgcacgagaaagattttttgctg

SEQ ID NO: 482572 - DNA, 75 bp, synthetic construct
  source 1..75: mol_type = other DNA
gtcaaccgggatacctggtgtcgtgccggtgattaccgtgctccgggatcactggccgggatgattaaacaggcg

SEQ ID NO: 482573 - DNA, 75 bp, synthetic construct
  source 1..75: mol_type = other DNA
ttaccagaaacgtaagcatcgggaaggtaaacgcgtgcatcccacaaccctgcattacgtctgggcccgggagtt

SEQ ID NO: 482574 - DNA, 75 bp, synthetic construct
  source 1..75: mol_type = other DNA
aacggacgcagctgtgatatcccgcttcatcaatgccctgaaagcccgaatctacgcttaccagaaccgtaagca

SEQ ID NO: 482575 - DNA, 75 bp, synthetic construct
  source 1..75: mol_type = other DNA
aacggacgcagctgtgatatcccgcttcatcaatgccctgaaagcccgaatctacgcttaccagaaacgtaagcc

SEQ ID NO: 482576 - DNA, 75 bp, synthetic construct
  source 1..75: mol_type = other DNA
tccggggtcactggccggtatgattcaacaggcctggtgcagtgccctgggggtggatgccgggccttatgccac

SEQ ID NO: 482577 - DNA, 75 bp, synthetic construct
  source 1..75: mol_type = other DNA
caacggacgcagctgtgatatcccgcttcatcaatgccctgaaagcccgaatctacgcttaccagaaccgtaagc

SEQ ID NO: 482578 - DNA, 75 bp, synthetic construct
  source 1..75: mol_type = other DNA
aacggacgcagctgtgatatcccgcttcatcaatgccctgaaagcccgaatccacgcttaccagaagcgtaagct

SEQ ID NO: 482579 - DNA, 75 bp, synthetic construct
  source 1..75: mol_type = other DNA
aacggacgcagctgtgatatcccgcttcatcaatgccctgaaagcccgaatccacgcttaccagaatcgtaagcg

SEQ ID NO: 482580 - DNA, 75 bp, synthetic construct
  source 1..75: mol_type = other DNA
tccgggatcactggccggaatgatttaacaggcctggtgcagtgccctgggggtggatgccgggccttatgccac

SEQ ID NO: 482581 - DNA, 75 bp, synthetic construct
  source 1..75: mol_type = other DNA
gggatcactggccggaatgattgaacaggcctggtgcagtgccctgggggtggatgccggatgccatgccacgct

SEQ ID NO: 482582 - DNA, 75 bp, synthetic construct
  source 1..75: mol_type = other DNA
tcgacgcttaccagaaacgtaagcatcgggaaggtaaacgcgtgcatcccaccactctgcattacgtctgggccc

SEQ ID NO: 482583 - DNA, 75 bp, synthetic construct
  source 1..75: mol_type = other DNA
tccgggctcactggccggtatgattgaacaggcctggtgcagtgccctgggggtggatgccgggccttatgccac

SEQ ID NO: 482584 - DNA, 75 bp, synthetic construct
  source 1..75: mol_type = other DNA
tccgggttcactggccgggatgattcaacaggcctggtgcagtgccctgggggtggatgccgggccttatgccac

SEQ ID NO: 482585 - DNA, 75 bp, synthetic construct
  source 1..75: mol_type = other DNA
tccgggttcactggccggcatgattgaacaggcctggtgcagtgccctgggggtggatgccgggccttatgccac

SEQ ID NO: 482586 - DNA, 75 bp, synthetic construct
  source 1..75: mol_type = other DNA
cccgtacgaccatcacggtcgtattagtcatcctggctttcatcgcaatttttcgcgcctgggtctattacactg

SEQ ID NO: 482587 - DNA, 75 bp, synthetic construct
  source 1..75: mol_type = other DNA
aggcgcttgaggaagcgcaagccgatgttgcttattatcaggtactggcacaggagaaacgccaggaggccggac

SEQ ID NO: 482588 - DNA, 75 bp, synthetic construct
  source 1..75: mol_type = other DNA
agcgtgttccggtacgtattcgtctcgacaaccagcaagataacatctggcctgccgggactaccgccactgtgg

SEQ ID NO: 482589 - DNA, 75 bp, synthetic construct
  source 1..75: mol_type = other DNA
ctttccggaacatcccgcactgtggctgacgcgtgatgatgacgccggctttcagcagctactggaacgggctga

SEQ ID NO: 482590 - DNA, 75 bp, synthetic construct
  source 1..75: mol_type = other DNA
actggccgggatgattaaacaggcctggtgcagtgccctgggtgtggataccggagatcataccacgctggcgca

SEQ ID NO: 482591 - DNA, 75 bp, synthetic construct
  source 1..75: mol_type = other DNA
tgacgttgcttattatcaggtgttagcacaggagaaacgtcaggaagctggacgtcgtaaccgtctgggcataca

SEQ ID NO: 482592 - DNA, 75 bp, synthetic construct
  source 1..75: mol_type = other DNA
cagagttaggaagaaaggtagatgctctcacagtagaaaccaagaaaccaatccctgtaaatatcactggtgaag

SEQ ID NO: 482593 - DNA, 75 bp, synthetic construct
  source 1..75: mol_type = other DNA
aaaacattaggtgagtctcttggtagcttgatgactgatatgtcacatggtgtcgattcactaaccgatatttct

SEQ ID NO: 482594 - DNA, 75 bp, synthetic construct
  source 1..75: mol_type = other DNA
tgaagagattaaacgtgctttaattggtttccagcaggttgcttctaaaggtcaggttatgagcgaagaggtgaa

SEQ ID NO: 482595 - DNA, 75 bp, synthetic construct
  source 1..75: mol_type = other DNA
tagcaataaagtgctgaaaggtacggtcgatagcgttgctgccggagtcactaacgccagcagcacgcgtgatga

SEQ ID NO: 482596 - DNA, 75 bp, synthetic construct
  source 1..75: mol_type = other DNA
agcaccaccggaacggggggcggcggtggcgaatatccattacaggatggctttggctggaccaatggcgtgacg

SEQ ID NO: 482597 - DNA, 75 bp, synthetic construct
  source 1..75: mol_type = other DNA
ttatcgttgaactaggtttcaatgaaagcgttattaaaggtctgcaaagagttgaaaaactcgctatgcagtcag

SEQ ID NO: 482598 - DNA, 75 bp, synthetic construct
  source 1..75: mol_type = other DNA
atgacacacgagtacaaacccttctggcaacaacgtatccgtgagacggtgctgcgcgcacttgatgttcatccc

SEQ ID NO: 482599 - DNA, 75 bp, synthetic construct
  source 1..75: mol_type = other DNA
ttcagcaagtgctggaacgtgctgactatctggcgaaggagtataccaaagctcactgcaccggtgagcgcaatt

SEQ ID NO: 482600 - DNA, 75 bp, synthetic construct
  source 1..75: mol_type = other DNA
agcgctacggtgtcgccgcaggtggtcgcagactggcagcactcaacatgctggcagagcgtggaatcattccgg

SEQ ID NO: 482601 - DNA, 75 bp, synthetic construct
  source 1..75: mol_type = other DNA
tggtcaccggtatcagcttcggttttgtcttctacgtactggaccagatcttcggcccgctgacgttggtttatg

SEQ ID NO: 482602 - DNA, 75 bp, synthetic construct
  source 1..75: mol_type = other DNA
cggagcgttttcatattttgcctccggggatttatcctgaccgtaaatatagccagcagccagccaatagccgtg

SEQ ID NO: 482603 - DNA, 75 bp, synthetic construct
  source 1..75: mol_type = other DNA
gggagtttggggagttcaaaggtaaaaaaacactatcacctgatgctgctggtcaaccgggatacctggtgtcgt

SEQ ID NO: 482604 - DNA, 75 bp, synthetic construct
  source 1..75: mol_type = other DNA
gagtggatgccggacgttatgacacgctggcacattttccggtcaggccggcggtgtggctggaacgcgatgatg

SEQ ID NO: 482605 - DNA, 75 bp, synthetic construct
  source 1..75: mol_type = other DNA
tacccaactaatactaaactgagtgaagatttagccttatggtttctattactttctcgtggttacaaatttgca

SEQ ID NO: 482606 - DNA, 75 bp, synthetic construct
  source 1..75: mol_type = other DNA
tgcacgaatggatagtgatgacgagtcattacctgatcggttttgtgagcagataaattatctgcaaaaagcgcc

SEQ ID NO: 482607 - DNA, 75 bp, synthetic construct
  source 1..75: mol_type = other DNA
gtgtctataacggagatctacctcagaatgtagaacttgcaattgatagtattttaaatcaaaggtataaaaatt

SEQ ID NO: 482608 - DNA, 75 bp, synthetic construct
  source 1..75: mol_type = other DNA
ccgcagggcgagcagatggcgcgtaactaccgtgcgcaggcgatgtacggcggctcgttgctctctacccagcaa

SEQ ID NO: 482609 - DNA, 75 bp, synthetic construct
  source 1..75: mol_type = other DNA
cgtagcgtgccgatgggcgtgcgcgtggttaccggtatcagcttcggttttgtgttctatgtactggatcagatc

SEQ ID NO: 482610 - DNA, 75 bp, synthetic construct
  source 1..75: mol_type = other DNA
acgacgttctggggtgaagaaagcatttagtgaaatgaatattagatttctttattcacttaagatgaaaaattt

SEQ ID NO: 482611 - DNA, 75 bp, synthetic construct
  source 1..75: mol_type = other DNA
tcccgcagtttgtccgtttcccgaatacgctggaagaagtggcggcgctggagagtattgaagagtgctggtttg

SEQ ID NO: 482612 - DNA, 75 bp, synthetic construct
  source 1..75: mol_type = other DNA
tggcgcgtctggaaaataatctggcaattgccctgaaacgcgacgacatgaccgcagaactgctcaatttgtggc

SEQ ID NO: 482613 - DNA, 75 bp, synthetic construct
  source 1..75: mol_type = other DNA
cggcgaccggcgatcgcaccattaacatccacagttattacaacgatcagccggttgattatctcttctggcaag

SEQ ID NO: 482614 - DNA, 75 bp, synthetic construct
  source 1..75: mol_type = other DNA
gagcagaaaaccctgaaatcctggcaggcggtgtggctggaaaacgactacatcaaagtgatgatcctgccggag

SEQ ID NO: 482615 - DNA, 75 bp, synthetic construct
  source 1..75: mol_type = other DNA
cgcgctgaattgacggcgattaatccggcctggccgaaagcggcattattcaccaccgtgatgccttttattttt

SEQ ID NO: 482616 - DNA, 75 bp, synthetic construct
  source 1..75: mol_type = other DNA
cctgatgactgccgggcagttgattaactggggaatgcccgccctggcggcagagatgctgaacgcactggactg

SEQ ID NO: 482617 - DNA, 75 bp, synthetic construct
  source 1..75: mol_type = other DNA
gagatgggccggaaaatggatgcctttaaggcgcgggttatccgcaacagcctgcggccccctgccgtgcccggt

SEQ ID NO: 482618 - DNA, 75 bp, synthetic construct
  source 1..75: mol_type = other DNA
cagccgcagtatcagcagccgcaacaaccagttgcgccgcagccgcatgataccctgcttcatccgctgttgatg

SEQ ID NO: 482619 - DNA, 75 bp, synthetic construct
  source 1..75: mol_type = other DNA
tatcgtcggcctggcgctgggtatcgtggtgctgaacccggaactgaaaatgcctgctatgacccagtacattga

SEQ ID NO: 482620 - DNA, 75 bp, synthetic construct
  source 1..75: mol_type = other DNA
gtgctggtttgcccggcatttactggcctgtttctactacaacaagcgtagctacggcaaagccattgccttatg

SEQ ID NO: 482621 - DNA, 75 bp, synthetic construct
  source 1..75: mol_type = other DNA
aagctggcaaattgcttcatgccgctctgcactacccggagaatttgagcgaagggcgtttaccggggcaaactg

SEQ ID NO: 482622 - DNA, 75 bp, synthetic construct
  source 1..75: mol_type = other DNA
tcagcagccgcaacagccagttgcgccacagccgcaggataccctgcttcatccgctgttgatgcgtaatggcga

SEQ ID NO: 482623 - DNA, 75 bp, synthetic construct
  source 1..75: mol_type = other DNA
actactctgttggggtggatatctctcgctataaaaacgtacccgtaccgacctcatacatggccgaaaaatcac

SEQ ID NO: 482624 - DNA, 75 bp, synthetic construct
  source 1..75: mol_type = other DNA
gaccccgcagaactacgaaactacattctgacgggtgaaacccgcgcattaagtacaggcgttcccgctgatggt

SEQ ID NO: 482625 - DNA, 75 bp, synthetic construct
  source 1..75: mol_type = other DNA
gctccagacgaaaaaagttactggcagtctcagcgccgacatgctgattgacctgaaatttacgctgcgcaataa

SEQ ID NO: 482626 - DNA, 75 bp, synthetic construct
  source 1..75: mol_type = other DNA
ctagtaagcaacgacgagctgcgtcactacattatgaccggtgatacccgttctctctccacgctggtgcaggct

SEQ ID NO: 482627 - DNA, 75 bp, synthetic construct
  source 1..75: mol_type = other DNA
atgcgtcccgcgactatcgcccctttaacgccatacgataaatgggatggtgagaaatgggtgacagatactgaa

SEQ ID NO: 482628 - DNA, 75 bp, synthetic construct
  source 1..75: mol_type = other DNA
atgcgtcccgcgactatcgccccattatcgccatacgataaatgggatggtgagaaatgggtgacagatactgaa

SEQ ID NO: 482629 - DNA, 75 bp, synthetic construct
  source 1..75: mol_type = other DNA
atgcgtcccgcgactatcgccccattaacgccatacgataaatgggatggtgagaaatgggtgacggataccgag

SEQ ID NO: 482630 - DNA, 75 bp, synthetic construct
  source 1..75: mol_type = other DNA
gaacatttcgtacagcctttacgttcagtgagttagctggcttggatgtaaccactcgttcaactcaattctctt

SEQ ID NO: 482631 - DNA, 75 bp, synthetic construct
  source 1..75: mol_type = other DNA
ataacgattccaataaagtggatggaacctctgtaaaatcaccaaaaaaggtaagcattacagagcagatagcag

SEQ ID NO: 482632 - DNA, 75 bp, synthetic construct
  source 1..75: mol_type = other DNA
aagtctcacttattagatttagcatgttccacgggttttagttcacgtgaatgcttcaaaaaagaaggtgcatcc

SEQ ID NO: 482633 - DNA, 75 bp, synthetic construct
  source 1..75: mol_type = other DNA
gcctggtacttccgttgaaggtgagccagtaagcaacgacgagctgcgccactacatcatgacaggtgatacccg

SEQ ID NO: 482634 - DNA, 75 bp, synthetic construct
  source 1..75: mol_type = other DNA
gtggtgatgagcagaatcattacacgtctacccggattggatatttcatgtcctgaaacagactctttaagctaa

SEQ ID NO: 482635 - DNA, 75 bp, synthetic construct
  source 1..75: mol_type = other DNA
cagtgagttagttggcttggatgtaaccactcgttcaactcaattctcttggcgtgggaaaatttccgttttcca

SEQ ID NO: 482636 - DNA, 75 bp, synthetic construct
  source 1..75: mol_type = other DNA
gacaaacgtactgacaaagaaacaccgtacgttccaatcccggaaggcggcgtgaagatctcttcgcaccactaa

SEQ ID NO: 482637 - DNA, 75 bp, synthetic construct
  source 1..75: mol_type = other DNA
tgcgtctcccggatgtgccggcagcaacggacgcagctgtgatatcccgcttcatcaatgccctgaaagcccgaa

SEQ ID NO: 482638 - DNA, 75 bp, synthetic construct
  source 1..75: mol_type = other DNA
ccctgggagtggatgtcgggtgccatgccacgctggtgcattttccggcctggccggcggtgtggctggaacgcg

SEQ ID NO: 482639 - DNA, 75 bp, synthetic construct
  source 1..75: mol_type = other DNA
ttttcctgacaagccagcggtgtggctggaacgcgatgatgaaaccggctttcagcaggtgctggaacgttctgg

SEQ ID NO: 482640 - DNA, 75 bp, synthetic construct
  source 1..75: mol_type = other DNA
ctggaacgcgatgatgatgctggtttacgggatatgctgaaccgtgctgactatctcgcgaaagagtataccaaa

SEQ ID NO: 482641 - DNA, 75 bp, synthetic construct
  source 1..75: mol_type = other DNA
taccgcgatccggggtcactggccgggatgattaaacaggcgtggtgcagtgccctgggggtggatgccggatgc

SEQ ID NO: 482642 - DNA, 75 bp, synthetic construct
  source 1..75: mol_type = other DNA
gtaaacgcgtacataccacaaggctgcattacgtctgggcccgggaattcggggtgctcaggggtaaaaaacact

SEQ ID NO: 482643 - DNA, 75 bp, synthetic construct
  source 1..75: mol_type = other DNA
aaaacactatcacctgatgctgctggtcaaccgggatacctggtgtcgtgccggtgattaccgtgctccgggatc

SEQ ID NO: 482644 - DNA, 75 bp, synthetic construct
  source 1..75: mol_type = other DNA
cgggatcactggccgggatgattaaacaggcgtggtgcagtgccctgggagtagatgccggacgttatgacacgc

SEQ ID NO: 482645 - DNA, 75 bp, synthetic construct
  source 1..75: mol_type = other DNA
gctgctggtcaaccgggatacctggtgtcgtgccggcgattaccgcgctccgggatcactggccgggatgattaa

SEQ ID NO: 482646 - DNA, 75 bp, synthetic construct
  source 1..75: mol_type = other DNA
tcgacgcttaccagaaacgtaagcatcgggaaggtaaacgcgtgcatcccaccaccctgcattacgcctgggccc

SEQ ID NO: 482647 - DNA, 75 bp, synthetic construct
  source 1..75: mol_type = other DNA
atgacatacgagtacaatcccttctggcaacaacgtatccgtgagacggtactgcgtgcactggatgttcatccc

SEQ ID NO: 482648 - DNA, 75 bp, synthetic construct
  source 1..75: mol_type = other DNA
gaaggccagctggtcaaacgcgcccgcacacctgattaaacgcgctattaccgaaaccgagatgcgcaccgacaa

SEQ ID NO: 482649 - DNA, 75 bp, synthetic construct
  source 1..75: mol_type = other DNA
tggctggcgcgtaatgatgacaccggctttcagcaagtgctggaacgtgctgactatctggcgaaggagcatacc

SEQ ID NO: 482650 - DNA, 75 bp, synthetic construct
  source 1..75: mol_type = other DNA
gacgccgcctgttgcctctgttgatgttccacctgcacaacctacagtagcctggcagcctgtaccggggccaca

SEQ ID NO: 482651 - DNA, 75 bp, synthetic construct
  source 1..75: mol_type = other DNA
ccacgttgccggtacgtgtccatggtgcttttgttcgcgatcaggaagttcatgccgtggtgcaggactggaaag

SEQ ID NO: 482652 - DNA, 75 bp, synthetic construct
  source 1..75: mol_type = other DNA
gctgttcggtatctccaaccagatgctggcagccgtagcgctggtactgggtaccgttgtactgattaagatgaa

SEQ ID NO: 482653 - DNA, 75 bp, synthetic construct
  source 1..75: mol_type = other DNA
cggttgcgccacagcagcaatatcagcagccgcaacaaccggttgcgccgcagcagcagtatcagcagccacaac

SEQ ID NO: 482654 - DNA, 75 bp, synthetic construct
  source 1..75: mol_type = other DNA
gcggaaaaattcattaatccgatggggcggcaaacagacgctgcgttgttctccggtaagcggatggatgatgac

SEQ ID NO: 482655 - DNA, 75 bp, synthetic construct
  source 1..75: mol_type = other DNA
aaaaagaaccatacattgtggtgttggttgacgaatttgccgacctgatgatgacggtaggtaaaaaagtggaag

SEQ ID NO: 482656 - DNA, 75 bp, synthetic construct
  source 1..75: mol_type = other DNA
ataagcctgtaattcaagttgaaaactatgaccgcatagatggtccatatgcagaagatacagatgccatgggac

SEQ ID NO: 482657 - DNA, 75 bp, synthetic construct
  source 1..75: mol_type = other DNA
gtcttctgatgatgattttccggtcagtcgggcgggagataacccggacctggaacatcacacggaactaatgaa

SEQ ID NO: 482658 - DNA, 75 bp, synthetic construct
  source 1..75: mol_type = other DNA
tgccatgccacgctggtgcattttccggcctggccggcggtgtggctggcgcgtaatgatgacaccggctttcag

SEQ ID NO: 482659 - DNA, 75 bp, synthetic construct
  source 1..75: mol_type = other DNA
aacgctggcggtaggtatcgctcacgtgttccacaaagtgctgccgatggctgacatgggcttctggtatcactt

SEQ ID NO: 482660 - DNA, 75 bp, synthetic construct
  source 1..75: mol_type = other DNA
cagccgcagcaaccggtagcgccgcagccgcaggataccctgcttcatccgctgttaatgcgcaatggcgacagt

SEQ ID NO: 482661 - DNA, 75 bp, synthetic construct
  source 1..75: mol_type = other DNA
caaccggtagcgccacagccgcaatatcagcagccgcaacaaccggtagcgccacagccgcagtatcaacagccg

SEQ ID NO: 482662 - DNA, 75 bp, synthetic construct
  source 1..75: mol_type = other DNA
ctgaactcaaaaaacgccataccgggttagaggtcgattttaataagcgtgacgcaaatgccttcacttgtgcga

SEQ ID NO: 482663 - DNA, 75 bp, synthetic construct
  source 1..75: mol_type = other DNA
ttgggatgatgatttaatgaagagtgaaaactcctctcgtcatctattaggatttgattctgtttataaaaataa

SEQ ID NO: 482664 - DNA, 75 bp, synthetic construct
  source 1..75: mol_type = other DNA
agcaatctttctctgccaaagagttttactgaccttgataaagatcgtgcccgtcgcgagggttttgagtatgtc

SEQ ID NO: 482665 - DNA, 75 bp, synthetic construct
  source 1..75: mol_type = other DNA
tatattagaatgagagataatagcattcaggcgaaatgtatttgtcataatattctttcagaaccgtttgtattc

SEQ ID NO: 482666 - DNA, 75 bp, synthetic construct
  source 1..75: mol_type = other DNA
acagctacctttatctcttagtcgtaatgttcgtattgaaaaaagagccgagctacgagagttaagccataaatt

SEQ ID NO: 482667 - DNA, 75 bp, synthetic construct
  source 1..75: mol_type = other DNA
caatagcaaatatatataatcgcaacccaactgttttaatagcatttcctacgccctcaggaatgaatattatag

SEQ ID NO: 482668 - DNA, 75 bp, synthetic construct
  source 1..75: mol_type = other DNA
ttggcgggatattgtcggtcggacgtgtccagactccgacactggccctgattgtccggcgggaaagagaaatca

SEQ ID NO: 482669 - DNA, 75 bp, synthetic construct
  source 1..75: mol_type = other DNA
cgtttatggttgtctgcgctggatgaggcgagtatcagacaggcattaaataacctgttacccggcgagaaaacg

SEQ ID NO: 482670 - DNA, 75 bp, synthetic construct
  source 1..75: mol_type = other DNA
gataatttttttcagggaaatggcgttcaggtcgcctgggcaagaggtcatctgctggaacaggctgaaccggag

SEQ ID NO: 482671 - DNA, 75 bp, synthetic construct
  source 1..75: mol_type = other DNA
acgcagggcgtcacacgagtggttaaaaaaagaaagaaggcagtgaagaagagcattacaggactctttacctga

SEQ ID NO: 482672 - DNA, 75 bp, synthetic construct
  source 1..75: mol_type = other DNA
ggtgtgtacagtgaatgaaacgaaaggaaaagcattgccgccgttgccgtttgatctcgggacacttcagcaggc

SEQ ID NO: 482673 - DNA, 75 bp, synthetic construct
  source 1..75: mol_type = other DNA
atgaaactatttttatgcgaaaaaccgtctcaggccaaagatattgcccgggtggtcggcgctcatcagcgtcgg

SEQ ID NO: 482674 - DNA, 75 bp, synthetic construct
  source 1..75: mol_type = other DNA
cggcggtcattccggtaattttaagagactgtgcatggcatcagttagaattcggcagcattatggcggcgacta

SEQ ID NO: 482675 - DNA, 75 bp, synthetic construct
  source 1..75: mol_type = other DNA
ctccctgcatgtggtcagcagcaagccggatgtgacggaggggatcagcgccccgttgctcaaaaaaatgtcttc

SEQ ID NO: 482676 - DNA, 75 bp, synthetic construct
  source 1..75: mol_type = other DNA
tgctggattacctgttttaacaacagcggtatgtgggtacgcgcattatattgcggatgctaattgtggaacggt

SEQ ID NO: 482677 - DNA, 75 bp, synthetic construct
  source 1..75: mol_type = other DNA
tgaagcgttggcagaaaaacttggcgtgcgtagcaatgtgcgtttcttttccggtcgcaacgatgtgtcggaatt

SEQ ID NO: 482678 - DNA, 75 bp, synthetic construct
  source 1..75: mol_type = other DNA
actttggtattgaaacaccctcagcgttagataactttactcaggcccgaattcaagtccgaagtgcgacactct

SEQ ID NO: 482679 - DNA, 75 bp, synthetic construct
  source 1..75: mol_type = other DNA
gtcaattacagttgaatgtgacagatcgtaagaccggaaaaacttcgaccattcaggtttcgggtttacaaaata

SEQ ID NO: 482680 - DNA, 75 bp, synthetic construct
  source 1..75: mol_type = other DNA
catcgctgaacctttctcccaggaacaattaaatgacgttttacgtaaagcgttaactcaatctccattgcgcat

SEQ ID NO: 482681 - DNA, 75 bp, synthetic construct
  source 1..75: mol_type = other DNA
gatagcttctcttttgaagagacggcgctgtacaagaaagtttatcagcttgcagaagcgaaaacggggaaatct

SEQ ID NO: 482682 - DNA, 75 bp, synthetic construct
  source 1..75: mol_type = other DNA
aattcgccgtcagttagagaaaggggaccgcttctcttttgaagagacggcgttgtaccagaaagtttatcagct

SEQ ID NO: 482683 - DNA, 75 bp, synthetic construct
  source 1..75: mol_type = other DNA
gtgactttattgcttctgattactgctatcaggtagagatgaaaaacgcactggaacggcataaccggggcgagg

SEQ ID NO: 482684 - DNA, 75 bp, synthetic construct
  source 1..75: mol_type = other DNA
aatattttccatttggtgggcttcaacgtgactttatgcgcattgcatcaacagttgccgcacggggccaccatg

SEQ ID NO: 482685 - DNA, 75 bp, synthetic construct
  source 1..75: mol_type = other DNA
atgaatcattatgagaaagggcggcatgtccccgatattgatacgcttcgacggatggcgtcagagttaaacgtg

SEQ ID NO: 482686 - DNA, 75 bp, synthetic construct
  source 1..75: mol_type = other DNA
aaagatggtgtttccgttgctcgtgaaatcgagctggaagacaagttcgaaaatatgggtgcgcagatggtgaaa

SEQ ID NO: 482687 - DNA, 75 bp, synthetic construct
  source 1..75: mol_type = other DNA
cagttatttaagaccagcggtaaagctgtggtcgttgctggctggaagagtttgtttggtaaggatgctgacgag

SEQ ID NO: 482688 - DNA, 75 bp, synthetic construct
  source 1..75: mol_type = other DNA
cggcgtcaaactggcggaacgcctcaacgtgcagccgggcgacagcatcacgctggtggatcacaatcagcgtaa

SEQ ID NO: 482689 - DNA, 75 bp, synthetic construct
  source 1..75: mol_type = other DNA
tacattgctggctggtcttttctccggtctatttctggttaattctctcgaatttcattctttatatttctccag

SEQ ID NO: 482690 - DNA, 75 bp, synthetic construct
  source 1..75: mol_type = other DNA
agtgtaatgggtggcatcggttggcaattctcccgcagaacgcctcctgaattaaaaaacagactgcattgctga

SEQ ID NO: 482691 - DNA, 75 bp, synthetic construct
  source 1..75: mol_type = other DNA
tcagagcagtcaccgcgggtggtgctctgggaaatcgacctgacggtgcagggcggtgagcggtattttttctgc

SEQ ID NO: 482692 - DNA, 75 bp, synthetic construct
  source 1..75: mol_type = other DNA
gaaagtctgaacgagtcggttaaatcagagcagtcaccgcgggtggtactctgggaaatcgacctgacggtacag

SEQ ID NO: 482693 - DNA, 75 bp, synthetic construct
  source 1..75: mol_type = other DNA
tatgagcgtggattggcccagactcagacaatgagagagcacggtgctaacacccagacacgtcaccagccaggc

SEQ ID NO: 482694 - DNA, 75 bp, synthetic construct
  source 1..75: mol_type = other DNA
aatcacttgaattacatgctgttgcagaaagtcatgtcacacctctttatcagttaatctgtaaaaataaaacct

SEQ ID NO: 482695 - DNA, 75 bp, synthetic construct
  source 1..75: mol_type = other DNA
tgatgctgcatcaacgcggctatgccaaaatgtttatgatttttaaagaaaatgaactcgtcggcgttatatcgt

SEQ ID NO: 482696 - DNA, 75 bp, synthetic construct
  source 1..75: mol_type = other DNA
gaaaaaccggggctgggtgtagaaatcgatatggatcaagtgatgaaagcccatgagcggtatcagaaacacggg

SEQ ID NO: 482697 - DNA, 75 bp, synthetic construct
  source 1..75: mol_type = other DNA
agaaatcacgatttatccgtatatcaacgaaacaattatttctggcggcaccgcgcatgaaggcggggcggtcca

SEQ ID NO: 482698 - DNA, 75 bp, synthetic construct
  source 1..75: mol_type = other DNA
tggtggcagaccggagaaacaccgggcacgtttcgcctggatatcgacgtgcaggaccagggcatcactgaagat

SEQ ID NO: 482699 - DNA, 75 bp, synthetic construct
  source 1..75: mol_type = other DNA
cgttgtgcaggacgctttttatatccatcagcacaaagggacaaccagtgccgtgcggcgtgtggtggagccgtt

SEQ ID NO: 482700 - DNA, 75 bp, synthetic construct
  source 1..75: mol_type = other DNA
atgcaggatattcacgaagaaagcctgaacgagtcggttaagtcagagcagtcaccgcgggtggtactctgggaa

SEQ ID NO: 482701 - DNA, 75 bp, synthetic construct
  source 1..75: mol_type = other DNA
aaaaatgcggcgggaatggtgagcgatccggcactgaaaaaagtgttacgcgagaatgccggactgggcacggaa

SEQ ID NO: 482702 - DNA, 75 bp, synthetic construct
  source 1..75: mol_type = other DNA
gcgtatggtgagcagtttggcagtccctggaaaattgacgttttgccggtctttcctgaacagtggcagatggtg

SEQ ID NO: 482703 - DNA, 75 bp, synthetic construct
  source 1..75: mol_type = other DNA
tctgccagcagcagaaaggtgcaacggtactggatgtgaatcagaagcgcgataaaacaccggctccgctttgct

SEQ ID NO: 482704 - DNA, 75 bp, synthetic construct
  source 1..75: mol_type = other DNA
cattctggggatgcgtcaactaccctgactgcaacgggattgtgaatgtcggggcgaagaagcctggtcgtcggc

SEQ ID NO: 482705 - DNA, 75 bp, synthetic construct
  source 1..75: mol_type = other DNA
aagctggtttctgatggcagcgtcaaaaaaataaattatccggtgctgtatgagtccggaataacacctccgtta

SEQ ID NO: 482706 - DNA, 75 bp, synthetic construct
  source 1..75: mol_type = other DNA
gcggggggaaacgcattgtggcatatgtttataaatcatcacggaatacggtttttgaaaatcctgacattgtaa

SEQ ID NO: 482707 - DNA, 75 bp, synthetic construct
  source 1..75: mol_type = other DNA
gcgtgttgcacggtatcaatcctgaaaggctgaccattgagctctccgatgccgacggcaatattgtactgagtt

SEQ ID NO: 482708 - DNA, 75 bp, synthetic construct
  source 1..75: mol_type = other DNA
agaagcgtttcgagcagtatttcctgccttatcattctttgggcatggtgcaaaatgcctcccgcgatgcggtga

SEQ ID NO: 482709 - DNA, 75 bp, synthetic construct
  source 1..75: mol_type = other DNA
gataagagtctgaccgacaataacggcccgtatatcgaactgatgaccggtatttttgccgataaccagcctgat

SEQ ID NO: 482710 - DNA, 75 bp, synthetic construct
  source 1..75: mol_type = other DNA
actctgatagctcgtgaatccggtgtttccgacgtgttgtctgttgggcgggttcagacgccgacgctggccatt

SEQ ID NO: 482711 - DNA, 75 bp, synthetic construct
  source 1..75: mol_type = other DNA
agccaaacagggactggagaatgctgtagctattacgttaaccggttctctactgggcgatgaagtaatgagtcc

SEQ ID NO: 482712 - DNA, 75 bp, synthetic construct
  source 1..75: mol_type = other DNA
aagccttcaaaattctgtcagatgccggtatctctacaccagaatctataaccataagccgggcagcgtctgtaa

SEQ ID NO: 482713 - DNA, 75 bp, synthetic construct
  source 1..75: mol_type = other DNA
aataacacacaatcaactccaccagctattacaggtgacatggttaatagtaatgctcaacttgcaatgactatt

SEQ ID NO: 482714 - DNA, 75 bp, synthetic construct
  source 1..75: mol_type = other DNA
aggtgacattagcttatcgtggtttaaccgatgaacaaaagaaagttgttgatgctttaggttctggcttgatta

SEQ ID NO: 482715 - DNA, 75 bp, synthetic construct
  source 1..75: mol_type = other DNA
atctatgcaggttatgaaagattagcttctacacctgaacgaatggaagcacaagctaaattaccagagctagct

SEQ ID NO: 482716 - DNA, 75 bp, synthetic construct
  source 1..75: mol_type = other DNA
cagaggtcatacatccaccagcattaatggtgacagagcagctaatagtcttgataacctgtcttcagcagcagt

SEQ ID NO: 482717 - DNA, 75 bp, synthetic construct
  source 1..75: mol_type = other DNA
atgagcaaattcacagttgatagttttatcgttgagctaggcttcaatgagaatgttattaaaggtctgcaaaga

SEQ ID NO: 482718 - DNA, 75 bp, synthetic construct
  source 1..75: mol_type = other DNA
tcaggaagttttaaaaggtctggaaaaagccgagaaacaaacgatgcaggtagcatcacgaattgagaagcgatt

SEQ ID NO: 482719 - DNA, 75 bp, synthetic construct
  source 1..75: mol_type = other DNA
agaagtattgatttcgtattcggtgaccaaagtacacaggttaaaaagttcattcaagatttaactcaaattact

SEQ ID NO: 482720 - DNA, 75 bp, synthetic construct
  source 1..75: mol_type = other DNA
gaccaatcttttaaacgctcttggtggaactggtaaaacattaggtgaaagttttggtagcttgatgagcgatat

SEQ ID NO: 482721 - DNA, 75 bp, synthetic construct
  source 1..75: mol_type = other DNA
agagtcagttttacgcattaagtagtaaagctggtcagatggataacaccaagtttaatgaagcccttgctaaac

SEQ ID NO: 482722 - DNA, 75 bp, synthetic construct
  source 1..75: mol_type = other DNA
agcagcagttaaaacagcaggtgcatttatctcaatgcaggctgtattagccagttatcagaagattatggaaat

SEQ ID NO: 482723 - DNA, 75 bp, synthetic construct
  source 1..75: mol_type = other DNA
gaccaatcttttaaacgctcttggtggaagcggtaaaagtcttggtgaatctcttggtagcttgatgagcgatat

SEQ ID NO: 482724 - DNA, 75 bp, synthetic construct
  source 1..75: mol_type = other DNA
accaaagtacacaggttaaaaagttcattcaagatttaactcaaattactggtatggacacaaccgaaacacaag

SEQ ID NO: 482725 - DNA, 75 bp, synthetic construct
  source 1..75: mol_type = other DNA
ggctggaaagctattcaggactctacgcagacaatgttagggaacttaaagaatacttggaacaactcactaacg

SEQ ID NO: 482726 - DNA, 75 bp, synthetic construct
  source 1..75: mol_type = other DNA
aacaacgcttttaaacagtttaggtggaagtggtaagagtcttggtgaaagttttggtagtctcatgacttctat

SEQ ID NO: 482727 - DNA, 75 bp, synthetic construct
  source 1..75: mol_type = other DNA
tgcaccatctttctttagcttcaatcaatcagctaatgaccaattcacgcaggatatgctcttaagttcaagcta

SEQ ID NO: 482728 - DNA, 75 bp, synthetic construct
  source 1..75: mol_type = other DNA
attctcgtttaatgggtcgaagtgaagaagaaattaagcgagcattaacagcgctatcgcagatggctggtaagg

SEQ ID NO: 482729 - DNA, 75 bp, synthetic construct
  source 1..75: mol_type = other DNA
ttgatagtttgagtttagcagcagttaaaacagcaggtgcatttatttctatgcaggctgtattagcaagctatc

SEQ ID NO: 482730 - DNA, 75 bp, synthetic construct
  source 1..75: mol_type = other DNA
tttaaacagtttaggtggaagcggtaagagtcttggtgaatctcttggtagtctcatgacttctatgtcacatgg

SEQ ID NO: 482731 - DNA, 75 bp, synthetic construct
  source 1..75: mol_type = other DNA
gtctatgggtattcagggttctgaagagctttttagaaatacgattggctattctcgtctgatgggtcgaagtga

SEQ ID NO: 482732 - DNA, 75 bp, synthetic construct
  source 1..75: mol_type = other DNA
ttattgttgagctgggcttcagtgaaaacgttgttaagggattgcaaagagttgaaaaggcagctttgcagtcag

SEQ ID NO: 482733 - DNA, 75 bp, synthetic construct
  source 1..75: mol_type = other DNA
tctttgatgaggtgacattagcttatcgtggtttaaccgatgaacaaaagaaagtagttgatgctttaggttctg

SEQ ID NO: 482734 - DNA, 75 bp, synthetic construct
  source 1..75: mol_type = other DNA
accagcattaatagtgacaaagcagctagttctcttgatagtctgtcttcagcagcatttagagcagcaggtgca

SEQ ID NO: 482735 - DNA, 75 bp, synthetic construct
  source 1..75: mol_type = other DNA
ggtgcttcagctagagagtctctaggcattcaaggttctgaagaactttttagaaatatgattggctattctcgt

SEQ ID NO: 482736 - DNA, 75 bp, synthetic construct
  source 1..75: mol_type = other DNA
atggcacagtttaaagttgatgattttctgattgagttaagttttaactctcagaaagttttaaaaggcttggaa

SEQ ID NO: 482737 - DNA, 75 bp, synthetic construct
  source 1..75: mol_type = other DNA
aaacgttgttaagggattgcaaagagttgaaaaggcagctttgcagtcagcacaaagaattgaaaagaaccttaa

SEQ ID NO: 482738 - DNA, 75 bp, synthetic construct
  source 1..75: mol_type = other DNA
gaatatgtctaagctgaaaggtcttaacccaattgtcgagaaatacattaagagtcagttttacgcattaagtag

SEQ ID NO: 482739 - DNA, 75 bp, synthetic construct
  source 1..75: mol_type = other DNA
ttgagatggccgatccgatggtcgcgcagcgttcgacgggatatctggttggggggattagcccactggggcaga

SEQ ID NO: 482740 - DNA, 75 bp, synthetic construct
  source 1..75: mol_type = other DNA
atgacacccgcagttaaattactcgaaaaaaacaagatttcgtttcaaatccacacctacgagcacgatccggct

SEQ ID NO: 482741 - DNA, 75 bp, synthetic construct
  source 1..75: mol_type = other DNA
atgccttcgatgatagcgataattttactcattatccttcacatctggctctgtagacagggtggtgatcacttc

SEQ ID NO: 482742 - DNA, 75 bp, synthetic construct
  source 1..75: mol_type = other DNA
tagaagagcaggctaaagctgccggggagcaggccagacaggaggccattgaaagtaatgctcaggcgcaagcac

SEQ ID NO: 482743 - DNA, 75 bp, synthetic construct
  source 1..75: mol_type = other DNA
cgggaatgcgattccatctggggaattaaaagatgatgtcgttgagcaaatagcagaacaggctaaagccgcggg

SEQ ID NO: 482744 - DNA, 75 bp, synthetic construct
  source 1..75: mol_type = other DNA
aagcctcagaacgaggcgaaagaagggcagggagagaatggcagcagcggctccctgcatgtggtcagcagcaag

SEQ ID NO: 482745 - DNA, 75 bp, synthetic construct
  source 1..75: mol_type = other DNA
atacgtctgaaggttgttttgaaattggtgtcagaatcagtaactctgcatttactgaagatgccattaacaaga

SEQ ID NO: 482746 - DNA, 75 bp, synthetic construct
  source 1..75: mol_type = other DNA
atggaaacgttattaccgaacgttaatacgtctgaaggatgttttaatattggtgttctgctcagtaaccgggag

SEQ ID NO: 482747 - DNA, 75 bp, synthetic construct
  source 1..75: mol_type = other DNA
gtgacagatcgtaaaaccggacaaacctcgaccatccaggtttcgggtttacaaaataactcaaccgatttttaa

SEQ ID NO: 482748 - DNA, 75 bp, synthetic construct
  source 1..75: mol_type = other DNA
gacttcagtcaaagcctggttaatgaggccacggtcaaacaattgcaccggtgcgacttcatggaacaagcccag

SEQ ID NO: 482749 - DNA, 75 bp, synthetic construct
  source 1..75: mol_type = other DNA
ttatagcagcgcaggtattccggttgctattgatgccagtccggaatgggctgttgaagccgcaagatggacaga

SEQ ID NO: 482750 - DNA, 75 bp, synthetic construct
  source 1..75: mol_type = other DNA
gccatcaggatgagaaaatatgagccttatcttctcaatgataattccattctctccagaattgcccttttttaa

SEQ ID NO: 482751 - DNA, 75 bp, synthetic construct
  source 1..75: mol_type = other DNA
agagactctgttgctgattctgtcgacaataatcgtgccagcgatgttcctggacttcctgtacatccgatgcgc

SEQ ID NO: 482752 - DNA, 75 bp, synthetic construct
  source 1..75: mol_type = other DNA
tggagctatctgttaaacaagccgatttcgaacgctggcagcacatcgatgcggaagagcaggtacagaaggatc

SEQ ID NO: 482753 - DNA, 75 bp, synthetic construct
  source 1..75: mol_type = other DNA
gctttcatcaaagggatatagtgtagattataaagtaatgccagctgcgtggtacggtgtaccacagacgcgaga

SEQ ID NO: 482754 - DNA, 75 bp, synthetic construct
  source 1..75: mol_type = other DNA
ccgtattcaagctcttggtaatggcgggatcataaccttaatcttgatactaacttttttaacactaaatggata

SEQ ID NO: 482755 - DNA, 75 bp, synthetic construct
  source 1..75: mol_type = other DNA
tttaaagaagccagaagtagacgtatcactgttacagattacattcttgatatgttgaaaagagaggctgaaaca

SEQ ID NO: 482756 - DNA, 75 bp, synthetic construct
  source 1..75: mol_type = other DNA
accaccatctttaaatttaaagatatcgaaattgacgatagcaaccctaatggcctgaacaaccgtgacaatatc

SEQ ID NO: 482757 - DNA, 75 bp, synthetic construct
  source 1..75: mol_type = other DNA
taatcggtgatgttgtagagcaaattgataaaatcgtgaaagctacccgctttgatggctggcaaaattccaaca

SEQ ID NO: 482758 - DNA, 75 bp, synthetic construct
  source 1..75: mol_type = other DNA
gcgacaatcgtgccagtgatgttcctggacttcctgtaaatccgatgcgcctggcggcgtctgagataacactga

SEQ ID NO: 482759 - DNA, 75 bp, synthetic construct
  source 1..75: mol_type = other DNA
gctatatttcaagataggtttacttcttcaaagatggctacaaaatacgaaaacgtctataataatttatttaga

SEQ ID NO: 482760 - DNA, 75 bp, synthetic construct
  source 1..75: mol_type = other DNA
ctaagaaaaaatgtggcccaaatattgtcatattgaacattgttaaagaattggctaataaacatgaaatggaaa

SEQ ID NO: 482761 - DNA, 75 bp, synthetic construct
  source 1..75: mol_type = other DNA
ggaatcataactctaatcttggcaatgacttttttaacattaaatggatatgtattccattttgaatggaactaa

SEQ ID NO: 482762 - DNA, 75 bp, synthetic construct
  source 1..75: mol_type = other DNA
ttaacgggggggggcgagagcgcagtaagtactgccaatgccgcaccaacgccgggacccgcacgtttcgtttaa

SEQ ID NO: 482763 - DNA, 75 bp, synthetic construct
  source 1..75: mol_type = other DNA
tcattggggactattgctgcaggtctgatagggatggctgcgacggggattgcacaggctgttgcgttgactcca

SEQ ID NO: 482764 - DNA, 75 bp, synthetic construct
  source 1..75: mol_type = other DNA
atgcgtcccgcgactatcgcccctttaccgccatacgataaatgggatggtgagaaatgggtgaccgatactgaa

SEQ ID NO: 482765 - DNA, 75 bp, synthetic construct
  source 1..75: mol_type = other DNA
agctaatcgctctccacaaagggctacgccgccgcaaagtggtgctcaaccgcctgcgcgtgcgccgggaggaca

SEQ ID NO: 482766 - DNA, 75 bp, synthetic construct
  source 1..75: mol_type = other DNA
cgctgtatcaaacgtgcaacggctctggccttatcaggcgaggtgaaagccatagccactgcgccgctgaataaa

SEQ ID NO: 482767 - DNA, 75 bp, synthetic construct
  source 1..75: mol_type = other DNA
attaaatttgcttcagaagtgatgcttgccgagtgtgttcttgtatcacccgatgaagctccatcaaaagcatta

SEQ ID NO: 482768 - DNA, 75 bp, synthetic construct
  source 1..75: mol_type = other DNA
ctgggtcggcctcctgcgccacgcagtaaacgccctgtctcaggaaatggcaaaccgcaccctgaccacaggtat

SEQ ID NO: 482769 - DNA, 75 bp, synthetic construct
  source 1..75: mol_type = other DNA
aggttgttatcgacaaaggcagcgttaacggggtttatgaaggtcagccggtcatcagcgataaaggtgttgttg

SEQ ID NO: 482770 - DNA, 75 bp, synthetic construct
  source 1..75: mol_type = other DNA
gatgcgacccacgcgctgccaatccaggtgctgcgcaacgatatccgcgtaattgcagccggtaacggttgtacg

SEQ ID NO: 482771 - DNA, 75 bp, synthetic construct
  source 1..75: mol_type = other DNA
atgggcggcgtggcggaagcgatttttgcgaactgcgcggaactggataacgaccagcttaacgagatcatcgag

SEQ ID NO: 482772 - DNA, 75 bp, synthetic construct
  source 1..75: mol_type = other DNA
gagccgacctggaacggtcgcatcctgcatacccactatgccaccgggcagcaggccgaagccctggttgaacac

SEQ ID NO: 482773 - DNA, 75 bp, synthetic construct
  source 1..75: mol_type = other DNA
gtcctggacttcctgacctggtgaagaggaaactgcctgtgactcagacaactatcccgctcacacccgagcaaa

SEQ ID NO: 482774 - DNA, 75 bp, synthetic construct
  source 1..75: mol_type = other DNA
gtggcgcagctggcagaaaaactgcatcagaaagcacaggccggtgagcgtatgccatcgtgcattaatatcatc

SEQ ID NO: 482775 - DNA, 75 bp, synthetic construct
  source 1..75: mol_type = other DNA
ccgcttctttacaattttcagaagaagtggccagtaccaacgttaaactggtcgaaggttatcagaagttacgca

SEQ ID NO: 482776 - DNA, 75 bp, synthetic construct
  source 1..75: mol_type = other DNA
ggagggaaaagcagaaaggctcacgtggcataaggcgtggacagcggtatcgtctggtttttcaatttcctatac

SEQ ID NO: 482777 - DNA, 75 bp, synthetic construct
  source 1..75: mol_type = other DNA
gactgccaaagttgcttatgacactggtgtcattgacattacatttacccaggctccgccagaaggtactgaaat

SEQ ID NO: 482778 - DNA, 75 bp, synthetic construct
  source 1..75: mol_type = other DNA
ggtctaggacgcaatgttaatctgtttgaagatcttagacattatgcatataaatccgttttaaaatttaaagaa

SEQ ID NO: 482779 - DNA, 75 bp, synthetic construct
  source 1..75: mol_type = other DNA
agcgactttacttaataatcatagcaaccctcataatccattatctcatgaagagacaaaacaaatttgtagcag

SEQ ID NO: 482780 - DNA, 75 bp, synthetic construct
  source 1..75: mol_type = other DNA
gcagcaatatcagcagccgcaacaaccggttgcaccgcagccgcagtatcagcagccgcaacaaccagttgcgcc

SEQ ID NO: 482781 - DNA, 75 bp, synthetic construct
  source 1..75: mol_type = other DNA
cacgtctcgacatgtcaagttccattatccagcgggccatgccaatgctgaaaagcctgcgggcaagacaatttg

SEQ ID NO: 482782 - DNA, 75 bp, synthetic construct
  source 1..75: mol_type = other DNA
tccgcgaagcagcaaaacttgatcccgccaactatatggtgcatagggccagaagcatgctggcgcaactacggg

SEQ ID NO: 482783 - DNA, 75 bp, synthetic construct
  source 1..75: mol_type = other DNA
tccgcgaagcagcaaaacttgatcccgccaactatatggtgcatagggctggcgcaactacgggcaagacaattt

SEQ ID NO: 482784 - DNA, 75 bp, synthetic construct
  source 1..75: mol_type = other DNA
atgaaacgaagaactcgtattaactacacgccagagcaaaaggtgattatttgggacagatataagcaaggtgat

SEQ ID NO: 482785 - DNA, 75 bp, synthetic construct
  source 1..75: mol_type = other DNA
tctcgttaaccgcaccactctctggggtagtgctatcaacgaagtccacccgcgcaacggtgagaattatttcgc

SEQ ID NO: 482786 - DNA, 75 bp, synthetic construct
  source 1..75: mol_type = other DNA
tgctgttcaggtcgaaattaacatcgagcgcaatccaagcctgattccggtgatcaaccaggctatgcgtaagta

SEQ ID NO: 482787 - DNA, 75 bp, synthetic construct
  source 1..75: mol_type = other DNA
atatcagcagccgcaacaaccggttgcaccgcagccgcagtatcagcagccgcaacaaccagttgcgccacagcc

SEQ ID NO: 482788 - DNA, 75 bp, synthetic construct
  source 1..75: mol_type = other DNA
ggcaggtaacgcctggcaagccgaagagcagcaatccacttttgctccacagtctacataccagactgagcaaac

SEQ ID NO: 482789 - DNA, 75 bp, synthetic construct
  source 1..75: mol_type = other DNA
ctgaatgtgaagcgattatcgagcggctgtatccggaacttgaacgccgtctggcaaaggtaaaacctgatttac

SEQ ID NO: 482790 - DNA, 75 bp, synthetic construct
  source 1..75: mol_type = other DNA
ggtcttccccgacagatgacgatgagctgccggaagtcaccggaccggcgtggatagtcgacaatgtggcgcatt

SEQ ID NO: 482791 - DNA, 75 bp, synthetic construct
  source 1..75: mol_type = other DNA
cagttatcgtgtaatacctatgcttgatatcctggtgtgggcagccgttaaaaaaatccgtgtctctgacgacag

SEQ ID NO: 482792 - DNA, 75 bp, synthetic construct
  source 1..75: mol_type = other DNA
atgcaaaactggtcagttgagcatacgaaagaggtgaagaagtggcttgatatcgatacctatcgtaagttcgaa

SEQ ID NO: 482793 - DNA, 75 bp, synthetic construct
  source 1..75: mol_type = other DNA
ccggaacagtctgcgcaacagccgtattacgcccctgcgccagaacaatcggtggcaggtaacgcctggcaagcc

SEQ ID NO: 482794 - DNA, 75 bp, synthetic construct
  source 1..75: mol_type = other DNA
gggatcgatattatctttattcccttcagaaacagtattcatattccttccatcataaaaatgtgtcgtgtagtg

SEQ ID NO: 482795 - DNA, 75 bp, synthetic construct
  source 1..75: mol_type = other DNA
cagcataatgtcacaggaacactgttaccggttgacgatctatcagcatggaaagaggctcttaatgatttcctc

SEQ ID NO: 482796 - DNA, 75 bp, synthetic construct
  source 1..75: mol_type = other DNA
agtccagccaaatcaaagataccgacaggcctttggctcttaaatcctgcacaactgactttatccgacaattcc

SEQ ID NO: 482797 - DNA, 75 bp, synthetic construct
  source 1..75: mol_type = other DNA
ccgtctggttgatggctgccttactaagctttaacccttcggaccccagctggtcgcaaacggcctggcatgaac

SEQ ID NO: 482798 - DNA, 75 bp, synthetic construct
  source 1..75: mol_type = other DNA
ccgatgcattagtgatgaagatggctgctgaaagtggtgcgccggaaagtgaactgtttaagcgccacgccaatc

SEQ ID NO: 482799 - DNA, 75 bp, synthetic construct
  source 1..75: mol_type = other DNA
gtaagagagcttgctgttacgctttcagaaagaaatatctcttttaaggagcttgcggagaatgccaaaacatcc

SEQ ID NO: 482800 - DNA, 75 bp, synthetic construct
  source 1..75: mol_type = other DNA
aataaaaaacgacaaaccgtttatctgcgcgaagttttggataacgccaaattccgcgataatccgtcgccatta

SEQ ID NO: 482801 - DNA, 75 bp, synthetic construct
  source 1..75: mol_type = other DNA
ttgttcgcgatcaggaagttcatgccgtggtgcaggactggaaagcgcgtggtcgcccacagtatgttgatggca

SEQ ID NO: 482802 - DNA, 75 bp, synthetic construct
  source 1..75: mol_type = other DNA
ttctttatttttggcgtgatggcttacaccattcccgtcattattgtcggcggttgttggtttgcctggcgtcat

SEQ ID NO: 482803 - DNA, 75 bp, synthetic construct
  source 1..75: mol_type = other DNA
atcgtatttctagccttgttgtcatgccttcgaaaagtgaagcatttggtatggtgatagctgaagcttctgctt

SEQ ID NO: 482804 - DNA, 75 bp, synthetic construct
  source 1..75: mol_type = other DNA
atgacagcctttcgtgccgcatttaaggcatatcgtatgcatcaggtgttaataatgcctcgctttgcacggctt

SEQ ID NO: 482805 - DNA, 75 bp, synthetic construct
  source 1..75: mol_type = other DNA
gagtggcatcaacattggtagttggcgactacgcgataactcaacgtggagttataacagtgggagtagcaattc

SEQ ID NO: 482806 - DNA, 75 bp, synthetic construct
  source 1..75: mol_type = other DNA
atgctgtggcttaatcaggggcagtttcataatcattatcacgaagaatatctgtggcacagtctttttcttacg

SEQ ID NO: 482807 - DNA, 75 bp, synthetic construct
  source 1..75: mol_type = other DNA
tatcccagcgcgacgttgatcgcgcagaaacggatttactcatcaacctgtcaacgcttacccagcgcggtctgg

SEQ ID NO: 482808 - DNA, 75 bp, synthetic construct
  source 1..75: mol_type = other DNA
cacggcctgaaaatccgcaatgcccgtttttcgctgtgtcagtttaaaccggaacataatctcaacccggaaacg

SEQ ID NO: 482809 - DNA, 75 bp, synthetic construct
  source 1..75: mol_type = other DNA
tttgatgttggtcagcaacatctgtcactctccgttccgcaaatttatgttggcagaatggctcgcggctattgt

SEQ ID NO: 482810 - DNA, 75 bp, synthetic construct
  source 1..75: mol_type = other DNA
gaatttatgctgcgtgtgttgcatcagctgaagatggaagggaaatcatttcgctggctcgtggtgggcaccggg

SEQ ID NO: 482811 - DNA, 75 bp, synthetic construct
  source 1..75: mol_type = other DNA
tgcatggagattactcggaatagttcatggttttcagcccaatgcaatcgtttgtcacagtgggcatgatagcaa

SEQ ID NO: 482812 - DNA, 75 bp, synthetic construct
  source 1..75: mol_type = other DNA
tgcggttgcgtgatgagttttataccatgctgcactctaggctcgaatgtctgggattcaagaaatttgaagagg

SEQ ID NO: 482813 - DNA, 75 bp, synthetic construct
  source 1..75: mol_type = other DNA
ctgtttcacttcctgcagcgtttggtggagataaatattttattgatggtgtatttcaacctttgagatatgagc

SEQ ID NO: 482814 - DNA, 75 bp, synthetic construct
  source 1..75: mol_type = other DNA
cgaataccggtttgatattaacagaacggcacagatcattgtgtctctggctcaccaggctaaggagaaacgcaa

SEQ ID NO: 482815 - DNA, 75 bp, synthetic construct
  source 1..75: mol_type = other DNA
atgatgaaaattttattcactgaatcttcgtcagatattggaggccaggagctgcaggcgctggcccagatgact

SEQ ID NO: 482816 - DNA, 75 bp, synthetic construct
  source 1..75: mol_type = other DNA
aaaaggctattgatctttttgaaggtaacgaaagtgcagcattaaactggtgcaatgaaccaaacagagcattac

SEQ ID NO: 482817 - DNA, 75 bp, synthetic construct
  source 1..75: mol_type = other DNA
ccggaacatacgaacgcgcatatcaccatgatcacaagaaaagccgagcgtactcatatttgcgaattactgcgc

SEQ ID NO: 482818 - DNA, 75 bp, synthetic construct
  source 1..75: mol_type = other DNA
tgccatcaccgttgaaggggccaacattctgacccgcagcatgatgatcttcggacaaggagcgattcgttgcca

SEQ ID NO: 482819 - DNA, 75 bp, synthetic construct
  source 1..75: mol_type = other DNA
gttgacagttgctataagatggcacaactctgggctccggaaactggcactctccaccgactggtgtgtctcgca

SEQ ID NO: 482820 - DNA, 75 bp, synthetic construct
  source 1..75: mol_type = other DNA
cgcatggaaagcgggacgtaacacctggtggtttgcagccacgttaacggtgctggggctatttgtcgttttaaa

SEQ ID NO: 482821 - DNA, 75 bp, synthetic construct
  source 1..75: mol_type = other DNA
ataatggactcagaagagggggtattgaaagttgccatgctcatttttcgaatagagcaaggcgtttattcatga

SEQ ID NO: 482822 - DNA, 75 bp, synthetic construct
  source 1..75: mol_type = other DNA
ggtcaggcgggtaaagaatacaccaatattggtgtcggttttgggactgaatcgacgggcctggcgttaagcggt

SEQ ID NO: 482823 - DNA, 75 bp, synthetic construct
  source 1..75: mol_type = other DNA
ctgtcgggtaaagacggtaaccgcgacaacgccgtggctgacggcccgtatgttggggttaacgccagtttctga

SEQ ID NO: 482824 - DNA, 75 bp, synthetic construct
  source 1..75: mol_type = other DNA
aaggtgctggataccggtagtggtattcctgactacgcgctgtcacgtatttttgaacgcttttactctttgccg

SEQ ID NO: 482825 - DNA, 75 bp, synthetic construct
  source 1..75: mol_type = other DNA
tatcagcacctgaaccgcctgagcgccaacctcgccctgctttctgatgtctcgatggcggtgctgggcggcagc

SEQ ID NO: 482826 - DNA, 75 bp, synthetic construct
  source 1..75: mol_type = other DNA
tggctggaatgctgttggtatctgcatctgttaatgcgatgagtatcagtggtcaggcaggtaaagaatatacca

SEQ ID NO: 482827 - DNA, 75 bp, synthetic construct
  source 1..75: mol_type = other DNA
ggctatcgctacctgaacctttctggtaaagacggtaaccgcgacaacgccgtggctgacggcccgtatgttggg

SEQ ID NO: 482828 - DNA, 75 bp, synthetic construct
  source 1..75: mol_type = other DNA
ccatttccgtttgccgctgctgttgcgggtttcagacaagcgcgtggaacccctgccggaaagtgagtactccgc

SEQ ID NO: 482829 - DNA, 75 bp, synthetic construct
  source 1..75: mol_type = other DNA
agcagttccggtaaaacattatctattgcgtttgttaatcagcgccaataccgtgctcaacaatgctttatgtcg

SEQ ID NO: 482830 - DNA, 75 bp, synthetic construct
  source 1..75: mol_type = other DNA
gcggttcctgacacagattctccctcccacagtcttaacattcaaaacaccgcaacgccacctgaacaatcccca

SEQ ID NO: 482831 - DNA, 75 bp, synthetic construct
  source 1..75: mol_type = other DNA
cccgttattcctgacggcgcaacggtagcagtcgatacaggcaacaagcggattattgacggcgaactctatgct

SEQ ID NO: 482832 - DNA, 75 bp, synthetic construct
  source 1..75: mol_type = other DNA
ggcagcagtcgattattgatgcgatggatatcactggtggcaaaggcattatgctcgggcagagcaacttcctgg

SEQ ID NO: 482833 - DNA, 75 bp, synthetic construct
  source 1..75: mol_type = other DNA
ttaccttgctggaaataatggtggtaattgtgatcttgggagttttggccagtctggtggtcccgaatctgatgg

SEQ ID NO: 482834 - DNA, 75 bp, synthetic construct
  source 1..75: mol_type = other DNA
aggcattggaaaatagcaccaagtacatgtgcaacatatattatgaaagccagggtttttgataggacaaaaata

SEQ ID NO: 482835 - DNA, 75 bp, synthetic construct
  source 1..75: mol_type = other DNA
agtccacgctgacaccggtgattgtggcggactctgaccgtgtccaggagataaccctgttctccggcccggtca

SEQ ID NO: 482836 - DNA, 75 bp, synthetic construct
  source 1..75: mol_type = other DNA
ggtggcagacccgcattatcgcaacgactggggattctacgacgatacggtgctggacgaagcatggaaaaaatt

SEQ ID NO: 482837 - DNA, 75 bp, synthetic construct
  source 1..75: mol_type = other DNA
aatacagcaaagaacacgaatggttgcgtaaagaagccgacggcacttacaccgttggtattaccgaacatgctc

SEQ ID NO: 482838 - DNA, 75 bp, synthetic construct
  source 1..75: mol_type = other DNA
gcgtaaagaagccgacggcacttacaccgttggtattaccgaacatgctcaggagctgttaggcgatatggtgtt

SEQ ID NO: 482839 - DNA, 75 bp, synthetic construct
  source 1..75: mol_type = other DNA
gcgtaaagaagccgacggcacttacaccgttggtatcaccgaacacgctcaggagctgttaggcgatatggtgtt

SEQ ID NO: 482840 - DNA, 75 bp, synthetic construct
  source 1..75: mol_type = other DNA
cgccattttgttggggattgcactggtgattggcgcaggcatggtttggtggatcaaccgctccattgcccggct

SEQ ID NO: 482841 - DNA, 75 bp, synthetic construct
  source 1..75: mol_type = other DNA
ctaatacaaaatggcgatgtgctctttgatggtatatgtgaaaatatcattgatagcgaggagttagaaaatgag

SEQ ID NO: 482842 - DNA, 75 bp, synthetic construct
  source 1..75: mol_type = other DNA
ctaatacaaaatggcgatgtgctctttgatggtatatgtgaaagtatcattaatagcgaggagttagaaaatgag

SEQ ID NO: 482843 - DNA, 75 bp, synthetic construct
  source 1..75: mol_type = other DNA
tgatattctcaaaggggaagtgtttcacggtcacattgaaagcctttccccagcgacaggagccagtttcagctt

SEQ ID NO: 482844 - DNA, 75 bp, synthetic construct
  source 1..75: mol_type = other DNA
gtatacaggaacagttacgagcaattaatccagttctggttaatccaaaagaatttcgtgcgagcttgaaaagat

SEQ ID NO: 482845 - DNA, 75 bp, synthetic construct
  source 1..75: mol_type = other DNA
atcggctgatcaaggaaatgcgtctggacggtattaccgacattgaagccgcgaatgcctggcttgccactttca

SEQ ID NO: 482846 - DNA, 75 bp, synthetic construct
  source 1..75: mol_type = other DNA
gaaccattctattatgattttgggattaatctttatgaggatggcggtaacttctcaatggcatcaatggtgtat

SEQ ID NO: 482847 - DNA, 75 bp, synthetic construct
  source 1..75: mol_type = other DNA
gtgaaaccatcgtcagggatactgttgccaaatggcgtaaaggctggaacccaccggttactactgccgcaagac

SEQ ID NO: 482848 - DNA, 75 bp, synthetic construct
  source 1..75: mol_type = other DNA
atgacaacacaatcccaccatgagcacgtagaaaagcaatttagctcgcaggccagtgaatatttaaccagtgcc

SEQ ID NO: 482849 - DNA, 75 bp, synthetic construct
  source 1..75: mol_type = other DNA
aaatggcgtaaaggctggaacccaccggttactactgccgcaagacttccttcagtgttccgggtaagccgctgg

SEQ ID NO: 482850 - DNA, 75 bp, synthetic construct
  source 1..75: mol_type = other DNA
tatggtggtcgcaatatttataatctaacaaagctagttgactacctagatacaatgggtccatcagtagctgaa

SEQ ID NO: 482851 - DNA, 75 bp, synthetic construct
  source 1..75: mol_type = other DNA
ttttgctttagcagcgaaaaagcatcaaagattaggtaatgactccaacttactgatagtgttttatgttcagat

SEQ ID NO: 482852 - DNA, 75 bp, synthetic construct
  source 1..75: mol_type = other DNA
tacagcatcatcttctacggtttcaaaacctggcttgcggtgcgtaacagcgacaaacgtactgacaaagaaaca

SEQ ID NO: 482853 - DNA, 75 bp, synthetic construct
  source 1..75: mol_type = other DNA
atggtaaattctgggggagtatgtaataccatgctaaaatattttttcatctcattgtttattttctctaatatt

SEQ ID NO: 482854 - DNA, 75 bp, synthetic construct
  source 1..75: mol_type = other DNA
ttataatttgccgctcactatccgctcggcgctgtacccgatcttcggtaaacggattaacgggccgataggtca

SEQ ID NO: 482855 - DNA, 75 bp, synthetic construct
  source 1..75: mol_type = other DNA
aattatgtcttctggcgcaggtagcttaagagcaaaaatctatgagaatgggcttaagaatgtaaatgaaggtga

SEQ ID NO: 482856 - DNA, 75 bp, synthetic construct
  source 1..75: mol_type = other DNA
gggaattgcactggtgattggtgccggaatggtttggtggatcaaccgctccattgcccgactcacccgttatgc

SEQ ID NO: 482857 - DNA, 75 bp, synthetic construct
  source 1..75: mol_type = other DNA
gtccgccgccggaagtggtggcacgtttcaccgacaatattctggcgcagaatgtacgtatgcaggcattggttg

SEQ ID NO: 482858 - DNA, 75 bp, synthetic construct
  source 1..75: mol_type = other DNA
gtggctcgttttaccgacaacattctgacgcaaaatgcgcgtatgcaggcattggtagaaacgttactacgccag

SEQ ID NO: 482859 - DNA, 75 bp, synthetic construct
  source 1..75: mol_type = other DNA
tgcatattcttctgaatataaagtgaaaacaccttttgttctacatgtattaaaaaaattgatcaaaggattaaa

SEQ ID NO: 482860 - DNA, 75 bp, synthetic construct
  source 1..75: mol_type = other DNA
ccccgcctgctggccttggcatcaccatgcctaacctgcatgaaatgggtggcgagaacgcgccgatcatcatgg

SEQ ID NO: 482861 - DNA, 75 bp, synthetic construct
  source 1..75: mol_type = other DNA
gtggggtgtcttcaccgtttgctcaaccgtaccaattgcgctgtttatgggtatctacatgcgctttatccgtcc

SEQ ID NO: 482862 - DNA, 75 bp, synthetic construct
  source 1..75: mol_type = other DNA
tcagcttaaagaagtgctgatgagcgaagagatggatgatgacgtggtgctgtcgtcagaagatattctggatgc

SEQ ID NO: 482863 - DNA, 75 bp, synthetic construct
  source 1..75: mol_type = other DNA
ttaagtatctggtggttttcattaactccaccgggaatctggtttttgttatttcttttacgttgttggcagtgg

SEQ ID NO: 482864 - DNA, 75 bp, synthetic construct
  source 1..75: mol_type = other DNA
ctctgttgtttattatccgggcatcagaatatgtgaaagcattaaataatttcagtatctggtggcttgcattga

SEQ ID NO: 482865 - DNA, 75 bp, synthetic construct
  source 1..75: mol_type = other DNA
attctgaaaatgccgttaccgggaagtgttgtcgcctccgtaagtccggatgagctgctgaaaacattgccgaag

SEQ ID NO: 482866 - DNA, 75 bp, synthetic construct
  source 1..75: mol_type = other DNA
aaaataccggaagcatgacatattttacaggaagtgcagcgaataaagcattccatacactgacggttgatgagc

SEQ ID NO: 482867 - DNA, 75 bp, synthetic construct
  source 1..75: mol_type = other DNA
ggagactcctcacttcgctcgttaaaaaataccggaagcatgacatattttacaggaagtgcagcgaataaagca

SEQ ID NO: 482868 - DNA, 75 bp, synthetic construct
  source 1..75: mol_type = other DNA
catctattacgcccgcgatgtgcaaattaatttgccgggggcgctgtttgtaccaaacagtctgttaaaccagtt

SEQ ID NO: 482869 - DNA, 75 bp, synthetic construct
  source 1..75: mol_type = other DNA
attctgaaaatgccgttaccgggaagcgtagtggcattcgtaagtccggatgatctgctgaaaacattgccgaag

SEQ ID NO: 482870 - DNA, 75 bp, synthetic construct
  source 1..75: mol_type = other DNA
cgctgtccgcttcatgacgcagctgatgatccacattctttacccacacaaattcatgtcctttgtgccctgcca

SEQ ID NO: 482871 - DNA, 75 bp, synthetic construct
  source 1..75: mol_type = other DNA
agcttacgtcactatcgtcgtactggttttgtgctggtggcgattggggtgaccattaaccttcctgccatcgcc

SEQ ID NO: 482872 - DNA, 75 bp, synthetic construct
  source 1..75: mol_type = other DNA
ccgtttcaggcgattggctatgcgtcgctgttttatggcttctggccgcaattgagccgctttaagctggtgctt

SEQ ID NO: 482873 - DNA, 75 bp, synthetic construct
  source 1..75: mol_type = other DNA
tggcttacgggctggtgggcttaatctgctggcggctggtgcgcgatgcgccatcggtaaaaagcctgtttaata

SEQ ID NO: 482874 - DNA, 75 bp, synthetic construct
  source 1..75: mol_type = other DNA
agtgcgccgtttcaggcgattggctatgcgtcgctgttttatggcttctggccgcaattaagccgctttaagctg

SEQ ID NO: 482875 - DNA, 75 bp, synthetic construct
  source 1..75: mol_type = other DNA
tgttgattggcgcggcgttgatgcgtagcggctggctgaaagggcagtttagcttgcgccactatcgtcgtaccg

SEQ ID NO: 482876 - DNA, 75 bp, synthetic construct
  source 1..75: mol_type = other DNA
ttgatttccgacagccagaccagtcgtgcctggacgccggatgcgtccgccattttgtatgaaaaatactggaaa

SEQ ID NO: 482877 - DNA, 75 bp, synthetic construct
  source 1..75: mol_type = other DNA
aagataacgatcagaccgctaacctgggggcgttgattgatgccggtgttcgttccttcaagatcgaagggcggt

SEQ ID NO: 482878 - DNA, 75 bp, synthetic construct
  source 1..75: mol_type = other DNA
ctcagttcaaatttgatcaagatgcaacttggtgagatatcttcgataaataaaaatcttaaaggaaagtggatc

SEQ ID NO: 482879 - DNA, 75 bp, synthetic construct
  source 1..75: mol_type = other DNA
tggtagtaaacaaaaagctgtcaggtaaggacaatattctgttggttgattttctgaacaacccctccggagaaa

SEQ ID NO: 482880 - DNA, 75 bp, synthetic construct
  source 1..75: mol_type = other DNA
taatataaatataatgggggggacaggcaaaccaggtgatctgtattatacgacctttgacggaaattattatct

SEQ ID NO: 482881 - DNA, 75 bp, synthetic construct
  source 1..75: mol_type = other DNA
atgaataaacttaataaaaataaatggcgaacaaatgtctgtgtccgcattttcaaaataatccttcccgcaaca

SEQ ID NO: 482882 - DNA, 75 bp, synthetic construct
  source 1..75: mol_type = other DNA
atcactcgctttgaacttaacctggctcctggcgtaaaagcggcgcgcatttctaacttgtcacgggaccttgcc

SEQ ID NO: 482883 - DNA, 75 bp, synthetic construct
  source 1..75: mol_type = other DNA
gcaccgcagccgcagtatcagcagccacaacagccagttgcgccacagccgcaggataccctgcttcatccgctg

SEQ ID NO: 482884 - DNA, 75 bp, synthetic construct
  source 1..75: mol_type = other DNA
tttcaatgttggtgctgtgtatcgtgctgccaactgggcagatcttaaccttagctacgagcgtggtaacacgtt

SEQ ID NO: 482885 - DNA, 75 bp, synthetic construct
  source 1..75: mol_type = other DNA
gcagtacagactactttgttaacgcgcgtaaaggcgacattggcgcgttcgattccccgaaatttattggcctgc

SEQ ID NO: 482886 - DNA, 75 bp, synthetic construct
  source 1..75: mol_type = other DNA
agtcgtaaaccggttgccgaacctgcgccggtttatccacaaacgcatttgaccttcctggcaaatgtctacaac

SEQ ID NO: 482887 - DNA, 75 bp, synthetic construct
  source 1..75: mol_type = other DNA
ggactcggaacccgtgattacagcacgcattcatggtatgccggtgcagaagcgggctaccgctatcatgtcact

SEQ ID NO: 482888 - DNA, 75 bp, synthetic construct
  source 1..75: mol_type = other DNA
aaatggaaccagaaagccattgataatctgaaaaagaacttttcttacaatgtggatatgtcaggagtacagcaa

SEQ ID NO: 482889 - DNA, 75 bp, synthetic construct
  source 1..75: mol_type = other DNA
cgtgctgatgaaactcagcgttggtcagtatctggcgaaggataaaggggcaacgattgacgtagcaaaacgctt

SEQ ID NO: 482890 - DNA, 75 bp, synthetic construct
  source 1..75: mol_type = other DNA
ggttaagacacttgatgccatgagcagtgattttgtcctgcgcactgacctgaaggacgctgataaaatcagtat

SEQ ID NO: 482891 - DNA, 75 bp, synthetic construct
  source 1..75: mol_type = other DNA
cggcagaagcacagcgccagtcgctgattgatcctgcaatggcttccattagtctgattcaactgaaattgcagg

SEQ ID NO: 482892 - DNA, 75 bp, synthetic construct
  source 1..75: mol_type = other DNA
ccgcagaagcacagcgccagtcgctgattgattctgcaatggcttccattagtctgattcaactgaaatttcagg

SEQ ID NO: 482893 - DNA, 75 bp, synthetic construct
  source 1..75: mol_type = other DNA
cagcagaagcacagcgccagtcgctgattgatgctgcaatggcttccattagtctgattcaactgaaattacagg

SEQ ID NO: 482894 - DNA, 75 bp, synthetic construct
  source 1..75: mol_type = other DNA
ggcgttatcagggattaatacccgctttttccattcgtaacagggagagtatgactcatgtttcctattcgtttt

SEQ ID NO: 482895 - DNA, 75 bp, synthetic construct
  source 1..75: mol_type = other DNA
cctttttcttaaggcggagtttgtactggactggttatattgcatatatattgagatattttttaatggggattt

SEQ ID NO: 482896 - DNA, 75 bp, synthetic construct
  source 1..75: mol_type = other DNA
cccgacttaactctgtgctggattacattgacgcggtgacggcaacagataccagcaccgcgccggatgtcatct

SEQ ID NO: 482897 - DNA, 75 bp, synthetic construct
  source 1..75: mol_type = other DNA
atgcgtcccgcgactatcgccccgttatcgccatacgataaatgggatggtgagaaatgggtgacggatactgaa

SEQ ID NO: 482898 - DNA, 75 bp, synthetic construct
  source 1..75: mol_type = other DNA
atgcgtcccgcgactatcgcccccttatcgccatacgataaatgggatggtgagaaatgggtgaccgatactgaa

SEQ ID NO: 482899 - DNA, 75 bp, synthetic construct
  source 1..75: mol_type = other DNA
atgcgtcccgcgactatcgcccctttagcgccatacgataaatgggatggtgagaaatgggtgacggatactgaa

SEQ ID NO: 482900 - DNA, 75 bp, synthetic construct
  source 1..75: mol_type = other DNA
tgagaaatgggtgacggataccgatgcacagcatagcgccgcagtagaagctgcagaagcacagcgccagtcact

SEQ ID NO: 482901 - DNA, 75 bp, synthetic construct
  source 1..75: mol_type = other DNA
tgagaaatgggtgacggatactgatgcacagcatagcggcgcagtagaagcagcagaagcacagcgccagtcact

SEQ ID NO: 482902 - DNA, 75 bp, synthetic construct
  source 1..75: mol_type = other DNA
tgagaaatgggtgacggatacagatgcacagcatagcgtcgcagtagaagccgcagaagcacagcgccagtcact

SEQ ID NO: 482903 - DNA, 75 bp, synthetic construct
  source 1..75: mol_type = other DNA
gcttccccgtaaagctttacagagcacgctgctcgatacgccagttcatgcctcacagaacgtcctgcgggtgcg

SEQ ID NO: 482904 - DNA, 75 bp, synthetic construct
  source 1..75: mol_type = other DNA
caacatgtcaataaaaccgactcggcggtacgcgccacgcatctggcatccggaattagcgtgaaggttcagtca

SEQ ID NO: 482905 - DNA, 75 bp, synthetic construct
  source 1..75: mol_type = other DNA
ggcactattcagtggatttgtcagagtccgtatcggccacatcatgggcgcaaaaactggtttctgggcattggg

SEQ ID NO: 482906 - DNA, 75 bp, synthetic construct
  source 1..75: mol_type = other DNA
tggcagcgaaatacacggcgacgcaactctcgcggactgaacttggcagtcgggtaatttgtcgcgataaacaac

SEQ ID NO: 482907 - DNA, 75 bp, synthetic construct
  source 1..75: mol_type = other DNA
agtacagcgaatgtcattatgcagaatgcactgtggaccctgggaggtgactctgtcattcatactcttacagcc

SEQ ID NO: 482908 - DNA, 75 bp, synthetic construct
  source 1..75: mol_type = other DNA
tcagccgtcatattcgggaactggaggatgaacttggcatcgaaatatttgttcgacgaggtaagcgactgctgg

SEQ ID NO: 482909 - DNA, 75 bp, synthetic construct
  source 1..75: mol_type = other DNA
cataccgcggtgcaattcatgccccgtcagcatctgccactatgaacaacacctggtggcaactgacaggagact

SEQ ID NO: 482910 - DNA, 75 bp, synthetic construct
  source 1..75: mol_type = other DNA
ggtcattgcagaacgtattctgaatgaagccagtaatgttcgtcggcttgcagacctgtttaccaacgatacatc

SEQ ID NO: 482911 - DNA, 75 bp, synthetic construct
  source 1..75: mol_type = other DNA
tggcaaacggctaccgtattcggcaggcgaatcgctgcatcgtatacccacaggaatgcaacagcccgcgtgagg

SEQ ID NO: 482912 - DNA, 75 bp, synthetic construct
  source 1..75: mol_type = other DNA
gaagcggaagcaacgattggtccgcaatgttttattgccgactcggtagttgcaaaccaggcatatttgggcgca

SEQ ID NO: 482913 - DNA, 75 bp, synthetic construct
  source 1..75: mol_type = other DNA
gtcacttaaaaaactcaggccgaagtcggtaacctcgcgcatacaaccgggcagtgatgtgattgtctgcgctga

SEQ ID NO: 482914 - DNA, 75 bp, synthetic construct
  source 1..75: mol_type = other DNA
aatggacgaacagtggggctacgtcggtgctaaatcacgtcagcgctggctgttttacgcttatgacaggatacg

SEQ ID NO: 482915 - DNA, 75 bp, synthetic construct
  source 1..75: mol_type = other DNA
atttaaaatcatgtcagaaaatatgatcccagattttctgttgagaataaagttctttaaccataagagattttt

SEQ ID NO: 482916 - DNA, 75 bp, synthetic construct
  source 1..75: mol_type = other DNA
cggatacctaccggtatcatctgtctccccgtattcgccggatggttgggactgaaaacacatcatcgccatacc

SEQ ID NO: 482917 - DNA, 75 bp, synthetic construct
  source 1..75: mol_type = other DNA
aatataatacgtgatatggggtcttctgctgcaattattcagcgcgattgccttactgaggggttaaaaaatagt

SEQ ID NO: 482918 - DNA, 75 bp, synthetic construct
  source 1..75: mol_type = other DNA
gggttcaaaatgtacggtgatgaccatctgggcgatgagattgcgtgtaattggctaaaaacggtgaatcagttc

SEQ ID NO: 482919 - DNA, 75 bp, synthetic construct
  source 1..75: mol_type = other DNA
taccgcgattacgactggcggcgcgaacaacaggctctcttttccgctgcggccatcgtgccgttatatgtcggc

SEQ ID NO: 482920 - DNA, 75 bp, synthetic construct
  source 1..75: mol_type = other DNA
ccgtggtcttctctgctggcgctgccgcagtcgtacattgtccccggaggccgttttagcgaaacctactactgg

SEQ ID NO: 482921 - DNA, 75 bp, synthetic construct
  source 1..75: mol_type = other DNA
tgaagcgcagcagactcgtgtacagaggagaacggtcagaatcgtttgatccggagaaacattttaatcgttata

SEQ ID NO: 482922 - DNA, 75 bp, synthetic construct
  source 1..75: mol_type = other DNA
cgagtaccggacaacgcttggcgatacagatacaaaagaaattcccctgacgatttccgcgctctggtcggttta

SEQ ID NO: 482923 - DNA, 75 bp, synthetic construct
  source 1..75: mol_type = other DNA
ctgctatggctctttcaactctgtcatttggcgtgtttgccgcggaaccggtaacggcatcccaggcacagaaca

SEQ ID NO: 482924 - DNA, 75 bp, synthetic construct
  source 1..75: mol_type = other DNA
tttatcttctgagttgatcgctgcttattttaataatcaacatttacgactgttgcttatcgttctttgtttgag

SEQ ID NO: 482925 - DNA, 75 bp, synthetic construct
  source 1..75: mol_type = other DNA
atgactatcgttcgtatcgatgctgaagcccgctggtctgatgtagtaatccacaacaacacgctctactacact

SEQ ID NO: 482926 - DNA, 75 bp, synthetic construct
  source 1..75: mol_type = other DNA
tactcctgtggtggtgcgtgcaccaggtggccgggctggcagaacgatgtactggttgtcatggggggcgggtat

SEQ ID NO: 482927 - DNA, 75 bp, synthetic construct
  source 1..75: mol_type = other DNA
atgctcaatcagaaaattcaaacccctaatccagacgaactgacgatcgaagtcgatctctgttatgagctggat

SEQ ID NO: 482928 - DNA, 75 bp, synthetic construct
  source 1..75: mol_type = other DNA
agagcataaggccgaagtgctggactatcttaaggataaaatcgcaacggctaaagaagcgcgtgaaaatgtgct

SEQ ID NO: 482929 - DNA, 75 bp, synthetic construct
  source 1..75: mol_type = other DNA
ttctaggaaaatgtcatatgcagacagaaaagccgcgctttctatcgcggtttttaataaacttagacatgataa

SEQ ID NO: 482930 - DNA, 75 bp, synthetic construct
  source 1..75: mol_type = other DNA
gaacaattagcactattatatctaggtaatgaatttattatatcggcaagactctttaaatggatgtcacttttg

SEQ ID NO: 482931 - DNA, 75 bp, synthetic construct
  source 1..75: mol_type = other DNA
aatattcagtagaaaaatgagttatgcagaaagaaaagcggctctttcagtcgctatctttaacaaattgaagca

SEQ ID NO: 482932 - DNA, 75 bp, synthetic construct
  source 1..75: mol_type = other DNA
aatatttcggaaaaattaaagagttaagaaaggaactaaactataattgtaaggttatgcgttatgaaaccaagc

SEQ ID NO: 482933 - DNA, 75 bp, synthetic construct
  source 1..75: mol_type = other DNA
ggctattaagaccaatgcagaatcaaactacattaatttaaaatccccgctctttcagcggcagtatattgaaga

SEQ ID NO: 482934 - DNA, 75 bp, synthetic construct
  source 1..75: mol_type = other DNA
gtgattcaggcacgtccgaccgctggattgcaacgtttacgttatctgctgctgttgtggggcgcggatcgtaat

SEQ ID NO: 482935 - DNA, 75 bp, synthetic construct
  source 1..75: mol_type = other DNA
acactatccagatgctgcatgacgtgctggacgcgttcgcgcggatggatattgacgaagcggtgcgaatttatc

SEQ ID NO: 482936 - DNA, 75 bp, synthetic construct
  source 1..75: mol_type = other DNA
ctcccagcagcatcagccgttgctggtaagtctggagtcgctgggccgtcataccatccagatgctgcacgacgt

SEQ ID NO: 482937 - DNA, 75 bp, synthetic construct
  source 1..75: mol_type = other DNA
aagtatcgcctggcgggcaagaggagcaacgaagaaaggaacggttgccccagaggaattacaactcattaaagc

SEQ ID NO: 482938 - DNA, 75 bp, synthetic construct
  source 1..75: mol_type = other DNA
cgcctgctgcgcccacacagcctgctgctaatcgctctccacaaagggctacgccgccgcaaagtggtgctcaac

SEQ ID NO: 482939 - DNA, 75 bp, synthetic construct
  source 1..75: mol_type = other DNA
ttgccttcgccagacgcaatgggaccaaagttacctgaaccggcaacggggatcgctcagccgaccccgcagcaa

SEQ ID NO: 482940 - DNA, 75 bp, synthetic construct
  source 1..75: mol_type = other DNA
ttaagttaattgatgtaattcaaacaaaaccgcgtaacggttattccccaaagggtgtcgattatttgactgatg

SEQ ID NO: 482941 - DNA, 75 bp, synthetic construct
  source 1..75: mol_type = other DNA
gcacctgctctgtgtgcagtaggtgcatggcttgtatctcgaacattcggccatgctgaggagttctttcatcgt

SEQ ID NO: 482942 - DNA, 75 bp, synthetic construct
  source 1..75: mol_type = other DNA
cctgtttggctcctacgatgcgcagaccggtgttcgccatatcaaggaagtgtttatccttatcccaagaaaaac

SEQ ID NO: 482943 - DNA, 75 bp, synthetic construct
  source 1..75: mol_type = other DNA
accggtgtacgccatataaaggaagtgttcattctgatacccaaaaaaacagcaagtccacgctggctgccggga

SEQ ID NO: 482944 - DNA, 75 bp, synthetic construct
  source 1..75: mol_type = other DNA
ttaccgcaatggcagaaggacgtcatgcggcacaggggattattgactggctgggggtaaaatcagtcaaatctc

SEQ ID NO: 482945 - DNA, 75 bp, synthetic construct
  source 1..75: mol_type = other DNA
ctgcgtggtggcctgtccgtttggtacgatgcaaatcgtcctgacacccgtcgcggtgggcaaagtaaaagccac

SEQ ID NO: 482946 - DNA, 75 bp, synthetic construct
  source 1..75: mol_type = other DNA
ctctgaccgcttgggcgggggctgatttctgggaagagcagggccgttgtatcagcctggacgatatcctgcgtc

SEQ ID NO: 482947 - DNA, 75 bp, synthetic construct
  source 1..75: mol_type = other DNA
ggagtgcatttttccgatgagcatcggagatgtttcggtctttgacggtgatgtaccggatacggataacccgtc

SEQ ID NO: 482948 - DNA, 75 bp, synthetic construct
  source 1..75: mol_type = other DNA
ttagggcaattcaaagaaattaaaaaaactatatttaaatttaattatatcgattttaaaggtgggccaatgaca

SEQ ID NO: 482949 - DNA, 75 bp, synthetic construct
  source 1..75: mol_type = other DNA
cagctcatcattaaaacaagcgcaatataacgcaatgaagcaggatgcggctcagttagagccggtagcgaagaa

SEQ ID NO: 482950 - DNA, 75 bp, synthetic construct
  source 1..75: mol_type = other DNA
aatgatcgaaggttcctgcaaagcgtacaaccgcgaactggatccggaattcgagctcggtacccaaaaatgcct

SEQ ID NO: 482951 - DNA, 75 bp, synthetic construct
  source 1..75: mol_type = other DNA
gcgtggataatgcaaccggtccccgactggcagaagccgctgaacgggattatttcatcctcagagaacggctga

SEQ ID NO: 482952 - DNA, 75 bp, synthetic construct
  source 1..75: mol_type = other DNA
tgcgctgacggacgtgacccgttcgccgtactgcatggttaatctgggcggtttcaatattccggtcggaaaagt

SEQ ID NO: 482953 - DNA, 75 bp, synthetic construct
  source 1..75: mol_type = other DNA
ccagcgagcgtttgagtaatgacccgcagctcgtcgccttcccgtggtttcgttggcaccatagtttgcttgttc

SEQ ID NO: 482954 - DNA, 75 bp, synthetic construct
  source 1..75: mol_type = other DNA
cttatccaggggacgccgcaggaaattgcgactctactacaaaacggcggagctgatattggtatagccagtgag

SEQ ID NO: 482955 - DNA, 75 bp, synthetic construct
  source 1..75: mol_type = other DNA
agaagccgctgccgctgtttctccgctggcatctggcgtgaaaaaagcgacactggcgacgggggctgccgcaac

SEQ ID NO: 482956 - DNA, 75 bp, synthetic construct
  source 1..75: mol_type = other DNA
cgccaattgttgaacctgtacagcagccgcaacaaccggtagtgccgcagccgcagtatcagcagccgcaacaac

SEQ ID NO: 482957 - DNA, 75 bp, synthetic construct
  source 1..75: mol_type = other DNA
gtaacggcatcccaggcacaaagcatgaataaaatcggcgtagtttctgccgatggcgcatccaccctcgacgcg

SEQ ID NO: 482958 - DNA, 75 bp, synthetic construct
  source 1..75: mol_type = other DNA
acctgttggatcgacggaaaggacccgaaaacgagaataattatcacttacagcaagaatcgaatctgatctatt

SEQ ID NO: 482959 - DNA, 75 bp, synthetic construct
  source 1..75: mol_type = other DNA
ctaatccaggggacgccacaggaaattgcgacgttgttgcaaaatggcgaagctgatattggtatcgccagcgag

SEQ ID NO: 482960 - DNA, 75 bp, synthetic construct
  source 1..75: mol_type = other DNA
agctgatattggtatcgccagcgagcgtttgagtaatgacccgcagctcgtcgccttcccgtggtttcgttggca

SEQ ID NO: 482961 - DNA, 75 bp, synthetic construct
  source 1..75: mol_type = other DNA
gtgattcgatgcagaatatggggttgcactccggtgatctgatggtggtcgataaagctgaaaaaccactgcagg

SEQ ID NO: 482962 - DNA, 75 bp, synthetic construct
  source 1..75: mol_type = other DNA
catcctcggtggctacaccccgccgaactgccgccgtcgcatctggctgacccgcgaggtgtttatcggtgaggt

SEQ ID NO: 482963 - DNA, 75 bp, synthetic construct
  source 1..75: mol_type = other DNA
tgctgcagcagaggcagaactggctcgtcagtttgctcaaactcaacagcaacgttattcgggcgaacaaccggc

SEQ ID NO: 482964 - DNA, 75 bp, synthetic construct
  source 1..75: mol_type = other DNA
cagcagcaatatcagcagccacaacaaccggttgcgccgcagcagcaatatcagcagccgcaacagccggttgca

SEQ ID NO: 482965 - DNA, 75 bp, synthetic construct
  source 1..75: mol_type = other DNA
cagtccagcgacgaaaacattgattattttgccgtttcgctacgcatcattggcgttttggcgctcatccttacc

SEQ ID NO: 482966 - DNA, 75 bp, synthetic construct
  source 1..75: mol_type = other DNA
gggaaaacagggaccatcgctgccgtacattccgtcaggaagttttgcgaaagccatgctgattgaaggggcgga

SEQ ID NO: 482967 - DNA, 75 bp, synthetic construct
  source 1..75: mol_type = other DNA
ggagcaaacgaaaacagtcgaagaggctgcagcagagcatgctcagaattttgttgatggcaataatgcgtctgt

SEQ ID NO: 482968 - DNA, 75 bp, synthetic construct
  source 1..75: mol_type = other DNA
gatgcagttgcgtatcaccggcctggtggaaatgccgaacagcaagacgtatgacgcaacgggatgttttgtggg

SEQ ID NO: 482969 - DNA, 75 bp, synthetic construct
  source 1..75: mol_type = other DNA
attgctgctgtaaatttaacatcttcgcaggcaatcttgggtattagaccaaaagattgtttaaattatgagttt

SEQ ID NO: 482970 - DNA, 75 bp, synthetic construct
  source 1..75: mol_type = other DNA
ctgtaccgcaggcaccagcctcaccgcccggcccggaaggcgaacctcagccgggtaatgttccggcgacgttcc

SEQ ID NO: 482971 - DNA, 75 bp, synthetic construct
  source 1..75: mol_type = other DNA
cgtatcaccggcctggtggaaatgccgaacagcaaaacgtatgacgcaacgggatgttttgtggggctggaagcc

SEQ ID NO: 482972 - DNA, 75 bp, synthetic construct
  source 1..75: mol_type = other DNA
gcagacatatgcgagaacttaaagagaaagactttaggttgccattagatatcaaagaacaacaaaaaatcgccg

SEQ ID NO: 482973 - DNA, 75 bp, synthetic construct
  source 1..75: mol_type = other DNA
gtgacggaaaaccttctcgccaacagtcagcagcagaaaaaagctctgatgcagcaattgcttaccggaaagagg

SEQ ID NO: 482974 - DNA, 75 bp, synthetic construct
  source 1..75: mol_type = other DNA
cgggaaacggtgtctattacaatacgtaagccgtccagtgtgtttatcgaccatgatacctttgttaaacagggg

SEQ ID NO: 482975 - DNA, 75 bp, synthetic construct
  source 1..75: mol_type = other DNA
gcaatcttgggtattagaccaaaagattgtttaaattatgagtttttatatttctatcttacatcattaaaagaa

SEQ ID NO: 482976 - DNA, 75 bp, synthetic construct
  source 1..75: mol_type = other DNA
ctgatgctgaaatctccacgctggagaaaaaactcgcctgcctgagagatgagaaaaaagccctgatgcaacagc

SEQ ID NO: 482977 - DNA, 75 bp, synthetic construct
  source 1..75: mol_type = other DNA
aaaacggccttggatctaagttttacgtttcatttactgaaatataatgaactgaagattatggggttgcgtgta

SEQ ID NO: 482978 - DNA, 75 bp, synthetic construct
  source 1..75: mol_type = other DNA
tgcaagggcagcaaaaaattgaatatgcgccgaaagagacattacaggtagtggaatattatcgtgatgaaactg

SEQ ID NO: 482979 - DNA, 75 bp, synthetic construct
  source 1..75: mol_type = other DNA
cggtttactggcgggggggatcggtattctgggcgctcgcggtgttgatcgtcggcaagccgctaatttcgctgg

SEQ ID NO: 482980 - DNA, 75 bp, synthetic construct
  source 1..75: mol_type = other DNA
ggctggcggcgctctattgcacgcttatcccctcaatggcttcctccacgccgaccggcattttgcgcgcagtgg

SEQ ID NO: 482981 - DNA, 75 bp, synthetic construct
  source 1..75: mol_type = other DNA
tttttcagcgtcattccttgctttataacgcagccggagagaaatcctgatgatgagaaaatatttcccgcttga

SEQ ID NO: 482982 - DNA, 75 bp, synthetic construct
  source 1..75: mol_type = other DNA
tgagcgttaaagctggaaaaacgatccttggaatgctacctacaggatggcaaaagttatcattagaaaagtgct

SEQ ID NO: 482983 - DNA, 75 bp, synthetic construct
  source 1..75: mol_type = other DNA
ccatacctttacggaacgaatgtaagggctaataagctggaaacaaatgagattcgctatgtaactcgcgaattc

SEQ ID NO: 482984 - DNA, 75 bp, synthetic construct
  source 1..75: mol_type = other DNA
cttgctaaatgtaaaaccttcggacttcttttcattaaaagttgcggttcctggctttgaagagcaacaaaaaat

SEQ ID NO: 482985 - DNA, 75 bp, synthetic construct
  source 1..75: mol_type = other DNA
tcgcatcagatacccttgatggttatttcttattaaaaaaagggcagtttgcttacaataaaagttactctaatg

SEQ ID NO: 482986 - DNA, 75 bp, synthetic construct
  source 1..75: mol_type = other DNA
attatatgccttatcgaaattatttcagagagttacgaccaaaaacaatggaaaaagcaacaatgttgtaaccat

SEQ ID NO: 482987 - DNA, 75 bp, synthetic construct
  source 1..75: mol_type = other DNA
agtgcattactacctgcaagggcagcaaaagattgaatatgcgccgaaagagacattacaggtagtggaatatta

SEQ ID NO: 482988 - DNA, 75 bp, synthetic construct
  source 1..75: mol_type = other DNA
ttgatggcagggaaacagcgtgctttcctcgtggcgcaaaccatcgcttcggcgggctacatcgttctactgttc

SEQ ID NO: 482989 - DNA, 75 bp, synthetic construct
  source 1..75: mol_type = other DNA
cagcgtttgcttacttcggtgggcaatgtctggacgtggcgctctcgttaattccaaccttaaaggcattttttc

SEQ ID NO: 482990 - DNA, 75 bp, synthetic construct
  source 1..75: mol_type = other DNA
ggtttgcagatggcgcgtttcgcaccattattcgcaatagcgcctggttaggctccagtaatgtcgtgagcgctt

SEQ ID NO: 482991 - DNA, 75 bp, synthetic construct
  source 1..75: mol_type = other DNA
ttatgactggcattacgcctcttattgtctggctgctgaaatccagcttatttattcagcgctttcgcagccagc

SEQ ID NO: 482992 - DNA, 75 bp, synthetic construct
  source 1..75: mol_type = other DNA
atccgccagcgggtggatatgcccgcggataactttggcgtggagcctcaatacccggttgcgttccggacatgg

SEQ ID NO: 482993 - DNA, 75 bp, synthetic construct
  source 1..75: mol_type = other DNA
tgacagtgtgtaccgggtgaaacgtcagcgcgatctgaacggagcgcggcgctttctgctgctggagtgtacgga

SEQ ID NO: 482994 - DNA, 75 bp, synthetic construct
  source 1..75: mol_type = other DNA
gctggtgatcaccggctgggtggaggcgacccccgttcgttacgatgcccgttcggtcagcaccggtattgccgg

SEQ ID NO: 482995 - DNA, 75 bp, synthetic construct
  source 1..75: mol_type = other DNA
tccacccttaaatggcgcttaagaaagttaacggctttagcaaaaaaactgaaaatcataccaaacaaaagattc

SEQ ID NO: 482996 - DNA, 75 bp, synthetic construct
  source 1..75: mol_type = other DNA
actgaaagacttgcaactttcactaaatggccaaaaggcagttttctttgttgaccaatttgaatctacattttc

SEQ ID NO: 482997 - DNA, 75 bp, synthetic construct
  source 1..75: mol_type = other DNA
aaggaactttataaccaaataactgcgactttgcatttgccgactgaagcatctctacataaggaaattaaaggt

SEQ ID NO: 482998 - DNA, 75 bp, synthetic construct
  source 1..75: mol_type = other DNA
agtatccgggggcggttttcagtttaccaggtggcggggcagcgtgccggaaacgacgatgatttcggtgaggcc

SEQ ID NO: 482999 - DNA, 75 bp, synthetic construct
  source 1..75: mol_type = other DNA
cgtctgatggcacgctgttaacgcgcgcggtagagcccggcacggtgcttaatgaaggtggcacggtatttaccg

SEQ ID NO: 483000 - DNA, 75 bp, synthetic construct
  source 1..75: mol_type = other DNA
gcgcagaacttctataaccgccagcaaggactgtggaaaagccgcaccatttcggcaaatgacctggaaaatgcc

SEQ ID NO: 483001 - DNA, 75 bp, synthetic construct
  source 1..75: mol_type = other DNA
gcgctaacctggtgaacggtttgctgtatatcgatcttgaacgcgtaattccagaagcgaaaaaaccgcgtcgta

SEQ ID NO: 483002 - DNA, 75 bp, synthetic construct
  source 1..75: mol_type = other DNA
gtcagcagcaggcactggcttacgacgacccgcacggcaggctggtgattggcggtattggctcaacgcgggcgc

SEQ ID NO: 483003 - DNA, 75 bp, synthetic construct
  source 1..75: mol_type = other DNA
tgcgcaggcgcttgctgcgcctttcggcattgaggtggtgaacagcgatgcgccgtcgggtgttattccggatgt

SEQ ID NO: 483004 - DNA, 75 bp, synthetic construct
  source 1..75: mol_type = other DNA
cgccaacaggctccaccgcctattccctctctgcaggcggtcctattctgacaccctctctggatgcgattaccc

SEQ ID NO: 483005 - DNA, 75 bp, synthetic construct
  source 1..75: mol_type = other DNA
gaacagggatgccggcacttgtaaaactgacggcttatgactatgccatttatggtggtcttgacggcgtggtga

SEQ ID NO: 483006 - DNA, 75 bp, synthetic construct
  source 1..75: mol_type = other DNA
gtcagacctggcgctgttgacagatgtacaggcagcccttcagcaggaaaagcatcatgcccttttcctgatggt

SEQ ID NO: 483007 - DNA, 75 bp, synthetic construct
  source 1..75: mol_type = other DNA
cctgaatatcccctgcgttctgctacgcttccgggtggagagcgtgttcaggttgtgatcccaccggcaactgaa

SEQ ID NO: 483008 - DNA, 75 bp, synthetic construct
  source 1..75: mol_type = other DNA
aggaaggcgttgaatacatcactggtgctgatggtgtgaaaaggccaatggcttattacaaagcggctgaagaga

SEQ ID NO: 483009 - DNA, 75 bp, synthetic construct
  source 1..75: mol_type = other DNA
ggtccgggaaggcgatattgttgagaaaggacaaatcctgctgacgctggacgatacacggagtgccgcgatgct

SEQ ID NO: 483010 - DNA, 75 bp, synthetic construct
  source 1..75: mol_type = other DNA
ctgtttatcgactacgaaagactgaactggcacaaagcatcgccggccttaagcagagtaaggctctgctggata

SEQ ID NO: 483011 - DNA, 75 bp, synthetic construct
  source 1..75: mol_type = other DNA
gaagcgattggtagtctgattgtcactaaaaacggcgacactctggattgccgccagtggcaacgggtgattgct

SEQ ID NO: 483012 - DNA, 75 bp, synthetic construct
  source 1..75: mol_type = other DNA
cgagatctttgcgttttctcagcgttctgatggcctgattatttcgacgccaacaggctccaccgcctattccct

SEQ ID NO: 483013 - DNA, 75 bp, synthetic construct
  source 1..75: mol_type = other DNA
ggaaggccactacatcagcgaaaaacgttttttgctggaagcgcaagtctgccagcaagattgccagaaacgcat

SEQ ID NO: 483014 - DNA, 75 bp, synthetic construct
  source 1..75: mol_type = other DNA
tatggctggcagagccgacccggttgagcgttcacgtatcagggctcccctgagaggcatcgtaaaaaatattcg

SEQ ID NO: 483015 - DNA, 75 bp, synthetic construct
  source 1..75: mol_type = other DNA
gagggaaagtgaagcccgggtgaataacctggaggccgtcagggcaagactccgtgcagaagcttattccgaatc

SEQ ID NO: 483016 - DNA, 75 bp, synthetic construct
  source 1..75: mol_type = other DNA
attgagtacgatggtatgacgatggagcgtgtggatcgcccgacggcagagtgtgccgccgcgctggataaagcg

SEQ ID NO: 483017 - DNA, 75 bp, synthetic construct
  source 1..75: mol_type = other DNA
agctcaggcagccacaacacagacagtccggatgccaacgtttgcaatgatgcgggtccttttgagctgttgcag

SEQ ID NO: 483018 - DNA, 75 bp, synthetic construct
  source 1..75: mol_type = other DNA
atgaaatctgccacctctgcgcaaagaccttaccaggaagtcggggcgatgatccgcgatctgatcataaagacg

SEQ ID NO: 483019 - DNA, 75 bp, synthetic construct
  source 1..75: mol_type = other DNA
ttacaggtgttgttcttttaatatttgtcattattgccggttatttcttttctgagcgtaatgacaggaaaatgt

SEQ ID NO: 483020 - DNA, 75 bp, synthetic construct
  source 1..75: mol_type = other DNA
ccagtcggtagaagagtgtcgcaaaatggtattcagttttattcatcaggcactggcggatggcttacgtaatgt

SEQ ID NO: 483021 - DNA, 75 bp, synthetic construct
  source 1..75: mol_type = other DNA
atgaaatcgaacatcatccaccttattggtatgttggtcttctattttgctggttactttttgttcaagttagca

SEQ ID NO: 483022 - DNA, 75 bp, synthetic construct
  source 1..75: mol_type = other DNA
gccaatatggccaatcgtattgtcatgcatgattggttttttttaatactggcaagaacatttggacacctaata

SEQ ID NO: 483023 - DNA, 75 bp, synthetic construct
  source 1..75: mol_type = other DNA
ttcacgcacgactggggatttgaggtcagcgtttactataaccgggtgagtgatgccatcctctcgcacaatatc

SEQ ID NO: 483024 - DNA, 75 bp, synthetic construct
  source 1..75: mol_type = other DNA
ccgccatacagcggaaatagtggtcaaaaatcacgctactggcagtggccagagtatgacaaagaaagtttttat

SEQ ID NO: 483025 - DNA, 75 bp, synthetic construct
  source 1..75: mol_type = other DNA
gctgacgccaaacgcaaagacatcggcaagataaccgatctgccaacgcagacaatgaccgcatggatgactctc

SEQ ID NO: 483026 - DNA, 75 bp, synthetic construct
  source 1..75: mol_type = other DNA
ggtctgatagagatgctgtcgtcgcgtatcaggtcggagcgtggcgaatcaactcaggtactgcgcatgcttttg

SEQ ID NO: 483027 - DNA, 75 bp, synthetic construct
  source 1..75: mol_type = other DNA
tcgaaggcacgggacatgagttgcatcatgaagactggccgaggattatccaggcgattaaggggcaaacgtcat

SEQ ID NO: 483028 - DNA, 75 bp, synthetic construct
  source 1..75: mol_type = other DNA
atgttatggagcagcaacgatgttacgcagcagggcagtcgccctaaaacaaagttgtacgtagaactcgaaggc

SEQ ID NO: 483029 - DNA, 75 bp, synthetic construct
  source 1..75: mol_type = other DNA
aagtgaccggaaacggactaccaccaaaaccagaagaacgctggcgctacattaaagagctggaaagtcgccagc

SEQ ID NO: 483030 - DNA, 75 bp, synthetic construct
  source 1..75: mol_type = other DNA
gttgaaagaccggaagagccattgttgtcattaaaagatctggcaatggatgcgttttatcatcccgagcgtggc

SEQ ID NO: 483031 - DNA, 75 bp, synthetic construct
  source 1..75: mol_type = other DNA
caccgtgttctcgcaaatggtggcggaaaccgtgggtgtcccggtcagcgatgtccgcgtaatttcgacacaaga

SEQ ID NO: 483032 - DNA, 75 bp, synthetic construct
  source 1..75: mol_type = other DNA
accagagactgatgagagttgggctgagattattgagtttggcttattaagcgctgaagagatcgcgttgcttca

SEQ ID NO: 483033 - DNA, 75 bp, synthetic construct
  source 1..75: mol_type = other DNA
tatgccgtaagtattaatgatgaacaagccagaagtctgcctggcgtactggctatttttacctgggaagatgta

SEQ ID NO: 483034 - DNA, 75 bp, synthetic construct
  source 1..75: mol_type = other DNA
cgttagaactagacccagtagaaattcgtttacgtaatgctgctcgagaaggcgatgcaaatccgctcacgggca

SEQ ID NO: 483035 - DNA, 75 bp, synthetic construct
  source 1..75: mol_type = other DNA
caggcgcgatgcgtggttatggcgcaccgcaagtcgtttttgctgtcgaatcaatgctggatgacgccgctaccg

SEQ ID NO: 483036 - DNA, 75 bp, synthetic construct
  source 1..75: mol_type = other DNA
atgctgccttccgttgtcagtcggcaggttgccgacagtgttgcttcctttttacgggcagccttcccgcttaac

SEQ ID NO: 483037 - DNA, 75 bp, synthetic construct
  source 1..75: mol_type = other DNA
tggtaacgcgttaaacattaccgtggcagaagggaacccgcacgatcagtttttctttgaagaaccactggagat

SEQ ID NO: 483038 - DNA, 75 bp, synthetic construct
  source 1..75: mol_type = other DNA
aatacgtctgggttctgaataatgatactgaagtggataaagaggctttaactcatttaattagtaaatgtgatt

SEQ ID NO: 483039 - DNA, 75 bp, synthetic construct
  source 1..75: mol_type = other DNA
ttattccattattcacaaccaggggttggcacgttgcattcgggccaattgacgaaaatacattgcaacatctgt

SEQ ID NO: 483040 - DNA, 75 bp, synthetic construct
  source 1..75: mol_type = other DNA
gtgctgccgtttgtgcaactgcgctcccagttgtggcttcgtgagatgcgtcgtctggtcgccagcgtggcgaaa

SEQ ID NO: 483041 - DNA, 75 bp, synthetic construct
  source 1..75: mol_type = other DNA
gaagctctggcgctataaccagccagggtcactgcgttatctggtggtggatgaactgcatacgtttgatggtgc

SEQ ID NO: 483042 - DNA, 75 bp, synthetic construct
  source 1..75: mol_type = other DNA
tcacccattatgacgacaacaatcagtcagcttttaactggcaggtgatggggaaataccactttgccaatgaag

SEQ ID NO: 483043 - DNA, 75 bp, synthetic construct
  source 1..75: mol_type = other DNA
aagctcttctcatcgccttcgctgatctgatcccagatatggataaggtggttaacaagaagttattggattctc

SEQ ID NO: 483044 - DNA, 75 bp, synthetic construct
  source 1..75: mol_type = other DNA
atgttgctcacacccggtcgcgcacatttcatggacgatggcaccaagataatgattgcacagtgccggaatatt

SEQ ID NO: 483045 - DNA, 75 bp, synthetic construct
  source 1..75: mol_type = other DNA
tggcagaaagcctgcatgaaaaacaggaactgccgccagtacggttaaaaacacaatcatattcgctgcgtctgg

SEQ ID NO: 483046 - DNA, 75 bp, synthetic construct
  source 1..75: mol_type = other DNA
atggaaagaggggaaatctggcttgtttcgcttgaccctaccgcaggtcatgagcagcagggaacacggccagtg

SEQ ID NO: 483047 - DNA, 75 bp, synthetic construct
  source 1..75: mol_type = other DNA
aaatactcgctgacaaagcgttatcaatcactgatgctgccgcacagtgcgatatcccatatcgttctctacaaa

SEQ ID NO: 483048 - DNA, 75 bp, synthetic construct
  source 1..75: mol_type = other DNA
ataatctggattactcacttgaaaaagccagtgaactcaaaaatgagcagttaataaattgggtttcggacatca

SEQ ID NO: 483049 - DNA, 75 bp, synthetic construct
  source 1..75: mol_type = other DNA
atttcggtgacggaaaagcttctcaccaacagtcagcagcagaaaaaagccctgatgcagcaattgcttaccggg

SEQ ID NO: 483050 - DNA, 75 bp, synthetic construct
  source 1..75: mol_type = other DNA
acagtccaacctaaacgccggaatggttaaagagtttgaactagacttacccagtataagagaacaacaaaaaat

SEQ ID NO: 483051 - DNA, 75 bp, synthetic construct
  source 1..75: mol_type = other DNA
atttcggtgacggaaaagcttctcgtcaacagccagaagcagaaaaaagcccttatgcagcaattgcttaccggt

SEQ ID NO: 483052 - DNA, 75 bp, synthetic construct
  source 1..75: mol_type = other DNA
gcttcagaccatcaaccgcttcattgtccgcccggtcacgccggacgaactggcagaaagcctgcatgaaaaaca

SEQ ID NO: 483053 - DNA, 75 bp, synthetic construct
  source 1..75: mol_type = other DNA
cgcgtttttcttatgatataagacttggcaattactgtacagatgacttttttatgaagaaattccgggaaaata

SEQ ID NO: 483054 - DNA, 75 bp, synthetic construct
  source 1..75: mol_type = other DNA
gatattgttgtcggagatgtaaaggccttgcactgtcaagaacatcgcggcgtctgtctcaggaagtcaccgaac

SEQ ID NO: 483055 - DNA, 75 bp, synthetic construct
  source 1..75: mol_type = other DNA
cacggggcggaaaacgactcgaacgggttccggagactatcatgaacgaagttcttggccgtctgtccactattc

SEQ ID NO: 483056 - DNA, 75 bp, synthetic construct
  source 1..75: mol_type = other DNA
gcgcaggaaggtgttgcgccgaaagcgttcgctaaactttctaagcgcgcagtacccgcgaaagggctgacgttc

SEQ ID NO: 483057 - DNA, 75 bp, synthetic construct
  source 1..75: mol_type = other DNA
gatgtgctgggtatgtatggcgttctttgtgtttgttctggtgttgttgacactggaagatgacacccgccaggc

SEQ ID NO: 483058 - DNA, 75 bp, synthetic construct
  source 1..75: mol_type = other DNA
tatttgccactgatgcaagaactggaaaaacgctacgaaggaaaactgcgcattcagacggtggtcagtcgggaa

SEQ ID NO: 483059 - DNA, 75 bp, synthetic construct
  source 1..75: mol_type = other DNA
gaacgttataccacgtccaaaccagcttataaccagatagccattgttaacccgcaactcaagccagaacgcgct

SEQ ID NO: 483060 - DNA, 75 bp, synthetic construct
  source 1..75: mol_type = other DNA
cttcgttatccgtgatcattctgttactggttctaaacctcgccacggtaaaaatgttcggtgagatggagttct

SEQ ID NO: 483061 - DNA, 75 bp, synthetic construct
  source 1..75: mol_type = other DNA
tctatgtgtttgcgctgattgtgatcatgtctgtaacaccgtggagctccgttgttgctgagaaaagcccctttg

SEQ ID NO: 483062 - DNA, 75 bp, synthetic construct
  source 1..75: mol_type = other DNA
aagctggcagcaacagacacgtactgcgcaagccgcgccagtacagtctcagccgcggcagtctaaacctgcgtc

SEQ ID NO: 483063 - DNA, 75 bp, synthetic construct
  source 1..75: mol_type = other DNA
cgctggatggtgcagtgcggttcgttcagaggcgcggaacaggcagagacggtacgtgctcagctggcgttcgaa

SEQ ID NO: 483064 - DNA, 75 bp, synthetic construct
  source 1..75: mol_type = other DNA
atggtcgctattgctgccgccgttcttgtgacctttatcggtggtctgtacttcattacgcatcacaagaaagaa

SEQ ID NO: 483065 - DNA, 75 bp, synthetic construct
  source 1..75: mol_type = other DNA
tgaactggaaaacgcggttggactgccaatgaataaagaaaccagccatgtgatgctgtgtggtaatccgcagat

SEQ ID NO: 483066 - DNA, 75 bp, synthetic construct
  source 1..75: mol_type = other DNA
agcccgcgactggcggcgctaaaaccgggtgatgaagtgcaagtggttagtgaggcggcaggcttctttgtgctg

SEQ ID NO: 483067 - DNA, 75 bp, synthetic construct
  source 1..75: mol_type = other DNA
tttgcccgcgaagccggttttaccgtttcactggacggggcgggaacaaaaacaacgggcgttattcgctgcgac

SEQ ID NO: 483068 - DNA, 75 bp, synthetic construct
  source 1..75: mol_type = other DNA
aacgaagatacctcctatgctcgtttcggtgttaaaggtgaaacacaaatcaccagcgaactgactggttttggt

SEQ ID NO: 483069 - DNA, 75 bp, synthetic construct
  source 1..75: mol_type = other DNA
cgaaaacgcgccaatgacatcgcgctcaaatgcaaatactgtgaaaaagagttttcccataatgtggtgctggcc

SEQ ID NO: 483070 - DNA, 75 bp, synthetic construct
  source 1..75: mol_type = other DNA
cggtcgtctgtccggttcagaggtactgattaaggcactgaaccagcaggctaatatcagttcggccaccaccac

SEQ ID NO: 483071 - DNA, 75 bp, synthetic construct
  source 1..75: mol_type = other DNA
tggcgacagcgattatgctgttgcaaacaaaacccagaactttgaagtcactgcacagtaccagtttgattttgg

SEQ ID NO: 483072 - DNA, 75 bp, synthetic construct
  source 1..75: mol_type = other DNA
ccgtaagttagctaaagagaacggcgacggcttcggtatgtccacttcctatgacttcgacttcggtttaagtct

SEQ ID NO: 483073 - DNA, 75 bp, synthetic construct
  source 1..75: mol_type = other DNA
ggtattacttcaataagaacatgaacgtatataccgcttatcagatcaacctgcttgataagagtgattatgttc

SEQ ID NO: 483074 - DNA, 75 bp, synthetic construct
  source 1..75: mol_type = other DNA
cctgaacggttttaacaccgaccagatgctgaagcagctgggcaatctgaatccgcagcagtttatgtccggaga

SEQ ID NO: 483075 - DNA, 75 bp, synthetic construct
  source 1..75: mol_type = other DNA
gtggtgttccaggacggcttccagctgaaaaccgtggaggaaatggcgctggagcagtcacagagtacagcggaa

SEQ ID NO: 483076 - DNA, 75 bp, synthetic construct
  source 1..75: mol_type = other DNA
aagttttgcgaaagccatgctgattgaaggggcggatgccaatgcctcagtcaccggtaatgaatccacggtgcc

SEQ ID NO: 483077 - DNA, 75 bp, synthetic construct
  source 1..75: mol_type = other DNA
gtccagggtgaactcccgctgcccggcagcacctccgccgccgacagccggggaagaacgccgctcggaaacaca

SEQ ID NO: 483078 - DNA, 75 bp, synthetic construct
  source 1..75: mol_type = other DNA
gatgaccagcgtcgcattgaaaagctggggcaggagaatgctgcgctggcagagcaggtgaaagccctgggcgcg

SEQ ID NO: 483079 - DNA, 75 bp, synthetic construct
  source 1..75: mol_type = other DNA
gcatgtcagcttccggggtaaaaacggtatcaagggcgaagtggtgatgcgtaacggcaaaatcctcggctgggc

SEQ ID NO: 483080 - DNA, 75 bp, synthetic construct
  source 1..75: mol_type = other DNA
tttacggaaggaaaaagtgagctgcaatggctggaaacgttttataacgttgcccggcagcgcggggcaagccag

SEQ ID NO: 483081 - DNA, 75 bp, synthetic construct
  source 1..75: mol_type = other DNA
atggagcatatgcagtcgagcggttcgttaacatttggagattgctacatatcacttaacgagttcgccgaccag

SEQ ID NO: 483082 - DNA, 75 bp, synthetic construct
  source 1..75: mol_type = other DNA
aacccaaaactttgaagttgttgctcagtatcagttcgacttcggtctgcgcccgtccatcgcttacctgcaatc

SEQ ID NO: 483083 - DNA, 75 bp, synthetic construct
  source 1..75: mol_type = other DNA
tctttggtcaggtcgatggcctgaactttgctctgcaatatcagagtaataacgaaaacagcggtggtctattcg

SEQ ID NO: 483084 - DNA, 75 bp, synthetic construct
  source 1..75: mol_type = other DNA
actgctcttgcgaatcgcagcgtgcaggtgacctgtcagacaccggagcaggctcagcttccccgctgggttgct

SEQ ID NO: 483085 - DNA, 75 bp, synthetic construct
  source 1..75: mol_type = other DNA
cacactttctccattgatcccaacacggactggaatgcgattttttcgttatgccaggccatgagcctgttcgcc

SEQ ID NO: 483086 - DNA, 75 bp, synthetic construct
  source 1..75: mol_type = other DNA
ggagcaagaggcaataacgtttgaagtggttgccagagaatggcacgccagtaatcagaaatggtcgacatcgca

SEQ ID NO: 483087 - DNA, 75 bp, synthetic construct
  source 1..75: mol_type = other DNA
tgttcggctgtggaactcacgcgggcaaattcttgccggagcggtcattagcgagggaattaaacctggcgtgat

SEQ ID NO: 483088 - DNA, 75 bp, synthetic construct
  source 1..75: mol_type = other DNA
agcaaaaacactggatgatcgtcacgctggcggcaatgttggggcaaatcggcacacccggcggcggttttggtc

SEQ ID NO: 483089 - DNA, 75 bp, synthetic construct
  source 1..75: mol_type = other DNA
tgagatgccagaaaatccagacagcaagcggtttatccgtttcgcggattttcgccgcgacccgcaggcacaccc

SEQ ID NO: 483090 - DNA, 75 bp, synthetic construct
  source 1..75: mol_type = other DNA
acaccaacaaagatctggttaaatacgttgaagtcggtgcgacctactacttcaacaaaaatatgtccacctatg

SEQ ID NO: 483091 - DNA, 75 bp, synthetic construct
  source 1..75: mol_type = other DNA
gtaatcatcattacaccaacaaagatctggttaaatatgttgatattggtatgacctactacttcaacaaaaaca

SEQ ID NO: 483092 - DNA, 75 bp, synthetic construct
  source 1..75: mol_type = other DNA
tgagatgccggaaaatccagccagcaaacagtttgtccgctttgccgatttccgtcgtgacccgcaggcgcatcc

SEQ ID NO: 483093 - DNA, 75 bp, synthetic construct
  source 1..75: mol_type = other DNA
ttgtgggtgatcacgatccgcataagcctatgagtgagaacacggtgaataaggctttacgagtgatgggctatg

SEQ ID NO: 483094 - DNA, 75 bp, synthetic construct
  source 1..75: mol_type = other DNA
aattgaccatatccccgcccagatcggttttaagctgttgagtctgttcaagttgaccgaaacggatcagcgcat

SEQ ID NO: 483095 - DNA, 75 bp, synthetic construct
  source 1..75: mol_type = other DNA
gctccatgcgctgcattaccaccaaaccaacgtacagagcgtgcaagctaacattgcccagaccgggtttaatgc

SEQ ID NO: 483096 - DNA, 75 bp, synthetic construct
  source 1..75: mol_type = other DNA
tgaatttgaaccgctgctggacgatctgctgactattccggtggctgaaaacgctaactggtcggcgcaagagat

SEQ ID NO: 483097 - DNA, 75 bp, synthetic construct
  source 1..75: mol_type = other DNA
gcatgttcggtactgaaaaatctcgttagtaataagaacgacaagaactatacgaacaatgacaagacacaacaa

SEQ ID NO: 483098 - DNA, 75 bp, synthetic construct
  source 1..75: mol_type = other DNA
acagttttctcgatgcaggcacttatcccagtttgatggaagcttttccaggtgatgctgccaacttactgattt

SEQ ID NO: 483099 - DNA, 75 bp, synthetic construct
  source 1..75: mol_type = other DNA
gcagtgagaaaacgcgccaatgatatcgcgctcaaatgcaaatactgcgaaaaagagttttcccataatgtggtg

SEQ ID NO: 483100 - DNA, 75 bp, synthetic construct
  source 1..75: mol_type = other DNA
gtttacgcattaacgccaattttaaacgttttgtggatgaagaagttttaccgggaacagggttggacgctgcgg

SEQ ID NO: 483101 - DNA, 75 bp, synthetic construct
  source 1..75: mol_type = other DNA
tcctgctgtaccgcaacctgctgggcctgatgcaggggactctgcaagagaaaatggagaaaaacggtcggcaaa

SEQ ID NO: 483102 - DNA, 75 bp, synthetic construct
  source 1..75: mol_type = other DNA
accgtatcgacaactatgaagtggtgggtaaatcgcgccccagtctgccagagcgcatcgacaatgtgctggtct

SEQ ID NO: 483103 - DNA, 75 bp, synthetic construct
  source 1..75: mol_type = other DNA
agtggtcgataaacaattacgtatccggttaaaaaatggcacggaaaccacgttacgtactccggcgcagtttgt

SEQ ID NO: 483104 - DNA, 75 bp, synthetic construct
  source 1..75: mol_type = other DNA
gcattcaggcggcgctcgacgagtggcatcgcagcaatccggggccggtaaaagacaaagcggcctataaatctt

SEQ ID NO: 483105 - DNA, 75 bp, synthetic construct
  source 1..75: mol_type = other DNA
gcatcgcagcaatccggggccggtaaaagacaaagcggcctataaatccttcctgcgggaactgggttacctggt

SEQ ID NO: 483106 - DNA, 75 bp, synthetic construct
  source 1..75: mol_type = other DNA
ttggatgagatctcaaacgtagatgcagatggggacgagggaaatccattaaaactagccgagcagagaacaaag

SEQ ID NO: 483107 - DNA, 75 bp, synthetic construct
  source 1..75: mol_type = other DNA
aaatatcgtctgagttattgggaaagtgccggtggcgccgagtttgatgatgcacagaacaagctcagtgtaaac

SEQ ID NO: 483108 - DNA, 75 bp, synthetic construct
  source 1..75: mol_type = other DNA
gatgaggaagaaacgtcaaagtataaaggcggcgatgaccatgatacggtattcagtggtggtatcgcggctggt

SEQ ID NO: 483109 - DNA, 75 bp, synthetic construct
  source 1..75: mol_type = other DNA
ccgaccggaaggtggtgcctgttttcatgttacacttccccagcaaaccgctcctgaacttgaagaatttcatga

SEQ ID NO: 483110 - DNA, 75 bp, synthetic construct
  source 1..75: mol_type = other DNA
ccggcgcaggtgcagtaccagcccatccccgtacccaaccagctgcgccggcagtcttttgcccacagcgacgag

SEQ ID NO: 483111 - DNA, 75 bp, synthetic construct
  source 1..75: mol_type = other DNA
cggcctcggcgccacggcatcactcggcgcgggtgacgtgatgaagatggggattggcggaggcgcctccaaagc

SEQ ID NO: 483112 - DNA, 75 bp, synthetic construct
  source 1..75: mol_type = other DNA
gcccagcggctgaacaaggaaacgcagactgaaatcaaaaagctgcgtacggaaatggggattatcggacgagat

SEQ ID NO: 483113 - DNA, 75 bp, synthetic construct
  source 1..75: mol_type = other DNA
acttcgtggcttgagttcgcctcgtgtcttccttgacgaaatatccaatattgatccgaatggcgatgaaggcaa

SEQ ID NO: 483114 - DNA, 75 bp, synthetic construct
  source 1..75: mol_type = other DNA
gagaaagcaggactaaataaagaagtaaatacagaagaagcaccaactaagccaactccaaaacgagtaataagg

SEQ ID NO: 483115 - DNA, 75 bp, synthetic construct
  source 1..75: mol_type = other DNA
tgaaatagatattaataccgtgccagatgattgtcagggaatcgtatttggcgtagaccaacagttagaccgttt

SEQ ID NO: 483116 - DNA, 75 bp, synthetic construct
  source 1..75: mol_type = other DNA
ccgaccggaaggcggcgcctgttttcgtgttacacttccccagcaaaccgctcctgaacttgaagaatttcatga

SEQ ID NO: 483117 - DNA, 75 bp, synthetic construct
  source 1..75: mol_type = other DNA
actgccgatcgcgtagatgagcaaatgcgcgcctggcgggggcatcctggcgaagagaaagtctggcacacgcgc

SEQ ID NO: 483118 - DNA, 75 bp, synthetic construct
  source 1..75: mol_type = other DNA
taatttcggagggagtcctctttctgaggaaattcacacgatcacaggagttgattctttaagaataaagctttg

SEQ ID NO: 483119 - DNA, 75 bp, synthetic construct
  source 1..75: mol_type = other DNA
cggtaggcctcgatgtattgctggcctgtactgcgagtaaggtgcctgaacatctggtcgaagaactgaaaagac

SEQ ID NO: 483120 - DNA, 75 bp, synthetic construct
  source 1..75: mol_type = other DNA
ccggagagaactctggaaagccctgcttgggtggatgccggacccgcaggggggcgagattgtttatgccggtgg

SEQ ID NO: 483121 - DNA, 75 bp, synthetic construct
  source 1..75: mol_type = other DNA
attccgggcgatggcgtgcagtgcattgattgaatcaggtttgtggtcccgcgatgctgtggaacgccagatgag

SEQ ID NO: 483122 - DNA, 75 bp, synthetic construct
  source 1..75: mol_type = other DNA
ccaaacaggcggggtttaccgttaaaacgtccgccagccttgctgctttatggcaggtagtgaaccaaatcggcg

SEQ ID NO: 483123 - DNA, 75 bp, synthetic construct
  source 1..75: mol_type = other DNA
tacaccctttatggctgcgctgttgccactgggtcaatgcagtggccattgcgggtatgttgttcagcggctggg

SEQ ID NO: 483124 - DNA, 75 bp, synthetic construct
  source 1..75: mol_type = other DNA
atgtcgattaagcaactcaaagacggacgttatcaggttgatgtaaggcctcagggtgcggaaggaaagcggatt

SEQ ID NO: 483125 - DNA, 75 bp, synthetic construct
  source 1..75: mol_type = other DNA
caagatgacgcaggttttgattggtgatatctatttacgtcagcaatgcgatgtgttttggctcggctataccat

SEQ ID NO: 483126 - DNA, 75 bp, synthetic construct
  source 1..75: mol_type = other DNA
tatttacagaatgccgggttagaagttcttgaggtgactgcgccagatcggatggagcgacgcaaacggggtaaa

SEQ ID NO: 483127 - DNA, 75 bp, synthetic construct
  source 1..75: mol_type = other DNA
atgctggcatggatgacctcgtttgggacattaaaacgaattggtgttgagtgcacaggtacctatggttccggt

SEQ ID NO: 483128 - DNA, 75 bp, synthetic construct
  source 1..75: mol_type = other DNA
ttagtcgccctgccatctgccggatgcttggtggaattagcaggggaacattttatttatggcgtaaaaaatggg

SEQ ID NO: 483129 - DNA, 75 bp, synthetic construct
  source 1..75: mol_type = other DNA
cggaaaataccctttcaaaaaattacttatcaggattggcttcaatttttcgagcatcgaagatgggtgagcata

SEQ ID NO: 483130 - DNA, 75 bp, synthetic construct
  source 1..75: mol_type = other DNA
ctcgccagggatatgcaattgaagcaattaccgccacgattgactggataaaagagaacggtttttcactcatca

SEQ ID NO: 483131 - DNA, 75 bp, synthetic construct
  source 1..75: mol_type = other DNA
gtacttcgattatcaccaccatcgcgatattaaagaagattttcgccctcaccgcttcgccaacgagtttgcccg

SEQ ID NO: 483132 - DNA, 75 bp, synthetic construct
  source 1..75: mol_type = other DNA
tttcttttgcatccacactggctgattttcatgacggtggttctgtgactcctgaatatcccctgcgttccgcca

SEQ ID NO: 483133 - DNA, 75 bp, synthetic construct
  source 1..75: mol_type = other DNA
accacctatgtggtgcagggctggcgacagggtaacggtacgctgtggcagccaaaccagcgggtgattgtcttt

SEQ ID NO: 483134 - DNA, 75 bp, synthetic construct
  source 1..75: mol_type = other DNA
ggaacaggcaaagcggcgacggcactggtgctgggagagaatattctttcctgtgacacggaaagaagcatcaga

SEQ ID NO: 483135 - DNA, 75 bp, synthetic construct
  source 1..75: mol_type = other DNA
cgtgaacaggacatcgcccaggcgaaagccagcctcgaacaggcgcaggcgcaactggcgcaggcggagctgaat

SEQ ID NO: 483136 - DNA, 75 bp, synthetic construct
  source 1..75: mol_type = other DNA
caaagccgccaggataacggcctgacgctgtatggcaacgtggatattcgtacggtgaatcttagtttccgtgtt

SEQ ID NO: 483137 - DNA, 75 bp, synthetic construct
  source 1..75: mol_type = other DNA
gcgacgcccgttcgttacgatgcccgttcggtcagcaccggtattgccggacgtagtctgaccgctgacctgatt

SEQ ID NO: 483138 - DNA, 75 bp, synthetic construct
  source 1..75: mol_type = other DNA
gcgctggtcgatatgacctactatgaaaatgccgtgcacgccatgtggctggcaagccaggaagcctgcgataag

SEQ ID NO: 483139 - DNA, 75 bp, synthetic construct
  source 1..75: mol_type = other DNA
agctggggtatcagccggtcatctcgctggatgaaggtatcgagcaaactgctgcctggctgcgcgaccacggaa

SEQ ID NO: 483140 - DNA, 75 bp, synthetic construct
  source 1..75: mol_type = other DNA
tattgatgatcccgcgcatctgtttatttttcgcgaatggcaaaacaaatcgccagactggcagaacaaagcaca

SEQ ID NO: 483141 - DNA, 75 bp, synthetic construct
  source 1..75: mol_type = other DNA
ggaacaggcaaggcggcgacagcactggtgctgggagagaatattctttcctgtgacacggaaagaagcatcaga

SEQ ID NO: 483142 - DNA, 75 bp, synthetic construct
  source 1..75: mol_type = other DNA
ttacgggttggcccggcagatgcttatctccctgagcctgtcaccgccaggaagaaaaaaaatgttgaggaggat

SEQ ID NO: 483143 - DNA, 75 bp, synthetic construct
  source 1..75: mol_type = other DNA
gcgaacaccgcatcttcgaagccgccggaccagaggtgctcagttatcagcaacagtttgaacattttatggcgg

SEQ ID NO: 483144 - DNA, 75 bp, synthetic construct
  source 1..75: mol_type = other DNA
atacaaaaacgttctgacgctggtgcgtaatacttttgccgatcgtgatgccggcgggcgcggtttgcagacatt

SEQ ID NO: 483145 - DNA, 75 bp, synthetic construct
  source 1..75: mol_type = other DNA
aatatgcgttttggcttggagctggaaaaatcggcgttcgggaaatataacgtggacaatgcgataaacgctaac

SEQ ID NO: 483146 - DNA, 75 bp, synthetic construct
  source 1..75: mol_type = other DNA
tatgatcgtcatttaaacctgaatgaaactatttatgaggtgtttgaggccaacggttgtaatcctggaaagctg

SEQ ID NO: 483147 - DNA, 75 bp, synthetic construct
  source 1..75: mol_type = other DNA
tcactgacagcgcaaacaataagaaattccatacgctgacggtcgatgaactggcaaccagcaacagcgcctatg

SEQ ID NO: 483148 - DNA, 75 bp, synthetic construct
  source 1..75: mol_type = other DNA
tgacacgaacggtgatgccggtgcctgggcccgtattatgaacggcgccggttcagccgatggcggatacagtga

SEQ ID NO: 483149 - DNA, 75 bp, synthetic construct
  source 1..75: mol_type = other DNA
accctggctcagtttcctcttctgtctcccctgttctggctgccgggttgttcagcggatataacgcggcgtact

SEQ ID NO: 483150 - DNA, 75 bp, synthetic construct
  source 1..75: mol_type = other DNA
gttttaataaaattgcagcgacagatataggagcactcataacaaatagtgcagtgcagaaagcagttctttctg

SEQ ID NO: 483151 - DNA, 75 bp, synthetic construct
  source 1..75: mol_type = other DNA
tggttttgattatgccgttaagtttctacgcagtgaagcgtctagtgtacgtttgttcgccgaccagcttcgcaa

SEQ ID NO: 483152 - DNA, 75 bp, synthetic construct
  source 1..75: mol_type = other DNA
ggctgctgaaaatacctcgcttaagcaatctgagaaggaatttaatgacttttgtcgtgaggagtttagcgaatg

SEQ ID NO: 483153 - DNA, 75 bp, synthetic construct
  source 1..75: mol_type = other DNA
atgaaacaaatgtcactaattgagatggatggatttctgaaaggtaaatgcattccaagtgatttaaaggttaac

SEQ ID NO: 483154 - DNA, 75 bp, synthetic construct
  source 1..75: mol_type = other DNA
aagaaacggcagcatcgttgagtggaatatccggtatgataataaagacaaccttcacaaaattggtgatggcac

SEQ ID NO: 483155 - DNA, 75 bp, synthetic construct
  source 1..75: mol_type = other DNA
ggtgcagaagcgggctatcgctatcatgtcactgaggatacctggattgagccacaggctgagctggtttacggt

SEQ ID NO: 483156 - DNA, 75 bp, synthetic construct
  source 1..75: mol_type = other DNA
actcaaatccagccagcgatatggctggtgcgctatcgacaaccaaagcgcgacattaccctgctttaccttcta

SEQ ID NO: 483157 - DNA, 75 bp, synthetic construct
  source 1..75: mol_type = other DNA
gacatacatgacggaaggctacgatttaaccggtgataacgccacgctggacatcagccagcaggcgcatgtttc

SEQ ID NO: 483158 - DNA, 75 bp, synthetic construct
  source 1..75: mol_type = other DNA
gctatgtccccggagttctttgtgacaaagattatgttgctgattttgccaaactggaaagtgaggcaaataaga

SEQ ID NO: 483159 - DNA, 75 bp, synthetic construct
  source 1..75: mol_type = other DNA
tgcctacagtgttaccgcaagccataatggcactattcaccatgccattaaaactcagacatggggacagtcaga

SEQ ID NO: 483160 - DNA, 75 bp, synthetic construct
  source 1..75: mol_type = other DNA
tttcagcctggagcatacggggtaaaaacgccattaaaaaatggtggtgaattcagttttcctgaagtaacgatc

SEQ ID NO: 483161 - DNA, 75 bp, synthetic construct
  source 1..75: mol_type = other DNA
tgacctggggttcacactctaacaaccacttcgatatttccctggcgatgtttacccatgttgccgctgctgcac

SEQ ID NO: 483162 - DNA, 75 bp, synthetic construct
  source 1..75: mol_type = other DNA
gcagagttccgtcgcgcgactggcctgccgaccgcaaccaatatgatcgccactgactggcggcagatgggccat

SEQ ID NO: 483163 - DNA, 75 bp, synthetic construct
  source 1..75: mol_type = other DNA
aggtgcaacggaacacgttgattttggtttatctgcagcagaggcacttgaacggtatggcgttgagtttaatgg

SEQ ID NO: 483164 - DNA, 75 bp, synthetic construct
  source 1..75: mol_type = other DNA
acggcgcagtgtccgggaaaacattcaactggaaagacggtgagatggatctaagtatgaagaacaaggatttca

SEQ ID NO: 483165 - DNA, 75 bp, synthetic construct
  source 1..75: mol_type = other DNA
ccacaacacatgccatttttcgtgatggtccccggtactgctatgtaccgggagtcctttgtgacaaagattatg

SEQ ID NO: 483166 - DNA, 75 bp, synthetic construct
  source 1..75: mol_type = other DNA
acagcagtctgattattgacggaaacattgatacgcacaatgacatcaccatacggaattcccagcttcggttac

SEQ ID NO: 483167 - DNA, 75 bp, synthetic construct
  source 1..75: mol_type = other DNA
gaatgtcagctttatgaagaacccgaccccggggcagtccctgaacatcccgctggtcagtgcgccggccggaac

SEQ ID NO: 483168 - DNA, 75 bp, synthetic construct
  source 1..75: mol_type = other DNA
ctgacggcacaaaaagggctctacagtgatggtcgggttcagattgggaagaacggtacgctttccctgagtggc

SEQ ID NO: 483169 - DNA, 75 bp, synthetic construct
  source 1..75: mol_type = other DNA
acggcgccatcaccggcggtaaaggaaacgtcaggatgaacagtggtctgtggcagctgaccggagactccgaca

SEQ ID NO: 483170 - DNA, 75 bp, synthetic construct
  source 1..75: mol_type = other DNA
ccgcgaatttgacacctacactgtagatacatgggtgattcgtgcggtgtgggataccttgcaaggaaacggcta

SEQ ID NO: 483171 - DNA, 75 bp, synthetic construct
  source 1..75: mol_type = other DNA
atgacaaacatgatctcatatcagggacttgttcgcaccttccttaatgcctataccagctatgacgaaacggtg

SEQ ID NO: 483172 - DNA, 75 bp, synthetic construct
  source 1..75: mol_type = other DNA
cattagtggcaactctgttgctcccagggcggctgattgccgccttaccgcaggatgaaaagttaattaccgggc

SEQ ID NO: 483173 - DNA, 75 bp, synthetic construct
  source 1..75: mol_type = other DNA
ttaccgattcacagcagtggaataccttgttaagtctgcataatgcgcaattttatctgctacaacgtacgccag

SEQ ID NO: 483174 - DNA, 75 bp, synthetic construct
  source 1..75: mol_type = other DNA
gcaggagcaattgttgaaacaaatgacggtagagaatgttaacactgccgtggctttgttgaataaatcgaactt

SEQ ID NO: 483175 - DNA, 75 bp, synthetic construct
  source 1..75: mol_type = other DNA
tgcctataccagctatgacgaaacggtgtatcaggtgagtttgccgactacgcagaaacaaaatctgcaacaagt

SEQ ID NO: 483176 - DNA, 75 bp, synthetic construct
  source 1..75: mol_type = other DNA
cagaaatttatcgttaacagtagacgctgacccacaggcggaaattagcagcaaagaaacgctggctgagaatct

SEQ ID NO: 483177 - DNA, 75 bp, synthetic construct
  source 1..75: mol_type = other DNA
cgaagatggtccgactcaccagccggtagagcaggtcgcttctctgcgcgtgaccccgaacatgtctacatggcg

SEQ ID NO: 483178 - DNA, 75 bp, synthetic construct
  source 1..75: mol_type = other DNA
tattacattaccatgaatgatgtgaaaattaatgaaaaaagtattacatctatcaaggattttatggtttcgcca

SEQ ID NO: 483179 - DNA, 75 bp, synthetic construct
  source 1..75: mol_type = other DNA
taaaattaatgttcatctaccagaagatagagagtctgtatttagaattaatgttttagctataccctctaatta

SEQ ID NO: 483180 - DNA, 75 bp, synthetic construct
  source 1..75: mol_type = other DNA
tttaatcctctgaaaacgggcgtttgccagctcgacaatgcgaacgtgactgaagcgatcctcagcagggcaggt

SEQ ID NO: 483181 - DNA, 75 bp, synthetic construct
  source 1..75: mol_type = other DNA
ggattcactgagcataggcaaacggcatttcgtgaactggagcgggttctgaatttttctcaatcacgcttgtgc

SEQ ID NO: 483182 - DNA, 75 bp, synthetic construct
  source 1..75: mol_type = other DNA
caactgatgcaggatgtcaccccagacgcatggccaaactggccggtaaaactgggttggctgacaccgcgcggt

SEQ ID NO: 483183 - DNA, 75 bp, synthetic construct
  source 1..75: mol_type = other DNA
ccgcacgaaattactgcaagaaaatcagattgcacagtttactgccgcagatgcgctggctgccgatcgccagtt

SEQ ID NO: 483184 - DNA, 75 bp, synthetic construct
  source 1..75: mol_type = other DNA
gggtatggatgaagacacctaccgccagatgttacaggggctgaccggtaaagcctcaaccaaaggaatggatac

SEQ ID NO: 483185 - DNA, 75 bp, synthetic construct
  source 1..75: mol_type = other DNA
atggaacttactgatactcaaaaaatttttctgaataatgcggctaaaagatctttcagagacatggctgatcaa

SEQ ID NO: 483186 - DNA, 75 bp, synthetic construct
  source 1..75: mol_type = other DNA
cctctataaaaatgggtttgacgaaatcaaatattttcagaatgaaatcacaaatattgagatgaaagtcatgtc

SEQ ID NO: 483187 - DNA, 75 bp, synthetic construct
  source 1..75: mol_type = other DNA
gccgggggcgctgtttgtaccaaacagtctgttaaaccagttccgccgtgaagccgccgatatgcttgatgctgc

SEQ ID NO: 483188 - DNA, 75 bp, synthetic construct
  source 1..75: mol_type = other DNA
cgctccttcaagattgaagggcgttacaaagatatgagctacgtgaagaatatcaccgcccattatcgtcagatg

SEQ ID NO: 483189 - DNA, 75 bp, synthetic construct
  source 1..75: mol_type = other DNA
cggtttaccgctggatgaccatccgcagtccaggaaaattcgtgcgctatggcttgaaatggctgctgcaggcat

SEQ ID NO: 483190 - DNA, 75 bp, synthetic construct
  source 1..75: mol_type = other DNA
cggcacaattgcgccaattttatcaacgctggtatcaaccaaataatatgacctttattgtggtcggcgatatcg

SEQ ID NO: 483191 - DNA, 75 bp, synthetic construct
  source 1..75: mol_type = other DNA
aaaaagtgatggcaatcttcagtgaatggagcaatgccgccacctttgaaaaacacgaagtagacgctgaacgtg

SEQ ID NO: 483192 - DNA, 75 bp, synthetic construct
  source 1..75: mol_type = other DNA
cccgattatcagtcgctgtttttccgtgtaaatgcacgagacgataatatgcaggatgctgcgaatgcattaatg

SEQ ID NO: 483193 - DNA, 75 bp, synthetic construct
  source 1..75: mol_type = other DNA
aaccatgagcagtaaagtcagtggcatgaatacattgctctccgttagcgcgcggactaataaccctgaacctgg

SEQ ID NO: 483194 - DNA, 75 bp, synthetic construct
  source 1..75: mol_type = other DNA
ttatcagtcgctgtttttccgtgtaaatgcacgagacgataatatgcaggatgctgcgaatgcattaatggcaga

SEQ ID NO: 483195 - DNA, 75 bp, synthetic construct
  source 1..75: mol_type = other DNA
catgagcagtaaagtcagtggcttgaatacactactgtctgttagcgcacgggctaataatcctgaacccggttt

SEQ ID NO: 483196 - DNA, 75 bp, synthetic construct
  source 1..75: mol_type = other DNA
taatttcattattattttcaaacttttcatttagccaatcaaatgggataaatctggcggcaactcgcgtagtct

SEQ ID NO: 483197 - DNA, 75 bp, synthetic construct
  source 1..75: mol_type = other DNA
attgagcagtgggatgcccagcgctcaatcggtaacctgacggcgaaaaagatgatggatcgcgccattgaactg

SEQ ID NO: 483198 - DNA, 75 bp, synthetic construct
  source 1..75: mol_type = other DNA
gatgagggcaatttgaccaaagaacctggcgttatcgagaaaaatcgccgcattttgccgatgggctactggaaa

SEQ ID NO: 483199 - DNA, 75 bp, synthetic construct
  source 1..75: mol_type = other DNA
ggttctggcatgtcgattgtgctggatatgatcgctactctcctttccgacggcgcatccgttgccgaagtcacc

SEQ ID NO: 483200 - DNA, 75 bp, synthetic construct
  source 1..75: mol_type = other DNA
atttatggcgtctgtgggaaattcccgacagataaccctaacttcgctcttgagattttgaatgcaaacttatgg

SEQ ID NO: 483201 - DNA, 75 bp, synthetic construct
  source 1..75: mol_type = other DNA
tgcacaggcgctggagaaactcattcaacggctggggcgtattgatgtgctggtgaataatgcgggcgcaatgac

SEQ ID NO: 483202 - DNA, 75 bp, synthetic construct
  source 1..75: mol_type = other DNA
gatgaaggcaatctgactaaagaacctggcataatcgagaaaaatcgccgcattttaccgatgggttactggaaa

SEQ ID NO: 483203 - DNA, 75 bp, synthetic construct
  source 1..75: mol_type = other DNA
tgctcgccgctttgttgcgggagagtcggagccgcagcatcaagtccgatccacaattcatcgccatgcgcgaat

SEQ ID NO: 483204 - DNA, 75 bp, synthetic construct
  source 1..75: mol_type = other DNA
gtgccttatcagcatggcagcattcaactggcgggtaagggtattcagggaccgggagcagagcgtggcgtagtt

SEQ ID NO: 483205 - DNA, 75 bp, synthetic construct
  source 1..75: mol_type = other DNA
attcccattatgtaggggatatcttcggtgcgccgctggcaatcgaaggtctgatggccttcttcctcgaatcca

SEQ ID NO: 483206 - DNA, 75 bp, synthetic construct
  source 1..75: mol_type = other DNA
tttgttagatgtctcaaaacgcctgaaactgaaagccgataaagagatgtccacctttgaaattgaacaacagtt

SEQ ID NO: 483207 - DNA, 75 bp, synthetic construct
  source 1..75: mol_type = other DNA
cgatggtgaagtggtcggcggtggtggaattgcgccattgacaggtagtgaagcggacatttgcgaactgcaaaa

SEQ ID NO: 483208 - DNA, 75 bp, synthetic construct
  source 1..75: mol_type = other DNA
ctgtatcaagtgtatagtcagccgggtcatgcatattgggtggttgagtacgagggtgaagtggtcggcggcggt

SEQ ID NO: 483209 - DNA, 75 bp, synthetic construct
  source 1..75: mol_type = other DNA
atgaaaattagaactgatggtagttttcaattatatgaaaatctaaaaaaaatagattataagaaagaaaatagt

SEQ ID NO: 483210 - DNA, 75 bp, synthetic construct
  source 1..75: mol_type = other DNA
tcgaaatcccgtctgaaatctatgcgcagtgggatgcgaaagaagcaggtcaggcgaaagaatccgcatggaacg

SEQ ID NO: 483211 - DNA, 75 bp, synthetic construct
  source 1..75: mol_type = other DNA
gtggcatggaaatacggcgttgagcgtcaggacggcccgactgcgcttatcctctcccgtcagaacctggcgcag

SEQ ID NO: 483212 - DNA, 75 bp, synthetic construct
  source 1..75: mol_type = other DNA
ttatccgcaggaagcggctgaatttacccgccgtatgaaaggcgaaatgccgtctgacttcgacgccaaagcgaa

SEQ ID NO: 483213 - DNA, 75 bp, synthetic construct
  source 1..75: mol_type = other DNA
atgaaaaaatacaatattacaatattatctttcatatttttttctcatatttcgctagctgagactggtggtatt

SEQ ID NO: 483214 - DNA, 75 bp, synthetic construct
  source 1..75: mol_type = other DNA
cgaagatggcccgactcaccagccggtagagcaagtggcttctctgcgcgtgaccccgaacatgtcgacatggcg

SEQ ID NO: 483215 - DNA, 75 bp, synthetic construct
  source 1..75: mol_type = other DNA
cgctgaaattgccctgacccgcgaacaactgggctggaaatatgcgccgttcgaaatcccgtctgaaatctatgc

SEQ ID NO: 483216 - DNA, 75 bp, synthetic construct
  source 1..75: mol_type = other DNA
aaaactggcgtttgccaactggataacgcgaacgtgactgacgcgatcctcagcagggcaggagggtcaattgct

SEQ ID NO: 483217 - DNA, 75 bp, synthetic construct
  source 1..75: mol_type = other DNA
gtgaaagcgcgcgtggtttccatgccgtctaccgaggcattcgacaagcaggatgcggcttaccgtgaatccgta

SEQ ID NO: 483218 - DNA, 75 bp, synthetic construct
  source 1..75: mol_type = other DNA
cgtctgacttcgatgccaaagcgaaagaattcatcgctaaactgcaggctaatccggcgaaaatcgccagccgta

SEQ ID NO: 483219 - DNA, 75 bp, synthetic construct
  source 1..75: mol_type = other DNA
tatctcttctgattccgttaacaccgaaatctgcattcgctcagagtgagccggagctgaagctggaaagtgtgg

SEQ ID NO: 483220 - DNA, 75 bp, synthetic construct
  source 1..75: mol_type = other DNA
cagcctggtcaggtcgcgattattgctgatgtcgacgagcgtacccgtaaaacaggcgaagccttcgccgccggg

SEQ ID NO: 483221 - DNA, 75 bp, synthetic construct
  source 1..75: mol_type = other DNA
ccattggattcaggtttcgctggtcttccagactttacagcagatgcgtgataaaacgccgctatcattaaatac

SEQ ID NO: 483222 - DNA, 75 bp, synthetic construct
  source 1..75: mol_type = other DNA
accgtggcgatgctggaaatgactcaggctggtcgcgaaatgagcgatgaagagctcaaagaaaacccagctgta

SEQ ID NO: 483223 - DNA, 75 bp, synthetic construct
  source 1..75: mol_type = other DNA
cggtgatgggcagatttaccgtcgcattcttgatctcatctgggaaacgctgactgtcaaagacgcaaaagtgaa

SEQ ID NO: 483224 - DNA, 75 bp, synthetic construct
  source 1..75: mol_type = other DNA
atttcgatctgtacggcgtttatccggcaatcgatgcctgcgtggcgttaagtgaactggtccattcgcgtttaa

SEQ ID NO: 483225 - DNA, 75 bp, synthetic construct
  source 1..75: mol_type = other DNA
aaactgattttaaaataaccctcgaaggtttcgctactgagcaagaagcaaataatatcggtaatttcacactag

SEQ ID NO: 483226 - DNA, 75 bp, synthetic construct
  source 1..75: mol_type = other DNA
cgaatgcaggaggcgcgccggaacatggcaataccggttcggattcattcagcattctggaagagcaacccgccg

SEQ ID NO: 483227 - DNA, 75 bp, synthetic construct
  source 1..75: mol_type = other DNA
agtattctggaagagcacgccgccacccaatctaatagccatgataattggcctgataatgctggtgactctgtt

SEQ ID NO: 483228 - DNA, 75 bp, synthetic construct
  source 1..75: mol_type = other DNA
tggttaaaacttaatgagaaaaacctattaaagcagccattatttatagcttcaattatcataccgttagaaatg

SEQ ID NO: 483229 - DNA, 75 bp, synthetic construct
  source 1..75: mol_type = other DNA
ctaagaaacattctcattgaactatatattttaattgacgaagaccccaatatttttctagcaagcaaaaatact

SEQ ID NO: 483230 - DNA, 75 bp, synthetic construct
  source 1..75: mol_type = other DNA
tctcctctcgcgatgcaatcagccatcatcagttatacgctgacggtggcgatgcttattccggtaagcggatga

SEQ ID NO: 483231 - DNA, 75 bp, synthetic construct
  source 1..75: mol_type = other DNA
tgaagagatggtaaacggcgtagcccgccgctggttgtacgtgcaccgtatttttagctacggcacacagcatgt

SEQ ID NO: 483232 - DNA, 75 bp, synthetic construct
  source 1..75: mol_type = other DNA
cggcgaaggtatgcccctgcctgacagctacgaccgtcccgatccacgcattaagcagctggcccgccgcagtgt

SEQ ID NO: 483233 - DNA, 75 bp, synthetic construct
  source 1..75: mol_type = other DNA
aaaaatgatggaagcacggaatacattgaattatctgtcgttcatccttacactctctacaaaaatatattcaaa

SEQ ID NO: 483234 - DNA, 75 bp, synthetic construct
  source 1..75: mol_type = other DNA
gtacggtaatatttctctgaatgacatgtatcttgaagtaaaaaaacgtatcaggctaatcatcaactcttatgc

SEQ ID NO: 483235 - DNA, 75 bp, synthetic construct
  source 1..75: mol_type = other DNA
aaagcattagctgaatctatcggtattacggtagagaaaagctgggggctgggacgtattgtcacggagatcttt

SEQ ID NO: 483236 - DNA, 75 bp, synthetic construct
  source 1..75: mol_type = other DNA
cctggtagctattacaaaatggggagtgactgggatggcggtcagtttgatgatcatcttaccattgaagttgaa

SEQ ID NO: 483237 - DNA, 75 bp, synthetic construct
  source 1..75: mol_type = other DNA
gcttaatgataaacagggcgatcgcaccgatattgctcttacccaacatcaactgacgccagcgcaactgaccga

SEQ ID NO: 483238 - DNA, 75 bp, synthetic construct
  source 1..75: mol_type = other DNA
taagcgatgccaaaccatgtagccgccacatgatcggcatgtccatcaaactgcagaccagcggcccgcattggg

SEQ ID NO: 483239 - DNA, 75 bp, synthetic construct
  source 1..75: mol_type = other DNA
taagcgatgccaaaccatgtagccgacacatgatcggcatgtccatcaacctgcagaccagcggcccgcattggg

SEQ ID NO: 483240 - DNA, 75 bp, synthetic construct
  source 1..75: mol_type = other DNA
tcagagcagggtaagaccccggcgcagattggtgaccagctggggtacagctcgcgccacgtccagcgcatgctg

SEQ ID NO: 483241 - DNA, 75 bp, synthetic construct
  source 1..75: mol_type = other DNA
gccctcctttggtgttcgttctggtgaactgactttattgtcatcgagaaatgtcaagcctgtttcaggattgtg

SEQ ID NO: 483242 - DNA, 75 bp, synthetic construct
  source 1..75: mol_type = other DNA
cattttgagttaaggcagtttataagggaaacggtaaaatcaactgagacgacgggtgcctacttcagtgaagcg

SEQ ID NO: 483243 - DNA, 75 bp, synthetic construct
  source 1..75: mol_type = other DNA
aaatggctgtaaaaagacttacgggaacctacacgtctgtcaaaaggagcttttgttatgctgacggtaattttc

SEQ ID NO: 483244 - DNA, 75 bp, synthetic construct
  source 1..75: mol_type = other DNA
gcaaatcatcacggcagaaaataacccgcagatgttccagtttaaccacctgctgcgcgcgctgttccaggccga

SEQ ID NO: 483245 - DNA, 75 bp, synthetic construct
  source 1..75: mol_type = other DNA
gtcacaggctaaattaacgattgaggtcaataacctcgaaacgctgttaatggaagtcgcgcaacggtccgctga

SEQ ID NO: 483246 - DNA, 75 bp, synthetic construct
  source 1..75: mol_type = other DNA
aggttatgaactcatataatgaaaggccttacattcccgggcgtatgtatacaggggaatatgaagatttaggga

SEQ ID NO: 483247 - DNA, 75 bp, synthetic construct
  source 1..75: mol_type = other DNA
atgactgataacaataccgccctaaagaaagctggcctgaaagtaacgcttccacgcttaaaaatcctggaagtt

SEQ ID NO: 483248 - DNA, 75 bp, synthetic construct
  source 1..75: mol_type = other DNA
cgaagagaaagtctggcacacgcgcgacgcgattcttttatgtattgggcataacaccggcagtgagaaactggt

SEQ ID NO: 483249 - DNA, 75 bp, synthetic construct
  source 1..75: mol_type = other DNA
cctgcgcgaactggcactgcgccgtactgccgatcgcgtagatgagcaaatgcgcgcctggcgggggcatcctgg

SEQ ID NO: 483250 - DNA, 75 bp, synthetic construct
  source 1..75: mol_type = other DNA
cgccggaaaaggtcaatgacgccattttctactacgcccgttttgaagtgccaaaccctaatggcctgctgcgtc

SEQ ID NO: 483251 - DNA, 75 bp, synthetic construct
  source 1..75: mol_type = other DNA
tctggcaagcgaaggttctccgcacgctcgccaggccagcgaaattcgccagcatgtgctgaacacgacccgact

SEQ ID NO: 483252 - DNA, 75 bp, synthetic construct
  source 1..75: mol_type = other DNA
cagtggagttttgataaaggcctgcctgcgggtgcgggcaccgacacgttacccggtgtaccgtaccagattttg

SEQ ID NO: 483253 - DNA, 75 bp, synthetic construct
  source 1..75: mol_type = other DNA
acgcgccggacagccgctcttttaaagacaaatggcgggtgcaaattcagggctgcgtggttgccgccgcgttat

SEQ ID NO: 483254 - DNA, 75 bp, synthetic construct
  source 1..75: mol_type = other DNA
gacgctggtatcgtcacccgccacaattttgaaggcggtaaatccgtatttgaactgacacagcaacatcaccac

SEQ ID NO: 483255 - DNA, 75 bp, synthetic construct
  source 1..75: mol_type = other DNA
agtgcacgaattgcggacatcattcggttgcagacggccattccatgccagcccgttacagtttctgagctcagc

SEQ ID NO: 483256 - DNA, 75 bp, synthetic construct
  source 1..75: mol_type = other DNA
gcattctcatcgttgccgatgatttcacgggagccaacgacgcgggggtaagcctggcgcaggtggggcatacag

SEQ ID NO: 483257 - DNA, 75 bp, synthetic construct
  source 1..75: mol_type = other DNA
cgccgcgacggagatggctgtgaaacaggcgcaaatcggcactattgacgcgcaaatcaagcgcaatcaggcctc

SEQ ID NO: 483258 - DNA, 75 bp, synthetic construct
  source 1..75: mol_type = other DNA
cagcaacgtctggcacaaacgcaggcggtttcacagcaggatctcgacaccgccgcgacggagatggctgtgaaa

SEQ ID NO: 483259 - DNA, 75 bp, synthetic construct
  source 1..75: mol_type = other DNA
ccggtgatcaccctttctcactttgaaatgccgctacatctggtgcagcaatacggcagttggaccaaccgtaag

SEQ ID NO: 483260 - DNA, 75 bp, synthetic construct
  source 1..75: mol_type = other DNA
ctgtcctatcttattatattaggtttcctttcgttgtttattgttatacctgagtttataggaataacatttttg

SEQ ID NO: 483261 - DNA, 75 bp, synthetic construct
  source 1..75: mol_type = other DNA
ggcgtaatgtgcaggataacgtggcgttcggcttgcaactggcggggatggagaaaaagcaacgtctggaaatcg

SEQ ID NO: 483262 - DNA, 75 bp, synthetic construct
  source 1..75: mol_type = other DNA
tgtgggaaaaagaaatgtgggaaggtcttgtgattgtggccgaaacagttcttttattatggtctgtgattgcgt

SEQ ID NO: 483263 - DNA, 75 bp, synthetic construct
  source 1..75: mol_type = other DNA
taataattataaaatagtagcggtggatcctatattaaatgatgaacattatataaataataaaaatgatctaca

SEQ ID NO: 483264 - DNA, 75 bp, synthetic construct
  source 1..75: mol_type = other DNA
gcaaaccttgctgctgaaactctggcaggagacgggcaagcaggtgctgttgattacccacgatatagaagaagc

SEQ ID NO: 483265 - DNA, 75 bp, synthetic construct
  source 1..75: mol_type = other DNA
gccagcgagtgggaattgcccgcgcgctggcggcgaatccacaactcttattacttgatgaaccgtttggcgcgc

SEQ ID NO: 483266 - DNA, 75 bp, synthetic construct
  source 1..75: mol_type = other DNA
caggagacaggcaagcaggtgttgttgattacccatgatatagaagaagcggtgtttatggcgaccgaactggtt

SEQ ID NO: 483267 - DNA, 75 bp, synthetic construct
  source 1..75: mol_type = other DNA
tcggaacgaagtttgatatcaatgggttatctttcgatgaatgcctgttgttgttgctggtgtgttcgatgattg

SEQ ID NO: 483268 - DNA, 75 bp, synthetic construct
  source 1..75: mol_type = other DNA
gcggttgcggaagtggcacaggttttcggaacgaagtttgatatcaatggcttatcgttcgatgaatgcctgcta

SEQ ID NO: 483269 - DNA, 75 bp, synthetic construct
  source 1..75: mol_type = other DNA
aaaaagtatggtctgggatgttgggaaagattttaatatcattaatggccactttatcatatgttattacaaatt

SEQ ID NO: 483270 - DNA, 75 bp, synthetic construct
  source 1..75: mol_type = other DNA
accaatgctgataaaattaaaagccttatattagaagttattgaacaatgtcaaataaaatcagatgatgtcgta

SEQ ID NO: 483271 - DNA, 75 bp, synthetic construct
  source 1..75: mol_type = other DNA
cgttacaaagtgacatacaaaacggtatatcaggccatcaaaagaatgcgtcgactggagcgtggaaaatatcaa

SEQ ID NO: 483272 - DNA, 75 bp, synthetic construct
  source 1..75: mol_type = other DNA
ttgttgctggtgtgttcgatgattggctgggtggcagcgtggcttgccacggtgcagcatttacgccactttacg

SEQ ID NO: 483273 - DNA, 75 bp, synthetic construct
  source 1..75: mol_type = other DNA
gatccgcgatctgatcataaagacgccgtacaatcctggcgaacggctgccgccggagcgtgaaatcgcagaaat

SEQ ID NO: 483274 - DNA, 75 bp, synthetic construct
  source 1..75: mol_type = other DNA
taccgaactactacgaaggtgttgtagatataccaacgttcaataaagctcaagagattctcgacaagaatcgta

SEQ ID NO: 483275 - DNA, 75 bp, synthetic construct
  source 1..75: mol_type = other DNA
taacatgaggcgtaaggcttcactcactgataaggaactaccccagcttaaagatattgaccttatgactaaagc

SEQ ID NO: 483276 - DNA, 75 bp, synthetic construct
  source 1..75: mol_type = other DNA
gttgaactcgacgacgagatcatagaggccatgcgatttgtaaccccgccgcctgaagcgccggtgaacaaaaca

SEQ ID NO: 483277 - DNA, 75 bp, synthetic construct
  source 1..75: mol_type = other DNA
cgatatggcctgtgatgaactgctgacgggccatttccggctttcctggatggacagatttccaccttaccagcc

SEQ ID NO: 483278 - DNA, 75 bp, synthetic construct
  source 1..75: mol_type = other DNA
catagccgagtttgccgccttgcaggcaacacgggaagacattgtgaaaatgcgccaggcattgcagcttgaaga

SEQ ID NO: 483279 - DNA, 75 bp, synthetic construct
  source 1..75: mol_type = other DNA
acggctaaaaccaatctcgattacactcgcatcgttgccccgatggccgggaagtcacgcaaatcaccactctgc

SEQ ID NO: 483280 - DNA, 75 bp, synthetic construct
  source 1..75: mol_type = other DNA
ttaaagatgtattgccaacaccggaaaaggtcaacgacgctattttctattacgcccgttttgaagtaccaaacc

SEQ ID NO: 483281 - DNA, 75 bp, synthetic construct
  source 1..75: mol_type = other DNA
cgctcggttcaaacctgtccgcactgtggattctggttgcaaacggctggatgcaaaacccaatcgcgtccgatt

SEQ ID NO: 483282 - DNA, 75 bp, synthetic construct
  source 1..75: mol_type = other DNA
tccagcgtgtcaaagcctacatagcgcatcaggaatctaagcagaagtctttccgtgtttctcagaaatgggggc

SEQ ID NO: 483283 - DNA, 75 bp, synthetic construct
  source 1..75: mol_type = other DNA
acagctaaaaccaatctcgattacacccgcatcgttgctccgatggccggggaagtcacgcaaatcactaccctg

SEQ ID NO: 483284 - DNA, 75 bp, synthetic construct
  source 1..75: mol_type = other DNA
tggaaaattctcaatgcgccggtgccaacttatcagacattgatagtgcgccccggtgatttgcagcaaagcgtg

SEQ ID NO: 483285 - DNA, 75 bp, synthetic construct
  source 1..75: mol_type = other DNA
gtcatggggagcgcagcccgtccccgtacagcatgaactggcaggcgtgttttaataatccggaacttgcggata

SEQ ID NO: 483286 - DNA, 75 bp, synthetic construct
  source 1..75: mol_type = other DNA
ttctgaagatattgcaaaactgcaaataaaaagtgggagaattgaaccagaatacacaacagatattagtgttgc

SEQ ID NO: 483287 - DNA, 75 bp, synthetic construct
  source 1..75: mol_type = other DNA
aggaactcttagacattactgatgactcacctgagttagaagaaactttacctgcactatccgaagatttatatc

SEQ ID NO: 483288 - DNA, 75 bp, synthetic construct
  source 1..75: mol_type = other DNA
aacgtgcaaaacttgcccttgctggtgaacaacgtcttacaaagatggttcccggatggattgaccctgatactt

SEQ ID NO: 483289 - DNA, 75 bp, synthetic construct
  source 1..75: mol_type = other DNA
ggatttaatgcattagcaggaactagcagtatactgaatcatgcagttgttgaaaaatctacggatgtatgtagc

SEQ ID NO: 483290 - DNA, 75 bp, synthetic construct
  source 1..75: mol_type = other DNA
agtgataatagaaaacccattttttttagagatttcataaaaaataaccgagagcatgagttcaatatttatgaa

SEQ ID NO: 483291 - DNA, 75 bp, synthetic construct
  source 1..75: mol_type = other DNA
tggaggcaataagaaataagtttacatataacgaaccactacattttgacgacatgtacggaaaagaatcaatat

SEQ ID NO: 483292 - DNA, 75 bp, synthetic construct
  source 1..75: mol_type = other DNA
gattctcatcagccacacaaggtgctgaaggtgctgattcaaccagacgacaaaatgagctattcaaacagtggt

SEQ ID NO: 483293 - DNA, 75 bp, synthetic construct
  source 1..75: mol_type = other DNA
gcatcaggagagtaagcagaagtctttccgtgttagcgagaagtggaaacaacgtgcaaaacttgcccttgctgg

SEQ ID NO: 483294 - DNA, 75 bp, synthetic construct
  source 1..75: mol_type = other DNA
aagctaccgccctacttcttgaaatggatgacattacagagttgaaagcacaggtgaaggaactgaaccagaagc

SEQ ID NO: 483295 - DNA, 75 bp, synthetic construct
  source 1..75: mol_type = other DNA
ttaaactcaatgaacacgctgagactgtgagattgatattcaaactgctgctagatggtgaaagtctgcataaca

SEQ ID NO: 483296 - DNA, 75 bp, synthetic construct
  source 1..75: mol_type = other DNA
taacatcgcccgtcaccttcaaagcaacggtataaagtcgtttagtcgccgtaaagatgctaacgggtttagtgt

SEQ ID NO: 483297 - DNA, 75 bp, synthetic construct
  source 1..75: mol_type = other DNA
tgaaggtgctgattcaaccagacgacaaaatgagctattcaaacagtggttaaggaagaatagcgatgctcaagt

SEQ ID NO: 483298 - DNA, 75 bp, synthetic construct
  source 1..75: mol_type = other DNA
gatggaatatctgtcacattgcttttcaacgatagcttcctgggagagattttttcttattattcctccccatct

SEQ ID NO: 483299 - DNA, 75 bp, synthetic construct
  source 1..75: mol_type = other DNA
cctgatattccatttgctactgctgggcatgcctggacacttgacgaaaacaagcgcgataccgccgatcgcgca

SEQ ID NO: 483300 - DNA, 75 bp, synthetic construct
  source 1..75: mol_type = other DNA
gacgaactcctgccatggaacgtagtactcaccaatatgaaccgccccgggtttcctggagagtgttttatctgt

SEQ ID NO: 483301 - DNA, 75 bp, synthetic construct
  source 1..75: mol_type = other DNA
ttgaactgtttgtattggtaggtctgcctgctgccgcaagcgtgattaactttgtggtgctgacgtctgcggcgt

SEQ ID NO: 483302 - DNA, 75 bp, synthetic construct
  source 1..75: mol_type = other DNA
ttacgaaatgggcgatgtgcagaaaaccaaactggctgctattgaagccgagtgggaaactcaacctgcgcctgc

SEQ ID NO: 483303 - DNA, 75 bp, synthetic construct
  source 1..75: mol_type = other DNA
caggctgaagtattaacgccaggctataagtacaatctgaccgatattaacgctgcgatagctctgacgcagttg

SEQ ID NO: 483304 - DNA, 75 bp, synthetic construct
  source 1..75: mol_type = other DNA
ttttcatttcacgccatcaaaaatattacctgtgcggaaggtggattagtcgttactgatgacgaaaatctcgct

SEQ ID NO: 483305 - DNA, 75 bp, synthetic construct
  source 1..75: mol_type = other DNA
ggcatgcctggacacttgacgaaaataagcgcgataccgctgatcgcgcactactaactcgccatgttcgtcatc

SEQ ID NO: 483306 - DNA, 75 bp, synthetic construct
  source 1..75: mol_type = other DNA
ccgttgctggcagaaggtcaggtacacggcggaatgggaatgggcattggctgggcgctatttgaagagatgatc

SEQ ID NO: 483307 - DNA, 75 bp, synthetic construct
  source 1..75: mol_type = other DNA
ggcagtacagcaaacgctacggctttatctatgtgaataaacatgacgacggtgctggcgatatgtcgcgttcac

SEQ ID NO: 483308 - DNA, 75 bp, synthetic construct
  source 1..75: mol_type = other DNA
tcttgtatctgtctgctcggcggcgtggtgatgttgtatgtgaatccaagtgtaattggcgcgttcacgatgatc

SEQ ID NO: 483309 - DNA, 75 bp, synthetic construct
  source 1..75: mol_type = other DNA
agatggagttctggtttgcgatgatcaaaattgtcgccatcgtgtcactgattgtcgtcggcctggtcatggtca

SEQ ID NO: 483310 - DNA, 75 bp, synthetic construct
  source 1..75: mol_type = other DNA
agacgtggtggcgatcacggcttatgctcagttctggttccccgatctctccgactgggtcgcctcgctggcggt

SEQ ID NO: 483311 - DNA, 75 bp, synthetic construct
  source 1..75: mol_type = other DNA
atgacaaagttctggggcaagttgtttggtatcaactttgctctgggtgtggcaaccggtttaaccatggagttc

SEQ ID NO: 483312 - DNA, 75 bp, synthetic construct
  source 1..75: mol_type = other DNA
aaaatgccactggaagattttgttgggatgtttgcgatgccggcattaaacgttccggtcgtacccgctcttccg

SEQ ID NO: 483313 - DNA, 75 bp, synthetic construct
  source 1..75: mol_type = other DNA
tggcaaaaggtgaaacaccttttgtgattaattcccgtatcggttataacggcgactccagttctgatatttccc

SEQ ID NO: 483314 - DNA, 75 bp, synthetic construct
  source 1..75: mol_type = other DNA
caacgaaaatatcgaccacggccccttccctctggctcagcttaaaaagctgaatttaattccgtcgatggcctc

SEQ ID NO: 483315 - DNA, 75 bp, synthetic construct
  source 1..75: mol_type = other DNA
tgtcgaactggctgaccacgatgcaagaatcaccgcaaacacaaaagcgataaatctccttgaggtcaggttaac

SEQ ID NO: 483316 - DNA, 75 bp, synthetic construct
  source 1..75: mol_type = other DNA
caacgaatcggttgatcatggtcccttcccccttgcccagcttaaaaaactgaacctgatcccgtcgatggcatc

SEQ ID NO: 483317 - DNA, 75 bp, synthetic construct
  source 1..75: mol_type = other DNA
tggcaaaaggagaaacaccttttgagattaactcccgcattggttacagcggtgattccagctcagatatctctc

SEQ ID NO: 483318 - DNA, 75 bp, synthetic construct
  source 1..75: mol_type = other DNA
acggggcgctggtcaaagccggttttgtgggcgaagcctggacccgcgccacagagcaggaaaaacaccgccagg

SEQ ID NO: 483319 - DNA, 75 bp, synthetic construct
  source 1..75: mol_type = other DNA
tgggattgcagatgatggtggcagactgggagccgtccctgcttgagcagctagaacaaaaattcacggcagaac

SEQ ID NO: 483320 - DNA, 75 bp, synthetic construct
  source 1..75: mol_type = other DNA
gactgaagcgcagattcaacaggcaaccaaagactctattccacgtgtagcaccgctgtacttcgcgttccgcat

SEQ ID NO: 483321 - DNA, 75 bp, synthetic construct
  source 1..75: mol_type = other DNA
gactgaagcgcagattcaacaggcaaccaaagactccattccgcgtgtagcgccgctgtacttcgcgttccgtat

SEQ ID NO: 483322 - DNA, 75 bp, synthetic construct
  source 1..75: mol_type = other DNA
aatctggtggttcactcgctgcctgatggcctgtcaggcgttgctgcgggcggtcgtcgtcttgctgccctgcaa

SEQ ID NO: 483323 - DNA, 75 bp, synthetic construct
  source 1..75: mol_type = other DNA
atgacgcgcttctggggtaagctcttcggtatcaattttgctcttggcgtggctaccggcctgaccatggagttt

SEQ ID NO: 483324 - DNA, 75 bp, synthetic construct
  source 1..75: mol_type = other DNA
tggttctggctgacggtggtgaataccctgcgttacaccggtatgcgtctgaatcagttgctgcatttacgtctg

SEQ ID NO: 483325 - DNA, 75 bp, synthetic construct
  source 1..75: mol_type = other DNA
cagaaaatcagtacaccggactttatatcaaatgtgccataaggccggcgtggttctggctgacggtggtgaata

SEQ ID NO: 483326 - DNA, 75 bp, synthetic construct
  source 1..75: mol_type = other DNA
gactatcttttccactacaagcgttttgttgtgccggtgtcagaagcaaaacgtataacgggtttgccggatgag

SEQ ID NO: 483327 - DNA, 75 bp, synthetic construct
  source 1..75: mol_type = other DNA
caggcgttggaaaaagagatcaacgaacggctggacgggctgttaagccgctggctgctgctgaaaaataccgga

SEQ ID NO: 483328 - DNA, 75 bp, synthetic construct
  source 1..75: mol_type = other DNA
gcgtctcctacgatcccgaaatttttaaaatattgccagcctctatttatgtattagttgaaaaccctatttgtg

SEQ ID NO: 483329 - DNA, 75 bp, synthetic construct
  source 1..75: mol_type = other DNA
acgtataaccggtttgccagatgagcagcccgtgaaatcgttttttcgcagattatctcaggagtgtggttttca

SEQ ID NO: 483330 - DNA, 75 bp, synthetic construct
  source 1..75: mol_type = other DNA
gtaactcaccgctttgtcggtactgaacccttttgtcgcgttaccgcccagtacaaccaggatatgcgctactgg

SEQ ID NO: 483331 - DNA, 75 bp, synthetic construct
  source 1..75: mol_type = other DNA
tctgtttatttataccaaaactgaatacgaggcgctgttccaccagtgcggtttctccacgctgacccgcgttcc

SEQ ID NO: 483332 - DNA, 75 bp, synthetic construct
  source 1..75: mol_type = other DNA
ccgaatcgctgaaaaaatttcgtcatccagggaacaagattggctgcattgtgatgaacgccaatccctttacga

SEQ ID NO: 483333 - DNA, 75 bp, synthetic construct
  source 1..75: mol_type = other DNA
ttttgcatcatacttgatacgctatcgtattaataaatcaatcgctgacccttatttcgtatggttgaatcttag

SEQ ID NO: 483334 - DNA, 75 bp, synthetic construct
  source 1..75: mol_type = other DNA
aaaagctggtttgttaattttgaacccgtaaaggccaaaatggcagtgctggaagcgggcggttcgcaggaagac

SEQ ID NO: 483335 - DNA, 75 bp, synthetic construct
  source 1..75: mol_type = other DNA
ccgaattaaaagccacggcagaactgtttccgttggcgatgcaggacagtgagctgggggaaattccggaagggt

SEQ ID NO: 483336 - DNA, 75 bp, synthetic construct
  source 1..75: mol_type = other DNA
catggaaaccttacgctctaaaatcatctataattttagagattatgacttatgttttatgttttttttcattag

SEQ ID NO: 483337 - DNA, 75 bp, synthetic construct
  source 1..75: mol_type = other DNA
ctcggcggctccgctgacctggctccgtctaacctgaccctgtggtctggttctaaagcaatcaacgaagatgct

SEQ ID NO: 483338 - DNA, 75 bp, synthetic construct
  source 1..75: mol_type = other DNA
cgctgaaatcgcgttgacccgcgaacagctgggctggaaatatgcaccgttcgaaatcccgtctgaaatctatgc

SEQ ID NO: 483339 - DNA, 75 bp, synthetic construct
  source 1..75: mol_type = other DNA
atggcgattgcagaaaaaacgctggcggcgcagtttaaccgtccgggtcacgacattgtcgaccactacacctac

SEQ ID NO: 483340 - DNA, 75 bp, synthetic construct
  source 1..75: mol_type = other DNA
cgagaaaaaatggcttctgcgcgccgcgctgtacggtattccgctgccgtggattgctgtagaagcgggctggtt

SEQ ID NO: 483341 - DNA, 75 bp, synthetic construct
  source 1..75: mol_type = other DNA
ttttggatatgacagatatccagattattactcaaaatatgtggaatggcgctaataacttcccgttactggcag

SEQ ID NO: 483342 - DNA, 75 bp, synthetic construct
  source 1..75: mol_type = other DNA
ttcgcgagttcggtatgaccgcgattgctaacggtatctccctgcatggcggcttcctgccgtacacctccacct

SEQ ID NO: 483343 - DNA, 75 bp, synthetic construct
  source 1..75: mol_type = other DNA
actactcctgtttcctggaatttgtgctgttacattaatagcttattataataaatcacctaagaaatttacttc

SEQ ID NO: 483344 - DNA, 75 bp, synthetic construct
  source 1..75: mol_type = other DNA
tctactcctgttccctgtaatttgtgctgttgcactaattacatattacaacaaatccccaaaaaaattcacttc

SEQ ID NO: 483345 - DNA, 75 bp, synthetic construct
  source 1..75: mol_type = other DNA
catggaaacattacactctgaaatcatctatgattttagagataataacttatatattatgttttttttcattaa

SEQ ID NO: 483346 - DNA, 75 bp, synthetic construct
  source 1..75: mol_type = other DNA
atgccatccgtatgctgagtgtcgatgccgttcagcgggcaaattccggtcatccgggcgcaccgatgggaatgg

SEQ ID NO: 483347 - DNA, 75 bp, synthetic construct
  source 1..75: mol_type = other DNA
atattattttgattgccaccggttcagagatggaaattaccctgcaagcggcagagaaattagcaggagaaggtc

SEQ ID NO: 483348 - DNA, 75 bp, synthetic construct
  source 1..75: mol_type = other DNA
ttttattgtttttttagcccttaccagcaaactaaaacaaaaaaaagaaattgcattatatgttatgtattctct

SEQ ID NO: 483349 - DNA, 75 bp, synthetic construct
  source 1..75: mol_type = other DNA
atggcggaaatcgcccaattcctgcatgaaaatgatttgagcgttgacaccacagtcgaagtatttattaccgta

SEQ ID NO: 483350 - DNA, 75 bp, synthetic construct
  source 1..75: mol_type = other DNA
ctcacctgagttagaagaaactttacctgcactatccgaagatttatatcccagtgaagaagagaatgtacaaaa

SEQ ID NO: 483351 - DNA, 75 bp, synthetic construct
  source 1..75: mol_type = other DNA
cattcactgtaaaacctgataaatatagcataaaaagaatcgtgctcaatggattattactaacatcaaacgcat

SEQ ID NO: 483352 - DNA, 75 bp, synthetic construct
  source 1..75: mol_type = other DNA
aagctgaaagccgacaaagagatgtctacgtttgaaattgagcaacagttactggaacaatttctgcgtaatacc

SEQ ID NO: 483353 - DNA, 75 bp, synthetic construct
  source 1..75: mol_type = other DNA
caattaccacacaatcagatggagttcactataaaaaaatcgcaattaatggactattgcttgcctcaggaatat

SEQ ID NO: 483354 - DNA, 75 bp, synthetic construct
  source 1..75: mol_type = other DNA
aagaaacagtgatttttcaccgcacttgaaatcagtaatatcaagttcagatagacattatttcaattcatggct

SEQ ID NO: 483355 - DNA, 75 bp, synthetic construct
  source 1..75: mol_type = other DNA
ttttaaatcaaataaaaagccaaacaaaagagattttgaacatatatttaaatgtgcgcaattagtaatccatca

SEQ ID NO: 483356 - DNA, 75 bp, synthetic construct
  source 1..75: mol_type = other DNA
gccgcggcgttggcgtcgcctgttttagctacacctctaacacctggcctgtcggcgtagaaatagcaggcgcgc

SEQ ID NO: 483357 - DNA, 75 bp, synthetic construct
  source 1..75: mol_type = other DNA
tggcgggcatgtgttatgcgaaatatgtacgtagccctatcgcacatggttatgccgtaagtattaatgatgaac

SEQ ID NO: 483358 - DNA, 75 bp, synthetic construct
  source 1..75: mol_type = other DNA
agtgccactggatttaataaagaaaactatggatactacaaacgttctggtgagggtttttatagaaaacaacac

SEQ ID NO: 483359 - DNA, 75 bp, synthetic construct
  source 1..75: mol_type = other DNA
atggaagcgcgggaagcaaccgctacgggtgaatcatgcatgcgcgtcgatgccattgctaaggtcaccgggcgg

SEQ ID NO: 483360 - DNA, 75 bp, synthetic construct
  source 1..75: mol_type = other DNA
cagagtgccagaaccagcaaggcaatttacgccgcggcgttggcgtcgcctgttttagctacacctctaacacct

SEQ ID NO: 483361 - DNA, 75 bp, synthetic construct
  source 1..75: mol_type = other DNA
gcaatttactgaaacaaagcacgatgtcgacgggcaatgtccaacaaacaatcgatgccgccgactaccaggtac

SEQ ID NO: 483362 - DNA, 75 bp, synthetic construct
  source 1..75: mol_type = other DNA
atgaacctcagcaacgtggctcatcttatagagtgatagaatcgatagaaaatactgattttatttatcaaaaaa

SEQ ID NO: 483363 - DNA, 75 bp, synthetic construct
  source 1..75: mol_type = other DNA
ggataaacagttaacctgttcatggcagccaggcgtgcgtcatcgcattacgccagaagcgttagatgccgcggt

SEQ ID NO: 483364 - DNA, 75 bp, synthetic construct
  source 1..75: mol_type = other DNA
gctgggttcctgcctggatgcggtcacctgatgcgcaacctgacgccgctgagggtgaggcgacagactctgatg

SEQ ID NO: 483365 - DNA, 75 bp, synthetic construct
  source 1..75: mol_type = other DNA
tctgttctggaggagtgtgatttatctttctctgatttggcaaacagcacaatcagcgcatcgtttgatagagct

SEQ ID NO: 483366 - DNA, 75 bp, synthetic construct
  source 1..75: mol_type = other DNA
gttcgcggtgaaggactggcgctgacattagccactgaactgataaacctcgcctatgagcggcacagcacgcat

SEQ ID NO: 483367 - DNA, 75 bp, synthetic construct
  source 1..75: mol_type = other DNA
atcgcactcgcatgatggagattcaggcctattatgaaagctgcctgaacccgcaactgatcaccccttcagaaa

SEQ ID NO: 483368 - DNA, 75 bp, synthetic construct
  source 1..75: mol_type = other DNA
acgaaggcagcgattttgttgatcagccctggccttcggcatcactttacgactacccgccgcaagaacagtgga

SEQ ID NO: 483369 - DNA, 75 bp, synthetic construct
  source 1..75: mol_type = other DNA
gatgctgacttaacaggaaccattataattcctggaatggttttaagtggtgctatcttaggtgatgtaaaggag

SEQ ID NO: 483370 - DNA, 75 bp, synthetic construct
  source 1..75: mol_type = other DNA
aacgggtgaagagccttctgaacaattaaattattctggatgtgacttgtcaggtctaagtcttgcagggctgaa

SEQ ID NO: 483371 - DNA, 75 bp, synthetic construct
  source 1..75: mol_type = other DNA
atcaataaactgtttaccccccaacttatcttcattaagtatggttggatgttcgtcattagaggttataaattg

SEQ ID NO: 483372 - DNA, 75 bp, synthetic construct
  source 1..75: mol_type = other DNA
acccacgttgggctgggatcgtttgttgatccacgcaatggcggcggtaagtcgaatgaatgcactaccgacgac

SEQ ID NO: 483373 - DNA, 75 bp, synthetic construct
  source 1..75: mol_type = other DNA
ctttcagtattcctccatatcttgcaagttcttatgttcaggaatggcttcagaatatatccggtcgttattata

SEQ ID NO: 483374 - DNA, 75 bp, synthetic construct
  source 1..75: mol_type = other DNA
ctgagcaaagctgagcttactgctgacttaatgtggttgtctgctaacagaacgggtgaagagcctgctgaacaa

SEQ ID NO: 483375 - DNA, 75 bp, synthetic construct
  source 1..75: mol_type = other DNA
aagtcacggctcggcgcatggatcgtggaagattgcttatgctgactttatgactgcgatgatggctttttttct

SEQ ID NO: 483376 - DNA, 75 bp, synthetic construct
  source 1..75: mol_type = other DNA
tacagggatcgctttgataaagcctttacgatttttgtatgtaatcttaaaggtggtggttccaagacagtttct

SEQ ID NO: 483377 - DNA, 75 bp, synthetic construct
  source 1..75: mol_type = other DNA
tctgtttgttggcattctggtgacggcaatttcactgttttttgtgccgtttcaggtgcattcgtgggtatttgt

SEQ ID NO: 483378 - DNA, 75 bp, synthetic construct
  source 1..75: mol_type = other DNA
ttgttctcgatccaggccacggcgggattgataccggggcgatcggtcgcaacggttcgaaagaaaaacacgtgg

SEQ ID NO: 483379 - DNA, 75 bp, synthetic construct
  source 1..75: mol_type = other DNA
catctataatatttccatttttttgggtcttcagtggtatcataatagcatatgaaaaaaataaatatagtagtt

SEQ ID NO: 483380 - DNA, 75 bp, synthetic construct
  source 1..75: mol_type = other DNA
gcgcaagcgatgctaaacgatgtcgatgctgaaaccctgcgtaacgaagtgatacggccaaccatcattccaggt

SEQ ID NO: 483381 - DNA, 75 bp, synthetic construct
  source 1..75: mol_type = other DNA
ttactccagttcctgaaggcagaggtgacacgacaggctgatgtgacgcgcatactgccgctgattaacgagctg

SEQ ID NO: 483382 - DNA, 75 bp, synthetic construct
  source 1..75: mol_type = other DNA
atgccgaaacgttgaatatgactacctacggtgatagctatatttccaataaagcgcaaagttttgaaattgtgg

SEQ ID NO: 483383 - DNA, 75 bp, synthetic construct
  source 1..75: mol_type = other DNA
gctctctggactatggtcgtaactacggtgtcggctatgacattggttcatggaccgatatgttgccagaatttg

SEQ ID NO: 483384 - DNA, 75 bp, synthetic construct
  source 1..75: mol_type = other DNA
cactcacttcgcgccgccaggtgctgaaagcagggcttgcagctctgacgctgtcagggatgtcgcaagccatcg

SEQ ID NO: 483385 - DNA, 75 bp, synthetic construct
  source 1..75: mol_type = other DNA
aaaaaatctggcggcaaacgtgtcgttgttctcgatccaggccacggcgggattgataccggagcgatcgggcgc

SEQ ID NO: 483386 - DNA, 75 bp, synthetic construct
  source 1..75: mol_type = other DNA
tggcaaaatatttgtcggaacgcgaaaaccgtgccgatgaagtcgccgggaaaaaagcgactgacagggatcatc

SEQ ID NO: 483387 - DNA, 75 bp, synthetic construct
  source 1..75: mol_type = other DNA
gcgaagagtatcctgatgaagtaatgaacagagaagaattctacaaaaacgtaagaatcatagggcgagtgttct

SEQ ID NO: 483388 - DNA, 75 bp, synthetic construct
  source 1..75: mol_type = other DNA
tgacgggcagattgattatcaactggatgtgatgaccgccgccgtgggctggtttggcgatacgctgctgaccaa

SEQ ID NO: 483389 - DNA, 75 bp, synthetic construct
  source 1..75: mol_type = other DNA
tatgaatcatatgaaccacggcgggaagttcgattttcaccatgctaataaaatcaacggtcaggccttcgatat

SEQ ID NO: 483390 - DNA, 75 bp, synthetic construct
  source 1..75: mol_type = other DNA
acagtgacgctgaatgtcgatcagcctgccgctacctgctggttccacccgcatcaacatggcaaaaccgggcgt

SEQ ID NO: 483391 - DNA, 75 bp, synthetic construct
  source 1..75: mol_type = other DNA
attctgtcgctttgggcgtggcttcggctttgccgttgtggagccgcgcagtttttgccgccgaacgccccacat

SEQ ID NO: 483392 - DNA, 75 bp, synthetic construct
  source 1..75: mol_type = other DNA
tggtagtgattgaagatgacgagattctaaaattaatgctgccaaaacagtggggtatcgatgatgtcccggtga

SEQ ID NO: 483393 - DNA, 75 bp, synthetic construct
  source 1..75: mol_type = other DNA
atgcaacgtcgtgatttcttgaaatattccgtcgcactgggtgtggcttcagccttgccactgtggagccgtgca

SEQ ID NO: 483394 - DNA, 75 bp, synthetic construct
  source 1..75: mol_type = other DNA
tccgccagcttactgaagaactgcgttgcccgaaatgtcagaacaatagcattgccgattccaactcgatgattg

SEQ ID NO: 483395 - DNA, 75 bp, synthetic construct
  source 1..75: mol_type = other DNA
actgcgctgcccgaaatgccagaacaacagcattgccgattccaactcgatgattgccaccgacctgcgccagaa

SEQ ID NO: 483396 - DNA, 75 bp, synthetic construct
  source 1..75: mol_type = other DNA
atcagagatggtaaaacctacgctatttgccagtctgatttgttacgagtaaaaacattaatcgccacccctaca

SEQ ID NO: 483397 - DNA, 75 bp, synthetic construct
  source 1..75: mol_type = other DNA
aacgattgaacgctggcagtctcaggggctcccttgcgtctccggaggtggtaagggcgttgaatctgtatttga

SEQ ID NO: 483398 - DNA, 75 bp, synthetic construct
  source 1..75: mol_type = other DNA
cgggtacgcgtggtgccggaagcgtttcctgaacaaagcgtgccggaaggtaagcgtgccggatatattgtttat

SEQ ID NO: 483399 - DNA, 75 bp, synthetic construct
  source 1..75: mol_type = other DNA
cgctgggtaacgccagtatcgcgactgatgcatatgccacagcgtatcgcctcgatccgaaaaacagcgatgctg

SEQ ID NO: 483400 - DNA, 75 bp, synthetic construct
  source 1..75: mol_type = other DNA
ttgattataaaatcaacctgattgatgaaagcgactttacccgtgccgtagatattcgcacggctttgttgaata

SEQ ID NO: 483401 - DNA, 75 bp, synthetic construct
  source 1..75: mol_type = other DNA
tgaacgccttagagcaactgcaacaggactatatgcagcggctgaacgaatgggagagcgccttcgtggaattgc

SEQ ID NO: 483402 - DNA, 75 bp, synthetic construct
  source 1..75: mol_type = other DNA
acgtgctggctgacgagaaacagcaaccttattttcttaatacacttcaaaccgtcgccgccgagcggcagtcgg

SEQ ID NO: 483403 - DNA, 75 bp, synthetic construct
  source 1..75: mol_type = other DNA
accgagttgggtgacgttaaagtggtgattctcggtcaggatccttatcacggaccgggacaggcgcatggtctg

SEQ ID NO: 483404 - DNA, 75 bp, synthetic construct
  source 1..75: mol_type = other DNA
aaaattctcgacacattagcgacttatcatgagcaacatcgcgatgaacctggtcctgggcgcgaacgtctgcga

SEQ ID NO: 483405 - DNA, 75 bp, synthetic construct
  source 1..75: mol_type = other DNA
tgcgcgaattgctgcaacagcctggctatattcaggctggttatagcttgttgaatgcgccggttgccgctcgct

SEQ ID NO: 483406 - DNA, 75 bp, synthetic construct
  source 1..75: mol_type = other DNA
tctgattcaaaccgcgctaagttcgccgcataaagtcaccatcgaacaattttaccgcgaagtgggcgtctttct

SEQ ID NO: 483407 - DNA, 75 bp, synthetic construct
  source 1..75: mol_type = other DNA
gggcgttctgctgctcaataccgtcttgacggttcgcgcaggtcaggcgcattcccacgccagcctcggctggga

SEQ ID NO: 483408 - DNA, 75 bp, synthetic construct
  source 1..75: mol_type = other DNA
atgattatcaataacgtcaaactggtgctggaaaacgaagtggtacacggttcactggaagtacaggacggtgaa

SEQ ID NO: 483409 - DNA, 75 bp, synthetic construct
  source 1..75: mol_type = other DNA
tattatcagggcaaatactcgctcaccgatgcgcagatgcaacagtacgaagaggagcaactggcgctcgccgca

SEQ ID NO: 483410 - DNA, 75 bp, synthetic construct
  source 1..75: mol_type = other DNA
acgtgctggctgaagaaaagcagcaaccctattttcttaacaccctccagaccgttgccagcgagcggcagtccg

SEQ ID NO: 483411 - DNA, 75 bp, synthetic construct
  source 1..75: mol_type = other DNA
aaccattttgtactggcaaatcagtggctggaacaacgtggcgagaagccgattaactggatacctgtattaccg

SEQ ID NO: 483412 - DNA, 75 bp, synthetic construct
  source 1..75: mol_type = other DNA
gataagcaacgccatcacgtactgaaagcaccgcatccgtcgccgttatcggcccatcgtggattctttggctgt

SEQ ID NO: 483413 - DNA, 75 bp, synthetic construct
  source 1..75: mol_type = other DNA
gtcaccggagtttgaacgctggctggaaagcatgggcattatggcaaacggtcgcctgaccaaacgggcgggcga

SEQ ID NO: 483414 - DNA, 75 bp, synthetic construct
  source 1..75: mol_type = other DNA
agcagcagccgagaaaactggagccgaacgggccgcattacaaaaacgtgcggcagaaatcaaaatggaaataat

SEQ ID NO: 483415 - DNA, 75 bp, synthetic construct
  source 1..75: mol_type = other DNA
ttattgcactgattaatcgggataatggcgcgggcgtgccggacgttggcgagttgttgaattacgatgccgaca

SEQ ID NO: 483416 - DNA, 75 bp, synthetic construct
  source 1..75: mol_type = other DNA
gagttgttaaattacgatgccgacaatgtgcagcaccgttataaaccacaggcgcagccgcttcgtttgatcatt

SEQ ID NO: 483417 - DNA, 75 bp, synthetic construct
  source 1..75: mol_type = other DNA
gttactccagttcctgaaggcagaggtgacacgacaggctgatgtgacgcgcatactgccgctgattaacgagct

SEQ ID NO: 483418 - DNA, 75 bp, synthetic construct
  source 1..75: mol_type = other DNA
tacctccatggcaattcagtggtatgcgcagagggaggctgatatcgaaaatgaaaaactccgtaaagaggttga

SEQ ID NO: 483419 - DNA, 75 bp, synthetic construct
  source 1..75: mol_type = other DNA
cgataacgtgcctgatgagcgtcccagcactgaaacgccgaagagctacgaaatggacgccgatgtgagaaaacg

SEQ ID NO: 483420 - DNA, 75 bp, synthetic construct
  source 1..75: mol_type = other DNA
ctcttcatgcgtggcttgaccgatatgaaacaatcctcagcgagaggggtatcaggccgaaaactctactcgact

SEQ ID NO: 483421 - DNA, 75 bp, synthetic construct
  source 1..75: mol_type = other DNA
tccgcacgcgacgcggcgattgagaatgagaaattacggaaggaggtggaagaccttcgtcttgcatcggaatcc

SEQ ID NO: 483422 - DNA, 75 bp, synthetic construct
  source 1..75: mol_type = other DNA
aaacacgccggggatatgacttacactcgtcttggtttcagaggcgaaactcagatcaacgatcaactaacaggt

SEQ ID NO: 483423 - DNA, 75 bp, synthetic construct
  source 1..75: mol_type = other DNA
atgagtgattcacaagaacgatcagtctctctttccggtggattacataaactgctgattgtgacgggtgtggtt

SEQ ID NO: 483424 - DNA, 75 bp, synthetic construct
  source 1..75: mol_type = other DNA
cgtgtatcacagtcccttgtgaacgccggagtcatgaatcaagccaatagttttacggggaaattagttcaaatc

SEQ ID NO: 483425 - DNA, 75 bp, synthetic construct
  source 1..75: mol_type = other DNA
gcaggcagatgcccaggaactaaaaaatgcaaaagattccgctgaggtggtggaaaccgcattctgcacgttcgt

SEQ ID NO: 483426 - DNA, 75 bp, synthetic construct
  source 1..75: mol_type = other DNA
cgggccgcacgacaacttccatccgaataattcgcatgtgatccccgcattgctgcgccgcttccacgaggcgac

SEQ ID NO: 483427 - DNA, 75 bp, synthetic construct
  source 1..75: mol_type = other DNA
aggtattaaattatgtgaatcttataaccgtcagtttgggcgtgattaccgttcagtaatgccaaccaatcttta

SEQ ID NO: 483428 - DNA, 75 bp, synthetic construct
  source 1..75: mol_type = other DNA
taacaaaagcggggagaatgttgcttcctgaggcgcgggaattaataaagaaattcgatgaaacactgtttaata

SEQ ID NO: 483429 - DNA, 75 bp, synthetic construct
  source 1..75: mol_type = other DNA
gtaaaacaggggctaagctcgccattccgctgacgctaacgattgacgcgctcaatatctcattggctgatacac

SEQ ID NO: 483430 - DNA, 75 bp, synthetic construct
  source 1..75: mol_type = other DNA
aatcaggtcaacccttgttgacgtttttcgtgaagcaatagccgaggggcatgtggcaacgaatccggtaacagc

SEQ ID NO: 483431 - DNA, 75 bp, synthetic construct
  source 1..75: mol_type = other DNA
tcatgattgagagtaatattatacattcagctcacaaggttggaattcaaaaattactttttttaggctctagct

SEQ ID NO: 483432 - DNA, 75 bp, synthetic construct
  source 1..75: mol_type = other DNA
aaaatacacagcctatgttatctcatattaatgttggtacgggtgtagattgttccatacgtgaaatggctgaaa

SEQ ID NO: 483433 - DNA, 75 bp, synthetic construct
  source 1..75: mol_type = other DNA
cttgggctggcaacatcgctataatttacatgaaggtctatcattaacatataaatggtttcttgagaatattga

SEQ ID NO: 483434 - DNA, 75 bp, synthetic construct
  source 1..75: mol_type = other DNA
aaacaatttcaaaagttgttggttatcaaggggaggtcgtttttgattctaccaaacctgacggcactcctagaa

SEQ ID NO: 483435 - DNA, 75 bp, synthetic construct
  source 1..75: mol_type = other DNA
acgttatcgctaaagttgtgggctataaaggtgagatcgtgtttgattcctcaaagcctgatggcaccccgcgca

SEQ ID NO: 483436 - DNA, 75 bp, synthetic construct
  source 1..75: mol_type = other DNA
ccgcataattcgcatgttattcctgcgctgctacgtcgtttccatgaagctacccagcagaacgaaaaatatgtc

SEQ ID NO: 483437 - DNA, 75 bp, synthetic construct
  source 1..75: mol_type = other DNA
ggcgcttcctggcctggcaatgccccatgcgccctattcttcgattattggtatcccactggtggaacccgttat

SEQ ID NO: 483438 - DNA, 75 bp, synthetic construct
  source 1..75: mol_type = other DNA
caggtgcaactgatgactttgcacgcgtcaaaaggactggagtttccctatgtctacatggttggtatggaagaa

SEQ ID NO: 483439 - DNA, 75 bp, synthetic construct
  source 1..75: mol_type = other DNA
gaagaacgatctcaaaacaccgtcccaggcggcagccagtgcgattggcgagcgggaccgtatttttgcccattg

SEQ ID NO: 483440 - DNA, 75 bp, synthetic construct
  source 1..75: mol_type = other DNA
gtgacctcgaatgccttgagcatatgcgcaacatcggccagctcgtcggcgatctgatgcgtgaacaggattgcg

SEQ ID NO: 483441 - DNA, 75 bp, synthetic construct
  source 1..75: mol_type = other DNA
aagctgtcgaattcgttaccggcccctgcctggtgctggcgggcgcgggttccggtaaaactcgtgttatcacca

SEQ ID NO: 483442 - DNA, 75 bp, synthetic construct
  source 1..75: mol_type = other DNA
ttactttgcgcgacatgatggagcgcggcgagagcgaggaagagctggatcaggtacaactgatgactctgcacg

SEQ ID NO: 483443 - DNA, 75 bp, synthetic construct
  source 1..75: mol_type = other DNA
caaagattacgccattctctatcgcggtaatcatcagtcgcgggtgtttgaaaaattcctgatgcaaaaccgcat

SEQ ID NO: 483444 - DNA, 75 bp, synthetic construct
  source 1..75: mol_type = other DNA
gcaccatgcgtatgttgcaggaagagaatatctggatcgtcggtacggcgggtgaagcggatcatactctctatc

SEQ ID NO: 483445 - DNA, 75 bp, synthetic construct
  source 1..75: mol_type = other DNA
tgtagaatggcaggagttagtgggttacaaaatgattggcgtacgctcctccagcggcaaccgactgttgataga

SEQ ID NO: 483446 - DNA, 75 bp, synthetic construct
  source 1..75: mol_type = other DNA
cccggaggcgcgggaattaataaagaaattcgatgaaacgctttttaatattcgtgatatgaatgcttatcatcg

SEQ ID NO: 483447 - DNA, 75 bp, synthetic construct
  source 1..75: mol_type = other DNA
gcgcaatgtcggccagctcgtcggcgacctgatgcaggtgcaggactgcgccaccgttcgtcgtgaccctgagct

SEQ ID NO: 483448 - DNA, 75 bp, synthetic construct
  source 1..75: mol_type = other DNA
ttcacttcaagctccaggctggtcgtaaaaccgttatccgggctgacagtatgcgtcagggtggtaatagtccat

SEQ ID NO: 483449 - DNA, 75 bp, synthetic construct
  source 1..75: mol_type = other DNA
taaaaccgttatccgggctgacggtatgtgtcagagtcgtaatggtccattccgcattatctatcggctgtttaa

SEQ ID NO: 483450 - DNA, 75 bp, synthetic construct
  source 1..75: mol_type = other DNA
tgttctatacgtgaaatggctgaaacaatggcttctgtagtgggttatcaaggaaaaattgtttttgacgcgacc

SEQ ID NO: 483451 - DNA, 75 bp, synthetic construct
  source 1..75: mol_type = other DNA
ggtttttgaacgcgatggacgtctgtgccagcgtccggtgcgtgaagtcgaaactctgcgcagagcacatcagca

SEQ ID NO: 483452 - DNA, 75 bp, synthetic construct
  source 1..75: mol_type = other DNA
gtatcactgccgcgttcactctgctgtccgctttcctgctgacttcaaccccacgccagaaaacggcagatgcct

SEQ ID NO: 483453 - DNA, 75 bp, synthetic construct
  source 1..75: mol_type = other DNA
cgaaacgaacgcgaaagcgtcggaaacccgtgcagaatcctcaaaaacggcagcggcatcgtccgccagttcggc

SEQ ID NO: 483454 - DNA, 75 bp, synthetic construct
  source 1..75: mol_type = other DNA
accggagggcgtataccggttccggttcaggaagatgccctgccagggaacggagggacggcaactggcagccct

SEQ ID NO: 483455 - DNA, 75 bp, synthetic construct
  source 1..75: mol_type = other DNA
cgtgattttagatacaggattattaggtataattcttggactggcggttattgtcattaccggaataccattaat

SEQ ID NO: 483456 - DNA, 75 bp, synthetic construct
  source 1..75: mol_type = other DNA
taccaaattcattccaagtgatggtatccagaccggttttttcgcaggtctgtctgttttagctattgtatccgc

SEQ ID NO: 483457 - DNA, 75 bp, synthetic construct
  source 1..75: mol_type = other DNA
gctgtcgcgtatagcaagggaaatatccagtattctcgacggtattcctctgtcggtgcagcgacgttttcctga

SEQ ID NO: 483458 - DNA, 75 bp, synthetic construct
  source 1..75: mol_type = other DNA
ggaaccagcatcgtactttgtcattggaactgttgttttgtttgtatggtatatagcatggcaaaaagaacgttc

SEQ ID NO: 483459 - DNA, 75 bp, synthetic construct
  source 1..75: mol_type = other DNA
aaccggaggacaggatattaaagaagatgggttacgtcgcatagcgggccagattaatggactcggtggttttat

SEQ ID NO: 483460 - DNA, 75 bp, synthetic construct
  source 1..75: mol_type = other DNA
ctatcagcaactcctttagtgcggatcaggctgacaccacgggcaccgcaggcgtttctggcggtactgagctga

SEQ ID NO: 483461 - DNA, 75 bp, synthetic construct
  source 1..75: mol_type = other DNA
tatgtgaataattatgcgtggggaaattatgagtccggcggcacaattactgttacatgcctgaatcttcctggt

SEQ ID NO: 483462 - DNA, 75 bp, synthetic construct
  source 1..75: mol_type = other DNA
ctggtcacgacttttggcgtactggttgtttttattattgcgttttatctgatctgctggtcgctgatccagcgt

SEQ ID NO: 483463 - DNA, 75 bp, synthetic construct
  source 1..75: mol_type = other DNA
actcacctgttcggcaggtcacattgccgtcgtcatgacgggtgatgatctgcaggaaagcgacaggttgtatcg

SEQ ID NO: 483464 - DNA, 75 bp, synthetic construct
  source 1..75: mol_type = other DNA
ataaaggttttattctgcttgaaattcttgctggcctgatagtaattggtatcgccacaccaatgatttattcag

SEQ ID NO: 483465 - DNA, 75 bp, synthetic construct
  source 1..75: mol_type = other DNA
gaggggcgtctttccacgggtgagtatttacagctggataaaacagccaccgcaggtacttcctgctcaccggac

SEQ ID NO: 483466 - DNA, 75 bp, synthetic construct
  source 1..75: mol_type = other DNA
gggaagacccgatttaaacagaatgcatactggcattgatatgaataataacagcatcaccaatatcaatgaagc

SEQ ID NO: 483467 - DNA, 75 bp, synthetic construct
  source 1..75: mol_type = other DNA
gtcgtctggaagcacttacctgcacaaccggaggacaggatattaaagaagatgggttacgtcgcatagcgggcc

SEQ ID NO: 483468 - DNA, 75 bp, synthetic construct
  source 1..75: mol_type = other DNA
atagcatggcagacagaacgctctaaagaagaagactttaaatcaagcattaagccggaagattttgtgaagtga

SEQ ID NO: 483469 - DNA, 75 bp, synthetic construct
  source 1..75: mol_type = other DNA
atgctcataaagatcattaaatctgtattcaatttttacatgctctgtgtgcagcctttacttggattatttctc

SEQ ID NO: 483470 - DNA, 75 bp, synthetic construct
  source 1..75: mol_type = other DNA
caaaatgaaatggtcagacataaacgacaaccatcttcacattgaacagggtaaaacaggggctaagctcgccat

SEQ ID NO: 483471 - DNA, 75 bp, synthetic construct
  source 1..75: mol_type = other DNA
atccccttcttcgggcagttgtactggttaaccggcaacttattgatcgacagaaacaatcgcactaaagctcac

SEQ ID NO: 483472 - DNA, 75 bp, synthetic construct
  source 1..75: mol_type = other DNA
tggttagtagccgcttacttacctggcgttgccccggttttaccggctttccgcgctggtttgagatggcctgca

SEQ ID NO: 483473 - DNA, 75 bp, synthetic construct
  source 1..75: mol_type = other DNA
ccggtgttgcaggtgttggtggtggtgcgacattcgccgcgttgattgttctgccagcaatgggcttgccggtaa

SEQ ID NO: 483474 - DNA, 75 bp, synthetic construct
  source 1..75: mol_type = other DNA
gaaggggtgaagggggtcattttgaccagcgatcaagtacaggtggtatttgggtcgggcaaagcgcatcgtgcc

SEQ ID NO: 483475 - DNA, 75 bp, synthetic construct
  source 1..75: mol_type = other DNA
gagtattgacgacctgaccagagccgggattggtatcatcgttaatgatggtggtggtaccagtaatacatcagg

SEQ ID NO: 483476 - DNA, 75 bp, synthetic construct
  source 1..75: mol_type = other DNA
gcgtgatgtagaaagaactatccctgcttgtcctgaagagtttgatacaaaactcaattttgaggtttgctataa

SEQ ID NO: 483477 - DNA, 75 bp, synthetic construct
  source 1..75: mol_type = other DNA
cacggcctgactcttttagcccctggaaggaacctcgttgctgcgcggcggcaatgattcgccgcgccatcatcg

SEQ ID NO: 483478 - DNA, 75 bp, synthetic construct
  source 1..75: mol_type = other DNA
gctggcctgaattctcacagtggcttgatgccgtgattcagcgtgtcgaaatgtacaacgcatcgcttcctgttc

SEQ ID NO: 483479 - DNA, 75 bp, synthetic construct
  source 1..75: mol_type = other DNA
gtggtattgcgttaacgcgtgatgactgtattcgccgcgatgtgattaaatcgctgatctgcaacttccgtctgg

SEQ ID NO: 483480 - DNA, 75 bp, synthetic construct
  source 1..75: mol_type = other DNA
ctacctgggtcttatcattatgtttgcagtgcatggcattctgctgggtattaatggcgtgagtccgctgaaata

SEQ ID NO: 483481 - DNA, 75 bp, synthetic construct
  source 1..75: mol_type = other DNA
tgctattcctccgacaccaggtggtgataccagcaattctggaggtaaatatacccctcctgttattgaccccgg

SEQ ID NO: 483482 - DNA, 75 bp, synthetic construct
  source 1..75: mol_type = other DNA
ggttcctttcatgttaacgccaccagtggcaaaaataggggcaaattccggggcagcaagtaaaaatcaaaatta

SEQ ID NO: 483483 - DNA, 75 bp, synthetic construct
  source 1..75: mol_type = other DNA
gatgggcttaaacagtgctttcgggccatccggcctggtggcgctgccgctgatgacttccgcgcaaggcattct

SEQ ID NO: 483484 - DNA, 75 bp, synthetic construct
  source 1..75: mol_type = other DNA
tcgaatacagccggaagcgggaagtggtgtactggcatcatcgaaccaaaacgtccctgttccatcgcggctttg

SEQ ID NO: 483485 - DNA, 75 bp, synthetic construct
  source 1..75: mol_type = other DNA
tcgctaattttgatcgccacgcaatccatcatccacagacggctcggttgtcacaacaaaagctggatgccattg

SEQ ID NO: 483486 - DNA, 75 bp, synthetic construct
  source 1..75: mol_type = other DNA
ctaaaagctgtcggttttgagccgcaggatgccatgctgccctggccgaaaaacgtccacagcggctaccggatc

SEQ ID NO: 483487 - DNA, 75 bp, synthetic construct
  source 1..75: mol_type = other DNA
cacccgttgagtctctgttgacgcagtaccatgatgcccgtgcgcagaagcagaatacagatgcgctggaaaaac

SEQ ID NO: 483488 - DNA, 75 bp, synthetic construct
  source 1..75: mol_type = other DNA
tcacagcaaaagctggatgccattgaacgtctggagacccgccccgttgaccgtctgtttacgggcattcccgtt

SEQ ID NO: 483489 - DNA, 75 bp, synthetic construct
  source 1..75: mol_type = other DNA
acgccagcgtcaactcattccacatgctgaccgttgtaaacatggaaagccaggagacatggaaatggacggaaa

SEQ ID NO: 483490 - DNA, 75 bp, synthetic construct
  source 1..75: mol_type = other DNA
ccggacgacctcgacatgctgttgacctcattaatcaccctgctgatcaccgctacgcttgcgtacctgatcatt

SEQ ID NO: 483491 - DNA, 75 bp, synthetic construct
  source 1..75: mol_type = other DNA
cgctacgcttgcgtacctgatcattatgccgctgggtggctggttattcgaaggcatgtcgtggctgtttatgca

SEQ ID NO: 483492 - DNA, 75 bp, synthetic construct
  source 1..75: mol_type = other DNA
aggcttgttcaccttcctggtaattctggtgggctataacgcggcccaggcgttcggcggcacgggcgtcaatgg

SEQ ID NO: 483493 - DNA, 75 bp, synthetic construct
  source 1..75: mol_type = other DNA
cgggggctggcctccacgctgtatctgcacccggagccgtttgtctgtgaaggggaaatgtatctgctcggtacg

SEQ ID NO: 483494 - DNA, 75 bp, synthetic construct
  source 1..75: mol_type = other DNA
tgtcttttccgttaacggcgtgataagccaggtgcaggatatgttcaggaaaaaagatctggggcgtcctgtttc

SEQ ID NO: 483495 - DNA, 75 bp, synthetic construct
  source 1..75: mol_type = other DNA
aggcctgttcaccttcctggtgattctggtgggctataacgccgcccaggcatttggcggcacgggcgtaaatgg

SEQ ID NO: 483496 - DNA, 75 bp, synthetic construct
  source 1..75: mol_type = other DNA
atctggccctgatccagaaatacaactattccgggccacgatacacctcgtacccgaccgcgctggagttttcag

SEQ ID NO: 483497 - DNA, 75 bp, synthetic construct
  source 1..75: mol_type = other DNA
atccgttcgaatgcgtgctgtgtggcggccggatggtgtaccggcgtgccatagcggggctgaatatgggcgagc

SEQ ID NO: 483498 - DNA, 75 bp, synthetic construct
  source 1..75: mol_type = other DNA
tctgaatcagaatggctctcatgtatgatcatacagaccaatacgcgaactcgccagttgcagctataccgtaac

SEQ ID NO: 483499 - DNA, 75 bp, synthetic construct
  source 1..75: mol_type = other DNA
atgacatttcagccatcaaagattgttggcaaaaaaaattcagatgatgatactgacattaacgtgatcaaatca

SEQ ID NO: 483500 - DNA, 75 bp, synthetic construct
  source 1..75: mol_type = other DNA
ttaccgtgatttacagcatcttagtctgtgtattcggctctatttactgccttttcagcccacgtaatccgaagc

SEQ ID NO: 483501 - DNA, 75 bp, synthetic construct
  source 1..75: mol_type = other DNA
cggcaggatggtataccgccgggccattgcggggctgaatgtatcagggctgaagaaaaacgcgcgggatatcag

SEQ ID NO: 483502 - DNA, 75 bp, synthetic construct
  source 1..75: mol_type = other DNA
ggttccagacagaaaacgatcggctggcatttctggactgcctttctaatctgacgcgcgtgacgacgcatagtc

SEQ ID NO: 483503 - DNA, 75 bp, synthetic construct
  source 1..75: mol_type = other DNA
gcgcgataaacgtacctatttccgtgagataaattacatcgccgcggcatttcaatatcagaaaaagaattacaa

SEQ ID NO: 483504 - DNA, 75 bp, synthetic construct
  source 1..75: mol_type = other DNA
ttgcagctgcgctggatgatgcgccgcgcgataaacgtacctatttccgtgagataaattacatcgccgcggcat

SEQ ID NO: 483505 - DNA, 75 bp, synthetic construct
  source 1..75: mol_type = other DNA
ccgttacctggaccacaaaacgggagaaacggcgacggaaacgctgacacagcgtgagctggtcgcgaggctgaa

SEQ ID NO: 483506 - DNA, 75 bp, synthetic construct
  source 1..75: mol_type = other DNA
cacgctacctgggtcgttatctgaagaagccaccaatagcggcttcccgactggcgcattacaacggaggggcta

SEQ ID NO: 483507 - DNA, 75 bp, synthetic construct
  source 1..75: mol_type = other DNA
atgtacatgtcgaagaaaacggccggcgggaggaatacggcgcgctacctgggtcgttatctgaagaagccgccg

SEQ ID NO: 483508 - DNA, 75 bp, synthetic construct
  source 1..75: mol_type = other DNA
tttctaaagaaattgttcgttcgtcgtaaatttaagcaagatgatcgcaaaacagaccgtgttgcgcaatttgtc

SEQ ID NO: 483509 - DNA, 75 bp, synthetic construct
  source 1..75: mol_type = other DNA
cggcgtgggtaaatcgtccacggcggtaaacctggcactggcgctggcggcagaaggggcgaaagtcggcattct

SEQ ID NO: 483510 - DNA, 75 bp, synthetic construct
  source 1..75: mol_type = other DNA
aatggcgtgaagaacatcattgcggtcagctccggtaaaggcggcgtgggtaaatcctccacggcggtaaacctg

SEQ ID NO: 483511 - DNA, 75 bp, synthetic construct
  source 1..75: mol_type = other DNA
caccctgaagcgggtgaaaaaccagccaggtattaatggtgtgaagaacattattgcggtcagttccggtaaagg

SEQ ID NO: 483512 - DNA, 75 bp, synthetic construct
  source 1..75: mol_type = other DNA
acggcgaaaggtcgcttgctgatccgcaacatttgcatgtgctttgatacctatctgcgccagaaagcgcggatg

SEQ ID NO: 483513 - DNA, 75 bp, synthetic construct
  source 1..75: mol_type = other DNA
atgcaatattttttttatgtcatgggtgctctggctgaaatggaacgcgaactgatagttgaacgcaccagggca

SEQ ID NO: 483514 - DNA, 75 bp, synthetic construct
  source 1..75: mol_type = other DNA
atccgaaagcgagcattgacggcggcgaacagcctcatgcgcatatcatgatgagtcagcgtgtgaatgatggca

SEQ ID NO: 483515 - DNA, 75 bp, synthetic construct
  source 1..75: mol_type = other DNA
gatggtgtggcgtggaccgatggcgagcaaggcgttaatgcagatgttgcaggaaaccttgtggccggatctcga

SEQ ID NO: 483516 - DNA, 75 bp, synthetic construct
  source 1..75: mol_type = other DNA
gtaaagagttacgagagttgaagaacaaaaactctttaagagttcctgtgagagtagttaacgaaccatctttaa

SEQ ID NO: 483517 - DNA, 75 bp, synthetic construct
  source 1..75: mol_type = other DNA
tcaacgcattttctaaagaaattgttcgttcgtcgtaaatttaagcaagatgatcgcaaaacagaccgtgttgcg

SEQ ID NO: 483518 - DNA, 75 bp, synthetic construct
  source 1..75: mol_type = other DNA
gacatcgcgttgatcgatgcgaaaaaaggcattgtgatgttcgagaaagtcgaggttccggtgctcggtattgtc

SEQ ID NO: 483519 - DNA, 75 bp, synthetic construct
  source 1..75: mol_type = other DNA
tctcgatatgccgccgggcactggtgatattcaattgacgctggcgcagaacattcctgtaactggtgctgttgt

SEQ ID NO: 483520 - DNA, 75 bp, synthetic construct
  source 1..75: mol_type = other DNA
ctggccgagaaataccatacgcagttgttggggcaaatgccgttacacattagcctgcgtgaagatctcgacaaa

SEQ ID NO: 483521 - DNA, 75 bp, synthetic construct
  source 1..75: mol_type = other DNA
atacttttgatggtgagtatcagcgtaaggatgacaaccgcgatcgccttgatcataaagacgatcgtcaggatt

SEQ ID NO: 483522 - DNA, 75 bp, synthetic construct
  source 1..75: mol_type = other DNA
gcttgaatttaaaagcctgaaagattttgaacccgaacaggtagcaaaaaatatcccacagcttcgtgtattact

SEQ ID NO: 483523 - DNA, 75 bp, synthetic construct
  source 1..75: mol_type = other DNA
cgcgtactgggagcgattaaagattccgaccgtctgctatgcgcggaagtaaacattaccgacaaagccagcatc

SEQ ID NO: 483524 - DNA, 75 bp, synthetic construct
  source 1..75: mol_type = other DNA
atgggactggcggtgattgccgcagaagatcagaaatttcctgagcactggggctttgatgtcgcttccattgag

SEQ ID NO: 483525 - DNA, 75 bp, synthetic construct
  source 1..75: mol_type = other DNA
cgccccgccagcgaggcagccttgctgtatgaagagactgcggaaagtgtagagaaacgcgaaaaaatggcgctg

SEQ ID NO: 483526 - DNA, 75 bp, synthetic construct
  source 1..75: mol_type = other DNA
ttcgactggataaatggctatgggccgcccgtttttataaaacccgcgcgctggcccgtgaaatgattgaaggcg

SEQ ID NO: 483527 - DNA, 75 bp, synthetic construct
  source 1..75: mol_type = other DNA
cgtcgctgggctgaatccagccttgaatttcaggtggcgcaggagattggccgccactggcaacgccgggcactc

SEQ ID NO: 483528 - DNA, 75 bp, synthetic construct
  source 1..75: mol_type = other DNA
acgcggtttccgtttatgtccgtcatttattacccaccgtttcactcccgctttaaaggatgaactaaggcgtcg

SEQ ID NO: 483529 - DNA, 75 bp, synthetic construct
  source 1..75: mol_type = other DNA
acagccggtactgccagcgcaaaaccaggccttaccgccggaagttcgcgcgttcctcaatgccgggagaacgcg

SEQ ID NO: 483530 - DNA, 75 bp, synthetic construct
  source 1..75: mol_type = other DNA
atgaaagcagtatctcgcgttcacatcaccccgcatatgcactgggatcgagagtggtatttcaccaccgaagag

SEQ ID NO: 483531 - DNA, 75 bp, synthetic construct
  source 1..75: mol_type = other DNA
tgtacccacgcctggtgcgcaccacccgcgcggcgctggccggatttgaaagtgaatacggcgtccatctttctg

SEQ ID NO: 483532 - DNA, 75 bp, synthetic construct
  source 1..75: mol_type = other DNA
tatgcgatcagctttatacacatctcgcccaggcattacaccgcagtttgtttgctatcggtattgataatactt

SEQ ID NO: 483533 - DNA, 75 bp, synthetic construct
  source 1..75: mol_type = other DNA
tagccgtcaggcgtggattttacggcagatgcatcagttgggcggtgaatcttttatgcggcaacatcaactgga

SEQ ID NO: 483534 - DNA, 75 bp, synthetic construct
  source 1..75: mol_type = other DNA
agccaaatcgcgaaaccatcgccgcaatgtgccgcgcgcgacacattgccctcgccagccacgatgacgccacgc

SEQ ID NO: 483535 - DNA, 75 bp, synthetic construct
  source 1..75: mol_type = other DNA
tggataaattcttcaccccgcgcccgaaagttgactggccagcccactcggcgatgagcagccacgacgcgctga

SEQ ID NO: 483536 - DNA, 75 bp, synthetic construct
  source 1..75: mol_type = other DNA
cgagagcaaccgctttacgctaccgcaggcggtgaggctggtgaccaaaaatccggcgcaggcgctgaatcttca

SEQ ID NO: 483537 - DNA, 75 bp, synthetic construct
  source 1..75: mol_type = other DNA
cgaagagacgcagaaacgcggcgtcaaccgcgccgagcaccgcctgcacctgcgctgcgaactgccgcatcacac

SEQ ID NO: 483538 - DNA, 75 bp, synthetic construct
  source 1..75: mol_type = other DNA
cgcgacggcggcgatcggctggagaatctggagaagatgatcaacgccatcgaagagacgcagaaacgcggcgtc

SEQ ID NO: 483539 - DNA, 75 bp, synthetic construct
  source 1..75: mol_type = other DNA
gatggaccactcgccgggccagcgccagttcgccaaccgcgagaagtatcgcgaatattatcagggcaaatactc

SEQ ID NO: 483540 - DNA, 75 bp, synthetic construct
  source 1..75: mol_type = other DNA
gctggatacgtaaagggctggaagctgtcctgacgttggggatagaaacagtctggagcaaaaagcgcatcctga

SEQ ID NO: 483541 - DNA, 75 bp, synthetic construct
  source 1..75: mol_type = other DNA
cgtcaggcgtggattttacggcagatgtatcagttaggcggtgagtcgtttatgcaacagcaccagctggattaa

SEQ ID NO: 483542 - DNA, 75 bp, synthetic construct
  source 1..75: mol_type = other DNA
aacgatttctcagcagacggccaaaatctctttttatgggatgggcgtagctgggtacgaaaagggctggaagct

SEQ ID NO: 483543 - DNA, 75 bp, synthetic construct
  source 1..75: mol_type = other DNA
ggaagctgcgttactggctgccgtattacctaatccactgcgtttcaaagtctccgcgccatcgggctatgtgcg

SEQ ID NO: 483544 - DNA, 75 bp, synthetic construct
  source 1..75: mol_type = other DNA
gccgcagcgcaacgttatttccataaacctgccagcaaactcacccagtcggaagcggcgttactggctgcagta

SEQ ID NO: 483545 - DNA, 75 bp, synthetic construct
  source 1..75: mol_type = other DNA
taaccgtcaggcgtggattttacgacaaatgcgccagttaggcggcgagtcatttatgcggcaacaccaactgga

SEQ ID NO: 483546 - DNA, 75 bp, synthetic construct
  source 1..75: mol_type = other DNA
atccgcccgaccattctgcgtgacggtatggcggcagacggtgtgtcgcagcgcaaatataactacatgcgcgcc

SEQ ID NO: 483547 - DNA, 75 bp, synthetic construct
  source 1..75: mol_type = other DNA
tagcaacgctattacagctgaatatctcgcacaacaccgtgaatttattcagagggcaaaggtcattgtcgcgga

SEQ ID NO: 483548 - DNA, 75 bp, synthetic construct
  source 1..75: mol_type = other DNA
aattatgcggattcaaatccaggtaaaataaaatttacgcctggtggagtagggcgcaatattgcacaaaacctg

SEQ ID NO: 483549 - DNA, 75 bp, synthetic construct
  source 1..75: mol_type = other DNA
aatccacactctcaagccaaaccgccttgaagcggaaaccctgagtgggattgcgctgtcagggcgtgaagatgt

SEQ ID NO: 483550 - DNA, 75 bp, synthetic construct
  source 1..75: mol_type = other DNA
cttgctgacagcactgttgaagcccgtgcacgtcgagggcgcaaaggggcgaaagctgagcttgcccgacgcgct

SEQ ID NO: 483551 - DNA, 75 bp, synthetic construct
  source 1..75: mol_type = other DNA
ggttacctcaacgaatacggctcaccagagcagaacatcccgccacgacctcacctggtccccggcgttaaatcg

SEQ ID NO: 483552 - DNA, 75 bp, synthetic construct
  source 1..75: mol_type = other DNA
tgaagcgaaaaggacggctgtatgtgatttgtaaatctaatccacgttttaaggccgttcagggtcgtaagaaaa

SEQ ID NO: 483553 - DNA, 75 bp, synthetic construct
  source 1..75: mol_type = other DNA
tacacaactggcggcactgctggcgaacgagctggaagcatccgtatcgcctgacacgccgcttttactcgccgg

SEQ ID NO: 483554 - DNA, 75 bp, synthetic construct
  source 1..75: mol_type = other DNA
acatgaaagagaaagatgtcgccagtatgtcaggtcgtttgctcaatcgctggggcagggtgaagaagcctcagt

SEQ ID NO: 483555 - DNA, 75 bp, synthetic construct
  source 1..75: mol_type = other DNA
ttcaggcaaggatcgaacaacttgagcagcgagggcagatatccctgcccggtatcgacagcgtattaacacact

SEQ ID NO: 483556 - DNA, 75 bp, synthetic construct
  source 1..75: mol_type = other DNA
gatggcggctacacgatgaatattagccagcttgccagaatgaaggatgagaagttagtagacagctacacgact

SEQ ID NO: 483557 - DNA, 75 bp, synthetic construct
  source 1..75: mol_type = other DNA
gttagactttccttcttcattattaagtcgcttatcaaaagagattcccaaatatgtagtgagcctgcatgacta

SEQ ID NO: 483558 - DNA, 75 bp, synthetic construct
  source 1..75: mol_type = other DNA
aacgggggcttgcgccacaaggactgattatttccgggtgccatgccccgcatctgcattctgaacgccagctca

SEQ ID NO: 483559 - DNA, 75 bp, synthetic construct
  source 1..75: mol_type = other DNA
aaaaaggatgtgttggtcggcatcccttcggaagacagcgagcgtgaagatgttccgtttggtaatgcggggatc

SEQ ID NO: 483560 - DNA, 75 bp, synthetic construct
  source 1..75: mol_type = other DNA
tgcacatcacacctggtcgggacggctccgagttcacttatgtcgaagcacgcgtgcatggggaactggaaattc

SEQ ID NO: 483561 - DNA, 75 bp, synthetic construct
  source 1..75: mol_type = other DNA
gaaaattgccggacaaaccgctcactgacatatcaacgaaagaggtggcagcaatgctaaacacctacgtagcag

SEQ ID NO: 483562 - DNA, 75 bp, synthetic construct
  source 1..75: mol_type = other DNA
aaaaacatctgcgtgccgtccaggaatatctgacccgccttcgcgcacgctatcaggggcgtgtgggagactttg

SEQ ID NO: 483563 - DNA, 75 bp, synthetic construct
  source 1..75: mol_type = other DNA
ttgagtggtattgccgcaatcaagagtacagccaatgctgttgtagctatttccataactgctacaattctaact

SEQ ID NO: 483564 - DNA, 75 bp, synthetic construct
  source 1..75: mol_type = other DNA
atctggcagcaggccacggcacaggctccggcgttactggacagggcgctggatccgaaagccgatccgctcaac

SEQ ID NO: 483565 - DNA, 75 bp, synthetic construct
  source 1..75: mol_type = other DNA
ttgaggaaaattgcctgccggaacaggtccggttgcgcaatcttgacggttgcgagcactgttataaaggcgtaa

SEQ ID NO: 483566 - DNA, 75 bp, synthetic construct
  source 1..75: mol_type = other DNA
tattattgagatttatgatcctgtatcaaggcagttgcaacgatacgaggtaattacagcgagtgtagatccttc

SEQ ID NO: 483567 - DNA, 75 bp, synthetic construct
  source 1..75: mol_type = other DNA
atgatgaaagggattatggcagcagatgcagatgaagcctttgtcagaggtatgattgctcatcatcagggcgcc

SEQ ID NO: 483568 - DNA, 75 bp, synthetic construct
  source 1..75: mol_type = other DNA
cgagggtggataacgctaaggccattctggatgcgctcaaatccatcagtaaaaaagaagtgctggtgggtatcc

SEQ ID NO: 483569 - DNA, 75 bp, synthetic construct
  source 1..75: mol_type = other DNA
ggagcgcaccctgcgccgtattctgcagcgccctgaaggtattatcacgctctcaggaccaacaggttcaggaaa

SEQ ID NO: 483570 - DNA, 75 bp, synthetic construct
  source 1..75: mol_type = other DNA
tcgacgttgttgataatgcgttatctatgttcgccactgatggaaaacgcgtggcgattattacatggacgcatc

SEQ ID NO: 483571 - DNA, 75 bp, synthetic construct
  source 1..75: mol_type = other DNA
tccggggtggaaaacggaattaaccccgtacagcaaaaaatgctcgggtatatcagccatgcggccaccctcagc

SEQ ID NO: 483572 - DNA, 75 bp, synthetic construct
  source 1..75: mol_type = other DNA
aactaccgctcttccgggcgtattctgaaagcggcgaacatcctgatcgccaataacccgcacgtctttgaaaag

SEQ ID NO: 483573 - DNA, 75 bp, synthetic construct
  source 1..75: mol_type = other DNA
gggctatcaggcggcaaaactgttgcatcgtttattggataaagaagagatgccgttgcaacggattttggtccc

SEQ ID NO: 483574 - DNA, 75 bp, synthetic construct
  source 1..75: mol_type = other DNA
tctacggattaccgttcgctgaccgaccccgctgttattcaggccatgcattacatccgcaatcacgcctgcaaa

SEQ ID NO: 483575 - DNA, 75 bp, synthetic construct
  source 1..75: mol_type = other DNA
ctttcgccagcttgtggctgaagagaagtaccgaggtgtggtttatcaggggctggaaaccgcaccagagaactg

SEQ ID NO: 483576 - DNA, 75 bp, synthetic construct
  source 1..75: mol_type = other DNA
gccatccggcatgcagtcgcaggttatcttcctggctgatcgcttcgccgtcaccacggcagccggaaatagcgt

SEQ ID NO: 483577 - DNA, 75 bp, synthetic construct
  source 1..75: mol_type = other DNA
agcaacggtcagtattacgccgcggggatgggtatcggcgtggagaatacgccatccggcatgcagtcgcaggtt

SEQ ID NO: 483578 - DNA, 75 bp, synthetic construct
  source 1..75: mol_type = other DNA
tgtgtcgtcttctctctcagatcttgagcagactgttgcgactgctgataccgcactgggccagcgaatcgacag

SEQ ID NO: 483579 - DNA, 75 bp, synthetic construct
  source 1..75: mol_type = other DNA
tctggtgccattgacagaatgggttctctgtcaacccgtacattccgaatgctgtcagccggggcgctgggtgtt

SEQ ID NO: 483580 - DNA, 75 bp, synthetic construct
  source 1..75: mol_type = other DNA
gaagttttcggctatgataatactgaggataatgatgaggcggcatctgattatgcattaaaaataaatgaaaac

SEQ ID NO: 483581 - DNA, 75 bp, synthetic construct
  source 1..75: mol_type = other DNA
atgcagaagcacaaaagcctgcgcacagcactgattaacgccgtgccgcagctccgaaataaccccgagatgctg

SEQ ID NO: 483582 - DNA, 75 bp, synthetic construct
  source 1..75: mol_type = other DNA
taaccgcctggacggaacgcgaagcgcgtaaccgttgcccgtcaggttgtgttgctgtattcgccgcccgtattc

SEQ ID NO: 483583 - DNA, 75 bp, synthetic construct
  source 1..75: mol_type = other DNA
gcgtaaccgttgcccgtccggttgtgtcgctgtattcgccgcccgtattcgtcaggaggtgcgccatgtgcaata

SEQ ID NO: 483584 - DNA, 75 bp, synthetic construct
  source 1..75: mol_type = other DNA
tccaagaacataaggttactaaggctacagtttataagttgttacgccgttactggcagcgtggtcaaacgccta

SEQ ID NO: 483585 - DNA, 75 bp, synthetic construct
  source 1..75: mol_type = other DNA
aaggttcagaccagcgttacaaacctgtcgagcacggtcggagatgtgtcttcttctctgagcaagcttgagcag

SEQ ID NO: 483586 - DNA, 75 bp, synthetic construct
  source 1..75: mol_type = other DNA
gcatacagcgaaacacctgcagtggaatcggtgtggattgtcgagtctgaagagctttacgcgcagcaatatcgc

SEQ ID NO: 483587 - DNA, 75 bp, synthetic construct
  source 1..75: mol_type = other DNA
ttccggctacgaacgcagccatcgcattgacctaccgcaggcaggcagcacatggacggtgcgcctgcgtaagct

SEQ ID NO: 483588 - DNA, 75 bp, synthetic construct
  source 1..75: mol_type = other DNA
actctacggttaaccagaacattgcgattaccaccatgcgcgttgcctgggatgctgttcagggtgcagttgcgt

SEQ ID NO: 483589 - DNA, 75 bp, synthetic construct
  source 1..75: mol_type = other DNA
atgagatttccgtttcaatggacggtatgacaggaggcgtgaagaattcggcaattgcgataatccagaatgggc

SEQ ID NO: 483590 - DNA, 75 bp, synthetic construct
  source 1..75: mol_type = other DNA
tcagggtatacagactttgtgcgcgggcaggccagcatcgatgtatccgatatcaccgatgcaatcctggaggac

SEQ ID NO: 483591 - DNA, 75 bp, synthetic construct
  source 1..75: mol_type = other DNA
accacgtcattcgatgttccggggatttatgcaggacgctacctggttcgcgtgcgtgccatcaatgccgccgaa

SEQ ID NO: 483592 - DNA, 75 bp, synthetic construct
  source 1..75: mol_type = other DNA
ggaccggaacgacgcctacacagtcctgcgtgattttgccgctatcttccgtggcatgacctactggggcgggga

SEQ ID NO: 483593 - DNA, 75 bp, synthetic construct
  source 1..75: mol_type = other DNA
tgcagagcttcaccgaggtgattgacgccaagttacgatatccaaacacagcgctactctacatcgaattcgatt

SEQ ID NO: 483594 - DNA, 75 bp, synthetic construct
  source 1..75: mol_type = other DNA
ataataatctcagtgcgatgtacaacattaaagtgggtgtctccagcaacgggcagtattacgctgcggggatgg

SEQ ID NO: 483595 - DNA, 75 bp, synthetic construct
  source 1..75: mol_type = other DNA
cccggcgaataccgacgacacgctgaagacggaaattcagtacagcctgaccggtaccgaagacgatgcgatact

SEQ ID NO: 483596 - DNA, 75 bp, synthetic construct
  source 1..75: mol_type = other DNA
atttcttccggatggggctcttcagaagagaaaacgctgacgggtaaagtgggcagcccaccgaagccggttggc

SEQ ID NO: 483597 - DNA, 75 bp, synthetic construct
  source 1..75: mol_type = other DNA
tttgagcaggcgctggtggcgcggtacggcttcaatcagctggaaatgacagccatcggctgcaccaggcagtca

SEQ ID NO: 483598 - DNA, 75 bp, synthetic construct
  source 1..75: mol_type = other DNA
ctgggctgctacatatggccttgtggttccgcgcgcgagtgatcaaccaacaggaagactggagtgaactggagt

SEQ ID NO: 483599 - DNA, 75 bp, synthetic construct
  source 1..75: mol_type = other DNA
ggcaccatctcctatgtcgcgtttgctaaaccgtttgctgaaggttttaacctcggacgcgaagcgcatttcaat

SEQ ID NO: 483600 - DNA, 75 bp, synthetic construct
  source 1..75: mol_type = other DNA
ccaaaccatttgctgaaggttttaacctcggacgcgaagcgcatttcaataacgccaaaattgttttctcccgcg

SEQ ID NO: 483601 - DNA, 75 bp, synthetic construct
  source 1..75: mol_type = other DNA
tggtgattggcgtcgatcctatcgcctatcgctgtgatattgcccgtcgccacggtgctgatttctgccttaacc

SEQ ID NO: 483602 - DNA, 75 bp, synthetic construct
  source 1..75: mol_type = other DNA
ggcgagacggtgatcgaagcgaaggaactaaccaagaaatttggtgattttgccgccaccgatcacgtcaacttt

SEQ ID NO: 483603 - DNA, 75 bp, synthetic construct
  source 1..75: mol_type = other DNA
tgttgctgctcgatgaacccggcgttggcgttgaccctatctcacggcgcgaactgtggcagatggtgcatgagc

SEQ ID NO: 483604 - DNA, 75 bp, synthetic construct
  source 1..75: mol_type = other DNA
gaagaaacctgctgggaactgctgatgaacggttatctcaattgcgaagatttaatcgacccggtggtgaccttt

SEQ ID NO: 483605 - DNA, 75 bp, synthetic construct
  source 1..75: mol_type = other DNA
ggatgagtatgcaaccggccctggctgatttgccccagatggaacctccgtcctccggcggtggcagcggtctgt

SEQ ID NO: 483606 - DNA, 75 bp, synthetic construct
  source 1..75: mol_type = other DNA
ctaagtggtgcggtattatagggacaattattccagctattatccttgttattcttggtttctcctatctgtggt

SEQ ID NO: 483607 - DNA, 75 bp, synthetic construct
  source 1..75: mol_type = other DNA
gtcaccacaaaggcgacgtatttgccaccgcgcggattgccggtattcaggcggcaaaacgtacatgggatctga

SEQ ID NO: 483608 - DNA, 75 bp, synthetic construct
  source 1..75: mol_type = other DNA
gtttgcgggagtccagaaaggacaaaaaacctggacggagtttggggccattgtggtggtgggggtgattctgct

SEQ ID NO: 483609 - DNA, 75 bp, synthetic construct
  source 1..75: mol_type = other DNA
aaattcggggcaattgtggtggtggggggggttctgctggttaccgttatctggttgctcggcaagtctgccgac

SEQ ID NO: 483610 - DNA, 75 bp, synthetic construct
  source 1..75: mol_type = other DNA
aaattcggggccattgtggtggtgggtgtggtgctgctggttgccgttatctggctgctcggcaagtctgccgac

SEQ ID NO: 483611 - DNA, 75 bp, synthetic construct
  source 1..75: mol_type = other DNA
taaatcgaccacctttaagatgatgtgcggtttgctggtaccgacctctggtcaggcgctggtgctgggcatgga

SEQ ID NO: 483612 - DNA, 75 bp, synthetic construct
  source 1..75: mol_type = other DNA
aatatagtcaggagttgcgcgatgccgggcaagaatatattccgcagcttattgatgatttttcagaaagtgttt

SEQ ID NO: 483613 - DNA, 75 bp, synthetic construct
  source 1..75: mol_type = other DNA
gaaaaatgggggctgctaaacattcgcttccgggaaaattatgaataccgctattactatgctcaacgtattggg

SEQ ID NO: 483614 - DNA, 75 bp, synthetic construct
  source 1..75: mol_type = other DNA
catgcctggtgaagaacagtttaatgccttccgtgaggcgctccgtgaacgaaactggtactactggagcaacag

SEQ ID NO: 483615 - DNA, 75 bp, synthetic construct
  source 1..75: mol_type = other DNA
cgggtctgctacatatggcgctgtggttccgtgcgcgggtgatcaaccaacaggaagactggagtgaactggagt

SEQ ID NO: 483616 - DNA, 75 bp, synthetic construct
  source 1..75: mol_type = other DNA
gatctgactccctattcgtggggcatgtgggtaaagattattaccgtactgcttcctcgccatccgcagagaaac

SEQ ID NO: 483617 - DNA, 75 bp, synthetic construct
  source 1..75: mol_type = other DNA
gagctgctttatgtgtttatcctgcgagtatgccagtgcactggtggactccaacaaaacagaagaagcgttggt

SEQ ID NO: 483618 - DNA, 75 bp, synthetic construct
  source 1..75: mol_type = other DNA
aatctggcgaaactgcaaattaccctggcgctggagcgtgaatccgtctgggttgccaaaatagcgatgaaactg

SEQ ID NO: 483619 - DNA, 75 bp, synthetic construct
  source 1..75: mol_type = other DNA
gagctgttttcagtgtttgtccaccgaatatgccagcgcactgatagattccaaaagagcagaagaggcattggc

SEQ ID NO: 483620 - DNA, 75 bp, synthetic construct
  source 1..75: mol_type = other DNA
atgaactggaaaaagaaaatgattattggggacgcgaccgcatcaattatcaactcaaaaaactgtacatcatgg

SEQ ID NO: 483621 - DNA, 75 bp, synthetic construct
  source 1..75: mol_type = other DNA
gagctgttttcagtgtttgtccactgaatatgccagtgcactgatagattccaaaagaatagaggaggcactggc

SEQ ID NO: 483622 - DNA, 75 bp, synthetic construct
  source 1..75: mol_type = other DNA
actttccgtgaggcgctccgtgaacgaaactggtactactggagcaacagtaatgacgactatacattaacggac

SEQ ID NO: 483623 - DNA, 75 bp, synthetic construct
  source 1..75: mol_type = other DNA
gctcagcggcacataccgaaattacgcgcgttattgggggttgatcgcgagtttctcgaactaagtgaaaaaatc

SEQ ID NO: 483624 - DNA, 75 bp, synthetic construct
  source 1..75: mol_type = other DNA
gctgtcagccggggcgctgggtatcgctggcgtgggttacaccgccaataaactgtttattggtgccgccgccca

SEQ ID NO: 483625 - DNA, 75 bp, synthetic construct
  source 1..75: mol_type = other DNA
gctacttacgtttatctgaacggcacgcgcctgaccgtagaacttccgtaccagactgtacacggaatcattagc

SEQ ID NO: 483626 - DNA, 75 bp, synthetic construct
  source 1..75: mol_type = other DNA
cggtgaactgttattacgcgcatcagccattgacggaattgttccatccgaaaaaaacgcagctacttacgttta

SEQ ID NO: 483627 - DNA, 75 bp, synthetic construct
  source 1..75: mol_type = other DNA
cttcaaggcaaaaactattctgctggtgatgcggcagacattcttaagaatggagcaacagctcttgagttaact

SEQ ID NO: 483628 - DNA, 75 bp, synthetic construct
  source 1..75: mol_type = other DNA
atcgtcaccatctgtaaataactttgttgcattgttagattataatgtaagggatgcatcattattattatcact

SEQ ID NO: 483629 - DNA, 75 bp, synthetic construct
  source 1..75: mol_type = other DNA
tgaaaaggctcgtcaggttaatggcgataaaccctatatcgaaattatctgtatggattcagaagctgaaatcca

SEQ ID NO: 483630 - DNA, 75 bp, synthetic construct
  source 1..75: mol_type = other DNA
gatttaaccgtgattgctcagaccggtttgctggggatcttgctgggtgtggcggtgatcgtcgtgaccggtatt

SEQ ID NO: 483631 - DNA, 75 bp, synthetic construct
  source 1..75: mol_type = other DNA
cgcccttatattggcaccaccaccacctggttcgttgggcaggcggcgcatatcgggcgctttatggtgcattgt

SEQ ID NO: 483632 - DNA, 75 bp, synthetic construct
  source 1..75: mol_type = other DNA
acgagtccgttaaggcacgtattatttcaggcgagctgacgtatgagcaggggcgttcagagattcttgcatact

SEQ ID NO: 483633 - DNA, 75 bp, synthetic construct
  source 1..75: mol_type = other DNA
atgaccaaagaccatgcacaaggtgtatttatccgttttattgattttcgcggtgaactgttattacgtgcatcc

SEQ ID NO: 483634 - DNA, 75 bp, synthetic construct
  source 1..75: mol_type = other DNA
cggtgaactgttattacgcgcatccgctattgatggagtgactccggcgggtaaaaacggagccgccgaagccac

SEQ ID NO: 483635 - DNA, 75 bp, synthetic construct
  source 1..75: mol_type = other DNA
tcgtttgaaccgcatgttttcgtcggcgcagtattaccgttcctggtgggctttgccctggggaaccttgaccct

SEQ ID NO: 483636 - DNA, 75 bp, synthetic construct
  source 1..75: mol_type = other DNA
aaatcaacaacaacttgcagcgtgttcgtgaactgaccgttcaggccactaccggtactaactctgattctgacc

SEQ ID NO: 483637 - DNA, 75 bp, synthetic construct
  source 1..75: mol_type = other DNA
accgtaccgttcctatttctgaaagcctgtttgaaaagatcaaaaaacggggcgggaaactggtgtttccgacgc

SEQ ID NO: 483638 - DNA, 75 bp, synthetic construct
  source 1..75: mol_type = other DNA
gaaaaatttggctggcaattcttgccctcatggccgccggttgggtatcgaacattataaaacttgtttgctctg

SEQ ID NO: 483639 - DNA, 75 bp, synthetic construct
  source 1..75: mol_type = other DNA
atgcggaagttctggaatgtttctttttttggtgatggagaactgattgtgactgaagcaatttggctacttttg

SEQ ID NO: 483640 - DNA, 75 bp, synthetic construct
  source 1..75: mol_type = other DNA
ctacccgggccttcacgctgtatgtggaaacggccctggggcaaaccttctctgttgtggccacgcccgtcaaag

SEQ ID NO: 483641 - DNA, 75 bp, synthetic construct
  source 1..75: mol_type = other DNA
gatagcgcgattaccgaaacctttggtatcggtggtgcggcaatgatcgccgcccctggcgtaacgcgctttgtc

SEQ ID NO: 483642 - DNA, 75 bp, synthetic construct
  source 1..75: mol_type = other DNA
atgcgcccggaggggcgtaaaggcaaacgcattcgtaaaaaatttaaaacgaaatcggatgcagttttatatgag

SEQ ID NO: 483643 - DNA, 75 bp, synthetic construct
  source 1..75: mol_type = other DNA
atggaaaccagccatcgccatctgctgcacgcggaagaaggcacatggctgaatatcgacggtttccatatgggg

SEQ ID NO: 483644 - DNA, 75 bp, synthetic construct
  source 1..75: mol_type = other DNA
caactctggctcacagtacgcgtagtgcaaccgaacgcgaccgcatggtcagaagccgggcacatcagcgcctgg

SEQ ID NO: 483645 - DNA, 75 bp, synthetic construct
  source 1..75: mol_type = other DNA
gtgcgcagatcctgcaacaagcgggtacctctgttctggcgcaggctaaccagaccacgcagaacgtactgtctc

SEQ ID NO: 483646 - DNA, 75 bp, synthetic construct
  source 1..75: mol_type = other DNA
tgacagaaaaaggcacttgtagattcaattggtcaacgcaacagttatgtgaaaacatggggttgcggaggtttt

SEQ ID NO: 483647 - DNA, 75 bp, synthetic construct
  source 1..75: mol_type = other DNA
gcagagacagattaaaggcgaagtggaaaccattgcgctggaacaactggtcggtagagtatcggcaaatatgat

SEQ ID NO: 483648 - DNA, 75 bp, synthetic construct
  source 1..75: mol_type = other DNA
gatcgccagttctgcatgaacggtctggtctttgccgaccgcacgccgcatccggcgctgacggaagcaaaatac

SEQ ID NO: 483649 - DNA, 75 bp, synthetic construct
  source 1..75: mol_type = other DNA
tgtctcatgatgaactggcggaagctattggtgtttgcaagcaggatattgaagatattatctgtggtttgcgtc

SEQ ID NO: 483650 - DNA, 75 bp, synthetic construct
  source 1..75: mol_type = other DNA
cgatgtacaacatcaaggttggtgtctccagcaatgggcagtattacgccgcggggatggggatcggcgttgaga

SEQ ID NO: 483651 - DNA, 75 bp, synthetic construct
  source 1..75: mol_type = other DNA
agcgccagtatagaccgtgttgatacgacgattgccgatgccagccaggcggtagcacgcgcgctggtcactctg

SEQ ID NO: 483652 - DNA, 75 bp, synthetic construct
  source 1..75: mol_type = other DNA
gggcaatccaccgaagccggccggcttcattgcgtctgaaaacgtggtattcggcatcgagctgaattggggata

SEQ ID NO: 483653 - DNA, 75 bp, synthetic construct
  source 1..75: mol_type = other DNA
atggccggacctgaagccattatgcctctgacgcgggcggcggatggctcgctgggtgtacgcgcggtgggcagt

SEQ ID NO: 483654 - DNA, 75 bp, synthetic construct
  source 1..75: mol_type = other DNA
gcgcagcaggataacgctgaaccccagcgtctgttggtggtcgaaggctatatggacgtggtggcgctggcgcaa

SEQ ID NO: 483655 - DNA, 75 bp, synthetic construct
  source 1..75: mol_type = other DNA
ccgccagctttacggtctttatgaagcgcagcaggataacgctgaacccaatcgtctgcttgtggtcgaaggcta

SEQ ID NO: 483656 - DNA, 75 bp, synthetic construct
  source 1..75: mol_type = other DNA
cgacgacagtacaggcggtttcactattacggccgttcagcacgatccaaacaaatatcgttacatcgatgacgg

SEQ ID NO: 483657 - DNA, 75 bp, synthetic construct
  source 1..75: mol_type = other DNA
gccgataaaaaaacggtgacggtggctacggcattcagtcaggttcctgtggcgggcgctgtttgggcgatagac

SEQ ID NO: 483658 - DNA, 75 bp, synthetic construct
  source 1..75: mol_type = other DNA
attgctctccaatgccaaagacgggaccgtatcgtttggcgtggggctggacggttatatccctttgcccgctga

SEQ ID NO: 483659 - DNA, 75 bp, synthetic construct
  source 1..75: mol_type = other DNA
tagtgcagcaaaatatcagcgtcgaaacgatgcgcgtgagctgggaccaggcgcagaacgctatcgcctatgaag

SEQ ID NO: 483660 - DNA, 75 bp, synthetic construct
  source 1..75: mol_type = other DNA
caccgtattgatttacctcaggctggcagcacctggacaatccgactgcgtaagattaccactgacgcaaatagc

SEQ ID NO: 483661 - DNA, 75 bp, synthetic construct
  source 1..75: mol_type = other DNA
ctgctccgaagaatatcgtggtgactgagagcgatcatgtgtctcaggggctgactgtagcaagcctggacgtgt

SEQ ID NO: 483662 - DNA, 75 bp, synthetic construct
  source 1..75: mol_type = other DNA
gcggtggccaatgcaaaaggcggcgtgtatacctcggcaaacctgagtgcgtacagcaacagtattgtggatacg

SEQ ID NO: 483663 - DNA, 75 bp, synthetic construct
  source 1..75: mol_type = other DNA
gtggtgtcctcccaaaaaaactgctgaatgaaatgattgagcaggcgtaccaggactttgtggcaaatgagcaac

SEQ ID NO: 483664 - DNA, 75 bp, synthetic construct
  source 1..75: mol_type = other DNA
cgctgaatccccttaccccggagcagaaatactggttcgcctgcgccacgtttgataactgggaaggctggaatg

SEQ ID NO: 483665 - DNA, 75 bp, synthetic construct
  source 1..75: mol_type = other DNA
ttcccagtcgtcatcaaactatttgacccattctccctctctgctgttttctaggaaagggagtgaagagaaaca

SEQ ID NO: 483666 - DNA, 75 bp, synthetic construct
  source 1..75: mol_type = other DNA
tgctgatggttccgttccgctgaaactgtccggaaaaatccacaaacagcttgaaagtattgcccgaagtcgtgg

SEQ ID NO: 483667 - DNA, 75 bp, synthetic construct
  source 1..75: mol_type = other DNA
tgctgatggttccgtcccgctgaaactgtccggaaaaatccacaaacagcctgaaagtattgcccgaagtcgtgg

SEQ ID NO: 483668 - DNA, 75 bp, synthetic construct
  source 1..75: mol_type = other DNA
gtgctgatggttccgtcctgctgaaactgtccggaaaaatccacaaacagcttgaaagtattgcccgaagtcgtg

SEQ ID NO: 483669 - DNA, 75 bp, synthetic construct
  source 1..75: mol_type = other DNA
tatctcaatagcctgcgactggtcgaggcgaacggttatacgtcggtagctttcccagccattagtactggtgtt

SEQ ID NO: 483670 - DNA, 75 bp, synthetic construct
  source 1..75: mol_type = other DNA
actattggtgctgatttttttataccagataatcgtgagcatataataaacaataatatttttgtcattctctgt

SEQ ID NO: 483671 - DNA, 75 bp, synthetic construct
  source 1..75: mol_type = other DNA
cctgcgtatggaggttgtgcgcgtttctggtgccattgacagaatgggttctctgtcaacccgtacattccgaat

SEQ ID NO: 483672 - DNA, 75 bp, synthetic construct
  source 1..75: mol_type = other DNA
aaaccagagaggtgattgatcagggaacgctggatcacctggccgggcagttaactgcgtttggcgagtttattc

SEQ ID NO: 483673 - DNA, 75 bp, synthetic construct
  source 1..75: mol_type = other DNA
cattgccgacattcctctgtatgacgctgacgtacagcaggaagaaggttttccagcgacagttgaagctctggc

SEQ ID NO: 483674 - DNA, 75 bp, synthetic construct
  source 1..75: mol_type = other DNA
atgacaaccggcggccatccaccgcctgaatacgcgcagaagtctctatatgttcagcagcccagcttacgggta

SEQ ID NO: 483675 - DNA, 75 bp, synthetic construct
  source 1..75: mol_type = other DNA
ataatatggtgggtgctgtttcggttgcgttgcagcctctggtcagggttttgccggtgacggcagttgaatggg

SEQ ID NO: 483676 - DNA, 75 bp, synthetic construct
  source 1..75: mol_type = other DNA
ttcgggtgctgccggtgaaaggcgcatctgtctatggcaagccagttatcaccatgccgaaaacccgtaatcagc

SEQ ID NO: 483677 - DNA, 75 bp, synthetic construct
  source 1..75: mol_type = other DNA
atgaagtctcacgtggaggcgacgattcggaacgtgccatgcctgaaagacctttccccatggctgggtcgtaaa

SEQ ID NO: 483678 - DNA, 75 bp, synthetic construct
  source 1..75: mol_type = other DNA
aatggcaggaagtgtttcttcgctgaacgtttctgtggcgacaggcatttgcttatttgaagcggtacgccagcg

SEQ ID NO: 483679 - DNA, 75 bp, synthetic construct
  source 1..75: mol_type = other DNA
cgctttgcaggcgcgtttaacccagccgggtaaacgtaccgggaaaatctattatgtacaggtagaaggtattcc

SEQ ID NO: 483680 - DNA, 75 bp, synthetic construct
  source 1..75: mol_type = other DNA
gcgactgattcgttatgcgatgggtgattacactttggataatctcgctaacggcgaatggcgagaagcgacaga

SEQ ID NO: 483681 - DNA, 75 bp, synthetic construct
  source 1..75: mol_type = other DNA
tatgcgcgttttgccctgccggtggtatctgccagtgaagtcgcaccgtataccttccgttttccggataacccg

SEQ ID NO: 483682 - DNA, 75 bp, synthetic construct
  source 1..75: mol_type = other DNA
gtggagtcaacgttacgggatgtcccttgtctgaaaattctttccccttggctgggacgtaagcaccgggataac

SEQ ID NO: 483683 - DNA, 75 bp, synthetic construct
  source 1..75: mol_type = other DNA
aaatcggcgcgcgtaggttataccaaaatgctgttaggggtggaggcctattttattgagcataaatcccgtaac

SEQ ID NO: 483684 - DNA, 75 bp, synthetic construct
  source 1..75: mol_type = other DNA
gtgccatgcctgaaagacctttccccatggctggggcgtaaacatcgtgacaatactctcacgctgaaacgcttt

SEQ ID NO: 483685 - DNA, 75 bp, synthetic construct
  source 1..75: mol_type = other DNA
ccatcatgaacagcatggggaatgatcagatccggactgttaatctgattaaatctgcccgtgttggctatacaa

SEQ ID NO: 483686 - DNA, 75 bp, synthetic construct
  source 1..75: mol_type = other DNA
ttaaatgtttctatcctgtctgctgataagtgcgactggtcgctcaaccgtgaagtaagcaaagaccgtgcgata

SEQ ID NO: 483687 - DNA, 75 bp, synthetic construct
  source 1..75: mol_type = other DNA
attgcgacgagttgatcagcatcccaatggcaggaagtgtttcttcgctgaacgtttctgtggcgacagggattt

SEQ ID NO: 483688 - DNA, 75 bp, synthetic construct
  source 1..75: mol_type = other DNA
ccgtgaaaaatccgtggacgtggtctgctatgacgagctttcctcgttcgaaccggatgttgaaagagggctcgc

SEQ ID NO: 483689 - DNA, 75 bp, synthetic construct
  source 1..75: mol_type = other DNA
gcatcggatgttgcccgcctgcacgcacactatttgcagcttgcgtcgcagtttgtctcacaggaaaaaccgtaa

SEQ ID NO: 483690 - DNA, 75 bp, synthetic construct
  source 1..75: mol_type = other DNA
ctaacgtccattagtatgggtctctccagctataaaaccgcattgactggtgatactagctcagtgaatttctcc

SEQ ID NO: 483691 - DNA, 75 bp, synthetic construct
  source 1..75: mol_type = other DNA
tggaaattaatcaaatggggtattagactgtttgatttagccactcgagcactggactactttgaagggggtgat

SEQ ID NO: 483692 - DNA, 75 bp, synthetic construct
  source 1..75: mol_type = other DNA
ctttttccagcaggtggtgcgcggcgtcatcattgtggtggcggtgctggcaaatatcttgctgacccagcgtag

SEQ ID NO: 483693 - DNA, 75 bp, synthetic construct
  source 1..75: mol_type = other DNA
caaaggcacctgccagatcgaaaaagccgctaacgagtcggcacacttcatgcgtttttatgtgccctgtccgca

SEQ ID NO: 483694 - DNA, 75 bp, synthetic construct
  source 1..75: mol_type = other DNA
tgattttctggtgctggccagtaaacctgctgccgccagaacggtacagtccctgacacaggcaccggtcattct

SEQ ID NO: 483695 - DNA, 75 bp, synthetic construct
  source 1..75: mol_type = other DNA
cagctggcaaaccgccaatatctcgacgagaaaagcgacggtgccgtgcatcagggcattatcgcccgtgtgaag

SEQ ID NO: 483696 - DNA, 75 bp, synthetic construct
  source 1..75: mol_type = other DNA
gacggcgtgaccgatccgcataacctcggcgcgtgcttgcgtagcgcggatgccgcaggtgttcacgccgtgatc

SEQ ID NO: 483697 - DNA, 75 bp, synthetic construct
  source 1..75: mol_type = other DNA
atttagaatcagcactcaatgatttacgttctcagattcattcaatggatctaaaaaatagaacgagtgatagca

SEQ ID NO: 483698 - DNA, 75 bp, synthetic construct
  source 1..75: mol_type = other DNA
tccatagtttcacctgggacggtacgttaactgacggcacaaccgctccaaatggttcttataacgtggcgatta

SEQ ID NO: 483699 - DNA, 75 bp, synthetic construct
  source 1..75: mol_type = other DNA
gttgactgacggcagcactgcgccgaacggttcttacaatgtagcgattagcgccagtaacggtggtacacaact

SEQ ID NO: 483700 - DNA, 75 bp, synthetic construct
  source 1..75: mol_type = other DNA
gagtcgaggcttcgcaagtatgccattactatcagcccttgtgtgccgagagtttgcgcggcgtgaccgacttcc

SEQ ID NO: 483701 - DNA, 75 bp, synthetic construct
  source 1..75: mol_type = other DNA
ctgctgcagaagatttcatgaaatctcatgttgagccaacgatcagggatgttcctgcattgctggagctggcgc

SEQ ID NO: 483702 - DNA, 75 bp, synthetic construct
  source 1..75: mol_type = other DNA
gagttgttgctggaaaaagtctgccactatgatgcgcaggttcccctgcgggtggtttacctgaccgcagggatt

SEQ ID NO: 483703 - DNA, 75 bp, synthetic construct
  source 1..75: mol_type = other DNA
atgtccgggatgatcgcaatgcgggttcgtcatctcctccggcggtctggttcgcgtactcaccgaaccggcagg

SEQ ID NO: 483704 - DNA, 75 bp, synthetic construct
  source 1..75: mol_type = other DNA
cttgtctgaaaattctttccccttggctgggacgtaagcaccgggataacacgctgacattaaaaagattcacct

SEQ ID NO: 483705 - DNA, 75 bp, synthetic construct
  source 1..75: mol_type = other DNA
ccacctgggtacagatagtctatgactggctggatgcactgaaagatcccaacggcctgaaaacctttgtgaaca

SEQ ID NO: 483706 - DNA, 75 bp, synthetic construct
  source 1..75: mol_type = other DNA
gggcttgcttggacatcgtgagcggtctctgcttatatttggtgacgaaaaagcgctggactccttgccacctga

SEQ ID NO: 483707 - DNA, 75 bp, synthetic construct
  source 1..75: mol_type = other DNA
gaattcgacatgattggcctagacattaccttcccgaaagagggaatagcgccaggggtgtgccgtcgctcatct

SEQ ID NO: 483708 - DNA, 75 bp, synthetic construct
  source 1..75: mol_type = other DNA
ggcgtccatgaggtgcgtaacttctggtacaccgtagtcgaatgtcatgcgatttatgaccccggattccgtggc

SEQ ID NO: 483709 - DNA, 75 bp, synthetic construct
  source 1..75: mol_type = other DNA
cggcgcgcgagatgaaagagcgtgtggcgcagacgctggggcgcaaagaggcgcgagggttgatgatctccacct

SEQ ID NO: 483710 - DNA, 75 bp, synthetic construct
  source 1..75: mol_type = other DNA
ttgctggctgctgtcaaccagacgctggtgagttttgaccattctctgactgacggcgacgaagtggctttcttc

SEQ ID NO: 483711 - DNA, 75 bp, synthetic construct
  source 1..75: mol_type = other DNA
gtcgctcatctcattgagttgggatacgccgatcagcttgttctcagccacgatgtcttccttaaacaaatgtag

SEQ ID NO: 483712 - DNA, 75 bp, synthetic construct
  source 1..75: mol_type = other DNA
accttgacgcgctggcgaggtcacgaagagatgagcaggatgaggatgatatgagcatggaagagatcgcggctg

SEQ ID NO: 483713 - DNA, 75 bp, synthetic construct
  source 1..75: mol_type = other DNA
gggataaattaccggatttactcgatgaatatatcagagcaacaactgaataatatgatggctgccgtttcggtt

SEQ ID NO: 483714 - DNA, 75 bp, synthetic construct
  source 1..75: mol_type = other DNA
ttctgtctatggcaagccagtgatcaccatgccgaaaactcgcaatcagcggggtgtttatctgtgtgaggtggg

SEQ ID NO: 483715 - DNA, 75 bp, synthetic construct
  source 1..75: mol_type = other DNA
tgggcggggctgccgctaaaaactaccgtgaaaaatccgtggacgtggtctgctatgacgaactttcctcgttcg

SEQ ID NO: 483716 - DNA, 75 bp, synthetic construct
  source 1..75: mol_type = other DNA
gccaaagtttgttttacgagaaatgaagactcttctggcgatccaccagcgtctaccccaagaaggtgtggcttc

SEQ ID NO: 483717 - DNA, 75 bp, synthetic construct
  source 1..75: mol_type = other DNA
aacgaagcgctggactgcctggtgtatgcctacgcggcattacgtgtgtccgtgcaacgctggcagcttgatctg

SEQ ID NO: 483718 - DNA, 75 bp, synthetic construct
  source 1..75: mol_type = other DNA
aaaatcggggcggttcaaaatggcaaacttgatagcgcactgaataagcagattgagaatgctttctggaagtgg

SEQ ID NO: 483719 - DNA, 75 bp, synthetic construct
  source 1..75: mol_type = other DNA
atgttgcgggcttaaaaatcgctcatcagttgcgttgtaagttgcttaatgattacggtatcagcttgcatttag

SEQ ID NO: 483720 - DNA, 75 bp, synthetic construct
  source 1..75: mol_type = other DNA
gttttcagcatgtcgcagacgccgatgttgctgcacttcgtaaccaacttggcctgccggataacaaaaaaatca

SEQ ID NO: 483721 - DNA, 75 bp, synthetic construct
  source 1..75: mol_type = other DNA
gcgctggtggcggggattcgtcaggcgctcctgctgcccaaacacaacacggtggcacgtgaatatgccgaacgc

SEQ ID NO: 483722 - DNA, 75 bp, synthetic construct
  source 1..75: mol_type = other DNA
cgttcctacgaagacaacatcagaaatagcctggcatccctggttggcccgacgtattacaggacaacttaccca

SEQ ID NO: 483723 - DNA, 75 bp, synthetic construct
  source 1..75: mol_type = other DNA
cagagatcaaaaaaacacggtgttttccgggtgctgccggtaaaaggcgcatctgtctatggcaagccggtgatc

SEQ ID NO: 483724 - DNA, 75 bp, synthetic construct
  source 1..75: mol_type = other DNA
ggcctgccggataacaaaaaatcattctttactccggcaatattggtgaaaagcaggggctggaaagcgttattg

SEQ ID NO: 483725 - DNA, 75 bp, synthetic construct
  source 1..75: mol_type = other DNA
actcgtccggacaacggcctgctgagcctgggtgtttcctaccgtttcggtcagggcgaagcagctccagtagtt

SEQ ID NO: 483726 - DNA, 75 bp, synthetic construct
  source 1..75: mol_type = other DNA
aaaaccacgacaccggcgtttctccggtcttcgctggcggtgttgagtatgcgatcactcctgaaatcgctaccc

SEQ ID NO: 483727 - DNA, 75 bp, synthetic construct
  source 1..75: mol_type = other DNA
aaaccttactatgcactggatatgtcaacactggaagaaattgccggcgcagataatgggttgctcccctgtgtt

SEQ ID NO: 483728 - DNA, 75 bp, synthetic construct
  source 1..75: mol_type = other DNA
atttcaacgatctgcgccctgccctgcgcgatacgccaaaaccggcatatcaacctgcgcctgaatctgaaggat

SEQ ID NO: 483729 - DNA, 75 bp, synthetic construct
  source 1..75: mol_type = other DNA
acctgatctccaaaggtatcccggcagacaagatctccgcacgtggtatgggcgaatccaacccggttactggca

SEQ ID NO: 483730 - DNA, 75 bp, synthetic construct
  source 1..75: mol_type = other DNA
acaaaggcgacaacatcaatggcgcatataaagctcagggcgttcaactgaccgccaaactgggttacccaatca

SEQ ID NO: 483731 - DNA, 75 bp, synthetic construct
  source 1..75: mol_type = other DNA
atgatggcgaatatctggtggtcattaccgctgacattgattgtcttttttgccgcccgcaaactggcggcacgg

SEQ ID NO: 483732 - DNA, 75 bp, synthetic construct
  source 1..75: mol_type = other DNA
tgcgaagtggggacggacaccgcaaaagaaattctctatgcccgtatgaaagccgatcccacgcctgcggatgaa

SEQ ID NO: 483733 - DNA, 75 bp, synthetic construct
  source 1..75: mol_type = other DNA
ctgagcttgaccagagcaacgggcggtggatctgtgaaaacacgggcatgtggacccgtgacggtctgacgtttt

SEQ ID NO: 483734 - DNA, 75 bp, synthetic construct
  source 1..75: mol_type = other DNA
gtttttgtcaggataatgccgaagtctatgccggtttacgggctctggtctttctggccagactggttaatgact

SEQ ID NO: 483735 - DNA, 75 bp, synthetic construct
  source 1..75: mol_type = other DNA
attgctgaactccctgagaatcagcgatggatggtcaccagtgaaggggctttttcttatctcgcacgcgatttg

SEQ ID NO: 483736 - DNA, 75 bp, synthetic construct
  source 1..75: mol_type = other DNA
ggaaatcgctgcatcaatattaccgaaatcggttaccacaccaattgcgatggccgttggtggcagtattggcgg

SEQ ID NO: 483737 - DNA, 75 bp, synthetic construct
  source 1..75: mol_type = other DNA
ggaagacaatacagtgatacaaagcgtgatgccattaaccactgaaacagcgctggatatcctcattgcgtggct

SEQ ID NO: 483738 - DNA, 75 bp, synthetic construct
  source 1..75: mol_type = other DNA
cctggaagtgaagtaagaaaggatttggttgagcgattcgaacgtggagagcgctttgttacagcttcacactgt

SEQ ID NO: 483739 - DNA, 75 bp, synthetic construct
  source 1..75: mol_type = other DNA
aactttctgcaaatgtaagcggacagcattataaagaggaagatgtatctggtcgagatatgaccgtttcagtca

SEQ ID NO: 483740 - DNA, 75 bp, synthetic construct
  source 1..75: mol_type = other DNA
tctgacaatgaagatttttctgcagatttaatttttgatcatcttgatatgttatttgacaacatcccatttaaa

SEQ ID NO: 483741 - DNA, 75 bp, synthetic construct
  source 1..75: mol_type = other DNA
aaataagtatgtcgcaactgactcatatcaacgccgctggcgaagcgcacatggtggatgtctccgccaaagcgg

SEQ ID NO: 483742 - DNA, 75 bp, synthetic construct
  source 1..75: mol_type = other DNA
cagcacatggctgcgcagagcgatcgctgggcgctggcgctggaagatggcaaattactggctgccgtcaaccag

SEQ ID NO: 483743 - DNA, 75 bp, synthetic construct
  source 1..75: mol_type = other DNA
cgtgaagcgcgcgctgaagcttttgtcaccatgcgtagcgagacgctggcgatgatcatcgatggtcgccatcac

SEQ ID NO: 483744 - DNA, 75 bp, synthetic construct
  source 1..75: mol_type = other DNA
taatgccattgagcaaggccttcgggcagagcacggtgttgtcactgaagatgacattctcatggagctgaccaa

SEQ ID NO: 483745 - DNA, 75 bp, synthetic construct
  source 1..75: mol_type = other DNA
aaactggccctgacgctggaagccgacagcgttaacgtgcaggcgctgaacatggggcgaattgtcgttgacgtc

SEQ ID NO: 483746 - DNA, 75 bp, synthetic construct
  source 1..75: mol_type = other DNA
ccggacgttaatttgtcccgcctctggcgcattgccaatttagccaataaacaagattcccggttactgtccgat

SEQ ID NO: 483747 - DNA, 75 bp, synthetic construct
  source 1..75: mol_type = other DNA
cccgtcaaatcacagtcttcattcagagtagcaattatgcgcaaggtgaaaaccgctacagcaattgtggtatcg

SEQ ID NO: 483748 - DNA, 75 bp, synthetic construct
  source 1..75: mol_type = other DNA
ccgcgacatggtcaatgcggcaggcgccatattgacccggatctacaaacccggcatagattatgcgaaggcggg

SEQ ID NO: 483749 - DNA, 75 bp, synthetic construct
  source 1..75: mol_type = other DNA
gagcctacgcggcatttgaatgcgccatggaccccaaacttgccaaatccccgctcatcatcgcgagcaacaacg

SEQ ID NO: 483750 - DNA, 75 bp, synthetic construct
  source 1..75: mol_type = other DNA
gtgtccgtgcaacgctggcagcttgatctggctgtactggcaaaatccgggaagaagagacgacccggccaaccc

SEQ ID NO: 483751 - DNA, 75 bp, synthetic construct
  source 1..75: mol_type = other DNA
acaaaaccgtgcgcggcttaacccgcggtctaatgttattaaatatgttaaataaacttgacggcggtgccagcg

SEQ ID NO: 483752 - DNA, 75 bp, synthetic construct
  source 1..75: mol_type = other DNA
taggaagggtgttttcggctacaatcaaaacatgcccgaatgtgcaccaggtgcacaacgttgttttaactatag

SEQ ID NO: 483753 - DNA, 75 bp, synthetic construct
  source 1..75: mol_type = other DNA
tctgagcttgaccagagtaacgggcgctggatctgtgaaaacacgggtatgtggacccgtgacggcctgatgttt

SEQ ID NO: 483754 - DNA, 75 bp, synthetic construct
  source 1..75: mol_type = other DNA
gagacggcggacagcaccacggaccagctgcagaacagaacgctgtggtcgtcatacaccgaaatcatcgatgtg

SEQ ID NO: 483755 - DNA, 75 bp, synthetic construct
  source 1..75: mol_type = other DNA
ctaactctacaggagcgataacgactggtctccttgcgctaaaaattcctgtacccctgacgacagttcagtggg

SEQ ID NO: 483756 - DNA, 75 bp, synthetic construct
  source 1..75: mol_type = other DNA
ccatcaatgcgctgttatgtgctggtgtcgttgttacgttgatgttctatcgccgcagagactcacgtcatcgta

SEQ ID NO: 483757 - DNA, 75 bp, synthetic construct
  source 1..75: mol_type = other DNA
ccggtgatcaccatgccaaaaacccgcaatcagcggggcgtgtatctgtgtgaagtgggaacggataccgcaaaa

SEQ ID NO: 483758 - DNA, 75 bp, synthetic construct
  source 1..75: mol_type = other DNA
atgttgctggggggggtcgggtattttattgagcataaatcccgaaacagtctgctttttcagcccacggattct

SEQ ID NO: 483759 - DNA, 75 bp, synthetic construct
  source 1..75: mol_type = other DNA
gtatgcctacgcggcattacgtgtgtccgtgcaacgctggcagcttgatctggctgtactggcaaaatcccggga

SEQ ID NO: 483760 - DNA, 75 bp, synthetic construct
  source 1..75: mol_type = other DNA
atctggacggcgtacagcccgttcaccacctgggtacagattgtttatgactggctggatgcactgaaggatccg

SEQ ID NO: 483761 - DNA, 75 bp, synthetic construct
  source 1..75: mol_type = other DNA
taaaggctcctgtcagattgagaaagccgcgaatgaatctgcgcatttcatgcggttttatgtcccttgccctca

SEQ ID NO: 483762 - DNA, 75 bp, synthetic construct
  source 1..75: mol_type = other DNA
aagatgcgtctgctgtgggataacaaaaagcggcgtaacgaagcgctggactgcctggtgtatgcctacgcggca

SEQ ID NO: 483763 - DNA, 75 bp, synthetic construct
  source 1..75: mol_type = other DNA
cgtggccaacattattttcctgtccgtgctggtcgccgtcagaggcaatgtggcacgtctggttgaccatctgag

SEQ ID NO: 483764 - DNA, 75 bp, synthetic construct
  source 1..75: mol_type = other DNA
aacggcccggtaccgacgtatatcgaccttcttaaggttactaccagtacgctggtacagggaattaaagccggg

SEQ ID NO: 483765 - DNA, 75 bp, synthetic construct
  source 1..75: mol_type = other DNA
cggggccaatatcatctttctttccgtgctggtggccgttaaaggcaacgtggcgcgcctggttgatcatctgag

SEQ ID NO: 483766 - DNA, 75 bp, synthetic construct
  source 1..75: mol_type = other DNA
gtgccatgtctgaaagacctttttccatggctggggcgtaaacatcgtgacaataccctcacgctgaaacgcttt

SEQ ID NO: 483767 - DNA, 75 bp, synthetic construct
  source 1..75: mol_type = other DNA
accttctgaaggttactaccagtacgctggtacagggaattaaagcggaaaaagggagaaataatgatgcaatct

SEQ ID NO: 483768 - DNA, 75 bp, synthetic construct
  source 1..75: mol_type = other DNA
cccctgcgtaagcagattgctgaactccctgagaataaaagatggatggtcaccagtgaaggggctttttcttat

SEQ ID NO: 483769 - DNA, 75 bp, synthetic construct
  source 1..75: mol_type = other DNA
ccgggaagaagagacgacccggccaaccctgaaagaactggcagcgaagctgtccggaggagtgaatggttacag

SEQ ID NO: 483770 - DNA, 75 bp, synthetic construct
  source 1..75: mol_type = other DNA
tgcctggtgtatgcctacgcggcattacgtgtgtccgtgcaacgctggcagcttgatctggctgtactggcaaaa

SEQ ID NO: 483771 - DNA, 75 bp, synthetic construct
  source 1..75: mol_type = other DNA
gaagtgggaaaaaggaaagatgcgtctgctgtgggataacaaaaagcggcgtaacgaagcgctggactgcctggt

SEQ ID NO: 483772 - DNA, 75 bp, synthetic construct
  source 1..75: mol_type = other DNA
cagcgttacctgatacttctgattcagtaaaagagtgtgtgaatctcgggcagtggatgctgttcaaatcttatg

SEQ ID NO: 483773 - DNA, 75 bp, synthetic construct
  source 1..75: mol_type = other DNA
catggttacaatggctttttgattaataaaggaaatgtagctgaactcgaagaaacaataattaaaataattgaa

SEQ ID NO: 483774 - DNA, 75 bp, synthetic construct
  source 1..75: mol_type = other DNA
gccaccggacagtgtgacctttcacatctggacggcgtacagcccgttcaccacctgggttcagattgtcaaaga

SEQ ID NO: 483775 - DNA, 75 bp, synthetic construct
  source 1..75: mol_type = other DNA
atatgaagatatccgggctgccggaaatgatgaacgccgtgaactgacacatgccgtaatgcgggagctggatgc

SEQ ID NO: 483776 - DNA, 75 bp, synthetic construct
  source 1..75: mol_type = other DNA
gtcgatctgtgggcggcaatcgccaaagaactgaagctggattacgagctgaaaccgatggatttcagcggtatc

SEQ ID NO: 483777 - DNA, 75 bp, synthetic construct
  source 1..75: mol_type = other DNA
acggggcttggttcacagttacagggtataacattttgtaaattaattgataaaagcactccattacttattaat

SEQ ID NO: 483778 - DNA, 75 bp, synthetic construct
  source 1..75: mol_type = other DNA
agtgcgccggttaaggggacgtctgctgcgggcggtgcatccggtaccagtacattccgcgggaatgtgaatatg

SEQ ID NO: 483779 - DNA, 75 bp, synthetic construct
  source 1..75: mol_type = other DNA
gggtgcttacgcctggaagacgggcgggacggtgggaagtccgctcatttctgactggagtctggtgtcaaaccc

SEQ ID NO: 483780 - DNA, 75 bp, synthetic construct
  source 1..75: mol_type = other DNA
gaacggggctgtcggtgggcggctggacaaggcgccgatgatggatttcagtgttgtggaccagatactgggggt

SEQ ID NO: 483781 - DNA, 75 bp, synthetic construct
  source 1..75: mol_type = other DNA
gtatcaatgcgaatcagaacagagtttataaccatgtgtcagaagaagatatgttagataaaatcaaagctatta

SEQ ID NO: 483782 - DNA, 75 bp, synthetic construct
  source 1..75: mol_type = other DNA
gattactttccttatcacaaaatgcaagagcacttgctcactggtgcgaaaagtacccggataaattttaccgac

SEQ ID NO: 483783 - DNA, 75 bp, synthetic construct
  source 1..75: mol_type = other DNA
taataagctcaatgaactaggttacatcatctgtgaaaactcatgggatgcagatggttttggaattgaaatacc

SEQ ID NO: 483784 - DNA, 75 bp, synthetic construct
  source 1..75: mol_type = other DNA
acatatgggctttaaactttcaggacgttccgagcgggacaatcaaggcagaccctaccctctattacatcttta

SEQ ID NO: 483785 - DNA, 75 bp, synthetic construct
  source 1..75: mol_type = other DNA
catctgaagcaccagaaattatccaaatttggaaaaattccgttgatgccacacacgattttcttacagcccatg

SEQ ID NO: 483786 - DNA, 75 bp, synthetic construct
  source 1..75: mol_type = other DNA
accaaccgctaggatttatgtttttgcataagggccatctggaggcactttttgtagcaggctctgctcgcggac

SEQ ID NO: 483787 - DNA, 75 bp, synthetic construct
  source 1..75: mol_type = other DNA
ccatcattttgccaccactcggcgtgctgctggggaaaggatttggttgggcattcattattaatattttgctga

SEQ ID NO: 483788 - DNA, 75 bp, synthetic construct
  source 1..75: mol_type = other DNA
gcagacgaaaaacatgtggtcactggcggtgtacacaggtgttcgtcacggagaactggtttccctggcatggga

SEQ ID NO: 483789 - DNA, 75 bp, synthetic construct
  source 1..75: mol_type = other DNA
tactacatgacgacaattgcaggaatgtttcaatttgcggctgataacggctatatcgtgtcaaacccatttaac

SEQ ID NO: 483790 - DNA, 75 bp, synthetic construct
  source 1..75: mol_type = other DNA
cgttgattgcgctgtatgagcaaaaaatctttactcagggcgtgatcctgaacatcttcaccttcgaccagtggg

SEQ ID NO: 483791 - DNA, 75 bp, synthetic construct
  source 1..75: mol_type = other DNA
atcaaggttcaactacgtgaatatgggcgttcagtgaatcatgaatgtactttcgtatttaacccccaggtggtt

SEQ ID NO: 483792 - DNA, 75 bp, synthetic construct
  source 1..75: mol_type = other DNA
gcagacgaaaaacctgtggtcattagcagtgtacacaggaatgcgtcacggggaactggtctccctggcctggga

SEQ ID NO: 483793 - DNA, 75 bp, synthetic construct
  source 1..75: mol_type = other DNA
gctgctgaaagtggttatgtgaaggtgagccctttcaccgggatcgcccttctcaagcgttcgcgttgcgagcct

SEQ ID NO: 483794 - DNA, 75 bp, synthetic construct
  source 1..75: mol_type = other DNA
ttgaaggggaccgcattcgctggggataccggggaggcacgcttgatatcaacggaaatgacatggccttcaacc

SEQ ID NO: 483795 - DNA, 75 bp, synthetic construct
  source 1..75: mol_type = other DNA
ctgcgggcggtgcatccggtaccagtacattcagcgggaatgtgaatatgcgtcattcttccctgacggtccgcg

SEQ ID NO: 483796 - DNA, 75 bp, synthetic construct
  source 1..75: mol_type = other DNA
gagcgttctgacgggcagaaggcgctgaatatccctctggtgacagcgccggccggtaccggcgcggatgtgttc

SEQ ID NO: 483797 - DNA, 75 bp, synthetic construct
  source 1..75: mol_type = other DNA
tcacactgacgcagtttaccgcagcctgatagctgcacaggccggactgaccatcgatcgcatcttctttttaca

SEQ ID NO: 483798 - DNA, 75 bp, synthetic construct
  source 1..75: mol_type = other DNA
gtggacgtaagacaaagtatccatagcgcgcacgcgaaaacactggatacccaagggctgcgcaatgaatttttg

SEQ ID NO: 483799 - DNA, 75 bp, synthetic construct
  source 1..75: mol_type = other DNA
atgccgataactaaaacggtttccgttggcggggaagttggtaaacaactcggcgtaagctatttccttgaacgt

SEQ ID NO: 483800 - DNA, 75 bp, synthetic construct
  source 1..75: mol_type = other DNA
ctggggtaaaaaagctcctcgaagaactccgctcggcggaacggttcaatgcaaccattgaacagctttttgaac

SEQ ID NO: 483801 - DNA, 75 bp, synthetic construct
  source 1..75: mol_type = other DNA
accggacacggtgcattttctgtggggtacacacaggtgcacccggacggtacgccggggctttccggtaccggc

SEQ ID NO: 483802 - DNA, 75 bp, synthetic construct
  source 1..75: mol_type = other DNA
tttatcgattactcgagaagttccttctaagtgtgtacatatatttcatgatgaaggtgaaggcttagaaatact

SEQ ID NO: 483803 - DNA, 75 bp, synthetic construct
  source 1..75: mol_type = other DNA
atggaccgttgccgggcgggtgaaacatggcctccggaccttgctgagtttgtggcgctgatttcggagagtggg

SEQ ID NO: 483804 - DNA, 75 bp, synthetic construct
  source 1..75: mol_type = other DNA
taactatggcctgagcgtactgtttgatattccggattcaatggcggcgaaagcggcgctgatcgcgctgtcggt

SEQ ID NO: 483805 - DNA, 75 bp, synthetic construct
  source 1..75: mol_type = other DNA
gaatgccgggattcagttcagtcccgtagagacggtggttattgaccttgcttatgaaggttccggcagtggcga

SEQ ID NO: 483806 - DNA, 75 bp, synthetic construct
  source 1..75: mol_type = other DNA
aaagggattaatgtgaaataccgttatgagttcacggatcacctgggcggcattgtcgcgctgagttatgcatcg

SEQ ID NO: 483807 - DNA, 75 bp, synthetic construct
  source 1..75: mol_type = other DNA
tggaagctgtgggagcttatgggggaggtgtattcgaaccgctggactcagaagaacggggccgcaccttcgaag

SEQ ID NO: 483808 - DNA, 75 bp, synthetic construct
  source 1..75: mol_type = other DNA
atccagaagaacggggccgcaccttcgaagctctggattgcacagattggcgcgatgactgagcagcaaatccgg

SEQ ID NO: 483809 - DNA, 75 bp, synthetic construct
  source 1..75: mol_type = other DNA
gcgttccgccagtccggcgacaactggcggcccccaaacgcccgtcggggccaacgccaattgagttgctgaaac

SEQ ID NO: 483810 - DNA, 75 bp, synthetic construct
  source 1..75: mol_type = other DNA
ttttattacaattgcgcacccgcgcatacgacgtatcccaccaaaaaagtcacaccggacgaagtatctccagtc

SEQ ID NO: 483811 - DNA, 75 bp, synthetic construct
  source 1..75: mol_type = other DNA
gacctggctgagtttgtggcactgatttcgaaaagcggagccaatccattcggtctgacggtggatgctgtgatg

SEQ ID NO: 483812 - DNA, 75 bp, synthetic construct
  source 1..75: mol_type = other DNA
gtgctgtatcacatttgcctcgagatgcgttcaaaggggattgaacgccagatgaccgaaggggagttaaaacgg

SEQ ID NO: 483813 - DNA, 75 bp, synthetic construct
  source 1..75: mol_type = other DNA
ctcgatcagtacgagcggcacctaaactttatccatctccatcgtgaagcgccgggtaatagcgtaatgttcccg

SEQ ID NO: 483814 - DNA, 75 bp, synthetic construct
  source 1..75: mol_type = other DNA
tgacggttacgctttctggtgttccgatttatgacactacaaacccgcagtacaactctgtaagtcgtcaggtag

SEQ ID NO: 483815 - DNA, 75 bp, synthetic construct
  source 1..75: mol_type = other DNA
tcgcgccggttcgccagcgaatcgttaccgaccttgaaacagagcttgctcacttcatgatgaataacggtgcgt

SEQ ID NO: 483816 - DNA, 75 bp, synthetic construct
  source 1..75: mol_type = other DNA
tacaactctgtaagtcgtcaggtagcggaaggcgatgccgtatctgtagtaggcactgctagccagacaatgaag

SEQ ID NO: 483817 - DNA, 75 bp, synthetic construct
  source 1..75: mol_type = other DNA
attgccgccgggacttatagtgctcatcagcaacaggttggtactcttgatgtttcattaactggttgcagcagt

SEQ ID NO: 483818 - DNA, 75 bp, synthetic construct
  source 1..75: mol_type = other DNA
gcgacgagagcagatcattcaacgcctgcgccagcaaggaagtgtgcaagttaatgatctatcggcgttgtatgg

SEQ ID NO: 483819 - DNA, 75 bp, synthetic construct
  source 1..75: mol_type = other DNA
cttttttatgtatggtcggcgggattgctaatgcggctacattgggtaacaaaacagctgtcaatgctgatttta

SEQ ID NO: 483820 - DNA, 75 bp, synthetic construct
  source 1..75: mol_type = other DNA
gattgccgattgagggaaaagagattgtattgtcaacaggaatggccacaattgaagaaatcaaagcaagtgtaa

SEQ ID NO: 483821 - DNA, 75 bp, synthetic construct
  source 1..75: mol_type = other DNA
tgttacccggcaatggaagaagtggcgcaggagctgcggttgcgcggcgcgtacgtggagctaaaaagcctgccg

SEQ ID NO: 483822 - DNA, 75 bp, synthetic construct
  source 1..75: mol_type = other DNA
atgaataactggacgctcttcttctgggcatggtgggtggcatggtcgccgtttgtcggcttgttcctggcgcgt

SEQ ID NO: 483823 - DNA, 75 bp, synthetic construct
  source 1..75: mol_type = other DNA
gcacctaaagcagagtatcaaattaaaacgacaggaaatagtgagtcacagttggaaatgactcggaagttagag

SEQ ID NO: 483824 - DNA, 75 bp, synthetic construct
  source 1..75: mol_type = other DNA
acggaaaatattacgacaaagcgaccaggaaacggaattagtccaatgtactggtatgaggtcttaggtaaaata

SEQ ID NO: 483825 - DNA, 75 bp, synthetic construct
  source 1..75: mol_type = other DNA
tgcatcagttccgtatggaattacattcatcgaaaaacattttactctaaataaagattttgaagggcctgatca

SEQ ID NO: 483826 - DNA, 75 bp, synthetic construct
  source 1..75: mol_type = other DNA
gataagaaagtggttgctgacgcaatcgccaaattcaacatcgatacagataaagttaacccgcgtctggcgtaa

SEQ ID NO: 483827 - DNA, 75 bp, synthetic construct
  source 1..75: mol_type = other DNA
cggtctcgatctcgacgagctggcgaacgccgcactgccaaacattccccgcgatgttatccgcgaggcgaaaag

SEQ ID NO: 483828 - DNA, 75 bp, synthetic construct
  source 1..75: mol_type = other DNA
ggcgaacctatccccggcaggctgcggaaggccatcgctgaccctgacactattctgtttttccacaattcacat

SEQ ID NO: 483829 - DNA, 75 bp, synthetic construct
  source 1..75: mol_type = other DNA
aaagaacttgttttctactttaggataaaatcatctaatgatttaggaataaaagaccatatatcaaagtgctgg

SEQ ID NO: 483830 - DNA, 75 bp, synthetic construct
  source 1..75: mol_type = other DNA
acgtgttttgagttattttgattactctgtacatgatacggtagcaaatgccgaatatatagataagaatggttt

SEQ ID NO: 483831 - DNA, 75 bp, synthetic construct
  source 1..75: mol_type = other DNA
gcaacaggaaactggcgagagtagctggtttggtttctcatttatcataaaaaaagattctggtgtcattaggaa

SEQ ID NO: 483832 - DNA, 75 bp, synthetic construct
  source 1..75: mol_type = other DNA
ataaactatggcatcagtggtgctcttgttgtacatgaaaatggtcttacgttgagtcaaccattaggtgaaact

SEQ ID NO: 483833 - DNA, 75 bp, synthetic construct
  source 1..75: mol_type = other DNA
gaatgatgggcgctcatcatcgaatgccatgactgcaacgtatggttatagtcaggataaccacggacaggtaaa

SEQ ID NO: 483834 - DNA, 75 bp, synthetic construct
  source 1..75: mol_type = other DNA
gatttttataacttgcgttatagcaaacgtggaaaatttcaggctagtgtatcgcaacctttcggtaactacggg

SEQ ID NO: 483835 - DNA, 75 bp, synthetic construct
  source 1..75: mol_type = other DNA
tggaaacctattgcgaaatccctattacgaacggtacccatgcgtatgccgaaggcgttgaagtgatgcttttcg

SEQ ID NO: 483836 - DNA, 75 bp, synthetic construct
  source 1..75: mol_type = other DNA
gacaggaatatccactgactggcgtggatatgcagttgttccttatgcaacagaatatagacgtaataatatttc

SEQ ID NO: 483837 - DNA, 75 bp, synthetic construct
  source 1..75: mol_type = other DNA
ttgttgtacatgaaaatggtcttacgttgagtcaaccattaggtgaaactaatgttttgataaaagcgcctggag

SEQ ID NO: 483838 - DNA, 75 bp, synthetic construct
  source 1..75: mol_type = other DNA
ttagcgtaattgatgatgatctattaaacataataaattgccaaaacaaagccgcactggataacataactcatc

SEQ ID NO: 483839 - DNA, 75 bp, synthetic construct
  source 1..75: mol_type = other DNA
atgcaaacccaaccactatcctcaacgcaggaggctacatcacgcccgtcaccggtggagatctggcaacggctt

SEQ ID NO: 483840 - DNA, 75 bp, synthetic construct
  source 1..75: mol_type = other DNA
tcaaagaagatgcaaaggccgttgtgacggtgaaagccgggacggttatccagacagaacgcattaacgggcgag

SEQ ID NO: 483841 - DNA, 75 bp, synthetic construct
  source 1..75: mol_type = other DNA
tgtgcagcggctgcgtcagtccggaatgacaatcatcacccgggatgttgaggtctcagactcgctgaccggaac

SEQ ID NO: 483842 - DNA, 75 bp, synthetic construct
  source 1..75: mol_type = other DNA
tgaacggttacaacaactggggcaaatcccggatgtctcgctaaaacagctcaacgtgcgtgatcaacaggcgct

SEQ ID NO: 483843 - DNA, 75 bp, synthetic construct
  source 1..75: mol_type = other DNA
cgattgcgcagcgaagtgctgagtgtggcaaaggatgaaacggggtttacgcttgaactgaacggtatgaccgtc

SEQ ID NO: 483844 - DNA, 75 bp, synthetic construct
  source 1..75: mol_type = other DNA
aacgggaggtttcaccacgcccgtcacccgtggagatctggcagcgcctcctgagtcatctgctggatcgtcact

SEQ ID NO: 483845 - DNA, 75 bp, synthetic construct
  source 1..75: mol_type = other DNA
caacgcccacagtgcgcgtgactggttcctgaaagcggctggcgatgagaagcacgttgcgaaacactttgcggc

SEQ ID NO: 483846 - DNA, 75 bp, synthetic construct
  source 1..75: mol_type = other DNA
gaacatattgatgctggaatatcgctcagtgatgcagtgaactttctggtagaaaaatacgggcttgtccgtatc

SEQ ID NO: 483847 - DNA, 75 bp, synthetic construct
  source 1..75: mol_type = other DNA
gaacatatcgatgctggtatcacgctggctgatactgtgaattttctggtggagaaatacgaactggtgcgtatc

SEQ ID NO: 483848 - DNA, 75 bp, synthetic construct
  source 1..75: mol_type = other DNA
cggctgcgccagtccggaatgacaatcatcacccgggatgtcgaggtttcagacacgctgaccggaaccacacgg

SEQ ID NO: 483849 - DNA, 75 bp, synthetic construct
  source 1..75: mol_type = other DNA
gcatcactgaagagacgctggcgaaattacaagatctggcgaaagagtgcgatctggcgggcgcgattaagtcga

SEQ ID NO: 483850 - DNA, 75 bp, synthetic construct
  source 1..75: mol_type = other DNA
gaccagccgggattcagcgcaggagcttcatcgcagttaatcagcagcattgatattctccgggcccgccgggcg

SEQ ID NO: 483851 - DNA, 75 bp, synthetic construct
  source 1..75: mol_type = other DNA
tcgttttctttattccaaatcgttagttcagacaggaacagcattccatattattggctatcgttattcaaccca

SEQ ID NO: 483852 - DNA, 75 bp, synthetic construct
  source 1..75: mol_type = other DNA
atcaacatatggtcgacgcagaaggaaataccttcagcgtgccgccggatcggaccagcaagcaggtgcttccga

SEQ ID NO: 483853 - DNA, 75 bp, synthetic construct
  source 1..75: mol_type = other DNA
gcggggatccttttcctgctgaccgttttaacgacagtgttggtgagcggctgggtcgtgttgggctggatggaa

SEQ ID NO: 483854 - DNA, 75 bp, synthetic construct
  source 1..75: mol_type = other DNA
ataaaacggtattaagccagcggcgagagatattcaccgcaatgggaatcgactttcatctcaactgtgaaattg

SEQ ID NO: 483855 - DNA, 75 bp, synthetic construct
  source 1..75: mol_type = other DNA
ctcttctgcgatgactccgcgcagcagattgtcgacatgctggtggatgagtgcgagaagggcaatgtgaccttc

SEQ ID NO: 483856 - DNA, 75 bp, synthetic construct
  source 1..75: mol_type = other DNA
ggaagaaagagaataccctgagaattattgatgccacaaacggacagatgccggaagacagggaaagtttgttct

SEQ ID NO: 483857 - DNA, 75 bp, synthetic construct
  source 1..75: mol_type = other DNA
cgagtcatttggttataccgatgaagaaatagtctcttctgatatcattggcagccatttcgggtcggtgtttga

SEQ ID NO: 483858 - DNA, 75 bp, synthetic construct
  source 1..75: mol_type = other DNA
gagacgatgcctgcaatggtggccctgtaccgttacacaggaaacagccggaactggcaacggctggcccgcagg

SEQ ID NO: 483859 - DNA, 75 bp, synthetic construct
  source 1..75: mol_type = other DNA
tgggtaaaggatgccacagacaggatgaaaacatgagtttttcaccgcttttcgtgaaaatcttttgtagatctt

SEQ ID NO: 483860 - DNA, 75 bp, synthetic construct
  source 1..75: mol_type = other DNA
tgtggattaccagactggcccgattatctggggtgaacctggcacgaacggtcagcacgcgttctaccagctgat

SEQ ID NO: 483861 - DNA, 75 bp, synthetic construct
  source 1..75: mol_type = other DNA
cgcaaaacggcagcaggaaaagcgtcatcagacgctcagccatctcgcagtgcagcgttgctccccgttaactcg

SEQ ID NO: 483862 - DNA, 75 bp, synthetic construct
  source 1..75: mol_type = other DNA
aatctttactcagggcgtgatcctgaacatcttcaccttcgaccagtggggcgttgagctgggtaaacaactggc

SEQ ID NO: 483863 - DNA, 75 bp, synthetic construct
  source 1..75: mol_type = other DNA
taaacgccgctcattctatgagtattgggccggttctgccggtgtacaggcagagaacacagagccggtgattgt

SEQ ID NO: 483864 - DNA, 75 bp, synthetic construct
  source 1..75: mol_type = other DNA
tgcagctgttgaagcggatatcgccctgaccaagttgcatctggaaatggcaaccgttcgcgcgccgtttgatgg

SEQ ID NO: 483865 - DNA, 75 bp, synthetic construct
  source 1..75: mol_type = other DNA
gcttatcgttgtttttcaaacgataaagtctctgctaataaaattatggctcctcacaaagaaaatatcactgaa

SEQ ID NO: 483866 - DNA, 75 bp, synthetic construct
  source 1..75: mol_type = other DNA
actccagtaaggtgatgatcatatctttatttgatagtacggtaatgccagataaatacagacacaatggtaaat

SEQ ID NO: 483867 - DNA, 75 bp, synthetic construct
  source 1..75: mol_type = other DNA
cagtggatttatcagattattgccgccgagcgtaagaaaaacaaagagtgccgcgatatgaaacagggacaaata

SEQ ID NO: 483868 - DNA, 75 bp, synthetic construct
  source 1..75: mol_type = other DNA
gcctccaggccctaagactatatggtcaggattaacacaattaatgctgtcaattaatgccatagaaatagccca

SEQ ID NO: 483869 - DNA, 75 bp, synthetic construct
  source 1..75: mol_type = other DNA
aaattattctggtcaaaaaaagaaacagggcgtcggtcccagacgacatgaaaatgagcgagatttgtttattca

SEQ ID NO: 483870 - DNA, 75 bp, synthetic construct
  source 1..75: mol_type = other DNA
gttcctgcaaacgcatcttttcggcgacattttcgcccgcgataacctcgactggcaaagccgcgagctggcaac

SEQ ID NO: 483871 - DNA, 75 bp, synthetic construct
  source 1..75: mol_type = other DNA
aaccgttgacggcgattaccagaccttcaaatcgaaagatggtgcgtatgttcgcgaacactttttcggtaaata

SEQ ID NO: 483872 - DNA, 75 bp, synthetic construct
  source 1..75: mol_type = other DNA
gcggcgacctggtttacttccagggccacatctccccaggcgtttacgctcgtgctttcctggaaggtcgtctga

SEQ ID NO: 483873 - DNA, 75 bp, synthetic construct
  source 1..75: mol_type = other DNA
gcgtcgatgcactggtggcgcaacgtgcggcggtcgaagcggatattgccctgaccaaactgcatctggaaatgg

SEQ ID NO: 483874 - DNA, 75 bp, synthetic construct
  source 1..75: mol_type = other DNA
cagtggatttataagattattgccgatgaacgtaagaaagaaaaagagcagcgtgtaatacaacaaggtcaaatc

SEQ ID NO: 483875 - DNA, 75 bp, synthetic construct
  source 1..75: mol_type = other DNA
gcaatgtcgggcaaactatcaattaccggaaagtgagttggataatgccattagctatgcaaatctggagtgccg

SEQ ID NO: 483876 - DNA, 75 bp, synthetic construct
  source 1..75: mol_type = other DNA
agttcgtgctgagtttaatgcacatgtcggtattcgaggtttatttaatgttcactatcgtaataaaccagttcc

SEQ ID NO: 483877 - DNA, 75 bp, synthetic construct
  source 1..75: mol_type = other DNA
ttacaaaatggaatcatgtttatagcgcctgctttattatgtgcaatatcttcaatcatactggcagtaggaatg

SEQ ID NO: 483878 - DNA, 75 bp, synthetic construct
  source 1..75: mol_type = other DNA
ttcatcctgagcgctcgtctggggagcgctgaggcggttgccgggatctcctttgaactgcgtgttattgcctcg

SEQ ID NO: 483879 - DNA, 75 bp, synthetic construct
  source 1..75: mol_type = other DNA
ttttcccgcgttatcatcagtgggatgtggtcaacaaactgctggaggccgcgacggtcgaaggcaccggctata

SEQ ID NO: 483880 - DNA, 75 bp, synthetic construct
  source 1..75: mol_type = other DNA
ccaacctcgccctgctttctgatgtctcgatggcagtgctgggcggcagcctgaaacgtcgcgagcgcatctcgg

SEQ ID NO: 483881 - DNA, 75 bp, synthetic construct
  source 1..75: mol_type = other DNA
atgctcgggcagagcaacttcctggcgcgagcttaccagggcgcaccgattgccatcaccgttgaaggggccaac

SEQ ID NO: 483882 - DNA, 75 bp, synthetic construct
  source 1..75: mol_type = other DNA
acgacgagcttcaacgcgcctacgaatttttcaatcaacgcctgtttgaaagtgcgctgccgccttgccttatca

SEQ ID NO: 483883 - DNA, 75 bp, synthetic construct
  source 1..75: mol_type = other DNA
gcacgcgcctgcatgttaagccacagcgccgggacagacctggacaacctcgcgggcaatatgaacacaaaacgc

SEQ ID NO: 483884 - DNA, 75 bp, synthetic construct
  source 1..75: mol_type = other DNA
gcctgagtttgaggcaattctggctgacacaaaggccatgatgattgcggcttatcccgccgaacagcgtgaagc

SEQ ID NO: 483885 - DNA, 75 bp, synthetic construct
  source 1..75: mol_type = other DNA
ttttaaattcccctacagctccgaagggcgtacaaaaggatttgatcgaaattgaaagtgttagcttttttgaag

SEQ ID NO: 483886 - DNA, 75 bp, synthetic construct
  source 1..75: mol_type = other DNA
agagcgtctgatacccgttttaaaggaacttgagaaagatggcatagtgcagttatttaaaatggacggcgttga

SEQ ID NO: 483887 - DNA, 75 bp, synthetic construct
  source 1..75: mol_type = other DNA
gttgcatcactatgatgattttggttccagaattatggaacaagctacgcgaatcgcagcagtaatgcaaatgtt

SEQ ID NO: 483888 - DNA, 75 bp, synthetic construct
  source 1..75: mol_type = other DNA
ggtgacactgcacgaccacaatatctcgcagaaggtgaaggtgattgtggagcacttccgcaaacatgtgatgca

SEQ ID NO: 483889 - DNA, 75 bp, synthetic construct
  source 1..75: mol_type = other DNA
aacagcgccgtaattggcagaaggcagccagagaacgagcgatcgcccggcaacgggaaaagttggctgatccgg

SEQ ID NO: 483890 - DNA, 75 bp, synthetic construct
  source 1..75: mol_type = other DNA
atgccacttctcaatgctctgctcgatttcagtgaccattcgcttatgccaccgccctctgcacaattgtttgca

SEQ ID NO: 483891 - DNA, 75 bp, synthetic construct
  source 1..75: mol_type = other DNA
gagacatatttgtaacggatggacagtatgttaattctggcgatgatattatatctatagaattattgagtaatt

SEQ ID NO: 483892 - DNA, 75 bp, synthetic construct
  source 1..75: mol_type = other DNA
aaacagttcctgatggaatgctccggcgctcaagaaaatacagccgctgtaaacagagttatatctatgttcgga

SEQ ID NO: 483893 - DNA, 75 bp, synthetic construct
  source 1..75: mol_type = other DNA
cggatcggctggccaagctcgaagaacaacgagcgcgaatcaatgccgaaattcagcgggtgcgggcaagggaac

SEQ ID NO: 483894 - DNA, 75 bp, synthetic construct
  source 1..75: mol_type = other DNA
atcctgccgacatcattgctggtttgcggaaaaaaggaacatcaatggctgcggagtctcgcagaaatggtttaa

SEQ ID NO: 483895 - DNA, 75 bp, synthetic construct
  source 1..75: mol_type = other DNA
aaagcggcgctggagcgggtggcgaaggaaggagagtgtgccccggtggctgaggcgattctcagggagagtgaa

SEQ ID NO: 483896 - DNA, 75 bp, synthetic construct
  source 1..75: mol_type = other DNA
ttacgaaagatgctcgatatgaagccgaccgttcgacgataccactgacgctctggacacttgatgatctcgtcc

SEQ ID NO: 483897 - DNA, 75 bp, synthetic construct
  source 1..75: mol_type = other DNA
gtgctcttattgagaactacgagcaagtcgatatcgaaaccaaacttttggttcctctgaagaaaactttcctac

SEQ ID NO: 483898 - DNA, 75 bp, synthetic construct
  source 1..75: mol_type = other DNA
actgtttatatggttctcggcgttgttgtaatgttgttttgtttgtttacgttttttatgttctggactcttttc

SEQ ID NO: 483899 - DNA, 75 bp, synthetic construct
  source 1..75: mol_type = other DNA
ctgttaattgatggggaccggaatgaattgtcgaatctattagatactgcgtttgagattataatagatgattag

SEQ ID NO: 483900 - DNA, 75 bp, synthetic construct
  source 1..75: mol_type = other DNA
ggaaggcttatttcagtcggggcgcattatggtagaaagtttgcagcatattctttcggtgcaaacggggattca

SEQ ID NO: 483901 - DNA, 75 bp, synthetic construct
  source 1..75: mol_type = other DNA
gtgaagcaccggcgggaacagatgagcagccagcaaatccgtagctttatcggtggccgtcataaagacgatcgc

SEQ ID NO: 483902 - DNA, 75 bp, synthetic construct
  source 1..75: mol_type = other DNA
atccgttcggcacaaccgttaccgtaaagacgttacacgaaactttcgcgccgttgactcaatgggaagacaaat

SEQ ID NO: 483903 - DNA, 75 bp, synthetic construct
  source 1..75: mol_type = other DNA
ataccatgtatatcgacaaaccgatgcgcgggcataatctgatgcaggccattgcgcgcgtcaaccgcgtcttca

SEQ ID NO: 483904 - DNA, 75 bp, synthetic construct
  source 1..75: mol_type = other DNA
agtgcgtgaactgggcgatgatacgctgagaaagctggccatcgaagtgacattgaaattgcggcagtccaccac

SEQ ID NO: 483905 - DNA, 75 bp, synthetic construct
  source 1..75: mol_type = other DNA
ttcactcggtagtgtttggtggatttgcctcgcacagcgtggcggcgcggattgatgacgcttttggccacgact

SEQ ID NO: 483906 - DNA, 75 bp, synthetic construct
  source 1..75: mol_type = other DNA
taattaagaaaatagctggttatcaccagttccacgcggtgcgtgaggccgtgcaggcgacgatcgttgcttcga

SEQ ID NO: 483907 - DNA, 75 bp, synthetic construct
  source 1..75: mol_type = other DNA
gccaacagccgccgggtttgattacaccggctttgaagaggtgccccaacggtttttacttaaagccgcagatta

SEQ ID NO: 483908 - DNA, 75 bp, synthetic construct
  source 1..75: mol_type = other DNA
accaaccgccgccgggtttgattacaccggttttgcagaggtgccccaacggtttttactcaaagccgcagatta

SEQ ID NO: 483909 - DNA, 75 bp, synthetic construct
  source 1..75: mol_type = other DNA
ctacatttctgtaccgaagactgaagggcagaagctggcaggagcgctgaaagttcacgttgatgaatacgacgt

SEQ ID NO: 483910 - DNA, 75 bp, synthetic construct
  source 1..75: mol_type = other DNA
atcgtcgccaaaattgatactggcgcggaaaaacgtgcggcagaagagctgaacaagcgtgatgcttatgacgta

SEQ ID NO: 483911 - DNA, 75 bp, synthetic construct
  source 1..75: mol_type = other DNA
cgttacgtccacatctcaaaatcgatctggtccaggaaggtctacgtattcagatcatcgatagccagaatcgcc

SEQ ID NO: 483912 - DNA, 75 bp, synthetic construct
  source 1..75: mol_type = other DNA
cgctcactgggcgtgcagcgtggcgatcgggtgctggtgtatatgccgatgattgccgaagcgcatattaccctg

SEQ ID NO: 483913 - DNA, 75 bp, synthetic construct
  source 1..75: mol_type = other DNA
ggcccgccccgaaggcatgtcggacacccgctatcagttgctgaacgagacaggaaagacgctgggattccgggg

SEQ ID NO: 483914 - DNA, 75 bp, synthetic construct
  source 1..75: mol_type = other DNA
ggcgctggcgctgattgccgtctcttcggagacagaagaagagcgcacctttacctttcgccagttatatgacga

SEQ ID NO: 483915 - DNA, 75 bp, synthetic construct
  source 1..75: mol_type = other DNA
atacaacaaccgggctattgagacggcgcaggtgattgaagagctgatccagatggcgaaggattttcagtctgc

SEQ ID NO: 483916 - DNA, 75 bp, synthetic construct
  source 1..75: mol_type = other DNA
gaaggtgttggtggtatttgttggttaaatagctttgttgtaaaaaatgttctgccaatagatgatacaactggt

SEQ ID NO: 483917 - DNA, 75 bp, synthetic construct
  source 1..75: mol_type = other DNA
tgaatgctttgcacttaactagagataatctactagctgcctttacaacaagttctccgaactccgaagaacagg

SEQ ID NO: 483918 - DNA, 75 bp, synthetic construct
  source 1..75: mol_type = other DNA
gaagggaattgagcgtaacgagagcacaggcgattatgttgtaattttatggcgagcaattggaaatgggaatgg

SEQ ID NO: 483919 - DNA, 75 bp, synthetic construct
  source 1..75: mol_type = other DNA
tgaactggggttacgttcacaacttagcgcctcacgcagtcaggggttaaatgcgttaagcgaggcaattatcgc

SEQ ID NO: 483920 - DNA, 75 bp, synthetic construct
  source 1..75: mol_type = other DNA
tgagctgggattgcgtgcgcaacttagcgcctcacgcagccaggggttaaatgcgttaagcgaggcgattatcgc

SEQ ID NO: 483921 - DNA, 75 bp, synthetic construct
  source 1..75: mol_type = other DNA
gggatataccgtggctgaaaacggcaagatgcatttctttggcgacagcgaagggcgcattgtgcgcggcctgct

SEQ ID NO: 483922 - DNA, 75 bp, synthetic construct
  source 1..75: mol_type = other DNA
atgaccatgtacgcaacgcttgaagaagccattgacgctgcacgcgaagaatttcttgcagacaaccccggcatc

SEQ ID NO: 483923 - DNA, 75 bp, synthetic construct
  source 1..75: mol_type = other DNA
ataatcaaatcaaagattgttccagaagatatagtggatgataatttaatatgggatagctggggcgctaacgtt

SEQ ID NO: 483924 - DNA, 75 bp, synthetic construct
  source 1..75: mol_type = other DNA
aagtcaccttaaagttgagacaatcaactaccgttgactggcaggtacgagaaagcgttcgtgcaaggctgcgta

SEQ ID NO: 483925 - DNA, 75 bp, synthetic construct
  source 1..75: mol_type = other DNA
ctaccaatatcaaaatgctgtgggaacaagacggggaaactcgaacccatatctgtccgaacagttttaaacgtg

SEQ ID NO: 483926 - DNA, 75 bp, synthetic construct
  source 1..75: mol_type = other DNA
acgcggcagaaataataccacattattaagtgctataacgctggaagccgcattacaacaacgttgccgggaaaa

SEQ ID NO: 483927 - DNA, 75 bp, synthetic construct
  source 1..75: mol_type = other DNA
gaatacattacatgaatgggacgagggggaatttcagcttgagccaccgctggataccgaggaaggacgggcagc

SEQ ID NO: 483928 - DNA, 75 bp, synthetic construct
  source 1..75: mol_type = other DNA
cgtttacatcaataggtctctgatcgagactcagacgccaaatgagccaataggcgtactgaatccgaacaacct

SEQ ID NO: 483929 - DNA, 75 bp, synthetic construct
  source 1..75: mol_type = other DNA
actatctttcggttgatgatcttactgaaatcaatcgccttttaattgagcttcaaacaccagatgaacctgttg

SEQ ID NO: 483930 - DNA, 75 bp, synthetic construct
  source 1..75: mol_type = other DNA
ctgcgcagcaggggcagaatcaaccaacgttaccacgtcccgttatttcctcgcgtattgatgagccagcctacc

SEQ ID NO: 483931 - DNA, 75 bp, synthetic construct
  source 1..75: mol_type = other DNA
atgaatgggatgtagaagatattaattcagggcagtacgcagcatttgtatacttaatcacttttgatacaaatg

SEQ ID NO: 483932 - DNA, 75 bp, synthetic construct
  source 1..75: mol_type = other DNA
aatcgttattacagaccgcactgtgttggatggtcaattgcaggacacgatttaccagtttgaacatcaggatgg

SEQ ID NO: 483933 - DNA, 75 bp, synthetic construct
  source 1..75: mol_type = other DNA
tttattgttaaatggatacgaattaaccgcgccaggcgatgaagttgtggagatggctgaggggctggcctgtaa

SEQ ID NO: 483934 - DNA, 75 bp, synthetic construct
  source 1..75: mol_type = other DNA
tgagactgcaattcccgcaactgaatcttgacaacctcatcccgcttaatgaaacagcgaatggtgaaaacggtg

SEQ ID NO: 483935 - DNA, 75 bp, synthetic construct
  source 1..75: mol_type = other DNA
tagcggttatcaattgcagttggatgggccactgcgttggcacgtctggccgcagcttagtatcctctccgggcg

SEQ ID NO: 483936 - DNA, 75 bp, synthetic construct
  source 1..75: mol_type = other DNA
ccggttgcaccgcgcgacaataccttgccggatctgtcagacgatcgcggatggtcgtttgatatatccagtctt

SEQ ID NO: 483937 - DNA, 75 bp, synthetic construct
  source 1..75: mol_type = other DNA
gaaactgcgaacaataacaatggcgctgttcagcaagggcaaaatcagtcaatgttgccgcgtcctgtcatttct

SEQ ID NO: 483938 - DNA, 75 bp, synthetic construct
  source 1..75: mol_type = other DNA
ggaaagatgtcactggctggtgatttctccggtgctgacatagatgccgacgcattccgccacaactggcaagga

SEQ ID NO: 483939 - DNA, 75 bp, synthetic construct
  source 1..75: mol_type = other DNA
atgttgccacgcaaatgaccaacaagtcgggtttgctggaaattactcaactgcagggcaagcttaacggtggac

SEQ ID NO: 483940 - DNA, 75 bp, synthetic construct
  source 1..75: mol_type = other DNA
aaattgattcgcaattatgggattacataaatgctaattcaatttggtttgaatactataaccataatgaatcat

SEQ ID NO: 483941 - DNA, 75 bp, synthetic construct
  source 1..75: mol_type = other DNA
gaaatcacttgttgaatattggttgcaaataggaatgggggaacaacgattacttgaaaagaataagcatactcc

SEQ ID NO: 483942 - DNA, 75 bp, synthetic construct
  source 1..75: mol_type = other DNA
atgccgtgatggaagaataccgctgctggcgcaatgagtcctggcgatacgacggaagtgataaatatccgtggt

SEQ ID NO: 483943 - DNA, 75 bp, synthetic construct
  source 1..75: mol_type = other DNA
ttggtccgattgactacttcaatgttcaggacaagatggttggccgccaactagagaaagggcgattggatgaaa

SEQ ID NO: 483944 - DNA, 75 bp, synthetic construct
  source 1..75: mol_type = other DNA
atttcgaaaagcggagccaatccattcggtctgacggtggatgctgtgatggaggagtaccgccgctggcgcaat

SEQ ID NO: 483945 - DNA, 75 bp, synthetic construct
  source 1..75: mol_type = other DNA
ggcggcccccaaacgcccgtcggggccaacgccaattgagttgctgaaacaggaatatgaacgccggaaagcggc

SEQ ID NO: 483946 - DNA, 75 bp, synthetic construct
  source 1..75: mol_type = other DNA
gccaatccattcggtctgacggtggatgccgtgatggaggagtaccgccgctggcgcaacgagtcctggcgatac

SEQ ID NO: 483947 - DNA, 75 bp, synthetic construct
  source 1..75: mol_type = other DNA
gccgacggcctccggtaaaacggcgttagccattgagctgcgtaaaattttaccagtagagttgataagcgttga

SEQ ID NO: 483948 - DNA, 75 bp, synthetic construct
  source 1..75: mol_type = other DNA
tacgccagtggtgagaaaggttacagcaactgggagctttctgccgatcgggccaatgcatcccgccgcgaactg

SEQ ID NO: 483949 - DNA, 75 bp, synthetic construct
  source 1..75: mol_type = other DNA
ggcgttacgtccacatctcaaaatcgatctggtccaggaaggtctacgtattcagatcatcgatagccagaatcg

SEQ ID NO: 483950 - DNA, 75 bp, synthetic construct
  source 1..75: mol_type = other DNA
atgattttcaactatatgaaatcgctggatccgcaatctgtggtacgcgaaggtgagcaagtgcaggtaaaacgc

SEQ ID NO: 483951 - DNA, 75 bp, synthetic construct
  source 1..75: mol_type = other DNA
aattgtcccgaagcggtcgggcgcgaggcgcaggcaaaagcgctcgccggcgtccccgggatgaccgtcgaacag

SEQ ID NO: 483952 - DNA, 75 bp, synthetic construct
  source 1..75: mol_type = other DNA
actgaatcaccggaaactattcaggatgccggcagcaccacggcaacaggaacaaccgcaaacgtctcgatgctg

SEQ ID NO: 483953 - DNA, 75 bp, synthetic construct
  source 1..75: mol_type = other DNA
gatcattgttgatgaaggcattcctgcggatagtctggaaggcttgcgaaaggctggggttgaagtgattctggt

SEQ ID NO: 483954 - DNA, 75 bp, synthetic construct
  source 1..75: mol_type = other DNA
ggttacagtagtaatcgatgtgatcctcaaggagttcagttactgaatacacctaatattggtgataatgagtta

SEQ ID NO: 483955 - DNA, 75 bp, synthetic construct
  source 1..75: mol_type = other DNA
gttatcttgccagcagatagttcacctgaagagatcggcgctggtctcaggttggcgctgagtcgatgtattagt

SEQ ID NO: 483956 - DNA, 75 bp, synthetic construct
  source 1..75: mol_type = other DNA
gacaaaatcaactacaacattgatgaaccgagcagttccggtaaaacattatctattgcgtttgttaatcagcgc

SEQ ID NO: 483957 - DNA, 75 bp, synthetic construct
  source 1..75: mol_type = other DNA
aaggcagaccaggtattgcaggacaaactgcgcagcctgaaaaacgtcgatatcattctgaacgcgcaaaccact

SEQ ID NO: 483958 - DNA, 75 bp, synthetic construct
  source 1..75: mol_type = other DNA
gatggtgattttgaattcgaaacttattactcgctctcctgccacaactgcccggacgtggtacaagcgctgaac

SEQ ID NO: 483959 - DNA, 75 bp, synthetic construct
  source 1..75: mol_type = other DNA
tctgctggagcagattcgccatattgacggtgattttgaattcgaaacctattactcgctctcttgccacaactg

SEQ ID NO: 483960 - DNA, 75 bp, synthetic construct
  source 1..75: mol_type = other DNA
ggagaacgcggcgctgaacgagcgcgtgacgcgcttgagtcagcaggtggcgaacttgagcaggcaattacagcg

SEQ ID NO: 483961 - DNA, 75 bp, synthetic construct
  source 1..75: mol_type = other DNA
ggagaacgcggcactgaacgagcgcgttacggacttgagcaggcaggtgcagagtttgagcgagcagctgcgccg

SEQ ID NO: 483962 - DNA, 75 bp, synthetic construct
  source 1..75: mol_type = other DNA
gatgcagcagttaagcacccggcttgaacgcctgaatgaatcgcgcacacgggaaattcagaaaatgagggaact

SEQ ID NO: 483963 - DNA, 75 bp, synthetic construct
  source 1..75: mol_type = other DNA
agatgaaaaacaattagcagctctgaatacagaaattgataacattggtacaatgccgggtgtgaataacctgtc

SEQ ID NO: 483964 - DNA, 75 bp, synthetic construct
  source 1..75: mol_type = other DNA
actcgaagtgagtacctcaggaaattatcgcaaaaaagtgcgagttttctcactacgcggtgcccacctaatcgc

SEQ ID NO: 483965 - DNA, 75 bp, synthetic construct
  source 1..75: mol_type = other DNA
tgaagaatcttgataccaacaattttgtcgtaaagaacgctcagccaatgctggcaaaacttcgcggcgaggaat

SEQ ID NO: 483966 - DNA, 75 bp, synthetic construct
  source 1..75: mol_type = other DNA
tgttagcggcgatattcacaacatcgaactggccggtattttcgtccagatcggtctgctgccgaacactaactg

SEQ ID NO: 483967 - DNA, 75 bp, synthetic construct
  source 1..75: mol_type = other DNA
ggcgctctcgttattgtacctgttgacgctggcggtgagtatcgccatggtcgcccgtgcttttggcgcttatgc

SEQ ID NO: 483968 - DNA, 75 bp, synthetic construct
  source 1..75: mol_type = other DNA
ttatcttccagaacgaaatgattgctcagatgaaagcaaaaggctggatttgtggcaaaactgacggctatgatc

SEQ ID NO: 483969 - DNA, 75 bp, synthetic construct
  source 1..75: mol_type = other DNA
cgtgtcgtcaaagctggttcgtttgctaaacacactattctacgcaaaacctcagacagtcaggtcgatgtagat

SEQ ID NO: 483970 - DNA, 75 bp, synthetic construct
  source 1..75: mol_type = other DNA
ctgtcagtcgagccttcggtagaagataaaagcgcgctgaacacggcgatgaaacgcagcgttgcgaaagctgcc

SEQ ID NO: 483971 - DNA, 75 bp, synthetic construct
  source 1..75: mol_type = other DNA
gatctggcgtttctggaaaagcaggggatcgctgtgcgtgcctatggtggcgcgttgatctgcgatagcacgacg

SEQ ID NO: 483972 - DNA, 75 bp, synthetic construct
  source 1..75: mol_type = other DNA
taaaaacacgacaactgatggcctggttaaactgaatacacaatctcctcaggggagtagttcttcggcggctta

SEQ ID NO: 483973 - DNA, 75 bp, synthetic construct
  source 1..75: mol_type = other DNA
tgtttatgatgactacccataacatgccgctgaactaccttatcgaccagttgaaagaagatattggcgaagtga

SEQ ID NO: 483974 - DNA, 75 bp, synthetic construct
  source 1..75: mol_type = other DNA
gggtggtgattgacggcggtagcgcaccggaaaacgacatcgtcgctatccgtgaactgcgcccgacacgactgc

SEQ ID NO: 483975 - DNA, 75 bp, synthetic construct
  source 1..75: mol_type = other DNA
tgtttatgatgactacccataacatgccgttgaactaccttatcgaccagttgaaagaagacattggcgaagtga

SEQ ID NO: 483976 - DNA, 75 bp, synthetic construct
  source 1..75: mol_type = other DNA
tctgtgcaacaggatctacgatttgttgatagagatctacccaaccaaaaaagttgaggacttcgaaatccagcg

SEQ ID NO: 483977 - DNA, 75 bp, synthetic construct
  source 1..75: mol_type = other DNA
tgcttctgtagagaatgatttggctatctggaaagaactttttggcccacgtttaaaagtaagggaagaagcatg

SEQ ID NO: 483978 - DNA, 75 bp, synthetic construct
  source 1..75: mol_type = other DNA
gctactatgacagtaatgtcctgaggctcccctcagataaaagaactgaataccatgctcaggttgatcggctga

SEQ ID NO: 483979 - DNA, 75 bp, synthetic construct
  source 1..75: mol_type = other DNA
ctggaagagttacaggcgctggcgggcgtggcggtgccttcagtaataaccgccgaaaacggcactgtatttcgt

SEQ ID NO: 483980 - DNA, 75 bp, synthetic construct
  source 1..75: mol_type = other DNA
gttaatgcagatgatgaaacaacgattggtgagattcgaccttttgctaatgacctagacgctgtccggtttaac

SEQ ID NO: 483981 - DNA, 75 bp, synthetic construct
  source 1..75: mol_type = other DNA
tcggcgatcgctttacttatgaaaacaccgagctgaaaacgccgttttgtataagtggtcatggtatgcccggag

SEQ ID NO: 483982 - DNA, 75 bp, synthetic construct
  source 1..75: mol_type = other DNA
acaccgagctgaaaacgccgttttgtataagtggttatggtatgcccggagccacagttgcagatgagtttgata

SEQ ID NO: 483983 - DNA, 75 bp, synthetic construct
  source 1..75: mol_type = other DNA
gcagatcgttggccgctgtttgatttcagttattcggcttgcacggcgcaacatggccgcttgcatttcagtctc

SEQ ID NO: 483984 - DNA, 75 bp, synthetic construct
  source 1..75: mol_type = other DNA
gctatttcgcttaaccaccgtgaaaagaattgccggttatttgcaggctatgcaggacaatgcacgggcggtgaa

SEQ ID NO: 483985 - DNA, 75 bp, synthetic construct
  source 1..75: mol_type = other DNA
agcagattctggcgcaagtgccggcgtatcagttagagcagcgcgatctgagtgctttgtcccctaacgcacgaa

SEQ ID NO: 483986 - DNA, 75 bp, synthetic construct
  source 1..75: mol_type = other DNA
gccgcgcgataaacgtacctatttccgtgagataaattacatcgccgcggcatttcaatatcagaaaaagaatta

SEQ ID NO: 483987 - DNA, 75 bp, synthetic construct
  source 1..75: mol_type = other DNA
ccagtaaccccggaacctggacagatgaaagtagacaccctgatacacaactcaattatgccaacgaatttgatc

SEQ ID NO: 483988 - DNA, 75 bp, synthetic construct
  source 1..75: mol_type = other DNA
aataaaaaggtaatacttcactttatgatcacaatgataacacttcagactacagcaaaaatggtgcaggcatag

SEQ ID NO: 483989 - DNA, 75 bp, synthetic construct
  source 1..75: mol_type = other DNA
tccggataacccgttccaggtcgtgattgatgattttgagtttgatgtcggcgatcgctttacttatgaatacaa

SEQ ID NO: 483990 - DNA, 75 bp, synthetic construct
  source 1..75: mol_type = other DNA
agtcatttatccgaacccggattatggttaacggcgatcggtttatcgcaggtgatcagtaacgtgccgagtacc

SEQ ID NO: 483991 - DNA, 75 bp, synthetic construct
  source 1..75: mol_type = other DNA
ggttaacggcaatcggtttatcgcaggtgatcagtaacgtgccgagtactatattgttgctgaactatgtgccgc

SEQ ID NO: 483992 - DNA, 75 bp, synthetic construct
  source 1..75: mol_type = other DNA
gttgccggaattgatgcaggacatgtcgaatgcgatccggtattctacaccttgcgcgctgttgccggatatgca

SEQ ID NO: 483993 - DNA, 75 bp, synthetic construct
  source 1..75: mol_type = other DNA
acccattcgcggttgaagagcgatgcccatgatgactcgggtcagagctatcgcgcgacctttaaccgcatgttt

SEQ ID NO: 483994 - DNA, 75 bp, synthetic construct
  source 1..75: mol_type = other DNA
gtgctcagaaagtaaatgcttatttcgaacctaatgcgaacacggattacaccactggtaatttaactaatacgg

SEQ ID NO: 483995 - DNA, 75 bp, synthetic construct
  source 1..75: mol_type = other DNA
tgaacccctgtacctgcgcaaaagtattctcctggtgaagccgggcaatccgaagaatataaaggggattgaaga

SEQ ID NO: 483996 - DNA, 75 bp, synthetic construct
  source 1..75: mol_type = other DNA
cgccgtggaaatcgacccgaaaggcagccatgacgacgtggccttcgatcgcaccgtggcgcaggttgtgccgtg

SEQ ID NO: 483997 - DNA, 75 bp, synthetic construct
  source 1..75: mol_type = other DNA
ctcgcgctttgccagctcgcagattggtatcaacggttcgctggacagtgaaaacaaccttaactacggcgtgtc

SEQ ID NO: 483998 - DNA, 75 bp, synthetic construct
  source 1..75: mol_type = other DNA
gctggggcgggttttatctcagcggccgtatctccgattactggaaccgctccgggaccgagaagcagtatcagg

SEQ ID NO: 483999 - DNA, 75 bp, synthetic construct
  source 1..75: mol_type = other DNA
caaaggacagaacgctggcggcagcaacggcaaaagcggaagggctgtatctggtcgcggtggattaccctgacc

SEQ ID NO: 484000 - DNA, 75 bp, synthetic construct
  source 1..75: mol_type = other DNA
gctctcccaggtggcgaacgaacccatcaccgtcttctgcgccgggcgtactgacgctggtgtacacggtaccgg

SEQ ID NO: 484001 - DNA, 75 bp, synthetic construct
  source 1..75: mol_type = other DNA
tgataatgattacatgagcgaacacttatacaacatgaagttacaatgcctgcatgcggcgcttattcagaatgg

SEQ ID NO: 484002 - DNA, 75 bp, synthetic construct
  source 1..75: mol_type = other DNA
ccattctgaaactattggtggggatggtaatgccacattacgttatatggctcaatattatgcgaccgggacatc

SEQ ID NO: 484003 - DNA, 75 bp, synthetic construct
  source 1..75: mol_type = other DNA
aatacagtgccccactgaagcccggctaccgcagcctgattcattcgccgtctggtgttctcggcctgacggaga

SEQ ID NO: 484004 - DNA, 75 bp, synthetic construct
  source 1..75: mol_type = other DNA
atgatttcacctcgttccgtgcggtgcagtgccagtcccgaaccccgtggcgcaacgttatgcatattaatgtca

SEQ ID NO: 484005 - DNA, 75 bp, synthetic construct
  source 1..75: mol_type = other DNA
acaacggcttgttgataaaaaagtcacggcagaaatccagtgggcattaaaacacgatccttattgctgcgctga

SEQ ID NO: 484006 - DNA, 75 bp, synthetic construct
  source 1..75: mol_type = other DNA
gagaagtcgcattaaaaacaggtctgaatattgttgcttcctccggtccctacctggaaaaatttgaaagccaga

SEQ ID NO: 484007 - DNA, 75 bp, synthetic construct
  source 1..75: mol_type = other DNA
acggcgcacggcatgtacgcgcctggtgttgtacctgctattgattttcagcgtctggcggagattttccactgc

SEQ ID NO: 484008 - DNA, 75 bp, synthetic construct
  source 1..75: mol_type = other DNA
cggtcagcagtacaccccgcaggatcgcgagcaggttgcgtactataaagaagacgagaaaggtcagattctgca

SEQ ID NO: 484009 - DNA, 75 bp, synthetic construct
  source 1..75: mol_type = other DNA
cactttcaacaatattgaagagctggggctcggatttatcaactattcccttgtgccgtatctgacccgtattga

SEQ ID NO: 484010 - DNA, 75 bp, synthetic construct
  source 1..75: mol_type = other DNA
tcgggctgaatcccattgcgtatgcgcgtgaggccatttcactggcagcggcaaccgaggagcacggtgccaggt

SEQ ID NO: 484011 - DNA, 75 bp, synthetic construct
  source 1..75: mol_type = other DNA
ctacatgacaccgcaggaattctgggaactggtcattgtctgcctgtgtctgcggggtaatttttacgcctacaa

SEQ ID NO: 484012 - DNA, 75 bp, synthetic construct
  source 1..75: mol_type = other DNA
tccacaagatggctattcgccagttgtacgcgactatgacaccggcctaccgacacaaggggtgaaggtggagga

SEQ ID NO: 484013 - DNA, 75 bp, synthetic construct
  source 1..75: mol_type = other DNA
aactgatctccacgcatcccaatggctatatgacgccgcaggagttctgggagctggtggtcacctgtctgtgcc

SEQ ID NO: 484014 - DNA, 75 bp, synthetic construct
  source 1..75: mol_type = other DNA
gctacctggatggcggttgtgaagatattgttgtggatgtctacaacacggaacagcagtgtctttattctatga

SEQ ID NO: 484015 - DNA, 75 bp, synthetic construct
  source 1..75: mol_type = other DNA
cagattaacaatcctcatgtggcgatgaatattcacatgccgggctggcttcgtcgcggtgatgaagtactcgac

SEQ ID NO: 484016 - DNA, 75 bp, synthetic construct
  source 1..75: mol_type = other DNA
tgactccgatgaacatgaccaccagtccctctgctggcgatgacaacggtaagaaaaaggagagtggagatgcag

SEQ ID NO: 484017 - DNA, 75 bp, synthetic construct
  source 1..75: mol_type = other DNA
ccacatctccccgggcgtgtacgctcgtgctttcctggaaggtcgtctgactcaagagcagctggataacttccg

SEQ ID NO: 484018 - DNA, 75 bp, synthetic construct
  source 1..75: mol_type = other DNA
ttatgttgaaggcgcatggaatcgggttacgaataagaaaggtgatacttcactttataaccataatgataatac

SEQ ID NO: 484019 - DNA, 75 bp, synthetic construct
  source 1..75: mol_type = other DNA
cgatacccgccttaattttgccaacgaatttgatctgaatatcaaaggctggctcttaaatgaaccagattatcg

SEQ ID NO: 484020 - DNA, 75 bp, synthetic construct
  source 1..75: mol_type = other DNA
ttatgactacagcaagaatggcgcaggtattgaaaattacagtttcataaccactgcaggcctcaagtactactt

SEQ ID NO: 484021 - DNA, 75 bp, synthetic construct
  source 1..75: mol_type = other DNA
tatctggtggcgtttccatctctattcaataccgatgctgttgtgggcggcgctggtgggatacgttttgttggt

SEQ ID NO: 484022 - DNA, 75 bp, synthetic construct
  source 1..75: mol_type = other DNA
tccacaaaatatcctaatctggggacgttctggcctttcgtttgcagggtttattgcccaaatggcaccgctggc

SEQ ID NO: 484023 - DNA, 75 bp, synthetic construct
  source 1..75: mol_type = other DNA
agagatgatatcggctccatcccgaatggagaaagagcaataggctataaacaacgttttaaaatgccctatatt

SEQ ID NO: 484024 - DNA, 75 bp, synthetic construct
  source 1..75: mol_type = other DNA
ggcactgtccatgtggcaggccctgtacccgacgatatcgcgccgggatcggttttgaagtttgaatctgttaag

SEQ ID NO: 484025 - DNA, 75 bp, synthetic construct
  source 1..75: mol_type = other DNA
gtgtggtaccgaagcttaacagtagctgggagccggtctatcaggtcacattcccggacggctccacggatgtgc

SEQ ID NO: 484026 - DNA, 75 bp, synthetic construct
  source 1..75: mol_type = other DNA
aacgtggcgaaatcgataagaaagtggttgctgacgcaatcgccaaattcaacatcgatgcagaaaaagttaacc

SEQ ID NO: 484027 - DNA, 75 bp, synthetic construct
  source 1..75: mol_type = other DNA
tctggcgtaccatggcaccgctgacccgcgatgccattagcgcaatgtgggatgaacttgaggaacagtcagaag

SEQ ID NO: 484028 - DNA, 75 bp, synthetic construct
  source 1..75: mol_type = other DNA
tctggcgcaccatggcaccgctaacccgcgatgcaatcagcgcaatgtgggatgaacttgaggaagaatcagagg

SEQ ID NO: 484029 - DNA, 75 bp, synthetic construct
  source 1..75: mol_type = other DNA
gtttatcggcgatgaatgtgctgtgccgccatatcgtagcgcatgggttgagggcgcgacggaagcggaagtgcg

SEQ ID NO: 484030 - DNA, 75 bp, synthetic construct
  source 1..75: mol_type = other DNA
tcttttgatatccctgctattcgcgaggccggatttgatctgacgacgccggtattaatcagtaatagcgatgat

SEQ ID NO: 484031 - DNA, 75 bp, synthetic construct
  source 1..75: mol_type = other DNA
accggtattaatcagtaatagcaatgattttacagacgtatttaccccacggcacggcgcagataagcgctggtg

SEQ ID NO: 484032 - DNA, 75 bp, synthetic construct
  source 1..75: mol_type = other DNA
caagcgacggtgactaataacaaaataggggaggcatttcagttcgatttatttggtatggcgtcttcgccaaca

SEQ ID NO: 484033 - DNA, 75 bp, synthetic construct
  source 1..75: mol_type = other DNA
atgacggagttagccagaacaatagtcgcaggagtcgggggcgcagataacattgtgagtctgatgcattgtgca

SEQ ID NO: 484034 - DNA, 75 bp, synthetic construct
  source 1..75: mol_type = other DNA
cgcaggttgccccgcaagagaaaacaccagaggttattacaccacctgagcagggtggtatctgttcaccgatga

SEQ ID NO: 484035 - DNA, 75 bp, synthetic construct
  source 1..75: mol_type = other DNA
cggcgttgacgggtctgtttggtatcaccgaaccagcggtatatggcgtcaacctgccgcgtaagtaccccttcg

SEQ ID NO: 484036 - DNA, 75 bp, synthetic construct
  source 1..75: mol_type = other DNA
attgccaagaatcaactcgctcgtgaaaaactgattatttataatagcgaaggtaattataatattattgaggta

SEQ ID NO: 484037 - DNA, 75 bp, synthetic construct
  source 1..75: mol_type = other DNA
aaccagttaattgccgatctcggcgctaaaccgcaagtgcgcgtattgctgcttgatgtcgtgattggcttcggt

SEQ ID NO: 484038 - DNA, 75 bp, synthetic construct
  source 1..75: mol_type = other DNA
ctacaaagcgccagcaaaccggtagtgcattaccaatgggcgccagtcgctggcggcaataaaaaactggctcgt

SEQ ID NO: 484039 - DNA, 75 bp, synthetic construct
  source 1..75: mol_type = other DNA
gcctgaatgaaataggtcagatctcagttagcaatatttcaggggatccgcaggacgtggaacgtatcgtggcgt

SEQ ID NO: 484040 - DNA, 75 bp, synthetic construct
  source 1..75: mol_type = other DNA
cgctgcaattagtgacttatcctgcgagcgccacggcacagtctgcagaattcgccagtgctgactgcgtgacgg

SEQ ID NO: 484041 - DNA, 75 bp, synthetic construct
  source 1..75: mol_type = other DNA
gtacttgatgataataaatattatcttttttcgcggagggcgaatgataaaatcgttgtttatcatcaggaacaa

SEQ ID NO: 484042 - DNA, 75 bp, synthetic construct
  source 1..75: mol_type = other DNA
accgggatcctgaaaggtatgctggctctggcgctcacttttcagtggacgaccgaacaaagtggtacttattta

SEQ ID NO: 484043 - DNA, 75 bp, synthetic construct
  source 1..75: mol_type = other DNA
gggcaattaggctggacgccgctttattatttgaatcagcattttgaccgtaaattactgatgaaaatattccgc

SEQ ID NO: 484044 - DNA, 75 bp, synthetic construct
  source 1..75: mol_type = other DNA
acttctggcgagtttcattatgtaatcatgttgaatccactttacgtaattaaaaagtcatatgaatcaaatgga

SEQ ID NO: 484045 - DNA, 75 bp, synthetic construct
  source 1..75: mol_type = other DNA
ggggctattgtagccaatggaacaaatagcgatgttgcttccggcgctgctattggcgctgtggctggccctgta

SEQ ID NO: 484046 - DNA, 75 bp, synthetic construct
  source 1..75: mol_type = other DNA
ctggcaggagtgctttatccgcgacctaaagcaggtagtaccgcgaagcgcggaaagtcagcaacgcgataaagt

SEQ ID NO: 484047 - DNA, 75 bp, synthetic construct
  source 1..75: mol_type = other DNA
cgcaaaagagtatgtcgccgctcaggatcctgcaaatccgggcgtactggtactttctcagtttgccggtgcggc

SEQ ID NO: 484048 - DNA, 75 bp, synthetic construct
  source 1..75: mol_type = other DNA
agcgtttcgaacggaagtttacccgatcggcattgagccgaaagaaatagcgaaacaggctgccggaccactgcc

SEQ ID NO: 484049 - DNA, 75 bp, synthetic construct
  source 1..75: mol_type = other DNA
tctgacgcccgggtgggtgtcattcatggtgaaaaaccggagattgccatcgtaccccagagtctgcaccggctg

SEQ ID NO: 484050 - DNA, 75 bp, synthetic construct
  source 1..75: mol_type = other DNA
ctggatgttcccggaaggaacccgcagccgtggtcgcggcctgctaccgttcaagaccggggcatttcacgcggc

SEQ ID NO: 484051 - DNA, 75 bp, synthetic construct
  source 1..75: mol_type = other DNA
gacgccggtattaatcagtaatagcgatgattttacggacgtattaccccacggcacggcgcagataagcgctgg

SEQ ID NO: 484052 - DNA, 75 bp, synthetic construct
  source 1..75: mol_type = other DNA
ccgcacaagatgttggtgagttcgttggacaagcagcgccatttgttagtggtggtgggattatttctcaggttc

SEQ ID NO: 484053 - DNA, 75 bp, synthetic construct
  source 1..75: mol_type = other DNA
atggcagcaaatgtaatcttaccggaaggttttgtgctcgatgaacaacctgataactcacagtttcctgatagt

SEQ ID NO: 484054 - DNA, 75 bp, synthetic construct
  source 1..75: mol_type = other DNA
tacgcgaactaacgttactgccgctcaacattaaacatatgtcggtaaaggtatttttgcagtcaggcgctccgc

SEQ ID NO: 484055 - DNA, 75 bp, synthetic construct
  source 1..75: mol_type = other DNA
cgtctgaaaattgttaatgccatgaaagcaaccggcaaaccgacggtggcgctgtttttaggttataccccggcg

SEQ ID NO: 484056 - DNA, 75 bp, synthetic construct
  source 1..75: mol_type = other DNA
cagacgctgaaagctacggcaatgctatctatatcgctaaccaccagaacaattatgacatggtgacggcatcga

SEQ ID NO: 484057 - DNA, 75 bp, synthetic construct
  source 1..75: mol_type = other DNA
aacttttcaacaaataatgatccgaccatgttcttagcaatattaaatcaggtctatggtttatgcatagaacaa

SEQ ID NO: 484058 - DNA, 75 bp, synthetic construct
  source 1..75: mol_type = other DNA
aaacttttgctgcgcttcgaaaaacaggatcggactgaattcaacacagaagcggaaacatttcttcgccagacg

SEQ ID NO: 484059 - DNA, 75 bp, synthetic construct
  source 1..75: mol_type = other DNA
tggaggtgcgagacaattttgagcgccgggcttatgaaattgctctggcatcgctggaagcagtatcggatgaac

SEQ ID NO: 484060 - DNA, 75 bp, synthetic construct
  source 1..75: mol_type = other DNA
tggatgtgcgagacaatattgagcgccgggcttatgaaattgctctggcatcgctggaagcagtatcggatgaac

SEQ ID NO: 484061 - DNA, 75 bp, synthetic construct
  source 1..75: mol_type = other DNA
cttgagcgccgggcttatgaaattgctctggcatcgctggaagcagtatcggatgaacgagcagcctatgaatta

SEQ ID NO: 484062 - DNA, 75 bp, synthetic construct
  source 1..75: mol_type = other DNA
gatctttcacgttttagtaccagcgccattgatgaaggggtttactccctcgatgtctataccaatggtgagtgg

SEQ ID NO: 484063 - DNA, 75 bp, synthetic construct
  source 1..75: mol_type = other DNA
aagacaacctggtccagtcctccctgcggttgaacatttcggtaccgcagatctatgaagatcaacgcctgaaaa

SEQ ID NO: 484064 - DNA, 75 bp, synthetic construct
  source 1..75: mol_type = other DNA
catgatgtttatcagcgacgccagcgcgccgaaggccacggttaagtggagcggcggacagtgctcggtggaatt

SEQ ID NO: 484065 - DNA, 75 bp, synthetic construct
  source 1..75: mol_type = other DNA
cgtacgtcaggatgcaaatgatgaaacccgtcgatttgcagcatggctacaaacagatgaagcaacgcctgcatt

SEQ ID NO: 484066 - DNA, 75 bp, synthetic construct
  source 1..75: mol_type = other DNA
cttgcatggcttcgcgagcaggggctggttcgtctgtctgatgtgggcggctgttacgtggctgaaatcaccggc

SEQ ID NO: 484067 - DNA, 75 bp, synthetic construct
  source 1..75: mol_type = other DNA
gcatgccatggaccacgctgaacggcagttacagtcagggctcaggctggcgccagagcggcatcggtggcagcg

SEQ ID NO: 484068 - DNA, 75 bp, synthetic construct
  source 1..75: mol_type = other DNA
caatggcgctctcctgtgaatacaccaataaccccgatttatcgattgccaacgttatatcgttagtggagaacg

SEQ ID NO: 484069 - DNA, 75 bp, synthetic construct
  source 1..75: mol_type = other DNA
aaggcttcacttcgtccatattgcacaccagcagtgaacctgtttgtccatcattctgaacccgtgaggcccgat

SEQ ID NO: 484070 - DNA, 75 bp, synthetic construct
  source 1..75: mol_type = other DNA
gcggattcagccgattgctattagtgcctccggtgctttgccagacacattaagtagcctgcctgcgttaccttc

SEQ ID NO: 484071 - DNA, 75 bp, synthetic construct
  source 1..75: mol_type = other DNA
aacctcgctcgaataccatgaaaatggggatctgcaaagacgatctggcaccttcattaggtcgtgccgatgaag

SEQ ID NO: 484072 - DNA, 75 bp, synthetic construct
  source 1..75: mol_type = other DNA
gtcacgctggaagatgaaatccagctcaaaacccgcgcacgcgataaaggcttgctggtgatggggccggactgc

SEQ ID NO: 484073 - DNA, 75 bp, synthetic construct
  source 1..75: mol_type = other DNA
cagcattccggacagctcacggtttaatgatgatgtgatcaccacgtcattaatctgtaccaaccgtatgatccc

SEQ ID NO: 484074 - DNA, 75 bp, synthetic construct
  source 1..75: mol_type = other DNA
atgttgcgttatgtattacgccgctttctgctgctgatcccgatggtgctcgccgcctcggtgatcatttttctg

SEQ ID NO: 484075 - DNA, 75 bp, synthetic construct
  source 1..75: mol_type = other DNA
gatatgactctcggttggatcgtctggcagcaacgagctggtatccatttttcaacaatgtcacaacaagaggtg

SEQ ID NO: 484076 - DNA, 75 bp, synthetic construct
  source 1..75: mol_type = other DNA
cgcctgtatttattgatccggtatcggcatggaaatgcgtcaaaatccgcgatcatctgagcaaaatccatacgt

SEQ ID NO: 484077 - DNA, 75 bp, synthetic construct
  source 1..75: mol_type = other DNA
ggacgtgaagatgtcgcaaaggtcgccgcctggtttcatcaacacggcctgaaccgcctggtgctgagcatggga

SEQ ID NO: 484078 - DNA, 75 bp, synthetic construct
  source 1..75: mol_type = other DNA
ttacgtttagtgtatctgtcaaacctaatgtattctaaagggatcatacatctaatacgtgctgtgaaaagatgt

SEQ ID NO: 484079 - DNA, 75 bp, synthetic construct
  source 1..75: mol_type = other DNA
tgatgaatatgttgattcgtgtaaattgaaagaaatattagaggctaaaattgaaaattgtccatatattaaata

SEQ ID NO: 484080 - DNA, 75 bp, synthetic construct
  source 1..75: mol_type = other DNA
ttgttctcactgcaaggatgaaggaacaatataacatatatcggaagatgaaaatcaaagtaataggtaactgtt

SEQ ID NO: 484081 - DNA, 75 bp, synthetic construct
  source 1..75: mol_type = other DNA
cgccgcgtctggcacaggttgagccgcccgcgcaaccggcaatggaaacgcaggatcgggtagaaacagaaaata

SEQ ID NO: 484082 - DNA, 75 bp, synthetic construct
  source 1..75: mol_type = other DNA
atgctgccaaaacgcacctggtggaatctgactaaaagcgtgctggcattccactttttgcgccacttcccggcg

SEQ ID NO: 484083 - DNA, 75 bp, synthetic construct
  source 1..75: mol_type = other DNA
gttcgaggatgacgtcggtaaacaattacacgcagcattgctggaggctgcacgacgcggggttaaagcagaagt

SEQ ID NO: 484084 - DNA, 75 bp, synthetic construct
  source 1..75: mol_type = other DNA
agtggtatgccggacccgacgctgctggaggtcatggcagggcagacgatatcatcggactgtgacccgccccgg

SEQ ID NO: 484085 - DNA, 75 bp, synthetic construct
  source 1..75: mol_type = other DNA
tccggcgaaaaaaacgatcgctccggacaccgcgccccctctcatgcagagaaaaaattcccgtttcaggccagt

SEQ ID NO: 484086 - DNA, 75 bp, synthetic construct
  source 1..75: mol_type = other DNA
gcaggtattgctggtctggcgcgataacgaagaacatcgcgatgatatcgaacgccactatctgaaaatgctcac

SEQ ID NO: 484087 - DNA, 75 bp, synthetic construct
  source 1..75: mol_type = other DNA
tcagcgaattgccgctgatgtgcagagactgcgtcagtcaggtatggttatagtcacccgggaagttgaggtatc

SEQ ID NO: 484088 - DNA, 75 bp, synthetic construct
  source 1..75: mol_type = other DNA
gcgattgtctgcattgtgtgccgcgaccacggccgcaatgggcgccgctgccgggatggcatggctggtggacgg

SEQ ID NO: 484089 - DNA, 75 bp, synthetic construct
  source 1..75: mol_type = other DNA
cgttaggtggaaatgccaacgccggactggaagtgctgaaaggcgcaacagagcaggcaattgccgatgccaaag

SEQ ID NO: 484090 - DNA, 75 bp, synthetic construct
  source 1..75: mol_type = other DNA
aaaggcggcgttcaggtatttgagtaccgccgccgcccgctccacggcaaagtggcattgatggacgatcactgg

SEQ ID NO: 484091 - DNA, 75 bp, synthetic construct
  source 1..75: mol_type = other DNA
ggtgatcgacgcgcatatcgcctttattggcgggctgaattactccgccgagcatatgtccagctacggtccaga

SEQ ID NO: 484092 - DNA, 75 bp, synthetic construct
  source 1..75: mol_type = other DNA
cgagcaatattatcccgcggtgtttaaggcgattggcgaggcacaagaacgcatcattcttgaaacgtttatctg

SEQ ID NO: 484093 - DNA, 75 bp, synthetic construct
  source 1..75: mol_type = other DNA
atatcctgcttgagataacctcgctggtagataacgcattggatctggctgaaattacggtaatgactccaactt

SEQ ID NO: 484094 - DNA, 75 bp, synthetic construct
  source 1..75: mol_type = other DNA
tttacctctcgggctgcaggtggagctgccggacattccgacaaccaccaccgtgcagaccgtccagctatggga

SEQ ID NO: 484095 - DNA, 75 bp, synthetic construct
  source 1..75: mol_type = other DNA
aagcaaaatcactccctgggccattccatctggctcaatttatcctcccatgaaaaatgtaatgaacgcatccca

SEQ ID NO: 484096 - DNA, 75 bp, synthetic construct
  source 1..75: mol_type = other DNA
ttatcctctgccaacatcttatcactaacaccgagttcagctatttggcactccctgaaaattataaccgcttgt

SEQ ID NO: 484097 - DNA, 75 bp, synthetic construct
  source 1..75: mol_type = other DNA
ctgctgtcggtaagcgactccctgtcgctgcctgagccattttctcggccagaagtgcagattctgatgattttt

SEQ ID NO: 484098 - DNA, 75 bp, synthetic construct
  source 1..75: mol_type = other DNA
tttacctcacgggctgcagttggagctgccggacattccgaccaccaccaccgtgcagaccgtccagctatggga

SEQ ID NO: 484099 - DNA, 75 bp, synthetic construct
  source 1..75: mol_type = other DNA
acacggtggacgcgctttgctggcgtcagtacgggcgcacgcagggtgtcacggagcaggtactgaaggcaaatc

SEQ ID NO: 484100 - DNA, 75 bp, synthetic construct
  source 1..75: mol_type = other DNA
gcgcgtaatgagcagaccgagctggccgctggccatctgctgctcagttacaaatatacgccgcctccgccgctg

SEQ ID NO: 484101 - DNA, 75 bp, synthetic construct
  source 1..75: mol_type = other DNA
tagtgtgacgaatgccacgttgaaagttgacagcaatcatcagatcagattagcccagggggctgtcagtaatgt

SEQ ID NO: 484102 - DNA, 75 bp, synthetic construct
  source 1..75: mol_type = other DNA
gatgctgcgcagtttggctcaactcaggctaactttacgatcccacaggcgctgaaggcgatttatgaccacggt

SEQ ID NO: 484103 - DNA, 75 bp, synthetic construct
  source 1..75: mol_type = other DNA
ctccctgaaaattataaccgtttgtttttaccaaattcaaaaaaccaaacaaataatcgtttcaaaacgttaaac

SEQ ID NO: 484104 - DNA, 75 bp, synthetic construct
  source 1..75: mol_type = other DNA
ctccgcaggttgtgggactactgaatctataggtaatcgctggcagagcgggcatgagaatgaaatatttacatt

SEQ ID NO: 484105 - DNA, 75 bp, synthetic construct
  source 1..75: mol_type = other DNA
cattaagagaccttcaaaagacttagctaacttacgaaaggagtttaataaaactgtaagaaaaaattttcttat

SEQ ID NO: 484106 - DNA, 75 bp, synthetic construct
  source 1..75: mol_type = other DNA
cgtcaatgaagtgccgtttgcggcgatccgctttattctcgattccgcgaagttaaattgcgcgttatcgcagga

SEQ ID NO: 484107 - DNA, 75 bp, synthetic construct
  source 1..75: mol_type = other DNA
acccggccataccaatctgaaacccgtacctgataagtatctcgatgagttaaaggcactcataaataaactcaa

SEQ ID NO: 484108 - DNA, 75 bp, synthetic construct
  source 1..75: mol_type = other DNA
aacaaaccccgtatatttccgtagtggatattctgcgagcaaggcgatctaccggcttgctaaaagctaacgtga

SEQ ID NO: 484109 - DNA, 75 bp, synthetic construct
  source 1..75: mol_type = other DNA
gaacatatcgatgccggtatcactctggctaatgccgttaactttctggtaaagaaatatgagttagttcgtatc

SEQ ID NO: 484110 - DNA, 75 bp, synthetic construct
  source 1..75: mol_type = other DNA
gagaacgcattaattattaaaatgaatgattatggcgatttgcaaatcaatattctttttacttcccgccaaatg

SEQ ID NO: 484111 - DNA, 75 bp, synthetic construct
  source 1..75: mol_type = other DNA
gatgcactttccaaacgtctggtcagcagtgttctggatgccgcagttgtggaagacgagcagatccatctacgc

SEQ ID NO: 484112 - DNA, 75 bp, synthetic construct
  source 1..75: mol_type = other DNA
aatatctggcgtgccgcagaagtcgaaaaagagttgcaacgcaaagctcaacacaacgaaaacaacaaggaaacc

SEQ ID NO: 484113 - DNA, 75 bp, synthetic construct
  source 1..75: mol_type = other DNA
atctggtcaataaacacggcatcgcctggcacgagaaaacgttagggcaactcttctgcgatgactccgcgcagc

SEQ ID NO: 484114 - DNA, 75 bp, synthetic construct
  source 1..75: mol_type = other DNA
gaatttgtcagcatcaatctgctaccggatgtggatctcgaaaccttcctgaatgagcagcgtaacgcacatccg

SEQ ID NO: 484115 - DNA, 75 bp, synthetic construct
  source 1..75: mol_type = other DNA
atcgcactgccgaagtgacgctcggcggcgtggacaccaacgaactctcttcacggacgatggaagcgcgcaaag

SEQ ID NO: 484116 - DNA, 75 bp, synthetic construct
  source 1..75: mol_type = other DNA
tgtggactgatgacacgtaacggctacagagcggtgacagatatcactacaggcaaatacagcaagatgacccga

SEQ ID NO: 484117 - DNA, 75 bp, synthetic construct
  source 1..75: mol_type = other DNA
cgatattcttcgtgcccgtaaggcaaccgggctgatgacccgcagcggttacaaagctgttaccgatatcaccgg

SEQ ID NO: 484118 - DNA, 75 bp, synthetic construct
  source 1..75: mol_type = other DNA
atcgcaccgccgaagtgactctcggcggcgtggacaccaatgaactctcatcacggacgatggaagcgcgcaaag

SEQ ID NO: 484119 - DNA, 75 bp, synthetic construct
  source 1..75: mol_type = other DNA
acattctgctggagataaccacactggtggataacgccttggatctggctgaaattactgaagaatattcacact

SEQ ID NO: 484120 - DNA, 75 bp, synthetic construct
  source 1..75: mol_type = other DNA
gctgagggatgccggacagtgctgtctctgtgggcgtgtggttgacctttgtgacagtgaacttgagcaccgcat

SEQ ID NO: 484121 - DNA, 75 bp, synthetic construct
  source 1..75: mol_type = other DNA
ttgaagaagtggtgaaagacagcggtatgccggtaacggaagccgaagtgcgggaacgcttcaatgcaattgcag

SEQ ID NO: 484122 - DNA, 75 bp, synthetic construct
  source 1..75: mol_type = other DNA
gtagcgtacttaacgccgcagtggtagaaggcgagccgattcatcttcgctgcttcgaatccacccacgaaatgc

SEQ ID NO: 484123 - DNA, 75 bp, synthetic construct
  source 1..75: mol_type = other DNA
aacattgtgcatattgagacgcacaatggtgtggtgtttacccagcaggcgtgtgtggcagagggcgagcaagag

SEQ ID NO: 484124 - DNA, 75 bp, synthetic construct
  source 1..75: mol_type = other DNA
tgtcaccatcgtcggcgggcataccaacattgtgcatattgagacgcacaatggtgtggtgtttacccagcaggc

SEQ ID NO: 484125 - DNA, 75 bp, synthetic construct
  source 1..75: mol_type = other DNA
catattggcgcgacgctggaaaaacagtgcgcgcgcggtttgctggcgaaagatctctcttcatccattgtgatt

SEQ ID NO: 484126 - DNA, 75 bp, synthetic construct
  source 1..75: mol_type = other DNA
ccgttgatggataaaggcgagcagctggcctgggtctggcgcagtaaagcgcgctgtaacccgctatttatcgca

SEQ ID NO: 484127 - DNA, 75 bp, synthetic construct
  source 1..75: mol_type = other DNA
gcctgttctccgtgagaattggcgaatgtggcgtgagtttctggtgcacaaatccgccgccggaaaaaccgttcc

SEQ ID NO: 484128 - DNA, 75 bp, synthetic construct
  source 1..75: mol_type = other DNA
cgacggcgctgcaaactgtacctgaacaaaatattgatataacaaataatgaaaacgcattaattattaaaatga

SEQ ID NO: 484129 - DNA, 75 bp, synthetic construct
  source 1..75: mol_type = other DNA
tggcctgggtctggcgcagcaaagcacgctgcaacccactgtttatcgctacgggtcatcgggtcagcgtggata

SEQ ID NO: 484130 - DNA, 75 bp, synthetic construct
  source 1..75: mol_type = other DNA
ctgctgaaatacccctcgcttgagctggtggagtataaagttgcccgcatcgccaccaccatgccttacattcca

SEQ ID NO: 484131 - DNA, 75 bp, synthetic construct
  source 1..75: mol_type = other DNA
catgaaaggctatcgtctgccggagccaacgcgctgggcagacgcggtggcctcggaacgtccggcgttcgtgcg

SEQ ID NO: 484132 - DNA, 75 bp, synthetic construct
  source 1..75: mol_type = other DNA
gctggtggagctggtaaagcgtctgccctatatcattgagttgaacaccgggcaagaaactatcgttatagccca

SEQ ID NO: 484133 - DNA, 75 bp, synthetic construct
  source 1..75: mol_type = other DNA
gcatactggaatcagcactacatagacactggcgcggttttttgcggaaatctgacgctaatgcatgtgaaggga

SEQ ID NO: 484134 - DNA, 75 bp, synthetic construct
  source 1..75: mol_type = other DNA
gcggtgggccgatgcttgcatcgttggcggcggcttgtgctgtaagtcgtggtagcgccgtattgctgatgtatc

SEQ ID NO: 484135 - DNA, 75 bp, synthetic construct
  source 1..75: mol_type = other DNA
acaccgattaacgatcgtcgttcgcgtcagcaggaagtgataccggctggcaccagtctgcgttatgaggcgagt

SEQ ID NO: 484136 - DNA, 75 bp, synthetic construct
  source 1..75: mol_type = other DNA
gtacctgggtagatttcctcgatgataaggggaactgggttaagtggaaggattttgagagtgtggcttcatcac

SEQ ID NO: 484137 - DNA, 75 bp, synthetic construct
  source 1..75: mol_type = other DNA
gtaactttgacacttatttcaggtcttgatcgtttcgttaatgtcaaagtcacgaaagacactggaactgtcatt

SEQ ID NO: 484138 - DNA, 75 bp, synthetic construct
  source 1..75: mol_type = other DNA
gtatcagctttgatggggagtgaatcgaaagaattcctcgcagcacaacagtattttaacggatacgaaaactca

SEQ ID NO: 484139 - DNA, 75 bp, synthetic construct
  source 1..75: mol_type = other DNA
ccgaccccacaccacatactggcttgagcacatcttcacaaacccgctttgccatgaaatccgtattcttcatcg

SEQ ID NO: 484140 - DNA, 75 bp, synthetic construct
  source 1..75: mol_type = other DNA
caccgtttccaagttgcgttttgatatacaggaacacaccccgcaaaccgaaagttgaagttacccagacaattt

SEQ ID NO: 484141 - DNA, 75 bp, synthetic construct
  source 1..75: mol_type = other DNA
gcttttcaaacgtactctgggcgggcaaaccggcgatacgctgggagctgccatagagcttggtgagctggtctt

SEQ ID NO: 484142 - DNA, 75 bp, synthetic construct
  source 1..75: mol_type = other DNA
taccgattgagagcaatgccaaacgctacgacgcgatgaataaaggcattttcaaagacctaaccaaacatactg

SEQ ID NO: 484143 - DNA, 75 bp, synthetic construct
  source 1..75: mol_type = other DNA
ccgaagccatggtggccgaggccccgaagaaggacgagccggcgatgccgccgggcggcggcatgggtggcatgg

SEQ ID NO: 484144 - DNA, 75 bp, synthetic construct
  source 1..75: mol_type = other DNA
acagtaccatgccctgacggtgggtgataaaggtacgttgagctttaaaggaacgcgttttgtcagctttgttgg

SEQ ID NO: 484145 - DNA, 75 bp, synthetic construct
  source 1..75: mol_type = other DNA
tatttccattctgcgcttaagtcgcggcgtgtttgaagtgctggcaaccggcggtgattccgcgctcggcggcga

SEQ ID NO: 484146 - DNA, 75 bp, synthetic construct
  source 1..75: mol_type = other DNA
gctgatgaagttctggaagtggtgatggttggcggttctacccgtgtgccgttggtgcgtgaacgggtgggcgaa

SEQ ID NO: 484147 - DNA, 75 bp, synthetic construct
  source 1..75: mol_type = other DNA
ccggtgcgcgtttctgcggacatcctcaaagcactggcggcgcgggcaactgaagccctggcaggcgagctggat

SEQ ID NO: 484148 - DNA, 75 bp, synthetic construct
  source 1..75: mol_type = other DNA
ttctgcaacagcctgcgcgcgcagacgagcctttcctgatggtggtttcgtatgatgagccgcatcacccgttca

SEQ ID NO: 484149 - DNA, 75 bp, synthetic construct
  source 1..75: mol_type = other DNA
caccaaagacgcggcgcgtctggcggggctgcatgttctgcgcttacttaatgaaccgaccgctgcggctattgc

SEQ ID NO: 484150 - DNA, 75 bp, synthetic construct
  source 1..75: mol_type = other DNA
ggtgtggttatcaccgttccggcgtactttgacgatgcccagcgtcagggcaccaaagatgcggcgcgcctggct

SEQ ID NO: 484151 - DNA, 75 bp, synthetic construct
  source 1..75: mol_type = other DNA
catcgtcgccaaagtattcatatcctgacccgggtatgggatgcctgcgccaatatggagcgctatatccagtac

SEQ ID NO: 484152 - DNA, 75 bp, synthetic construct
  source 1..75: mol_type = other DNA
ggtgatacggagggggtgccgcttgatgataaacaactggtcgatcagtttgagctgcgagtgataaggcaaccg

SEQ ID NO: 484153 - DNA, 75 bp, synthetic construct
  source 1..75: mol_type = other DNA
ccagcagtaccacgccctgacagtgggcgataaaggtacgctgagctataaaggaacgcgctttgtcagctttgt

SEQ ID NO: 484154 - DNA, 75 bp, synthetic construct
  source 1..75: mol_type = other DNA
ccgcatttgccttatcaattccaggccagcgaaaacggcctgccgatgattgaaacggcggcggggctgctgaac

SEQ ID NO: 484155 - DNA, 75 bp, synthetic construct
  source 1..75: mol_type = other DNA
cctactctggtttacaagcactggttgaatggggctttgtactatctgtttaatgcccattccgctgaaaaccag

SEQ ID NO: 484156 - DNA, 75 bp, synthetic construct
  source 1..75: mol_type = other DNA
gcagtttgtgcctgctgattttaattcgttagctgacatgcttatctcatcggtttcggagcttagcacaacaga

SEQ ID NO: 484157 - DNA, 75 bp, synthetic construct
  source 1..75: mol_type = other DNA
aatgcatgaccaagggcaacccgtcaagagcatcgcagaatcgctaagaatgcctctaagcaccacttacaggat

SEQ ID NO: 484158 - DNA, 75 bp, synthetic construct
  source 1..75: mol_type = other DNA
cctgctcctgctcctgctcctgctcctgctcctgcaatagttttgaaaaccgctgagagaaaggaaagtatcggt

SEQ ID NO: 484159 - DNA, 75 bp, synthetic construct
  source 1..75: mol_type = other DNA
atcccagcagagaaactattctcgataaactactgcaactcgacgagcaaatcagaaatgaaagggagaatgaac

SEQ ID NO: 484160 - DNA, 75 bp, synthetic construct
  source 1..75: mol_type = other DNA
ccttgcacacagccagaaacacatcatcccagcagagaaactattctcgataaactactgcaactcgacgagcaa

SEQ ID NO: 484161 - DNA, 75 bp, synthetic construct
  source 1..75: mol_type = other DNA
gcgtcgcttttgatctcgacggtacgctggtcgacagtgctcccggtctggctgccgcggtagatatggcgttgt

SEQ ID NO: 484162 - DNA, 75 bp, synthetic construct
  source 1..75: mol_type = other DNA
aatggggttcactgacactcatcttcgctgctatatcatgcacgatgattcggatgggcagcatatccatataat

SEQ ID NO: 484163 - DNA, 75 bp, synthetic construct
  source 1..75: mol_type = other DNA
ggtggaaaaattgcagaactggaattacggctcagagaagacaaacggaccgcaatcgtagaaaagattcttcta

SEQ ID NO: 484164 - DNA, 75 bp, synthetic construct
  source 1..75: mol_type = other DNA
accttaagccaggaaatgctggatattgtgaactatcgcaaagaatccaatttattgtttgacgttggtgtggct

SEQ ID NO: 484165 - DNA, 75 bp, synthetic construct
  source 1..75: mol_type = other DNA
ttgtgaattatcgcaaagagtccaatttgctgtttgatgttggtgtggccgatgcgctttccaaacgtttggtta

SEQ ID NO: 484166 - DNA, 75 bp, synthetic construct
  source 1..75: mol_type = other DNA
ttacctcacgggctacaggtggagctgccggacattccgacaaccaccaccgtgcagaccgtccagctatgggac

SEQ ID NO: 484167 - DNA, 75 bp, synthetic construct
  source 1..75: mol_type = other DNA
gcgttgatgaaagcctttggtgcgacgcacaatgctatttttgttgcaccttcactttacgccaatgatttttat

SEQ ID NO: 484168 - DNA, 75 bp, synthetic construct
  source 1..75: mol_type = other DNA
cagcctgtctggagcaacgtcgcttacttataccggggcggcgctcaatgttgggacgcaagctattaaactggt

SEQ ID NO: 484169 - DNA, 75 bp, synthetic construct
  source 1..75: mol_type = other DNA
gcagatgaggctattgtcgaaattggtcgcgttgagaatgtgatggaagagtaccatgccatatttgctgaacgg

SEQ ID NO: 484170 - DNA, 75 bp, synthetic construct
  source 1..75: mol_type = other DNA
aatgctacgaagctcctacgatccgatgtcagtaaacctgtatggcacaattctctgcgtctgcctgctggtgag

SEQ ID NO: 484171 - DNA, 75 bp, synthetic construct
  source 1..75: mol_type = other DNA
tattggttgtctggagattcagggggccagtctagaaaccaacgtcggtgatcattatggatactcatcctatca

SEQ ID NO: 484172 - DNA, 75 bp, synthetic construct
  source 1..75: mol_type = other DNA
aaaactagtattaagactatcacttatttaagtgatattggttgtctggagattcagggggccagtctagttgat

SEQ ID NO: 484173 - DNA, 75 bp, synthetic construct
  source 1..75: mol_type = other DNA
ctgacgcaaaaaaaccacgcacagttggtcgtgttagtggttgatacaacaggcgatgaaaccatcgagcagtac

SEQ ID NO: 484174 - DNA, 75 bp, synthetic construct
  source 1..75: mol_type = other DNA
tgcgctttcattatgtgttcatcgacggctactggaaggtgatgtaccgcacgccggaaggctggaagatgaaag

SEQ ID NO: 484175 - DNA, 75 bp, synthetic construct
  source 1..75: mol_type = other DNA
tgcgtattccgctctattcgatcacggattggcatcgaagtccgatcagcgattcgcatccattcgatcaaccgg

SEQ ID NO: 484176 - DNA, 75 bp, synthetic construct
  source 1..75: mol_type = other DNA
tcggcactggcgagtgtccgccggagtgggacgctgattactggttcgatggggcgaactatcttagcgaactga

SEQ ID NO: 484177 - DNA, 75 bp, synthetic construct
  source 1..75: mol_type = other DNA
cacattattatgtttcgccactccattcctggtcgtagctatcgctttcacgcctttcggcagaaaggtgcgtga

SEQ ID NO: 484178 - DNA, 75 bp, synthetic construct
  source 1..75: mol_type = other DNA
atgaacggcttttcatttcagtatcagggcattgcctttaaagcatctcagttgggtaagaaatatggctgggct

SEQ ID NO: 484179 - DNA, 75 bp, synthetic construct
  source 1..75: mol_type = other DNA
tgcggaagacatattgcttccattacctgaacgacccaaacctctattagatgaatatttagatacgaaaacaat

SEQ ID NO: 484180 - DNA, 75 bp, synthetic construct
  source 1..75: mol_type = other DNA
attcgtaaaagcatcattccagcatttaaaaacggcgacctggcaggcggcttgcaaaaaggaataagcgatatt

SEQ ID NO: 484181 - DNA, 75 bp, synthetic construct
  source 1..75: mol_type = other DNA
gctacgcgggtattcgatagctggaaaccaggtgataaagaccgcgatgatggcgttctactgttagtcgcctgg

SEQ ID NO: 484182 - DNA, 75 bp, synthetic construct
  source 1..75: mol_type = other DNA
aatgacggcaatccgcgacggcgtccggggcaaagataaactggatgtgcccattaagttcatctggaactacgc

SEQ ID NO: 484183 - DNA, 75 bp, synthetic construct
  source 1..75: mol_type = other DNA
tgctgttgtgcggcattctcggcagcgcgacgctgatgtccggctgtgcgttgattcgcaaggattccgcgcctc

SEQ ID NO: 484184 - DNA, 75 bp, synthetic construct
  source 1..75: mol_type = other DNA
cagagcaacatgtacgaagtctgtttacagctaccagccagacttgtttcaggactgcggagatgcgagtactta

SEQ ID NO: 484185 - DNA, 75 bp, synthetic construct
  source 1..75: mol_type = other DNA
cgttcagaggtatcgcaacctgcattttatccggtgtttcgcacctgccccgttcgtgacacaaaggcgcgacac

SEQ ID NO: 484186 - DNA, 75 bp, synthetic construct
  source 1..75: mol_type = other DNA
agcgcccggagcaggacttcctcggcattgaagtgcattcgccgggcgttggcgcttgtctggcttctgcgcatg

SEQ ID NO: 484187 - DNA, 75 bp, synthetic construct
  source 1..75: mol_type = other DNA
gagcatgatttatatgccctgagcgagcaacagaaggcagcctgcgtggtgctgaatccggaaaagtcccaccct

SEQ ID NO: 484188 - DNA, 75 bp, synthetic construct
  source 1..75: mol_type = other DNA
tggtacggggatttattgcagagcggtatgtacaaagtatgtttacaggtaccggtcagatttgctgctggaccc

SEQ ID NO: 484189 - DNA, 75 bp, synthetic construct
  source 1..75: mol_type = other DNA
tatcgccattaccggtcgtgctggagtggcattgtgtgatgtgcgggcagcatttttccgggaaaaagttctgcg

SEQ ID NO: 484190 - DNA, 75 bp, synthetic construct
  source 1..75: mol_type = other DNA
taaaaacgctaaagatttcaatatctacaaccccgtttatggcaataccagcaaatgcacaacggtttcggcgtc

SEQ ID NO: 484191 - DNA, 75 bp, synthetic construct
  source 1..75: mol_type = other DNA
ctccgttcgatcgtggaacgattttcgaccttacgacgaaacagcccgtaaacgttgatcgaaaaatacgttttg

SEQ ID NO: 484192 - DNA, 75 bp, synthetic construct
  source 1..75: mol_type = other DNA
caggactcaaaggtcgggcgctcttttcactgctttttgcggcaccgatgattcatgcaacagactctgtaacga

SEQ ID NO: 484193 - DNA, 75 bp, synthetic construct
  source 1..75: mol_type = other DNA
ggggtgtcatatgaatattatgatcttctgcgcacagatatgattcgctgtaaaaaagctaaagatttcaatatc

SEQ ID NO: 484194 - DNA, 75 bp, synthetic construct
  source 1..75: mol_type = other DNA
tgagcacctccacggcgacattaaccgatatgccgatgctggatatcccgcaggtggtcaatacggttagcgatc

SEQ ID NO: 484195 - DNA, 75 bp, synthetic construct
  source 1..75: mol_type = other DNA
tgcttacgaagtcggggcaaaattcgagctgttcgatggtatcaccgcagatattgcgctgtttgatatccataa

SEQ ID NO: 484196 - DNA, 75 bp, synthetic construct
  source 1..75: mol_type = other DNA
cacaaatgcttgagtctgatgcagccatattcctgaaacgcgccatagttgcgaggatgcttcaaaaaataaaat

SEQ ID NO: 484197 - DNA, 75 bp, synthetic construct
  source 1..75: mol_type = other DNA
ttaacgggcaactccacgccgtaaatgctgaaaagcagcaagtgactcaaaccatgaatgcgggcgtcgtttcca

SEQ ID NO: 484198 - DNA, 75 bp, synthetic construct
  source 1..75: mol_type = other DNA
ggcgatcgctggcctctatttcctgctgcaaacccgctggggagcagagcatatcagcgcatggatttccaggaa

SEQ ID NO: 484199 - DNA, 75 bp, synthetic construct
  source 1..75: mol_type = other DNA
gacaccacaggaacagaaagaggcagagacccgtttaatgatgctgaatgaccgacgaaaagccagaaaacctcg

SEQ ID NO: 484200 - DNA, 75 bp, synthetic construct
  source 1..75: mol_type = other DNA
atggaagaccagatcattaacgatctgaatgacactcgtatcaaacgccaggggatttccctctccggcggcgat

SEQ ID NO: 484201 - DNA, 75 bp, synthetic construct
  source 1..75: mol_type = other DNA
atgatgaaaaatacaggctatatcttagctctttgtctgacagcatcggagcatgccctggcccacgatgtctgg

SEQ ID NO: 484202 - DNA, 75 bp, synthetic construct
  source 1..75: mol_type = other DNA
cggtagctggcaggtggaaaatctgcgcctggcggatatccgtctgcaaagcgaaaaatcgctcaccgacttctt

SEQ ID NO: 484203 - DNA, 75 bp, synthetic construct
  source 1..75: mol_type = other DNA
tgccggtatctcgatgccatactggagcaataccatcaggggcgtgataaccgtctggcgtatcgtattgcccgc

SEQ ID NO: 484204 - DNA, 75 bp, synthetic construct
  source 1..75: mol_type = other DNA
gttcatcaccctgttggttctgctgtgcttcaacctgttgggcgaaggttttgaagttgcgctgcctcgcgtggt

SEQ ID NO: 484205 - DNA, 75 bp, synthetic construct
  source 1..75: mol_type = other DNA
ccatcattcaaataacaggaataaaccacggctactggatcctgctgaccagcctgttcgtctgccagccaaact

SEQ ID NO: 484206 - DNA, 75 bp, synthetic construct
  source 1..75: mol_type = other DNA
cgggttactgattgcattactgccagaaattggccgtctgcaacgtcggattactcaagttcctcaggaaactcc

SEQ ID NO: 484207 - DNA, 75 bp, synthetic construct
  source 1..75: mol_type = other DNA
tgctttaacttgctgggtgaaggttttgaagtcgcactgcctcgcgttatcgatacgctgatcggatgcgtaata

SEQ ID NO: 484208 - DNA, 75 bp, synthetic construct
  source 1..75: mol_type = other DNA
atacctggaacagcgcctggctgtattacgcccgcatttttatcgcactttgcggtactactgcgtttccgtggt

SEQ ID NO: 484209 - DNA, 75 bp, synthetic construct
  source 1..75: mol_type = other DNA
tggcggcagccagccatcgcagagtcagatgagcgcgtactataaccacagcagtccgctggccagcctgtcagc

SEQ ID NO: 484210 - DNA, 75 bp, synthetic construct
  source 1..75: mol_type = other DNA
tcacaagtctcgatgaagttgacgaagcacgccgcctgatcgagcgtgccggacgtgaagtcgaagaaatgattg

SEQ ID NO: 484211 - DNA, 75 bp, synthetic construct
  source 1..75: mol_type = other DNA
agcgcgacgcctgattgaacgtgccgggcgtgaagtcgaagagatgatcggttatgcaattcccaaaccacgcat

SEQ ID NO: 484212 - DNA, 75 bp, synthetic construct
  source 1..75: mol_type = other DNA
tcttcatcctggaatgttacgtgctctggcgatgatcgcccgtgaggcggaaacgcagggaatcgatctgcgttt

SEQ ID NO: 484213 - DNA, 75 bp, synthetic construct
  source 1..75: mol_type = other DNA
cgtcgctcttttctacccaaccgctgtggcaaatcgcgatggttcttcaggcgacgcaggcgcaaaaactggggc

SEQ ID NO: 484214 - DNA, 75 bp, synthetic construct
  source 1..75: mol_type = other DNA
ataaattacgcgccatgccgtcggggcgctatgtggtcgcggttggtgcactacacctgtatggagaagggaatt

SEQ ID NO: 484215 - DNA, 75 bp, synthetic construct
  source 1..75: mol_type = other DNA
agtacctgtctgacacgcgggaggggctgaagcaccaggactatccccgcacgcgccaggtgaaaatttttctga

SEQ ID NO: 484216 - DNA, 75 bp, synthetic construct
  source 1..75: mol_type = other DNA
ttgcgaatttactgttggctccttacttcaagaatattgctgataattatcagcaagctttacgtgatgttgttg

SEQ ID NO: 484217 - DNA, 75 bp, synthetic construct
  source 1..75: mol_type = other DNA
aaccacagccttccttgctacacggcgatttgtggtccgggaactgcgcgctgggtccagatggcccgtacattt

SEQ ID NO: 484218 - DNA, 75 bp, synthetic construct
  source 1..75: mol_type = other DNA
ttgattccctgaaaccatatctcgataaaggcgatatcatcattgatggtggtaataccttcttccaggacacca

SEQ ID NO: 484219 - DNA, 75 bp, synthetic construct
  source 1..75: mol_type = other DNA
tccgtaaaagaagaacgtttccgtgcgtttttaggcgtgccaattattcaacgtcgccagttacttggtgtactg

SEQ ID NO: 484220 - DNA, 75 bp, synthetic construct
  source 1..75: mol_type = other DNA
attgctggtcgatccggagccggtactgctgcaagaatatcagcggctaattagtgaagagattgagcttagccg

SEQ ID NO: 484221 - DNA, 75 bp, synthetic construct
  source 1..75: mol_type = other DNA
gccttacatgccgatcagcgaagagaatccatgcctgggttggcgtgggattcgcattacgctcgatcagccgga

SEQ ID NO: 484222 - DNA, 75 bp, synthetic construct
  source 1..75: mol_type = other DNA
ccggggcgctatgtggtcgcggtcggtgctttacatctgtatggagaagggaatttgccgcagatgttgcgctaa

SEQ ID NO: 484223 - DNA, 75 bp, synthetic construct
  source 1..75: mol_type = other DNA
ggcacagcgtgactatttcggagcacatacttataagcgtattgataaagaaggtgtgttccataccgaatggct

SEQ ID NO: 484224 - DNA, 75 bp, synthetic construct
  source 1..75: mol_type = other DNA
ctgttctgcctgcgaacctgatccaggcacagcgtgactatttcggtgcacatacttataagcgcattgataaag

SEQ ID NO: 484225 - DNA, 75 bp, synthetic construct
  source 1..75: mol_type = other DNA
gatggtgctggtcactatgtgaagatggttcacaacggtattgaatacggagatatgcaactgattgctgaagcc

SEQ ID NO: 484226 - DNA, 75 bp, synthetic construct
  source 1..75: mol_type = other DNA
cagtgccgactctgcgctcagcagaaatatccggcattgtttctgcctttcctgccatggccggttgattctgca

SEQ ID NO: 484227 - DNA, 75 bp, synthetic construct
  source 1..75: mol_type = other DNA
tggttcacaacggtattgaatacggcgatatgcagctgattgccgaagcctattctctgctaaaaggtggcctga

SEQ ID NO: 484228 - DNA, 75 bp, synthetic construct
  source 1..75: mol_type = other DNA
agatgaagatggtaactacctggttgatgtgatcctggatgaagcagcaaacaaaggtacgggcaaatggaccag

SEQ ID NO: 484229 - DNA, 75 bp, synthetic construct
  source 1..75: mol_type = other DNA
cagtgctgattctgcgctcagcagaaacatcaggcattgtttctgcctttcctgtcgtggtcggttgattttgca

SEQ ID NO: 484230 - DNA, 75 bp, synthetic construct
  source 1..75: mol_type = other DNA
aatatcacgatgctctacgttacattaaggaacaaacccgcctctatgaatccggcgctatatcgcaagcgaaga

SEQ ID NO: 484231 - DNA, 75 bp, synthetic construct
  source 1..75: mol_type = other DNA
taaaggtgacatcattattgatggtggtaataccttcttccaggatactattcgtcgtaaccgtgagctttctgc

SEQ ID NO: 484232 - DNA, 75 bp, synthetic construct
  source 1..75: mol_type = other DNA
agcaacagaaggcggactgtgtggtgctgaatccggagaagtcccacccttacattgaggatatggcgatgtttt

SEQ ID NO: 484233 - DNA, 75 bp, synthetic construct
  source 1..75: mol_type = other DNA
ggatcacgccgggtgagcacattatcagtgccgacgctgcgctcagcagaaagatccggcattgtttctgccttt

SEQ ID NO: 484234 - DNA, 75 bp, synthetic construct
  source 1..75: mol_type = other DNA
tgaatacggatatcacttttgcgggttaccgcttctctgaacgtaagcgtcaacggagcaccgtattgacgctta

SEQ ID NO: 484235 - DNA, 75 bp, synthetic construct
  source 1..75: mol_type = other DNA
gaacatcactcataacgtgaactacagcgacgctgaccgggcagagattcagcgtcagctgactgaacagtatct

SEQ ID NO: 484236 - DNA, 75 bp, synthetic construct
  source 1..75: mol_type = other DNA
tgatgccatcaaccgctggataccttatgacaagtcagttgtgtcagcacagaaagaacttagcaaactgtcggt

SEQ ID NO: 484237 - DNA, 75 bp, synthetic construct
  source 1..75: mol_type = other DNA
gtatcagcttcagcgggccgtgggcgcagttccgtctgttcggggccggacaactgaccggagtacaggatggca

SEQ ID NO: 484238 - DNA, 75 bp, synthetic construct
  source 1..75: mol_type = other DNA
cgtggtgtctatctcacctcgtcactgcaacgcggccagatggatgacatctttacccagtccgccgcccgccag

SEQ ID NO: 484239 - DNA, 75 bp, synthetic construct
  source 1..75: mol_type = other DNA
aaaaacactgcctgctccgctcaaccgctgggtaggcaggctggctgaccaggcctggcatgtggtgatggtgga

SEQ ID NO: 484240 - DNA, 75 bp, synthetic construct
  source 1..75: mol_type = other DNA
cggaagatttctaccttgatcttgctgggttgctgggtgaactgatgacctttaccgagccgtcgcgcctgccct

SEQ ID NO: 484241 - DNA, 75 bp, synthetic construct
  source 1..75: mol_type = other DNA
gaccggtgcgctggagcagattatcagtggtgaccagccacttcagcgggcgctgactgccctgcgtgataacac

SEQ ID NO: 484242 - DNA, 75 bp, synthetic construct
  source 1..75: mol_type = other DNA
atgaaagacatcgatactgaaacccggaataacaccatggcggatgatgtgacggcatgtgaggatatggctgcc

SEQ ID NO: 484243 - DNA, 75 bp, synthetic construct
  source 1..75: mol_type = other DNA
ttaaacgcggcgaccaggaaatcaaatccgtcgcaatcaccgacacaatcaagcaggctggctcactgcgcgggc

SEQ ID NO: 484244 - DNA, 75 bp, synthetic construct
  source 1..75: mol_type = other DNA
ggtggtggcaggtctatccggtgcagcagcaactgttacaggttaacgacaccgctcagggcgcagcaacggtgt

SEQ ID NO: 484245 - DNA, 75 bp, synthetic construct
  source 1..75: mol_type = other DNA
ttacggcctgcaaagctattttgtaaaacagcgcgatgaactggttgaactgacggcgatggattcctgggtact

SEQ ID NO: 484246 - DNA, 75 bp, synthetic construct
  source 1..75: mol_type = other DNA
gtgttcaaattaccaaccccgcgactcttcagcggactcaaatcagcccttcggccagccatgcccaggtttaaa

SEQ ID NO: 484247 - DNA, 75 bp, synthetic construct
  source 1..75: mol_type = other DNA
ggatactttctatcagcagaatctgaagctgtttatcgacaatgacctgcatctggaggatggcgataacagcgt

SEQ ID NO: 484248 - DNA, 75 bp, synthetic construct
  source 1..75: mol_type = other DNA
gattccatgttcacgctgctgccacgcgtgacctcgccacgactggatgaagtgacgatcaaaaaaatgtcatcc

SEQ ID NO: 484249 - DNA, 75 bp, synthetic construct
  source 1..75: mol_type = other DNA
ccgccgtgagtatctgctacagacgctgcgcagccgcctccaggatgtacgccagcagcttcactgccagttgcc

SEQ ID NO: 484250 - DNA, 75 bp, synthetic construct
  source 1..75: mol_type = other DNA
ccggcttgatttattgcagggttttgccgccctgtttcagtccctgaacagacaggatcgcgatgcgattctggg

SEQ ID NO: 484251 - DNA, 75 bp, synthetic construct
  source 1..75: mol_type = other DNA
gacggcaggtgaggatatggctgtcgaacgtggtgtaaaactttcccggccaattgagcgtggtggcgaaaaaat

SEQ ID NO: 484252 - DNA, 75 bp, synthetic construct
  source 1..75: mol_type = other DNA
attgaccaggctggatccctgcgtggtctgtcgctgtctgatgtgctgaatctgaaagcggataccatgttgatg

SEQ ID NO: 484253 - DNA, 75 bp, synthetic construct
  source 1..75: mol_type = other DNA
attgatcaggctggatccctgcgtggtctgtcgctgtctgatgtgctgaatctgaaagcggataccatgttgacg

SEQ ID NO: 484254 - DNA, 75 bp, synthetic construct
  source 1..75: mol_type = other DNA
caactggaaactgcgcagaaaatccgtgacatcttcttcagcaaacagaacggtctgggaacatcctttgccgtg

SEQ ID NO: 484255 - DNA, 75 bp, synthetic construct
  source 1..75: mol_type = other DNA
cgctgaccgtgctgcgtgacaacacacagccaggcgtcttttctgaaaaactctctgccaaagaacgggatgagg

SEQ ID NO: 484256 - DNA, 75 bp, synthetic construct
  source 1..75: mol_type = other DNA
gcccatctggtctggcctaacaacatgcgcgaaggcaacgaaagtaagctgacgctcatcggcaccagcggcaac

SEQ ID NO: 484257 - DNA, 75 bp, synthetic construct
  source 1..75: mol_type = other DNA
tgaacgcccagcagcgttacctcgaccgctggttactgcgcctgcaacgccatctcgacaaccgccgctacctgt

SEQ ID NO: 484258 - DNA, 75 bp, synthetic construct
  source 1..75: mol_type = other DNA
acgctgtatgaagaacagtggctcaaaccactggcgaaccgctggctggcaacggcggcatgggggattatcgcc

SEQ ID NO: 484259 - DNA, 75 bp, synthetic construct
  source 1..75: mol_type = other DNA
tacaccgccacctggcgggccgggatggacaatctgaatatccgcaattttgagtccatcggacaactgaccggg

SEQ ID NO: 484260 - DNA, 75 bp, synthetic construct
  source 1..75: mol_type = other DNA
gcggatttccgacagttatccggagtggagatacgcccgaatccggcagaagggatgctgtacatcaatatgccg

SEQ ID NO: 484261 - DNA, 75 bp, synthetic construct
  source 1..75: mol_type = other DNA
atcgttctgttactgatgtttctcgcactgtggctggtgaactggtcgatgagcatcattggcgtgacggttctg

SEQ ID NO: 484262 - DNA, 75 bp, synthetic construct
  source 1..75: mol_type = other DNA
ggactgctgcgtaaacaccgccccggcgcaccgctcaacggcgtgatcctgacgctgaacgtggcggatctgact

SEQ ID NO: 484263 - DNA, 75 bp, synthetic construct
  source 1..75: mol_type = other DNA
gctcatgcaactgagcacaaacatccagttcataaagcagaactcacctttgtaactaatgaggatggtatcgtc

SEQ ID NO: 484264 - DNA, 75 bp, synthetic construct
  source 1..75: mol_type = other DNA
ttctgcgtactcttctggtatggccactggtcacctttcgttatctgcaggaattgtgcgaactggataaacttg

SEQ ID NO: 484265 - DNA, 75 bp, synthetic construct
  source 1..75: mol_type = other DNA
aaacacgtcccggtgacggaaaaaataacaaagcaaagaacctgtcggtgatgacattgcttgtaaagctgatga

SEQ ID NO: 484266 - DNA, 75 bp, synthetic construct
  source 1..75: mol_type = other DNA
ctggcggaactgcgggagacgctgggtattcgttttccggtctatctggtcgtcaccaagatggatctgctgccg

SEQ ID NO: 484267 - DNA, 75 bp, synthetic construct
  source 1..75: mol_type = other DNA
cgttttgtcaacatatatgaaaccgggatactggtcgagaacctcttcaggatggaaaccggtcagccgggaggg

SEQ ID NO: 484268 - DNA, 75 bp, synthetic construct
  source 1..75: mol_type = other DNA
ccgctgccgaagttgattatcaaacgtaaacccgaatccatcttcgactaccgtttcgaagactttgagattgaa

SEQ ID NO: 484269 - DNA, 75 bp, synthetic construct
  source 1..75: mol_type = other DNA
tgatctggaagtgggcgattttgtctggacgggggcgacacgcacctgtacagcaatcatatggatcaaactcat

SEQ ID NO: 484270 - DNA, 75 bp, synthetic construct
  source 1..75: mol_type = other DNA
tttgtgactaaatatgcaaaatcttttattcctggtgaacagcagatgccagcacaactctatcagtctccaaca

SEQ ID NO: 484271 - DNA, 75 bp, synthetic construct
  source 1..75: mol_type = other DNA
tagctctttgtctgacagcatcggagcatgccctggcccacgatgtctggattaccggtaaacaggcagagaaca

SEQ ID NO: 484272 - DNA, 75 bp, synthetic construct
  source 1..75: mol_type = other DNA
attcctgacagaagggatttctttgaaaatccccggctttataacgggaaagagacaataacactgaagccagcg

SEQ ID NO: 484273 - DNA, 75 bp, synthetic construct
  source 1..75: mol_type = other DNA
actggtatgttctagagttttgttctgcacgtacagcacgagtgttttctcatctggaaaggttaggggtaacat

SEQ ID NO: 484274 - DNA, 75 bp, synthetic construct
  source 1..75: mol_type = other DNA
actcgcgactctgtgtaccagaaccagcatgaatcggaacggaactaccaaaaagcggaacaaaacagtccaaat

SEQ ID NO: 484275 - DNA, 75 bp, synthetic construct
  source 1..75: mol_type = other DNA
aattcagtaaccgctttatcgtagcacctgaatttaaccgccgtacaaacgccggaaaagaagaagagaaagcgt

SEQ ID NO: 484276 - DNA, 75 bp, synthetic construct
  source 1..75: mol_type = other DNA
tctaaaacgctggcgtacagtggcaatcagcactggagaaatggatttagaaacatttatcgctacttccgggcg

SEQ ID NO: 484277 - DNA, 75 bp, synthetic construct
  source 1..75: mol_type = other DNA
aatttcgacccatctgttaggctctaacgcctccagcgtgatccgtcacgctaatctgcctgtactggtcgttcg

SEQ ID NO: 484278 - DNA, 75 bp, synthetic construct
  source 1..75: mol_type = other DNA
tattgattaccgggcagcgcaatccgacccggtggcagcgagccatagaagggagcaactggaagctgaccgcca

SEQ ID NO: 484279 - DNA, 75 bp, synthetic construct
  source 1..75: mol_type = other DNA
tttggtaactattcaatgatgaccgggatcggcgcagcactggcagcgccattgattgggctggtgggcgctgac

SEQ ID NO: 484280 - DNA, 75 bp, synthetic construct
  source 1..75: mol_type = other DNA
ttgctgcggaataggcgacactgacggctggcgattactgaaagccaacgggcttaaagtcacgacaaacggaaa

SEQ ID NO: 484281 - DNA, 75 bp, synthetic construct
  source 1..75: mol_type = other DNA
cgggcaaagatgccgcagagaaagccgccttatccgtggctggctgggtggcgctgccgccgacagactacaaag

SEQ ID NO: 484282 - DNA, 75 bp, synthetic construct
  source 1..75: mol_type = other DNA
ttcagacggaaagaagtgccgctgtttcctggatatgtgttcataaagatcgatttcaataagacccatagcaca

SEQ ID NO: 484283 - DNA, 75 bp, synthetic construct
  source 1..75: mol_type = other DNA
gcccggctgtttaatggcatgtttgagcctcagccgaaggagaactggacggatgtacttccacggctcagggaa

SEQ ID NO: 484284 - DNA, 75 bp, synthetic construct
  source 1..75: mol_type = other DNA
tactcgcctttgccgcgtggagtggcactggaaaaactacgctgctgaaaaaactgatcccggcattatgcgcca

SEQ ID NO: 484285 - DNA, 75 bp, synthetic construct
  source 1..75: mol_type = other DNA
cggatagctacggcgagcaggtccaccgcgtgggggagcgtttcgccatactggaggctgcgcttgtgctttccg

SEQ ID NO: 484286 - DNA, 75 bp, synthetic construct
  source 1..75: mol_type = other DNA
tttggttaggtcgaagagatgacatccaaaatttaatcagaaatagccatgtcgtgattttgccaactaaatatt

SEQ ID NO: 484287 - DNA, 75 bp, synthetic construct
  source 1..75: mol_type = other DNA
atgtatggcgtatttttgctgatccagaccaaaacgcatcaaagtttgtttgtctacgagcacgaagatgacagt

SEQ ID NO: 484288 - DNA, 75 bp, synthetic construct
  source 1..75: mol_type = other DNA
gcatcgcctcgccgaggtattgcaatgttcaccaacttggatactgtttggcgacgaggacaaaacaccagctcc

SEQ ID NO: 484289 - DNA, 75 bp, synthetic construct
  source 1..75: mol_type = other DNA
cgcacattatggtcgtagagcgcgattatccggcgacttacgaacgctttacctctatcggcccgctgatggaga

SEQ ID NO: 484290 - DNA, 75 bp, synthetic construct
  source 1..75: mol_type = other DNA
tcagccagctgattgctatagctggcttaaaattcctgctgatatcggcatcatggatgctcttaatagcgggaa

SEQ ID NO: 484291 - DNA, 75 bp, synthetic construct
  source 1..75: mol_type = other DNA
ggtggaaatgcgtgtgtccgcgctgttgcagttaaaacggcacttggttgatttgcgcgagaagtgttctggctc

SEQ ID NO: 484292 - DNA, 75 bp, synthetic construct
  source 1..75: mol_type = other DNA
ctgttagttggctatccgtttatgacggatatcagtccacttgcaggcgctgccttcacgcttattccttccatc

SEQ ID NO: 484293 - DNA, 75 bp, synthetic construct
  source 1..75: mol_type = other DNA
aacataatcaggcgcgggcaaacgttcttacactccgctcgcttcttgacacctacgcctcaacccattccaaaa

SEQ ID NO: 484294 - DNA, 75 bp, synthetic construct
  source 1..75: mol_type = other DNA
caccagcgaacaggaagcacgccagcaatccccggctggctgcgtgatggtattcgccgcccgtattcgtcaggg

SEQ ID NO: 484295 - DNA, 75 bp, synthetic construct
  source 1..75: mol_type = other DNA
ccttgagctttttaatgcattgcctgaatcagaacaggatgctcagctcaccgagatgcgcgcccgagtaaataa

SEQ ID NO: 484296 - DNA, 75 bp, synthetic construct
  source 1..75: mol_type = other DNA
gtgattgagatgaccaaccgctacatgggccgcaatgcgcaatttatgctcgatgtgatgcgcgagacagggatc

SEQ ID NO: 484297 - DNA, 75 bp, synthetic construct
  source 1..75: mol_type = other DNA
acaggacgaccgatctccacgcatacctcttttagcaccatggggctggagcaactggcgctattgcaagcccag

SEQ ID NO: 484298 - DNA, 75 bp, synthetic construct
  source 1..75: mol_type = other DNA
agcaaactgacgtaccggaatctgctgactggtacaactccagctacatcatcgcctgggggtcaaacgtgccgc

SEQ ID NO: 484299 - DNA, 75 bp, synthetic construct
  source 1..75: mol_type = other DNA
gctggaaaatctacgttaaaaacggtctggtgacctgggaaaaccaacagactgactacccgcgcactcgcccgg

SEQ ID NO: 484300 - DNA, 75 bp, synthetic construct
  source 1..75: mol_type = other DNA
gctggaaaatctacgttaaaaaaggtctggtgacctgggaaaaccaccagactgactacccgcgcactcgcccgg

SEQ ID NO: 484301 - DNA, 75 bp, synthetic construct
  source 1..75: mol_type = other DNA
tcccatggcgtacgctctctggccgtcagcagttgtatcaggatcatcagtggatgcgtgatttcggtgaaagcc

SEQ ID NO: 484302 - DNA, 75 bp, synthetic construct
  source 1..75: mol_type = other DNA
attatgggcggtgtagattcaatctgtcaatgcaacacccctttcaattatctctttcggtgttttgaacttcag

SEQ ID NO: 484303 - DNA, 75 bp, synthetic construct
  source 1..75: mol_type = other DNA
actgactatccgcgtactcgtccggatctgccaaaccatgaacctcgcggctgcccgcgcggtgccagctactcc

SEQ ID NO: 484304 - DNA, 75 bp, synthetic construct
  source 1..75: mol_type = other DNA
gctggaaaatctacgttaaaaacggtctggtgacctgggaaaaccaccagactgactaaccgcgcactcgcccgg

SEQ ID NO: 484305 - DNA, 75 bp, synthetic construct
  source 1..75: mol_type = other DNA
ccagcccgacctggtctggtctggaagacgaacacgtttcttacaacgccggttacaccaacgttcacgagttga

SEQ ID NO: 484306 - DNA, 75 bp, synthetic construct
  source 1..75: mol_type = other DNA
acttacagcgacaacctgctgatgctgactttaggtcgcggtggtccggtggtctggctgagcgaagccgatgct

SEQ ID NO: 484307 - DNA, 75 bp, synthetic construct
  source 1..75: mol_type = other DNA
tatttcaccgactatgtgcgtcgctacaccgacatgccgatgctggtgatgctggaagaacgcgacggttactac

SEQ ID NO: 484308 - DNA, 75 bp, synthetic construct
  source 1..75: mol_type = other DNA
ctcgatatgaactatcgcggtctgatcaacatgctgattttctgcggctgtgtcggtcagagcgggggcggctgg

SEQ ID NO: 484309 - DNA, 75 bp, synthetic construct
  source 1..75: mol_type = other DNA
ctttactgaagtgcgttacaaaggcaccaaaactgttgccgtcacaccggactacgctgaaatcgccaaactgtg

SEQ ID NO: 484310 - DNA, 75 bp, synthetic construct
  source 1..75: mol_type = other DNA
ccgtgaaatccctgaaagagggttctatccgttttgcggcagaacaaccagaaaacggtaaaaaccacccgcgca

SEQ ID NO: 484311 - DNA, 75 bp, synthetic construct
  source 1..75: mol_type = other DNA
gcagacagtgcaattgatgcaataaactgtgccgttgttttgattgaaatgttcaagggggttgttatacctaaa

SEQ ID NO: 484312 - DNA, 75 bp, synthetic construct
  source 1..75: mol_type = other DNA
gataacccgacattgaataaattgagtgaagaaacccggctacagattattccttaccttgtgaattttgccttt

SEQ ID NO: 484313 - DNA, 75 bp, synthetic construct
  source 1..75: mol_type = other DNA
gcggcagcatcagtggggaacatggcatcgggcgagaaaaaatcaatcaaatgtgcgcccagttcaacagcgatg

SEQ ID NO: 484314 - DNA, 75 bp, synthetic construct
  source 1..75: mol_type = other DNA
acccggcttcatggcacacctgtttataagatttgtgggcgttgcaatggaaaacggtttagtcgtttaccaaca

SEQ ID NO: 484315 - DNA, 75 bp, synthetic construct
  source 1..75: mol_type = other DNA
ccataccagttcgagtctgaaggtaaagcctggctgttcggtactaactttaactacgcgttcgcctggataaag

SEQ ID NO: 484316 - DNA, 75 bp, synthetic construct
  source 1..75: mol_type = other DNA
aacggtaaccagtggggctttggctggaacgccggaatcctgtatgaactggataaaaataaccgctatgcactg

SEQ ID NO: 484317 - DNA, 75 bp, synthetic construct
  source 1..75: mol_type = other DNA
atgaaccttgaagccttaccgaaatattactccccgaaatctccaaaattgagcgatgacgcaccggcgacaggc

SEQ ID NO: 484318 - DNA, 75 bp, synthetic construct
  source 1..75: mol_type = other DNA
taattgctgcgcaggggatggtgcagtcgaaagcaccactgggttttgccttattcctggcaaaagttggtgttc

SEQ ID NO: 484319 - DNA, 75 bp, synthetic construct
  source 1..75: mol_type = other DNA
atggtgtattaaaaatcttggtaacaggattgaaacaactgaatatcttgacaatgatgctttcgaatcaaaaca

SEQ ID NO: 484320 - DNA, 75 bp, synthetic construct
  source 1..75: mol_type = other DNA
ccaagaagaagataaaaaactcaaagctattttcataacgcacagtattgcaacaaaggataatatagaaaatct

SEQ ID NO: 484321 - DNA, 75 bp, synthetic construct
  source 1..75: mol_type = other DNA
atgagcatcttgtacgaagagcgtcttgacggcgctttacccgatgtcgatcgcgcatcggtactgatggcactg

SEQ ID NO: 484322 - DNA, 75 bp, synthetic construct
  source 1..75: mol_type = other DNA
gagcgatgacgctccagcgacaggcaccggttgtttaacaattacggatgtaatggcagcgcaggggatggtgca

SEQ ID NO: 484323 - DNA, 75 bp, synthetic construct
  source 1..75: mol_type = other DNA
attactccccgaaatctccaaaactgagcgatgacgcaccggcgacaggctctggtggtttaacgattacggatg

SEQ ID NO: 484324 - DNA, 75 bp, synthetic construct
  source 1..75: mol_type = other DNA
aaataaccgctatgcactgacctaccgttctgaagtgaaaattgacttcaaaggtaactacagcagcgatcttaa

SEQ ID NO: 484325 - DNA, 75 bp, synthetic construct
  source 1..75: mol_type = other DNA
ggggtgggcagctggatcatgcagcagatggtgctctggacccgctccctgccgccggaaacgctggtcggaaga

SEQ ID NO: 484326 - DNA, 75 bp, synthetic construct
  source 1..75: mol_type = other DNA
catccattgttcggccctgatcctgttaaggtattcgcaattaaatgtgatgtgaattggatgctaagaggtgaa

SEQ ID NO: 484327 - DNA, 75 bp, synthetic construct
  source 1..75: mol_type = other DNA
atgaaaagtaaacacctgcatttaaatttaaaaggagaatacttccacgctatccgtgcgggaaagaaggtggag

SEQ ID NO: 484328 - DNA, 75 bp, synthetic construct
  source 1..75: mol_type = other DNA
tatatgtttgtatctttttggaatggggatcaattaatagaaagggagaggtgtttttcagtttttattaacgat

SEQ ID NO: 484329 - DNA, 75 bp, synthetic construct
  source 1..75: mol_type = other DNA
ggtcgcaaaaacagttaattacttcacttcagaatcgtccattttatcatctgttgcacaggaaagggggccagc

SEQ ID NO: 484330 - DNA, 75 bp, synthetic construct
  source 1..75: mol_type = other DNA
tatccgcggtacgccggctggaagactgttatcgcgggctgcaggaaaaaatcgtgcagctcgaaggcaaaaaac

SEQ ID NO: 484331 - DNA, 75 bp, synthetic construct
  source 1..75: mol_type = other DNA
tgaagccatcgaaagagactgataacaacaacgtggaagtcatccgcctgctggaagaagcacttcagcatgcca

SEQ ID NO: 484332 - DNA, 75 bp, synthetic construct
  source 1..75: mol_type = other DNA
ttattgacagaatcaagaggtgtattactttttacaacattatcactgttattagccagtttaaattacataagc

SEQ ID NO: 484333 - DNA, 75 bp, synthetic construct
  source 1..75: mol_type = other DNA
tgattactccaggtctgcggcaagtaaggctcgctgtgagcattgttcaggtacgggattttataatgtattgcg

SEQ ID NO: 484334 - DNA, 75 bp, synthetic construct
  source 1..75: mol_type = other DNA
tcagtggtatagcctggtttttggcctgctgacgtatctgacaaatctttatttcaagattaaagaagacaggcg

SEQ ID NO: 484335 - DNA, 75 bp, synthetic construct
  source 1..75: mol_type = other DNA
cgcgaagtggtgaaacactccagaagcggggaatccattatcaaggcagagagggtgaaggaactatgtcagcat

SEQ ID NO: 484336 - DNA, 75 bp, synthetic construct
  source 1..75: mol_type = other DNA
gcgggcgcccgtatgtcatggtaggggcgatggagtctcttcgcctggatttcatcaatgccaatatcgagcgca

SEQ ID NO: 484337 - DNA, 75 bp, synthetic construct
  source 1..75: mol_type = other DNA
tcgaagtgggtgaaggcatcgagaaagttgagactgactttgcggcagaagttgctgcgatgtccaagcagtctt

SEQ ID NO: 484338 - DNA, 75 bp, synthetic construct
  source 1..75: mol_type = other DNA
taaaagagctgcgtgagcgtactggcgcaggcatgatggattgcaaaaaagcactgactgaagctaacggcgaca

SEQ ID NO: 484339 - DNA, 75 bp, synthetic construct
  source 1..75: mol_type = other DNA
gagaccatcaacgttgtcgggtacgactatcaacgagacgatgaagccactacatggggttccgccgatctccaa

SEQ ID NO: 484340 - DNA, 75 bp, synthetic construct
  source 1..75: mol_type = other DNA
ttaacatcaacgtgataatgagtatggccacctgggcgatggcggaaatcacgtaccagatcacgtacacgaatt

SEQ ID NO: 484341 - DNA, 75 bp, synthetic construct
  source 1..75: mol_type = other DNA
agagcaccattttcccggccctgaatgatataccggcactttccggactcatcgacaccctgatcccactcggtt

SEQ ID NO: 484342 - DNA, 75 bp, synthetic construct
  source 1..75: mol_type = other DNA
agatgactggcaggctgttctgcatattgctgtcttcatccgggcacaggcaccggattcagagctggatatgtg

SEQ ID NO: 484343 - DNA, 75 bp, synthetic construct
  source 1..75: mol_type = other DNA
ggcatgggatcaccctgccctgtttatcccaggcggcaattctccgtatgttagcgagcagtatcgtgatgattt

SEQ ID NO: 484344 - DNA, 75 bp, synthetic construct
  source 1..75: mol_type = other DNA
tctttcgccggaaggtttaggggcgttaaaagcggtattaaacaaccaggtccagcgcgcgatgaatctgttctt

SEQ ID NO: 484345 - DNA, 75 bp, synthetic construct
  source 1..75: mol_type = other DNA
tctgtcaccggaaggtttaggcgcgttaaaagcggttttaaacaatcaggttcagcgcgcgatgaatctgttctt

SEQ ID NO: 484346 - DNA, 75 bp, synthetic construct
  source 1..75: mol_type = other DNA
cgtccctgaccttacgagtcttgtcgagaccatcaacgttgtcgggtacgactatcaacgagacgatgaagccac

SEQ ID NO: 484347 - DNA, 75 bp, synthetic construct
  source 1..75: mol_type = other DNA
ctgaggagtcacaggaaaaagtcacgtactggaataacgggcagtgtgcagacttcagtcagttagctggggtag

SEQ ID NO: 484348 - DNA, 75 bp, synthetic construct
  source 1..75: mol_type = other DNA
ctacacaaaatcagcacaataattctcccatcgtccttgttcatggtctgtttggtagtctcgacaacctcggcg

SEQ ID NO: 484349 - DNA, 75 bp, synthetic construct
  source 1..75: mol_type = other DNA
cacgtcaggattcacgaatgctgttggcaaccaggcattcggcaagcggtcaagtcactcagtggataaaaagag

SEQ ID NO: 484350 - DNA, 75 bp, synthetic construct
  source 1..75: mol_type = other DNA
tgagcgagcagttaggtgaaggtgaaatcgaactgcgtaatgaactgcctggcggagaagtccatgccgcatggc

SEQ ID NO: 484351 - DNA, 75 bp, synthetic construct
  source 1..75: mol_type = other DNA
tgatttatggtccggaaactgtgcgctgggtccgaatggcccgtacatcttcgatcccgcttgttactggggtga

SEQ ID NO: 484352 - DNA, 75 bp, synthetic construct
  source 1..75: mol_type = other DNA
atttacgctacgcaggacgtgactttttcgtcaaatgtgatgaaagggaactgctttccggttttaccgccgaag

SEQ ID NO: 484353 - DNA, 75 bp, synthetic construct
  source 1..75: mol_type = other DNA
ggtaacaccttcttccaggacaccattcgtcgtaaccgtgagctttctgcagaaggctttaactttatcggtacc

SEQ ID NO: 484354 - DNA, 75 bp, synthetic construct
  source 1..75: mol_type = other DNA
ccttgcgctcaatatcgaaagccgtggttataccgtctctattttcaaccgttcccgtgaaaagacggaagaagt

SEQ ID NO: 484355 - DNA, 75 bp, synthetic construct
  source 1..75: mol_type = other DNA
atgaaaaataatacctcttttgctgttaatggcattacatatgcgttgttgttttccctggctggcgcaccggct

SEQ ID NO: 484356 - DNA, 75 bp, synthetic construct
  source 1..75: mol_type = other DNA
tgttgaagcgcctgcgggttccgaagatgccacattaatgatggcccgcgtgcagcaacatcaagggcaagcctc

SEQ ID NO: 484357 - DNA, 75 bp, synthetic construct
  source 1..75: mol_type = other DNA
gcagagtctggctgggtggaattccgcactgccacccttgttgcggaagaattgcaccagctcggctattcactg

SEQ ID NO: 484358 - DNA, 75 bp, synthetic construct
  source 1..75: mol_type = other DNA
caagtcactcagtggataaaaagagaatttagcttacaaggaatactgacggggatttatcaggatttgatgcat

SEQ ID NO: 484359 - DNA, 75 bp, synthetic construct
  source 1..75: mol_type = other DNA
tcagcactgtatcggggaaagttgaacgtattattagctttgatatagccaggcgttggtatctgcgtgatatcg

SEQ ID NO: 484360 - DNA, 75 bp, synthetic construct
  source 1..75: mol_type = other DNA
atgactcatgtctgctcggtgatcctcattcgtcgttcattcgatatttatcatgaacagcataaaatatcgctg

SEQ ID NO: 484361 - DNA, 75 bp, synthetic construct
  source 1..75: mol_type = other DNA
gtggagcgaagaggatttctcggtggtggtcagctatgacgacatcgccgcgaaaaattactcgttcagcgccgg

SEQ ID NO: 484362 - DNA, 75 bp, synthetic construct
  source 1..75: mol_type = other DNA
caatcttcttgcgcttattggtattttaagtagcgcctttagtgttgtccgtcatgcggacgtattagcccatcg

SEQ ID NO: 484363 - DNA, 75 bp, synthetic construct
  source 1..75: mol_type = other DNA
tcacgttcagtatatttgcttcggcacaatagccgcgtaagaaataccgttctggagcaaaatctgaccgttgaa

SEQ ID NO: 484364 - DNA, 75 bp, synthetic construct
  source 1..75: mol_type = other DNA
atgaaatttattgggaagctgcttctctacattttcatcgctctgttagtggtgatcgctggcctctattttctt

SEQ ID NO: 484365 - DNA, 75 bp, synthetic construct
  source 1..75: mol_type = other DNA
tcacgttcagtatatttgcttcggcacaatagccgcgtaaggaataccgtgctggagcaaaatctgactgttgaa

SEQ ID NO: 484366 - DNA, 75 bp, synthetic construct
  source 1..75: mol_type = other DNA
agatgagttaagtaatattgttttatttccggtaaaagaggatgacccacgtaatcaggttaattttctttatga

SEQ ID NO: 484367 - DNA, 75 bp, synthetic construct
  source 1..75: mol_type = other DNA
caggtccgctgtaaaatctgcggtgcggttgtggagccgtttgactggatgctctctgtggcaaaaagagaaacc

SEQ ID NO: 484368 - DNA, 75 bp, synthetic construct
  source 1..75: mol_type = other DNA
cctggaatattgttttatttccggtaaaagatgatgacccacgtaatcaggttaattttctttatgagctatcgg

SEQ ID NO: 484369 - DNA, 75 bp, synthetic construct
  source 1..75: mol_type = other DNA
atgagccagacgcagctccagagcctgaccgcattttttaaagagaacgtcccgccccgtgcgatgcagtcattt

SEQ ID NO: 484370 - DNA, 75 bp, synthetic construct
  source 1..75: mol_type = other DNA
ctgattccttttcttcttaatagcattagtacggtttcaggaaaggttgaacgcattattagctttgatattgcc

SEQ ID NO: 484371 - DNA, 75 bp, synthetic construct
  source 1..75: mol_type = other DNA
cctacattcctgactaaaaaccatagtaagtgggtattgtaccagcgaaaaaacagagagcttgcttattccagg

SEQ ID NO: 484372 - DNA, 75 bp, synthetic construct
  source 1..75: mol_type = other DNA
agcgctgtgttaaaccaatctaagagttgcttatatggtgttgtgagtcaacaagacattaaaaagatcaatgtc

SEQ ID NO: 484373 - DNA, 75 bp, synthetic construct
  source 1..75: mol_type = other DNA
tgagccggaaatctggacggcgctgaccgcaacgatttacggcgtggatgagtccggtgcgcctgtgggcgatgc

SEQ ID NO: 484374 - DNA, 75 bp, synthetic construct
  source 1..75: mol_type = other DNA
aggattccgtagcacatcatattttataaagatatttaaagattacttcggcatcacccctaaacaacttatcat

SEQ ID NO: 484375 - DNA, 75 bp, synthetic construct
  source 1..75: mol_type = other DNA
aaagaccatattgccatcacgcttctgtccgggttgatgaaaaagagcgtcaggtccgctgtaaaatctgcggtg

SEQ ID NO: 484376 - DNA, 75 bp, synthetic construct
  source 1..75: mol_type = other DNA
tgttcgaacaggtctggcgggagtacccgttgcgtgccggagcaaacccgaagaaatccgcattcagtgcctgga

SEQ ID NO: 484377 - DNA, 75 bp, synthetic construct
  source 1..75: mol_type = other DNA
accggacgcccgatctccacgcatacgtcgttcagcacgatggggctggagcaacctggcgttgctacaagccca

SEQ ID NO: 484378 - DNA, 75 bp, synthetic construct
  source 1..75: mol_type = other DNA
ggagttgatctttcgcgcgtcaccgttggtcactgcgatctgaaagacaacctcgacaacattttgaagatgatc

SEQ ID NO: 484379 - DNA, 75 bp, synthetic construct
  source 1..75: mol_type = other DNA
atgaaactggaagcagcactcaaacattttagtcctcagggaatgcatatcagcgacgatgtaaagggaacctct

SEQ ID NO: 484380 - DNA, 75 bp, synthetic construct
  source 1..75: mol_type = other DNA
tattatcttaaggatgatggaaatagtaggttttttaatgataataaaacatattcttatgttatttaattacaa

SEQ ID NO: 484381 - DNA, 75 bp, synthetic construct
  source 1..75: mol_type = other DNA
ccagtcactgagctataacggtactgcgggagctaacttcggtgcctggcgtctgcgtgcggactatcagggcta

SEQ ID NO: 484382 - DNA, 75 bp, synthetic construct
  source 1..75: mol_type = other DNA
tgtccgggttgacgaaaaagagcgccaggtccgatgcaaaatttgcggtgcggttgtggagccatttgactggat

SEQ ID NO: 484383 - DNA, 75 bp, synthetic construct
  source 1..75: mol_type = other DNA
gctctctgtggcgaaaagagaaagcagactggcagatgatgtaaggctcttgcgtcaggaggagcgggaaaggcg

SEQ ID NO: 484384 - DNA, 75 bp, synthetic construct
  source 1..75: mol_type = other DNA
agactggcagatgatgtaaggctcttgcgccaggaggaacgggaaaggcgaaaaaatatagaaaagctaattcag

SEQ ID NO: 484385 - DNA, 75 bp, synthetic construct
  source 1..75: mol_type = other DNA
aacgtggtggcctgtaccggttattaccaggacgcgtttttcccgcaacatgtggcgacccgcagcgtgcaggaa

SEQ ID NO: 484386 - DNA, 75 bp, synthetic construct
  source 1..75: mol_type = other DNA
atggcccggggcgtgcgtaatgtgattgagatgaccaaccgttacatggggcgcaatgcgcaatttatgctcgat

SEQ ID NO: 484387 - DNA, 75 bp, synthetic construct
  source 1..75: mol_type = other DNA
atagaaaagctaattcagattgagcgtaacgcgaaagcgcggatacgcagggcgacaaaatttagccccgaataa

SEQ ID NO: 484388 - DNA, 75 bp, synthetic construct
  source 1..75: mol_type = other DNA
aggcagtccttataataaaatcctgttttatttctctaatcataccatttcgacagaaaatgatgatgaatcggt

SEQ ID NO: 484389 - DNA, 75 bp, synthetic construct
  source 1..75: mol_type = other DNA
ctcagggcttctcccagctgcgtgccgcttctgatgaatacaactgggatctggactacggtgagatcgctaaga

SEQ ID NO: 484390 - DNA, 75 bp, synthetic construct
  source 1..75: mol_type = other DNA
ggtgtttccggtggtgaagagggcgctctgaaagggccttccatcatgcctggtggccagaaagaagcctatgag

SEQ ID NO: 484391 - DNA, 75 bp, synthetic construct
  source 1..75: mol_type = other DNA
ctggttccttactatacggtaaaagagtttgttgaatctctggaaacgcctcgtcgcatcctgttaatggtgaaa

SEQ ID NO: 484392 - DNA, 75 bp, synthetic construct
  source 1..75: mol_type = other DNA
tgacatgcagttgattgctgaagcctatgcgctgttgaaaggcggtctgacactttccaacgaagagctggcgca

SEQ ID NO: 484393 - DNA, 75 bp, synthetic construct
  source 1..75: mol_type = other DNA
ggcaacaccttcttccaagacaccatccgtcgtaaccgtgaactgtctgccgaaggttttaactttatcggtacc

SEQ ID NO: 484394 - DNA, 75 bp, synthetic construct
  source 1..75: mol_type = other DNA
cgcgcagttcctgcagaagatcaccgatgcctacgctgaaaatgccggtattgctaacctgctgctggcgccgta

SEQ ID NO: 484395 - DNA, 75 bp, synthetic construct
  source 1..75: mol_type = other DNA
cctctgtctctgatcaccgagtccgtatttgctcgttacatctcatcgcttaaagaccagcgtgtagccgcttct

SEQ ID NO: 484396 - DNA, 75 bp, synthetic construct
  source 1..75: mol_type = other DNA
ccgctgtccctgatcaccgagtccgtattcgcgcgttatatctcttctttgaaagatcagcgtgttgcagcctct

SEQ ID NO: 484397 - DNA, 75 bp, synthetic construct
  source 1..75: mol_type = other DNA
ctcagggcttctcccagctgcgagctgcttctgatgaatacaactgggatctgaactacggtgagatcgctaaga

SEQ ID NO: 484398 - DNA, 75 bp, synthetic construct
  source 1..75: mol_type = other DNA
gctcccgtgaaaagaccgaagaagtgattgccgaaaacccaggcaagaaactggttccttactacacagtacaag

SEQ ID NO: 484399 - DNA, 75 bp, synthetic construct
  source 1..75: mol_type = other DNA
ggctcagcgtgattactttggtgcgcatacctataaacgtaccgataaagaaggtgtattccatactgagtggtt

SEQ ID NO: 484400 - DNA, 75 bp, synthetic construct
  source 1..75: mol_type = other DNA
ctttaagaaaatcgctgacgactaccaacaggcactgcgtgatgtcgtcgcttatgctgtgcaaaacggtatccc

SEQ ID NO: 484401 - DNA, 75 bp, synthetic construct
  source 1..75: mol_type = other DNA
tgcacagttcctgcagaagatcaccgatgcctatgctgaaaatagcggtatcgcaaacctgctgctggcaccgta

SEQ ID NO: 484402 - DNA, 75 bp, synthetic construct
  source 1..75: mol_type = other DNA
ggcgcagcgcgattattttggtgcacatacctataagcgtactgataaagaaggcgtattccatacggaatggtt

SEQ ID NO: 484403 - DNA, 75 bp, synthetic construct
  source 1..75: mol_type = other DNA
ctcttaaaggtccttctatcatgcctggtggccagaaagaagcctatgatctggttgctcctattctgaagcaga

SEQ ID NO: 484404 - DNA, 75 bp, synthetic construct
  source 1..75: mol_type = other DNA
atgagtaagcaagaagatattttagccggagattttaacctgacggatgaagccgttccgacggtgaaatctccc

SEQ ID NO: 484405 - DNA, 75 bp, synthetic construct
  source 1..75: mol_type = other DNA
gacgtgtatatcaacgcgtgggacccgttgaacgcttccggttcgatggtgactgaccagaaccccaacagcccg

SEQ ID NO: 484406 - DNA, 75 bp, synthetic construct
  source 1..75: mol_type = other DNA
gatggtgcgctaaacgctgcacgcgacaatattatttccgatattgcgtcagggagtgacgttccggcgatcctt

SEQ ID NO: 484407 - DNA, 75 bp, synthetic construct
  source 1..75: mol_type = other DNA
ggctcagcgtgattactttggtgcgcacacctataagcgtactgataaggaaggcgttttccatactgagtggtt

SEQ ID NO: 484408 - DNA, 75 bp, synthetic construct
  source 1..75: mol_type = other DNA
cactttccaacgaagagctggcgcaatccttcactgaatggaacgaaggcgagctaagcagctacttgatcgaca

SEQ ID NO: 484409 - DNA, 75 bp, synthetic construct
  source 1..75: mol_type = other DNA
ctttaagaagattgctgacgaataccagcaggcgctgcgtgatgttgtagcatacgctgtacagaatggtattcc

SEQ ID NO: 484410 - DNA, 75 bp, synthetic construct
  source 1..75: mol_type = other DNA
tattctctgcttaaaggtggcctgaatctcaccaacgaagaactggcgcagacctttaccgagtggaataacggt

SEQ ID NO: 484411 - DNA, 75 bp, synthetic construct
  source 1..75: mol_type = other DNA
ctctgaaagggccttccatcatgcctggtggccaaaaagaagcctatgaacttgttgctccgattctgaaacaga

SEQ ID NO: 484412 - DNA, 75 bp, synthetic construct
  source 1..75: mol_type = other DNA
ttcgtcgtaaccgtgagctttctgctgaaggctttaacttcatcggtacgggtgtttccggtggtgaggagggtg

SEQ ID NO: 484413 - DNA, 75 bp, synthetic construct
  source 1..75: mol_type = other DNA
catcgaaaaagttcgccgtgcgctgtatctgggcaaaatcgtttcttacgctcagggcttctctcagctacgcgc

SEQ ID NO: 484414 - DNA, 75 bp, synthetic construct
  source 1..75: mol_type = other DNA
agatgaagacggtaactacctggttgatgtgattctggatgaagcagcaaacaaaggtacgggcaaatggaccag

SEQ ID NO: 484415 - DNA, 75 bp, synthetic construct
  source 1..75: mol_type = other DNA
gccatgcgttacctatattggtgccgatggcgcaggtcactatgtgaagatggttcacaacggtattgaatacgg

SEQ ID NO: 484416 - DNA, 75 bp, synthetic construct
  source 1..75: mol_type = other DNA
cctctgtccttgatcactgagtccgtgtttgctcgttatatctcttcgcttaaagaccaacgtgtagccgcttcg

SEQ ID NO: 484417 - DNA, 75 bp, synthetic construct
  source 1..75: mol_type = other DNA
ggatgaagacggtaaatacctcgtcgatgtcattcttgatgaagcagcaaataaaggtaccggtaagtggaccag

SEQ ID NO: 484418 - DNA, 75 bp, synthetic construct
  source 1..75: mol_type = other DNA
tggttcataacggcattgagtatggtgacatgcagctgattgctgaagcttatgcgctgttgaaaggcggtctgg

SEQ ID NO: 484419 - DNA, 75 bp, synthetic construct
  source 1..75: mol_type = other DNA
tccggcctacaaagtcgtataaattcaatgtattgcagtttattggtaggcctaataagcgcggcgcatcaggca

SEQ ID NO: 484420 - DNA, 75 bp, synthetic construct
  source 1..75: mol_type = other DNA
gcaggtgcaggcacggatgctgctattgattccctcaaaccatatctcgataaaggtgacatcatcattgatggt

SEQ ID NO: 484421 - DNA, 75 bp, synthetic construct
  source 1..75: mol_type = other DNA
gacctttactgaatggaacaatggtgaactgagcagctacctcatcgacattaccaaagacatcttcaccaaaag

SEQ ID NO: 484422 - DNA, 75 bp, synthetic construct
  source 1..75: mol_type = other DNA
gctcccgtgaaaagaccgaagaagtgatagctgaaaaccctggcaagaagcttgttccttactacacagtacaag

SEQ ID NO: 484423 - DNA, 75 bp, synthetic construct
  source 1..75: mol_type = other DNA
gcaggtgcaggcacagatgctgctattgattccctaaagccataccttgaaaaaggcgacatcatcattgatggt

SEQ ID NO: 484424 - DNA, 75 bp, synthetic construct
  source 1..75: mol_type = other DNA
tttctaacttgcttttggcaccgtacttcacgaaaattgcggatgattatcaacaggctctgcgtgacgttgttg

SEQ ID NO: 484425 - DNA, 75 bp, synthetic construct
  source 1..75: mol_type = other DNA
aaagtcctttccggaccgcaagcgcaaccggtcgttgataaggcagatttcattgaaaaggtccgtcgtgcattg

SEQ ID NO: 484426 - DNA, 75 bp, synthetic construct
  source 1..75: mol_type = other DNA
ggtaccgacgttctctgcggcaattgcctactatgacagctaccgttccgcagttctgcccgctaacctgattca

SEQ ID NO: 484427 - DNA, 75 bp, synthetic construct
  source 1..75: mol_type = other DNA
ttgctgcggttgctgaagacggcgagccatgtgtcacctatatcggtgctgatggtgctggtcattatgtaaaga

SEQ ID NO: 484428 - DNA, 75 bp, synthetic construct
  source 1..75: mol_type = other DNA
tcaccaaagatatcttcaccaaaaaagatgaagatggtaactatctggttgatgtgatcctggatgaagcggcca

SEQ ID NO: 484429 - DNA, 75 bp, synthetic construct
  source 1..75: mol_type = other DNA
tacctcggtaaaatcgtttcctatgctcagggcttctcccagctgcgcgctgcttctgatgaatacaactgggat

SEQ ID NO: 484430 - DNA, 75 bp, synthetic construct
  source 1..75: mol_type = other DNA
ggcacagcgtgattacttcggtgcgcacacgtataaacgcactgataaagaaggtgtgttccacaccgaatggct

SEQ ID NO: 484431 - DNA, 75 bp, synthetic construct
  source 1..75: mol_type = other DNA
tggtggccagaaagaagcctatgaacttgtagcaccaattctgaagcagattgcggcggtggctgaagacggcga

SEQ ID NO: 484432 - DNA, 75 bp, synthetic construct
  source 1..75: mol_type = other DNA
acaaagggactggcaaatggaccagccagagcgctctggagctcggcgagtcgctgtcgttgataactgagtctg

SEQ ID NO: 484433 - DNA, 75 bp, synthetic construct
  source 1..75: mol_type = other DNA
gatatttactgattggaataacggtgaactgagcagttatctgatcgatattactaaggatatcttcatcaaaaa

SEQ ID NO: 484434 - DNA, 75 bp, synthetic construct
  source 1..75: mol_type = other DNA
ggttataccgtctccattttcaaccgctcacgtgaaaagactgaagaagtgattgccgaaaatcccggcaagaaa

SEQ ID NO: 484435 - DNA, 75 bp, synthetic construct
  source 1..75: mol_type = other DNA
atgatatcgtcaacgaacttattcaggatgttgattatatcacccccaatgaaacagaagctggtttactgtccg

SEQ ID NO: 484436 - DNA, 75 bp, synthetic construct
  source 1..75: mol_type = other DNA
cagttctgtctgccctgaaagaaaatatttctgagcgggtgagctggtttgacggccgcccggtttttattgatg

SEQ ID NO: 484437 - DNA, 75 bp, synthetic construct
  source 1..75: mol_type = other DNA
cccgccagcgtggcaggaaggcggcagcatggcgcacttgctgggcaccgatgatgttggtcgcgatgtgatgtc

SEQ ID NO: 484438 - DNA, 75 bp, synthetic construct
  source 1..75: mol_type = other DNA
cttgcgctgttgagtaccattggcggcagtttgtatcaggcgctgcataatgagcgatgtataacttcaatatct

SEQ ID NO: 484439 - DNA, 75 bp, synthetic construct
  source 1..75: mol_type = other DNA
aatcaccgcggctatttgccaaagcccggaagcgcatccggataaagatcaacgttggctggcagctgccgttgc

SEQ ID NO: 484440 - DNA, 75 bp, synthetic construct
  source 1..75: mol_type = other DNA
cctccccccacgctactggcggggtttctggcggtattgattggctacgccagttcagcagcaataatctggcaa

SEQ ID NO: 484441 - DNA, 75 bp, synthetic construct
  source 1..75: mol_type = other DNA
gctgggggttccggaaagctttcagctttaagccagttattaaaaccccttttgatttgttaaaacaccttgcgg

SEQ ID NO: 484442 - DNA, 75 bp, synthetic construct
  source 1..75: mol_type = other DNA
tggtacggttacgcacgttttaatccgatctatgccgatcactacgcgatgcgcggtgagccgggtgatcacagc

SEQ ID NO: 484443 - DNA, 75 bp, synthetic construct
  source 1..75: mol_type = other DNA
caatcctgggatcaccatttccctggttttgaacacgaaacagaaggtaccgaaattattgatggtatttaccat

SEQ ID NO: 484444 - DNA, 75 bp, synthetic construct
  source 1..75: mol_type = other DNA
tattctcggcctgatcgccggttacttcggcggcctggttgataacattatcatgcgcgtggtcgatatcatgct

SEQ ID NO: 484445 - DNA, 75 bp, synthetic construct
  source 1..75: mol_type = other DNA
tatttctgagcgggttagctggtttgacggccgcccggtttttattgatgaacaggaactacctgctgttgctgt

SEQ ID NO: 484446 - DNA, 75 bp, synthetic construct
  source 1..75: mol_type = other DNA
atgggtatttaccgcagtccggacttattgtgcacagaaaacccccagctaggctgggggttccggaaagctttc

SEQ ID NO: 484447 - DNA, 75 bp, synthetic construct
  source 1..75: mol_type = other DNA
cgacgggagccagtttcgccggacagcgaaatggccttgtcgcacacaaagtgattgcccgcccgggagacggca

SEQ ID NO: 484448 - DNA, 75 bp, synthetic construct
  source 1..75: mol_type = other DNA
tggcgcaagaatctgtaggcctgataagcgtagcgcatcaggcatttgtcacgattgccggatgcggcgtgaacg

SEQ ID NO: 484449 - DNA, 75 bp, synthetic construct
  source 1..75: mol_type = other DNA
atgacgaagacttcacattcaaagatcttttcaactgagagcgatatcaccgggggcgatttatttaaaatctct

SEQ ID NO: 484450 - DNA, 75 bp, synthetic construct
  source 1..75: mol_type = other DNA
atcgatacattgcagccacccctgagctggctgatattcgtgaggcagctttgggtcgcaaccctgtgtttaaga

SEQ ID NO: 484451 - DNA, 75 bp, synthetic construct
  source 1..75: mol_type = other DNA
ctgatcacctatcagacggaatatgacccacagatcggctgtaatatcccgaccgatatcaccttcaccccggct

SEQ ID NO: 484452 - DNA, 75 bp, synthetic construct
  source 1..75: mol_type = other DNA
ctaccagacggaatatgacccgcttatcgggtgctacattccgaccgatatcacgttcacaccggcgctgtttgc

SEQ ID NO: 484453 - DNA, 75 bp, synthetic construct
  source 1..75: mol_type = other DNA
ccggatgcggcgtgaacgccttatccggcctacgagtggcgcaagaatctgtaggcctgataagcgtagcgcatc

SEQ ID NO: 484454 - DNA, 75 bp, synthetic construct
  source 1..75: mol_type = other DNA
tttaacccaggttactggcaaatggcagccagcgaggtctttgctatcggagcggaaaaaacgcgacctttctta

SEQ ID NO: 484455 - DNA, 75 bp, synthetic construct
  source 1..75: mol_type = other DNA
ttgtcatcgtctgtttccaggcaacggtgcgataccactgtacatgatcacccatgaactggtgaaaaaaggtta

SEQ ID NO: 484456 - DNA, 75 bp, synthetic construct
  source 1..75: mol_type = other DNA
ctggccgatattttttctgtaagccatcttaagccatggggctacaactcgctggaagacatcacattttgtgat

SEQ ID NO: 484457 - DNA, 75 bp, synthetic construct
  source 1..75: mol_type = other DNA
acaaatgctaattggcaaaaccccaaaaaccctagctgatcttttctttattgaacagaaacgtatagagagaaa

SEQ ID NO: 484458 - DNA, 75 bp, synthetic construct
  source 1..75: mol_type = other DNA
atttttaatattcattcgaaactgtgaaatggtcaaacgtttcctacctcaccctattgggcgttcatgggacta

SEQ ID NO: 484459 - DNA, 75 bp, synthetic construct
  source 1..75: mol_type = other DNA
atttggatacatcaaaagttttaattgacgttgtttcatatagttgcataaatttttcatttcttttaataccaa

SEQ ID NO: 484460 - DNA, 75 bp, synthetic construct
  source 1..75: mol_type = other DNA
gctgaaagaaaacaaccctggcgcacggttgaacgaagcctattccggcctgccggtggcggaaatcaccccgcg

SEQ ID NO: 484461 - DNA, 75 bp, synthetic construct
  source 1..75: mol_type = other DNA
ttaagcatagcggtattgctgcgggggcgctggtagtgacctctgctacgccgctacccgcatgggcagatgaaa

SEQ ID NO: 484462 - DNA, 75 bp, synthetic construct
  source 1..75: mol_type = other DNA
gccgctcagaaaggtgcccgtgcgcaacgcgtgactatgccgatgtttaatgccttctggcagcaaaataaactg

SEQ ID NO: 484463 - DNA, 75 bp, synthetic construct
  source 1..75: mol_type = other DNA
gcgctgatgttaggggttgcgcacaccctgatgacacaaggcaaacacgataaagcgttccttgaaaaatacacc

SEQ ID NO: 484464 - DNA, 75 bp, synthetic construct
  source 1..75: mol_type = other DNA
atgacattaacaagacgtgaatttattaaacatagcggtattgcggcaggggcgctggtggtgacatcggctgca

SEQ ID NO: 484465 - DNA, 75 bp, synthetic construct
  source 1..75: mol_type = other DNA
gtgatcctcgttgatcagggaggaagttatgacattaaaagacgcgaatttattaaacacagcggtattgccgct

SEQ ID NO: 484466 - DNA, 75 bp, synthetic construct
  source 1..75: mol_type = other DNA
aaaatatgcggttgccgatcgtgaaccgatcactattcacaccgaagatgctgctcgctttggtattgcgaatgg

SEQ ID NO: 484467 - DNA, 75 bp, synthetic construct
  source 1..75: mol_type = other DNA
tggagcgtcaccacgggcaggtggaatatgtggctgacccggcggcgctgcagtatctgcagagtctggagtacg

SEQ ID NO: 484468 - DNA, 75 bp, synthetic construct
  source 1..75: mol_type = other DNA
cggaagaggaagaacggcgtcttgctgagcagcagaaactgattgaggaggcgctgcgtgcagcagaaggggctc

SEQ ID NO: 484469 - DNA, 75 bp, synthetic construct
  source 1..75: mol_type = other DNA
ccggtgaccttaacgctggaagtgtcatcagtagaaataatgttagccgacctccttaacatcgacgacgacacg

SEQ ID NO: 484470 - DNA, 75 bp, synthetic construct
  source 1..75: mol_type = other DNA
ccgctgattctggaaaacagccaggtggtggtgttgtgggggatgaacccgctgaataccttaaaaattgcctgg

SEQ ID NO: 484471 - DNA, 75 bp, synthetic construct
  source 1..75: mol_type = other DNA
gtaaaaacggcagtgcgaacgtgttaacggcggatatccccagctcgcagctggcaaatgcctgtgccggtaact

SEQ ID NO: 484472 - DNA, 75 bp, synthetic construct
  source 1..75: mol_type = other DNA
tctatatcaacgagaggaaaaaatatgaggcttctaccctaaaaagagggttgtccatcaaagagaagaaaagaa

SEQ ID NO: 484473 - DNA, 75 bp, synthetic construct
  source 1..75: mol_type = other DNA
atatcagcacaacggtaaagaacaaacttacccaaatatcaaaatgatctggtgggctggcggcggtaatttcac

SEQ ID NO: 484474 - DNA, 75 bp, synthetic construct
  source 1..75: mol_type = other DNA
aaaaacaatggcgcatcaggggccgatatcaataactatgccgggcagattaaatctgctatcgaaagtaagttc

SEQ ID NO: 484475 - DNA, 75 bp, synthetic construct
  source 1..75: mol_type = other DNA
acgaagccagtaacgatggggtaagccttgccaactggcttaaagagttagggcgcaaagagctgctacggcgcg

SEQ ID NO: 484476 - DNA, 75 bp, synthetic construct
  source 1..75: mol_type = other DNA
cctatgtctaaagtggcaatagcccaggcattacgtcgtatcctggaacgaccagaactgatggagcttgagcca

SEQ ID NO: 484477 - DNA, 75 bp, synthetic construct
  source 1..75: mol_type = other DNA
gtcatggatcgctctctgctggagcttgtcgatgaattcgcctggattctggaagataccgctgactttattgcc

SEQ ID NO: 484478 - DNA, 75 bp, synthetic construct
  source 1..75: mol_type = other DNA
cgatctatgccgatcactatgccatgcgcggcgaacctggcgatcacaacggtcctaccgttttcgccacccact

SEQ ID NO: 484479 - DNA, 75 bp, synthetic construct
  source 1..75: mol_type = other DNA
ccccttttgatttgttaaaacaccttgcggtctggcaactgcaagtgtcaaacaagaaatcaaaagggggtccca

SEQ ID NO: 484480 - DNA, 75 bp, synthetic construct
  source 1..75: mol_type = other DNA
tacgtcatcgtgaaacggtactggcgaatgaagtcgctccatatgccgccaccgataacgtgcttgcggcatcga

SEQ ID NO: 484481 - DNA, 75 bp, synthetic construct
  source 1..75: mol_type = other DNA
ggttgaatgccgcttcgacaaagcctgttccagttatctcccgaatcgcaccttagaaaatgccatgtaccaggc

SEQ ID NO: 484482 - DNA, 75 bp, synthetic construct
  source 1..75: mol_type = other DNA
aaaatcgccgaaggtgcggcattgatgaccgaaaccacggttgaatgccgcttcgacaaagcctgttccagttat

SEQ ID NO: 484483 - DNA, 75 bp, synthetic construct
  source 1..75: mol_type = other DNA
tgtgtgcgcaggtacaaaatgggcagccaggctatgtcttgtatccgcaagacgacctgatgaagtactgcgggc

SEQ ID NO: 484484 - DNA, 75 bp, synthetic construct
  source 1..75: mol_type = other DNA
tctgcctttaagcacattaatgcgcacatgcattgaagagttattcgaatatggtaaaggcagccagtggcttgt

SEQ ID NO: 484485 - DNA, 75 bp, synthetic construct
  source 1..75: mol_type = other DNA
ctgctgagcgtgagggagtaagtcttggtaattggcttaaaggtctggctagaaatgaacttattaagcaaggaa

SEQ ID NO: 484486 - DNA, 75 bp, synthetic construct
  source 1..75: mol_type = other DNA
cagccagcactgacaataccaatgttaacggcgaagacatgacggagattgaggagagtatgcttctgccggttt

SEQ ID NO: 484487 - DNA, 75 bp, synthetic construct
  source 1..75: mol_type = other DNA
agctatgttctggaaacggataaattcgctgatgaatatgccattccggtaccggttcctgaatatgtggttact

SEQ ID NO: 484488 - DNA, 75 bp, synthetic construct
  source 1..75: mol_type = other DNA
gcattacacattgctcgggctgaagaactaccggctgttactgccctggctgtttcccacaaaaccagcctgctc

SEQ ID NO: 484489 - DNA, 75 bp, synthetic construct
  source 1..75: mol_type = other DNA
aaccggcgggaggccaggaagaaaacacacgggcagacgctcacggggattgccaggattgcgaagtctctgtat

SEQ ID NO: 484490 - DNA, 75 bp, synthetic construct
  source 1..75: mol_type = other DNA
cgacctccacaaactggtgcgtgatactgacaaagttttccctgatccgaaaaattcagattttgggctgatgac

SEQ ID NO: 484491 - DNA, 75 bp, synthetic construct
  source 1..75: mol_type = other DNA
gcttgctcaacacggcagcgaaaagccggtaacgcacgtttcacgcgacgaactccaggcattacacattgcccg

SEQ ID NO: 484492 - DNA, 75 bp, synthetic construct
  source 1..75: mol_type = other DNA
actggcacaatccgttggaaaggcattctctcactcaacaacccgtcatatcggcccggccgaattcgacaagtt

SEQ ID NO: 484493 - DNA, 75 bp, synthetic construct
  source 1..75: mol_type = other DNA
atggacgatgccggatttgacgaagaggattttaaaaaacccatccgcgtccatttacccgttgtgaatgacctt

SEQ ID NO: 484494 - DNA, 75 bp, synthetic construct
  source 1..75: mol_type = other DNA
tggagaaaatgagaccactgatggagatgaccaggcgcaaatgaagaatgaatacattcaggaaaatgctgttga

SEQ ID NO: 484495 - DNA, 75 bp, synthetic construct
  source 1..75: mol_type = other DNA
caccgcctgcggtcagatcggtgggggcaactgccctgattgtggcgcggcgatgggcgacgcaacgtatcagga

SEQ ID NO: 484496 - DNA, 75 bp, synthetic construct
  source 1..75: mol_type = other DNA
cccaaatacgcaacaaaacgagccagaaacgaaacagcctgaaccagaagagcaacaagaaccggaaaaagtctg

SEQ ID NO: 484497 - DNA, 75 bp, synthetic construct
  source 1..75: mol_type = other DNA
ccatcatttgtcagtgccggccggttaatgaccgaacgggagcagcgctttctgcgccggctggacagggtgaca

SEQ ID NO: 484498 - DNA, 75 bp, synthetic construct
  source 1..75: mol_type = other DNA
agtgatgattttgaatcgacccgtgccactctggactacctgatcgttaagtcaggtaaaaaactgagcaactat

SEQ ID NO: 484499 - DNA, 75 bp, synthetic construct
  source 1..75: mol_type = other DNA
cttcaggggtatatcaacgcctatttgacggaaactgatcacgagaaccctaccgaggaaactctcgctgctgca

SEQ ID NO: 484500 - DNA, 75 bp, synthetic construct
  source 1..75: mol_type = other DNA
ggaacaaaaccgatcgcaatccgaatttagtacacaccttcgatacgctggatgtggagattgcagcagccacac

SEQ ID NO: 484501 - DNA, 75 bp, synthetic construct
  source 1..75: mol_type = other DNA
cgatctccacaaactggttcgtgacactgacaaagttttccctaatcctggtaattcaagcctgggactgataac

SEQ ID NO: 484502 - DNA, 75 bp, synthetic construct
  source 1..75: mol_type = other DNA
ctcaaccacccggatcgcaaatctgaaatcagctatttcgggtttgatgaagaaaccgggctggaaatcagggtc

SEQ ID NO: 484503 - DNA, 75 bp, synthetic construct
  source 1..75: mol_type = other DNA
gtaaattctgttgatgcgaagtatcagaaactgcgggcagaactccatgaagcccggaaaaacattccgcccaaa

SEQ ID NO: 484504 - DNA, 75 bp, synthetic construct
  source 1..75: mol_type = other DNA
cagaatcagccagaaacggaacagaacgaccagaaagcggaacagaacgacccaaatacgcaacaaaacgagcca

SEQ ID NO: 484505 - DNA, 75 bp, synthetic construct
  source 1..75: mol_type = other DNA
agtcagcctcggttatgtgcgacaggaacgactgaaagatcgcctgcaccgtgaaattattgaacgtgattatca

SEQ ID NO: 484506 - DNA, 75 bp, synthetic construct
  source 1..75: mol_type = other DNA
aaagtggaacaaattgccccagaagcgggacaaaacagcccggatacgcaacaaaacgggccagaagagcaacag

SEQ ID NO: 484507 - DNA, 75 bp, synthetic construct
  source 1..75: mol_type = other DNA
cgacgcaaactccggtgaattttttgttcaggtttggggaaatggagccaacttcgacaacacgattttgcgccg

SEQ ID NO: 484508 - DNA, 75 bp, synthetic construct
  source 1..75: mol_type = other DNA
tatagccggtaagttttttgatccggcaaccggagatatggggccagaattcagcaaaactatcgatctggaaac

SEQ ID NO: 484509 - DNA, 75 bp, synthetic construct
  source 1..75: mol_type = other DNA
cattcgatgaagagaatcaggctgaagctcagaaaaatgatccggaggaaatggaaggcactgaacatctgcaca

SEQ ID NO: 484510 - DNA, 75 bp, synthetic construct
  source 1..75: mol_type = other DNA
aactgtagatccagaactggcaaaaaaagaacgtgctaaatctttgccttacaacatcagtggcacaaaagagca

SEQ ID NO: 484511 - DNA, 75 bp, synthetic construct
  source 1..75: mol_type = other DNA
aaccggagctggaaaaaaactgccgcgtctgtggtcagactggcgggggtaactgccctgactgtagtgcggtaa

SEQ ID NO: 484512 - DNA, 75 bp, synthetic construct
  source 1..75: mol_type = other DNA
cacgcacataaaaaacttacacaaatagcaatccctgttaagggatcttgcaagtttttgcttgatgacggtaaa

SEQ ID NO: 484513 - DNA, 75 bp, synthetic construct
  source 1..75: mol_type = other DNA
gcgggaacggcaggtaaaccgatgctcgcccaacttatgggcagcggcgtcggggaaattaccgccgtggtggtg

SEQ ID NO: 484514 - DNA, 75 bp, synthetic construct
  source 1..75: mol_type = other DNA
tcaaaagattgcattcttatggtattagctagtgatgtatatgatgagagtgactatattagaagttacgaatcc

SEQ ID NO: 484515 - DNA, 75 bp, synthetic construct
  source 1..75: mol_type = other DNA
tatggttatttttcgatagcgtttaaacgaatcaggcatgttgatgatatcgttcatcagttggtgaagctcgct

SEQ ID NO: 484516 - DNA, 75 bp, synthetic construct
  source 1..75: mol_type = other DNA
tttttctggtgctctcgggcgttttcagcgtacccatcaggcggtaagcagtctggttcctttttatatatcaga

SEQ ID NO: 484517 - DNA, 75 bp, synthetic construct
  source 1..75: mol_type = other DNA
tggcagatagtcattatgatgaaaatgactatatacgagattatgaaactttttataagttggtaaatgataatg

SEQ ID NO: 484518 - DNA, 75 bp, synthetic construct
  source 1..75: mol_type = other DNA
catataacacgagtgcctgccgatcctgacaagggcatgactacaaatgaagttccggcctattacaaacacctt

SEQ ID NO: 484519 - DNA, 75 bp, synthetic construct
  source 1..75: mol_type = other DNA
catattatgatccggactggattaaaggcgagcatacgctccttgctctcaaaagaaataccgttgagcctttgg

SEQ ID NO: 484520 - DNA, 75 bp, synthetic construct
  source 1..75: mol_type = other DNA
aaagtgattattgtctgccgtctttccggttcccgctggctgggcgaactgaatccctggccggatgttctttaa

SEQ ID NO: 484521 - DNA, 75 bp, synthetic construct
  source 1..75: mol_type = other DNA
aatttggcatgaaatgtatgattattcaaaagattgcattcttatggtattagctagtgatgtatatgatgagag

SEQ ID NO: 484522 - DNA, 75 bp, synthetic construct
  source 1..75: mol_type = other DNA
agattcatggtgatgatagaggggcccttgtttctttagaaagagataagaatatagacttcgaaattagacgtg

SEQ ID NO: 484523 - DNA, 75 bp, synthetic construct
  source 1..75: mol_type = other DNA
gaggatttttcaatgaaaataacctcggtcggatagtcgttttttatagccaagtcgatgaggttgggatgggat

SEQ ID NO: 484524 - DNA, 75 bp, synthetic construct
  source 1..75: mol_type = other DNA
tattaattgaactctcttctgtgcacagtattaaaattattaatgctcttcatgattatctcgttttaggagatg

SEQ ID NO: 484525 - DNA, 75 bp, synthetic construct
  source 1..75: mol_type = other DNA
gcaggcattatctctttcccagtggcgctttgtctggtgattggggcaaacctcggttccggcctgctggcgatg

SEQ ID NO: 484526 - DNA, 75 bp, synthetic construct
  source 1..75: mol_type = other DNA
tgattgtgctgggtgccgatgtcgggacggcgctgatggctcgggtcctcaccttcgatttatcctggctgtcgc

SEQ ID NO: 484527 - DNA, 75 bp, synthetic construct
  source 1..75: mol_type = other DNA
gtgttatataccgcgattaaactttacctggcgcggatgccaaaagaggaactggcggaggaagagtctcgtcgc

SEQ ID NO: 484528 - DNA, 75 bp, synthetic construct
  source 1..75: mol_type = other DNA
cagagtggcgcccgaccggaagtccggcagccgtgaatggtggcagttatttcgcctggtgtcacagtggcactg

SEQ ID NO: 484529 - DNA, 75 bp, synthetic construct
  source 1..75: mol_type = other DNA
gtgttgtataccgcgattaaactttaccttgcgcggatgccaaaagaggagctggcagaagaagagtctcgacgc

SEQ ID NO: 484530 - DNA, 75 bp, synthetic construct
  source 1..75: mol_type = other DNA
tgctggcagagacaatggggaagttgccattgccaaaagcggaactggtgatctatttccacgtcttctacaacc

SEQ ID NO: 484531 - DNA, 75 bp, synthetic construct
  source 1..75: mol_type = other DNA
caggtctggggaaatggagccaacttcgacaacacgattttgcgccgttcatacgaacggcaggggatcccctgc

SEQ ID NO: 484532 - DNA, 75 bp, synthetic construct
  source 1..75: mol_type = other DNA
ctttttcggattcggataacgagaaaccgttaccagaaccctgcctgacaccggagatagtcagccggatgggac

SEQ ID NO: 484533 - DNA, 75 bp, synthetic construct
  source 1..75: mol_type = other DNA
agtgtcagctattttagcgtggccttaggacgtttatttcatgtcgctcagttggtttcacagttggtaccttta

SEQ ID NO: 484534 - DNA, 75 bp, synthetic construct
  source 1..75: mol_type = other DNA
aaaaaagccgctcgccttttgcgcggggatcggcgttaccgcactggtacagagcagtaatgccaccaccatgct

SEQ ID NO: 484535 - DNA, 75 bp, synthetic construct
  source 1..75: mol_type = other DNA
aggggcgaaaatgtgcatcggtttacgcgtcaacagcaggcatcagaaacagcggtatggaaggtgaaaagtgat

SEQ ID NO: 484536 - DNA, 75 bp, synthetic construct
  source 1..75: mol_type = other DNA
cgtatcctgtggacacgtcaaagcagaaatcagcacagtgttacaagacggggatattcaatattgccgccgtta

SEQ ID NO: 484537 - DNA, 75 bp, synthetic construct
  source 1..75: mol_type = other DNA
atagcccttattatcttggtttacacaattcgcgtattggttctgacgatttcaacaaaaaaccacctggtaatt

SEQ ID NO: 484538 - DNA, 75 bp, synthetic construct
  source 1..75: mol_type = other DNA
aaatgatcgataaaaataacgggattttagatggaaactttcccaacttactaatgacttatttaactgaaaaca

SEQ ID NO: 484539 - DNA, 75 bp, synthetic construct
  source 1..75: mol_type = other DNA
caatgcgaagaatgctgaaaagtaatattattttttgttctgctatgtattatcgtgaagattggtttaatgtgg

SEQ ID NO: 484540 - DNA, 75 bp, synthetic construct
  source 1..75: mol_type = other DNA
tgccagatggttcatatcctccttttggggcgacagtcgttaataaaaaaggtagagaattaggaatgttaagcg

SEQ ID NO: 484541 - DNA, 75 bp, synthetic construct
  source 1..75: mol_type = other DNA
tttacttgatgctttttctaagacagattgcaatacaaaaaaagattcattttcatacatcaggaaatcgaaaaa

SEQ ID NO: 484542 - DNA, 75 bp, synthetic construct
  source 1..75: mol_type = other DNA
ctggcgttgccggaagaagagaaagcgcgtctgaaagcaatgactcccgccaactatattggccgcgccatcacg

SEQ ID NO: 484543 - DNA, 75 bp, synthetic construct
  source 1..75: mol_type = other DNA
ggaagtgaaccgtgaccatctgctggatgaactggatcacaactgggaagtgctggctgaaccaatccagacagt

SEQ ID NO: 484544 - DNA, 75 bp, synthetic construct
  source 1..75: mol_type = other DNA
tgcttttttcgaagcatacatggacgcagactacaccgatcgcggtctgctgacaaaagagtggatgaaaggaaa

SEQ ID NO: 484545 - DNA, 75 bp, synthetic construct
  source 1..75: mol_type = other DNA
cagtttggccgtgatgttgcggaaaatactgcagcttatgcagatagccttttggaacagatcagaaataaagat

SEQ ID NO: 484546 - DNA, 75 bp, synthetic construct
  source 1..75: mol_type = other DNA
ctactgaaatccagccattcgttattacaccggctacgctgtcacaattcggtttacgccaggaagatgaagcgg

SEQ ID NO: 484547 - DNA, 75 bp, synthetic construct
  source 1..75: mol_type = other DNA
ccaccctgaaaggcgtgagcaaactggaagtgaaccgtgaccatctgctggatgagctggatcacaactgggaag

SEQ ID NO: 484548 - DNA, 75 bp, synthetic construct
  source 1..75: mol_type = other DNA
aaggtattgtaacgttgcctgatgaaagcatttatattgctagtgaacctgatatcctcgctaaatttgtccctc

SEQ ID NO: 484549 - DNA, 75 bp, synthetic construct
  source 1..75: mol_type = other DNA
cacccagaatagtcctgcacagctacttaaaataaccaaaagtggcgacatcatggacagagccccgctgccttt

SEQ ID NO: 484550 - DNA, 75 bp, synthetic construct
  source 1..75: mol_type = other DNA
gccccaacctgaaggtattgtaacgttgcctgatgaaagcatttatattgctagtgaacctgatatcctcgctaa

SEQ ID NO: 484551 - DNA, 75 bp, synthetic construct
  source 1..75: mol_type = other DNA
aaggcgaccctcatgtcaaagggcgaatccgtcagatgcagcgagctgcggcgcggcggcggatgatggccgatg

SEQ ID NO: 484552 - DNA, 75 bp, synthetic construct
  source 1..75: mol_type = other DNA
atgcgatggatctggtagggctatgcgcgctgctggtggtgcttggtgtcattccaatggtgggatttgacgtct

SEQ ID NO: 484553 - DNA, 75 bp, synthetic construct
  source 1..75: mol_type = other DNA
tgctgggggggctggtatttagcggaaaatccttgcagccgaagttttccaaactcaacccgctaccgggcatta

SEQ ID NO: 484554 - DNA, 75 bp, synthetic construct
  source 1..75: mol_type = other DNA
aatcacttttttaccactggccttctgctttcaggcgtttgttaagagcggttattttgctctttcagcaaatca

SEQ ID NO: 484555 - DNA, 75 bp, synthetic construct
  source 1..75: mol_type = other DNA
gatgaaatcattgcgaagagaaaagaaaaacgtcagtgttttgatgtgtgtatattagattcagcttcaaataaa

SEQ ID NO: 484556 - DNA, 75 bp, synthetic construct
  source 1..75: mol_type = other DNA
agatgccttgctagaaatcgagcgggatcgcatcgtgttcaatatgcagatgtcggtactgaccttcatcatccg

SEQ ID NO: 484557 - DNA, 75 bp, synthetic construct
  source 1..75: mol_type = other DNA
tcatctcttacttataataaagaggataaattcctgtatgccacccagaacagtcctgcgcagctaatcaaaata

SEQ ID NO: 484558 - DNA, 75 bp, synthetic construct
  source 1..75: mol_type = other DNA
gaaggccggatgctgtttgtcgctaaagaacgacgccctacaggcatgtttgcctatcagctttctccagatctg

SEQ ID NO: 484559 - DNA, 75 bp, synthetic construct
  source 1..75: mol_type = other DNA
gacagataaaagataatgcgattgaagcattgctacatgatcctttattccgacagcgtgtagagaaaaataaga

SEQ ID NO: 484560 - DNA, 75 bp, synthetic construct
  source 1..75: mol_type = other DNA
caatgcctgcggccagactggcgggggtaactgccctgactgtggtgcggtgatgggcgacgcaacataccagga

SEQ ID NO: 484561 - DNA, 75 bp, synthetic construct
  source 1..75: mol_type = other DNA
gatagcctcagaagagtcaagtgatgcttcgggggtaatcctttgtgtagatcagggggatgagcaattaacacc

SEQ ID NO: 484562 - DNA, 75 bp, synthetic construct
  source 1..75: mol_type = other DNA
gcgacattttcttataattttggtacggtaattgtctcagatgttaataataattcgcctgggacagtattaccc

SEQ ID NO: 484563 - DNA, 75 bp, synthetic construct
  source 1..75: mol_type = other DNA
agtgaattgagccgggctggtgccggagcgaagcccgctggtgttactcctgtagcaacaactattccgattaat

SEQ ID NO: 484564 - DNA, 75 bp, synthetic construct
  source 1..75: mol_type = other DNA
aagtaatgtatagaaatagagagtttgttttaaaaatgttctcaatagatatgatcgttaatcaatggatgaaat

SEQ ID NO: 484565 - DNA, 75 bp, synthetic construct
  source 1..75: mol_type = other DNA
ataccacttgtcagactggcgatgacaaagttgccggcaaaaagtaaacgtaaagggagtattattataataagt

SEQ ID NO: 484566 - DNA, 75 bp, synthetic construct
  source 1..75: mol_type = other DNA
gttattggtgacgatgattttcttgtacccatatctgattcaacacaacttgcaagcaaaattgaaaaattgtct

SEQ ID NO: 484567 - DNA, 75 bp, synthetic construct
  source 1..75: mol_type = other DNA
aaaaacctgttcgcgtcaatttgcctgttgttgatgacctcccgccagaaggcgtatttgatacggaattctgca

SEQ ID NO: 484568 - DNA, 75 bp, synthetic construct
  source 1..75: mol_type = other DNA
ctgcgtgggcggatcattcacagctatgttctggaaacggataaattcgctgatgaatatgccattccggtaccg

SEQ ID NO: 484569 - DNA, 75 bp, synthetic construct
  source 1..75: mol_type = other DNA
gtcaggtaaaaaactgagcaactattttaaagctgttgccacgaattttcctgtcgttaatgacctgccccctga

SEQ ID NO: 484570 - DNA, 75 bp, synthetic construct
  source 1..75: mol_type = other DNA
tttacggttcgcttccggtggaattccagcgtattccggaggaggagaaacatactgcatcggcaatgaaagcct

SEQ ID NO: 484571 - DNA, 75 bp, synthetic construct
  source 1..75: mol_type = other DNA
gaaatatctgaaactgcgggcagaactccatgaagcccggaaaaacattccgccaaaaaatcctgtcgatgcaga

SEQ ID NO: 484572 - DNA, 75 bp, synthetic construct
  source 1..75: mol_type = other DNA
tggattattcccgcgccattgtggttgcgtccgtaaaagaagcaccaattggtatcgaggctacccaccaccgtg

SEQ ID NO: 484573 - DNA, 75 bp, synthetic construct
  source 1..75: mol_type = other DNA
tgcaaatatcgttgccagacttgcaaaagtttttacctataataaatacaaattaatttgtacagcacatagtaa

SEQ ID NO: 484574 - DNA, 75 bp, synthetic construct
  source 1..75: mol_type = other DNA
atgccttttaaacctttagtgacggcaggaatcgaaagtctgctcaacaccttcctgtatcgctcacccgcgctg

SEQ ID NO: 484575 - DNA, 75 bp, synthetic construct
  source 1..75: mol_type = other DNA
tactgggcgaatgggcaggcgatgctgactgcaccgttatcgcctacgccagcgtgttgccgaaacttcgcgatc

SEQ ID NO: 484576 - DNA, 75 bp, synthetic construct
  source 1..75: mol_type = other DNA
atggggtgtcccagtaatggaaacgtgctggaactcaatagctacggtgagaatcgccaacctgcgaacctaaaa

SEQ ID NO: 484577 - DNA, 75 bp, synthetic construct
  source 1..75: mol_type = other DNA
gatccggaggaaatggaaggcgctgaacatccgcacaatgagaatgctggcagcgatccgcatcgcgattgcagt

SEQ ID NO: 484578 - DNA, 75 bp, synthetic construct
  source 1..75: mol_type = other DNA
cggaggaaatggaaggcgctgaacatccgcacaatgagaatgctggcagcgatccgcatcgcgattgcagtgatg

SEQ ID NO: 484579 - DNA, 75 bp, synthetic construct
  source 1..75: mol_type = other DNA
atgtttttaaaattcccaatacctgtaccaccttcagaagaacaagctcgcattgtcgaaatactcgataaattc

SEQ ID NO: 484580 - DNA, 75 bp, synthetic construct
  source 1..75: mol_type = other DNA
gcgtcagcaatatatcagcgcacagaacaaaagaataaaaactgccacccgtaccagccgtggtgaccagtttgc

SEQ ID NO: 484581 - DNA, 75 bp, synthetic construct
  source 1..75: mol_type = other DNA
agtcctttgccctgaccgatgatgagcgtgaactgatgcaacagtggctggaacataaatacccgcaaacgcaaa

SEQ ID NO: 484582 - DNA, 75 bp, synthetic construct
  source 1..75: mol_type = other DNA
cctttacaaagagataaaataaggcatagtttaaatatcattaatgatgatagccttatactttctgtaggccga

SEQ ID NO: 484583 - DNA, 75 bp, synthetic construct
  source 1..75: mol_type = other DNA
cgctggcgaataaacttggcattgcccagggcgatactgtgaaagtctcctccaaccgtggctatatcaaagcca

SEQ ID NO: 484584 - DNA, 75 bp, synthetic construct
  source 1..75: mol_type = other DNA
aagatatcgataccatcggtatcccgattcactggggctatgaaggtgttgcgaaaaaaggctttattgccaata

SEQ ID NO: 484585 - DNA, 75 bp, synthetic construct
  source 1..75: mol_type = other DNA
actggccgacaggcagcctccgtccaccgcgctacatgctgggcctgatgaacatcatccgcgaggcatttggtg

SEQ ID NO: 484586 - DNA, 75 bp, synthetic construct
  source 1..75: mol_type = other DNA
tggtagcaaaatatcttgatggcgttactgtgcgtaaagtgatttacgtaccaggtaaactcctcaatctggtcg

SEQ ID NO: 484587 - DNA, 75 bp, synthetic construct
  source 1..75: mol_type = other DNA
atgagcgataagcagactgaaaagaccattcaactggatacccccatcaagcgtggtaaaactgaaatcaccgaa

SEQ ID NO: 484588 - DNA, 75 bp, synthetic construct
  source 1..75: mol_type = other DNA
tttccagtccggtactgactgcacaggaaatcgcagagatggacccggcagatctcaccgctatatcggttgagg

SEQ ID NO: 484589 - DNA, 75 bp, synthetic construct
  source 1..75: mol_type = other DNA
tccgccttcatgctgagttccgcccggatcagggggcaaaaatcctcgaaactctggcagaaatcaagaaactgg

SEQ ID NO: 484590 - DNA, 75 bp, synthetic construct
  source 1..75: mol_type = other DNA
gacctgcgcgatggcgatcattacgccacgctgaacacggcgcagaaaaaagcggttgataacgcactgcgcgac

SEQ ID NO: 484591 - DNA, 75 bp, synthetic construct
  source 1..75: mol_type = other DNA
ggctggactaaactcgtcaccgacgaagcggaactggcgggtatgccagaaagtgcattggctgcggcaaaagct

SEQ ID NO: 484592 - DNA, 75 bp, synthetic construct
  source 1..75: mol_type = other DNA
taaactggctctataatcattcctctgtgctgcatgaacgggcagaaatcattaaatgcgccgaaatgctgatgc

SEQ ID NO: 484593 - DNA, 75 bp, synthetic construct
  source 1..75: mol_type = other DNA
ttgctgtttgtaaactggctctataaccattcctctgtgctgcatgaacgagcagaaatcattaaatgcgccgaa

SEQ ID NO: 484594 - DNA, 75 bp, synthetic construct
  source 1..75: mol_type = other DNA
tagtggaccaggctaaactggaggaggaaatgggcgacctgctgtttgcgacggtcaatctggcccgccatttag

SEQ ID NO: 484595 - DNA, 75 bp, synthetic construct
  source 1..75: mol_type = other DNA
ggccattatggatatggatgtgaacgcgatgatgaccgtgatcccccgcatctccagtccggcactgactgcaca

SEQ ID NO: 484596 - DNA, 75 bp, synthetic construct
  source 1..75: mol_type = other DNA
ccattcaactggatacccctatcaagcgcggtaaaacagaaattaccgaaattgtgctgcgtaaaccgcagtctg

SEQ ID NO: 484597 - DNA, 75 bp, synthetic construct
  source 1..75: mol_type = other DNA
atgaatcaaattgaccgtttgctcactattatgcagcgcctgcgcgacacggaaaacggctgcccgtgggataaa

SEQ ID NO: 484598 - DNA, 75 bp, synthetic construct
  source 1..75: mol_type = other DNA
tgtgccgtgggatgcggtcgaactgccgagtcagtttatggaaaactggtgttgggagccggaggcgctggcgtt

SEQ ID NO: 484599 - DNA, 75 bp, synthetic construct
  source 1..75: mol_type = other DNA
tattgaaaccatcgcccgtgaatttgccgataccgcccataaaacgcatgggcgctcgatgattattctcggcgc

SEQ ID NO: 484600 - DNA, 75 bp, synthetic construct
  source 1..75: mol_type = other DNA
tattggacgaaatggcaccatgaccggatatgcaggcggcgtgcagcgaaaagagtggttattacgccatgaagg

SEQ ID NO: 484601 - DNA, 75 bp, synthetic construct
  source 1..75: mol_type = other DNA
atggcgtccggcaaaaagggcgcgccggttgactatgttgtgctgcgcggttgtgtgcagcacaacggacaacgg

SEQ ID NO: 484602 - DNA, 75 bp, synthetic construct
  source 1..75: mol_type = other DNA
ttaaccgccgagcagaacgttgaagtacccgccgtctatgctggtcttgagcggaaacagcgactgcttcgtgcc

SEQ ID NO: 484603 - DNA, 75 bp, synthetic construct
  source 1..75: mol_type = other DNA
cccaggcgctgaaatcgggcgatttacgtatggcctgcgaacaaccagatagcggcagcaatcatccgcgtaatt

SEQ ID NO: 484604 - DNA, 75 bp, synthetic construct
  source 1..75: mol_type = other DNA
cactatgtcggtcaggaaaaactgcgcccgcaaaccggctggctgcctctggcctttgcgctcgactggaaccga

SEQ ID NO: 484605 - DNA, 75 bp, synthetic construct
  source 1..75: mol_type = other DNA
acggttcgctgcaaaaaccggtcgcgtatctgacctgtaacttcaaccgcccggtaaatggtaaaccggcgctgt

SEQ ID NO: 484606 - DNA, 75 bp, synthetic construct
  source 1..75: mol_type = other DNA
ggtaaatgggataacagcaaggtgatggaagagatcctcgctctgcgtcacgaactggcgcaactgctgggcttt

SEQ ID NO: 484607 - DNA, 75 bp, synthetic construct
  source 1..75: mol_type = other DNA
gttccacgagttcggtcacggcctgcaccatatgctgacccgcatcgaaaccgccggtgtttccggtatcagcgg

SEQ ID NO: 484608 - DNA, 75 bp, synthetic construct
  source 1..75: mol_type = other DNA
gcgatgatgaccgtgatccctcgcatctccagtccggcactgactgcacaggaaatcgcagagatggacccggca

SEQ ID NO: 484609 - DNA, 75 bp, synthetic construct
  source 1..75: mol_type = other DNA
ggtgccgtgggatgcggtcgaactgccgagccagtttatggaaaactggtgctgggagcctgaggcgctggcgtt

SEQ ID NO: 484610 - DNA, 75 bp, synthetic construct
  source 1..75: mol_type = other DNA
gcaggtgctggatttcttaaccgatctggcaaaacgcgcgcgtccgcaaggcgaaaaagagctggcgcaactgcg

SEQ ID NO: 484611 - DNA, 75 bp, synthetic construct
  source 1..75: mol_type = other DNA
gaagggcgctttgactttaatgatatttgcgcggcgatcagcgataagttagagcgccgccatccgcatgttttt

SEQ ID NO: 484612 - DNA, 75 bp, synthetic construct
  source 1..75: mol_type = other DNA
attattgatacgcttcccactgccacgggggggacgccatttcagcgcgaagtctggaaaacactgcgcactatc

SEQ ID NO: 484613 - DNA, 75 bp, synthetic construct
  source 1..75: mol_type = other DNA
tctgaacaccatgcacaccatttcgtcgatggcatggcgtcagcgaccgcatcacgggatttggctgagtcgcaa

SEQ ID NO: 484614 - DNA, 75 bp, synthetic construct
  source 1..75: mol_type = other DNA
gggcgacggtcggttttaccattaccgctgtgtataccctgcaactgctgtggctgaatggtgagcaatacatca

SEQ ID NO: 484615 - DNA, 75 bp, synthetic construct
  source 1..75: mol_type = other DNA
ttcgaagaaacaagtacttcactgaatatcgcggcctatcgctattcgacacagaattaccttggtcttaatgat

SEQ ID NO: 484616 - DNA, 75 bp, synthetic construct
  source 1..75: mol_type = other DNA
taatagccgtcagttttcgctcaataccgacgggggttttgtgctacacagtggaggcctcacattcagtaacga

SEQ ID NO: 484617 - DNA, 75 bp, synthetic construct
  source 1..75: mol_type = other DNA
ttgagaaaaaagattacggttcattttatctttccggaagttggtccgattactgggcttccggacaaaatcgta

SEQ ID NO: 484618 - DNA, 75 bp, synthetic construct
  source 1..75: mol_type = other DNA
atgtccctgaaactggctttcgaagcctttctggtcttcatcagaaccgaacgcctgtcagtccgcgccgggacc

SEQ ID NO: 484619 - DNA, 75 bp, synthetic construct
  source 1..75: mol_type = other DNA
tgaaaataagccctataacccaacctgggcgattcgcgcactggtgcaatatgaccagcatttgtggaaaaacat

SEQ ID NO: 484620 - DNA, 75 bp, synthetic construct
  source 1..75: mol_type = other DNA
cgccgccagaacttctcggccgggtactcggcacggtctcggcggtgatgctgtcagcctcgcccatggttatgc

SEQ ID NO: 484621 - DNA, 75 bp, synthetic construct
  source 1..75: mol_type = other DNA
tacgatggataagcaaattggcgcgctggaaaaaatcgcccgccagcatccggataaccccgtgggacaattttg

SEQ ID NO: 484622 - DNA, 75 bp, synthetic construct
  source 1..75: mol_type = other DNA
gggttattggtcatctgaacaccatgcacaccatttcgtcgatggcatggcggcagcgaccgcatcacgggattt

SEQ ID NO: 484623 - DNA, 75 bp, synthetic construct
  source 1..75: mol_type = other DNA
tacagcgggacaaacggctggcctcgcagcaggggctggacagcacccgctggtttggtcatgtcgccacggtga

SEQ ID NO: 484624 - DNA, 75 bp, synthetic construct
  source 1..75: mol_type = other DNA
ccgatataaacagcgaaaaagccgttctgcttgcccgggatgaagctctcggcaattgcctcaatttgacggaaa

SEQ ID NO: 484625 - DNA, 75 bp, synthetic construct
  source 1..75: mol_type = other DNA
attgcacgcctatcaaggtgtactgtctgccagaagaaaaattgcaaatagaagcgaatgccgctgcgacaggtt

SEQ ID NO: 484626 - DNA, 75 bp, synthetic construct
  source 1..75: mol_type = other DNA
tgaaacatcccgaacaagatcttgaaccgaaatccatgcgtaattactcgcgcatgaaaaatcaggttacggtca

SEQ ID NO: 484627 - DNA, 75 bp, synthetic construct
  source 1..75: mol_type = other DNA
aaggagcgcgaataaattatggcaacagtactatcgatcgatggggttatggtgtcaccagtgctctttctcctt

SEQ ID NO: 484628 - DNA, 75 bp, synthetic construct
  source 1..75: mol_type = other DNA
tttgcgctgcgattagcgataaattagagcgtcgccatccacatgtttttgccgacagttctgccgaaaacagca

SEQ ID NO: 484629 - DNA, 75 bp, synthetic construct
  source 1..75: mol_type = other DNA
atgaatcaaatcgaccgtttgctcactattatgcagcgtcttcgcgacccggataacggctgcccgtgggataaa

SEQ ID NO: 484630 - DNA, 75 bp, synthetic construct
  source 1..75: mol_type = other DNA
attgcacgccgatcaaggtgtactgtctgccagaagaaaaatcacaaatagaagcgaatgccgcagctgcaggtt

SEQ ID NO: 484631 - DNA, 75 bp, synthetic construct
  source 1..75: mol_type = other DNA
gctactactacggcctgaataactatctgacgggttataccggtattcagataaccgataataactataccgctg

SEQ ID NO: 484632 - DNA, 75 bp, synthetic construct
  source 1..75: mol_type = other DNA
atcgttatgggaaaacggcattaatgcggccatgttgtcatacaacctcaacggatatcatagtgaaacccctgg

SEQ ID NO: 484633 - DNA, 75 bp, synthetic construct
  source 1..75: mol_type = other DNA
tgacagttttagcgactccgatacactggcggtagttcaggctccaggtgctcaaggagcgcgaataaattatgg

SEQ ID NO: 484634 - DNA, 75 bp, synthetic construct
  source 1..75: mol_type = other DNA
cattgatgatctgagtccgtcagggtacggcagcgatcttattgttactgtcgaagaatccgatggctcaaagcg

SEQ ID NO: 484635 - DNA, 75 bp, synthetic construct
  source 1..75: mol_type = other DNA
ggttatatgatgaataaatccagtgatgatttgagttatatcggcggttatgccagttatgaatcgccgtgggga

SEQ ID NO: 484636 - DNA, 75 bp, synthetic construct
  source 1..75: mol_type = other DNA
gcatgaaaaatcaggttacggtcagtattaaccaaccgttgaaatttgagaaaaaagattacggttcattttatc

SEQ ID NO: 484637 - DNA, 75 bp, synthetic construct
  source 1..75: mol_type = other DNA
atgactacgcacaacttcaataccctggacttattaaccagtcctgtctggatcgtttcacccttcgaggaacaa

SEQ ID NO: 484638 - DNA, 75 bp, synthetic construct
  source 1..75: mol_type = other DNA
ccgcgctcaatttctatggttataaccatgaaacgatgtgccagaaacatacctgggaaataaatatgctcgggc

SEQ ID NO: 484639 - DNA, 75 bp, synthetic construct
  source 1..75: mol_type = other DNA
aaccccgttggatactgcactttcgttggctgaaactatccgcttgagcgtggcaaaagtgagtatttcgggctt

SEQ ID NO: 484640 - DNA, 75 bp, synthetic construct
  source 1..75: mol_type = other DNA
gggccgctcaaagaacaccactggtcaacattgcttgctgcgcgtgctctggatacaacctgttatatggtggcg

SEQ ID NO: 484641 - DNA, 75 bp, synthetic construct
  source 1..75: mol_type = other DNA
tgggctgatgacctgctatgacttacgctttccggagctggcgttggcacaggccatacagggagccgaaattct

SEQ ID NO: 484642 - DNA, 75 bp, synthetic construct
  source 1..75: mol_type = other DNA
tcgggcaaagccggattatagatccctttggcgtcaccattgcggcagcgtcagaaatgcctgcactcattatgg

SEQ ID NO: 484643 - DNA, 75 bp, synthetic construct
  source 1..75: mol_type = other DNA
ataggttatctgccgatgaacagagaggaagccagcctgttcttccggctactgaaccgtcgatatgaaaaagcg

SEQ ID NO: 484644 - DNA, 75 bp, synthetic construct
  source 1..75: mol_type = other DNA
actacgctgaatatcaaaggagagagttaccggttaaaagagaaacgtaaagctggagtgctgaccaaaaacaca

SEQ ID NO: 484645 - DNA, 75 bp, synthetic construct
  source 1..75: mol_type = other DNA
ttatcgcgttgaaagcctgctggaacaggcagctaaaaaagagctgaactaccgggagttcctgtgcatggcgct

SEQ ID NO: 484646 - DNA, 75 bp, synthetic construct
  source 1..75: mol_type = other DNA
agtacgggatgcggattgcgacggcttctgttgacgtgtatgacaacataaccggaacagctcgtcatatccctg

SEQ ID NO: 484647 - DNA, 75 bp, synthetic construct
  source 1..75: mol_type = other DNA
gagaggaagccagcctgttcttccggctactgaaccgtcgatatgaaaaagcgagcatcatactgacgtcaaaca

SEQ ID NO: 484648 - DNA, 75 bp, synthetic construct
  source 1..75: mol_type = other DNA
tacagcagcttggttatgcccgggtactgatactggatgagataggctatctgccgatgacccgcgaggaagcca

SEQ ID NO: 484649 - DNA, 75 bp, synthetic construct
  source 1..75: mol_type = other DNA
tcgggcaaagccggattataatccctttggcgtcaccattgcggcagcgtcagaaatgcctgcactcattatggc

SEQ ID NO: 484650 - DNA, 75 bp, synthetic construct
  source 1..75: mol_type = other DNA
acaatactgaatcctcaaaaaatcaatcctggactcgtctggcattcgccgggttgaaatttgctgattacggtt

SEQ ID NO: 484651 - DNA, 75 bp, synthetic construct
  source 1..75: mol_type = other DNA
caacccggcaggtgttgatgataaagatctggttaaatacgccgatgttggcgcgacttactatttcaataaaaa

SEQ ID NO: 484652 - DNA, 75 bp, synthetic construct
  source 1..75: mol_type = other DNA
tggcaacagcgattacgccgttgcgaacaagacccagaactttgaagtcactgcccaatatcagtttgactttgg

SEQ ID NO: 484653 - DNA, 75 bp, synthetic construct
  source 1..75: mol_type = other DNA
ggtaaaactccccggtcttgaggcccgccgttcggcggatgaatggttatgtcgttacgatttgccgaaagtctg

SEQ ID NO: 484654 - DNA, 75 bp, synthetic construct
  source 1..75: mol_type = other DNA
tcacggtgctattgccagagcaacatttaatgcacaaatcggcgggaaagtattaatgacgttgaagtacggtaa

SEQ ID NO: 484655 - DNA, 75 bp, synthetic construct
  source 1..75: mol_type = other DNA
gcgcctggcgcaaaagatgcaaaagtcgaaaaccagacgggggtgcgtaccgactggcgtggttatgccgtgctg

SEQ ID NO: 484656 - DNA, 75 bp, synthetic construct
  source 1..75: mol_type = other DNA
gttaccggttgaaggaaaaacgcaaagccggggtgttgtctaaaaacgcaacgccaatcagtgatgatgaaatgg

SEQ ID NO: 484657 - DNA, 75 bp, synthetic construct
  source 1..75: mol_type = other DNA
atcggcaacagtgcttaccagactatgcgtaaacataacgacccttccctggaggcagaacgcgatgcgttgcgg

SEQ ID NO: 484658 - DNA, 75 bp, synthetic construct
  source 1..75: mol_type = other DNA
aagctatctgccgatgaacagagaggaagccagcctgttcttccggctactgaaccgtcgatatgaaaaagcgag

SEQ ID NO: 484659 - DNA, 75 bp, synthetic construct
  source 1..75: mol_type = other DNA
ggattgaagtttgcaaattacggttctttcgattacggacgtaactacggtgtaatgtacgacgtagagggctgg

SEQ ID NO: 484660 - DNA, 75 bp, synthetic construct
  source 1..75: mol_type = other DNA
ttcggtgcaattgtcacacacggagagaataaaaatggcagcattgtcgcggaaaacggtcaggtttatctgact

SEQ ID NO: 484661 - DNA, 75 bp, synthetic construct
  source 1..75: mol_type = other DNA
ttgaactggatgaaaccgtagtcactgtcatcccaactcacggtgctattgccagagcaacatttaatgcacaaa

SEQ ID NO: 484662 - DNA, 75 bp, synthetic construct
  source 1..75: mol_type = other DNA
cactcaaccacgctgaatatcaaaggagagagttaccggttaaaagagaaacgtaaagctggagtgctgaccaaa

SEQ ID NO: 484663 - DNA, 75 bp, synthetic construct
  source 1..75: mol_type = other DNA
atgccatggtgattggtttcggcctggctgctggtatccgggtttatattacctgggagtcattaatcaatctgg

SEQ ID NO: 484664 - DNA, 75 bp, synthetic construct
  source 1..75: mol_type = other DNA
ggcatcatccttaagctgaatcagctttctaatcaggtagataacctgcgtctggccgataatgacagcgatggt

SEQ ID NO: 484665 - DNA, 75 bp, synthetic construct
  source 1..75: mol_type = other DNA
accgacgtggtattacaacccctactgcatgactctccggcagagctctcacagccgtgtgaagtgctcgactgg

SEQ ID NO: 484666 - DNA, 75 bp, synthetic construct
  source 1..75: mol_type = other DNA
agatgaacacgtttcttacaacgccggttacaccaacgttcacgagcagatcccgtggcgtacgctctctggccg

SEQ ID NO: 484667 - DNA, 75 bp, synthetic construct
  source 1..75: mol_type = other DNA
attgcggcgattatggagctgatgaacaaactggcgaaagcaccgaccgatggcgagcaggatcgcgctctgatg

SEQ ID NO: 484668 - DNA, 75 bp, synthetic construct
  source 1..75: mol_type = other DNA
ccagattatccgtattgcccgtgaatttgccgataacgctgacaagacgcacggtcgttcgatgattatcgtcgg

SEQ ID NO: 484669 - DNA, 75 bp, synthetic construct
  source 1..75: mol_type = other DNA
gacgccgatgcgctggcgcagctccgtcgcgagcattttggctttattttccagcgttaccacctgctttcgcat

SEQ ID NO: 484670 - DNA, 75 bp, synthetic construct
  source 1..75: mol_type = other DNA
gcgttgggaataacactgtcactgttaattgctttcaccttgcagcttttcttacccggctgggagattggtttt

SEQ ID NO: 484671 - DNA, 75 bp, synthetic construct
  source 1..75: mol_type = other DNA
atgacgcctttgctcgaattgaaggatattcgccgtagctatcccgcgggagatgagcaggttgaggtgctgaag

SEQ ID NO: 484672 - DNA, 75 bp, synthetic construct
  source 1..75: mol_type = other DNA
gatttctttacctggaacatggacggcgtcttgaaaaccgttgaaaagaccacacgtactttacaactgtttctg

SEQ ID NO: 484673 - DNA, 75 bp, synthetic construct
  source 1..75: mol_type = other DNA
gcgggcatacggtgattatcgtcacccacgatccgcaggtcgctgctcaggccgagcgggtgatcgaaattcgcg

SEQ ID NO: 484674 - DNA, 75 bp, synthetic construct
  source 1..75: mol_type = other DNA
gatgttttgcaacagttcctgatcgaagccgtactggtttgcctggtcggtggcgcgttgggaataacactgtaa

SEQ ID NO: 484675 - DNA, 75 bp, synthetic construct
  source 1..75: mol_type = other DNA
cgcacattatggtcgtagagcgcgattatccagcaacttacgaacgctttacctctatcggcccgctgatggaga

SEQ ID NO: 484676 - DNA, 75 bp, synthetic construct
  source 1..75: mol_type = other DNA
atgagcgttttaactggaataaaatgagcgatggcgaaaaacaagaagtgttgcgcctttgtcggcagcgattaa

SEQ ID NO: 484677 - DNA, 75 bp, synthetic construct
  source 1..75: mol_type = other DNA
ccgtccagagcccgtgccggggaatttgccagtctgacgaacgcgggttttgtcgcggctgttttcgtagccggg

SEQ ID NO: 484678 - DNA, 75 bp, synthetic construct
  source 1..75: mol_type = other DNA
gaaaaactcatctggccatagctcttggcgtgaaagcggtggatgcgggacatcgggtactgtttatgccactgg

SEQ ID NO: 484679 - DNA, 75 bp, synthetic construct
  source 1..75: mol_type = other DNA
tttcggtgaaagcctgctggtttatcgtccgccgatcgacacccgttcggtgaaagaagtgatggggcagaaatc

SEQ ID NO: 484680 - DNA, 75 bp, synthetic construct
  source 1..75: mol_type = other DNA
aaggcgctgcatagcgatccggttgaggcatgggcttctatcattgaagacgccgataaagcgaaaagctttaag

SEQ ID NO: 484681 - DNA, 75 bp, synthetic construct
  source 1..75: mol_type = other DNA
tcggatatgcatccgtttattcatcccctatctgcggcggtcgatccggcgtgggaatcacgcagcgactgggaa

SEQ ID NO: 484682 - DNA, 75 bp, synthetic construct
  source 1..75: mol_type = other DNA
caaaattcttctccggtaaagaacccgtcgttatggacagtttatcagactgcaataatgatctttataagacgc

SEQ ID NO: 484683 - DNA, 75 bp, synthetic construct
  source 1..75: mol_type = other DNA
gcgaccgttcagatatgccctgctattcggataagagcggaatcactattaccggtacagagaaagcacagcagg

SEQ ID NO: 484684 - DNA, 75 bp, synthetic construct
  source 1..75: mol_type = other DNA
ttccttttccgccatggagaacgttgcgaccgttcagatatgccctgctattcggataagagcggaatcactatt

SEQ ID NO: 484685 - DNA, 75 bp, synthetic construct
  source 1..75: mol_type = other DNA
tggagcgtcagctacagcaactgagttatgcccgggtgttgatcctggatgaaataggctatctgccgatgaaca

SEQ ID NO: 484686 - DNA, 75 bp, synthetic construct
  source 1..75: mol_type = other DNA
gcgtctcctcaccgatgcgcgtgactcaagaagggcctgacgtcttgtctcgttactgtcctgtccgggttatct

SEQ ID NO: 484687 - DNA, 75 bp, synthetic construct
  source 1..75: mol_type = other DNA
gctgacggttctgccggaaacagccgcgaagttctcgcccgttgggaggagatcaaaaccgaagagcgcgcgcag

SEQ ID NO: 484688 - DNA, 75 bp, synthetic construct
  source 1..75: mol_type = other DNA
ccggcatcgaaaagtcgtttatcaataaacttccatccacgtctgcacaggcagcgcgtgaagtggttcagaaga

SEQ ID NO: 484689 - DNA, 75 bp, synthetic construct
  source 1..75: mol_type = other DNA
tcgcacggcactggccaaactcaacgagaagcgtgccgaaaaacattcatgcgaaggaaaggtagcggagattag

SEQ ID NO: 484690 - DNA, 75 bp, synthetic construct
  source 1..75: mol_type = other DNA
cattacctgaaatcccatatctcaatgggccgttgtgagagcattcctgagtccgcgaaaggtctggacgtggac

SEQ ID NO: 484691 - DNA, 75 bp, synthetic construct
  source 1..75: mol_type = other DNA
ctctggagcggtttaaattttttctggaacaacgcgggtggatcgttgcccgtaaagaacaactggtggaacggt

SEQ ID NO: 484692 - DNA, 75 bp, synthetic construct
  source 1..75: mol_type = other DNA
cgcagtgaaggggaatggagttttaactccgacaaacttgacgtgcccgataacgccgaaaatcagcacgttgac

SEQ ID NO: 484693 - DNA, 75 bp, synthetic construct
  source 1..75: mol_type = other DNA
ttcggttcatgctgacccgctgattagcgccatttatgacgatgcgcagacccgcctgcgtgagcctcgtcatct

SEQ ID NO: 484694 - DNA, 75 bp, synthetic construct
  source 1..75: mol_type = other DNA
cagatttaccaactgacggtaaagataagtcagcgggtaaggcgcgtaaaaatctgacaaaatcgatttctgaaa

SEQ ID NO: 484695 - DNA, 75 bp, synthetic construct
  source 1..75: mol_type = other DNA
tggccgttctctatgaccgctacaacagtgagaaaaatttaagcgttcaggaaattgcggagcgagctggtaaat

SEQ ID NO: 484696 - DNA, 75 bp, synthetic construct
  source 1..75: mol_type = other DNA
ctgggcggttcagaaatcgaacaagaacgccagtggctgaaaccgcaggtgtggattggtccggcaattttgtca

SEQ ID NO: 484697 - DNA, 75 bp, synthetic construct
  source 1..75: mol_type = other DNA
atggaagaaaagcgcgccagccgtcaggtgacagtcccggcggtgatgctggaaaaagtgatggcgctggcaggc

SEQ ID NO: 484698 - DNA, 75 bp, synthetic construct
  source 1..75: mol_type = other DNA
gacccggaaggtgtattcccggtggttctcggtcacgaaggggctggcgttgtggttgaagtcggtgaaggcgta

SEQ ID NO: 484699 - DNA, 75 bp, synthetic construct
  source 1..75: mol_type = other DNA
ctgggagaaggggaaagcccgctgaaaagcgatgttctggcggcgctggcaaacgccggtcagaactggtgggca

SEQ ID NO: 484700 - DNA, 75 bp, synthetic construct
  source 1..75: mol_type = other DNA
gggcgacggtctgcgccccggttctattcaggacgccaacgatgaagcacagtttgccgagctgcatacgctggg

SEQ ID NO: 484701 - DNA, 75 bp, synthetic construct
  source 1..75: mol_type = other DNA
acaaccaccagcaacacaaaactcccccaccccaaatgatggatgcgcattactgatccactttgataaacacgg

SEQ ID NO: 484702 - DNA, 75 bp, synthetic construct
  source 1..75: mol_type = other DNA
ctctggagcggtataaattttatctggagcaacacggctggatcgttgcccgtaaagaacaactggtggaacggt

SEQ ID NO: 484703 - DNA, 75 bp, synthetic construct
  source 1..75: mol_type = other DNA
gaagaagtggaaaagctggtatggtctacgcgctggggggcggatacggtgatggatctctccaccggtcgctat

SEQ ID NO: 484704 - DNA, 75 bp, synthetic construct
  source 1..75: mol_type = other DNA
agctggtgcaggcggtgttccagaacgtcaacaccaccattacccagccaaaacagttgaccgaactggtcagca

SEQ ID NO: 484705 - DNA, 75 bp, synthetic construct
  source 1..75: mol_type = other DNA
ttgaaggcaacctcgaccacggcggcgcaatccgtctgggcaacactctgggtagcgacggcgaaaacctgccga

SEQ ID NO: 484706 - DNA, 75 bp, synthetic construct
  source 1..75: mol_type = other DNA
gacacgaagccacgcgcaattttatgcgaaaacgctggcattaaccgaagccacgcctgagctttccgcgttaag

SEQ ID NO: 484707 - DNA, 75 bp, synthetic construct
  source 1..75: mol_type = other DNA
taaaagttaacgccaatatcggcaactcagcggtcacctcttccatcgaagaagaagtggaaaagctggtatggt

SEQ ID NO: 484708 - DNA, 75 bp, synthetic construct
  source 1..75: mol_type = other DNA
gccccggacacgtaccgatgcagatgatccgccgtaatatgaccgaggagttagagcactgccatgaagcgccgt

SEQ ID NO: 484709 - DNA, 75 bp, synthetic construct
  source 1..75: mol_type = other DNA
aaatcgcgattaacgtacagcaagggctggcaaaactgcgccagccgtggatcgatgcacgcggcgacactgaag

SEQ ID NO: 484710 - DNA, 75 bp, synthetic construct
  source 1..75: mol_type = other DNA
atgatggcctcgacgaactgcgtttttagcggtgtactaacaccaaaacgcgccaaagcaggacgccgtgtcacc

SEQ ID NO: 484711 - DNA, 75 bp, synthetic construct
  source 1..75: mol_type = other DNA
cgggcgtactgctgcgctacgtgccgatgaccgcgaaacgcctgaccggtatcgtctctcgcggcggttcgatta

SEQ ID NO: 484712 - DNA, 75 bp, synthetic construct
  source 1..75: mol_type = other DNA
ggcgtactaacaccaaaacgcgccaaagcaggacgccgtgtcacccaactgcactacgcccgccagggcatcatc

SEQ ID NO: 484713 - DNA, 75 bp, synthetic construct
  source 1..75: mol_type = other DNA
cgacgggtttgtgattgcacagaaagacttagagattcgcggccctggcgaattgttaggtacgcgccagacggg

SEQ ID NO: 484714 - DNA, 75 bp, synthetic construct
  source 1..75: mol_type = other DNA
agattgtcaccgaccaggacatgccggacgaagtgcgcgccaaattatgcaaagcgtgcgcctttgcccgccgtg

SEQ ID NO: 484715 - DNA, 75 bp, synthetic construct
  source 1..75: mol_type = other DNA
acttcggcgcgattgttctgctgccgcagttgttgcaggaggtctacggttacacggcgacctgggcagggctgg

SEQ ID NO: 484716 - DNA, 75 bp, synthetic construct
  source 1..75: mol_type = other DNA
ctctgcgccggtagggattattccggtgatcctgtcgccgattatcggccgcttcgcgcataaactggatatgcg

SEQ ID NO: 484717 - DNA, 75 bp, synthetic construct
  source 1..75: mol_type = other DNA
taatgaatcacaagataagtattgtgtttcgtatacgattcgatcatttccggcaaaaattaagccaggcgcgct

SEQ ID NO: 484718 - DNA, 75 bp, synthetic construct
  source 1..75: mol_type = other DNA
aaaaaacagcctaatggtaaacctcaccctgcggctgaaatccttttagcggttttattcttctataaagattta

SEQ ID NO: 484719 - DNA, 75 bp, synthetic construct
  source 1..75: mol_type = other DNA
tccccggtcgtcgatgagaaacccgcaccggtgccgacattacccgttacaccccgccgggtaaaaagctgctac

SEQ ID NO: 484720 - DNA, 75 bp, synthetic construct
  source 1..75: mol_type = other DNA
ttaagttcctggcggaagtgcgtcagccacacctggtcatccggtaccaacggcgtggtggctgcaacgttttca

SEQ ID NO: 484721 - DNA, 75 bp, synthetic construct
  source 1..75: mol_type = other DNA
atctcgcccaggggtcattaaaagaacatttgcccgcctggctatggggcaagaaagagaacacgaagtgggaag

SEQ ID NO: 484722 - DNA, 75 bp, synthetic construct
  source 1..75: mol_type = other DNA
ccgttttaaaccgatggcgacattcaccgagaaaaacggctatccgccggagaaagtcgatgtcgctacgggtaa

SEQ ID NO: 484723 - DNA, 75 bp, synthetic construct
  source 1..75: mol_type = other DNA
gtgtatcagcctcgcgtatatgctctacttcggcgctattgttctgctgccgcagttgttgcaggaggtctacgg

SEQ ID NO: 484724 - DNA, 75 bp, synthetic construct
  source 1..75: mol_type = other DNA
tacacggcaacgtgggcaggtctggcctctgcgccggtagggattattccggtgatcctgtcgccgattatcggc

SEQ ID NO: 484725 - DNA, 75 bp, synthetic construct
  source 1..75: mol_type = other DNA
tgtatcagcctcgcgtatatgctctacttcggcgccattgttttgctgccgcagttgttgcaggaggtatacggc

SEQ ID NO: 484726 - DNA, 75 bp, synthetic construct
  source 1..75: mol_type = other DNA
tggatgacatgttcttccacgatggcagcgatatcccgaccgatcgctttatcgtgccgcgcattgaagtggagc

SEQ ID NO: 484727 - DNA, 75 bp, synthetic construct
  source 1..75: mol_type = other DNA
ctgagcgccaatgacacgctgaaaaataaacttcttgccgccttaccgttcaagccaacgggcgctcaggctcgc

SEQ ID NO: 484728 - DNA, 75 bp, synthetic construct
  source 1..75: mol_type = other DNA
ataaactccttgccgcgctgccgttcaagccgacgggcgctcaggctcgcgtggtggcagagatcgagcgtgata

SEQ ID NO: 484729 - DNA, 75 bp, synthetic construct
  source 1..75: mol_type = other DNA
gatttggagattcgcggtcctggtgaactgttaggtacgcgtcagacgggtaatgccgaatttaaagtggcagat

SEQ ID NO: 484730 - DNA, 75 bp, synthetic construct
  source 1..75: mol_type = other DNA
accgctcggtatcgaagtgggctggctggcgggcaaacagaagggcaaagcgcggctggcacagcaagaagccat

SEQ ID NO: 484731 - DNA, 75 bp, synthetic construct
  source 1..75: mol_type = other DNA
gtcaggcgtactgggtttgtacgttgattgaagagtcggaattgctggaagcgcaagcggcagaggccacatggg

SEQ ID NO: 484732 - DNA, 75 bp, synthetic construct
  source 1..75: mol_type = other DNA
cgccacgcctgtatgactgaagggcgtcaggcgtactgggtgtgcacactcattgaagagtcagagttactggaa

SEQ ID NO: 484733 - DNA, 75 bp, synthetic construct
  source 1..75: mol_type = other DNA
cctgatcaacgccgcgcgcagcaccggctttgccgaatgcgcctttgaagatgccgcccgctatgccaaccaacg

SEQ ID NO: 484734 - DNA, 75 bp, synthetic construct
  source 1..75: mol_type = other DNA
gaaccaggtgctggctcagataacaacagtgccactaccacttacacgcgtaaaaacggcaaggtctacatcaac

SEQ ID NO: 484735 - DNA, 75 bp, synthetic construct
  source 1..75: mol_type = other DNA
gcagcgtgaatgggttcgactgaaaatcgccgaaggtcgcacgctgaaaggccacaaaatcggcctgacctcgaa

SEQ ID NO: 484736 - DNA, 75 bp, synthetic construct
  source 1..75: mol_type = other DNA
catgccgagatacgtcgctggcgtttgaaacagtcgctgggccgtacttggcttagaagacctgaacttctggaa

SEQ ID NO: 484737 - DNA, 75 bp, synthetic construct
  source 1..75: mol_type = other DNA
gaactggcaacgaatcaaaaattgattctggtgtgcggtcgctacgaaggtatagatgagcgcgtgatccaaacc

SEQ ID NO: 484738 - DNA, 75 bp, synthetic construct
  source 1..75: mol_type = other DNA
acagcgccaccaccacttacacgcgtaaaaacggcaaggtttacatcaacggacagaaaacctttattaccggcg

SEQ ID NO: 484739 - DNA, 75 bp, synthetic construct
  source 1..75: mol_type = other DNA
tgggaaaccaccatggacccggaaagccgtcgtatgctgcgcgttaccgttaaggatgcgattgccgctgaccag

SEQ ID NO: 484740 - DNA, 75 bp, synthetic construct
  source 1..75: mol_type = other DNA
atttataataaagacagtaacaagctggatctgtacgggaaagttaatgctaagcactacttctcctctaatgat

SEQ ID NO: 484741 - DNA, 75 bp, synthetic construct
  source 1..75: mol_type = other DNA
gaaaaagggtatttccactctccggcgaccggacagttaatgctcgatcacccgatggtcgttgccgacgtgcaa

SEQ ID NO: 484742 - DNA, 75 bp, synthetic construct
  source 1..75: mol_type = other DNA
taaagatgcgattgccgccgaccaattgttcaccacgctgatgggcgacgccgtagaaccgcgccgtgcgtttat

SEQ ID NO: 484743 - DNA, 75 bp, synthetic construct
  source 1..75: mol_type = other DNA
ggcaaagaagaccacttccactatgaaggcggcatcaaggcgttcgttgaatatctgaacaagaacaaaacgccg

SEQ ID NO: 484744 - DNA, 75 bp, synthetic construct
  source 1..75: mol_type = other DNA
tgtacaaagtgaagaaaggcaagcaggagcagtacattaaagacgatgaagcgatggatcagtaccaaatttcta

SEQ ID NO: 484745 - DNA, 75 bp, synthetic construct
  source 1..75: mol_type = other DNA
tttactggtggcgtcagttactgaacaagggaggacctgaggggctaatcccgcacagtaaggcacctctggtgc

SEQ ID NO: 484746 - DNA, 75 bp, synthetic construct
  source 1..75: mol_type = other DNA
tttcaacggacgaaattcacctggcggatgccagtctggtgctggaatttaacaactgcggccggggattcatca

SEQ ID NO: 484747 - DNA, 75 bp, synthetic construct
  source 1..75: mol_type = other DNA
atgcgggggagattaagagcacaggaagccaggcggacagcctcagtaagaaatattcacccgtaatcagtaagt

SEQ ID NO: 484748 - DNA, 75 bp, synthetic construct
  source 1..75: mol_type = other DNA
gcgtcgttaaaaaagccttgcacgtacagattgatggcttagaaaccgtgttggctgcgatgtgtgaaccgcaaa

SEQ ID NO: 484749 - DNA, 75 bp, synthetic construct
  source 1..75: mol_type = other DNA
aaacaacaccgcgccagcaccgtggacgtacgacaacatcgcgtatatgaaaaaccagctcaaaatgctgggctt

SEQ ID NO: 484750 - DNA, 75 bp, synthetic construct
  source 1..75: mol_type = other DNA
cgcggcattccgaccggtattcacccggaagagggcgtatcggcggcggaagtgatcatgaccgtcctgcacgca

SEQ ID NO: 484751 - DNA, 75 bp, synthetic construct
  source 1..75: mol_type = other DNA
tcaacgttaacgactatgacaacacactgaccgtttacactacccgccctgacacctttatgggttgtacctacc

SEQ ID NO: 484752 - DNA, 75 bp, synthetic construct
  source 1..75: mol_type = other DNA
ggtacagttttctccccgcagggacggatatcaactgatgctgatggattgaagtatcagttgaatggggaaaat

SEQ ID NO: 484753 - DNA, 75 bp, synthetic construct
  source 1..75: mol_type = other DNA
atggatatcaagaagaatataataattgcttttgctacaactttattgggcgggtgtggtagtattggaaatata

SEQ ID NO: 484754 - DNA, 75 bp, synthetic construct
  source 1..75: mol_type = other DNA
cagaaacgcgtaatatgaccccgtttggcgacagcgattatgctgttgcaaacaaaacccagaactttgaagtca

SEQ ID NO: 484755 - DNA, 75 bp, synthetic construct
  source 1..75: mol_type = other DNA
gctgacggcgttctgctccgtccttgcaggtctgctcggcgcgtgggtgcttcccgcgcgtgccgctcggacgat

SEQ ID NO: 484756 - DNA, 75 bp, synthetic construct
  source 1..75: mol_type = other DNA
gcggggctcgtggctctactctcgctccgtcttcaatttgctacaatggcggcggcagccacagcctccgcccca

SEQ ID NO: 484757 - DNA, 75 bp, synthetic construct
  source 1..75: mol_type = other DNA
actgatatgctacctgaatttggcggtgactcttataccaatgcagacaactttatgactggtcgtgccaatggc

SEQ ID NO: 484758 - DNA, 75 bp, synthetic construct
  source 1..75: mol_type = other DNA
gacaccttacggtgattcaacaaatacgattgccaacaaaacccagaactttgaagttactgcacaatatcagtt

SEQ ID NO: 484759 - DNA, 75 bp, synthetic construct
  source 1..75: mol_type = other DNA
tatatcggcgacacggatgacggcaccggcctgcaccacatggtattcgaggtggtagataacgctatcgacgaa

SEQ ID NO: 484760 - DNA, 75 bp, synthetic construct
  source 1..75: mol_type = other DNA
aacaagggagttttcagggaagacagcaatggttaaatgctgctgagcgacttggatttttgagtaaacgtgtcc

SEQ ID NO: 484761 - DNA, 75 bp, synthetic construct
  source 1..75: mol_type = other DNA
ggctcaattttctccccgcaggggcggatatcaacagatgctgatggtttgaagtatcagttgaatggggaaaat

SEQ ID NO: 484762 - DNA, 75 bp, synthetic construct
  source 1..75: mol_type = other DNA
ctaaaggccgtgacctgcacgctgccggtggtgcagacaacccggcaggtgttgatgataaagatctggttaaat

SEQ ID NO: 484763 - DNA, 75 bp, synthetic construct
  source 1..75: mol_type = other DNA
gaccaatgacacgatggctgtcacatggacacccaggaaccgcgccacgggtaagccattgcagaaaacaccggc

SEQ ID NO: 484764 - DNA, 75 bp, synthetic construct
  source 1..75: mol_type = other DNA
ttttcagaatattaatgagggtgatactaatataaaaaatacaattcttaattcattaatacacaatgtactgac

SEQ ID NO: 484765 - DNA, 75 bp, synthetic construct
  source 1..75: mol_type = other DNA
acctttgtcgtggcgatgagaagaacgcagcaaggatttatcgggccagttgcgagcaaaaacctggtgattacg

SEQ ID NO: 484766 - DNA, 75 bp, synthetic construct
  source 1..75: mol_type = other DNA
ccgggttccggtcgaggtttgtaataaaccagtatcagaaaagtggacgccatcaattcacatgccgcgctgggc

SEQ ID NO: 484767 - DNA, 75 bp, synthetic construct
  source 1..75: mol_type = other DNA
atggctaatgaaaacttagatattgactccaagacagcagaagaattatacgagtggtatctggatgataaatta

SEQ ID NO: 484768 - DNA, 75 bp, synthetic construct
  source 1..75: mol_type = other DNA
gcattatagactataatcctgtcattacatggacagtacctgttgcatttttctttttagtagtgctggctggta

SEQ ID NO: 484769 - DNA, 75 bp, synthetic construct
  source 1..75: mol_type = other DNA
acataattttatcaaccatctgcatgaacttttacgctcgcgcttatcaacggctttgccgctgattttcgcagt

SEQ ID NO: 484770 - DNA, 75 bp, synthetic construct
  source 1..75: mol_type = other DNA
ggcgacacgcaggatttccagatccaccgcgcctttatcggcctcgaactggtgcccggcacccgtcgtctggcg

SEQ ID NO: 484771 - DNA, 75 bp, synthetic construct
  source 1..75: mol_type = other DNA
tgggtgtacgacctgcgtaccaatatgccgagcttcggcaagcgcacgccgtttaccgacgagcatctgcagccg

SEQ ID NO: 484772 - DNA, 75 bp, synthetic construct
  source 1..75: mol_type = other DNA
cggaatacctgccggaaggttaccgctgggatgacctgaaatcccgcatcggccaggagcagttgcagttctacc

SEQ ID NO: 484773 - DNA, 75 bp, synthetic construct
  source 1..75: mol_type = other DNA
caacaggttaaccgccttgagcgcggcgtggcttactatatagaagccggtacgctgaccaatgaacaatggcag

SEQ ID NO: 484774 - DNA, 75 bp, synthetic construct
  source 1..75: mol_type = other DNA
tctggaagaggcatcaactgaagaaatcattgaacatctgaaagtgctgatccctcaatggaagagacagcttaa

SEQ ID NO: 484775 - DNA, 75 bp, synthetic construct
  source 1..75: mol_type = other DNA
tgctgtttttgaaaatgtgtaaagagaccgggcaggaagcggaatacctgccggtaggctaccgctgggatgacc

SEQ ID NO: 484776 - DNA, 75 bp, synthetic construct
  source 1..75: mol_type = other DNA
gagcttgcgcagcaatgcgcgaaccattcgcaccccaccgttggaactccaaccaatgccgccgcgttcacactg

SEQ ID NO: 484777 - DNA, 75 bp, synthetic construct
  source 1..75: mol_type = other DNA
gtagaaatcccgtcagagttcagccagggggctgctggtggtaactctgtgacattaccagtgatccagactatg

SEQ ID NO: 484778 - DNA, 75 bp, synthetic construct
  source 1..75: mol_type = other DNA
acctttcaacggatgaagtgcatctggctgatgccagcctggtactggagcttaacagttgcggtcggggattta

SEQ ID NO: 484779 - DNA, 75 bp, synthetic construct
  source 1..75: mol_type = other DNA
tcagtgttggccggaacgcaaaacgggacgtcgcgggcgatgttacagacgacgtgaaagggaatgtcacgtcaa

SEQ ID NO: 484780 - DNA, 75 bp, synthetic construct
  source 1..75: mol_type = other DNA
atgttcatttcagcaccctaccttgcggaaggtggccagttggctggaggaaaacagcgggatcaccatcagcgt

SEQ ID NO: 484781 - DNA, 75 bp, synthetic construct
  source 1..75: mol_type = other DNA
gaccaatgcgtcatcatttactcagactgctacgaaagccggagaaacccggagcaagtaccagaatattatcgc

SEQ ID NO: 484782 - DNA, 75 bp, synthetic construct
  source 1..75: mol_type = other DNA
acactgctggccggagccatccagcatgtaagcgccggtgattatagccaggcggtgaaaggtaacaggctggcc

SEQ ID NO: 484783 - DNA, 75 bp, synthetic construct
  source 1..75: mol_type = other DNA
tctacgttacgcaacggtggcagcagaaatgagaaaggaggcacatagaatgaccggtaataatttgaatgttga

SEQ ID NO: 484784 - DNA, 75 bp, synthetic construct
  source 1..75: mol_type = other DNA
atcgatggtgcgaacggtaaaagcagatacagaacaacgtgatctggtcagtcgcgaaaccacggttaaagccac

SEQ ID NO: 484785 - DNA, 75 bp, synthetic construct
  source 1..75: mol_type = other DNA
agagcgtcaacacgctgactatgatgctggacactattgatttactggccgagctggcgcagcagtgtgcgagcc

SEQ ID NO: 484786 - DNA, 75 bp, synthetic construct
  source 1..75: mol_type = other DNA
gcacgggctaccagctttttgccagtctgggccgagcattttcagtgacggattatctttggtatcagctgccgg

SEQ ID NO: 484787 - DNA, 75 bp, synthetic construct
  source 1..75: mol_type = other DNA
ccgcgcgcgaatcaaaagctgtccgccgttcgctgatcgacaaactggaagaattgcagcaggcaaactccccta

SEQ ID NO: 484788 - DNA, 75 bp, synthetic construct
  source 1..75: mol_type = other DNA
tgaccggtaaaaatttgaatgttgagaaaccagcacctgttacgtcagctacgccaacaccagccgtgaatgtca

SEQ ID NO: 484789 - DNA, 75 bp, synthetic construct
  source 1..75: mol_type = other DNA
atttgaaaggcggcatgaccaatctatcgggggtttatggcactctgctgccggataataacctgaattatagcg

SEQ ID NO: 484790 - DNA, 75 bp, synthetic construct
  source 1..75: mol_type = other DNA
gcgaaatgaccgtcaatacggctgccgggcgcaagctgtctgaggacgaaatggaatctctggtgcgtgacatga

SEQ ID NO: 484791 - DNA, 75 bp, synthetic construct
  source 1..75: mol_type = other DNA
gtgtgcaccttacctctgaaaaaccagactggatgaatggctttaagggatcggcgaatgcggccaaacgagcca

SEQ ID NO: 484792 - DNA, 75 bp, synthetic construct
  source 1..75: mol_type = other DNA
gtgataatattagtgctcgattcaaggagcataaatgaaaaaattattaaggcatcggtattacttctttcatta

SEQ ID NO: 484793 - DNA, 75 bp, synthetic construct
  source 1..75: mol_type = other DNA
tcaacggcggaagatatcaaaaacgagctgcaaaaggtcgttgacatgatttcgaacggtcagggaacggcggcg

SEQ ID NO: 484794 - DNA, 75 bp, synthetic construct
  source 1..75: mol_type = other DNA
tgataaccaactggcttgcaaagaatgctgaccagtctcatgcgcggctaccggaagacctgcgacgcgtgctgg

SEQ ID NO: 484795 - DNA, 75 bp, synthetic construct
  source 1..75: mol_type = other DNA
aattcgtgccgccgggtatgagtcctggcgcaatgccattctgccgcgccttgatgatatgacatttgacgggat

SEQ ID NO: 484796 - DNA, 75 bp, synthetic construct
  source 1..75: mol_type = other DNA
ctgcgtgactgcgtttatatcatcattggcagcattcttatcggcggtggctcggagttcgcagcactgcttatc

SEQ ID NO: 484797 - DNA, 75 bp, synthetic construct
  source 1..75: mol_type = other DNA
gaaaggcgagagcctgtcgcagtgcggctacatcatcattggcggcattttaattggcggaggcagtgaaatcgg

SEQ ID NO: 484798 - DNA, 75 bp, synthetic construct
  source 1..75: mol_type = other DNA
acaaaaatgaaacttagctacttaaaaacattagcttactatgcgtctgaatatagttctttttatatacaaaat

SEQ ID NO: 484799 - DNA, 75 bp, synthetic construct
  source 1..75: mol_type = other DNA
aactgcatcatgatctgaagtcttatcttgatgccggtatttcgattaagtttcttgcattcccacgtgcaggac

SEQ ID NO: 484800 - DNA, 75 bp, synthetic construct
  source 1..75: mol_type = other DNA
ctatattttactgagcattgggcgctgcccatttcctctaattcgcacgaatatagaaggattgccttactttga

SEQ ID NO: 484801 - DNA, 75 bp, synthetic construct
  source 1..75: mol_type = other DNA
gcgggtgatgcacaaagcggaaaaagcagttgcctccgtgaaatttcgctaaaaacggaaagtagcgatcttttg

SEQ ID NO: 484802 - DNA, 75 bp, synthetic construct
  source 1..75: mol_type = other DNA
gcagattaaaaccggcgatgacgtcgatatcgatatcgccatttgttcaatgatgggcgttgatccagaagatat

SEQ ID NO: 484803 - DNA, 75 bp, synthetic construct
  source 1..75: mol_type = other DNA
agcgattctgaaacgctcgccgcaacaccaaaagcggttaaggcagcgtatgatcttgctaacgaaaaatatacc

SEQ ID NO: 484804 - DNA, 75 bp, synthetic construct
  source 1..75: mol_type = other DNA
gattacgttgatgacaaaattgcagaacacgaacagtcacgacgccacccggacgcctcactgactgcaaaaggt

SEQ ID NO: 484805 - DNA, 75 bp, synthetic construct
  source 1..75: mol_type = other DNA
taatgctgacggcctctggcgataaatttggaacatggaacggtttaagaccgctgactatcaataacgccaatg

SEQ ID NO: 484806 - DNA, 75 bp, synthetic construct
  source 1..75: mol_type = other DNA
attaggtgatgatgcaggctggcatttttacagtcagagaaatacagataacagcatcacttttgctgttaacgg

SEQ ID NO: 484807 - DNA, 75 bp, synthetic construct
  source 1..75: mol_type = other DNA
atcaataacgctaatggcggagtgtcaatggggcatggcctgagtgttactggtgatattgtctcaagtaccaaa

SEQ ID NO: 484808 - DNA, 75 bp, synthetic construct
  source 1..75: mol_type = other DNA
ggaagaattatcactcagctccgcttatggtctccgttcaagaggtgagattacatcactcagtgctaatggtct

SEQ ID NO: 484809 - DNA, 75 bp, synthetic construct
  source 1..75: mol_type = other DNA
gctggatgaatggcaaatctctgcgctgaaacaggtcctttctcgcctgtgggaagagaaaggtaaagagatgaa

SEQ ID NO: 484810 - DNA, 75 bp, synthetic construct
  source 1..75: mol_type = other DNA
ccggatgatggggttgcgtgatggcttccgtcacgagctgctgacatctgtcatcaaggaacggattaacttcct

SEQ ID NO: 484811 - DNA, 75 bp, synthetic construct
  source 1..75: mol_type = other DNA
tgccgtactggcgcaacagtccggtgaagccgaagccggggcactgattcaggcggcgctgtctgacgggcgact

SEQ ID NO: 484812 - DNA, 75 bp, synthetic construct
  source 1..75: mol_type = other DNA
atctgagctctcggcttcgttctttaaaaaaaactttgataagatcaacgtaaaccttctatccaaagccacatc

SEQ ID NO: 484813 - DNA, 75 bp, synthetic construct
  source 1..75: mol_type = other DNA
gctcggccaaaccgaagaaacagttgaatctgttaagcgcagcggtcgtctgaccctttcagatggcgggttcca

SEQ ID NO: 484814 - DNA, 75 bp, synthetic construct
  source 1..75: mol_type = other DNA
ccagcaagaagtattcctgggtgaacgtaaccgcaagaaagtcgtcatcgtggatgaggcctgggacctgctcaa

SEQ ID NO: 484815 - DNA, 75 bp, synthetic construct
  source 1..75: mol_type = other DNA
tcagatatacgttaggaagtcgactggctaatgaaggagcctcaattgaggtgattgctaaagcgttagatcata

SEQ ID NO: 484816 - DNA, 75 bp, synthetic construct
  source 1..75: mol_type = other DNA
aaaatcgacttcgaaggggattacaaaagttccattaacccaaatctgaacaacattttgggtagcatgggttta

SEQ ID NO: 484817 - DNA, 75 bp, synthetic construct
  source 1..75: mol_type = other DNA
gcgtgctgatgcagataatattgcaccaactgcgtgggtgcctaacctgcatttcgtagcacctattaacgatca

SEQ ID NO: 484818 - DNA, 75 bp, synthetic construct
  source 1..75: mol_type = other DNA
tacgccaaggcaaaaattgagcgttacgccggttcgctggggcctttgttgtctcaacagttgattgcccaaggt

SEQ ID NO: 484819 - DNA, 75 bp, synthetic construct
  source 1..75: mol_type = other DNA
atgactggtttgaaggccgttttgtcatttattggcacaattatattggttgcatttggcgcgtttggttttggt

SEQ ID NO: 484820 - DNA, 75 bp, synthetic construct
  source 1..75: mol_type = other DNA
taaaacaaccagcttctcacgctcagttgagatccacaaaaaagtgatcggagcgtttatcgaaaaacacatgct

SEQ ID NO: 484821 - DNA, 75 bp, synthetic construct
  source 1..75: mol_type = other DNA
gtgaggtattcgataggcattgattccggttctaccgccaccaaagggatcttactggcagacggcgtgattatg

SEQ ID NO: 484822 - DNA, 75 bp, synthetic construct
  source 1..75: mol_type = other DNA
ctcttccctgaagtcctgctatccgagccgaacctggcgggtgaaaacagcgtctggctgagcagctcccggcgc

SEQ ID NO: 484823 - DNA, 75 bp, synthetic construct
  source 1..75: mol_type = other DNA
ccgccgcgaagcactggtacaaaatctgcgtcagcaactccaggagatccgccagtgcctgcactgccggttgcc

SEQ ID NO: 484824 - DNA, 75 bp, synthetic construct
  source 1..75: mol_type = other DNA
tatcgctttccggcaataagcggcgcagcgtacttaacctggacggccagttagtggactacagccagggacgca

SEQ ID NO: 484825 - DNA, 75 bp, synthetic construct
  source 1..75: mol_type = other DNA
ggaccggcagcttattccttcgagtctgaaggtaaagcctggctgttcggtactaactttaactacgcgttctga

SEQ ID NO: 484826 - DNA, 75 bp, synthetic construct
  source 1..75: mol_type = other DNA
gatgcatccattgacgttggtgcatcttatatgcacggtcagaatgtgaagtttactgaaggtgaaggaccggca

SEQ ID NO: 484827 - DNA, 75 bp, synthetic construct
  source 1..75: mol_type = other DNA
ataaaccggtcattaatgcgcaacatgaactgagcaagctgcccatataccagcgtgtctaccagaccctgcgca

SEQ ID NO: 484828 - DNA, 75 bp, synthetic construct
  source 1..75: mol_type = other DNA
gttatgccagagaagtcgcgaaggaaaagcatctgaccggcaaactattcactcagcgcattgagcgtaacaatc

SEQ ID NO: 484829 - DNA, 75 bp, synthetic construct
  source 1..75: mol_type = other DNA
gtggccgaacatcgtgatgtcattcataagattggtgttactggtggcaaggtagagactcgtattgccaatgct

SEQ ID NO: 484830 - DNA, 75 bp, synthetic construct
  source 1..75: mol_type = other DNA
tcgttccgttattcgttatcgatgaggctgttgcacgtattaaggatggtagcatcattgggtatgtttatgacc

SEQ ID NO: 484831 - DNA, 75 bp, synthetic construct
  source 1..75: mol_type = other DNA
ctaaaattcacgatgcctgtgtggttgcaatgcccgatgaacgtttaggtgaacgatcatgcgcttatgtcgtgc

SEQ ID NO: 484832 - DNA, 75 bp, synthetic construct
  source 1..75: mol_type = other DNA
gaatgtaccaaaagtaaaacaaagaaaatgtttcagaaaagaatttaacatggttatgatagaaccgttcttata

SEQ ID NO: 484833 - DNA, 75 bp, synthetic construct
  source 1..75: mol_type = other DNA
agcaaatcttttttgctaagatgaacaggtatagtttcaaactgtcagataagaaatggcaactggataaagaaa

SEQ ID NO: 484834 - DNA, 75 bp, synthetic construct
  source 1..75: mol_type = other DNA
attgctacgttattctattagcaacaacgggaaggaggccatcacagctaacttcgttgaaagcgaaagatctca

SEQ ID NO: 484835 - DNA, 75 bp, synthetic construct
  source 1..75: mol_type = other DNA
gactactggggaagttatgccagagaagtcgtgaaggaaaagcatctgaccggtaaactattcactcagcgcatt

SEQ ID NO: 484836 - DNA, 75 bp, synthetic construct
  source 1..75: mol_type = other DNA
ttgctggcgctgcttgccccttttaccatcggtgtgttgatcactgacgaatggggtagttacactagagagtta

SEQ ID NO: 484837 - DNA, 75 bp, synthetic construct
  source 1..75: mol_type = other DNA
gctatggccgggaggtgccgaagaataagcatctgaccggcaaaatattcacccaacgcattgagcgtaataatc

SEQ ID NO: 484838 - DNA, 75 bp, synthetic construct
  source 1..75: mol_type = other DNA
gatgaatccgtactacatgctccttcattgcatttgcagttattcaacactcaggtgaccacacagggcaacctg

SEQ ID NO: 484839 - DNA, 75 bp, synthetic construct
  source 1..75: mol_type = other DNA
cttcgtgctggggtttggtggttcgcgttggacttcagatatagcaatcaactacttcaaaagcgtattgggcgt

SEQ ID NO: 484840 - DNA, 75 bp, synthetic construct
  source 1..75: mol_type = other DNA
atgagcaaaactatcgcgacggaaaatgcacccgcagccatcggtccttatgttcagggcgttgatctgggcagt

SEQ ID NO: 484841 - DNA, 75 bp, synthetic construct
  source 1..75: mol_type = other DNA
gagttgagcgacggcactttatcgtggttagggaacgccttgttctggatgccgctaccggaaccgccgcaggag

SEQ ID NO: 484842 - DNA, 75 bp, synthetic construct
  source 1..75: mol_type = other DNA
ttgctgtcaggaggcggggcaaaaaacaacgtcagcttcgatagtggcaatgcttatgccgacccgctgcgagaa

SEQ ID NO: 484843 - DNA, 75 bp, synthetic construct
  source 1..75: mol_type = other DNA
tgcgtgaggaggcagagcgtgcaattccggcaatggatcgcctgttaatgttgccagttgatgatgatttgttaa

SEQ ID NO: 484844 - DNA, 75 bp, synthetic construct
  source 1..75: mol_type = other DNA
atcagaaaaataattacacaacatctgcaaaacagatgcttggtacgatggctgaatttgcctatagggcaggta

SEQ ID NO: 484845 - DNA, 75 bp, synthetic construct
  source 1..75: mol_type = other DNA
cccctccaatgccagtagtacctgaagaaaaaccaatgcccaaccctcttaaaatgtacgcggtcgatgctgttg

SEQ ID NO: 484846 - DNA, 75 bp, synthetic construct
  source 1..75: mol_type = other DNA
tatccggtaactccggatggttggataagctgtagtgatcgaatgcctgaaaagggccagaacgtgcttatttcg

SEQ ID NO: 484847 - DNA, 75 bp, synthetic construct
  source 1..75: mol_type = other DNA
cccatgacgaattcatggccgagcggcaacaggtactgaaaacctgggaaactggcaaggacgttgaaaaattcg

SEQ ID NO: 484848 - DNA, 75 bp, synthetic construct
  source 1..75: mol_type = other DNA
ttgtacgaagagcgtcttgatggcgctttacccgatgtcgaccgcacatcggtactgatggcactgcgtgagcat

SEQ ID NO: 484849 - DNA, 75 bp, synthetic construct
  source 1..75: mol_type = other DNA
aaatatgagttacacataccgacggttgtcattcccggttctgatcataatccgccttctaaccaagggggggat

SEQ ID NO: 484850 - DNA, 75 bp, synthetic construct
  source 1..75: mol_type = other DNA
gaaccagttgcttatattttcaaacatccggccggaaaattattctgggctttgacggatgaaagcaataaagag

SEQ ID NO: 484851 - DNA, 75 bp, synthetic construct
  source 1..75: mol_type = other DNA
ggatgcgccagttgaaggcagcagcaaagcggctgcatacgctacaggctggaatgcctgccgcgccgctatgct

SEQ ID NO: 484852 - DNA, 75 bp, synthetic construct
  source 1..75: mol_type = other DNA
gccgtcgcctcaccgaaaccctgcaaaaaccgctacagatccgccacggcacgccagatgcgcgtctgctggctg

SEQ ID NO: 484853 - DNA, 75 bp, synthetic construct
  source 1..75: mol_type = other DNA
ttgtcgagttcattccgtttatggtgacccgccagatgtgctcactaaatcctttttccacagattttcggcaac

SEQ ID NO: 484854 - DNA, 75 bp, synthetic construct
  source 1..75: mol_type = other DNA
gaaatggctatttatatgcgacagttggtaatgactccaacttactgatagtgttttatgttcagataatgcccg

SEQ ID NO: 484855 - DNA, 75 bp, synthetic construct
  source 1..75: mol_type = other DNA
cctgatatgcctactgttcaggctggcaactatccggtaactccggatggttggataagctgtagtgagcgaatg

SEQ ID NO: 484856 - DNA, 75 bp, synthetic construct
  source 1..75: mol_type = other DNA
acccgctggagctggctaaagctatcagaaaaggtcctgacatgcccgaattcgatggaccaactccggtaactc

SEQ ID NO: 484857 - DNA, 75 bp, synthetic construct
  source 1..75: mol_type = other DNA
tgatgatggagttcccggacgatccggcttgtgattaccttgaccgtcaatacatgttaggcgacaacgtgatgg

SEQ ID NO: 484858 - DNA, 75 bp, synthetic construct
  source 1..75: mol_type = other DNA
cgatgtgcagttctacttgccggaaggtcgctggacacatctgtggcacaacgatgaactcgatggtagtcgctg

SEQ ID NO: 484859 - DNA, 75 bp, synthetic construct
  source 1..75: mol_type = other DNA
gcagcaaatcttatcgtgtgccgtgggcctatgatgatgagtcctgtgatgtggtgcgcttcttcacgcaactga

SEQ ID NO: 484860 - DNA, 75 bp, synthetic construct
  source 1..75: mol_type = other DNA
tcatccgcattacgcgatgaccgcgctggcgctgggcgatcagcatttgtgggtcaataagctggacgaaccgct

SEQ ID NO: 484861 - DNA, 75 bp, synthetic construct
  source 1..75: mol_type = other DNA
gccagggatgaactggtgatcaaacctggcctgtggctgtgcgcgcaaattaaaagtgtgtcgataaccgcctga

SEQ ID NO: 484862 - DNA, 75 bp, synthetic construct
  source 1..75: mol_type = other DNA
cagtctggctggattagccctgccgatctgatgcatatgcgtactggcgatgtctctgcgtttaagccagaaacg

SEQ ID NO: 484863 - DNA, 75 bp, synthetic construct
  source 1..75: mol_type = other DNA
cactggcatcgctggaagcagagccggtggcgtggatgcgtgatgacgcagatggtcgtgagtataacgctcgca

SEQ ID NO: 484864 - DNA, 75 bp, synthetic construct
  source 1..75: mol_type = other DNA
ttcaaacatccggccggaaaattattctgggctttgacggatgaaagcaataaagatcaatcggacgttattcct

SEQ ID NO: 484865 - DNA, 75 bp, synthetic construct
  source 1..75: mol_type = other DNA
atgctggaactgaatttttcccagacgttgggcaaccattgcctgaccattaatgaaacgctgcccgccaatggc

SEQ ID NO: 484866 - DNA, 75 bp, synthetic construct
  source 1..75: mol_type = other DNA
aacatacgctcaatactcaaccggttgaagatacttcgtcatcggcgccagctgccccgatggtggattcgttaa

SEQ ID NO: 484867 - DNA, 75 bp, synthetic construct
  source 1..75: mol_type = other DNA
catacaaacctgcgaacaatggcatgacatggacacatcaggcaccgtccgggtgtgtatataccggcattattg

SEQ ID NO: 484868 - DNA, 75 bp, synthetic construct
  source 1..75: mol_type = other DNA
catacggtaataacaaaattattaccgatactgactgtgggactattcatcttgcaggttgcgtgattgaggtta

SEQ ID NO: 484869 - DNA, 75 bp, synthetic construct
  source 1..75: mol_type = other DNA
cggtaaaggcagcgtatgaccttgctaacgggaaatacactgcacaggatgccaccacagcgcgaaaaggtcttg

SEQ ID NO: 484870 - DNA, 75 bp, synthetic construct
  source 1..75: mol_type = other DNA
caccatgcccactacgtaatcctgtatcacaacggtttcacctgcgaagccgatacccttggcagttgcggctat

SEQ ID NO: 484871 - DNA, 75 bp, synthetic construct
  source 1..75: mol_type = other DNA
gaattatcactcagctccgcttatggtctccgttcaagaggtgagattacatcactcagtgctaatggtctgcgc

SEQ ID NO: 484872 - DNA, 75 bp, synthetic construct
  source 1..75: mol_type = other DNA
attctgaaacgcttgcggcaacgccaaaggcggttaagacagcgtatgaccttgctaacgggaaatacactgcac

SEQ ID NO: 484873 - DNA, 75 bp, synthetic construct
  source 1..75: mol_type = other DNA
ctcggtttacaggaaacggtaaatcaggcttctggcgcattacagaaaaaacagaacggcgcagatattccggga

SEQ ID NO: 484874 - DNA, 75 bp, synthetic construct
  source 1..75: mol_type = other DNA
gcagaatgtaactcaaggtttattacaggtattcgccttggcggtctgtcatctgttcagacatggaatggtcct

SEQ ID NO: 484875 - DNA, 75 bp, synthetic construct
  source 1..75: mol_type = other DNA
tgcttttaatcacccatactggatgtgtaaaggctcctggtcatatgccaataataaacttattaccgatactgg

SEQ ID NO: 484876 - DNA, 75 bp, synthetic construct
  source 1..75: mol_type = other DNA
gcggagtgtcaatggggcatggcctgagtgttacaggtgatattgtctcaagtaccaaagtacgtgccggtagcg

SEQ ID NO: 484877 - DNA, 75 bp, synthetic construct
  source 1..75: mol_type = other DNA
taatgctgacggcctctggcgataaatttgggacatggaacggtttaaggccgctgactatcaataacgccaatg

SEQ ID NO: 484878 - DNA, 75 bp, synthetic construct
  source 1..75: mol_type = other DNA
atcaatggggcatggcctgagtgttactggtgatattgtctcaagtaccaaagtacgtgccggtagcgggaaaaa

SEQ ID NO: 484879 - DNA, 75 bp, synthetic construct
  source 1..75: mol_type = other DNA
atgaaatctactgattcagagaacgattcatttctcaagtggggtctgaatcgtaatgtgacaccttgctttggc

SEQ ID NO: 484880 - DNA, 75 bp, synthetic construct
  source 1..75: mol_type = other DNA
atgggacttgaaatgattatcggcctgattgttgccgcgctggcagcaattgccggtgcttttggtctgggtaaa

SEQ ID NO: 484881 - DNA, 75 bp, synthetic construct
  source 1..75: mol_type = other DNA
caaaaggagccagggatgtacagcagactgttaatcatcttcctgatgacgatgttgaccgtgagttgcgcgaaa

SEQ ID NO: 484882 - DNA, 75 bp, synthetic construct
  source 1..75: mol_type = other DNA
taagctggaagagaaattcccccaggttgcggccactggcgatggtccggacattattttctgggcgcacgaccg

SEQ ID NO: 484883 - DNA, 75 bp, synthetic construct
  source 1..75: mol_type = other DNA
tgcatcaagagtgggtctgagctcacgtcatcagtttgctccgggggcaacagctttgtacaaaggcgataaagt

SEQ ID NO: 484884 - DNA, 75 bp, synthetic construct
  source 1..75: mol_type = other DNA
gcgttctggttggtgaactggacgatgagcagatggctgcattgtcccgactgggtaacgattatcgcccaacaa

SEQ ID NO: 484885 - DNA, 75 bp, synthetic construct
  source 1..75: mol_type = other DNA
atatttgaagctgaagaagtcatcactcttttaacgtctgtgcttaaaacgtcatctgcctcaagaactagctta

SEQ ID NO: 484886 - DNA, 75 bp, synthetic construct
  source 1..75: mol_type = other DNA
tgcattcggtgcgtttggttttggtcgtatgaaggggcgagaaaaggccgaagatgaagctgaaaagcagcgcat

SEQ ID NO: 484887 - DNA, 75 bp, synthetic construct
  source 1..75: mol_type = other DNA
atgaatcctcgccatgcccactgtgtcaccctgtaccacaatggtttcacctgcgaagccgatacccttggcagt

SEQ ID NO: 484888 - DNA, 75 bp, synthetic construct
  source 1..75: mol_type = other DNA
gtcatcctgtatcacaacggtttcacctgcgaagccgatacccttggcagttgcggctacgtatacgtcgccgtt

SEQ ID NO: 484889 - DNA, 75 bp, synthetic construct
  source 1..75: mol_type = other DNA
tcctcgcattatccgcattagcgacgatgatgttttctgcctcggctctcgccaaaatcgaagaaggtaaactgg

SEQ ID NO: 484890 - DNA, 75 bp, synthetic construct
  source 1..75: mol_type = other DNA
aagaaattcgagaaagataccggaattaaagtcaccgttgagcatccagataaactggaagagaaattccctcag

SEQ ID NO: 484891 - DNA, 75 bp, synthetic construct
  source 1..75: mol_type = other DNA
gtatttccacattttatcagcctgatagagtcgatgctgaccactggtgaactgaatccccgtcatgcctactgc

SEQ ID NO: 484892 - DNA, 75 bp, synthetic construct
  source 1..75: mol_type = other DNA
atagcgcagcgggagtctgacttctggcattattttttctgggttgagcatattcaacgctttgcgatggatgat

SEQ ID NO: 484893 - DNA, 75 bp, synthetic construct
  source 1..75: mol_type = other DNA
aaggcaaattgcccacctatattctttcctgctttgcacctctggcaatgctgatggcgcattacgctttgctgg

SEQ ID NO: 484894 - DNA, 75 bp, synthetic construct
  source 1..75: mol_type = other DNA
atgtttgagttttatatggcagaacgtcttcgccaccgctggatgcgcctgcgcttatatcgttttcctggttct

SEQ ID NO: 484895 - DNA, 75 bp, synthetic construct
  source 1..75: mol_type = other DNA
aatgagtccaatacaagacgggttgcagaagagattaaattccggattcaatatcttcaggatgaagaacaaaag

SEQ ID NO: 484896 - DNA, 75 bp, synthetic construct
  source 1..75: mol_type = other DNA
tagcctgccgtggctgggattactccccggtgcactgtacgcaggctggaaaaaccgcaagcattccgcaaccgt

SEQ ID NO: 484897 - DNA, 75 bp, synthetic construct
  source 1..75: mol_type = other DNA
cagcaaaaaataatcctctggcgttgcggatgaatggctggattaacatcgcttttggcgtcactggcattattg

SEQ ID NO: 484898 - DNA, 75 bp, synthetic construct
  source 1..75: mol_type = other DNA
atccagcagaccgtacaaaatagtgaggaagggaaagaacgcgtgcgggcattgatagcgattgaggcgatcttt

SEQ ID NO: 484899 - DNA, 75 bp, synthetic construct
  source 1..75: mol_type = other DNA
atgtttgagttttatatggcagaacttcttcgccaccgctggggtcgtctgcgcttatatcgtttccccggttat

SEQ ID NO: 484900 - DNA, 75 bp, synthetic construct
  source 1..75: mol_type = other DNA
ggagcaacccaaccatcatttaatccctgcggacagcgaattttatcctcctcaacttctggcgacgacagatta

SEQ ID NO: 484901 - DNA, 75 bp, synthetic construct
  source 1..75: mol_type = other DNA
atgatgtttgagtcttatatggcagaacgtcttcgccaccgctggatgcgcctgcgcttatatcgttttcctggt

SEQ ID NO: 484902 - DNA, 75 bp, synthetic construct
  source 1..75: mol_type = other DNA
tatctgggatatctggccggttatcaacacattaacgattgcatggaagatgaaaattatcgtcacgcggcacat

SEQ ID NO: 484903 - DNA, 75 bp, synthetic construct
  source 1..75: mol_type = other DNA
attcaaaaggctgtgcaaagtagtgccgaagggaaaacgcgtgtgcagtcgttgatggcgattaaggcgatattt

SEQ ID NO: 484904 - DNA, 75 bp, synthetic construct
  source 1..75: mol_type = other DNA
gatttcccccctgtcccttgttactcgtggagaatctgaacaggctgaatcttttcttttacagcttattactga

SEQ ID NO: 484905 - DNA, 75 bp, synthetic construct
  source 1..75: mol_type = other DNA
ggcgttccgctagttcctgatgtcgacctgatagaacaatacccggagttggggatctccggcgcgctgatcgtc

SEQ ID NO: 484906 - DNA, 75 bp, synthetic construct
  source 1..75: mol_type = other DNA
attcctctcgtcacgggcgctgacctgctggcgcagtacggctatatggggctcggctttaagctggtggtggtc

SEQ ID NO: 484907 - DNA, 75 bp, synthetic construct
  source 1..75: mol_type = other DNA
agaagactcagtaccggcgaaatgctgcatgacctgattgttgaagagtataaaaggtaccgacattccagataa

SEQ ID NO: 484908 - DNA, 75 bp, synthetic construct
  source 1..75: mol_type = other DNA
cattcgcggctacgttaatttctggtgtcgcttttaacgctcttgctgatgatacaaatcaggggtcaggtaaaa

SEQ ID NO: 484909 - DNA, 75 bp, synthetic construct
  source 1..75: mol_type = other DNA
atctttggctgaacctttcactattcatctgcaagactgcatgctgagccagagcggaacaacttactctaaagc

SEQ ID NO: 484910 - DNA, 75 bp, synthetic construct
  source 1..75: mol_type = other DNA
ggcgtccccctggtgccgggggttaaccttttggctcagtatccggatctggggatatctggcgcactggtggtc

SEQ ID NO: 484911 - DNA, 75 bp, synthetic construct
  source 1..75: mol_type = other DNA
gatataaaaaatttcagaaacagtttcaataaggccaaggcgcagcgcaagtacaaaaaaatgcaggaagataaa

SEQ ID NO: 484912 - DNA, 75 bp, synthetic construct
  source 1..75: mol_type = other DNA
gcgtatcagtgccatggcagcttttgtgtgatgaacatggttttacccgggagcaccacaatcagttgaagaagt

SEQ ID NO: 484913 - DNA, 75 bp, synthetic construct
  source 1..75: mol_type = other DNA
tcagcccagagacattacgtgaaattattgctgaaatagcctgctgccatccatcaatcagtgtattgctcagga

SEQ ID NO: 484914 - DNA, 75 bp, synthetic construct
  source 1..75: mol_type = other DNA
aaacagcgcgatgaactggttgaactgacggcgatggattcctgggtacttaaccttacccgcagcgtgaaatac

SEQ ID NO: 484915 - DNA, 75 bp, synthetic construct
  source 1..75: mol_type = other DNA
accgagcagtatatcagcgactacaccgccacctggcgggccgggatggacaatctgaatatccgcaattttgag

SEQ ID NO: 484916 - DNA, 75 bp, synthetic construct
  source 1..75: mol_type = other DNA
gcacacttgacctgaatggacacaatcagtctttcaataaaattgctgcaactgattcaggcgcagtaataacca

SEQ ID NO: 484917 - DNA, 75 bp, synthetic construct
  source 1..75: mol_type = other DNA
ggggaatggacttaataccattcatccgcgtcgccatgcccgactggctaccagtttgcttgaacatggtggggc

SEQ ID NO: 484918 - DNA, 75 bp, synthetic construct
  source 1..75: mol_type = other DNA
taaaggaagaattaactcgacgcatcagtaagcgttatgacgatgtagaggtgatcgtaaaagccaccagcaacg

SEQ ID NO: 484919 - DNA, 75 bp, synthetic construct
  source 1..75: mol_type = other DNA
tgcagagtgataatcacagtgacgcaaacaaggatcgttctccgcatcgctttctcgtctggcgcgtattcgtca

SEQ ID NO: 484920 - DNA, 75 bp, synthetic construct
  source 1..75: mol_type = other DNA
aaaagccaccagcaacgatggcctttctgttacacgcaccgcagataaggattctgcaaaaacttttggggtatt

SEQ ID NO: 484921 - DNA, 75 bp, synthetic construct
  source 1..75: mol_type = other DNA
agagtatgtgcgcctgtttttatccggcaaggacgatcaggtgcttacccaactgattagccgcatggaaacagc

SEQ ID NO: 484922 - DNA, 75 bp, synthetic construct
  source 1..75: mol_type = other DNA
atgggctttctgttacacgcaccgcagataaagattctgcaaaaacatttgttcaggagactctgaaagatacct

SEQ ID NO: 484923 - DNA, 75 bp, synthetic construct
  source 1..75: mol_type = other DNA
tctgttacgcgcaccaccgataaagattcagctaaaacttttgttcaggaaactctgaaagatacctgggagtct

SEQ ID NO: 484924 - DNA, 75 bp, synthetic construct
  source 1..75: mol_type = other DNA
aactcgtagaggggacgttaccgcttatttgggcaaaaacgcgtttattaagtgatgatcctgcgaaaggggagg

SEQ ID NO: 484925 - DNA, 75 bp, synthetic construct
  source 1..75: mol_type = other DNA
cgtgcgtgaattcgacggcgagctggcgcagaaaatcatcgacgaaatgttcctgttcgagaatctggtggatgt

SEQ ID NO: 484926 - DNA, 75 bp, synthetic construct
  source 1..75: mol_type = other DNA
cgttccgaaggcgtggaaatcaccttcaacgttaacgactatgacaacacgctgaccgtttacactacccgcccg

SEQ ID NO: 484927 - DNA, 75 bp, synthetic construct
  source 1..75: mol_type = other DNA
cacgatcgcggcataaccggtaattccggtgccagcctgcatgctaaaacctttagcatcgatggtaaaacggtg

SEQ ID NO: 484928 - DNA, 75 bp, synthetic construct
  source 1..75: mol_type = other DNA
caaaaaagaacccgccaccagtttctggaagcgggttatggtcagactggcgtcaatattgcccgttgaatggtt

SEQ ID NO: 484929 - DNA, 75 bp, synthetic construct
  source 1..75: mol_type = other DNA
tccgcttggttatatcaccgacttttcccgtctcaatcgccgtatgcacaataaaagtttcactgtcgatggcgt

SEQ ID NO: 484930 - DNA, 75 bp, synthetic construct
  source 1..75: mol_type = other DNA
gtgaagaagaatacgctcagcaggtcgagtatgtgcgcctgtttttgtctggcaaagatgatcaggtgcttacgc

SEQ ID NO: 484931 - DNA, 75 bp, synthetic construct
  source 1..75: mol_type = other DNA
cactggccgcagttctggctttcaccgcaggtacttctgtagctgctacttctaccgtaactggcggttacgctc

SEQ ID NO: 484932 - DNA, 75 bp, synthetic construct
  source 1..75: mol_type = other DNA
atgtctacctattcttttatggatgtcactgcgacgctgaccgggccgaccggttcgattgacctcgggtacggt

SEQ ID NO: 484933 - DNA, 75 bp, synthetic construct
  source 1..75: mol_type = other DNA
ttacggcgtccctctccggcccgaccggcgagattgatcttggctacggttccgccagttcagaggaggggatca

SEQ ID NO: 484934 - DNA, 75 bp, synthetic construct
  source 1..75: mol_type = other DNA
cgctttctttcatttccgcgaaagagtatcgaaagctcactttgttggttggagcaacccaaccatcatttaatc

SEQ ID NO: 484935 - DNA, 75 bp, synthetic construct
  source 1..75: mol_type = other DNA
tgggtccaccagcgttacggcaatcgctatgacctgacgcgagatgttgacggcttctactgtcgtgaagttgtg

SEQ ID NO: 484936 - DNA, 75 bp, synthetic construct
  source 1..75: mol_type = other DNA
agtactacggcatcaccgcaggtccggcataccgtatcaatgactgggcgagcatctatggtgtagtcggtgttg

SEQ ID NO: 484937 - DNA, 75 bp, synthetic construct
  source 1..75: mol_type = other DNA
cctgctcgattttaatcttagcgataaaacgctgctcgccgattccctttcagaactggcaggacgcaagattaa

SEQ ID NO: 484938 - DNA, 75 bp, synthetic construct
  source 1..75: mol_type = other DNA
caagcgtgttgaaattgccgaaagtgaagcggatggagtgttttgacatcagccataccatgggtgaacaaacgg

SEQ ID NO: 484939 - DNA, 75 bp, synthetic construct
  source 1..75: mol_type = other DNA
agatgcgcactttgccgggtgagatcctgctcgactttaatcttagcgataaaacgctgctcgccgattcccttt

SEQ ID NO: 484940 - DNA, 75 bp, synthetic construct
  source 1..75: mol_type = other DNA
aaaccattgaaggcgtcgggccaaaacgtcggcaaatgttgttgaaatatatgggtggtttgcaaggtttacgta

SEQ ID NO: 484941 - DNA, 75 bp, synthetic construct
  source 1..75: mol_type = other DNA
accggcgacgaccttgacgttattggagtggcgttcgatgcgggtatggcttgtgtccacgtattgttcattcgt

SEQ ID NO: 484942 - DNA, 75 bp, synthetic construct
  source 1..75: mol_type = other DNA
gtgtttacaaacaatggctctacactgcaaacagacataacaacattcggggtaaatatgaaattagcacatctg

SEQ ID NO: 484943 - DNA, 75 bp, synthetic construct
  source 1..75: mol_type = other DNA
aggggaaggactgggtacaactgacggagtgacacagagtgacggagctggaaaggcatttgctgaacgcattag

SEQ ID NO: 484944 - DNA, 75 bp, synthetic construct
  source 1..75: mol_type = other DNA
gaaatttctggtccttccgtacgggaaatcagcagaggtgactcactatcaggggaaggactggatacaactgac

SEQ ID NO: 484945 - DNA, 75 bp, synthetic construct
  source 1..75: mol_type = other DNA
aaactgaacgcgaagacatggggcgtggagtttgttcaggacgggagaaggaaatttctggtccttccgtacggg

SEQ ID NO: 484946 - DNA, 75 bp, synthetic construct
  source 1..75: mol_type = other DNA
ggcgaggcggcggtgccgggccggtggattatctgctggggaaagaccgccagcgcgacggggccatcgtcctgc

SEQ ID NO: 484947 - DNA, 75 bp, synthetic construct
  source 1..75: mol_type = other DNA
ctttctcctgtttaccgcgagtggcgggacgctctggtatcttggcgggaggatacaggcgaacctggaagaaat

SEQ ID NO: 484948 - DNA, 75 bp, synthetic construct
  source 1..75: mol_type = other DNA
acaggcgcttgctgagagcgtcacacgcgggatagacgctctttatcatgtcggggagataaaaggccgtcagga

SEQ ID NO: 484949 - DNA, 75 bp, synthetic construct
  source 1..75: mol_type = other DNA
tgccggacgggatgaaaggggaaaacacctggacggtgggcgacaagaacgccgtgaggctggtcagggagtaaa

SEQ ID NO: 484950 - DNA, 75 bp, synthetic construct
  source 1..75: mol_type = other DNA
cggctggattgagggaacgctggaggctgacggcgggcaacaggatgaagtgattgccacgctgatggtgtgggc

SEQ ID NO: 484951 - DNA, 75 bp, synthetic construct
  source 1..75: mol_type = other DNA
ggcagaacgtgatggcgcagcgcgcaggccgggcgaatgaaggcgtggatcacgccgcgcgtaccgcgcatgaag

SEQ ID NO: 484952 - DNA, 75 bp, synthetic construct
  source 1..75: mol_type = other DNA
cgggggttacttgccttagcctcgtccggggagctgaaaacccgtcaggacgtcactgaggcgctggaaagcgct

SEQ ID NO: 484953 - DNA, 75 bp, synthetic construct
  source 1..75: mol_type = other DNA
cgagctgcaccgggagcaggagcgcgtggtgcagcatcagaaagcgctggagctggagcgatctcagcgacagcg

SEQ ID NO: 484954 - DNA, 75 bp, synthetic construct
  source 1..75: mol_type = other DNA
gtggattacctgctgggaaaagaccggcagcgcgagggggcgaccgtgctgcagggaaaaccggaggaagtccgg

SEQ ID NO: 484955 - DNA, 75 bp, synthetic construct
  source 1..75: mol_type = other DNA
cggttacgcattttacgcttcgttttgctccgagcatcattgaagaaattctcgatgacagccgggaagagttaa

SEQ ID NO: 484956 - DNA, 75 bp, synthetic construct
  source 1..75: mol_type = other DNA
gtgccaatccggtacgtggaaaaaaaatggcgcaggtgatagccaaattgttaccgcttcagctactgcgtggcg

SEQ ID NO: 484957 - DNA, 75 bp, synthetic construct
  source 1..75: mol_type = other DNA
gcacactcagcgatcgccgacgcacggatgacggcaggggtggtaaacgctattgctgcatatcatctggaactg

SEQ ID NO: 484958 - DNA, 75 bp, synthetic construct
  source 1..75: mol_type = other DNA
ggcctgaccgatgcgtccggtcaggtggtatttgaaaccaggctgaagcccacggtcgccatcggggcgcaggcc

SEQ ID NO: 484959 - DNA, 75 bp, synthetic construct
  source 1..75: mol_type = other DNA
cctcactggattcgtttgaacgtttctttaaaccggatggcattctggacaatttctacaagaacaacctgcgcc

SEQ ID NO: 484960 - DNA, 75 bp, synthetic construct
  source 1..75: mol_type = other DNA
gcgtctggctcacatcatcgctacagcgtggccaggtggatgatattttcacgcagtccgccgcccgccagtacg

SEQ ID NO: 484961 - DNA, 75 bp, synthetic construct
  source 1..75: mol_type = other DNA
tcacctggcgggtaatgaagcgtctgcaaaagctggaaaaacagcagaaacagcagcgggaggaagaaaaagatc

SEQ ID NO: 484962 - DNA, 75 bp, synthetic construct
  source 1..75: mol_type = other DNA
aaaccagactgaagcccacggtcgccatcaaggcgcaggccgccgccgtgcatggttttaatgaactggctctct

SEQ ID NO: 484963 - DNA, 75 bp, synthetic construct
  source 1..75: mol_type = other DNA
ttcgctgtataccgaattgcagactgtgttccgatgcgtgagaaacgcccactgacgagtaaacaactgctggct

SEQ ID NO: 484964 - DNA, 75 bp, synthetic construct
  source 1..75: mol_type = other DNA
gtggttttatcaaaagtgactttttatatggcaacttcagacttcgctcttaaaaaccataatgttaaagcattt

SEQ ID NO: 484965 - DNA, 75 bp, synthetic construct
  source 1..75: mol_type = other DNA
tttgattcgaaagataacccgtttaacagcgattcggtgcgcatgatgcaggggttttatgacgatgagttgtgt

SEQ ID NO: 484966 - DNA, 75 bp, synthetic construct
  source 1..75: mol_type = other DNA
aacaccctggcgcagcagcacgggattgggattgcggcgatgattgtgaagcagttgtcgccgaagcataggtga

SEQ ID NO: 484967 - DNA, 75 bp, synthetic construct
  source 1..75: mol_type = other DNA
aacaccctggcgcagcagcacgggattgggattgcggcgatgattgtgaagcagttgtcgccgaagcataaatga

SEQ ID NO: 484968 - DNA, 75 bp, synthetic construct
  source 1..75: mol_type = other DNA
tcgccggatattgctgctgaactgtgcgacacgggggtgaatatggggccgtcggtggcgacgaagatacttcag

SEQ ID NO: 484969 - DNA, 75 bp, synthetic construct
  source 1..75: mol_type = other DNA
gtgaggctggagtcggtaagctaatcattacccacgtcagctcgcgctatgatgacaaaggttgtcagcacctgt

SEQ ID NO: 484970 - DNA, 75 bp, synthetic construct
  source 1..75: mol_type = other DNA
taaatgcccaggcattaaaagctgctggcgtgccgcctggcccactgtttcaggaattaaaagcgggcaaaacaa

SEQ ID NO: 484971 - DNA, 75 bp, synthetic construct
  source 1..75: mol_type = other DNA
caggaattaaaagcaggcaaaacgatcacgctggaagacggtcgacagattaatggcgctgattatgtatcagcg

SEQ ID NO: 484972 - DNA, 75 bp, synthetic construct
  source 1..75: mol_type = other DNA
ggcacttatcgtgttgactggcgcgcggtttcttcagatacgcacccgattaccggtaattacactttcacagtg

SEQ ID NO: 484973 - DNA, 75 bp, synthetic construct
  source 1..75: mol_type = other DNA
tgccgcgctggagctggctaaaggcgtcgacgtaatggttcacgaagcgactctggatatggcgatggaagccaa

SEQ ID NO: 484974 - DNA, 75 bp, synthetic construct
  source 1..75: mol_type = other DNA
ggaagatggaaggcagattaacggcgcagattacttagccgctccagtgccaggtaaagcgctcgctattttcgg

SEQ ID NO: 484975 - DNA, 75 bp, synthetic construct
  source 1..75: mol_type = other DNA
cgcaatatgtcgcaacgtgccgccgatattctgcgcgacgatctcgccaaccgtggtccggtgcgtctgtcgcag

SEQ ID NO: 484976 - DNA, 75 bp, synthetic construct
  source 1..75: mol_type = other DNA
atgagtaacctgacaggcaccgataaaagcgtcatcctgctgatgaccattggcgaagaccgggcggcagaagtg

SEQ ID NO: 484977 - DNA, 75 bp, synthetic construct
  source 1..75: mol_type = other DNA
cgcaatatgtcgcaacgcgccgccgatatcctgcgcgacgacctcgccaaccgtggtccggtacgtttgtcgcag

SEQ ID NO: 484978 - DNA, 75 bp, synthetic construct
  source 1..75: mol_type = other DNA
gggtctgcctgggggagccggttgcccgttccggaaaactgccgacactggcaccgccgttactgcgtcagctgg

SEQ ID NO: 484979 - DNA, 75 bp, synthetic construct
  source 1..75: mol_type = other DNA
ctttatggaatcctcctggtactatgcacgctacacttgtccagagtacaaagaaggaatgctggattccgacgc

SEQ ID NO: 484980 - DNA, 75 bp, synthetic construct
  source 1..75: mol_type = other DNA
cagttaactgaagtgctggcggagtttgaacaagaagctgaacagttcgccgccctgaatattaacgccaacgat

SEQ ID NO: 484981 - DNA, 75 bp, synthetic construct
  source 1..75: mol_type = other DNA
gatctgaccgtgaaattctcaggcgcgaaactgacaatgaccggaatgaaaggtatgtcgtcgcattcaccgatg

SEQ ID NO: 484982 - DNA, 75 bp, synthetic construct
  source 1..75: mol_type = other DNA
cgcggcaatacagaaacattccgcacatatagcaagaatgcagcttctccagtagagcttaaaaaatatattgag

SEQ ID NO: 484983 - DNA, 75 bp, synthetic construct
  source 1..75: mol_type = other DNA
ggaagttgtatccagatatggatgtggatgggcgaatcggcccgcgcaccattgcggcattacgtgcttatcttg

SEQ ID NO: 484984 - DNA, 75 bp, synthetic construct
  source 1..75: mol_type = other DNA
aaggcgtgcgcctttgcccgccgtggcctgaccgatgcggacagcatggcctcatcactgaagctgctgcgcgaa

SEQ ID NO: 484985 - DNA, 75 bp, synthetic construct
  source 1..75: mol_type = other DNA
gcggcaggctgtacccggatatggacgcagacggacgcatcggacctcgtaccatcagcgcattgcgcgccttcc

SEQ ID NO: 484986 - DNA, 75 bp, synthetic construct
  source 1..75: mol_type = other DNA
tgcacgtagaaagcgtgatcagattgcagatgaataccattgcttacgggagagtgtcgcccctgtaaacagcac

SEQ ID NO: 484987 - DNA, 75 bp, synthetic construct
  source 1..75: mol_type = other DNA
cttcttgatcgaaatcaaattccagaagacaggatcgcccttctcctgggcctggatttgcccctatatttccag

SEQ ID NO: 484988 - DNA, 75 bp, synthetic construct
  source 1..75: mol_type = other DNA
ggcccaacaaagtggggcattactcagaatactgcccgtgctcacggataccgtggcgatatgcgagatctgacg

SEQ ID NO: 484989 - DNA, 75 bp, synthetic construct
  source 1..75: mol_type = other DNA
actttcaccctcaacaccaatgaacagaaagaaatcaaaattcacggtcgggtagtcgcttctttggctgtgagg

SEQ ID NO: 484990 - DNA, 75 bp, synthetic construct
  source 1..75: mol_type = other DNA
tattcgcaaccacactattatctggcgttgcatttaacgcgcttgctgatgaccctaatcagggttccggtaaaa

SEQ ID NO: 484991 - DNA, 75 bp, synthetic construct
  source 1..75: mol_type = other DNA
ctatcctcggcaaagagggcggttacgtgaatcaccctgatgacaaaggcggcccgacgaactggggcattaccc

SEQ ID NO: 484992 - DNA, 75 bp, synthetic construct
  source 1..75: mol_type = other DNA
aactgtggcgtccagaatgcttcagcgctggctgaacgttttcaacctgcgcgggaaactctatccggatatgga

SEQ ID NO: 484993 - DNA, 75 bp, synthetic construct
  source 1..75: mol_type = other DNA
agtggcgtcaaaaatgcttcaacgctggctgaatgtgttcaacctgcgtgggaagctgtatcccgatttggatgc

SEQ ID NO: 484994 - DNA, 75 bp, synthetic construct
  source 1..75: mol_type = other DNA
atccgctggccaatcgcgtgcagcgctcgattaccaatatggccatcgaatgtggactggccaccgagtccagga

SEQ ID NO: 484995 - DNA, 75 bp, synthetic construct
  source 1..75: mol_type = other DNA
atgagcgagttgagttatctggaaaaattgctggatggggttgaggttgagtggttgccattggggaaactaggt

SEQ ID NO: 484996 - DNA, 75 bp, synthetic construct
  source 1..75: mol_type = other DNA
cgcagaacacctggcgtccgtgaagaaaaactgaaaaatattaatggagatgataaggacggaataaaacaatag

SEQ ID NO: 484997 - DNA, 75 bp, synthetic construct
  source 1..75: mol_type = other DNA
ttcttttttgcatcggtcgccatcgtggccggcggcacaatactgaatgcgctgtttgctgctgcgctgatgaat

SEQ ID NO: 484998 - DNA, 75 bp, synthetic construct
  source 1..75: mol_type = other DNA
atcgagacacggattcagagagcagccgacgagtatgagcgtgctgtacaaaaatcgctacctattgataacgga

SEQ ID NO: 484999 - DNA, 75 bp, synthetic construct
  source 1..75: mol_type = other DNA
attgggtacaacagaaattctctggacaggatatacaactgtcagagttctcgcgacaatgggtgataactctat

SEQ ID NO: 485000 - DNA, 75 bp, synthetic construct
  source 1..75: mol_type = other DNA
ctaagtctgattttaccgaatctggggttcctgccatacactatggtcagatatatactttttacggattatcta

SEQ ID NO: 485001 - DNA, 75 bp, synthetic construct
  source 1..75: mol_type = other DNA
gacggtgaacatgtggacggctgctaccgatgcatggaacgatccgaccaacgtaaccacaggacaaaagatcgc

SEQ ID NO: 485002 - DNA, 75 bp, synthetic construct
  source 1..75: mol_type = other DNA
aaaaccatcaaaaacggatggctgcaattgaaaagaaatatgctgatgctcgccagtcaatagccgatgatatgt

SEQ ID NO: 485003 - DNA, 75 bp, synthetic construct
  source 1..75: mol_type = other DNA
atgaataaaaaaatcagcctgctggtcacagcgggcctgctgccattctgtctgccggcacaggcagacgacgtc

SEQ ID NO: 485004 - DNA, 75 bp, synthetic construct
  source 1..75: mol_type = other DNA
gtgattacaccatggtcacaaccgaaaccatctgggcgggttataccaccgtcagggtgctttccactgccggca

SEQ ID NO: 485005 - DNA, 75 bp, synthetic construct
  source 1..75: mol_type = other DNA
cgccatggataccatgctccgtgacctggacagcgcagcacaggaatttgtgtcagcgtaccggacccgacgcga

SEQ ID NO: 485006 - DNA, 75 bp, synthetic construct
  source 1..75: mol_type = other DNA
ctaaagggtatctcgaacagaatgcaggagactaccccgtttatagttcccaaaccgcaagaaatgggatgattg

SEQ ID NO: 485007 - DNA, 75 bp, synthetic construct
  source 1..75: mol_type = other DNA
gactcaattgcagaattcaacttataccccacctttaggtactataacttcagcagacgaacaactactttcaaa

SEQ ID NO: 485008 - DNA, 75 bp, synthetic construct
  source 1..75: mol_type = other DNA
agcggtgaatactggcaacgtcagaagacgcttctgacagaaagggaagtcagttttatgaaaggactgttcaga

SEQ ID NO: 485009 - DNA, 75 bp, synthetic construct
  source 1..75: mol_type = other DNA
tatttatgagcacaacttaactctttgcaccgaaggtaaatatatccacccaaccccgcgaattatagatacaac

SEQ ID NO: 485010 - DNA, 75 bp, synthetic construct
  source 1..75: mol_type = other DNA
tgcgccggctggacagggtgacagatacccgccagtggcggttatgtccacaggttcgtgtggccgatatcgtca

SEQ ID NO: 485011 - DNA, 75 bp, synthetic construct
  source 1..75: mol_type = other DNA
gccacgatgccagaaaactgctgcagatgaccggagaatggctgaatacaacaggggctgatcagcagtccccgg

SEQ ID NO: 485012 - DNA, 75 bp, synthetic construct
  source 1..75: mol_type = other DNA
tatcgtccagctgaacgggaatatccggccacgatcacgccagtggtggcggttattcaggatggtgtctcagtg

SEQ ID NO: 485013 - DNA, 75 bp, synthetic construct
  source 1..75: mol_type = other DNA
aaatggacagcggcaataaagtggcaagcaaatccagcaagtacgggaaacgtctggcaaaaatcgccaaagcat

SEQ ID NO: 485014 - DNA, 75 bp, synthetic construct
  source 1..75: mol_type = other DNA
gctatgccgaatgattacgcgcggtctgctctgttcactgtaaggaataagagaaaaaaacgtgaagcctgtgat

SEQ ID NO: 485015 - DNA, 75 bp, synthetic construct
  source 1..75: mol_type = other DNA
ggcgttacatcgagaaggccgaagaatgcttaactcggttacaggctactgcaatgcagtttatctctgatcgta

SEQ ID NO: 485016 - DNA, 75 bp, synthetic construct
  source 1..75: mol_type = other DNA
tcagttggttgccaacgtaccaatcccgccatggtcaacactcctgacgggaaagagggtgaaggcgaccaagag

SEQ ID NO: 485017 - DNA, 75 bp, synthetic construct
  source 1..75: mol_type = other DNA
agaaagcggctcgcatcgagtcagccttgctgaacaaactggcactgatggggcagaagacattcgctcgagcga

SEQ ID NO: 485018 - DNA, 75 bp, synthetic construct
  source 1..75: mol_type = other DNA
tatttcacaaaaaatcagagatgagcatgatatatgccttggacagtttgaatcagaggaattacttgatgagat

SEQ ID NO: 485019 - DNA, 75 bp, synthetic construct
  source 1..75: mol_type = other DNA
ctgttaatggtcgctattacaaaaaagctgaggaatgcctttccaggctgcaggcgacatcgatggctgttacat

SEQ ID NO: 485020 - DNA, 75 bp, synthetic construct
  source 1..75: mol_type = other DNA
aagtcgcaatatccgacatactcctggaatgaaaacagatcgtcttaaagataatacaaaaggaagtgacgacaa

SEQ ID NO: 485021 - DNA, 75 bp, synthetic construct
  source 1..75: mol_type = other DNA
gcgattggtgcactgtataaaatgaacgcgtctatttccggtgcggaagtcggttgccagggcgaagtaggtgtt

SEQ ID NO: 485022 - DNA, 75 bp, synthetic construct
  source 1..75: mol_type = other DNA
ccggagtcgttctgtttaacgctgtctattcctggaacagcctgcgtcgccgccgattcccccaggtatcgaact

SEQ ID NO: 485023 - DNA, 75 bp, synthetic construct
  source 1..75: mol_type = other DNA
ttagcggcatgatcgcctccgtgcccggcgttgctgcactgctaagtgctccacgactcggtaaacttggcgatc

SEQ ID NO: 485024 - DNA, 75 bp, synthetic construct
  source 1..75: mol_type = other DNA
aattgcactcatgaaccgttattttggtattagctctaaagaagtctgcgcacgtcgacggttacttggtatcgc

SEQ ID NO: 485025 - DNA, 75 bp, synthetic construct
  source 1..75: mol_type = other DNA
tgctaactgtagttctcagggcactacgcgaagggaacataaactactgtgaagcaatgggattcactcacgacg

SEQ ID NO: 485026 - DNA, 75 bp, synthetic construct
  source 1..75: mol_type = other DNA
aataaacgatcttatcagcctcagtcagtcacctttaccacttgtcgatattattgtccgccatgatgtcctgca

SEQ ID NO: 485027 - DNA, 75 bp, synthetic construct
  source 1..75: mol_type = other DNA
acttagtgcatttttttcgttcaacttcacaagcagagcgcggagcgcaggttaaagccaatacattgacgatga

SEQ ID NO: 485028 - DNA, 75 bp, synthetic construct
  source 1..75: mol_type = other DNA
ctcttcgcctcaatgcgattaactggagtttacgcgatgtaatagcccgctgccgtgactatgcagtcagcccat

SEQ ID NO: 485029 - DNA, 75 bp, synthetic construct
  source 1..75: mol_type = other DNA
gtgcttcctgctaaagtgaaagttgataataaagctaataaagaagcggcacagacatttggtgcggtactggga

SEQ ID NO: 485030 - DNA, 75 bp, synthetic construct
  source 1..75: mol_type = other DNA
cccaaaactggtactcagcctgtttgtcacgacgttaattatccagattgccaccggttcaatcgccccaatcct

SEQ ID NO: 485031 - DNA, 75 bp, synthetic construct
  source 1..75: mol_type = other DNA
cgggatgggcatcgtgatggtgttgatggggttggcgcaaaatatctggcagttcctgatcctgcgggcgctact

SEQ ID NO: 485032 - DNA, 75 bp, synthetic construct
  source 1..75: mol_type = other DNA
tgccgtgactatgcagtcagcccatacttagtgcattttttccgttcaacttcgcaggcagaacgtggagcacag

SEQ ID NO: 485033 - DNA, 75 bp, synthetic construct
  source 1..75: mol_type = other DNA
gtactttgtcgttaaatttaattcgaccgtgcgcttccggttgtggcaatccgcgaaatggcgcggcggtaagta

SEQ ID NO: 485034 - DNA, 75 bp, synthetic construct
  source 1..75: mol_type = other DNA
gcaggaaaatacctgattgatgaaagaatgaaaaagcgccgtgctgaagcagctgccgaacgtgcattgccaaac

SEQ ID NO: 485035 - DNA, 75 bp, synthetic construct
  source 1..75: mol_type = other DNA
acggtgccgatgcgctgttgggtaactgggcaaaagtattgcgggtggagatcttccacactgattcccctttcc

SEQ ID NO: 485036 - DNA, 75 bp, synthetic construct
  source 1..75: mol_type = other DNA
tataccaccgtcagggtactttccacagccggcagcaactccgtttttggtcgactggtcaatgccgtcagcgga

SEQ ID NO: 485037 - DNA, 75 bp, synthetic construct
  source 1..75: mol_type = other DNA
aacacgcttggcagcatggcaaattctgttaaagaaatatttattggaggaagtcgcaatatccgacatactcct

SEQ ID NO: 485038 - DNA, 75 bp, synthetic construct
  source 1..75: mol_type = other DNA
gatgatcgttccaaccggaaatggctggagtatcgctcagctcattatgttatggggcgcatcgataatgggggt

SEQ ID NO: 485039 - DNA, 75 bp, synthetic construct
  source 1..75: mol_type = other DNA
tgaacaagctctttgctgttgcactcacaaacattcaggcagattcgctgactgggattgtcagtatcgcgggtt

SEQ ID NO: 485040 - DNA, 75 bp, synthetic construct
  source 1..75: mol_type = other DNA
gcaacaccatcattggtaacctgttcatggtgtttaacgcaattatcgccacgatggggatagtctggtttctgt

SEQ ID NO: 485041 - DNA, 75 bp, synthetic construct
  source 1..75: mol_type = other DNA
agcgtaccagcttccgcctggagcgtcgggtcgccgctgtgggccgtcaaatgggccgtggtaatggctatctcg

SEQ ID NO: 485042 - DNA, 75 bp, synthetic construct
  source 1..75: mol_type = other DNA
agatatgaggagattatcgttactcttcgatacgtatctagatcatttgatttatctattcctgagcattggtta

SEQ ID NO: 485043 - DNA, 75 bp, synthetic construct
  source 1..75: mol_type = other DNA
ataaagttaatgtcaccggactttacgaaactgacatataaaatcgcaactgtatattctagtacaggaactaca

SEQ ID NO: 485044 - DNA, 75 bp, synthetic construct
  source 1..75: mol_type = other DNA
tacaaatgatccacaaagtgcaattataaagttaatgtcaccggactttacgaaactgacatataaaatcgcaac

SEQ ID NO: 485045 - DNA, 75 bp, synthetic construct
  source 1..75: mol_type = other DNA
tcatccacgccgcccatgagcgaatcctcacggacagagaatggcagatataccgtcaccgtctcaaatggcagc

SEQ ID NO: 485046 - DNA, 75 bp, synthetic construct
  source 1..75: mol_type = other DNA
cgaaacaacccgtagtctggaatattttatcagcaaaaacagccatctccgcaacataccgatttcggaactcgg

SEQ ID NO: 485047 - DNA, 75 bp, synthetic construct
  source 1..75: mol_type = other DNA
agaaacaacccgtagtctggaacattttatcagcaaaaacagccatctcctcaacataccgatttcggaactagg

SEQ ID NO: 485048 - DNA, 75 bp, synthetic construct
  source 1..75: mol_type = other DNA
atcccgtggccatcagataccgttccgtctggttatgccctgatgcaggggcagacttttgacaaatctgcctac

SEQ ID NO: 485049 - DNA, 75 bp, synthetic construct
  source 1..75: mol_type = other DNA
attggcctgaaggggatttgggtatttattaccgccgccattattgcttacccggcaacctgggtcgtacaggat

SEQ ID NO: 485050 - DNA, 75 bp, synthetic construct
  source 1..75: mol_type = other DNA
gttttttgccttttcgtttaccttctcaattagccacgaagaagccgtttctgcctttgaacaaaatatctcggc

SEQ ID NO: 485051 - DNA, 75 bp, synthetic construct
  source 1..75: mol_type = other DNA
gcggtcgtctttcaggaaaagatgcggtatctctggttgtatatgatggtttgccacaggacagtattattgagc

SEQ ID NO: 485052 - DNA, 75 bp, synthetic construct
  source 1..75: mol_type = other DNA
cgctctggcgacagctatattctggttaacttctataccggagtcggaagttgccggaccctgcagatgaaggcg

SEQ ID NO: 485053 - DNA, 75 bp, synthetic construct
  source 1..75: mol_type = other DNA
atgatcttaaatgtcttatttttcgtaatgtgtataacaaggaatagtgatgaatttaaaaaatgtcttctgcct

SEQ ID NO: 485054 - DNA, 75 bp, synthetic construct
  source 1..75: mol_type = other DNA
agaaactaaaaccgttaatattatttccattcttcccgcaaaagttgccgtagacaactcccaaaataaacgaaa

SEQ ID NO: 485055 - DNA, 75 bp, synthetic construct
  source 1..75: mol_type = other DNA
agcgcatccagtacggatttgggtacgaaaaccacatcgtcgtttgattacggcactaaatccacgaataacacc

SEQ ID NO: 485056 - DNA, 75 bp, synthetic construct
  source 1..75: mol_type = other DNA
ccagtacggatttggggacgaaaaccacatcgtcgtttgattacggcactaaatccacgaataacactggtgcgc

SEQ ID NO: 485057 - DNA, 75 bp, synthetic construct
  source 1..75: mol_type = other DNA
tcccacggctggaatttatcggcgcgccaacaccactcgaatatctgccgcgtttttctgattatctcggacgag

SEQ ID NO: 485058 - DNA, 75 bp, synthetic construct
  source 1..75: mol_type = other DNA
tttggccaatgctggcgctggcatggatgtttaacattgtggaacgtggtagtgctgcgtacagccgtattttcg

SEQ ID NO: 485059 - DNA, 75 bp, synthetic construct
  source 1..75: mol_type = other DNA
tttgttatgcgagctggacggcgtggagtctgacgtacaggaagactgcgagcgggttaacgacatcttgttgaa

SEQ ID NO: 485060 - DNA, 75 bp, synthetic construct
  source 1..75: mol_type = other DNA
cctgattatccattttttgcgttaaatcagagtggaagtaatacaaatacttctggtcaattaacgatatggaat

SEQ ID NO: 485061 - DNA, 75 bp, synthetic construct
  source 1..75: mol_type = other DNA
acgggcgataacgtggtaattcgccagtcgcacggtggttcaggtaagcaagcgacgtcggtaattaatggtatc

SEQ ID NO: 485062 - DNA, 75 bp, synthetic construct
  source 1..75: mol_type = other DNA
ttgatggcgctgctttccctgtttttgcttttatcgaagatggcctgtcaatatccgcacctggtgctgatctcg

SEQ ID NO: 485063 - DNA, 75 bp, synthetic construct
  source 1..75: mol_type = other DNA
gcgcatactgtcggtattggtgctcatacgcactctgttgcgattggctcacatggacacaccatcaccgttaac

SEQ ID NO: 485064 - DNA, 75 bp, synthetic construct
  source 1..75: mol_type = other DNA
agtaacaaggccaaaaatgcatggggaggcgatgtcaccattgcagcaacaagtaataaatacggttataccata

SEQ ID NO: 485065 - DNA, 75 bp, synthetic construct
  source 1..75: mol_type = other DNA
ccgcattctttggcatttatctcggtttccacgaggccattaaaggcattattctcaatctgttaagccgaatta

SEQ ID NO: 485066 - DNA, 75 bp, synthetic construct
  source 1..75: mol_type = other DNA
cgcacaactggaaaaacttcgcgggtttaaaacctggctgattctgctgtacggcattttgctatgcttgtcgcc

SEQ ID NO: 485067 - DNA, 75 bp, synthetic construct
  source 1..75: mol_type = other DNA
gttccagaaccatgatgaaactggaagcggctgtcgataaagcggtcactacaacattaagccgggtcgtagaaa

SEQ ID NO: 485068 - DNA, 75 bp, synthetic construct
  source 1..75: mol_type = other DNA
aatgagtcagatgtccagtaccatgtcatccagtgataaccagcgcgaactgaaaaacctgcagaccattgccac

SEQ ID NO: 485069 - DNA, 75 bp, synthetic construct
  source 1..75: mol_type = other DNA
ggcaacaaagccaaaaacgcatggggaggcgatgtcaccattgcaacaacaagtaataaatacggttatattata

SEQ ID NO: 485070 - DNA, 75 bp, synthetic construct
  source 1..75: mol_type = other DNA
gcacgtatgccatcaccgccgtgcagcatgtaccggaaaaagaagccatcgtggatatgcgtggctggacgatta

SEQ ID NO: 485071 - DNA, 75 bp, synthetic construct
  source 1..75: mol_type = other DNA
atgtcaaagctgatgattgtgatggttgtgctgttatcgctggcggtggcggggctgtttctggtgaagcatgaa

SEQ ID NO: 485072 - DNA, 75 bp, synthetic construct
  source 1..75: mol_type = other DNA
gtacgggaatccggtcaccgggctgaagccagatgcaccagtgtttagtggtgccgccagcacggggagtgagcg

SEQ ID NO: 485073 - DNA, 75 bp, synthetic construct
  source 1..75: mol_type = other DNA
tccagtattgaggtgattggcaactatgcactggcggacggcaaagccaaacaaacgtataaagttacggtgact

SEQ ID NO: 485074 - DNA, 75 bp, synthetic construct
  source 1..75: mol_type = other DNA
tactggccgtactcggcctgttgtggttgcgtcatgagaacggcaatttatcccgctcctttgagacggcaaacc

SEQ ID NO: 485075 - DNA, 75 bp, synthetic construct
  source 1..75: mol_type = other DNA
ggggctgtttctggcgaagcatgaaaacgccagcctgcgcgcctcgctggacagggtgaacaacgtcgccagtga

SEQ ID NO: 485076 - DNA, 75 bp, synthetic construct
  source 1..75: mol_type = other DNA
tcgtgttgttatcactggcggtgccggggctgtttctggtgaagcatgaaaatgccagcctgcgcacctcactgg

SEQ ID NO: 485077 - DNA, 75 bp, synthetic construct
  source 1..75: mol_type = other DNA
tatcgtccagctgaacgggaatatccggccacgatcacgtcagtggtggcagttattcaggatggtgtcccagtg

SEQ ID NO: 485078 - DNA, 75 bp, synthetic construct
  source 1..75: mol_type = other DNA
cgaagggggagcagcgttttctgcgcgggcgggacagggtgacagatccccgccagtggcggttatgtccgcagg

SEQ ID NO: 485079 - DNA, 75 bp, synthetic construct
  source 1..75: mol_type = other DNA
aaaaactgtcctcccgcactgatacggttacatgcagcaggcatacgccccggtgaagctgagcgaatactggtc

SEQ ID NO: 485080 - DNA, 75 bp, synthetic construct
  source 1..75: mol_type = other DNA
gactgccggaacgtatgagatcacggcgtcagcaggaaatgaccagccttcgaatgcgcagtctgtaacgtttgt

SEQ ID NO: 485081 - DNA, 75 bp, synthetic construct
  source 1..75: mol_type = other DNA
aatgggacggcgacaacgaatgagcaagggcaggctattttcaccgccaccacaactgttgcggcgacatataca

SEQ ID NO: 485082 - DNA, 75 bp, synthetic construct
  source 1..75: mol_type = other DNA
cgttggtgctgtctctgcgcgacgccgagggtcagccagtcacgggcatgaaagatcagatcaagactgaactaa

SEQ ID NO: 485083 - DNA, 75 bp, synthetic construct
  source 1..75: mol_type = other DNA
gcaggtggcactgcgtcaggaactggaaaacgccgcgaagcgtgaagcacagcgcgagaaaaccatcacgaggtt

SEQ ID NO: 485084 - DNA, 75 bp, synthetic construct
  source 1..75: mol_type = other DNA
tgatggccgtgctcgggctgctgtggttgcgccatgagaacggcaatttatcccgctcctttgagacggcaaacc

SEQ ID NO: 485085 - DNA, 75 bp, synthetic construct
  source 1..75: mol_type = other DNA
tccggcctgcactgacgccagtgattgtccccaacgcctgcccgaaagtgagcctttgcccgatgccgggcagtg

SEQ ID NO: 485086 - DNA, 75 bp, synthetic construct
  source 1..75: mol_type = other DNA
cccggcctgcaccgacgccagtgattgtccacaacgcctgcccgaaagtgagtttttgcccgatgccgggcagtg

SEQ ID NO: 485087 - DNA, 75 bp, synthetic construct
  source 1..75: mol_type = other DNA
gtgcggttagccgcgctgacagacaatacgcagggggcagcaggtcttgagttatacgaggtgtataacaacgga

SEQ ID NO: 485088 - DNA, 75 bp, synthetic construct
  source 1..75: mol_type = other DNA
tgccgggtcgcttgcccccttcgccggttcactcccagcattcttcacaggtgttacaaaatttacaacatcaac

SEQ ID NO: 485089 - DNA, 75 bp, synthetic construct
  source 1..75: mol_type = other DNA
cccgcctgcaccgacgccagtgattgtccacaacgcctgcccgaaagtgagcctttgcccgatgccgggcagtga

SEQ ID NO: 485090 - DNA, 75 bp, synthetic construct
  source 1..75: mol_type = other DNA
caacaacgatcaggcaaaagcacaggattttgttcgggcactgtataaaaacgtcgaagttctggattctggcgc

SEQ ID NO: 485091 - DNA, 75 bp, synthetic construct
  source 1..75: mol_type = other DNA
atgtcaaagctgatgattgtgctggtcgtgttgttatcactggcggtgccggggctgtttctggtgaagcatgaa

SEQ ID NO: 485092 - DNA, 75 bp, synthetic construct
  source 1..75: mol_type = other DNA
gggactgtttctggtgaagcatgaaaacgccagcctgcgcgcctcgctggacagggcgaacaacgtcgccagtga

SEQ ID NO: 485093 - DNA, 75 bp, synthetic construct
  source 1..75: mol_type = other DNA
atgattgtgctggttgtgttgttatcactggcggtggtaggtctgtttctggcgaagcatgaaaacgccagcctg

SEQ ID NO: 485094 - DNA, 75 bp, synthetic construct
  source 1..75: mol_type = other DNA
cccggcctgcaccgacgccagtgattgtccacaacgcctgcccgaaagtgagcctttgcccgatgccgggcagtg

SEQ ID NO: 485095 - DNA, 75 bp, synthetic construct
  source 1..75: mol_type = other DNA
agattggtaaacataacggcggtcaattgatccactccccagatgaacgtgttccgtttgcagaaattgccagcg

SEQ ID NO: 485096 - DNA, 75 bp, synthetic construct
  source 1..75: mol_type = other DNA
attacatcggcttatttgaggctgattccggctttttgcgcagtgagctggcgataaaaacctggatcaagctgg

SEQ ID NO: 485097 - DNA, 75 bp, synthetic construct
  source 1..75: mol_type = other DNA
aatggcaactcaacgttgaaaagctcgatgcgcaagggattatggcccgctggccggaaatacgcgtcccggaca

SEQ ID NO: 485098 - DNA, 75 bp, synthetic construct
  source 1..75: mol_type = other DNA
cgctggaaatgctttatccgatatatgacacgccgacaaatatgctgttcactcagggggcaatacatcgcactg

SEQ ID NO: 485099 - DNA, 75 bp, synthetic construct
  source 1..75: mol_type = other DNA
agaaaaactacgcgcttacttttcaaatgtatgtgctgattttgaagctgaactggttgaaatggatggcgaacc

SEQ ID NO: 485100 - DNA, 75 bp, synthetic construct
  source 1..75: mol_type = other DNA
ctgactccgcatttctcgccaacgtcgcccacagcgccgaacagtggcaactcaacgttgaaaagctcgacgcgc

SEQ ID NO: 485101 - DNA, 75 bp, synthetic construct
  source 1..75: mol_type = other DNA
gtaatagttggtcgcgcattactggaaggtaaattcaccgtgaaggaggccatcgcatgctggcaaaacgcataa

SEQ ID NO: 485102 - DNA, 75 bp, synthetic construct
  source 1..75: mol_type = other DNA
catgatgaagcaaacgcttatgctgccggtgaggtttacttcccgccggaaatagcacaaacacgctattatttc

SEQ ID NO: 485103 - DNA, 75 bp, synthetic construct
  source 1..75: mol_type = other DNA
gttataaaaaggaggcccggttgccagttgccaaaacgctaagcgaatacgacttcagtcaggtgccggaactga

SEQ ID NO: 485104 - DNA, 75 bp, synthetic construct
  source 1..75: mol_type = other DNA
ttgaagggcaacaaagtagccaaaacgctaagcgaatacgacttcagtcaggtgccggaactgaatggagctcag

SEQ ID NO: 485105 - DNA, 75 bp, synthetic construct
  source 1..75: mol_type = other DNA
ctatcgcccgtgcgctgttacatgatgcgccgctggtattgctggatgagcctacagaaggcttagatgccacaa

SEQ ID NO: 485106 - DNA, 75 bp, synthetic construct
  source 1..75: mol_type = other DNA
gcgaagaagacgtagcggcgttactggaagcaggcgttgcgcgtgtggtggttggctccaccgcggtgaaatcac

SEQ ID NO: 485107 - DNA, 75 bp, synthetic construct
  source 1..75: mol_type = other DNA
acaacagatgagcaagggctggctgttttcactgctacaacaacaacggctgcgacgtatacagtgacggctaca

SEQ ID NO: 485108 - DNA, 75 bp, synthetic construct
  source 1..75: mol_type = other DNA
agactgctctgcaggagcagcaaaccgcctttaacgaactggtggataagctgagtcatgaagacagccgccagg

SEQ ID NO: 485109 - DNA, 75 bp, synthetic construct
  source 1..75: mol_type = other DNA
cgcctttaacgaactggtgaataagctgagtcatgaagacagccgccaggactatcgccagcgtgcaacaggcgg

SEQ ID NO: 485110 - DNA, 75 bp, synthetic construct
  source 1..75: mol_type = other DNA
cgaactggaagaaatccaggaggacaagccgtccctgtttacccatgtcacggcgctgttcaccaaaaaagagca

SEQ ID NO: 485111 - DNA, 75 bp, synthetic construct
  source 1..75: mol_type = other DNA
tatcgtcggcacttccggcctgtttaatcatgcggaaaatatcgacgaagcatggagaattatgaccgcgcagat

SEQ ID NO: 485112 - DNA, 75 bp, synthetic construct
  source 1..75: mol_type = other DNA
tacacgccagtgccgccacttgaaaacctgatgctgcgtcagcgcatcaccgatcagtacctggtgaatttcgcc

SEQ ID NO: 485113 - DNA, 75 bp, synthetic construct
  source 1..75: mol_type = other DNA
caggaagaacgcctgtctgagctggagactgccctgctggcacagcagaccgcctttaacgaactggtggacaag

SEQ ID NO: 485114 - DNA, 75 bp, synthetic construct
  source 1..75: mol_type = other DNA
gaatatattgatttgataaaccaattctcgttaaataaaaaacttaaaataaacgaatggggtattgaatatgaa

SEQ ID NO: 485115 - DNA, 75 bp, synthetic construct
  source 1..75: mol_type = other DNA
gcgtcgctgcctggcgattgcttcggaagatgtcggcaatgccgatccgcgtgcgatgcaggtggcaatagcagc

SEQ ID NO: 485116 - DNA, 75 bp, synthetic construct
  source 1..75: mol_type = other DNA
ctgggattgctttacccgtgttggtccggcagaaggcgaacgcgccattgcacaggcgattgtttatcttgcctg

SEQ ID NO: 485117 - DNA, 75 bp, synthetic construct
  source 1..75: mol_type = other DNA
gtgcataaagccgtggagctggtcgccactgagcagcagaacctgagcgcatgcaccgaaaaatccctgtctgag

SEQ ID NO: 485118 - DNA, 75 bp, synthetic construct
  source 1..75: mol_type = other DNA
tggctggaacagatggcagccagctacaacccggcggtgtataccgctctgattaaccttgagcacatcaagtct

SEQ ID NO: 485119 - DNA, 75 bp, synthetic construct
  source 1..75: mol_type = other DNA
aagaaaccgatatccggcgtggaaggcattgtgttttcctgatgcatgttcacctggtctttgtcaccagatacc

SEQ ID NO: 485120 - DNA, 75 bp, synthetic construct
  source 1..75: mol_type = other DNA
tatgctctatctgcgtaaccacaatcccgctacctttgtgttgatcccggtatttatcgtggtgaccaaggttat

SEQ ID NO: 485121 - DNA, 75 bp, synthetic construct
  source 1..75: mol_type = other DNA
atgaaggggagcgaagaaaaatctacgccggatgttctggactctgcccagttggtacgtattaaagccgtacac

SEQ ID NO: 485122 - DNA, 75 bp, synthetic construct
  source 1..75: mol_type = other DNA
cgacagcttcggactctctggcgcctttacaaaggttctgggcactcgatgggctcgttttttccgagcttaaag

SEQ ID NO: 485123 - DNA, 75 bp, synthetic construct
  source 1..75: mol_type = other DNA
aacgttcgacaccttcttgcagcaacggaacgacaacctgctgctggttctggataacgcgcatcgtatccctgt

SEQ ID NO: 485124 - DNA, 75 bp, synthetic construct
  source 1..75: mol_type = other DNA
attatcggcaatggcacattgtttgacggtgcagatgcgctgttaggtagctgggcaaaagtattacgcgtggaa

SEQ ID NO: 485125 - DNA, 75 bp, synthetic construct
  source 1..75: mol_type = other DNA
tggggttgctcatatttttcactgccgtcactggcggtagcctgtatctctaccatgagagacagaaagaaaaaa

SEQ ID NO: 485126 - DNA, 75 bp, synthetic construct
  source 1..75: mol_type = other DNA
tggggttgctcatttttttcactgtcgtcactggcggcagtctgtatctctaccatgagaaacagaaggaaaaaa

SEQ ID NO: 485127 - DNA, 75 bp, synthetic construct
  source 1..75: mol_type = other DNA
gttatggtggtcaggatatcgttctgccgggtgaaacaagacgcgccatcgctgaattggtgaatggcgacgcgc

SEQ ID NO: 485128 - DNA, 75 bp, synthetic construct
  source 1..75: mol_type = other DNA
aaatccagtgctgcaggcgcagttcttaaagaaggtgagtttacttctgttgctaacttcaatctgacctacgaa

SEQ ID NO: 485129 - DNA, 75 bp, synthetic construct
  source 1..75: mol_type = other DNA
gggcgatgcaggtggcaattgcggcctgggattgctttactcgcgttggtccggctgaaggtgaacgtgccattg

SEQ ID NO: 485130 - DNA, 75 bp, synthetic construct
  source 1..75: mol_type = other DNA
gggctcgttttttccgagcttaaagacggtgtttctgagcaaattgcacaatggctggaagcgatgggagctttg

SEQ ID NO: 485131 - DNA, 75 bp, synthetic construct
  source 1..75: mol_type = other DNA
atgaaggggagcaaagaaaaatctatgccggatgttctggactctgcccagttggtacgtattgaagctgtacac

SEQ ID NO: 485132 - DNA, 75 bp, synthetic construct
  source 1..75: mol_type = other DNA
tttcagaattcgaaactaccgaacaagaaaacagttacaacgaatggttgcgcgctaaagtggcgtcaagccttg

SEQ ID NO: 485133 - DNA, 75 bp, synthetic construct
  source 1..75: mol_type = other DNA
atattaaagtcgaaatatcagattttacccgcgcggcgctttattcattcgcctataacgtaggcgctaccaact

SEQ ID NO: 485134 - DNA, 75 bp, synthetic construct
  source 1..75: mol_type = other DNA
atctatacgccaggcgcggatgataacgccagcggcgtcgccggactactggagctggcacgtttgttacagcag

SEQ ID NO: 485135 - DNA, 75 bp, synthetic construct
  source 1..75: mol_type = other DNA
ttatattgttcttgctttcacttcctctaattgttttttatcaaccctgggtcaatgcattaccgccaacgcccc

SEQ ID NO: 485136 - DNA, 75 bp, synthetic construct
  source 1..75: mol_type = other DNA
cgtctggctcgcgaaccgggtaaacgcgaaagtcgctatatgcatcttttcagtggtgagatagatgagcaacct

SEQ ID NO: 485137 - DNA, 75 bp, synthetic construct
  source 1..75: mol_type = other DNA
gcggcacagggaatggcacaggcaacggacctggcctcagccggtaaagcggacgtccaggcgacttttggtaag

SEQ ID NO: 485138 - DNA, 75 bp, synthetic construct
  source 1..75: mol_type = other DNA
tgctgcggccaatattgatacgctgcgtgcattgcacctgaaacacaattgcaccattccgtttgaaaatctcga

SEQ ID NO: 485139 - DNA, 75 bp, synthetic construct
  source 1..75: mol_type = other DNA
atgaaaaaaataatctttgcttttattatattatttgtgtttttactccctatgattattttttaccaaccctgg

SEQ ID NO: 485140 - DNA, 75 bp, synthetic construct
  source 1..75: mol_type = other DNA
caatacccgctctcagtcaatggtgtagtaacggcctgtaatcagaaaacgaaccgtgaaccggtcatgaatctg

SEQ ID NO: 485141 - DNA, 75 bp, synthetic construct
  source 1..75: mol_type = other DNA
agcccgtttcgatgtcggtgctgtcgagcaaagggagtggcgcagtcagtccctgtttactcaacggatgcgtga

SEQ ID NO: 485142 - DNA, 75 bp, synthetic construct
  source 1..75: mol_type = other DNA
gctaaattcagtcatggtgattctaaagccagtagcttttatctggaaacctccgctaacgaaagctatttaaac

SEQ ID NO: 485143 - DNA, 75 bp, synthetic construct
  source 1..75: mol_type = other DNA
cgctggaacaactggcgaatcgcgaagatggtccttttgtggtgcgtctggcccgcgaaccgggtaaacgcgaaa

SEQ ID NO: 485144 - DNA, 75 bp, synthetic construct
  source 1..75: mol_type = other DNA
ccgcgccgcgcgaatgtatgaattcagcgatatggcggaagtggagtcgacgctggaacaactggcgaatcgcga

SEQ ID NO: 485145 - DNA, 75 bp, synthetic construct
  source 1..75: mol_type = other DNA
caatacccgctctcagtaaatggtgtagtcacggcctgtaatcagaaaacgaaccgtgaaccggtcatgaatctg

SEQ ID NO: 485146 - DNA, 75 bp, synthetic construct
  source 1..75: mol_type = other DNA
gatgggacggcgaaaactaatgagcaagggcaggctattttcaccgccacgaccactgtcgcagcgaaatataca

SEQ ID NO: 485147 - DNA, 75 bp, synthetic construct
  source 1..75: mol_type = other DNA
agttcaccgaaactgaagcaggggtgtatcagtctgtctttacgaccggaacgcagtcaggtgaggcaacgatta

SEQ ID NO: 485148 - DNA, 75 bp, synthetic construct
  source 1..75: mol_type = other DNA
tccggtattgaggtgattggcaactatgcactggcggacggcaaagccaaacagacgtataaagttacggtgact

SEQ ID NO: 485149 - DNA, 75 bp, synthetic construct
  source 1..75: mol_type = other DNA
cgcatctaaggctgagattcgtgatatgacagtgaaggttgataaccagctggcaaatggacagtcgactaacca

SEQ ID NO: 485150 - DNA, 75 bp, synthetic construct
  source 1..75: mol_type = other DNA
aagaagttacgctgactttaccgcagggtgtgaccagcaagacggggaatacagtaacaaccaatgcggcaggta

SEQ ID NO: 485151 - DNA, 75 bp, synthetic construct
  source 1..75: mol_type = other DNA
gctcttcaacggccagccagcagccaccgaagccgcgcagctgactgttattgccggagagatgtcatcagcgaa

SEQ ID NO: 485152 - DNA, 75 bp, synthetic construct
  source 1..75: mol_type = other DNA
tgggtgaaagccaacgatgaggggaaagcagagttgcaggtggtttcagtgactgccggaacgtatgagatcacg

SEQ ID NO: 485153 - DNA, 75 bp, synthetic construct
  source 1..75: mol_type = other DNA
ctgatatgcaatctctggtggcggatgggaaatcgactgcgaagctggaggtgacactgatgtcggcaaataacc

SEQ ID NO: 485154 - DNA, 75 bp, synthetic construct
  source 1..75: mol_type = other DNA
tccggtattgaggtgattggcaactatgcgctggcggacggcaaagccaaacaaacgtataaagttacggtgact

SEQ ID NO: 485155 - DNA, 75 bp, synthetic construct
  source 1..75: mol_type = other DNA
acagctatggtaacccgttgcaggggcaagaagttacgctgactttaccgcagggtgtgactagcaagacgggga

SEQ ID NO: 485156 - DNA, 75 bp, synthetic construct
  source 1..75: mol_type = other DNA
cgctggtgctgtctctgcgcgacgccgagggccagccagtcacgggcatgaaagatcagatcaagactgaactaa

SEQ ID NO: 485157 - DNA, 75 bp, synthetic construct
  source 1..75: mol_type = other DNA
agaagtggttattagcggagctggtatgagcgccgatcgtacggcgttaacgcttgacggtcagagccgtattca

SEQ ID NO: 485158 - DNA, 75 bp, synthetic construct
  source 1..75: mol_type = other DNA
gcagcgccctgcatcttgagccctggcaaggcgatggccaggtccatttttccaggtggacgccttcccgtaaac

SEQ ID NO: 485159 - DNA, 75 bp, synthetic construct
  source 1..75: mol_type = other DNA
tccaggcggacgcctttccgtaaaccgacatcatctgatgctcgcccttcttccgatgatacgcctgtgcctggt

SEQ ID NO: 485160 - DNA, 75 bp, synthetic construct
  source 1..75: mol_type = other DNA
tgggtgatgtcgcagcgcaggtattgttgctgcaaagccgtgacctggatctggaagccagcgccgctgcgcatc

SEQ ID NO: 485161 - DNA, 75 bp, synthetic construct
  source 1..75: mol_type = other DNA
cggcatcatctgatgctcgcccttcttccgatgatacgcctttgtcgggtggatgttctgaaaccaggaaggctt

SEQ ID NO: 485162 - DNA, 75 bp, synthetic construct
  source 1..75: mol_type = other DNA
gaccaattttcatttcacccattatgaaaatggacatgcagtggagcagcgaaatctaccggatgtggcgtcgtt

SEQ ID NO: 485163 - DNA, 75 bp, synthetic construct
  source 1..75: mol_type = other DNA
gggctgggcgtggatgatgcgaaacatgggtttaccgtggatgaactggcactggtgatggcagcgttcgacaca

SEQ ID NO: 485164 - DNA, 75 bp, synthetic construct
  source 1..75: mol_type = other DNA
cttcaacccaggttggcaaacagtgccaattcactactggtttagcagttgttatctccactgcttacaatgaaa

SEQ ID NO: 485165 - DNA, 75 bp, synthetic construct
  source 1..75: mol_type = other DNA
tggatgttctgataccaggaaggcttcagacaaaaagccgggtgaagccgctgtgctctgggtcaagcgtggtga

SEQ ID NO: 485166 - DNA, 75 bp, synthetic construct
  source 1..75: mol_type = other DNA
ggatgttctgataccaggaaggcttcagacaaaaagccgggtgaagccgctgtgctctggatcaagcgtggtgat

SEQ ID NO: 485167 - DNA, 75 bp, synthetic construct
  source 1..75: mol_type = other DNA
ggatgttctgaaaccaggaaggcttcagacaaaaagtctggtggatccgctgtgctctgggtcaagcgtggtgat

SEQ ID NO: 485168 - DNA, 75 bp, synthetic construct
  source 1..75: mol_type = other DNA
tggatgttctgataccaggaaggcttcagacaaaaagccgggtggagccgctgtcctctggatcaagcgtggtga

SEQ ID NO: 485169 - DNA, 75 bp, synthetic construct
  source 1..75: mol_type = other DNA
tggatgttctgataccaggaaggcttcagacaaaaagccgggtggagccgctgtactctggctcaagcgtggtga

SEQ ID NO: 485170 - DNA, 75 bp, synthetic construct
  source 1..75: mol_type = other DNA
tggatgttctgataccaggaaggcttcagacaaaaagccgggtgcagccgctgttctctggttcaagcgtggtga

SEQ ID NO: 485171 - DNA, 75 bp, synthetic construct
  source 1..75: mol_type = other DNA
ctctgagcgtgaatgaactctcaggagatgtggttgctgatggtcagcaatcccacacgctgacgcttactgcgg

SEQ ID NO: 485172 - DNA, 75 bp, synthetic construct
  source 1..75: mol_type = other DNA
gtgcataaggccgtggagctggttgccactgagcagcagaacctgagcgcgcgcaccgaaaaatccctgtctgag

SEQ ID NO: 485173 - DNA, 75 bp, synthetic construct
  source 1..75: mol_type = other DNA
gttatctcgtgaaatatgaaacgaagttgcataacggttccgggcaacgtaattatggttgcagtcgtgggccgg

SEQ ID NO: 485174 - DNA, 75 bp, synthetic construct
  source 1..75: mol_type = other DNA
aggtttttacctgggcgtggcgtttcaaagagtgtttgttcgataccgaactgaaagcagcacaggattacgaca

SEQ ID NO: 485175 - DNA, 75 bp, synthetic construct
  source 1..75: mol_type = other DNA
cggcgctgtttaccaaaaaagagcagtccgacgatgtccggttctctgatgtgtataaggccgtggagctggtcg

SEQ ID NO: 485176 - DNA, 75 bp, synthetic construct
  source 1..75: mol_type = other DNA
ccactgagcagcaaaacctgagtgtgcgtaccgaaaaatccctgtctgagctggagactgccctgcaggcacagc

SEQ ID NO: 485177 - DNA, 75 bp, synthetic construct
  source 1..75: mol_type = other DNA
atccctgtctgagcaggaagaacgtctgtctgagctggagactgccctgcaggcacagcagaccgcctttaacga

SEQ ID NO: 485178 - DNA, 75 bp, synthetic construct
  source 1..75: mol_type = other DNA
tgctgaagaaataacggaaggtccgctggcaggcaagatggcgctgtatgccgatgttgagccaacggagtccct

SEQ ID NO: 485179 - DNA, 75 bp, synthetic construct
  source 1..75: mol_type = other DNA
caggaagaacgcctgtctgagctggagacagccctgcaggcacagcaaaccgcctttaacgaactggtggacaag

SEQ ID NO: 485180 - DNA, 75 bp, synthetic construct
  source 1..75: mol_type = other DNA
tatctgccggacagcacctttaaccgctacggcaaggtgacggcgctgtttgctgaagaaatcatggaaggtccg

SEQ ID NO: 485181 - DNA, 75 bp, synthetic construct
  source 1..75: mol_type = other DNA
tggaagaggcgacgcagatcctgcatatcaatcacggtgaaatgcagatcacctcgtcaccgaaaaaattctccg

SEQ ID NO: 485182 - DNA, 75 bp, synthetic construct
  source 1..75: mol_type = other DNA
cgcaataaacgtatgacctggcgcaccttgttgacgctgctgtcggtgcgtaacggcaaacgtctggctgatggt

SEQ ID NO: 485183 - DNA, 75 bp, synthetic construct
  source 1..75: mol_type = other DNA
gtgcataaggccgtggaactggtcgccactgagcagcagaacctgagtacgcgcaccgaaaaatccctgtctgag

SEQ ID NO: 485184 - DNA, 75 bp, synthetic construct
  source 1..75: mol_type = other DNA
gctacggcaaggtgacagcgctgtttgctgaagaaatcaaggaaggtccgctggcaggcaagatggcgctgtatg

SEQ ID NO: 485185 - DNA, 75 bp, synthetic construct
  source 1..75: mol_type = other DNA
cgacattgaggctccggaaggagtgacggagaaggattatcaattcctgccgtcgaaggctgaccatttctcagg

SEQ ID NO: 485186 - DNA, 75 bp, synthetic construct
  source 1..75: mol_type = other DNA
tccttcagcaggaaactggacagagaaaggtaatggggtctacgtggcgaccttaacgctgggatctgccgcggg

SEQ ID NO: 485187 - DNA, 75 bp, synthetic construct
  source 1..75: mol_type = other DNA
aacgctcccggcttatcgtccaggcaaagacaattattatgcgatttctgcggttgcctacgataacaaaggcaa

SEQ ID NO: 485188 - DNA, 75 bp, synthetic construct
  source 1..75: mol_type = other DNA
caggctgttttcaccggctctaccactatcgcagcgacatatacactcacggcgaaagtggaacaggccaacggt

SEQ ID NO: 485189 - DNA, 75 bp, synthetic construct
  source 1..75: mol_type = other DNA
gaataatgctcagaagacggttacggtgaaattcaaggcggatttcagtaccggtcaggcgaccctggaggttga

SEQ ID NO: 485190 - DNA, 75 bp, synthetic construct
  source 1..75: mol_type = other DNA
gatggatgtggcaaactccaccctgagcgctaacgagccgtcaggtgatgtggttgctgatggtcagcaagccta

SEQ ID NO: 485191 - DNA, 75 bp, synthetic construct
  source 1..75: mol_type = other DNA
tgtcaccatcatggatcccgatccggattcagcggtgatttctcgtttttttgcatccctgaaagccgaaattca

SEQ ID NO: 485192 - DNA, 75 bp, synthetic construct
  source 1..75: mol_type = other DNA
atgaaccaaccaatacacaatgcttactggttatcccgttttgacagccttctcgacagtgccctggcgcagcac

SEQ ID NO: 485193 - DNA, 75 bp, synthetic construct
  source 1..75: mol_type = other DNA
ttaaatttcctttgcctgttacaggtgcaaaagaactcaactatggaattacagttaaactatctggaaatatat

SEQ ID NO: 485194 - DNA, 75 bp, synthetic construct
  source 1..75: mol_type = other DNA
cagacactttccctggggcttgtggtcagcaaagcaactcacggactgaaaaatgtgcagtgggaagcgccgtca

SEQ ID NO: 485195 - DNA, 75 bp, synthetic construct
  source 1..75: mol_type = other DNA
gcggaaagacgggcgagcttcgtgtcatgccgctcttcaacggccagccagcagccaccgaagccgcgcagttga

SEQ ID NO: 485196 - DNA, 75 bp, synthetic construct
  source 1..75: mol_type = other DNA
tgagacgaagcagcatgacggttccgggcaacgtaattatggttgcagtcgtgggccggggcgtctgctggatgg

SEQ ID NO: 485197 - DNA, 75 bp, synthetic construct
  source 1..75: mol_type = other DNA
taagtggtatcctatagtctttcgccgatctggaggcagtaccgatgaattagcctcacgagttgtgataactac

SEQ ID NO: 485198 - DNA, 75 bp, synthetic construct
  source 1..75: mol_type = other DNA
tagcctggcgtgtcatatcacatctcgccagctaaaccacgtcgaagcagcagaactgctgcgtttgactgctga

SEQ ID NO: 485199 - DNA, 75 bp, synthetic construct
  source 1..75: mol_type = other DNA
gatgcgaacagtggcagtggtgtatggacagagcagcagtggaatgcgtccggtggtaaaggcactgtgacggat

SEQ ID NO: 485200 - DNA, 75 bp, synthetic construct
  source 1..75: mol_type = other DNA
tttaatgaggcgtcgggtgcgacagcgggctcttccctgtggggggtggataaaccgttgtatcgtgacctggtc

SEQ ID NO: 485201 - DNA, 75 bp, synthetic construct
  source 1..75: mol_type = other DNA
atatcacgggggcaaaagcgacgtatccgatactgcttgatacggtcacagtcaaagttaacgaaagccgggcat

SEQ ID NO: 485202 - DNA, 75 bp, synthetic construct
  source 1..75: mol_type = other DNA
ggggcagagttgctgaagaaaggcggacgtgtgagcgtacggtttaaggtgccgggctcactggtgccgaatcag

SEQ ID NO: 485203 - DNA, 75 bp, synthetic construct
  source 1..75: mol_type = other DNA
ctaaaaccggaccggatgatgcaggtcttaatcttttactgacagaggcccgacttgaagaacgtcgggcaaggg

SEQ ID NO: 485204 - DNA, 75 bp, synthetic construct
  source 1..75: mol_type = other DNA
ctggccgccttcttcatccagagcgacagcgcaaacctgaatctgatgcagcacaaacaacagaatgcaaaactg

SEQ ID NO: 485205 - DNA, 75 bp, synthetic construct
  source 1..75: mol_type = other DNA
aagtttctttaaacaatactatgcttctcgtgaaaacttccttgttaatttctacgcgactaatccggattgtgc

SEQ ID NO: 485206 - DNA, 75 bp, synthetic construct
  source 1..75: mol_type = other DNA
tatcgctgttaatgctttcaggttgtgcaaccgaagcattgaagaatgaacaagctgaaactgttattactgcgg

SEQ ID NO: 485207 - DNA, 75 bp, synthetic construct
  source 1..75: mol_type = other DNA
gctgtgtggggcatgccctgcatgtggccaaaaaactgctgccgtttatgcctgcccgtgcggggatccttcttg

SEQ ID NO: 485208 - DNA, 75 bp, synthetic construct
  source 1..75: mol_type = other DNA
atcctgaaagcgcgccacgctgcaaaagcgaccggtttaccggcgattgccgacgattccggtctggcggttgat

SEQ ID NO: 485209 - DNA, 75 bp, synthetic construct
  source 1..75: mol_type = other DNA
cggcctgacctttatcgaaaacgcgattctgaaagcgcgccacgcggcaaaagcgaccggtttaccggcgattgc

SEQ ID NO: 485210 - DNA, 75 bp, synthetic construct
  source 1..75: mol_type = other DNA
tgatgtcagtccgggggtaccgggtgttgagaaaccgcaggatggcggtgttgctggtactggtcatgatgaggc

SEQ ID NO: 485211 - DNA, 75 bp, synthetic construct
  source 1..75: mol_type = other DNA
acgtatgatcgtcctgacccgcgtattaagcaactggcgcgtcgcagcacggtgacaccgggcggtgcggcctgt

SEQ ID NO: 485212 - DNA, 75 bp, synthetic construct
  source 1..75: mol_type = other DNA
gagcttaaagataaaagctcatatatagggaaggtcttatcatatattaaatatgaagatgaagatgttactgca

SEQ ID NO: 485213 - DNA, 75 bp, synthetic construct
  source 1..75: mol_type = other DNA
aaggcgctacatccaattgttggagctgaagagccagaagcgcatctacatcccaatgcacaaagaaccttgttt

SEQ ID NO: 485214 - DNA, 75 bp, synthetic construct
  source 1..75: mol_type = other DNA
tccaggcgtgggcgcagaagagcgtggtcagtctgaagccatcgcgcgtaacctgcgtgaaatgtctcgcctgag

SEQ ID NO: 485215 - DNA, 75 bp, synthetic construct
  source 1..75: mol_type = other DNA
tccgttatctcgccggaaggttgtgcgtccattctgtggaagagcgctgacaaagcgccgctggcggctgaagcg

SEQ ID NO: 485216 - DNA, 75 bp, synthetic construct
  source 1..75: mol_type = other DNA
atatcacgggggcaaaagcgacgtatccggttctgctggatactgtcactgtcaaagtgaaagaaagcgaagcag

SEQ ID NO: 485217 - DNA, 75 bp, synthetic construct
  source 1..75: mol_type = other DNA
cccggatattgtggcagtggggtattacggtgcggcatcccgcacccgggggagttttgtttccacgcagcgtga

SEQ ID NO: 485218 - DNA, 75 bp, synthetic construct
  source 1..75: mol_type = other DNA
ctgaagcaatggcagctcgccttgatagcctggcgtgttatatcacatcccgccaactaaaccacgtcgaagcgg

SEQ ID NO: 485219 - DNA, 75 bp, synthetic construct
  source 1..75: mol_type = other DNA
actgttgcagtggaggaggcaaaaaatcttctcagcaaggggggtgaaattgccgtacggttcaaaattccggac

SEQ ID NO: 485220 - DNA, 75 bp, synthetic construct
  source 1..75: mol_type = other DNA
tgcgggggctacgggaggtaaggccctgcaactgaataaaccggaaaaccacatctggtttctggagcatgatgc

SEQ ID NO: 485221 - DNA, 75 bp, synthetic construct
  source 1..75: mol_type = other DNA
gtgagtgaaaatgatgtgctcactcctgcttcacctggtgataacgagacagtgatcggtgagccggaatactac

SEQ ID NO: 485222 - DNA, 75 bp, synthetic construct
  source 1..75: mol_type = other DNA
tcagggctgcttcgccttcagaccttgcggagcgactgacacaaaaactgaaggaaggctggcagccgtttggca

SEQ ID NO: 485223 - DNA, 75 bp, synthetic construct
  source 1..75: mol_type = other DNA
tatcgctgttaatgctttctggctgtgcgacagaagcattaaggaatgaacaagctgagtctgttattaccgcag

SEQ ID NO: 485224 - DNA, 75 bp, synthetic construct
  source 1..75: mol_type = other DNA
accggaaaatcaggtcagccgccgccgatggcgcttacgatacccggctctgtcacgatgaactgcggcgtaaga

SEQ ID NO: 485225 - DNA, 75 bp, synthetic construct
  source 1..75: mol_type = other DNA
ttcatcacggggaagacctcagcgctattctgatctcgccgtcaccaccgttctggtcattaaacgcgtgttcag

SEQ ID NO: 485226 - DNA, 75 bp, synthetic construct
  source 1..75: mol_type = other DNA
agactcacagaaaaatcagggcagcatcggcagacggcgcttacgacacccggctctgtcacgatgagctgcggc

SEQ ID NO: 485227 - DNA, 75 bp, synthetic construct
  source 1..75: mol_type = other DNA
ttacagctgtgtcagcaggcgggcaaagtcggttaacgtcagtttcaaaacgcccacccggggtgaaatcgcaca

SEQ ID NO: 485228 - DNA, 75 bp, synthetic construct
  source 1..75: mol_type = other DNA
agcgccgtcgtatctggcgaaagttgcatcttgctgttgacagcaacacacatgaagttgtctgtgcagacctgt

SEQ ID NO: 485229 - DNA, 75 bp, synthetic construct
  source 1..75: mol_type = other DNA
attctgaaagcgcgccacgcagcaaaggtgactggcttgccggcgattgctgatgattccggcctggcggttgat

SEQ ID NO: 485230 - DNA, 75 bp, synthetic construct
  source 1..75: mol_type = other DNA
acaccaaaggcagtaaaagcagccaatgacaatgctgagaaacgtctgcagaaagatcagaacggtgcggatatc

SEQ ID NO: 485231 - DNA, 75 bp, synthetic construct
  source 1..75: mol_type = other DNA
catacccactcactgtccggcactgctgcaagcgcaggtgcacacgcacatactgtcggtattggtgctcatacg

SEQ ID NO: 485232 - DNA, 75 bp, synthetic construct
  source 1..75: mol_type = other DNA
cagaggctatggccctggtacgagcgctgaacaaaatgacgaaagcaggtatgcctgaaagcgtgcgtattgcct

SEQ ID NO: 485233 - DNA, 75 bp, synthetic construct
  source 1..75: mol_type = other DNA
cacagctgcatctgcaggtgctcacgcacatactgtcggtattggtgctcatacgcactcggttgcgattggctc

SEQ ID NO: 485234 - DNA, 75 bp, synthetic construct
  source 1..75: mol_type = other DNA
tattctgaccttgccatcaccaccgttctggtcattaaacgcgtgttcaggttgaccttgcgggctgcacagggt

SEQ ID NO: 485235 - DNA, 75 bp, synthetic construct
  source 1..75: mol_type = other DNA
tatctctgttaatgctttcaggatgtgcaaccgaagcattaaagaatgaacaagctgaatctgttatttctgcgg

SEQ ID NO: 485236 - DNA, 75 bp, synthetic construct
  source 1..75: mol_type = other DNA
atgattagatatagtggaatatttctatcgctgttaatgctttcaggttgtgcaaccgatgcattgaaaaatgaa

SEQ ID NO: 485237 - DNA, 75 bp, synthetic construct
  source 1..75: mol_type = other DNA
tccctcaatctttgagagatgaaatagcaaccttttgcctacaaagttatcaaaatgataatcggttagacttta

SEQ ID NO: 485238 - DNA, 75 bp, synthetic construct
  source 1..75: mol_type = other DNA
ttttgagtgcagtaattaatcttaatgaaagcagattgcgttcatctgatccggcggctccagcaatacaagcta

SEQ ID NO: 485239 - DNA, 75 bp, synthetic construct
  source 1..75: mol_type = other DNA
tatattacttaatcaggcgctcgatcacgcaaacaacgcccaaaaactacttggcctttcagaaggtgaagaatt

SEQ ID NO: 485240 - DNA, 75 bp, synthetic construct
  source 1..75: mol_type = other DNA
ggaaatcattagcagtatgagttcttatgtcgaacttttgaatgaggatttagatgttaaagacagcaaacagtt

SEQ ID NO: 485241 - DNA, 75 bp, synthetic construct
  source 1..75: mol_type = other DNA
tacctcaaaatttgcgagatgaaatagcaaccttttgcttacaaaattatcaaaataacaagatgttagactata

SEQ ID NO: 485242 - DNA, 75 bp, synthetic construct
  source 1..75: mol_type = other DNA
gcttgttgacgaattagaagctcatttacatccaaaatggcaaagagcatttttaccatctttaatagcacttga

SEQ ID NO: 485243 - DNA, 75 bp, synthetic construct
  source 1..75: mol_type = other DNA
aaaatatgtttagctttagtgaccatgaaataaaatcatattttcatgaaactgttccaaatattaatagcatac

SEQ ID NO: 485244 - DNA, 75 bp, synthetic construct
  source 1..75: mol_type = other DNA
aacaatcttaaaatcaaattctccaaatctatccacatggctaactgccacgaataactatattagactctcaga

SEQ ID NO: 485245 - DNA, 75 bp, synthetic construct
  source 1..75: mol_type = other DNA
ttttaattagattactaagtgaaaaacgtgaaggtctaattttgttaaatggtgagtggggagttggtaaaacat

SEQ ID NO: 485246 - DNA, 75 bp, synthetic construct
  source 1..75: mol_type = other DNA
ttctcaaagtgaagtctacagtattgatgaaatattcggttcactggcaggattcggtcgtcactacgattatga

SEQ ID NO: 485247 - DNA, 75 bp, synthetic construct
  source 1..75: mol_type = other DNA
ccatatttttacgcactaaggacggttccacttccgacaacccaggactcaagggtactaacctgtgcagccaga

SEQ ID NO: 485248 - DNA, 75 bp, synthetic construct
  source 1..75: mol_type = other DNA
gttgtccctcaagttcaatttataaaccaagatagtggagaagatgtcatggggagacatgctcactacgaaaaa

SEQ ID NO: 485249 - DNA, 75 bp, synthetic construct
  source 1..75: mol_type = other DNA
gttcatctcaaaaatggcagcggtaacggtgatcactatcatcatgcgctgttatttcacgtttgagggtaggga

SEQ ID NO: 485250 - DNA, 75 bp, synthetic construct
  source 1..75: mol_type = other DNA
tggcgcaataacggtaatgataaattacgatgcgggaatggtggcaattgcgtcatttgtcgctgttgtttctgg

SEQ ID NO: 485251 - DNA, 75 bp, synthetic construct
  source 1..75: mol_type = other DNA
tagaggatatgcagcaggccatctgcgccttcagttgtcgcgccggtgaaaagttgcgtcggaacaaaacctatg

SEQ ID NO: 485252 - DNA, 75 bp, synthetic construct
  source 1..75: mol_type = other DNA
attcttcctgcattttatgagttattactttctgatgctataacctctacctgctatggttatgagaaatcagca

SEQ ID NO: 485253 - DNA, 75 bp, synthetic construct
  source 1..75: mol_type = other DNA
atgatatatatactaaattacaagaaagtactggtttttcagatgaagtaataggtaagataaaaaaactagaat

SEQ ID NO: 485254 - DNA, 75 bp, synthetic construct
  source 1..75: mol_type = other DNA
tctataaaaaaaattgaagtatctccggaggatattgttgagatacaaaacttaaaaaaatattatcaaaataat

SEQ ID NO: 485255 - DNA, 75 bp, synthetic construct
  source 1..75: mol_type = other DNA
ttatttttgtgttactggcaggtctggtttatctggtgcgtattggcgcgctggactggacgcccgcgcgttcac

SEQ ID NO: 485256 - DNA, 75 bp, synthetic construct
  source 1..75: mol_type = other DNA
gtaaataaggtaatatccccaaaagaacagagtgaatcgatatccggttatacatctaaagttaacaaaacaaac

SEQ ID NO: 485257 - DNA, 75 bp, synthetic construct
  source 1..75: mol_type = other DNA
cttacctttgtagtaacacaactgatacacatttattaaatcaatatgttggagatgatccattatttactgata

SEQ ID NO: 485258 - DNA, 75 bp, synthetic construct
  source 1..75: mol_type = other DNA
gccagacggaaacgccattttaatgcggaacatcagtacacgcgtaagaaatcaatcgatctggaatttattgtc

SEQ ID NO: 485259 - DNA, 75 bp, synthetic construct
  source 1..75: mol_type = other DNA
ctcttactccacgtgaggaaaagacgacaccacagactgctgtttcgctggaaacaataagcgaatatctcgatc

SEQ ID NO: 485260 - DNA, 75 bp, synthetic construct
  source 1..75: mol_type = other DNA
ggtggtaaccgctgcgcaggtggcacatgctccggtgataatcggtgttgacccggcatattcaggcgttgatga

SEQ ID NO: 485261 - DNA, 75 bp, synthetic construct
  source 1..75: mol_type = other DNA
gcttctggtcacggtattggtaaatccgcattcatctcaatgctgatcaactggggcatgtccacttgcgaggat

SEQ ID NO: 485262 - DNA, 75 bp, synthetic construct
  source 1..75: mol_type = other DNA
aagagcagcttgtcgaggatattgcatcgttcacatatgacccgctgggctattcgctgtatgcgtttccgtggg

SEQ ID NO: 485263 - DNA, 75 bp, synthetic construct
  source 1..75: mol_type = other DNA
cgcaaatataaacaccgctgggttacgaagcagatcgacagccgtaccgtcgaaggaacgaacaaagagcagatt

SEQ ID NO: 485264 - DNA, 75 bp, synthetic construct
  source 1..75: mol_type = other DNA
catgctccggtgataatcggtgttgacccggcatattcaggcgttgatgacgcggtgatatacctgcggcagggg

SEQ ID NO: 485265 - DNA, 75 bp, synthetic construct
  source 1..75: mol_type = other DNA
ttgccgatgatatggggcgattcttttacgatccgcttggcttcgttatgtatgcgtttgattggggaactggtg

SEQ ID NO: 485266 - DNA, 75 bp, synthetic construct
  source 1..75: mol_type = other DNA
tgaagcttggtgcgcaacttgatagccaggatttagccgacgagctgagcgctcctgaatacaaggtcaggctca

SEQ ID NO: 485267 - DNA, 75 bp, synthetic construct
  source 1..75: mol_type = other DNA
ccagaaccttgccgatgagctgagtgcgccggagtacaaggtcaggctgaaggacagcaggaagattttgcagga

SEQ ID NO: 485268 - DNA, 75 bp, synthetic construct
  source 1..75: mol_type = other DNA
accttctgtaaggtcaccgatagccttgcggtggcgaggaaaatgtttcccggtaagcgcaacagcctcgatgcg

SEQ ID NO: 485269 - DNA, 75 bp, synthetic construct
  source 1..75: mol_type = other DNA
ggtgaagcaacaattcagcgcattgtacgtcaggcaagtaagttacgcgttgtttttgcgacagatgaagagctt

SEQ ID NO: 485270 - DNA, 75 bp, synthetic construct
  source 1..75: mol_type = other DNA
cgtacatggtattgccgatgaatttttgctcgataagcccacgtttgccgaagtagccgatgagttcatggacta

SEQ ID NO: 485271 - DNA, 75 bp, synthetic construct
  source 1..75: mol_type = other DNA
tttttaaagatagtatttttcttgaggggtcgcacactggtttctggcgattagaaaataaaaatcctgatgtat

SEQ ID NO: 485272 - DNA, 75 bp, synthetic construct
  source 1..75: mol_type = other DNA
atgaatacgcaaaattgatggattcagatttagagccagagatgattgctgacacaatagaaggcatggaaggag

SEQ ID NO: 485273 - DNA, 75 bp, synthetic construct
  source 1..75: mol_type = other DNA
gtcacgctgaatatatgaccacgctcacccgcatgattcccgcgccgctgctgggcgaaattccctggcttgcag

SEQ ID NO: 485274 - DNA, 75 bp, synthetic construct
  source 1..75: mol_type = other DNA
caatttaatcgatttgcccatgacccaatggctggcggtcacagaatgtggcaaatggccgggcttaaagcccag

SEQ ID NO: 485275 - DNA, 75 bp, synthetic construct
  source 1..75: mol_type = other DNA
acggctggcgcactgcatttagtctctgttattactctggcagtcctgggagctttcagtaaagctattttctgg

SEQ ID NO: 485276 - DNA, 75 bp, synthetic construct
  source 1..75: mol_type = other DNA
ggttatgctgaacgcctcaaggaagaggcaaagtcactgaatgaacgagcagcagtaattcaaaataagattgac

SEQ ID NO: 485277 - DNA, 75 bp, synthetic construct
  source 1..75: mol_type = other DNA
caaataacggtatcgactatgaaaaagactccatgggagaaatgggaagtcgatttcttgtgcgaagtagcggca

SEQ ID NO: 485278 - DNA, 75 bp, synthetic construct
  source 1..75: mol_type = other DNA
caaatgttcaggtcagtacacttccgctggaccaggcaactgttagcgtgacaaaacgtgtgaccgatgttgtga

SEQ ID NO: 485279 - DNA, 75 bp, synthetic construct
  source 1..75: mol_type = other DNA
tatcatattgatattaatctcgtttatttggtttgatgaaaaatgtaccctctcttgtaccctcggtcccttctg

SEQ ID NO: 485280 - DNA, 75 bp, synthetic construct
  source 1..75: mol_type = other DNA
ccgatatctgttatctgcgggaacagcattatcctgtgtgctcaaaacgaaaatcgtaacctcttatcccggtat

SEQ ID NO: 485281 - DNA, 75 bp, synthetic construct
  source 1..75: mol_type = other DNA
aggcaaatgaagatgttgccagaaatcaggagcgacaggctaaagctgttcaggtttataattcgcgtaaaagcg

SEQ ID NO: 485282 - DNA, 75 bp, synthetic construct
  source 1..75: mol_type = other DNA
tgcgttaggtgctgcgctggaacgccgtaagcagaaggaaaataaagaaaaggactctaaggataaattagataa

SEQ ID NO: 485283 - DNA, 75 bp, synthetic construct
  source 1..75: mol_type = other DNA
caaaagataagtctgatgctgatgctgcgttaggtgctgcgctggaacgccgtaagcagaaggaaaataaagaaa

SEQ ID NO: 485284 - DNA, 75 bp, synthetic construct
  source 1..75: mol_type = other DNA
aaaagaaatcatcctggaacgtaaaaaacgattgcgagaaaagaacggtaacccggttatccggcacgctaaatg

SEQ ID NO: 485285 - DNA, 75 bp, synthetic construct
  source 1..75: mol_type = other DNA
gatacttgctgctgctttcgttatcctttactccggtgtgctcctgtttattctgtatttttgtttttctgccct

SEQ ID NO: 485286 - DNA, 75 bp, synthetic construct
  source 1..75: mol_type = other DNA
ttttactccggtgtgctcctgtttattctgtatttttgtttttctgccctgactgacctgctgaaaaccgatgaa

SEQ ID NO: 485287 - DNA, 75 bp, synthetic construct
  source 1..75: mol_type = other DNA
gataagtgaaaatgaactttcgaatattctggcggtaagtaaaacacctattcgtgaagcttttattttacttag

SEQ ID NO: 485288 - DNA, 75 bp, synthetic construct
  source 1..75: mol_type = other DNA
tttttaaagatagtgtcttgcttgagggctctcatactggtttctggcgattggaaaataacaaccccgatgtgt

SEQ ID NO: 485289 - DNA, 75 bp, synthetic construct
  source 1..75: mol_type = other DNA
tgttttgattattgcatcatttatttattatctgcttgaggtggggacaaaaaaggatttatatttgtttgtgtt

SEQ ID NO: 485290 - DNA, 75 bp, synthetic construct
  source 1..75: mol_type = other DNA
ttatttatactgctctctattatttgatattgcatgtatcattgtctttggctggatgctttattcagaatttgt

SEQ ID NO: 485291 - DNA, 75 bp, synthetic construct
  source 1..75: mol_type = other DNA
agattgagttaagaacggatgcaccggcagagctggaagtcccggtcagctaccggggaaatctgcagatagcac

SEQ ID NO: 485292 - DNA, 75 bp, synthetic construct
  source 1..75: mol_type = other DNA
ccgacagacccggtgttgtaccggagtggagacacgacgcctcttcccggcagcctgaccatccgcaacgcagag

SEQ ID NO: 485293 - DNA, 75 bp, synthetic construct
  source 1..75: mol_type = other DNA
atgaagaaaacaatgatggcagtcgccttggctctgagtgctctcagtattccgtcagcactggccgctgaatac

SEQ ID NO: 485294 - DNA, 75 bp, synthetic construct
  source 1..75: mol_type = other DNA
aaaaagacctggtgcaattgataacagaacgtcaaaaccagccgctgcgtgaagtggatctcaatcagtatctgt

SEQ ID NO: 485295 - DNA, 75 bp, synthetic construct
  source 1..75: mol_type = other DNA
tgattgagttaagaacagatgcgccgtcagagctggagattccgaccagctaccggggaaacttgcagatagcgc

SEQ ID NO: 485296 - DNA, 75 bp, synthetic construct
  source 1..75: mol_type = other DNA
gtggaggcacaacgcctcttcccggcagcctgatcatccgcaacgcagaattcaggactgcatcaggtggcttgg

SEQ ID NO: 485297 - DNA, 75 bp, synthetic construct
  source 1..75: mol_type = other DNA
gactcatcttcgcggacagtatcgccaacaactgacggcctggctgcaagggcaagctgagctgaccatttttgg

SEQ ID NO: 485298 - DNA, 75 bp, synthetic construct
  source 1..75: mol_type = other DNA
caaatacaaacaatagcagcatcagtaaataaactttataccaacagctctacccccctacaagggggagataat

SEQ ID NO: 485299 - DNA, 75 bp, synthetic construct
  source 1..75: mol_type = other DNA
taaataaattttataccaacagcgctacacctccagggggaaatgataatggcgtagttgaggcgatttctgcta

SEQ ID NO: 485300 - DNA, 75 bp, synthetic construct
  source 1..75: mol_type = other DNA
cactgtataaacgtcataaatggatgttaagtcttggtattgtgctggcaattgtcacgctgctcgccagtatcg

SEQ ID NO: 485301 - DNA, 75 bp, synthetic construct
  source 1..75: mol_type = other DNA
aatagtgatggacaacgggcaaattattgagcaaggtactcacgcagagctgcttgccagacaggggcgttatta

SEQ ID NO: 485302 - DNA, 75 bp, synthetic construct
  source 1..75: mol_type = other DNA
tcttctgcgcgttagccgcgtttgaagcactggcaccagtaacgggtgcatttcagcatctggggcaagtcattg

SEQ ID NO: 485303 - DNA, 75 bp, synthetic construct
  source 1..75: mol_type = other DNA
ccatccccgaaccggtacgctttccacagcttcccaggtaagaaaacttcgccgtgttctagaaaaaacaagtta

SEQ ID NO: 485304 - DNA, 75 bp, synthetic construct
  source 1..75: mol_type = other DNA
ttgtctgcctggcatttctgataggaccgagcattaagaactccagcccggaagagatggtgtcggtataccatt

SEQ ID NO: 485305 - DNA, 75 bp, synthetic construct
  source 1..75: mol_type = other DNA
gaagagatggtgtcggtataccatttctggacgattgtgctggcgattgaaccgccccgggtttcctggagagtg

SEQ ID NO: 485306 - DNA, 75 bp, synthetic construct
  source 1..75: mol_type = other DNA
tgtgactcattacgtaagatgaattcaacaaaatgcaacgagatggcatcacttattgaaatagctattgatttt

SEQ ID NO: 485307 - DNA, 75 bp, synthetic construct
  source 1..75: mol_type = other DNA
aatctgagggaactgcagttcggtatgtaccctgagtcaattcatgtgcttgactggtttcatattacgatgagg

SEQ ID NO: 485308 - DNA, 75 bp, synthetic construct
  source 1..75: mol_type = other DNA
tcgccagacgaatggccaaaaagcagcagatgcagtggagcagaaaaggggctcattatttgttacagacccgga

SEQ ID NO: 485309 - DNA, 75 bp, synthetic construct
  source 1..75: mol_type = other DNA
agcactggcaccagtaacgggtgcatttcagcatctggggcaagtcattgcctctgccgtacgtatctctgactt

SEQ ID NO: 485310 - DNA, 75 bp, synthetic construct
  source 1..75: mol_type = other DNA
gcatagacacccttagcagacgaaccaagaacatcgcctactacgccgaaaaacctccagcaaccgccgctaccg

SEQ ID NO: 485311 - DNA, 75 bp, synthetic construct
  source 1..75: mol_type = other DNA
tctgatgggacgccatgcaaccattcgggtaatgggatttttggtattcccattgattgcctatttcttatttct

SEQ ID NO: 485312 - DNA, 75 bp, synthetic construct
  source 1..75: mol_type = other DNA
agcactggcaccagtaacgggtgcatttcagcatctggggcaagtcattgcctctgccgtacggatcactgactt

SEQ ID NO: 485313 - DNA, 75 bp, synthetic construct
  source 1..75: mol_type = other DNA
actatttcatggtcaccaaaggggtggatcgtcagaccgcagaaagctacaccgaaacaaagcagggtctggaga

SEQ ID NO: 485314 - DNA, 75 bp, synthetic construct
  source 1..75: mol_type = other DNA
gtgataaggaggttattgctgcctgcggtaatggtaatgcgggtagttcagcgtgtgccagcgcaagactgaaag

SEQ ID NO: 485315 - DNA, 75 bp, synthetic construct
  source 1..75: mol_type = other DNA
cagtgataaggaggttattgctgcctgcggtaatggtaatgcgggtagttcagcgtgtgccagcgcaagactgaa

SEQ ID NO: 485316 - DNA, 75 bp, synthetic construct
  source 1..75: mol_type = other DNA
cgttgtgccacagcgtgtacatctgtttagcgccacgctgcgagataatctgttacttgcagcaccaggcagcag

SEQ ID NO: 485317 - DNA, 75 bp, synthetic construct
  source 1..75: mol_type = other DNA
gtggactttcacattttcagcaaataatagtgatggacaacgggcaaattattgaacaaggtacccatgcagaac

SEQ ID NO: 485318 - DNA, 75 bp, synthetic construct
  source 1..75: mol_type = other DNA
gactcatcttcgcgggcagtatcgccagcaactgacagcctggctgcaagggcaagctgaactgaccatttttgg

SEQ ID NO: 485319 - DNA, 75 bp, synthetic construct
  source 1..75: mol_type = other DNA
ttccctgatacccaaactcgtgttgccgatcgcgtttcgcttgacattacgggatgttcagttcacttatccgga

SEQ ID NO: 485320 - DNA, 75 bp, synthetic construct
  source 1..75: mol_type = other DNA
tgcgccgctggtattgctggacgaacctaccgaaggtttagatgccacaacagaaagtcagatccttgaattact

SEQ ID NO: 485321 - DNA, 75 bp, synthetic construct
  source 1..75: mol_type = other DNA
gctaggggaaggcggacgccaactctccggtggtgaactgcgccgtctggctattgcccgcgcgctgctgcatgg

SEQ ID NO: 485322 - DNA, 75 bp, synthetic construct
  source 1..75: mol_type = other DNA
atgaatcaacaactctcatggcgcaccatcgtcggctacagcctcggtgacgttgccaataacttcgccatgggg

SEQ ID NO: 485323 - DNA, 75 bp, synthetic construct
  source 1..75: mol_type = other DNA
tgcagcagaatccgcggcaacgcgcgccgagacagcagcaaaacgggcagaggatattgcatccgccgtggcgct

SEQ ID NO: 485324 - DNA, 75 bp, synthetic construct
  source 1..75: mol_type = other DNA
tcccgcggaatccgcggcaacgcgcgccgagacagcagcaaaacgggcagaggatattgcatccgccgtggcgct

SEQ ID NO: 485325 - DNA, 75 bp, synthetic construct
  source 1..75: mol_type = other DNA
tacagcggaatccgcggcaacgcgcgccgagacagcagcaaaacgggcagaggatattgcatccgccgtggcgct

SEQ ID NO: 485326 - DNA, 75 bp, synthetic construct
  source 1..75: mol_type = other DNA
tgcggcggaatccgcggcaacgcgcgccgagacagcagcaaaacgggcagaggatattgcatccgccgtggcgct

SEQ ID NO: 485327 - DNA, 75 bp, synthetic construct
  source 1..75: mol_type = other DNA
tgccgccgaatccgcggcaacgcgcgccgagacagcagcaaaacgggcagaggatattgcatccgccgtggcgct

SEQ ID NO: 485328 - DNA, 75 bp, synthetic construct
  source 1..75: mol_type = other DNA
tgctgctgaatccgcggcaacgcgcgccgagacagcagcaaaacgggcagaggatattgcatccgccgtggcgct

SEQ ID NO: 485329 - DNA, 75 bp, synthetic construct
  source 1..75: mol_type = other DNA
gtctgcttcaaaagatgaggcgaccagacaagcgtcagcagcgaatggcagagccacgacagcatcgacgaaggc

SEQ ID NO: 485330 - DNA, 75 bp, synthetic construct
  source 1..75: mol_type = other DNA
cgaagccgctgaacaggccagcgcagcagcgaggtctgcatccgcagcgatgacatccgaaacgaacgcgaaagc

SEQ ID NO: 485331 - DNA, 75 bp, synthetic construct
  source 1..75: mol_type = other DNA
gcggctgcgtcgtctgccagtgccgcgtcaacaagtgccgggcaggcctcagtcagtgccaccgcagccggaaaa

SEQ ID NO: 485332 - DNA, 75 bp, synthetic construct
  source 1..75: mol_type = other DNA
gtctgcttcaaaagatgaggcgaccagacaagcgtcagcagcgaatggcagtgccacgacggcaccgacgaaggc

SEQ ID NO: 485333 - DNA, 75 bp, synthetic construct
  source 1..75: mol_type = other DNA
gtctgcttcaaaagatgaggcgaccagacaagcgtcagcagcgaatggcagtgccacgaccgcagcgacgaaggc

SEQ ID NO: 485334 - DNA, 75 bp, synthetic construct
  source 1..75: mol_type = other DNA
gtctgcttcaaaagatgaggcgaccagacaagcgtcagcagcgaatggcagagccacgactgcaacgacgaaggc

SEQ ID NO: 485335 - DNA, 75 bp, synthetic construct
  source 1..75: mol_type = other DNA
caccgttaacgctgctggtaacgcggaaaacactgtcaaaaacatcgcatttaactacattgtgaggcttgcata

SEQ ID NO: 485336 - DNA, 75 bp, synthetic construct
  source 1..75: mol_type = other DNA
gccagagagtatgcaagccaggcagcggagccgtataaacaagttttgcagccgttgcccgatgtgtggataccg

SEQ ID NO: 485337 - DNA, 75 bp, synthetic construct
  source 1..75: mol_type = other DNA
gatagtacagctcagcagtgcgaccaacagcacttccgagtcactggcggcaacgccaaaagcagttaaggccgc

SEQ ID NO: 485338 - DNA, 75 bp, synthetic construct
  source 1..75: mol_type = other DNA
cgcaaaagcgactgaggcgacgagtcaggctacagctgctaaaaattcagcatcggcagcaaaaacctctgaaac

SEQ ID NO: 485339 - DNA, 75 bp, synthetic construct
  source 1..75: mol_type = other DNA
accgactggagccatagcagcaaagtagtgtatgcatatttgacctacatgggcctcgggctttgctacagcctg

SEQ ID NO: 485340 - DNA, 75 bp, synthetic construct
  source 1..75: mol_type = other DNA
gttgagtgcctaaacaagttaggcgcaaaagtcagtcttgatgacgtgttcccgccggaacacaaagccgcttaa

SEQ ID NO: 485341 - DNA, 75 bp, synthetic construct
  source 1..75: mol_type = other DNA
gttgcgtgcctaaacaagttaggcgcaaaagtaagtcttgatgacgtgttcccgccggaacacaaagccgcttaa

SEQ ID NO: 485342 - DNA, 75 bp, synthetic construct
  source 1..75: mol_type = other DNA
agagagtacgcaagccaggctgcggagccgtataaatatgtcttacagccgctgcctgatgtgtggataccgttt

SEQ ID NO: 485343 - DNA, 75 bp, synthetic construct
  source 1..75: mol_type = other DNA
gcaggctgcaacgccgaaagcagtaaaggccgcgtatgaccttgctaacgcaaaatataccgctcaggacgccac

SEQ ID NO: 485344 - DNA, 75 bp, synthetic construct
  source 1..75: mol_type = other DNA
aggaaattccgcgaaggcggcaaagacgtctgagacaaacgccaggtcctctgaaacggcagcagcacagagtgc

SEQ ID NO: 485345 - DNA, 75 bp, synthetic construct
  source 1..75: mol_type = other DNA
ggcggaacaaccaacgcccagtttacctatattaatcacggaacagattattcacctggctggcgaagggactat

SEQ ID NO: 485346 - DNA, 75 bp, synthetic construct
  source 1..75: mol_type = other DNA
aggatgcgagcacgacgaaaaaggggatagtacagctcagcagtgcgaccaacagcacatctgaaacgctggcgg

SEQ ID NO: 485347 - DNA, 75 bp, synthetic construct
  source 1..75: mol_type = other DNA
cgccgaagccgcctctcagagcgcagcagcggcaaagaaatccgaaactgcagcggcatcatcgaagaacgcggc

SEQ ID NO: 485348 - DNA, 75 bp, synthetic construct
  source 1..75: mol_type = other DNA
gatgtacaggaagactgcgagcgagttaacggcatcttactgaaagcgggcgcgactgacgtccgtctggcgcag

SEQ ID NO: 485349 - DNA, 75 bp, synthetic construct
  source 1..75: mol_type = other DNA
cgagcgtgttgtaaccctgactggcgaagcaatcgctcgcccgggcaacgtctgggcacggctggggacgccagt

SEQ ID NO: 485350 - DNA, 75 bp, synthetic construct
  source 1..75: mol_type = other DNA
gagcagttaaaagcaagagagcaggtgaaccctgatgattccgaagataaagatgggaaatatcgtgatctgtta

SEQ ID NO: 485351 - DNA, 75 bp, synthetic construct
  source 1..75: mol_type = other DNA
ttcttgttgtcggcaccatctatttacttagcgtactggaagccgtaggcgatattaccgccacagcgatggttt

SEQ ID NO: 485352 - DNA, 75 bp, synthetic construct
  source 1..75: mol_type = other DNA
accatcagtacggcctgaccggtaaaaattgtgtctttgctcactgcgtccatctcgaagaaaaagagtgggatc

SEQ ID NO: 485353 - DNA, 75 bp, synthetic construct
  source 1..75: mol_type = other DNA
ctcgacactgccgaaagcagctatcaccaaagcaaagaactgattgaacgctggcacaaaaatggtcgtctgttg

SEQ ID NO: 485354 - DNA, 75 bp, synthetic construct
  source 1..75: mol_type = other DNA
ggtatttatttcgatcacaaccctgactacatcatgcagatggctgagcgtgcagctgcactgggcgttgagcgt

SEQ ID NO: 485355 - DNA, 75 bp, synthetic construct
  source 1..75: mol_type = other DNA
atgaactggctgctgggcgagcacgcagtggattatgtgaagtgggatatgaaccgcgaactggtacagcccggg

SEQ ID NO: 485356 - DNA, 75 bp, synthetic construct
  source 1..75: mol_type = other DNA
ttatcaaaacttgctggatgctttgaagagagactgggttgatatctatgaaattatctataactgtgttcaaca

SEQ ID NO: 485357 - DNA, 75 bp, synthetic construct
  source 1..75: mol_type = other DNA
aaagatacgagactggatttcagtgagttgaaaaaaggatttgaagctgagcttatgtcactaaaagatggagtt

SEQ ID NO: 485358 - DNA, 75 bp, synthetic construct
  source 1..75: mol_type = other DNA
gttcgtcatgcactgaccaacctcagggagggagactggcagataaatcgtttcgctatcactttacctgtagct

SEQ ID NO: 485359 - DNA, 75 bp, synthetic construct
  source 1..75: mol_type = other DNA
tttgggcgactggtataccgatgaacagaaatacccgaacgggctgatgccggttattaatcatgtgaaatctct

SEQ ID NO: 485360 - DNA, 75 bp, synthetic construct
  source 1..75: mol_type = other DNA
tattgcagtaatgctggtaattctggggctatttccaatgatcggcggattcttcaccactattccctcatcggt

SEQ ID NO: 485361 - DNA, 75 bp, synthetic construct
  source 1..75: mol_type = other DNA
cgatttcaaatctaagcgcggggattatgagcacaacaagcggtagtggccagactcgtaatgcagggaagacat

SEQ ID NO: 485362 - DNA, 75 bp, synthetic construct
  source 1..75: mol_type = other DNA
aagcagccaatgacaatgctgagaaacgtctgcagaaagatcagaacggtgcggatatccctggcaaagatacct

SEQ ID NO: 485363 - DNA, 75 bp, synthetic construct
  source 1..75: mol_type = other DNA
cggcagaatccgcagcaacgcgcgccgagacagcagcaaaacgggcagaggatattgcatccgccgtggcgcttg

SEQ ID NO: 485364 - DNA, 75 bp, synthetic construct
  source 1..75: mol_type = other DNA
acgtcagcgagcgcggcctcagtaagcgcggatagtgcttcatcaagtgcaacgtcggcagaaaagtctgcggaa

SEQ ID NO: 485365 - DNA, 75 bp, synthetic construct
  source 1..75: mol_type = other DNA
cctcagcccgggatgcgtcggcttcaaaagaggcggcaaaatcatcagaaacgaacgcatcatcaagcgccagta

SEQ ID NO: 485366 - DNA, 75 bp, synthetic construct
  source 1..75: mol_type = other DNA
cagactcgtaatgcagggaagacatcatcagatggtgctcatacccactcgctgtccggcactgctgcaagcgca

SEQ ID NO: 485367 - DNA, 75 bp, synthetic construct
  source 1..75: mol_type = other DNA
aaatattatcctccctggtggctaccgacaggaaaacgttctgcctggtattacctcagcggaagatgatggatt

SEQ ID NO: 485368 - DNA, 75 bp, synthetic construct
  source 1..75: mol_type = other DNA
gtgcttggcggtgcgcctgggatttactccgcacgttattccggtgaagacgcgaccgatcaaaagaatctgcaa

SEQ ID NO: 485369 - DNA, 75 bp, synthetic construct
  source 1..75: mol_type = other DNA
tgttcaccggatcggaaggcatgctcggcgtgaccaccgaagtgacggtaaaactgctgccgaagccccctgtgg

SEQ ID NO: 485370 - DNA, 75 bp, synthetic construct
  source 1..75: mol_type = other DNA
ctacgatggtcaggtagcggaagctatggccatggtgcgtgcgttgaacaggatgacaaaggctgggatgccaga

SEQ ID NO: 485371 - DNA, 75 bp, synthetic construct
  source 1..75: mol_type = other DNA
tactggatagataaagaagcaacaattggtaatgactccaacttattgatagtgttttatgttcagataatgccc

SEQ ID NO: 485372 - DNA, 75 bp, synthetic construct
  source 1..75: mol_type = other DNA
gccagggccgacgggtgaacgcaacacctggacgctgctgccgcgtgagcgcgtgttgtgtattgcggatgatga

SEQ ID NO: 485373 - DNA, 75 bp, synthetic construct
  source 1..75: mol_type = other DNA
aggcagcaggcagagaaaaagaataaagacgcgacagttcagcctgataaaaaagacgatacaaataccgctggc

SEQ ID NO: 485374 - DNA, 75 bp, synthetic construct
  source 1..75: mol_type = other DNA
cccaaaccagttctctaatgcggctaactccattctggttaacatggtgtcgggctactacagaatgtataagag

SEQ ID NO: 485375 - DNA, 75 bp, synthetic construct
  source 1..75: mol_type = other DNA
tggatgactttgccgaattgcaaaaagaggtctttggtccggtgctgcatgtggtgcgttacaaccgtaaccagc

SEQ ID NO: 485376 - DNA, 75 bp, synthetic construct
  source 1..75: mol_type = other DNA
gtagtaatagatgtgctggcctcagcgttcgacagtgcgggccagcgttgttcggcactgcgtgtgctgtgcctg

SEQ ID NO: 485377 - DNA, 75 bp, synthetic construct
  source 1..75: mol_type = other DNA
agatgtcgcccgttattaaccctgcggaaccgaaagatattgtgggctatgtgcgtgaagccacgccgcgtgagg

SEQ ID NO: 485378 - DNA, 75 bp, synthetic construct
  source 1..75: mol_type = other DNA
tttctggctcattccggaaaccaaaaatgtcacgctggaacatatcgagcgcaaactgatggcaggcgaaaagtt

SEQ ID NO: 485379 - DNA, 75 bp, synthetic construct
  source 1..75: mol_type = other DNA
ggtagataaagcagggcgtaagccggctctgaaaattggtttcagcgtgatggcgttaggcactctggtgctggg

SEQ ID NO: 485380 - DNA, 75 bp, synthetic construct
  source 1..75: mol_type = other DNA
tgctgtatccgggagtgaagcagtcagacctcagtgaagagcagaagcagacgataagtacgctggcaactgtgt

SEQ ID NO: 485381 - DNA, 75 bp, synthetic construct
  source 1..75: mol_type = other DNA
cgctgacctcgttatcactatcaacaaaacggaagaagaagaagcgaaaggcgaagcgcgtctttacttcgctgg

SEQ ID NO: 485382 - DNA, 75 bp, synthetic construct
  source 1..75: mol_type = other DNA
cacctccgcaagtgagcgattgaaagcgcgtgaatatgaggcttcagaggagtatgtgccaaacagcattacaac

SEQ ID NO: 485383 - DNA, 75 bp, synthetic construct
  source 1..75: mol_type = other DNA
aagcgaccggcatttacgattactttgcagaatcagcggagcgttacaaggcccgtgagtacgaagcgtccgacg

SEQ ID NO: 485384 - DNA, 75 bp, synthetic construct
  source 1..75: mol_type = other DNA
ctgtatatcgaacgttcgctgagtgtgaataccgctgccgctggcggtaacgccagtttaatgacgatcggttaa

SEQ ID NO: 485385 - DNA, 75 bp, synthetic construct
  source 1..75: mol_type = other DNA
cgccccgcagctcgtttcaggtgctgcgggatgtgacctttggcctgcttatccgtgaactgaaaacacgatttg

SEQ ID NO: 485386 - DNA, 75 bp, synthetic construct
  source 1..75: mol_type = other DNA
cgcccggaaacagaagccgtttccatgttgctggaacaagctcgcctgccacaccccgttgcagaacaggcgcat

SEQ ID NO: 485387 - DNA, 75 bp, synthetic construct
  source 1..75: mol_type = other DNA
agcaggcgattttttcttatcttgaacaactggaaaacggcaatgcgctaccagagttgcctgcgctgctttctg

SEQ ID NO: 485388 - DNA, 75 bp, synthetic construct
  source 1..75: mol_type = other DNA
tttacaggtcggtgaacatgaactgacgtttatcccgaccgtaaaagcctacaacgacctgcagaacgatttcat

SEQ ID NO: 485389 - DNA, 75 bp, synthetic construct
  source 1..75: mol_type = other DNA
tgctggctatttgccattcatgttttttaataaagtggtcagccagttaaaatcagcagttaatgccaatatggg

SEQ ID NO: 485390 - DNA, 75 bp, synthetic construct
  source 1..75: mol_type = other DNA
agttatcggctggggtatgcctgggcgctgctggatccgctgttgatgattggtctgtttagcgcaatttttggg

SEQ ID NO: 485391 - DNA, 75 bp, synthetic construct
  source 1..75: mol_type = other DNA
taccggaactgatcgagcagattaacgcttccggctatggcctgacgctcggtgtccatacacgtattgatgaaa

SEQ ID NO: 485392 - DNA, 75 bp, synthetic construct
  source 1..75: mol_type = other DNA
actggcggcaggtaacagcgtactggcaaaaccggcagaacaaacgccgctgatagccgcgcaagggatcgccat

SEQ ID NO: 485393 - DNA, 75 bp, synthetic construct
  source 1..75: mol_type = other DNA
gatgcagagtatccggtcgatgcacagttgaaagccgcattgactcagccactgaatgcactgcgggaatgggcg

SEQ ID NO: 485394 - DNA, 75 bp, synthetic construct
  source 1..75: mol_type = other DNA
ttgcaacgcacaacgcccacacgctggcggcgatttatcaactggcaggtcaaaactactatccgggtcagtacg

SEQ ID NO: 485395 - DNA, 75 bp, synthetic construct
  source 1..75: mol_type = other DNA
caaactggtttctacccataacgaagccagcctctctcgttcgctgaatcgcattatcggtaagagtggcgaacc

SEQ ID NO: 485396 - DNA, 75 bp, synthetic construct
  source 1..75: mol_type = other DNA
gttttgcccgtggcgaaagcaatatcctgctggaacggctgtatatcgagcgttcgctgagtgtgaataccgctg

SEQ ID NO: 485397 - DNA, 75 bp, synthetic construct
  source 1..75: mol_type = other DNA
cgcaacgtgcggtggagtgatgactcccggcgagagtatgaatggtcacaacggaaaggtaacacggacaatatg

SEQ ID NO: 485398 - DNA, 75 bp, synthetic construct
  source 1..75: mol_type = other DNA
atgtgtggggctatgcagaatgtgacctctgtgaagccaggggggcatgggcaccatcagttgctgcggcggctg

SEQ ID NO: 485399 - DNA, 75 bp, synthetic construct
  source 1..75: mol_type = other DNA
ggcgtttatctgctgaccgacttcgaccagctcgcccgccagcttctgctggcctctcatatcgccgtcatctcc

SEQ ID NO: 485400 - DNA, 75 bp, synthetic construct
  source 1..75: mol_type = other DNA
cgaagctgttcaatcaggcgggatatgacactgcctatattggaaagtggcacctggcagatctggatgaaaaac

SEQ ID NO: 485401 - DNA, 75 bp, synthetic construct
  source 1..75: mol_type = other DNA
catgcgcggatccgtgaaaaattacgtcaggatattggccgcaaaatgacggcgattggtgaagtcctgcccgtc

SEQ ID NO: 485402 - DNA, 75 bp, synthetic construct
  source 1..75: mol_type = other DNA
aagcgaaagcgacaaactggcggcctttaacgatccacaaaaccgttacgcattttgtctcacctgcgccaacgt

SEQ ID NO: 485403 - DNA, 75 bp, synthetic construct
  source 1..75: mol_type = other DNA
gtttgattctaatgagattgataacgatctctctttcgtcgatgccactgtttgtgattactacggcatcaataa

SEQ ID NO: 485404 - DNA, 75 bp, synthetic construct
  source 1..75: mol_type = other DNA
ctgacaaatgggacgtaatagttgccgtaattaagcgtgctcacgaatacgggaaaagaatcgttattgttgatg

SEQ ID NO: 485405 - DNA, 75 bp, synthetic construct
  source 1..75: mol_type = other DNA
cggtaactgttacccggtcgataaagttattcacatgaataataacgaagtcccggcaggattaaaaacagcacc

SEQ ID NO: 485406 - DNA, 75 bp, synthetic construct
  source 1..75: mol_type = other DNA
tcgtggacattgccagaaaaacaatcgagaagcgcatgacactggataaggatgtgctgatttctgttgaaaatg

SEQ ID NO: 485407 - DNA, 75 bp, synthetic construct
  source 1..75: mol_type = other DNA
tacaaaactctttaccaataacttaccggattcagaaaactgatgaggggaaaggtcagttctatataaacgtat

SEQ ID NO: 485408 - DNA, 75 bp, synthetic construct
  source 1..75: mol_type = other DNA
tgcaaaattctctaccaatcacctaccggattcagaaaactgatgagggtaaaggtccgttttatataaacgtaa

SEQ ID NO: 485409 - DNA, 75 bp, synthetic construct
  source 1..75: mol_type = other DNA
cggtaactgttatccggtcgataaagttattcaccaggataataacgaaatcccggcaggacttaaaacagcacc

SEQ ID NO: 485410 - DNA, 75 bp, synthetic construct
  source 1..75: mol_type = other DNA
gatattccgcctgacggagatcctagattctacgtcagtacttcaaaaagcataatcaaagccttgataaatatg

SEQ ID NO: 485411 - DNA, 75 bp, synthetic construct
  source 1..75: mol_type = other DNA
tttactgaagatgccattaacaagagaaaacacgaacgggagctattaaataaaatatgcattgtttcaatgctg

SEQ ID NO: 485412 - DNA, 75 bp, synthetic construct
  source 1..75: mol_type = other DNA
tgactgttttttttgtttctggtgaaccgattgatcttgttattgacatacatgactcaatggaagaatgcatga

SEQ ID NO: 485413 - DNA, 75 bp, synthetic construct
  source 1..75: mol_type = other DNA
tgaggatattcctgttgaggaagcgactgccgaggcgcgaaagcatcagagcgcacaaccgaccgtcgccaaaga

SEQ ID NO: 485414 - DNA, 75 bp, synthetic construct
  source 1..75: mol_type = other DNA
tcatcattccggtgattttggtgtacaccttctggagttactatgtgtttcgcggcaaagtgcaacatggcgagg

SEQ ID NO: 485415 - DNA, 75 bp, synthetic construct
  source 1..75: mol_type = other DNA
attaccaaagctggcgagacgaaagtcttccgggtgttcaccagtaatgctggtgacatcgatatcttaccaacg

SEQ ID NO: 485416 - DNA, 75 bp, synthetic construct
  source 1..75: mol_type = other DNA
ggcgcatttcattacccagtgatgcgccgatgatggatttacccggcgagcaactgatcgactggggcggggcgt

SEQ ID NO: 485417 - DNA, 75 bp, synthetic construct
  source 1..75: mol_type = other DNA
gcagcgcgtgaactgctgggtggcgaagaggtcgctggtcagttctggcagcaattgcgcgaacaacaattgccg

SEQ ID NO: 485418 - DNA, 75 bp, synthetic construct
  source 1..75: mol_type = other DNA
atgaataccacatttgcacttgttctgacggtttttcttgtttccggtgaaccagttgacatggttactggcgta

SEQ ID NO: 485419 - DNA, 75 bp, synthetic construct
  source 1..75: mol_type = other DNA
cacaggacaatgcaggagtgtttgactgcagcaaccgaacagaaaattcccggtaactgttacccggtcgataaa

SEQ ID NO: 485420 - DNA, 75 bp, synthetic construct
  source 1..75: mol_type = other DNA
atacgtctgaaggttgttttgatattggcgttctgctcagtaaccgggagtttacggaagatgccattaagatga

SEQ ID NO: 485421 - DNA, 75 bp, synthetic construct
  source 1..75: mol_type = other DNA
atgctacgcgagtgtgattacagccaggcgctgctggagcaggtgaatcaggcaattagcgataaaacgccgctg

SEQ ID NO: 485422 - DNA, 75 bp, synthetic construct
  source 1..75: mol_type = other DNA
tatcgaagctggtcagaacgaagttgataacaacggtgaccatgttgcagctgcaaccggtaactacaaagttcg

SEQ ID NO: 485423 - DNA, 75 bp, synthetic construct
  source 1..75: mol_type = other DNA
aatttaagagaatgcctgccaatagaaaattcaagaaatataaggatccgaaagaatagcaaatcaggttgcaga

SEQ ID NO: 485424 - DNA, 75 bp, synthetic construct
  source 1..75: mol_type = other DNA
ttgcactcgatacgcaacagctgcgtgaacaggtgaccaacggcgttttgggagagatttacgttaccaccgccc

SEQ ID NO: 485425 - DNA, 75 bp, synthetic construct
  source 1..75: mol_type = other DNA
gacgctgatgcaacgggaactggccgacgacaaccgtcatttgcgcagcatggaagcctttatcaatcacgtaca

SEQ ID NO: 485426 - DNA, 75 bp, synthetic construct
  source 1..75: mol_type = other DNA
taaaaatagccatcgtcacgctgatcctgacgcaattgatgaacctggcgtttatcggcccgttgaaacatgccg

SEQ ID NO: 485427 - DNA, 75 bp, synthetic construct
  source 1..75: mol_type = other DNA
tgagtggtcactgggtactatgccctggcgtttactgcgtttaatggcggtcgtgctggcgggaattgccgcgta

SEQ ID NO: 485428 - DNA, 75 bp, synthetic construct
  source 1..75: mol_type = other DNA
gctggcatgctcgctgcaccgtgggtgatcatggtgaccgcgccaggcttcgctgacacagctgacaaatttgcc

SEQ ID NO: 485429 - DNA, 75 bp, synthetic construct
  source 1..75: mol_type = other DNA
atgaatacagcatacgcactcgttctgacagtttttcttaatacaggcgaaccacttgatcttattgttgatata

SEQ ID NO: 485430 - DNA, 75 bp, synthetic construct
  source 1..75: mol_type = other DNA
aatgaaagtgttgccgcgaccgcgcgctaccttgagcctgcggcgggaaatcagcctacaagaagccatgagtga

SEQ ID NO: 485431 - DNA, 75 bp, synthetic construct
  source 1..75: mol_type = other DNA
atcattaccggcactggaaaacatctgcgctttggtggcgaagtgatgaaaaacgttgccggatacgatctctcg

SEQ ID NO: 485432 - DNA, 75 bp, synthetic construct
  source 1..75: mol_type = other DNA
tgaacaggtgaccaacggcgttttgggtgagatttacgtcacgaccgcccgcgccctgcgtcgctgcggcgttcc

SEQ ID NO: 485433 - DNA, 75 bp, synthetic construct
  source 1..75: mol_type = other DNA
gctgctggcggtaaaacctgacgtggtaagcgtctgttcacctaaccgttttcattacgagcataccctgatggc

SEQ ID NO: 485434 - DNA, 75 bp, synthetic construct
  source 1..75: mol_type = other DNA
gttagcgtctgctcacctaaccgttttcattacgaacataccctgatggcactggaagcgggctgccatgtgatg

SEQ ID NO: 485435 - DNA, 75 bp, synthetic construct
  source 1..75: mol_type = other DNA
ttgttgttgcggggatcgcggcatactttgccgcgctggcggtgctgggcttcaaagttaaagagtttgcccgtc

SEQ ID NO: 485436 - DNA, 75 bp, synthetic construct
  source 1..75: mol_type = other DNA
gcctgaaaccgccacgcgtataggcgagaaactgtcgctgaaagaactcggtcgtgactataagctggtgctgaa

SEQ ID NO: 485437 - DNA, 75 bp, synthetic construct
  source 1..75: mol_type = other DNA
atcttgccaacgggattttgtggctattgttgatggttatctttttgaaagataaacgggtcggaaattcacgcg

SEQ ID NO: 485438 - DNA, 75 bp, synthetic construct
  source 1..75: mol_type = other DNA
tgatgctggcaggcgtggtgtggtttatcgtcacctgtctggcaatattgctggcgcaaaacattgaacaattca

SEQ ID NO: 485439 - DNA, 75 bp, synthetic construct
  source 1..75: mol_type = other DNA
gacctgaccaacgaccgtaccaacgatactaccaagtcaaactacggttatggcttaatcgcaatgaactctgat

SEQ ID NO: 485440 - DNA, 75 bp, synthetic construct
  source 1..75: mol_type = other DNA
gggtgtactaatcaacggggagcaggtcacggtaactacaaagttcgtatcgacaacgctactggtgctggttct

SEQ ID NO: 485441 - DNA, 75 bp, synthetic construct
  source 1..75: mol_type = other DNA
cgatatgagtaaaggtacggtttctgcggcgatggggatgttacaaatgctgatctttaccgtcggtatcgaaat

SEQ ID NO: 485442 - DNA, 75 bp, synthetic construct
  source 1..75: mol_type = other DNA
gattttgacgcaattgatgaaccttgcgtttatcgggccgttgaaacatgccggactgtcgctgtccattggtct

SEQ ID NO: 485443 - DNA, 75 bp, synthetic construct
  source 1..75: mol_type = other DNA
gaaagtgctggctccgggtttttattcccgccaggatattaaaacaccggtgaaaattgccatcgtcacgctgat

SEQ ID NO: 485444 - DNA, 75 bp, synthetic construct
  source 1..75: mol_type = other DNA
tgatcatggtgaccgcgccaggcttcgctgacactgccgacaaatttgccctgaccagccagctactaaagatta

SEQ ID NO: 485445 - DNA, 75 bp, synthetic construct
  source 1..75: mol_type = other DNA
ttgctggcgtggatcgcccagtcgccgattatcatcattaccggcgagcagttgagcagctatgaatatggcttg

SEQ ID NO: 485446 - DNA, 75 bp, synthetic construct
  source 1..75: mol_type = other DNA
tgctgcaagtgcctattttcggggcgttaattgcgggtaacttgctgctagcgcgtctgacctcgcgccgcaccg

SEQ ID NO: 485447 - DNA, 75 bp, synthetic construct
  source 1..75: mol_type = other DNA
gtcgctgctgcggcaacggttatctcatcgcacgcgtatttatggatgaccgccgggttaagtctttatgctttc

SEQ ID NO: 485448 - DNA, 75 bp, synthetic construct
  source 1..75: mol_type = other DNA
ttgcgctcgggacaattagcgcctctttcctgtggttctttggtctggctattctcgcagcctggctggcaccgc

SEQ ID NO: 485449 - DNA, 75 bp, synthetic construct
  source 1..75: mol_type = other DNA
agcaccctgaccggttctatcggtatcttcggcgtgatcactaccgtagaaaatagtctggattcgattggtgtt

SEQ ID NO: 485450 - DNA, 75 bp, synthetic construct
  source 1..75: mol_type = other DNA
gtcggagatagcccggcgtcgttgccgcagcatgaagacggtgtcatatcagaagtcgcagatataccggaagct

SEQ ID NO: 485451 - DNA, 75 bp, synthetic construct
  source 1..75: mol_type = other DNA
ttgttgagaactatcagcaaggctggctgcatatcgactgctcggcgacttaccgtaaagcgccggttgaacagt

SEQ ID NO: 485452 - DNA, 75 bp, synthetic construct
  source 1..75: mol_type = other DNA
cgaaaaccgcgctgggtaatgattatcacgcgctgttcagttttgacgatgcgcttgccggtcgcttgctggcga

SEQ ID NO: 485453 - DNA, 75 bp, synthetic construct
  source 1..75: mol_type = other DNA
tatttgcattagtttctgttaatgcaatggcggcagattgtgctaaaggtaaaattgagttttccaagtataatg

SEQ ID NO: 485454 - DNA, 75 bp, synthetic construct
  source 1..75: mol_type = other DNA
ttttttaagggtgaagtcagcgaaatgcagattctttatccggcacgttttcaatctagccaaaaccagaatggg

SEQ ID NO: 485455 - DNA, 75 bp, synthetic construct
  source 1..75: mol_type = other DNA
aacgtgaccgtttctggccgacaccgcaattcgcggccaggatctcgacgaagcgcgagccatggaagcgaaacg

SEQ ID NO: 485456 - DNA, 75 bp, synthetic construct
  source 1..75: mol_type = other DNA
gctatgtttactgcctcgtggagcaccagagtacggaaaacgcgtatatggcgttcagaatgctcaggtatgcgg

SEQ ID NO: 485457 - DNA, 75 bp, synthetic construct
  source 1..75: mol_type = other DNA
aaactccacaaccataacgacaccctatccaggcattgaatggcagctggaaggtatgaattgtagtggtaatca

SEQ ID NO: 485458 - DNA, 75 bp, synthetic construct
  source 1..75: mol_type = other DNA
ttagaattaacgtcaagccttcagcaccgtttcctgtcgggaaggtttcaacgtacctgaatgtttcgctaatat

SEQ ID NO: 485459 - DNA, 75 bp, synthetic construct
  source 1..75: mol_type = other DNA
cggcattcttgaagtgcagcctggcaacgtgaccgttctggccgacaccgcaattcgcggccaggatctcgacga

SEQ ID NO: 485460 - DNA, 75 bp, synthetic construct
  source 1..75: mol_type = other DNA
caccgcagccagttgccgtcaaactttgctgaactgaacaataccggcagcgcggcgtatccggcaggtgcaagc

SEQ ID NO: 485461 - DNA, 75 bp, synthetic construct
  source 1..75: mol_type = other DNA
atggaaaaaacagaaaacaaaccggttgcaattggtgctgtggctgttccgtttaagtttgaactgtcacaactg

SEQ ID NO: 485462 - DNA, 75 bp, synthetic construct
  source 1..75: mol_type = other DNA
gtcgcgccacgacgcagtggtttggtgagtcaatgctggaagcaacagaagatgatcgtcatccgggttgtccgg

SEQ ID NO: 485463 - DNA, 75 bp, synthetic construct
  source 1..75: mol_type = other DNA
gatgatcgttatccaggctgccctgtttttgcctgtgttgatttgccagaaggcgcggtacttgaagacgacaaa

SEQ ID NO: 485464 - DNA, 75 bp, synthetic construct
  source 1..75: mol_type = other DNA
aaataaaaatcttcatctttttattttcatgcatctctattatatttttattactgcatgaaaataatggaatat

SEQ ID NO: 485465 - DNA, 75 bp, synthetic construct
  source 1..75: mol_type = other DNA
tgatttttatttttctattactttactatgtttctaatcagagacaaagttatctcttaattctttcattcgcgt

SEQ ID NO: 485466 - DNA, 75 bp, synthetic construct
  source 1..75: mol_type = other DNA
tgaatcaatgctggaagcaacagaagatgctcgtcatccgggctgtccagtatttgccttcatgaaattaccgta

SEQ ID NO: 485467 - DNA, 75 bp, synthetic construct
  source 1..75: mol_type = other DNA
gtagattttaatgtgtttaatggcacgggggaggagttgcaggcattcgttcatgggattaaagaaacgccttaa

SEQ ID NO: 485468 - DNA, 75 bp, synthetic construct
  source 1..75: mol_type = other DNA
tcaatgaatatccgtggtgggtggctcactattatcaacgtcgtccggacaatgacggcatggcctggcgcttct

SEQ ID NO: 485469 - DNA, 75 bp, synthetic construct
  source 1..75: mol_type = other DNA
cggtaaaaaagttgaagtgatgaacactgatgccgaagggcgtctggtgctggccgatggcctgattgatgccag

SEQ ID NO: 485470 - DNA, 75 bp, synthetic construct
  source 1..75: mol_type = other DNA
tcgaaaaaagtacggggaaaaagccgattatttactcaggagccgtttttttatcacaccaatctggcgggctat

SEQ ID NO: 485471 - DNA, 75 bp, synthetic construct
  source 1..75: mol_type = other DNA
ttttctattcgacagcaattcagattaaagactacatccacttctacggttatcgcccggtcaaatcttttgcta

SEQ ID NO: 485472 - DNA, 75 bp, synthetic construct
  source 1..75: mol_type = other DNA
cgcggggcatatcactatttttctccgtcggtctcagcttccgttcaggcgcgattatttctgcaaacggtggat

SEQ ID NO: 485473 - DNA, 75 bp, synthetic construct
  source 1..75: mol_type = other DNA
atgcgcctgcgtaaagcgattaaagaaggcaaagcagcggatgtcagttttaaactcccaggtgcgccctttacg

SEQ ID NO: 485474 - DNA, 75 bp, synthetic construct
  source 1..75: mol_type = other DNA
ggcgcacaacactttcctgcattctggggacgctgttctggctgtggaccggatggacctctggcagtggtgcaa

SEQ ID NO: 485475 - DNA, 75 bp, synthetic construct
  source 1..75: mol_type = other DNA
acctggttcgacgcaccacggcgctacaaggtatgcgcagcaacctgaatatggaatcttcccgttgggcgcgag

SEQ ID NO: 485476 - DNA, 75 bp, synthetic construct
  source 1..75: mol_type = other DNA
agaatacgcgcccggaattgatcactgatactttccgcgaattttttgacacgccggtagaaaccgcgcaggacg

SEQ ID NO: 485477 - DNA, 75 bp, synthetic construct
  source 1..75: mol_type = other DNA
aggggcagggcttcgttcagcctgaagccagccagagcgatatattgattcgccacaaagcagagtcgcgcattg

SEQ ID NO: 485478 - DNA, 75 bp, synthetic construct
  source 1..75: mol_type = other DNA
cacagaaacaactggcgaagtatatccagcaagttgacgaccaggtaaataaagaactggaaaaagacctgaaag

SEQ ID NO: 485479 - DNA, 75 bp, synthetic construct
  source 1..75: mol_type = other DNA
gatattaaaagcctgcggtgcggtggattacttctgccagcatggccacggtttgatctctaaaaagagtgtgga

SEQ ID NO: 485480 - DNA, 75 bp, synthetic construct
  source 1..75: mol_type = other DNA
gagcagtaacattgagttagccagtgccgaagttctgaaacaaggcagatggaaaattatcgccaccatgttggc

SEQ ID NO: 485481 - DNA, 75 bp, synthetic construct
  source 1..75: mol_type = other DNA
atgaacgaccagcaaattgaaaaagaaatcgcagccaagggtaagacggcggctcgcgttactcctgaacacatt

SEQ ID NO: 485482 - DNA, 75 bp, synthetic construct
  source 1..75: mol_type = other DNA
cggcgctggtgatgacctggtgcctgtcatatatcgaacgctgggtggacagcattacaccggcggtgactaaaa

SEQ ID NO: 485483 - DNA, 75 bp, synthetic construct
  source 1..75: mol_type = other DNA
ccattcagccggaaccattgcttacgccgcagtttgccgtcgaacgttgtagcgagatcgttatcggtattgtgt

SEQ ID NO: 485484 - DNA, 75 bp, synthetic construct
  source 1..75: mol_type = other DNA
accgtgatccacttcgccgggctgaaagccgttggcgaatcggtacaaaaaccgctggaatattacgacaacaat

SEQ ID NO: 485485 - DNA, 75 bp, synthetic construct
  source 1..75: mol_type = other DNA
ttgcacttggggcggctatgatcctaccgctcggtccacaaaatgcttttgtgatgaatcagggcattcgtcgtc

SEQ ID NO: 485486 - DNA, 75 bp, synthetic construct
  source 1..75: mol_type = other DNA
ataaccaggacgatatcgataaagccattaccactcaaactaatacttgggctagtaataatcaatccatcctga

SEQ ID NO: 485487 - DNA, 75 bp, synthetic construct
  source 1..75: mol_type = other DNA
aggtacagatgatcgccattggcggcgcgattggtacgggtttgtttttaggcgcgggagcccgactgcaaatgg

SEQ ID NO: 485488 - DNA, 75 bp, synthetic construct
  source 1..75: mol_type = other DNA
gaataaattaccggatttacggggtgagtttattcgcggctgggatgacgggcggggaattgattcagggcgttc

SEQ ID NO: 485489 - DNA, 75 bp, synthetic construct
  source 1..75: mol_type = other DNA
gcagcattttcttctgaaatgtaccccaaactggcaaaagcctaccccgcgaataaattaccggatttacggggt

SEQ ID NO: 485490 - DNA, 75 bp, synthetic construct
  source 1..75: mol_type = other DNA
tgtgcgcaaacgcgttgctgaaattcacagcactgcgccagtcgtcgaggaagatgaagaacaacaggaaattgt

SEQ ID NO: 485491 - DNA, 75 bp, synthetic construct
  source 1..75: mol_type = other DNA
tgccggagaatgtaaagatccgcagaccatggtgcctaaagcgattaacagtgtgatttggcgtattggcctgtt

SEQ ID NO: 485492 - DNA, 75 bp, synthetic construct
  source 1..75: mol_type = other DNA
tcggcagcattatgaacattgtggtgctgaccgctgccctctccagcctgaactcaggtctgtactgcaccgggc

SEQ ID NO: 485493 - DNA, 75 bp, synthetic construct
  source 1..75: mol_type = other DNA
aagtgaaagtgacaagctggccgcgtttaatgacccacaaaaccgttatgcgttttgcctgacctgcgccaacat

SEQ ID NO: 485494 - DNA, 75 bp, synthetic construct
  source 1..75: mol_type = other DNA
tctggtgcagagcaggaggtcatgttccgccagtggcatcagcccggtctgcgaggcctgttggattttaccaaa

SEQ ID NO: 485495 - DNA, 75 bp, synthetic construct
  source 1..75: mol_type = other DNA
gcaaggttatctggttctgaccacttatagtgcggaaaccagtctgggtatgctggtggcgttatcgctactgcg

SEQ ID NO: 485496 - DNA, 75 bp, synthetic construct
  source 1..75: mol_type = other DNA
accccaccaataaattaccggatttacggggtgagtttattcgtggctgggatgatgggcggggaattgattcag

SEQ ID NO: 485497 - DNA, 75 bp, synthetic construct
  source 1..75: mol_type = other DNA
atgcgcctgcgtaaagcaattaaagaaggcaaagcagcggatgtcagttttaaactgcctggcgcgcccttcact

SEQ ID NO: 485498 - DNA, 75 bp, synthetic construct
  source 1..75: mol_type = other DNA
ccgtacatcggcagcattatgaacattgtggtgctgaccgctgccctctccagcctgaattcaggtctgtactgc

SEQ ID NO: 485499 - DNA, 75 bp, synthetic construct
  source 1..75: mol_type = other DNA
tgtttccactatgacccgctggccaaccgcgtccagtgctccatcaccacgctggccattgagtgcggactggcg

SEQ ID NO: 485500 - DNA, 75 bp, synthetic construct
  source 1..75: mol_type = other DNA
caggaaaactctccatcacccgtgccacccgggcactgacgttcctgtcagagctggggctgattagctaccaga

SEQ ID NO: 485501 - DNA, 75 bp, synthetic construct
  source 1..75: mol_type = other DNA
aaaaatggaatgttaggctaggtttccatggcaagagtaaacacttcggatgctttgatgatctggagttagcgg

SEQ ID NO: 485502 - DNA, 75 bp, synthetic construct
  source 1..75: mol_type = other DNA
ttgcaacagtgccaaaatccgaatccggtgttcacaccccgtgaaggtgccggaacgctgaagttctgcgaaaaa

SEQ ID NO: 485503 - DNA, 75 bp, synthetic construct
  source 1..75: mol_type = other DNA
aaagcgtgcccgtgcgcgtcgtgatgcgaacagggaacgccaggatatagttaccctggtgaaacggcagctgac

SEQ ID NO: 485504 - DNA, 75 bp, synthetic construct
  source 1..75: mol_type = other DNA
cccgggtatggatgaactgatagcgaaagcctggcgttttgtgcgtgagcgtttccgcagttaccagacagagct

SEQ ID NO: 485505 - DNA, 75 bp, synthetic construct
  source 1..75: mol_type = other DNA
gcgaagtggagcgtcgagtgaaggagcgcatgattctgtcacgtaaccgcaattacagccggctgaccacagctt

SEQ ID NO: 485506 - DNA, 75 bp, synthetic construct
  source 1..75: mol_type = other DNA
catcgaagaagacgcccagcgccgcgatttcactatcaacagcctgtattacagcgtagcggattttaccgtccg

SEQ ID NO: 485507 - DNA, 75 bp, synthetic construct
  source 1..75: mol_type = other DNA
gatgaagaaccgtcaccgcgtcgtcgtactcgtcgtccacgcaaacgcgcaccgcgtcgtgagggtaccgcatga

SEQ ID NO: 485508 - DNA, 75 bp, synthetic construct
  source 1..75: mol_type = other DNA
ttcgctggtcctaaaaactaccagtatgaaatgagcgacgagccggaaatggcagatattcagccgatccatgtt

SEQ ID NO: 485509 - DNA, 75 bp, synthetic construct
  source 1..75: mol_type = other DNA
gctgatgcaaattcccggcggctggctgcttgataagtttggctcgaaaaaagtttacacctacagcctcttttt

SEQ ID NO: 485510 - DNA, 75 bp, synthetic construct
  source 1..75: mol_type = other DNA
ccccgtgaaggtgccggaacgctgaagttctgcgaaaaactgatggaaaaggcggtgggcttcacctcccgtttt

SEQ ID NO: 485511 - DNA, 75 bp, synthetic construct
  source 1..75: mol_type = other DNA
acaccggcactgtttgctgctctcgatgtgtctgaggaggcagtggcttccgcacgccgcagccgcgtggaatgg

SEQ ID NO: 485512 - DNA, 75 bp, synthetic construct
  source 1..75: mol_type = other DNA
tggcatcatccgggtctggtgttgattcatgccgagggagtagaaacgcctcagcctgaactgaccgaggcggta

SEQ ID NO: 485513 - DNA, 75 bp, synthetic construct
  source 1..75: mol_type = other DNA
ccggttttaaatacgaatcttcccgccagttctgttcaaaatttgtctttgatatttataaagaggcgctatgta

SEQ ID NO: 485514 - DNA, 75 bp, synthetic construct
  source 1..75: mol_type = other DNA
gtgaaaattaattacccttctgaatatgaagttggcgatattgtatttacatgtataggtgctgcattatttggt

SEQ ID NO: 485515 - DNA, 75 bp, synthetic construct
  source 1..75: mol_type = other DNA
ctcccgttttgattttgccgcgcatgttgcgtatgcacgttcgcgtggcctgcgccggcgtatgccgccgatgct

SEQ ID NO: 485516 - DNA, 75 bp, synthetic construct
  source 1..75: mol_type = other DNA
gaaatcgcggaagggcgtttccggggaagcctggaggctgtgaagcgcgaaatcgaccgtcgcgtgaaggaacgc

SEQ ID NO: 485517 - DNA, 75 bp, synthetic construct
  source 1..75: mol_type = other DNA
tacggtgttcgccgcctcgcaggaggtttaaccgcagagcaaaaacttgctctggtcgaaaaggtccccggacgg

SEQ ID NO: 485518 - DNA, 75 bp, synthetic construct
  source 1..75: mol_type = other DNA
cacgcgtgccctgacgttcctggcagagctggggctgattacctaccagacggaatatgacccgcttatcggctg

SEQ ID NO: 485519 - DNA, 75 bp, synthetic construct
  source 1..75: mol_type = other DNA
acccgctggccaaccgcgtccagtgctccatcaccactctggccattgagtgcggactggcgacggagtctgctg

SEQ ID NO: 485520 - DNA, 75 bp, synthetic construct
  source 1..75: mol_type = other DNA
ccggtgatgcctgccaatgaatctttccagatgattgaggcgaccaaggggatcaacagttactacctgaccagc

SEQ ID NO: 485521 - DNA, 75 bp, synthetic construct
  source 1..75: mol_type = other DNA
taaaacagttacgccagcgagtttgtggctccatccgggcctggaattaattcatgcgcaaggagtagaaacgcc

SEQ ID NO: 485522 - DNA, 75 bp, synthetic construct
  source 1..75: mol_type = other DNA
ttggagtcattacctaaacgttcttctaatcaacgctatgctataaagcgattagacgctgggctgacagaacaa

SEQ ID NO: 485523 - DNA, 75 bp, synthetic construct
  source 1..75: mol_type = other DNA
ggctaacagaacaacaaaaacaacgaattgttgaacaggttccctcccggctacgcaaactttaccacaccggtt

SEQ ID NO: 485524 - DNA, 75 bp, synthetic construct
  source 1..75: mol_type = other DNA
cattacccgctacttcacggaaaatggcgacagcccgatggagcggatcattgagcaggtactgaagaacaccga

SEQ ID NO: 485525 - DNA, 75 bp, synthetic construct
  source 1..75: mol_type = other DNA
gctatccagcagtggttcgcagaaaagcatccggtgccgttctactcctgcatttttgataacgagataacagat

SEQ ID NO: 485526 - DNA, 75 bp, synthetic construct
  source 1..75: mol_type = other DNA
aaagcaaacatttcaggttgatacggcgtatgtgccttatcttacccgacctggtcaaattcgctataaacttgt

SEQ ID NO: 485527 - DNA, 75 bp, synthetic construct
  source 1..75: mol_type = other DNA
atcgtagtccgctggcaaatttgtccgcgaatattgcatccctgcagaaaggatatgcgtctttcggcgtcagtg

SEQ ID NO: 485528 - DNA, 75 bp, synthetic construct
  source 1..75: mol_type = other DNA
gcgcagtggtgtggcgcatattccacagttgaaagattatccaacgcgcttcacatcgcccaccagcaggatgta

SEQ ID NO: 485529 - DNA, 75 bp, synthetic construct
  source 1..75: mol_type = other DNA
gagagcgcgccaatcaacgcgacggcggagatataaaccagtgcaggtgcgaaaccgtaaccctgcgccaggtac

SEQ ID NO: 485530 - DNA, 75 bp, synthetic construct
  source 1..75: mol_type = other DNA
atggaacatttcgacgtggcgattattggcctcggcccggcaggttcggcgttggcgcgaaagttagcagacaaa

SEQ ID NO: 485531 - DNA, 75 bp, synthetic construct
  source 1..75: mol_type = other DNA
agcgcaggtgcgggaacaaccactcatgactggtggccaaaacaactccgtgttgacctgttaaaccaacattca

SEQ ID NO: 485532 - DNA, 75 bp, synthetic construct
  source 1..75: mol_type = other DNA
cccattaccgtcaggtcaaaaacccgaacccggcattcacgccgcgtgaaggcaaaaagacactgccgttctgtc

SEQ ID NO: 485533 - DNA, 75 bp, synthetic construct
  source 1..75: mol_type = other DNA
gagctggggctgatcacctatcagacggaatatgacccacagatcggctgtaatatcccgaccgatatcaccttc

SEQ ID NO: 485534 - DNA, 75 bp, synthetic construct
  source 1..75: mol_type = other DNA
gtgactgatcttcaacaaacgtattaccgtcaggtaaagaacccgaatccggtattcacaccccgtgaaggtgcc

SEQ ID NO: 485535 - DNA, 75 bp, synthetic construct
  source 1..75: mol_type = other DNA
ttggttctaactccgtcctgcgcgctgtggcagaagtttacgccagcagcgatgcccacgagaagtttgtgaaag

SEQ ID NO: 485536 - DNA, 75 bp, synthetic construct
  source 1..75: mol_type = other DNA
atccagaagctgcgccgattgaaaaccagggcttaggctggaaaagtgattttggcagcggcgttggcgcagacg

SEQ ID NO: 485537 - DNA, 75 bp, synthetic construct
  source 1..75: mol_type = other DNA
ggactggcgacagagtccggtgcaggaaaactctccatcactcgtgccacccgtgccctgacgttcctgtcagag

SEQ ID NO: 485538 - DNA, 75 bp, synthetic construct
  source 1..75: mol_type = other DNA
tcgctggcccgtcgattgtcgggcatgctctccgctgggctgcattttgatcacagtattatcaatgacccgaat

SEQ ID NO: 485539 - DNA, 75 bp, synthetic construct
  source 1..75: mol_type = other DNA
gcgtggtactggtggcgctcatttctccggtcatgctgggagggctggtatttagcggcaaatccttgcagccga

SEQ ID NO: 485540 - DNA, 75 bp, synthetic construct
  source 1..75: mol_type = other DNA
cgccctgtacaacctactcatcttccggtgccggaagctctggattttattaacgagaaaccgacccatgagtaa

SEQ ID NO: 485541 - DNA, 75 bp, synthetic construct
  source 1..75: mol_type = other DNA
gccatctttaactcggcgcaatatttctcgctggcgctcttttcgccgctgcttggctggctgactttcgcctgg

SEQ ID NO: 485542 - DNA, 75 bp, synthetic construct
  source 1..75: mol_type = other DNA
cgtgaaatagccgctgaaaataacgtcccgaccctcgaagcgccgccactggcgcgtgcgctgtatcgacatgcg

SEQ ID NO: 485543 - DNA, 75 bp, synthetic construct
  source 1..75: mol_type = other DNA
aaaacagaagctcccacacctcaccgacttgaaaaagcgcgggaagaggggcagatcccgcgctcccgtgagctg

SEQ ID NO: 485544 - DNA, 75 bp, synthetic construct
  source 1..75: mol_type = other DNA
gaagggcggtgcttttcgtaacgtgcgtgcagaagatctctccgctcatttaatgcgtagcctgctggcgcgtaa

SEQ ID NO: 485545 - DNA, 75 bp, synthetic construct
  source 1..75: mol_type = other DNA
cggttccggcctcgaagctggcgctgaaaaaagcggggctttctgccagcgatatcggcgtgtttgagatgaacg

SEQ ID NO: 485546 - DNA, 75 bp, synthetic construct
  source 1..75: mol_type = other DNA
ccggagtactctccatcacccgtgccacccgtgccctgacgtccctggctgagctgggtctgattacctaccaga

SEQ ID NO: 485547 - DNA, 75 bp, synthetic construct
  source 1..75: mol_type = other DNA
cccgctggccaaccgtgtccagcgttccatcaccaatctggctattgaatgcggactggccaccgagtcgaaaac

SEQ ID NO: 485548 - DNA, 75 bp, synthetic construct
  source 1..75: mol_type = other DNA
cggttaccgtcaatcgcttgtgtggttcatccatgcaggcactgcatgacgcagcacgaatgatcatgactggcg

SEQ ID NO: 485549 - DNA, 75 bp, synthetic construct
  source 1..75: mol_type = other DNA
atgtattaaagatctgggactaattgagcagattgacgagaagatcaacctcaacggtggcgcgatcgcgctggg

SEQ ID NO: 485550 - DNA, 75 bp, synthetic construct
  source 1..75: mol_type = other DNA
gaccgttctgtatttcaccgctaactatgtctctaccaaagatgcagtaaccacgggttacggtaacgctgaagt

SEQ ID NO: 485551 - DNA, 75 bp, synthetic construct
  source 1..75: mol_type = other DNA
cggttttgctcaatatttcgctacgcaatccatcgtgttgctggatagtctgacggctccggcgtggtatctggg

SEQ ID NO: 485552 - DNA, 75 bp, synthetic construct
  source 1..75: mol_type = other DNA
atgagcctggggacgctgatgattggtatcgcgccgacatatgcaacggcgggctattggggaacggcgacactg

SEQ ID NO: 485553 - DNA, 75 bp, synthetic construct
  source 1..75: mol_type = other DNA
ttggctaatatcaaatcagctaagaagcgcgccattcagtctgaaaaggctcgtaagcacaacgcaagccgtcgc

SEQ ID NO: 485554 - DNA, 75 bp, synthetic construct
  source 1..75: mol_type = other DNA
aaaattgtgagggcggtcatggatagtgatgataaacttattgttgtagacgcaaccaataacttagtttattgg

SEQ ID NO: 485555 - DNA, 75 bp, synthetic construct
  source 1..75: mol_type = other DNA
gactgccggcggggatggcggcctgaaaaatgacggcaccacggaatgggcgaccggtgaaaccggaaaaactat

SEQ ID NO: 485556 - DNA, 75 bp, synthetic construct
  source 1..75: mol_type = other DNA
ctctgaactgttgccgaaacggattcgggcattaggtttcgcgctggtttatagcattggcgtagcaatctttgg

SEQ ID NO: 485557 - DNA, 75 bp, synthetic construct
  source 1..75: mol_type = other DNA
atgaacgttaagtctgtgactgaggttgacgatgccgtggttgcccgtgtcagtgaagttctggaattcgcattt

SEQ ID NO: 485558 - DNA, 75 bp, synthetic construct
  source 1..75: mol_type = other DNA
aaaatgctccggtaaaaatgtggaccaaaggcgtgccggtagaagccgatgcgcgtcagcaacttattaataccg

SEQ ID NO: 485559 - DNA, 75 bp, synthetic construct
  source 1..75: mol_type = other DNA
atgacggcgatcgtaaatgaaacaatggacgtaaggaaaaagcccagcggtaagcgggtgatttttgcctcagcg

SEQ ID NO: 485560 - DNA, 75 bp, synthetic construct
  source 1..75: mol_type = other DNA
gcggtgtgccagtgatgttgttgatctctgaactgttgccgaaacggattcgggcattgggttttgcgctggttt

SEQ ID NO: 485561 - DNA, 75 bp, synthetic construct
  source 1..75: mol_type = other DNA
ttgcggcaggaggcgaagtcggtgcctcaatgtctttgttggttgaatcagctccggcaaatcgtcgcggctttt

SEQ ID NO: 485562 - DNA, 75 bp, synthetic construct
  source 1..75: mol_type = other DNA
aaaaacaatacgggtactctttatctgtccagttttaatcatgagcatgcacctgaatgccccatgtatcgtcag

SEQ ID NO: 485563 - DNA, 75 bp, synthetic construct
  source 1..75: mol_type = other DNA
gccgagttgcccattggtgtggtcaccgcaaccctgggagcgccggtgtttatctggttattgttaaaagcaggg

SEQ ID NO: 485564 - DNA, 75 bp, synthetic construct
  source 1..75: mol_type = other DNA
cgagatttcagcacgacaactcggcttgcctctgtggttctggcgcaatgtgttggtggctgcaacgggctggat

SEQ ID NO: 485565 - DNA, 75 bp, synthetic construct
  source 1..75: mol_type = other DNA
atgctgacacttgcccgccaacaacagcgacaaaatattcgctggttattatgcctgtcagttttgatgctgctg

SEQ ID NO: 485566 - DNA, 75 bp, synthetic construct
  source 1..75: mol_type = other DNA
tggtgacgaagccacctggggcggtatggtcgcctgcgggctggcagggccgcgtcgcccgtggagtggttcggt

SEQ ID NO: 485567 - DNA, 75 bp, synthetic construct
  source 1..75: mol_type = other DNA
aggtactgctggagcaggtgaatcaggcaattagcgataaaacgccgctggcgattcagggaagcaatagcaaag

SEQ ID NO: 485568 - DNA, 75 bp, synthetic construct
  source 1..75: mol_type = other DNA
gatgaaagtgttaccgcgaccgcgcgcctccctgagcctgcgtcgggaaatcagcctgcaagaagccatgaatga

SEQ ID NO: 485569 - DNA, 75 bp, synthetic construct
  source 1..75: mol_type = other DNA
ctaatccccgtatccggactaattatcgtgagtgtcttgatgccatacggcaggttacactgcagcaggagtata

SEQ ID NO: 485570 - DNA, 75 bp, synthetic construct
  source 1..75: mol_type = other DNA
aaatggctggataacgatcatccccttttgagaaacatatgtacggtgtttttatgcatctcaggtactgagata

SEQ ID NO: 485571 - DNA, 75 bp, synthetic construct
  source 1..75: mol_type = other DNA
tgtccagttttaatcatgagcatgcacctgaatgccccatgtatcgtcagttatccggaaatgaagaggaaacat

SEQ ID NO: 485572 - DNA, 75 bp, synthetic construct
  source 1..75: mol_type = other DNA
agggctgtgtgcgattgctggcgcgcttatcatcactttaatactcttacgtttcgcccgtcgtcatctttcgac

SEQ ID NO: 485573 - DNA, 75 bp, synthetic construct
  source 1..75: mol_type = other DNA
tcgcgcctggaaagagttgaaaaacagcgtgagcaggggcggcaatcgcgtatcaaagccgacgttcctactgtt

SEQ ID NO: 485574 - DNA, 75 bp, synthetic construct
  source 1..75: mol_type = other DNA
gtggatggaggaggacggcagcgtaagtctgcaagttcgtatgccgatcgttgactggcgtcgcctctgcaaaca

SEQ ID NO: 485575 - DNA, 75 bp, synthetic construct
  source 1..75: mol_type = other DNA
gcaagcgggttgctgtaatcgatatggatacccagggcaacgcctcttttaccctgaaacagttctcgtccggca

SEQ ID NO: 485576 - DNA, 75 bp, synthetic construct
  source 1..75: mol_type = other DNA
taaatcacttgcgaaaaatacagcttttatcgcacaatatctaaataaaaataattttattaccgatagtgtcaa

SEQ ID NO: 485577 - DNA, 75 bp, synthetic construct
  source 1..75: mol_type = other DNA
gggaaggaagacccggtctatgctgatgttattcctacaaagaatagaaggaagtcattattcaacgtttccaat

SEQ ID NO: 485578 - DNA, 75 bp, synthetic construct
  source 1..75: mol_type = other DNA
taaagccaattaaacccgttaggcccaaagctcggcctgtcactgatctaccgcgaaacagagatatctttgttg

SEQ ID NO: 485579 - DNA, 75 bp, synthetic construct
  source 1..75: mol_type = other DNA
ctaaagtttccgatttagcatttcttttattcaatttttctgaagaaaacaaacctgtagcgtttgaggcaattt

SEQ ID NO: 485580 - DNA, 75 bp, synthetic construct
  source 1..75: mol_type = other DNA
agatattttaaccctgttggtgctcatagttcgatgagcataggtgaagaccccagaggtatacctagcaattta

SEQ ID NO: 485581 - DNA, 75 bp, synthetic construct
  source 1..75: mol_type = other DNA
gcggcgcagagaaaaactcattgcggacgcgctgtaaatatcgccagaaatcatctggccttcaaggtactttga

SEQ ID NO: 485582 - DNA, 75 bp, synthetic construct
  source 1..75: mol_type = other DNA
cacccgggccctgacgttccttgcagagctgggactgatcacctaccagacggaatatgacccgcttattggctg

SEQ ID NO: 485583 - DNA, 75 bp, synthetic construct
  source 1..75: mol_type = other DNA
atgtgtctgaggtggcggtggcttccgcacggcgcagtcgtgtggaatgggaaaacagacagcgcaagaagcagg

SEQ ID NO: 485584 - DNA, 75 bp, synthetic construct
  source 1..75: mol_type = other DNA
tcaccctggtgaaacggcagctgacgcgtgaaatctcggaagggcgcttctctgccagtcgtgaggcggtaaaag

SEQ ID NO: 485585 - DNA, 75 bp, synthetic construct
  source 1..75: mol_type = other DNA
taacaagaaaaaagatacacctcaaaacccagtgaaaggtgataataaaggcattcccggtggcgaaggaggcga

SEQ ID NO: 485586 - DNA, 75 bp, synthetic construct
  source 1..75: mol_type = other DNA
acttttcctgcaatgacagagttatagtatctgcgagtacagagaagtcgcatggctggaaaacgaagtggcact

SEQ ID NO: 485587 - DNA, 75 bp, synthetic construct
  source 1..75: mol_type = other DNA
gaagcatgccagaagaaatgcaaaaagaatctatgggaaaaagctggtatcttaaaggaggaagaagtgcttact

SEQ ID NO: 485588 - DNA, 75 bp, synthetic construct
  source 1..75: mol_type = other DNA
cggtaccagcactcgataaaactgtcagagtctgcaattacctttttagctctccaggcgccaccttcagccaga

SEQ ID NO: 485589 - DNA, 75 bp, synthetic construct
  source 1..75: mol_type = other DNA
accaatgatacagagatttcacaagtggcttttggtgacgtttatatttctgaactgagaaatgaaaccaataaa

SEQ ID NO: 485590 - DNA, 75 bp, synthetic construct
  source 1..75: mol_type = other DNA
taattgttttagccccgcagataaaacggttaacctttcttccgtcactgcgacgcaacatttcgattatgattt

SEQ ID NO: 485591 - DNA, 75 bp, synthetic construct
  source 1..75: mol_type = other DNA
tgattgttactggtggaatgattagccatagtgccctggcaggaacaacgtctgcaaccttaacggtagacagca

SEQ ID NO: 485592 - DNA, 75 bp, synthetic construct
  source 1..75: mol_type = other DNA
tggaaaatcaagaagacagcagcacgtaaagccagccaggaaatgagagcactggcctatcatgtttttactaag

SEQ ID NO: 485593 - DNA, 75 bp, synthetic construct
  source 1..75: mol_type = other DNA
aaaattaaatctgccggaaatggtgaagcagttccgccataacctgcagcagctggcggacagtggctttgacgt

SEQ ID NO: 485594 - DNA, 75 bp, synthetic construct
  source 1..75: mol_type = other DNA
ggtgttcttgtgacacctgatttaatcggaaaatatatcagaccactgggtaatatacttaatcatgacgcgatt

SEQ ID NO: 485595 - DNA, 75 bp, synthetic construct
  source 1..75: mol_type = other DNA
agtcccggggaataaagcgtgcccgtgcgcgtcgtgatgcggacagggaacgtcaggatattgtcaccctggtga

SEQ ID NO: 485596 - DNA, 75 bp, synthetic construct
  source 1..75: mol_type = other DNA
gaaaacagacagcgcaaaaagcaggggctggataccctgggcatggatgaactgatagcgaaagcctggcgtttt

SEQ ID NO: 485597 - DNA, 75 bp, synthetic construct
  source 1..75: mol_type = other DNA
atcgggctatcctggcaccaattcgtttcagtgcaaaagtagttcgttatgagcgccgcaatgtcgacgctttta

SEQ ID NO: 485598 - DNA, 75 bp, synthetic construct
  source 1..75: mol_type = other DNA
tcgccctggtcttaaaggcgctttaaagtgcattaatagcggagacaccctggtagtgtggaaactggacaggct

SEQ ID NO: 485599 - DNA, 75 bp, synthetic construct
  source 1..75: mol_type = other DNA
gtgtgagctgcatcttaaatcaggtgtggtaaaactgttttcccccctcactccggaacttcttagggtgctcct

SEQ ID NO: 485600 - DNA, 75 bp, synthetic construct
  source 1..75: mol_type = other DNA
ccagtgctccatcaccacactggccattgagtgcggactggcgacggagtctgctgccggaaaactctccatcac

SEQ ID NO: 485601 - DNA, 75 bp, synthetic construct
  source 1..75: mol_type = other DNA
atgtctgcactttatgaaaaatcgcagctgacgaagatccttatttcctctgcgccagccaccaaagaaacgatg

SEQ ID NO: 485602 - DNA, 75 bp, synthetic construct
  source 1..75: mol_type = other DNA
ttcgtccgcgagggcgacaccgtggtggtgcatagcatggacaggttggcacgcaaccttgatgacctgcgccgc

SEQ ID NO: 485603 - DNA, 75 bp, synthetic construct
  source 1..75: mol_type = other DNA
tccgtgtcagtagcttcgatcaaaacccagaacggcaactggaacatatccaggtggacaaagttttcatcgaca

SEQ ID NO: 485604 - DNA, 75 bp, synthetic construct
  source 1..75: mol_type = other DNA
ggtacttgtgggcgttggcatcgctacctcggtggaaaccgccgcagtgctctcgcgtaaagccattttgcgccc

SEQ ID NO: 485605 - DNA, 75 bp, synthetic construct
  source 1..75: mol_type = other DNA
cttctggcaaggacacccagcgtcccgagctggaaaggctgctggccttcgtccgcgagggcgacaccgtggtgg

SEQ ID NO: 485606 - DNA, 75 bp, synthetic construct
  source 1..75: mol_type = other DNA
aatgaacacgatgattttcactatcagtatgtggatattcgtgctgaagggatcactaaagaggatctgcaacag

SEQ ID NO: 485607 - DNA, 75 bp, synthetic construct
  source 1..75: mol_type = other DNA
aacgagcgcgatgattttcactatcagtatgtggatattcgtgctgaagggatcactaaagaagatttacaacag

SEQ ID NO: 485608 - DNA, 75 bp, synthetic construct
  source 1..75: mol_type = other DNA
atggtagctctcttcggtcagggcaacgctgcacgcggctatcaactgggcgtcggggtattgtgcgccattgcc

SEQ ID NO: 485609 - DNA, 75 bp, synthetic construct
  source 1..75: mol_type = other DNA
caaaaggggatgataagtttatcaccaccgactatttgcaacagtgcccttttagcgacaaggcatccggcaagg

SEQ ID NO: 485610 - DNA, 75 bp, synthetic construct
  source 1..75: mol_type = other DNA
gcgtgcgcatcgagttcctgaaggagggcctggtgttcactggcgaggactcgccgatggccaacctgatgctgt

SEQ ID NO: 485611 - DNA, 75 bp, synthetic construct
  source 1..75: mol_type = other DNA
cagagctggagctacgcctggaagaaggactcaaccgtctggggattggtccacaagggctgaccggcaacagtt

SEQ ID NO: 485612 - DNA, 75 bp, synthetic construct
  source 1..75: mol_type = other DNA
atgatgagcgaaagtaataagcaacaggcagtgaataagttgacagagattgtcgctaactttaccgccatgatt

SEQ ID NO: 485613 - DNA, 75 bp, synthetic construct
  source 1..75: mol_type = other DNA
ggcctccagcgccgggatcatcagcctgctgtttatttttgtcgcctaccagccaggcgtggaaaaccagaccgc

SEQ ID NO: 485614 - DNA, 75 bp, synthetic construct
  source 1..75: mol_type = other DNA
gcgcgccctgatccgcgaacgtcagcgcgagggaatcgtgctggccaagcagcgcggtgcctaccggggacgaaa

SEQ ID NO: 485615 - DNA, 75 bp, synthetic construct
  source 1..75: mol_type = other DNA
cgagaagcattaaacgagctaagtgttgataacgatgatgctcatgcggaaatcatccaaaaaatggaactgcta

SEQ ID NO: 485616 - DNA, 75 bp, synthetic construct
  source 1..75: mol_type = other DNA
tgttagcgccaatcttgatgttgctggtggcaggctggtttcggttctatttggtgattaccgcgacgacttctt

SEQ ID NO: 485617 - DNA, 75 bp, synthetic construct
  source 1..75: mol_type = other DNA
ttatcccgatcgtggtgactttgtggctgtggttgggcgtatgcaagatatcagcgccgttcgtcaggtaaaagc

SEQ ID NO: 485618 - DNA, 75 bp, synthetic construct
  source 1..75: mol_type = other DNA
caaacaaaagcgatgatgaatcacaggcgaacgatgctgttaaccgctacaaactgctgaaaaaagatgcgcgta

SEQ ID NO: 485619 - DNA, 75 bp, synthetic construct
  source 1..75: mol_type = other DNA
gggctacttcctgtggcactgggcaaacaaggaaaagatcgtgattgtgcccgccaggcgctccgtctgctggtg

SEQ ID NO: 485620 - DNA, 75 bp, synthetic construct
  source 1..75: mol_type = other DNA
cgagcaccatttctggctggcgttacgcaatgaaacctttaccattgaatggcaaggggaaggcccgacatgtcg

SEQ ID NO: 485621 - DNA, 75 bp, synthetic construct
  source 1..75: mol_type = other DNA
atgctcgcgaacgcccggattatgacgtgccggttcatttgcgtaatgcgccgacgaaattaatgaaggaaatgg

SEQ ID NO: 485622 - DNA, 75 bp, synthetic construct
  source 1..75: mol_type = other DNA
tggcaataccgtttcacaagcctttcaggaagtcgtcagcctgctgccgggagatatgcagcccgccctgcccgt

SEQ ID NO: 485623 - DNA, 75 bp, synthetic construct
  source 1..75: mol_type = other DNA
tgccatcgcgggtgtgctggtacatccgagttttattgaactgatggcgaaagcggcccagggtgaacatgtcga

SEQ ID NO: 485624 - DNA, 75 bp, synthetic construct
  source 1..75: mol_type = other DNA
ggcaaaagttaccgaacagagggttcccattgctgatgggccttacaaaaacattattgctgactatggtccaca

SEQ ID NO: 485625 - DNA, 75 bp, synthetic construct
  source 1..75: mol_type = other DNA
ttaatggcacggtggtgcgtttgcatcagggcgattacgcccaacagcgcgactacggtaacgacccgctaccgc

SEQ ID NO: 485626 - DNA, 75 bp, synthetic construct
  source 1..75: mol_type = other DNA
acagctttaatgctgacaccctgccggaacgtctggtgcgtcagacgttgtttcgcgcaaaccgcctcctgatgg

SEQ ID NO: 485627 - DNA, 75 bp, synthetic construct
  source 1..75: mol_type = other DNA
tatacagagctggataacagagttaaaatttatacattagaaatagggcagttatcgtttgcattaaattacgca

SEQ ID NO: 485628 - DNA, 75 bp, synthetic construct
  source 1..75: mol_type = other DNA
gggagaaacacttaataccgcttacaccggagcaacaaatactgtggcatcttggttttgaaaaatggcgggaga

SEQ ID NO: 485629 - DNA, 75 bp, synthetic construct
  source 1..75: mol_type = other DNA
tcactgcctgatagcgcactcctccacctcggtgaaatgctccgcttccctcaggaagaggcactgtatccagga

SEQ ID NO: 485630 - DNA, 75 bp, synthetic construct
  source 1..75: mol_type = other DNA
ttctgcttttctcctccctttgtataataagtggcgacctcttaacgtttgattctaacacaagccattcttttt

SEQ ID NO: 485631 - DNA, 75 bp, synthetic construct
  source 1..75: mol_type = other DNA
ctaacgctcagtcgccggatatcaagacgcttggtaccgtcatggggcaagcggcccgcaaaaactccgcaaaat

SEQ ID NO: 485632 - DNA, 75 bp, synthetic construct
  source 1..75: mol_type = other DNA
ctaacgctcagtcgccggatatcaagacgcttggtaccgtcatgggacaggcggcccgcaaaaactccgcaaaat

SEQ ID NO: 485633 - DNA, 75 bp, synthetic construct
  source 1..75: mol_type = other DNA
tttagctgcgctggcaacattgttcgatagcgacccactggaagaattgaaccgccccggaaatcctggagacta

SEQ ID NO: 485634 - DNA, 75 bp, synthetic construct
  source 1..75: mol_type = other DNA
acgtcgcgggtaatattccgtttattatcaaacgtaaagatgctgaaaatcgccagggggcggtgaataatagtg

SEQ ID NO: 485635 - DNA, 75 bp, synthetic construct
  source 1..75: mol_type = other DNA
gcgtctggttttcggtaaaactggcctgtttggaaaaccggagcagggaattcgtcactgctatccgccgcagga

SEQ ID NO: 485636 - DNA, 75 bp, synthetic construct
  source 1..75: mol_type = other DNA
atgcaatttttcacatccagcgatactgtaatgttatgtgcgaagacctgcgatcgctgtggtcgccatgcgaag

SEQ ID NO: 485637 - DNA, 75 bp, synthetic construct
  source 1..75: mol_type = other DNA
tggagatggctaaaagctctattgagaatagcggtgaacagtggacgcgtaatgcgataagtagagcgtattata

SEQ ID NO: 485638 - DNA, 75 bp, synthetic construct
  source 1..75: mol_type = other DNA
tcgagagaggaattgcttaagagaaagagtttcggttctgttaatgacaacaaatatctgaatgcgatgtggcgc

SEQ ID NO: 485639 - DNA, 75 bp, synthetic construct
  source 1..75: mol_type = other DNA
aagagaaattcttttccgtcagtgaatcaaaacaaatatctgaatgcgatgtggcgcaaaggaggcaaccagtga

SEQ ID NO: 485640 - DNA, 75 bp, synthetic construct
  source 1..75: mol_type = other DNA
ttcctgatcataagcatgccgtaatcgcattaacttcgatttatggcgtcggcaagacccgttccaaagccatcc

SEQ ID NO: 485641 - DNA, 75 bp, synthetic construct
  source 1..75: mol_type = other DNA
gaaatgtgcgtctgggaggcagacgttctgacacattatatcgcggaggactttgcgaaccaggtaatggtcatg

SEQ ID NO: 485642 - DNA, 75 bp, synthetic construct
  source 1..75: mol_type = other DNA
gtagcagcctatgttgctgttaacactaacaaatggttctatgaaaaagaagtaaaaggtattcatacctggagc

SEQ ID NO: 485643 - DNA, 75 bp, synthetic construct
  source 1..75: mol_type = other DNA
aaatgaattaattacatttgatgctctgtgtcaggaaggtcaggagatggaacattgcgttgccagttatgcaga

SEQ ID NO: 485644 - DNA, 75 bp, synthetic construct
  source 1..75: mol_type = other DNA
cagacaagtttccgtattttacggggaatgatgtcgccagcctggcaactctgacaaaagtcgggcgggatattc

SEQ ID NO: 485645 - DNA, 75 bp, synthetic construct
  source 1..75: mol_type = other DNA
cgctgacgtggacgaatgatgatctgccttcactgggcgcggagacatctctggagacctgcctgagtgaaggga

SEQ ID NO: 485646 - DNA, 75 bp, synthetic construct
  source 1..75: mol_type = other DNA
tcggtcttattttccgtcgttcagaagattttcttcatttcattccgacggctgaaggacaaggcgaaaacggtg

SEQ ID NO: 485647 - DNA, 75 bp, synthetic construct
  source 1..75: mol_type = other DNA
ttaaacacgctggaagaagctggtattcaaccggataaaacaaaattaaaccagcttgcactgtccattaaagcc

SEQ ID NO: 485648 - DNA, 75 bp, synthetic construct
  source 1..75: mol_type = other DNA
caaaattgatggtgggctggcgcttggtacagataacgcactgggcggtaattccattactctcggagataacga

SEQ ID NO: 485649 - DNA, 75 bp, synthetic construct
  source 1..75: mol_type = other DNA
atgggcgcaccgttgggcgtgctgttttatcactggggcggtttgcaggggctggcgttaatcattatgggcgtg

SEQ ID NO: 485650 - DNA, 75 bp, synthetic construct
  source 1..75: mol_type = other DNA
atgaaacactgttgtaaaaatgtggtgatcctcatgcccgaacccgcgctaaacggattgcgcctgaatttgcgc

SEQ ID NO: 485651 - DNA, 75 bp, synthetic construct
  source 1..75: mol_type = other DNA
cggcattgggcgtagtggcggtaaaagcggttccgcagcaaaatcaggggcggcgctggcaacttacaccgtatt

SEQ ID NO: 485652 - DNA, 75 bp, synthetic construct
  source 1..75: mol_type = other DNA
atgaaaggaattattttagctggtggttctggaacaaggctttatccaattacaatggggatttcaaagcaatta

SEQ ID NO: 485653 - DNA, 75 bp, synthetic construct
  source 1..75: mol_type = other DNA
atgaaaggaattattttagccggtggttctgggacaaggctttatccaattacaatgggggtttcaaagcagcta

SEQ ID NO: 485654 - DNA, 75 bp, synthetic construct
  source 1..75: mol_type = other DNA
gttggttaaataattctgatttgaaatcattagcaactaatatgaaaaatagttatggttcttatttaacaaaac

SEQ ID NO: 485655 - DNA, 75 bp, synthetic construct
  source 1..75: mol_type = other DNA
agcatcctgccggttgcggaagtctggggcgtaggccatcgtacagagaaagcactcgccacaatggggatcaaa

SEQ ID NO: 485656 - DNA, 75 bp, synthetic construct
  source 1..75: mol_type = other DNA
ttgttgtatcccgttcgtttggagcgcgggtcacgcaactggcgcagatgcagcaggcggtgactaaatatgcca

SEQ ID NO: 485657 - DNA, 75 bp, synthetic construct
  source 1..75: mol_type = other DNA
gttccaactacaccctttacgcctcattctccgccagatttgcaaccgtagtggaaagtctggcgccgcggacgt

SEQ ID NO: 485658 - DNA, 75 bp, synthetic construct
  source 1..75: mol_type = other DNA
ctgtggcgcgggtgtgctttcagttgcctttgcgcgccattcgccgaaaattcgtctcaccttgtgcgatgtctc

SEQ ID NO: 485659 - DNA, 75 bp, synthetic construct
  source 1..75: mol_type = other DNA
aacggtgttgaaggtgaagtctttgccagcaacgtcttttccgaggtgaaaggtcgttttgatatgatcatctcc

SEQ ID NO: 485660 - DNA, 75 bp, synthetic construct
  source 1..75: mol_type = other DNA
tgacacgtcagacgctgtatcgcgccaatcgcctgttcatggaggcgtataccgaaattctggaactggatgcgt

SEQ ID NO: 485661 - DNA, 75 bp, synthetic construct
  source 1..75: mol_type = other DNA
cctgaggagatagcttggaggaatggctggttaagtaacgaaaaactttatgagcttagccaaaatttaattaag

SEQ ID NO: 485662 - DNA, 75 bp, synthetic construct
  source 1..75: mol_type = other DNA
tggttttgcttggttggatacagggacccacgaaagtttgcatgaagcgtcatccttcgtgcaaaccatccagaa

SEQ ID NO: 485663 - DNA, 75 bp, synthetic construct
  source 1..75: mol_type = other DNA
gttggctctcaaaagaaaatctttacgaaagaggccaactactgagtaaaaatcattacgggcagtatttattaa

SEQ ID NO: 485664 - DNA, 75 bp, synthetic construct
  source 1..75: mol_type = other DNA
aacgccaaattagcttcgtgaaatctcacttttctcgccaactggaagaacgtctggggctgatcgaagtccagg

SEQ ID NO: 485665 - DNA, 75 bp, synthetic construct
  source 1..75: mol_type = other DNA
tgccagggcgaagtctattcccaaccggcaagtttgccgctgtatcccaaatcgccgtattcacgccgcctgttc

SEQ ID NO: 485666 - DNA, 75 bp, synthetic construct
  source 1..75: mol_type = other DNA
ttgctccacctcctgggaacaactgcaacagtacgtcaccaccctcaacgatccgcgtatcacttacattcacaa

SEQ ID NO: 485667 - DNA, 75 bp, synthetic construct
  source 1..75: mol_type = other DNA
agcgcttgggtcaaaaaagcgactaacggtacccttaaagaaggtgacttcgccgccgttgcgaactttaacctg

SEQ ID NO: 485668 - DNA, 75 bp, synthetic construct
  source 1..75: mol_type = other DNA
cgcaaggggaatacatcaccgggatcgatgacgatgatgaatggacacccaaccgcctgagcgtcttcctcgccc

SEQ ID NO: 485669 - DNA, 75 bp, synthetic construct
  source 1..75: mol_type = other DNA
caacagtacgtcaccgccctcaacgactcgcgcattacgtacattcacaacgacattaacagcggggcgtgcgcg

SEQ ID NO: 485670 - DNA, 75 bp, synthetic construct
  source 1..75: mol_type = other DNA
cacttttaccgcaagcacaaagacaaatttgaccgcgccagcaaaaaatatcagctgtttaccctctaccagatc

SEQ ID NO: 485671 - DNA, 75 bp, synthetic construct
  source 1..75: mol_type = other DNA
tccgaactgggcgaactgaaacgctatgttgagaacggtgagtttctgattgaagccagcgatctcggcgtggtg

SEQ ID NO: 485672 - DNA, 75 bp, synthetic construct
  source 1..75: mol_type = other DNA
gagctacggccatctgccgctggcgtactcagcccgctgcttcaccgcacgctcggaggatcgcccgaaagatga

SEQ ID NO: 485673 - DNA, 75 bp, synthetic construct
  source 1..75: mol_type = other DNA
tgcaccactgccgttgacggcaaacagcgattgtaacggctactggcggcggctggccgggctggagctgcaagc

SEQ ID NO: 485674 - DNA, 75 bp, synthetic construct
  source 1..75: mol_type = other DNA
atctgaaaaaaataaagaacaatcgttagtattgtcacaattatacgaagcccaagaagatttagagagctttta

SEQ ID NO: 485675 - DNA, 75 bp, synthetic construct
  source 1..75: mol_type = other DNA
acagatttctcctgtatggaatagccttgttttggatttaatgcttaacaatatagatcaattattttgggggtg

SEQ ID NO: 485676 - DNA, 75 bp, synthetic construct
  source 1..75: mol_type = other DNA
gtaacgtacgcgaactggaaaacgtcattgagcgcgcggtattgctaacacgcggtaacgtgctgcagctgtcat

SEQ ID NO: 485677 - DNA, 75 bp, synthetic construct
  source 1..75: mol_type = other DNA
tgtgtgaccttcgggccaggctgaacgatatggagcatcgctgtcgctttgattccgatgtgcttgttgaacgcc

SEQ ID NO: 485678 - DNA, 75 bp, synthetic construct
  source 1..75: mol_type = other DNA
atatgctaccgcagctatttgtcgctccaccgtgggtaataaataagaagaaaaatgtaatacccgtatttgatt

SEQ ID NO: 485679 - DNA, 75 bp, synthetic construct
  source 1..75: mol_type = other DNA
cggagctgcttgtttcgccgccctggatgaccaaagagaaaaagaaaaatacgcctgtgtttgatcttccagtgc

SEQ ID NO: 485680 - DNA, 75 bp, synthetic construct
  source 1..75: mol_type = other DNA
tggggtgagcggtgtaagccggatacttactgagtttgtggaagagcattctgacaatcccacttatctcttcga

SEQ ID NO: 485681 - DNA, 75 bp, synthetic construct
  source 1..75: mol_type = other DNA
tcactggctgactttggctgggatctgtataccgcctggacagaagctggcgcacccgcaaaagaaaactgggca

SEQ ID NO: 485682 - DNA, 75 bp, synthetic construct
  source 1..75: mol_type = other DNA
acgctgggctggcgatcatcaaagagaccttcacccgcgaatcactggctgactttggctgggatctctacacgg

SEQ ID NO: 485683 - DNA, 75 bp, synthetic construct
  source 1..75: mol_type = other DNA
atggcgcaacaattgcagaaaaaaatgtcttatgaagatgcgcgaaactggctaactgattatccgcgccatgcc

SEQ ID NO: 485684 - DNA, 75 bp, synthetic construct
  source 1..75: mol_type = other DNA
ggatgtgctagccaatatcggtagcgatattgcgctgatgttgcttaatggtattgcgcaaaagattaaattcgt

SEQ ID NO: 485685 - DNA, 75 bp, synthetic construct
  source 1..75: mol_type = other DNA
ggtaggcatgtcgccagccgaactgagtgccgagcaactcttaagcaagctgtggctatgggaaggcaaagcgga

SEQ ID NO: 485686 - DNA, 75 bp, synthetic construct
  source 1..75: mol_type = other DNA
ttgaaattgcccttctcgctcttcaacttagatataaaccagtaaaaggcgcagtaaccaccatcattccaccta

SEQ ID NO: 485687 - DNA, 75 bp, synthetic construct
  source 1..75: mol_type = other DNA
atgatcgctacggtaaacaatcctcccccactttctccgtgctcgacgacatcaccgccagcgaactcattaacg

SEQ ID NO: 485688 - DNA, 75 bp, synthetic construct
  source 1..75: mol_type = other DNA
gagattaccaaaaaactgacccgtacttaccttgtcacccacttccagcaaatagcccaacagcaggcgacaaaa

SEQ ID NO: 485689 - DNA, 75 bp, synthetic construct
  source 1..75: mol_type = other DNA
accccttatggcgatatcgaacttgaaactgaacctttctcattgatttatggtgaaacggggtatagcgatttg

SEQ ID NO: 485690 - DNA, 75 bp, synthetic construct
  source 1..75: mol_type = other DNA
ctggcatcaacgtctatgtcatcatctttcactcgcttcagaagatgagtggcaacgctgtgtagataaagtact

SEQ ID NO: 485691 - DNA, 75 bp, synthetic construct
  source 1..75: mol_type = other DNA
gtcgctttgattccgatgtgcttgttgaacgcctgacacgtcagacgctgtatcgcgccaatcgcctgttcatgg

SEQ ID NO: 485692 - DNA, 75 bp, synthetic construct
  source 1..75: mol_type = other DNA
cagaaatggtgaaaggctggtttgaacgtttcggtgccgatgccttagtgctggcgctggagttggtcaggcata

SEQ ID NO: 485693 - DNA, 75 bp, synthetic construct
  source 1..75: mol_type = other DNA
ggagcagcgtcgtcgcattaatgcaatgttgcaggattacgaactgcaacgccgactccactctgaacagcttca

SEQ ID NO: 485694 - DNA, 75 bp, synthetic construct
  source 1..75: mol_type = other DNA
atgaactatgccggacacgaaaaccttcgcgctgaagtggcggaagtggccaatgccatgtgtgaccttcgggcc

SEQ ID NO: 485695 - DNA, 75 bp, synthetic construct
  source 1..75: mol_type = other DNA
agaaggttttattgaaggttttaaagttgaaggcgacaccaagcctgaactggaacttactctgaagtatttcca

SEQ ID NO: 485696 - DNA, 75 bp, synthetic construct
  source 1..75: mol_type = other DNA
ccggtactggtaaaacgaccctcgcagaagtcattgcccgctatgcgaatgctgatgtggaacgtatttcagccg

SEQ ID NO: 485697 - DNA, 75 bp, synthetic construct
  source 1..75: mol_type = other DNA
taaagcgtatacccccaacaataattacaattcttatcctgaaaactggcagccggcgtttgccgagttacaaag

SEQ ID NO: 485698 - DNA, 75 bp, synthetic construct
  source 1..75: mol_type = other DNA
taagaataaatgcccctggcttgctgatgatgcgacgattccggtaactgacgatattaatcgatttgcttttcc

SEQ ID NO: 485699 - DNA, 75 bp, synthetic construct
  source 1..75: mol_type = other DNA
aaaaatcacataaattctgggcggtggagcagcaaggcaacgagttacatgtcagttggggcaaagtcggcacta

SEQ ID NO: 485700 - DNA, 75 bp, synthetic construct
  source 1..75: mol_type = other DNA
gcgtatcgcttgcagttatcgttggcgtccagcactataatggacaatctgaaacgtcccagcagcccgaaacac

SEQ ID NO: 485701 - DNA, 75 bp, synthetic construct
  source 1..75: mol_type = other DNA
aaagcgaccgtcacgacagaaatacctcccaatcgggaagcagaatcgctaccggactggcatcagcgtttatgc

SEQ ID NO: 485702 - DNA, 75 bp, synthetic construct
  source 1..75: mol_type = other DNA
gggagcttgcaatccgatgccgcattgctctggcgcttctggcactcttattttgcagatgaacttgttgatgac

SEQ ID NO: 485703 - DNA, 75 bp, synthetic construct
  source 1..75: mol_type = other DNA
cagcgttctctattcctacatttcatcaattcatcaggtctggttgcagcagctttatcccatgctggaaaaagc

SEQ ID NO: 485704 - DNA, 75 bp, synthetic construct
  source 1..75: mol_type = other DNA
tttcttgctatgggtttcacgggtaaacgtgctgcccagttcaaagaggcatacatcaatgcctttaaccagatg

SEQ ID NO: 485705 - DNA, 75 bp, synthetic construct
  source 1..75: mol_type = other DNA
gatgcaggtcagtggtggtgattcgaaagaaacggccagtcgtggcgcactgctgctggacatttctggtgtgat

SEQ ID NO: 485706 - DNA, 75 bp, synthetic construct
  source 1..75: mol_type = other DNA
gcagtttctaattactttactaaacggcatgagcgggttttagatagaattcgaaacctcgaatgttccgttgaa

SEQ ID NO: 485707 - DNA, 75 bp, synthetic construct
  source 1..75: mol_type = other DNA
taaaaaatgctcctggcgcccttgaaaataagtcagtacttacttatgatcgagatacagtccaagaaagcggac

SEQ ID NO: 485708 - DNA, 75 bp, synthetic construct
  source 1..75: mol_type = other DNA
tgagtgctctgttgaattcactgagctgaattttcagcccagtgattacaccgattgcacaggccgcaaactccc

SEQ ID NO: 485709 - DNA, 75 bp, synthetic construct
  source 1..75: mol_type = other DNA
cccagttgaaggagcgcaaagaaggcgcattcgttcctttcgtcacgctcggtgatccgggcattgagcagtcgc

SEQ ID NO: 485710 - DNA, 75 bp, synthetic construct
  source 1..75: mol_type = other DNA
atcttcatctgcccgccaaatgccgatgacgacttgctgcgccagatagcctcttacggtcgtggttacacctat

SEQ ID NO: 485711 - DNA, 75 bp, synthetic construct
  source 1..75: mol_type = other DNA
atggaacgctacgaatctctgtttgcccaactgaaggagcgcaaagaaggcgcattcgttcctttcgtcaccctc

SEQ ID NO: 485712 - DNA, 75 bp, synthetic construct
  source 1..75: mol_type = other DNA
tcccggtaacgggcctgacggcgatatcgaacatcacaccgaaataacccttcctgagaatcttcatgtttgtga

SEQ ID NO: 485713 - DNA, 75 bp, synthetic construct
  source 1..75: mol_type = other DNA
tttttaagctccttcccaaatacaaagctcacaaaaacgttagtgcatcgaaaatcaaaaatgttgttattttcg

SEQ ID NO: 485714 - DNA, 75 bp, synthetic construct
  source 1..75: mol_type = other DNA
cgatacccgccagcaggatgatctgaacagtctggatgaactgcaaacgctggcgattgatgttgattatctcga

SEQ ID NO: 485715 - DNA, 75 bp, synthetic construct
  source 1..75: mol_type = other DNA
tgaagacggcaatatgttgtgggcgctgattgttgaaatcgcgcgcgacgacgaagatccgttcacttcaaccgg

SEQ ID NO: 485716 - DNA, 75 bp, synthetic construct
  source 1..75: mol_type = other DNA
atgactatattaatgatgcttcggcgctggcctgcctcataaatttgtcgctgaacccttcagaggcaagggggc

SEQ ID NO: 485717 - DNA, 75 bp, synthetic construct
  source 1..75: mol_type = other DNA
tacatcaacgcctttaacctgatggagaagagtttatcaggtgccgatgcgtctgatatgtcagctgtcgcacga

SEQ ID NO: 485718 - DNA, 75 bp, synthetic construct
  source 1..75: mol_type = other DNA
gcccaaattatggtggggcgtacagggccgacttcggttgggccgggttctatgttgaccggtttctcacccctg

SEQ ID NO: 485719 - DNA, 75 bp, synthetic construct
  source 1..75: mol_type = other DNA
agtgattacaccgattgcacaggccgcaaactcccttgttaccaaatcacccgcgacggttttgcgtttcttgcc

SEQ ID NO: 485720 - DNA, 75 bp, synthetic construct
  source 1..75: mol_type = other DNA
agaaacacagcgcgttatctatcttcgcaaagactacccgcatgagtgctttagtcctttgtggaaattcaggcg

SEQ ID NO: 485721 - DNA, 75 bp, synthetic construct
  source 1..75: mol_type = other DNA
gcaatatcaaattcactgaaaccgttccggacggcgcaatggtctgcaccctggataccttccagttttatctgg

SEQ ID NO: 485722 - DNA, 75 bp, synthetic construct
  source 1..75: mol_type = other DNA
agaacatcgtcgacaaaatcgagtatctgaactgctcgcgcgagttttttacccgtaatttcataccgggtactt

SEQ ID NO: 485723 - DNA, 75 bp, synthetic construct
  source 1..75: mol_type = other DNA
tctgatatgtcagctgtcgcacgaaacgccagaggcgtatacctgcatttgcgtgaaatccatcaaatctggaca

SEQ ID NO: 485724 - DNA, 75 bp, synthetic construct
  source 1..75: mol_type = other DNA
tgctatcaaatcacccgcgacggttttgcgtttcttgccatgggcttcactggtaaacgtgctgcccggttcaaa

SEQ ID NO: 485725 - DNA, 75 bp, synthetic construct
  source 1..75: mol_type = other DNA
tttggattgttctccagagttttgtgcccgcaattttgcggagacatcaattttggtacgccagcccaacggtgg

SEQ ID NO: 485726 - DNA, 75 bp, synthetic construct
  source 1..75: mol_type = other DNA
gcccaaattatggtggggcgtgcagggccaacttcggttgggccgggttctttggtgaccggtttctcacccctg

SEQ ID NO: 485727 - DNA, 75 bp, synthetic construct
  source 1..75: mol_type = other DNA
aaataagtcagtacttacttatgatcaaggcgcagcccaagaaagcgggcaagatcaaccccgagggaatgggga

SEQ ID NO: 485728 - DNA, 75 bp, synthetic construct
  source 1..75: mol_type = other DNA
cacactgcgtgcctttgcggcaggtgtgaccccggcgcagtgctttgagatgctggcactcattcgccagaagca

SEQ ID NO: 485729 - DNA, 75 bp, synthetic construct
  source 1..75: mol_type = other DNA
cgttcaatacgcttatcggtgatatccgggccgggcgtcaggggggcagcgtacatcgcattacttttcaggagg

SEQ ID NO: 485730 - DNA, 75 bp, synthetic construct
  source 1..75: mol_type = other DNA
ctgtctgcgcaccgggaaggaatggtcggaggcatccgagcaggcctggatggcatcggtgtacaaattctacgg

SEQ ID NO: 485731 - DNA, 75 bp, synthetic construct
  source 1..75: mol_type = other DNA
ggagttgtggctgcaacgttttccctgcgcctgaaaggtaaacctgtactgacgacagagccactgaaagtgaag

SEQ ID NO: 485732 - DNA, 75 bp, synthetic construct
  source 1..75: mol_type = other DNA
ctgtttgacgaaaaagggcagtttatcgagggctactacattgtcggcctgctggcagaagcattcctcgaaaaa

SEQ ID NO: 485733 - DNA, 75 bp, synthetic construct
  source 1..75: mol_type = other DNA
tgctggaggcgctccccgctgacgcacgttctttcctgggtcgcgactttggccgcagcggtgacctgtcggtgg

SEQ ID NO: 485734 - DNA, 75 bp, synthetic construct
  source 1..75: mol_type = other DNA
tgagtcccggatgtcggctggcacgccggtgttgcgcctgacctgcccggagggctacgaactgaggcccgacga

SEQ ID NO: 485735 - DNA, 75 bp, synthetic construct
  source 1..75: mol_type = other DNA
tccacccatgacggtgacgataacccgttcaatacgcttatcggtgatattcgggccggacgtcaggggggtagc

SEQ ID NO: 485736 - DNA, 75 bp, synthetic construct
  source 1..75: mol_type = other DNA
ggcgtcgtctgagatttccatgtcgggtaatttttatctgaatcaggcccagaacgccctgcgtgatgcctatga

SEQ ID NO: 485737 - DNA, 75 bp, synthetic construct
  source 1..75: mol_type = other DNA
ccaccaatgttaaaaataaaagtgttttagaagataaaagaaacataataattgttgttttgtcaatattaattc

SEQ ID NO: 485738 - DNA, 75 bp, synthetic construct
  source 1..75: mol_type = other DNA
gagaatatttaaggcacgttatatttaagcctgtcgaaaatgacacgtcgttaagtgaagaactggctcatgtgt

SEQ ID NO: 485739 - DNA, 75 bp, synthetic construct
  source 1..75: mol_type = other DNA
ctaacctgcgtggccgtcagggtattattgttatcgacgaagcggcgttccatgagcaactggacgaactgctga

SEQ ID NO: 485740 - DNA, 75 bp, synthetic construct
  source 1..75: mol_type = other DNA
tcagaggcatccgagcaggcctggatggcgtcggtgtacaaattctacgctgccggcgcatccgaagagcttgac

SEQ ID NO: 485741 - DNA, 75 bp, synthetic construct
  source 1..75: mol_type = other DNA
agttgttaacgcaggagccaggataggtgcaaattgccgaattcatgtaggtacgaatattggcacatcagctgg

SEQ ID NO: 485742 - DNA, 75 bp, synthetic construct
  source 1..75: mol_type = other DNA
gaaggggccgagggcactgttgcaaagttagcgatgaggcagccttttgtcttattcaaaggccttacatttcaa

SEQ ID NO: 485743 - DNA, 75 bp, synthetic construct
  source 1..75: mol_type = other DNA
atgcagaaaagcaataaagttataatcagctgtggtatggcattatattttttgtgtggggggattacagtggca

SEQ ID NO: 485744 - DNA, 75 bp, synthetic construct
  source 1..75: mol_type = other DNA
gagaatccgctgattcaaaaactggcgcttaatatgggcaagcagcaattaatcgcctcgccagagggcacagtg

SEQ ID NO: 485745 - DNA, 75 bp, synthetic construct
  source 1..75: mol_type = other DNA
cactttcgttaccaagactccgccggcagcagttctgctgaaaaaagcagctggtatcaagtctggttccggtaa

SEQ ID NO: 485746 - DNA, 75 bp, synthetic construct
  source 1..75: mol_type = other DNA
gcagcagttctgctgaaaaaagcggctggtatcaagtctggttccagtaagccgaacaaagacaaagtgggtaaa

SEQ ID NO: 485747 - DNA, 75 bp, synthetic construct
  source 1..75: mol_type = other DNA
cacttcgggcgcgttgcccggaattccagagtcgtgtagcaggcgctgcgcagtttaaggacttgccggaagtcg

SEQ ID NO: 485748 - DNA, 75 bp, synthetic construct
  source 1..75: mol_type = other DNA
ttgtggatgagcggacgctcaggcagcgtattgatgagggactgggatttgctgtttcggcgaagggaaaacatg

SEQ ID NO: 485749 - DNA, 75 bp, synthetic construct
  source 1..75: mol_type = other DNA
catacaaggtggtttaatgttagatgaattacaggtcggcggcgttgaaaatacgccagggagaaaaatagtttt

SEQ ID NO: 485750 - DNA, 75 bp, synthetic construct
  source 1..75: mol_type = other DNA
tgcgcgagcatcaggccgacatggggattgcctttgacggcgacttcgatcgctgcttcctgttcgatgacgagg

SEQ ID NO: 485751 - DNA, 75 bp, synthetic construct
  source 1..75: mol_type = other DNA
caaaactgtgtggtataccctcaagccagtcatcacgcaggctgcgtgagcgcatcagcccttccctgaaacgca

SEQ ID NO: 485752 - DNA, 75 bp, synthetic construct
  source 1..75: mol_type = other DNA
acattatcaacaagataaccgaactttcgcagaatttgacgcctgaaaatatcaagatgattgagatcctttcca

SEQ ID NO: 485753 - DNA, 75 bp, synthetic construct
  source 1..75: mol_type = other DNA
atgctccggatattaatcgcattatgagtaataatcatcatgcacctgaacatcagccggtatcacctatggttg

SEQ ID NO: 485754 - DNA, 75 bp, synthetic construct
  source 1..75: mol_type = other DNA
gtaccgatggcgataacggttccccaagtgcgtttatcggcggcggccgcgaagtgcgtgcatccgtcaccttcg

SEQ ID NO: 485755 - DNA, 75 bp, synthetic construct
  source 1..75: mol_type = other DNA
cagggtaaccaggttaacaacggccttgagttaaccgctgccgggaatgtgtggcaggggctgaatatttacagc

SEQ ID NO: 485756 - DNA, 75 bp, synthetic construct
  source 1..75: mol_type = other DNA
ctcgacgtgttgaacggtcaggacggtttcaaacctgcatacctggtaaacccgaatactgcagatctgctggct

SEQ ID NO: 485757 - DNA, 75 bp, synthetic construct
  source 1..75: mol_type = other DNA
cgttcgcgctggaagataagattgaagtggcgcgtgttttcaggagtcacggcgtacttacgttaatggtcaggg

SEQ ID NO: 485758 - DNA, 75 bp, synthetic construct
  source 1..75: mol_type = other DNA
gcaggtgacttgtccacctgtagcggtgaacgtaatgcaaaaatggtagatacttcagagcttttgcgtgtcttc

SEQ ID NO: 485759 - DNA, 75 bp, synthetic construct
  source 1..75: mol_type = other DNA
gcggccagccgtgctcatacccagcaattccaccactggcaggtattaagccgccagatgggggataacgcccgt

SEQ ID NO: 485760 - DNA, 75 bp, synthetic construct
  source 1..75: mol_type = other DNA
taaactgcctggtgcgcccttcacgtcctggctgacattactgtttttactgagtgtgctggtgctgatggcatt

SEQ ID NO: 485761 - DNA, 75 bp, synthetic construct
  source 1..75: mol_type = other DNA
gcgtagtgtttgcttttgcctccattgaaatggtgggtacagctgccggagaatgtaaagatccgcagaccatgg

SEQ ID NO: 485762 - DNA, 75 bp, synthetic construct
  source 1..75: mol_type = other DNA
agccgtaccgcgattaacaacatcaaaaaattctggtcgctgacagcgaaaggctgcatgttcggcaagaacatc

SEQ ID NO: 485763 - DNA, 75 bp, synthetic construct
  source 1..75: mol_type = other DNA
ctcgatgtgttgagcggtcaggacggtttcaagcctgcatacctggtaaacccgaatacagcagatctgctcgct

SEQ ID NO: 485764 - DNA, 75 bp, synthetic construct
  source 1..75: mol_type = other DNA
aaggtaaagcgcaggaagtcagttttaaactccccggcgcgcccttcacttcctggctgactttactgtttttgc

SEQ ID NO: 485765 - DNA, 75 bp, synthetic construct
  source 1..75: mol_type = other DNA
tttttgggtgagaaagccgcttatgttgctggctggatgtacttcatcaactgggcaatgaccgggattgtcgat

SEQ ID NO: 485766 - DNA, 75 bp, synthetic construct
  source 1..75: mol_type = other DNA
agtcgatattgatggaacaatatcagaggcaactgaagacagactgcatttgcttccgccaccaggtaaaggtgc

SEQ ID NO: 485767 - DNA, 75 bp, synthetic construct
  source 1..75: mol_type = other DNA
acaatttgccttaaacatgaaaaaacaggcgaggcttatgtcgtcatttttacagactgccataatatccgtgat

SEQ ID NO: 485768 - DNA, 75 bp, synthetic construct
  source 1..75: mol_type = other DNA
ccttcttcctggcgacatcacgtatatcgatcagattactggtcaggatggcttcaggcctgcttatctggttaa

SEQ ID NO: 485769 - DNA, 75 bp, synthetic construct
  source 1..75: mol_type = other DNA
taagcaatacaactccggcatacagccatggtcagcaattttcggttggtctgggtcatggctgggactccattg

SEQ ID NO: 485770 - DNA, 75 bp, synthetic construct
  source 1..75: mol_type = other DNA
agatgctttgtatggattaccagatattatcgatgccaattggcaatcagactctgagagttggcgaacaattaa

SEQ ID NO: 485771 - DNA, 75 bp, synthetic construct
  source 1..75: mol_type = other DNA
tagcaggaatcagctttacatgcatttctaccgtttagtatcagaattacagccattattctttttggcagaaaa

SEQ ID NO: 485772 - DNA, 75 bp, synthetic construct
  source 1..75: mol_type = other DNA
tacaccaagagaagctgctagattacaaggcttccctgattggtttcgctttcatgtaactaaatggcatagttt

SEQ ID NO: 485773 - DNA, 75 bp, synthetic construct
  source 1..75: mol_type = other DNA
cggtacccgatgtatggaacatttgctttctggctaacggcatgcccgacacatggttttacaccgatgacgcct

SEQ ID NO: 485774 - DNA, 75 bp, synthetic construct
  source 1..75: mol_type = other DNA
agtggcgcgtgttttcaggagtcacggcgtacttacgttaatggtcagggagtatgaaaacgcgcttctccatca

SEQ ID NO: 485775 - DNA, 75 bp, synthetic construct
  source 1..75: mol_type = other DNA
aagaaaattggtctaagtaaaattgcgttcgcgctggaagataagattgaagtggcgcgtgttttcaggcgtcac

SEQ ID NO: 485776 - DNA, 75 bp, synthetic construct
  source 1..75: mol_type = other DNA
agagacaacgatgagatggtacagagcaggtacacaaaacctgaccatcggcagtcgcctctatggtgaatcttc

SEQ ID NO: 485777 - DNA, 75 bp, synthetic construct
  source 1..75: mol_type = other DNA
gtgcctgcaaatattcgttttatgctgttaagaaatacaactccgacatacagccatggtaagaaattttcggtt

SEQ ID NO: 485778 - DNA, 75 bp, synthetic construct
  source 1..75: mol_type = other DNA
agaaacaacccgtctgactgagaaatttgacgatattatttttaaagtcgccttacctgcagatcttcctttagg

SEQ ID NO: 485779 - DNA, 75 bp, synthetic construct
  source 1..75: mol_type = other DNA
atctgtctaactcatctgtgcttggggcctgtcagaaactccaggaggctgttggcttaccgaatctggcaccgc

SEQ ID NO: 485780 - DNA, 75 bp, synthetic construct
  source 1..75: mol_type = other DNA
gtttcgacgatgatggcctgcccggatggcaagaaagagaagaaatttgtcaccgcgtatctgggcgatgctgga

SEQ ID NO: 485781 - DNA, 75 bp, synthetic construct
  source 1..75: mol_type = other DNA
tgaaacctaaccgccgcgagctggaaatctgggcaggccgtaaactgcctgaaatgaaagatgtgattgaagctg

SEQ ID NO: 485782 - DNA, 75 bp, synthetic construct
  source 1..75: mol_type = other DNA
gccgaaggcgcgctttgggttaatgcctccggcgaatggatcgccaaaccaccgtcagtcgatgtcgtaagcacc

SEQ ID NO: 485783 - DNA, 75 bp, synthetic construct
  source 1..75: mol_type = other DNA
tgtatgaccgaattaacgatgcggcatttcttgcccgtcttattcattcgtcgctgaactcttcagaggtaaggg

SEQ ID NO: 485784 - DNA, 75 bp, synthetic construct
  source 1..75: mol_type = other DNA
gtatacctgcatttgcgtgaaatccatcaaatctggacaagccagctttatccaatgcttaaggccgttgaatct

SEQ ID NO: 485785 - DNA, 75 bp, synthetic construct
  source 1..75: mol_type = other DNA
atggcaagaaagagaagaaatttgtcaccgcgtatctgggcgatgccggaatgctgcgttacaacagcaagctgc

SEQ ID NO: 485786 - DNA, 75 bp, synthetic construct
  source 1..75: mol_type = other DNA
ccagcaaactgtacgaccgtgtaggtgatgctgtttttggtgctgcacttgttgattcctggctgaatggttctg

SEQ ID NO: 485787 - DNA, 75 bp, synthetic construct
  source 1..75: mol_type = other DNA
gaggcatacatcaacgcctttaacctgatggagaagagtttatcaggtgccgatgcgtctgatatgtcagctgtc

SEQ ID NO: 485788 - DNA, 75 bp, synthetic construct
  source 1..75: mol_type = other DNA
ttctctggctgttgctagttatttcggcaaacaacacaaaaacgtcattcaaaaaattgcgtctcttgaatgctc

SEQ ID NO: 485789 - DNA, 75 bp, synthetic construct
  source 1..75: mol_type = other DNA
gtcaggcgtcagcccggaagcgttcaccgactggatgactcgcctgcgtagtcagtgtccttgcattatctttga

SEQ ID NO: 485790 - DNA, 75 bp, synthetic construct
  source 1..75: mol_type = other DNA
gtcatgacgatgtactgaaaaagatccgcacgcttgaatgctccgcatcattcactgcccgcaatttttcggtga

SEQ ID NO: 485791 - DNA, 75 bp, synthetic construct
  source 1..75: mol_type = other DNA
gctcacatccagattatggtgggctgggcgggggcaccgaaaggtgcgccggtctccgttgacgccggttacgcc

SEQ ID NO: 485792 - DNA, 75 bp, synthetic construct
  source 1..75: mol_type = other DNA
acccgcgacggttttgcgtttcttgccatgggcttcactggtaaacgtgctgcccggttcaaagaggcatacata

SEQ ID NO: 485793 - DNA, 75 bp, synthetic construct
  source 1..75: mol_type = other DNA
accttaaggtgtcaggacagcccggtgacatcccggtcgttttcctgtcggaagcccgtaatctcaccacggaac

SEQ ID NO: 485794 - DNA, 75 bp, synthetic construct
  source 1..75: mol_type = other DNA
ttctaaagatattgttttatcaaagaggaagagtatactgtgtaaattatcgtgatatgacagtaggaataacat

SEQ ID NO: 485795 - DNA, 75 bp, synthetic construct
  source 1..75: mol_type = other DNA
gtgcactgctgaaacagtatggtatccgcctgacggctaatcaggcatatcaccagatggtgaaactggggatcg

SEQ ID NO: 485796 - DNA, 75 bp, synthetic construct
  source 1..75: mol_type = other DNA
tgtataccgtggacaaccacacaggacgggtggaacacgtaacccggacatcgaaaaccagcctgacagcaacag

SEQ ID NO: 485797 - DNA, 75 bp, synthetic construct
  source 1..75: mol_type = other DNA
aacattatcaagtgggcagaagaaacaaaatgcgaaagcatggcatcaacgcactggatggtcatatggccactt

SEQ ID NO: 485798 - DNA, 75 bp, synthetic construct
  source 1..75: mol_type = other DNA
tgacatcccggtcgttttcctgtcggaagcccgtaatctcaccacggaacagtgggtgagccggttactgcctga

SEQ ID NO: 485799 - DNA, 75 bp, synthetic construct
  source 1..75: mol_type = other DNA
aaataagttggtatttacttatgatcgcgatacagtccaagaaagcggacaagatcaaccccgagggaatgggga

SEQ ID NO: 485800 - DNA, 75 bp, synthetic construct
  source 1..75: mol_type = other DNA
gtagcaaaggctctgatgagttttacgtaacgcatcttgtgcaaacggcaaaatatagtgtcaagcacgatacgg

SEQ ID NO: 485801 - DNA, 75 bp, synthetic construct
  source 1..75: mol_type = other DNA
gcagttgctaactactttactaaacggcacgagcgggttttagatagaattcgaaaccttgaatgctccgctgaa

SEQ ID NO: 485802 - DNA, 75 bp, synthetic construct
  source 1..75: mol_type = other DNA
cgcccgacactgtcactgagtgcactgctgaaacagtatggtatacgcctgacggctaatcaggcatatcactag

SEQ ID NO: 485803 - DNA, 75 bp, synthetic construct
  source 1..75: mol_type = other DNA
aagaccttgtggcacgacgccacccagaatatgagaagaaaaaagaacattgggacttcctcgccagcacctacg

SEQ ID NO: 485804 - DNA, 75 bp, synthetic construct
  source 1..75: mol_type = other DNA
aagctggggagcgtcgagcagcgcgaacgatacagccgtaccgcgattaacaacatcaaaaaattctggtcgctg

SEQ ID NO: 485805 - DNA, 75 bp, synthetic construct
  source 1..75: mol_type = other DNA
gggctgcggtgcgcaaatgttgaaatatgcctctccgccaatggcgcaggcgtggtgtcaggtgatgttagatac

SEQ ID NO: 485806 - DNA, 75 bp, synthetic construct
  source 1..75: mol_type = other DNA
gatttatcacgctcatcaacgccatgtatttggtaatccgttgatccaacagcctctgatgcgtcatgtcttaag

SEQ ID NO: 485807 - DNA, 75 bp, synthetic construct
  source 1..75: mol_type = other DNA
cgcgagcgtgggaccggcgtgccgatgccaaagaagctctgtgggcgcgtttatttacgcctgcggcgaaatttg

SEQ ID NO: 485808 - DNA, 75 bp, synthetic construct
  source 1..75: mol_type = other DNA
ttaatcaacctatacccttaaataacagcaatttatacttatctgatggcgcgctctgcgaagcggtaacacgcg

SEQ ID NO: 485809 - DNA, 75 bp, synthetic construct
  source 1..75: mol_type = other DNA
cgataaccatgacctttgccgccacgccattgttgttacagatgttacccgcgccgtttcaggactggaccacgc

SEQ ID NO: 485810 - DNA, 75 bp, synthetic construct
  source 1..75: mol_type = other DNA
gaagcatttgtggaagtgaaagggcaagatcgctattttgaccgtgcggttcgtcgcttacaacagcaactgcgc

SEQ ID NO: 485811 - DNA, 75 bp, synthetic construct
  source 1..75: mol_type = other DNA
cagcaacttatacctgtctgatggcgcgctctgcgaagcggtaacgcgtgaaggtgctggctgggatagcgattt

SEQ ID NO: 485812 - DNA, 75 bp, synthetic construct
  source 1..75: mol_type = other DNA
ctgggcggcatgacggcgaaacaatgggcgcaggcgaacggcatcaaaggaaaaccgcgtgacagcatgagcgtt

SEQ ID NO: 485813 - DNA, 75 bp, synthetic construct
  source 1..75: mol_type = other DNA
tcaatgagtatgctgaattagatgctctcagcggatgtgaaaatgatgctgcaaaaatggcagaagcattatcta

SEQ ID NO: 485814 - DNA, 75 bp, synthetic construct
  source 1..75: mol_type = other DNA
gaacgtctggacgatggttcttatcggctggtggggcataaatggtttttctcggtgccacaaagcgacgcgcat

SEQ ID NO: 485815 - DNA, 75 bp, synthetic construct
  source 1..75: mol_type = other DNA
gagcgtctggaagatggctcttatcggctggtggggcataaatggtttttctcggtgccgcaaagcgatgcgcat

SEQ ID NO: 485816 - DNA, 75 bp, synthetic construct
  source 1..75: mol_type = other DNA
caggttgaggctgggtcgttatgtccgataacgatgacctttgccgccacgccattgttgttacagatgttaccc

SEQ ID NO: 485817 - DNA, 75 bp, synthetic construct
  source 1..75: mol_type = other DNA
cgtggtgtcagataatgttagatacgcgcggtggcgtgcgggtgtcagagcagatccagaatgatttattactgc

SEQ ID NO: 485818 - DNA, 75 bp, synthetic construct
  source 1..75: mol_type = other DNA
gaaacgctggagtacaaacgccagctggctgagctgggcgacaaggtggagcaccagaaacgcctgaatgaactt

SEQ ID NO: 485819 - DNA, 75 bp, synthetic construct
  source 1..75: mol_type = other DNA
gtacggtgataatccggctgcgctggcgaaggccacatcggcactgaagaacacctggtctgcggaggagcagct

SEQ ID NO: 485820 - DNA, 75 bp, synthetic construct
  source 1..75: mol_type = other DNA
ccgtcagccgtctggctgaagagctgacaggtaaaaagcatacatcaccgaaaacgcgctctgccggggagaggg

SEQ ID NO: 485821 - DNA, 75 bp, synthetic construct
  source 1..75: mol_type = other DNA
tgacggtgccgaataactttacgctccccgaaaacagtgagggcgtcattctgacagaaatttcaggtggtcagt

SEQ ID NO: 485822 - DNA, 75 bp, synthetic construct
  source 1..75: mol_type = other DNA
gcaccgaaaccgtgttttgaagtttatctgaacaatggcgcagaagaggggtattgggatatcgaaatgtatgta

SEQ ID NO: 485823 - DNA, 75 bp, synthetic construct
  source 1..75: mol_type = other DNA
atgcgtctttttggcaaagtggcagaatttagtgctgcctttgcgctattcgttctggttgtgatgacaattgga

SEQ ID NO: 485824 - DNA, 75 bp, synthetic construct
  source 1..75: mol_type = other DNA
acgcgcagagaaagttaaaattcgcgccctggaccgcgacggtaaaccatttgaactggaagcagacggtctgtt

SEQ ID NO: 485825 - DNA, 75 bp, synthetic construct
  source 1..75: mol_type = other DNA
ctttttgcctgacgggcaacgcaacgcgattcgcctggagcggctgaaagataagctgggcaatcgctccaacgc

SEQ ID NO: 485826 - DNA, 75 bp, synthetic construct
  source 1..75: mol_type = other DNA
aatgccagtgaacagcatctgggaaggttctggcaatattatgtgcctcgatgtgctgcgcgttctcaataagca

SEQ ID NO: 485827 - DNA, 75 bp, synthetic construct
  source 1..75: mol_type = other DNA
tgatgagcttgagcgcacgaaaggtaaacaggctgcggtgacggaggcgatgtccctgtttgcggatgtcatgaa

SEQ ID NO: 485828 - DNA, 75 bp, synthetic construct
  source 1..75: mol_type = other DNA
gcgcgatgggcgcaaccaccttccgtaagcgtctggaaaaagcgggactggcaattgaagtaaaacattacgcca

SEQ ID NO: 485829 - DNA, 75 bp, synthetic construct
  source 1..75: mol_type = other DNA
tacccgtggtgaacaaatggaactggcacggattgcgctggcatcgctggaagcagagccggttgtgttctggtt

SEQ ID NO: 485830 - DNA, 75 bp, synthetic construct
  source 1..75: mol_type = other DNA
tggcgaagagtttgccatcatactttttaatgcaacattgccggaagcagagacggtagcagccagagtgaagca

SEQ ID NO: 485831 - DNA, 75 bp, synthetic construct
  source 1..75: mol_type = other DNA
gtactgtttctgttggcgatgtgtttgtatcttcctggggatatgagcaaacgaacgttaatttctaccaggtta

SEQ ID NO: 485832 - DNA, 75 bp, synthetic construct
  source 1..75: mol_type = other DNA
aagccatgcaggagcatctcctggaaaaaaagcgccaggagctggagaaaaacgaaagtcatccggagcctgagg

SEQ ID NO: 485833 - DNA, 75 bp, synthetic construct
  source 1..75: mol_type = other DNA
aacggttatgaaaatacccttacctgtttatctccggagtcactaccttctcaccacagcgtgagggtagatgcc

SEQ ID NO: 485834 - DNA, 75 bp, synthetic construct
  source 1..75: mol_type = other DNA
aatgaattagaaccgtggacgcctgaaggagccgacccaaattattgctggagggaggttgatccagttgatgct

SEQ ID NO: 485835 - DNA, 75 bp, synthetic construct
  source 1..75: mol_type = other DNA
caactactatcgcaatcaggcgtatatcgatttaaacaacttgccggaagatgcggaagccacccagtcggtggt

SEQ ID NO: 485836 - DNA, 75 bp, synthetic construct
  source 1..75: mol_type = other DNA
gtggcggcgctggggctgaaagaagggatagcaaaaagcctgcagtggacgcacaacgatgaatgccttaaacca

SEQ ID NO: 485837 - DNA, 75 bp, synthetic construct
  source 1..75: mol_type = other DNA
gcccggaggatattcatccggatgcgcaagaggaaaataacatttccgccaaaattagcgtggcggaattaaccg

SEQ ID NO: 485838 - DNA, 75 bp, synthetic construct
  source 1..75: mol_type = other DNA
cgctttccggcgggcaacgtcagcgagtggcgctcgggcgggcgattgtgcgcgaagcgggcgtgtttttaatgg

SEQ ID NO: 485839 - DNA, 75 bp, synthetic construct
  source 1..75: mol_type = other DNA
acgcgcctgacacttagcccgctactcaatggcctggtttgccacctcgtgatggttaagggggatacacgagcc

SEQ ID NO: 485840 - DNA, 75 bp, synthetic construct
  source 1..75: mol_type = other DNA
aaaatcgccaaagaggtgattgatgagcgggtgaactgggcggcgcaaattctcggcctgcgtgagtacctgaaa

SEQ ID NO: 485841 - DNA, 75 bp, synthetic construct
  source 1..75: mol_type = other DNA
gacggtgataagtttgttactgaaacactgaaattaacgattccagaaaataaattagtacaattaaaactacag

SEQ ID NO: 485842 - DNA, 75 bp, synthetic construct
  source 1..75: mol_type = other DNA
atgcaggagaaaatatcactattcattttgatatgacgaaatgtcatttctttgatgcagaaacggaaatagcac

SEQ ID NO: 485843 - DNA, 75 bp, synthetic construct
  source 1..75: mol_type = other DNA
tttgtgttggtgacatatttgtgtcttcatggggatacgaacaaacgaatgttaatttctatcaggtcatttctg

SEQ ID NO: 485844 - DNA, 75 bp, synthetic construct
  source 1..75: mol_type = other DNA
gtttgattacatgcgccatatcgtgagccatttcgccgctgagcgtatgaaacacgttaagcaatacttagagga

SEQ ID NO: 485845 - DNA, 75 bp, synthetic construct
  source 1..75: mol_type = other DNA
ctgcacaagaaaaaatggaatcgttaatggcaagttttcagaatgggttaaacttagtgatcttagcagtgaaag

SEQ ID NO: 485846 - DNA, 75 bp, synthetic construct
  source 1..75: mol_type = other DNA
ggttcgtataactgagccatattcagcctcatgtgttggaggggaaagcgaatatattaaagaaggtaataaatc

SEQ ID NO: 485847 - DNA, 75 bp, synthetic construct
  source 1..75: mol_type = other DNA
aacctgaatctaacatacctgatgaaaataatataaatacatttaagcaattgcaggcatgtaatagacacggtt

SEQ ID NO: 485848 - DNA, 75 bp, synthetic construct
  source 1..75: mol_type = other DNA
gttctatgcagacgatccgcaccaatactgcggttatcgacagctttcctatgcgttttcacaacagtgaagacg

SEQ ID NO: 485849 - DNA, 75 bp, synthetic construct
  source 1..75: mol_type = other DNA
ccacaagtgctgatacatgcaattcagcaattgaaacgacgaagccccgcaagtgtcgttaccactcgcagggct

SEQ ID NO: 485850 - DNA, 75 bp, synthetic construct
  source 1..75: mol_type = other DNA
tttctgttcacggtaaaaaaaccgtcaccgtccaggaggttcgcgcttctgttcttctgactcgttcatcgatag

SEQ ID NO: 485851 - DNA, 75 bp, synthetic construct
  source 1..75: mol_type = other DNA
gcgcccgaaaggcggatttttactgtggatcgaattgcctgaacaggtcgatatggtctgcgtcgcgcggcagct

SEQ ID NO: 485852 - DNA, 75 bp, synthetic construct
  source 1..75: mol_type = other DNA
ctctctcgctcaacgtcatgatattgtgatttttgaagatgatgtctacggcgaactggcaacggagtatccgcg

SEQ ID NO: 485853 - DNA, 75 bp, synthetic construct
  source 1..75: mol_type = other DNA
gtccgtaccttctgaccggggtcgccaaacttaccggtctgaaaatgtacagacagttaccggggttttattccc

SEQ ID NO: 485854 - DNA, 75 bp, synthetic construct
  source 1..75: mol_type = other DNA
ctgcatcagactcatcgctttgagcatatcttttcctggcttttattaacgccagagcaattacagaacacgccg

SEQ ID NO: 485855 - DNA, 75 bp, synthetic construct
  source 1..75: mol_type = other DNA
aactgttcaggagattcgcgcttcagttcatcggacccattcaatgagcggatataagaccccattacttaatga

SEQ ID NO: 485856 - DNA, 75 bp, synthetic construct
  source 1..75: mol_type = other DNA
tgtacgagagctttattcacccgatcaccattctctcgacgctacccaccgcaggggttggcgcactgctggcgt

SEQ ID NO: 485857 - DNA, 75 bp, synthetic construct
  source 1..75: mol_type = other DNA
ggattatcggttatcgcgccctgcccgtttcggcgctgccggaagtggactatccgaccattcaggtggtcacgc

SEQ ID NO: 485858 - DNA, 75 bp, synthetic construct
  source 1..75: mol_type = other DNA
agatttcggttactaacagcgcgatcaacaacctgccgccagatgtggacctggtcatcactcaccgtgacctga

SEQ ID NO: 485859 - DNA, 75 bp, synthetic construct
  source 1..75: mol_type = other DNA
aagttccggcggtgcgtcagttatcaccttacagttccagctaacattaccgctcgatgtcgccgagcaggaagt

SEQ ID NO: 485860 - DNA, 75 bp, synthetic construct
  source 1..75: mol_type = other DNA
tcgacgacgccatcgtggtgatcgaaaacatttcccgctatatcgaaaaaggcgaaaaaccactggcagcggcgc

SEQ ID NO: 485861 - DNA, 75 bp, synthetic construct
  source 1..75: mol_type = other DNA
ctgattgcagtgctgatcccgctactgtttatgggcgatatcgtcgggcgactgttccgcgaatttgccattact

SEQ ID NO: 485862 - DNA, 75 bp, synthetic construct
  source 1..75: mol_type = other DNA
cagaaagttaaccgtatttttgcgaccatcatgccgctggtgggtctatctccggcactggctcctctgttagga

SEQ ID NO: 485863 - DNA, 75 bp, synthetic construct
  source 1..75: mol_type = other DNA
atgcaacctgggaaaagatttttagtctggctggcaggtttgagcgtactcggttttctggcaaccgatatgtat

SEQ ID NO: 485864 - DNA, 75 bp, synthetic construct
  source 1..75: mol_type = other DNA
ccaacggcgcaatctacccgattgttgtcgcccaggcgctgcgccccttcccacatgcgaccggccgcgctgcag

SEQ ID NO: 485865 - DNA, 75 bp, synthetic construct
  source 1..75: mol_type = other DNA
tgcgggcggtgcggcaatcatccacttcctgggtggtatccacgaaatctacttcccgtatgtgctgatgaatcc

SEQ ID NO: 485866 - DNA, 75 bp, synthetic construct
  source 1..75: mol_type = other DNA
gagtccgtcatcgagcgtctggcgcacaccaccagcgtggatgaagtgctggaactgctggcaggtcgtaagtaa

SEQ ID NO: 485867 - DNA, 75 bp, synthetic construct
  source 1..75: mol_type = other DNA
cttgcggtactggcgatgacaccaaaaggtgcttacttcgctaacatcgcgggtgtgtgtgcggcgatggcagtc

SEQ ID NO: 485868 - DNA, 75 bp, synthetic construct
  source 1..75: mol_type = other DNA
gcgactggcaggacaaagggctggtggcgtatgtcaacgttgatcgcgacagcgccagccgtctggggatcagca

SEQ ID NO: 485869 - DNA, 75 bp, synthetic construct
  source 1..75: mol_type = other DNA
actgaaacagacatgggcggatgaagacatgctgcgcggtgactggctggccggtctgaagtccggctgggggga

SEQ ID NO: 485870 - DNA, 75 bp, synthetic construct
  source 1..75: mol_type = other DNA
tatgtgggaggtgaaggaagtccggcgcagatgcgtcgcgctgagggtatccggtttgagcagaacaacaacgtg

SEQ ID NO: 485871 - DNA, 75 bp, synthetic construct
  source 1..75: mol_type = other DNA
tgtcgggcgtatcggcggtgccattggcggtgccttcgccgggggcggggcgcatgtctccacgggaacggccat

SEQ ID NO: 485872 - DNA, 75 bp, synthetic construct
  source 1..75: mol_type = other DNA
gcgtgcaacaggcgtcagcaaaggtccggggcagcagaaagccgtcaggatcgcagcgtcggctgaagagctgac

SEQ ID NO: 485873 - DNA, 75 bp, synthetic construct
  source 1..75: mol_type = other DNA
gcgtgcaacaggcgtcagcaaaggtccggggcagcagaaagccgtcaggaacgctgcgtcggctgaagagctgac

SEQ ID NO: 485874 - DNA, 75 bp, synthetic construct
  source 1..75: mol_type = other DNA
gagacgctggagtacaaacgccagctggctgagctgggcgacaaggttgaacaccagaaacgcctgaatgagctg

SEQ ID NO: 485875 - DNA, 75 bp, synthetic construct
  source 1..75: mol_type = other DNA
gcggtggtggcgatgtatatcgtgctcggcattctgtacgagagctttattcacccgatcaccattctctcgacg

SEQ ID NO: 485876 - DNA, 75 bp, synthetic construct
  source 1..75: mol_type = other DNA
ctccagcaactgccacagctttctgatgtctccagcgactggcaggacaaagggctggtggcgtatgtcaatgtt

SEQ ID NO: 485877 - DNA, 75 bp, synthetic construct
  source 1..75: mol_type = other DNA
ccagatgcaatccgcagaagagtatcgccagttgattatcgcttaccagaacggcgcgccgattcgtcttggcga

SEQ ID NO: 485878 - DNA, 75 bp, synthetic construct
  source 1..75: mol_type = other DNA
atgcgctggcgaaggccacatcggcactgaagaacacctggtctgcggaggagcagcttcgtggaagctggatgg

SEQ ID NO: 485879 - DNA, 75 bp, synthetic construct
  source 1..75: mol_type = other DNA
gctgaaaatgcccggaatgccggtgaactgggacgatttatgtcggtggcccgtgtggcggcaggtggcggggtt

SEQ ID NO: 485880 - DNA, 75 bp, synthetic construct
  source 1..75: mol_type = other DNA
ttcacccgcctgaaaaacagtctcgacagcaccgaaagtctgacccagcagcgccgcagcaaagccaccggcggt

SEQ ID NO: 485881 - DNA, 75 bp, synthetic construct
  source 1..75: mol_type = other DNA
cctattttctggctcaaacccacgacgaaggcccgtaacaatagtcaggatggtctgacctttaccgacctgcta

SEQ ID NO: 485882 - DNA, 75 bp, synthetic construct
  source 1..75: mol_type = other DNA
aatcgacgccacacaaaaaacggtttccgcacttggcgatgcccaaaccagcgcacactatcaggaaatggttaa

SEQ ID NO: 485883 - DNA, 75 bp, synthetic construct
  source 1..75: mol_type = other DNA
tcgccgcgcctgagccggtgaaagaacaaaagcctgagatgaaaatccgggctgaggcggtagcagaaattcagg

SEQ ID NO: 485884 - DNA, 75 bp, synthetic construct
  source 1..75: mol_type = other DNA
gcgcgagcgctttaaagaagccgcagaacacgatggttactttggcggtggccagatttacatcgacgttcgttc

SEQ ID NO: 485885 - DNA, 75 bp, synthetic construct
  source 1..75: mol_type = other DNA
gcggtgtctgtcggaacatcttttaatgccggaacgcatacggtacttaaagccggtatttctgcggatacgcaa

SEQ ID NO: 485886 - DNA, 75 bp, synthetic construct
  source 1..75: mol_type = other DNA
ggctaatcagcgcactaccacggaacaagggcagaaaatgaatgcactgacaaccgatgtggcagcacaacagca

SEQ ID NO: 485887 - DNA, 75 bp, synthetic construct
  source 1..75: mol_type = other DNA
acgcagcaacagttaaccaacacccaaaaacgggttgcagataacagccaacaaattaacacgctcaataaccat

SEQ ID NO: 485888 - DNA, 75 bp, synthetic construct
  source 1..75: mol_type = other DNA
tagggcttcgctataaatatggtagcgcagcagaccgcttcagccgatttgtatcctggctttcaacgattggta

SEQ ID NO: 485889 - DNA, 75 bp, synthetic construct
  source 1..75: mol_type = other DNA
cgtgtagtcggtgatgattttgctaaaccctggtatcagttctttaatagcctcttgcaggacagtgcttatgaa

SEQ ID NO: 485890 - DNA, 75 bp, synthetic construct
  source 1..75: mol_type = other DNA
ttaccaaaaccctgttttgaggtttatctgaacaatggcgcgcaagatggttattgggatatcgaaatgtatgtc

SEQ ID NO: 485891 - DNA, 75 bp, synthetic construct
  source 1..75: mol_type = other DNA
ccgtacatgcaagccggatgattgatttcgtctctcggcaggtgccggatctgctgaaagcatcgtataacttcc

SEQ ID NO: 485892 - DNA, 75 bp, synthetic construct
  source 1..75: mol_type = other DNA
tgaggcggaaacggatcagatttatgagagcaccggagcagtgaccaataacgaagtacgcgaacggctggcgac

SEQ ID NO: 485893 - DNA, 75 bp, synthetic construct
  source 1..75: mol_type = other DNA
tcagtgccataccgtccgtaaaattcgccgggctgagcccaacgggactgaatgcgtcgagtgagggtgaaatcc

SEQ ID NO: 485894 - DNA, 75 bp, synthetic construct
  source 1..75: mol_type = other DNA
ttatggtggcgcagacggatattgatgctaataaagtcgccattgctgacacccgcaatgatgtctcggtcgtgc

SEQ ID NO: 485895 - DNA, 75 bp, synthetic construct
  source 1..75: mol_type = other DNA
accatctcacagcccctgcgcggagacttcatccggaccgcagccaccgccggggcggtgatgtaccagacggat

SEQ ID NO: 485896 - DNA, 75 bp, synthetic construct
  source 1..75: mol_type = other DNA
aacatccttgatgtcatattatgtaaagatattgataacacatgcaggaagctaaaaatactgttagatatgatt

SEQ ID NO: 485897 - DNA, 75 bp, synthetic construct
  source 1..75: mol_type = other DNA
aaggtggctggtggggcagagattgagtggcctgtgactggtgctacatcacagcttgattacgtcgcgagttat

SEQ ID NO: 485898 - DNA, 75 bp, synthetic construct
  source 1..75: mol_type = other DNA
atgtcaaatacacagaaaattattaacactgaaaaatataacgagtgggtgaaaaaattctctgagcagattttt

SEQ ID NO: 485899 - DNA, 75 bp, synthetic construct
  source 1..75: mol_type = other DNA
acccgcatcagcgtttctccgcaacgggcactgacacacctgttcacactggcgtaaccggcggcggtattgctt

SEQ ID NO: 485900 - DNA, 75 bp, synthetic construct
  source 1..75: mol_type = other DNA
agaaatggttttcgcgcgtcatggcgctcatcagcaaaacccgtgacacggacagcgagcagttcgctcacgtgc

SEQ ID NO: 485901 - DNA, 75 bp, synthetic construct
  source 1..75: mol_type = other DNA
gcacatgcccagtcaacggctgaccatgccaacgctaacgccaacaccgctctgatcaacggcgtcaaactttcc

SEQ ID NO: 485902 - DNA, 75 bp, synthetic construct
  source 1..75: mol_type = other DNA
aacgcatacggtacttaaagcaggtatttctgcggatacacaatctgatttcggtgcgggtgtcggcgtgggata

SEQ ID NO: 485903 - DNA, 75 bp, synthetic construct
  source 1..75: mol_type = other DNA
tgccggaacgcatacggtacttaaagcaggtatttctgcggatacacaatctgatttcggtgcgggtgtcggcgt

SEQ ID NO: 485904 - DNA, 75 bp, synthetic construct
  source 1..75: mol_type = other DNA
aggctaaagtcacaatggatgggcttcccgatgcgagtgactcttccctttttgcccttgatcctggaggcgcgg

SEQ ID NO: 485905 - DNA, 75 bp, synthetic construct
  source 1..75: mol_type = other DNA
ctgatgaaagggctgaatctgccggtgaaaaagaaaaacggcctgcgggtgacgcctgctgatcagatagacatt

SEQ ID NO: 485906 - DNA, 75 bp, synthetic construct
  source 1..75: mol_type = other DNA
gaacccgataaccaatcaagcgcagaccgtccgcgacaacgggcaggacaccgccattcaggacgcgcaacatgc

SEQ ID NO: 485907 - DNA, 75 bp, synthetic construct
  source 1..75: mol_type = other DNA
taaatggatgttcaaagatggcgtagtggtaaagcgaacttataccggggaagagcagaggcagcaggcggaaaa

SEQ ID NO: 485908 - DNA, 75 bp, synthetic construct
  source 1..75: mol_type = other DNA
gtctacctgggtctgtggggcgtatttacgctgtttatgttcttcggcacgctgaaaggcgcacgcgtcctgcaa

SEQ ID NO: 485909 - DNA, 75 bp, synthetic construct
  source 1..75: mol_type = other DNA
tgtttgccctgctggcgatcggtaacattgccggtaatgccgcgatcatccactttgccggctggattggtctga

SEQ ID NO: 485910 - DNA, 75 bp, synthetic construct
  source 1..75: mol_type = other DNA
cgactatttataccgccctggatattgtatcccgtgagcaggtaggttttatccctgcggtagcaaaaaacgcaa

SEQ ID NO: 485911 - DNA, 75 bp, synthetic construct
  source 1..75: mol_type = other DNA
ggccgcgccagcaggagaagctgttaccgttttctgacgtccgcgaggagctgccgcgcggcacgtttgcttata

SEQ ID NO: 485912 - DNA, 75 bp, synthetic construct
  source 1..75: mol_type = other DNA
ctgcccgctttgcgggcaggctaacgaacgtattgtgtttgttgaaggtttttcgacgttgttttccatctgtgg

SEQ ID NO: 485913 - DNA, 75 bp, synthetic construct
  source 1..75: mol_type = other DNA
ccggaagaagttgacgtctcccgcgaccgtatcgattaccaggcgctgccggagcacgaaaaacacatctttatc

SEQ ID NO: 485914 - DNA, 75 bp, synthetic construct
  source 1..75: mol_type = other DNA
ctgtttgtccaggcggcacaacaggagaaagactgggcggattatctgttccgtgacggttcgatgattggtctg

SEQ ID NO: 485915 - DNA, 75 bp, synthetic construct
  source 1..75: mol_type = other DNA
caccaacgagcagatccagaaacgcgcggaagggatttcagcttactacgacgaactgatcgaaatgaccagtta

SEQ ID NO: 485916 - DNA, 75 bp, synthetic construct
  source 1..75: mol_type = other DNA
attgtttacgatgaaaataatattattgttgccatcaccagagatgcctccacgcttaatcccgaaggttttagc

SEQ ID NO: 485917 - DNA, 75 bp, synthetic construct
  source 1..75: mol_type = other DNA
aagagcagaggcaacaggcggaaaatgaaaagcaaagcctgctacagctcgtcagggataaaacccagctgtggg

SEQ ID NO: 485918 - DNA, 75 bp, synthetic construct
  source 1..75: mol_type = other DNA
agcaattaatccagaaggcgcaagcgtcgttgaattacctgatattacagcaaatcgccgggctgatatttcggg

SEQ ID NO: 485919 - DNA, 75 bp, synthetic construct
  source 1..75: mol_type = other DNA
ttgatgataattatttatcgctggggtttgtttcaacaggaaagataagcgccaacgtaggaatggttcagccac

SEQ ID NO: 485920 - DNA, 75 bp, synthetic construct
  source 1..75: mol_type = other DNA
ggttcacgacggtaaatgcctgaagccaggccaatttgacggtctggaaatgcgcgctgatttaagccagtccgc

SEQ ID NO: 485921 - DNA, 75 bp, synthetic construct
  source 1..75: mol_type = other DNA
ggatctgagtgctaactaccatgaagggcaatacacttctgccgggttgtcgctgcaaggcggagccacgttaac

SEQ ID NO: 485922 - DNA, 75 bp, synthetic construct
  source 1..75: mol_type = other DNA
cgccattgctcaccaccaccagcgtgatgttatcaacagtagtgctggtcgctctgggttacatgatgcaacgtt

SEQ ID NO: 485923 - DNA, 75 bp, synthetic construct
  source 1..75: mol_type = other DNA
ggctcacggtggcgcgttgcaccgtactcaaaatatgggcggtacgcgattactgattgacgctgacggtgttgc

SEQ ID NO: 485924 - DNA, 75 bp, synthetic construct
  source 1..75: mol_type = other DNA
ccaggtcaacttgacggtctggaaatacgtgctgatttaagtcagttcgcactgctcatcaccttaccgcaggct

SEQ ID NO: 485925 - DNA, 75 bp, synthetic construct
  source 1..75: mol_type = other DNA
ttatcagcatacccgcagtaatgatgaagagacagaagacagcaccgaaagaaactgggactggagccgttacta

SEQ ID NO: 485926 - DNA, 75 bp, synthetic construct
  source 1..75: mol_type = other DNA
tgtcgcccaggcgctgcgtcccttcccacacgcaactggtcgcgccgcagcgttgcagaacactcttcaactggg

SEQ ID NO: 485927 - DNA, 75 bp, synthetic construct
  source 1..75: mol_type = other DNA
cgctgaagccgcctctcagagcgcagcggcagcaaagaaatcagaaacagcagcggcatcgtccaggaacgcggc

SEQ ID NO: 485928 - DNA, 75 bp, synthetic construct
  source 1..75: mol_type = other DNA
tgtcgcccaggcgctgcgtcccttcccacacgcaactggtcgcgccgcagctttgcagaacactctacaactggg

SEQ ID NO: 485929 - DNA, 75 bp, synthetic construct
  source 1..75: mol_type = other DNA
ttccatcagctttatcgccgcgatgtggtatgtcggcgcgacctgcgccgatttggtcggctattggctttatga

SEQ ID NO: 485930 - DNA, 75 bp, synthetic construct
  source 1..75: mol_type = other DNA
aaactgtttggcgaaccggtggctttcgaggaagagcagccgcagcaaacccgttttcgcgatctgtttaatcgc

SEQ ID NO: 485931 - DNA, 75 bp, synthetic construct
  source 1..75: mol_type = other DNA
aaaactgtatctctgcctgatgagcgttaacgcgctggaagcgattcgtttctacgtcagctttgcttgttcctt

SEQ ID NO: 485932 - DNA, 75 bp, synthetic construct
  source 1..75: mol_type = other DNA
atcgacatgaactacatcaccagtttcaccggtatgacagataaatggttttacaagctgatcagtgaaggccat

SEQ ID NO: 485933 - DNA, 75 bp, synthetic construct
  source 1..75: mol_type = other DNA
taactggatgtttaaagatggctcagtcattaaacgtgtgtataccgaagaagagcaacgcttgcaggctgaaaa

SEQ ID NO: 485934 - DNA, 75 bp, synthetic construct
  source 1..75: mol_type = other DNA
tgatgaaggtatttcacagaaagaatttatccgtacgctgacgccccgcctgcaaaagctgggatggtggggaaa

SEQ ID NO: 485935 - DNA, 75 bp, synthetic construct
  source 1..75: mol_type = other DNA
atatcagctaacaaagaattttaatgttatctggttatggtccgaagacggaaaaaactggtatgaggaagtgaa

SEQ ID NO: 485936 - DNA, 75 bp, synthetic construct
  source 1..75: mol_type = other DNA
gtcattaaacgtgtgtataccgaagaagagcaacgcttgcaggctgaaaaccagaaacaaaggttattacagcag

SEQ ID NO: 485937 - DNA, 75 bp, synthetic construct
  source 1..75: mol_type = other DNA
gtcgtagaggaaggcaaacagacactgacactcgacggtaaaacctggctgctcgaacgcccgctgcgcgccgac

SEQ ID NO: 485938 - DNA, 75 bp, synthetic construct
  source 1..75: mol_type = other DNA
cgtgtgttgccggtgaaattctttggcgggctggggacactcggcggaggcatggtgttggggcgcgaagggcca

SEQ ID NO: 485939 - DNA, 75 bp, synthetic construct
  source 1..75: mol_type = other DNA
caatccgtgaggaagtggagcgggctgtcagtgagggtatcacccgtgaggaatttacccgcacactggctcccc

SEQ ID NO: 485940 - DNA, 75 bp, synthetic construct
  source 1..75: mol_type = other DNA
gaatttacccgcacactggccccccggctgcaaaaactcggatggtggggaaaacaaatcatcgtggatgcagac

SEQ ID NO: 485941 - DNA, 75 bp, synthetic construct
  source 1..75: mol_type = other DNA
gcacgcctggatgtggtgaccacgttacaggccgaagtgcagcgggccattgatgaaggtatttcacagaaagaa

SEQ ID NO: 485942 - DNA, 75 bp, synthetic construct
  source 1..75: mol_type = other DNA
cgttgattgacgtcggtaaactttctgacgcgccgcttaatacgctgtggctttatctgatcctcggtattattt

SEQ ID NO: 485943 - DNA, 75 bp, synthetic construct
  source 1..75: mol_type = other DNA
cctgaaaggtgatgaagctcgccatacgctgttggcaaccggtgcggcggcgggtctggcggcggcctttaacgc

SEQ ID NO: 485944 - DNA, 75 bp, synthetic construct
  source 1..75: mol_type = other DNA
accaccaacgctgacggtgaattgattactatcgacaccaccgacaacaaaattttgagccgtaaaaagttgctg

SEQ ID NO: 485945 - DNA, 75 bp, synthetic construct
  source 1..75: mol_type = other DNA
atggcatataccaccttttcacagacgaaaaatgatcagctcaaagaaccgatgttctttggtcagccggtcaac

SEQ ID NO: 485946 - DNA, 75 bp, synthetic construct
  source 1..75: mol_type = other DNA
acagcgtattgctgcgtgccgacgatcccctgatcgacatgaactacatcaccagtttcaccggtatgaccgata

SEQ ID NO: 485947 - DNA, 75 bp, synthetic construct
  source 1..75: mol_type = other DNA
ctagcttacacagcagagggagttattgttgctattgataaggatgtatcggcaattaatccagaaggtttaagc

SEQ ID NO: 485948 - DNA, 75 bp, synthetic construct
  source 1..75: mol_type = other DNA
cacaccgtcaacggtaaaaccgtgaccgttagcctgcgcgagctgaagaaaaaactgtatctctgcctgatgagc

SEQ ID NO: 485949 - DNA, 75 bp, synthetic construct
  source 1..75: mol_type = other DNA
cgaaaaatgatcagctcaaagaaccgatgttctttggtcagccggtcaacgtggctcgctacgatcagcaaaaat

SEQ ID NO: 485950 - DNA, 75 bp, synthetic construct
  source 1..75: mol_type = other DNA
gaaggtaatgccaagattattcgcctgattgcccgtgacgaagcactacacctgaccggcactcagcatatgctg

SEQ ID NO: 485951 - DNA, 75 bp, synthetic construct
  source 1..75: mol_type = other DNA
aagacgcctccggcttctttcgtgacggcatgaccatcatggtgggcggatttatggggattggcactccatccc

SEQ ID NO: 485952 - DNA, 75 bp, synthetic construct
  source 1..75: mol_type = other DNA
acaaaaggcaactttgctttccgaagccgaatccgtgattttgccactggagcgcgctgtcaggctgaatatggc

SEQ ID NO: 485953 - DNA, 75 bp, synthetic construct
  source 1..75: mol_type = other DNA
tgccaaaacgggcgaggtgaaaggccgtctggtgctggatgatcgtaagcgtacggaagaggtgcgcccgctgca

SEQ ID NO: 485954 - DNA, 75 bp, synthetic construct
  source 1..75: mol_type = other DNA
gcccaggttgccgtgccggttatcgcgctggtgctgtgttacatcctctatgtggcaacccataccgaagtggca

SEQ ID NO: 485955 - DNA, 75 bp, synthetic construct
  source 1..75: mol_type = other DNA
ctggggcgcagcagccgctggtacaaaagtgaagtggagcagtggatgcagcaacgaatcgaggcatcacgagga

SEQ ID NO: 485956 - DNA, 75 bp, synthetic construct
  source 1..75: mol_type = other DNA
aagagcagaggcaacaagcggaaaatgaaaagcaaagcctgctacagctcgtcagggataaaacccagctatggg

SEQ ID NO: 485957 - DNA, 75 bp, synthetic construct
  source 1..75: mol_type = other DNA
tgatattcttcgcccgtcccctttcggtatttgctggattgctccccttccgcggtttcaatctgcgtgagcgcg

SEQ ID NO: 485958 - DNA, 75 bp, synthetic construct
  source 1..75: mol_type = other DNA
gggatgatctggacggtggctgagaaagaagataatgcagtgttgaagatcggcgttcgggtggcagaggacgaa

SEQ ID NO: 485959 - DNA, 75 bp, synthetic construct
  source 1..75: mol_type = other DNA
ggtggttccgcccgtcggacgtccggtgtcacgcgttggcctggatattcatccggaaaatccgtgggagcagtt

SEQ ID NO: 485960 - DNA, 75 bp, synthetic construct
  source 1..75: mol_type = other DNA
ctggcactttatacctgctggatacgggaatattttccctgcgaaatctgtattacgcgcccgaaaggcggattt

SEQ ID NO: 485961 - DNA, 75 bp, synthetic construct
  source 1..75: mol_type = other DNA
gcgaactggcaacggagtatccgcgcccgcggaccattcattcctgggatatcgacgggcgagtgctgctgtgca

SEQ ID NO: 485962 - DNA, 75 bp, synthetic construct
  source 1..75: mol_type = other DNA
tctgcaaaatttcgacggcctcgcctggctggcacaaatcgccatgttcctggtgctggggctgttggttaaccc

SEQ ID NO: 485963 - DNA, 75 bp, synthetic construct
  source 1..75: mol_type = other DNA
cacgtagtaaaaatatgcgcgcgatcgccacgcgcgatacggctattgagaagcgtcttgccagcctgttaactg

SEQ ID NO: 485964 - DNA, 75 bp, synthetic construct
  source 1..75: mol_type = other DNA
ggcgcgtactgattgtctgggagtgtgcgttacgtgggcgcgagaagctgacggatgaagcgcttaccgagcgtc

SEQ ID NO: 485965 - DNA, 75 bp, synthetic construct
  source 1..75: mol_type = other DNA
tgctaaccggtttcgactccaagtaccttaataccttgtacgtggataagaacctcaagcatcacggcttgatcc

SEQ ID NO: 485966 - DNA, 75 bp, synthetic construct
  source 1..75: mol_type = other DNA
cttatcacctctggtttaaccggcatgatggcggcgtggctgtttaatcttgatttgattgaaggcttattaatc

SEQ ID NO: 485967 - DNA, 75 bp, synthetic construct
  source 1..75: mol_type = other DNA
gattttgtcgttgatgaatatcgctgcgtgatatttacccacggctgcttctggcaccatcatcactgctatctg

SEQ ID NO: 485968 - DNA, 75 bp, synthetic construct
  source 1..75: mol_type = other DNA
aaacgttgagcgcgatcgtcgtgatatcagccgattgcaggaactcggctggcgtgtattgattatctgggagtg

SEQ ID NO: 485969 - DNA, 75 bp, synthetic construct
  source 1..75: mol_type = other DNA
ggcatcagcgttgaagcgctggaactcgcgctggaacagtggccgattaaaggcatcattctggtgccaaactgt

SEQ ID NO: 485970 - DNA, 75 bp, synthetic construct
  source 1..75: mol_type = other DNA
tcgcgtctgacgatcagcccattactaagcggccttacctgttatattgtgatggtcaacggtgacactttagcc

SEQ ID NO: 485971 - DNA, 75 bp, synthetic construct
  source 1..75: mol_type = other DNA
ttgcggcaattctttatcggcagccatacctcagaaatgctgcaaaagacgcaacaaccgcttctaatcctgcgt

SEQ ID NO: 485972 - DNA, 75 bp, synthetic construct
  source 1..75: mol_type = other DNA
gccggtggcgaagccgcgaagaaagttgagatcccgggtgttgcgactaccgcatcaccaagttctgaagtcggt

SEQ ID NO: 485973 - DNA, 75 bp, synthetic construct
  source 1..75: mol_type = other DNA
gaatgatgctggtcatgctgatgttcaattactgcaaaaacatggcgcgttggatgaaatcctggctgatttagg

SEQ ID NO: 485974 - DNA, 75 bp, synthetic construct
  source 1..75: mol_type = other DNA
ttgacggctcaccgtctacccgacctgtgtgcgaatacgcggcctgggccgccaatctgctggatgcgccgctgt

SEQ ID NO: 485975 - DNA, 75 bp, synthetic construct
  source 1..75: mol_type = other DNA
ccgcctgctggaagacgagtccgtgaccggcgccctgtgccgctacgcggacgctaatgatatcgacctcatggt

SEQ ID NO: 485976 - DNA, 75 bp, synthetic construct
  source 1..75: mol_type = other DNA
ctcatataaggcggacaacccatatcatgaagtttgcccatcgtaatagttttgactttcatttctttaatgccc

SEQ ID NO: 485977 - DNA, 75 bp, synthetic construct
  source 1..75: mol_type = other DNA
gagcgagaaatgcaggctgaacgcgtggaagcaacgcgcttcacccagcgcgctgccgaggccgcctatcagcgc

SEQ ID NO: 485978 - DNA, 75 bp, synthetic construct
  source 1..75: mol_type = other DNA
gaagcccggttgccagtacttgccgaagagatgtcattactgatgctggacagccgccgggtgatccaaagcatt

SEQ ID NO: 485979 - DNA, 75 bp, synthetic construct
  source 1..75: mol_type = other DNA
tcctcaaaataacaaagtttattttgggacttgttataaaggaccttttattagtcgtaaaccagtcggtgaggt

SEQ ID NO: 485980 - DNA, 75 bp, synthetic construct
  source 1..75: mol_type = other DNA
gccatgcaccggcatctggaggctgaccacgataagctgccgctggtggtgccgatactgttttatcagggcgag

SEQ ID NO: 485981 - DNA, 75 bp, synthetic construct
  source 1..75: mol_type = other DNA
ctgcatgttgtgattgaacaccaaagcaagccggataagaaaatggcctttcgcatgatgcgttattctatagcc

SEQ ID NO: 485982 - DNA, 75 bp, synthetic construct
  source 1..75: mol_type = other DNA
caacatccgagactggtgcaaaaacgacttcgaggtcgtcaaccagttgcgtatgaacactgaaaatagccatca

SEQ ID NO: 485983 - DNA, 75 bp, synthetic construct
  source 1..75: mol_type = other DNA
tgaagataacacaatgggtgatgcatcgttatgatatccggttgattgttctgtgtcctgatgaggtataccggg

SEQ ID NO: 485984 - DNA, 75 bp, synthetic construct
  source 1..75: mol_type = other DNA
cgtttttccaatcagggctatgttgaaccagggaaatacaacttacaggttcaggtaaacaaacaaccgttaccc

SEQ ID NO: 485985 - DNA, 75 bp, synthetic construct
  source 1..75: mol_type = other DNA
aaaagggaatgcgagtcccacggttcccgctgatgtacagcctgtgattcaggagcagacgcagcaggtaacgcc

SEQ ID NO: 485986 - DNA, 75 bp, synthetic construct
  source 1..75: mol_type = other DNA
gcggttatacgcgaagcaagaagaactgaaagagaaaattgagtttgtcgaagaatttgccgaactcggtaagta

SEQ ID NO: 485987 - DNA, 75 bp, synthetic construct
  source 1..75: mol_type = other DNA
ggccattgtgtttaaagacgataatgcggttagttttcatgaggatgttcaggagggggtagatgagtataaaaa

SEQ ID NO: 485988 - DNA, 75 bp, synthetic construct
  source 1..75: mol_type = other DNA
gcggttggtttttatgaggatgttcaggaggggatagaggagtataaaaatttaaaatgttgtatattggtcgat

SEQ ID NO: 485989 - DNA, 75 bp, synthetic construct
  source 1..75: mol_type = other DNA
atggcaagcatccccaatccaacaaagcccgatgtatacaggatagaagttttggatcttagcgttagcgcagga

SEQ ID NO: 485990 - DNA, 75 bp, synthetic construct
  source 1..75: mol_type = other DNA
aacaagggaatttctgtcacccaactcaaaagtcttgttggcgttacatatgaaatggcgcggcgatacacaatc

SEQ ID NO: 485991 - DNA, 75 bp, synthetic construct
  source 1..75: mol_type = other DNA
accggtgaatatgatatttactggtatgcaacagaaaatgacgccaataagacttacgcctgtctgtcgccagaa

SEQ ID NO: 485992 - DNA, 75 bp, synthetic construct
  source 1..75: mol_type = other DNA
ctggctggcgttaaacctggcgagcatatgacggttttgtggaacggtaaggctcagtgtgaaatcaacctgccc

SEQ ID NO: 485993 - DNA, 75 bp, synthetic construct
  source 1..75: mol_type = other DNA
tccggcggcgaagcctcctgggggattgccaacggctggtcgctttacggcggcgcgctggcggatgaaaactat

SEQ ID NO: 485994 - DNA, 75 bp, synthetic construct
  source 1..75: mol_type = other DNA
gcagaacggccaggtgcaggaatatgacatcagtacggcctcgatgccgttcctgactcgccaggggcaggtgcg

SEQ ID NO: 485995 - DNA, 75 bp, synthetic construct
  source 1..75: mol_type = other DNA
aatgccctggcagacgatatcattcagtttgatggccgatttcttgatttaaaaggcaataccaaaattgatttg

SEQ ID NO: 485996 - DNA, 75 bp, synthetic construct
  source 1..75: mol_type = other DNA
gcctttccggcccccatcaaactcggccgcaactcccgatggctgaaaagtgaagtggaagcctggttgcaggcg

SEQ ID NO: 485997 - DNA, 75 bp, synthetic construct
  source 1..75: mol_type = other DNA
gcatcgacaacgatgccacatttttggctggttggcaaatctgtcatcagggcggacaacaacgccacgatctca

SEQ ID NO: 485998 - DNA, 75 bp, synthetic construct
  source 1..75: mol_type = other DNA
atgattaagattgagaatttgacaaagtcatatcgtactccaacggggcgacactatgtgtttaaggatttaaac

SEQ ID NO: 485999 - DNA, 75 bp, synthetic construct
  source 1..75: mol_type = other DNA
cgatcagtataccgatctatctgaagagcaaaaacaacagatcgaaaggatcgtgccagcagatcaattgctggg

SEQ ID NO: 486000 - DNA, 75 bp, synthetic construct
  source 1..75: mol_type = other DNA
tacaaacaacatgtaaaaactgtggtgtggctgttttaccacctgacgattattgtaaaagttgtgcggataaaa

SEQ ID NO: 486001 - DNA, 75 bp, synthetic construct
  source 1..75: mol_type = other DNA
tgagggcgctgacgctcaaactggtaacaaaacgcgtctggcattcgcgggtcttaaatacgctgacgttggttc

SEQ ID NO: 486002 - DNA, 75 bp, synthetic construct
  source 1..75: mol_type = other DNA
atcgccaggatcagaccaactacaacatgatgctttctcattatttcaatttaggaagccttcgcaacctgagcg

SEQ ID NO: 486003 - DNA, 75 bp, synthetic construct
  source 1..75: mol_type = other DNA
ataccgcatgatattcaacctgtcattcaggagcagacacaacaggtggcaccaatggaaccgccgatgtctgtt

SEQ ID NO: 486004 - DNA, 75 bp, synthetic construct
  source 1..75: mol_type = other DNA
cgttcatgtaaataatcagccgttacctgacgactacgatatctactggtacgcaactgaaaacgatccgaataa

SEQ ID NO: 486005 - DNA, 75 bp, synthetic construct
  source 1..75: mol_type = other DNA
cttttggattaagtatggcttttaaattcgactattatcttattgatgaaatcacttctgttggagacgcaaagt

SEQ ID NO: 486006 - DNA, 75 bp, synthetic construct
  source 1..75: mol_type = other DNA
gtttgattattatattgtcgatgaagtaacggcagtcggtgatgctaggtttaaagaaaaatgtgcacattactt

SEQ ID NO: 486007 - DNA, 75 bp, synthetic construct
  source 1..75: mol_type = other DNA
gtttatctgtccttaagtttgccgtggggcgacaacagcaccatcagttacaacggcaactatggcagcggtgcc

SEQ ID NO: 486008 - DNA, 75 bp, synthetic construct
  source 1..75: mol_type = other DNA
gcgtgcaacaggcgtcagcaaaggtccggggcagcagtaagccgtcaggaccgcggcgtcggctgaagagctgac

SEQ ID NO: 486009 - DNA, 75 bp, synthetic construct
  source 1..75: mol_type = other DNA
tgcttacctgccatctcgacggtgtaactgaaacatatgctgatggctggaacgcctgccgcgccaccatgctta

SEQ ID NO: 486010 - DNA, 75 bp, synthetic construct
  source 1..75: mol_type = other DNA
atcagaacgtgctcatttcggtgaatttcgatagctctctggttgaaccgctaatatgctccgcacgctataccg

SEQ ID NO: 486011 - DNA, 75 bp, synthetic construct
  source 1..75: mol_type = other DNA
ttgagcgacggcactttatcgtggttagggaacgccttgtactggatgccgctgccagaaccgccgcagaaggtg

SEQ ID NO: 486012 - DNA, 75 bp, synthetic construct
  source 1..75: mol_type = other DNA
gggaaaggtgactggcgaatgaaatgggcgacttacatcccgggtcatcctgacgctaatgacgggtggctaatt

SEQ ID NO: 486013 - DNA, 75 bp, synthetic construct
  source 1..75: mol_type = other DNA
gttaaggccgttttgcgtagactggctggcaaccatccggattttccggatagttcccaacaatcgcccaagaaa

SEQ ID NO: 486014 - DNA, 75 bp, synthetic construct
  source 1..75: mol_type = other DNA
ccggtaactccggatggttggataagctgtagtgagcgaatgccagatgatggtcagcacgtaattattttatgt

SEQ ID NO: 486015 - DNA, 75 bp, synthetic construct
  source 1..75: mol_type = other DNA
tggagtacgacgacgatgagccaattggcggtgtaacccactggatgccgctaccagaacctccgaaggtggcga

SEQ ID NO: 486016 - DNA, 75 bp, synthetic construct
  source 1..75: mol_type = other DNA
ctgtagtgagcgaatgccggataccaaaacagccgttcttgttgccagggagtttgacaggaaaggtgactggcg

SEQ ID NO: 486017 - DNA, 75 bp, synthetic construct
  source 1..75: mol_type = other DNA
ggcaacctgtactgacttacggtgacttaactcgtctggagccttcaacagtaacgccactgcaagtatttgatg

SEQ ID NO: 486018 - DNA, 75 bp, synthetic construct
  source 1..75: mol_type = other DNA
ctccggtaactccggatggttggataagctgtagtgagcgaatgcccgctcaagatgattggattttaatttatt

SEQ ID NO: 486019 - DNA, 75 bp, synthetic construct
  source 1..75: mol_type = other DNA
cgcacttgtgcctttcatactgatgcgcaaaaggctgcgcaatggcttcgggcatgcgacggaaacagggttcag

SEQ ID NO: 486020 - DNA, 75 bp, synthetic construct
  source 1..75: mol_type = other DNA
tggatggcatagagcggagcgccaccatgcttcatggtgccaaacctgtaagccaaacttacaacttgccacaaa

SEQ ID NO: 486021 - DNA, 75 bp, synthetic construct
  source 1..75: mol_type = other DNA
atgaccactattaccaaagagcgtatcgaattattcattaaaaagccgcttgataatggacttactcgtggcgaa

SEQ ID NO: 486022 - DNA, 75 bp, synthetic construct
  source 1..75: mol_type = other DNA
gtactgccagcagaagaagcagaagaactggcacgaattgcgctggcatcgctggaagcagatccagttgcttat

SEQ ID NO: 486023 - DNA, 75 bp, synthetic construct
  source 1..75: mol_type = other DNA
gcaactgccggggctgtcgtgggatctggcgctgaatactgccgtcagctttgtgactaataccaactggcaatc

SEQ ID NO: 486024 - DNA, 75 bp, synthetic construct
  source 1..75: mol_type = other DNA
tagcgccatgctcaaccctggcccgcatggttttagcgaagtgctgtacgccgtgtcatccgccgctaacaacaa

SEQ ID NO: 486025 - DNA, 75 bp, synthetic construct
  source 1..75: mol_type = other DNA
aatgcgggtagtttcttcaaaaatcctgttgtttctgccgaaactgctaacgcgttgttggcacaatttccaaca

SEQ ID NO: 486026 - DNA, 75 bp, synthetic construct
  source 1..75: mol_type = other DNA
gccaaagagtgccgttttggctatcgcgacagtatttttaaacatgaataccaggaccgcttcgccattgtagcc

SEQ ID NO: 486027 - DNA, 75 bp, synthetic construct
  source 1..75: mol_type = other DNA
aatgtactttttctggaagactatcgcggcacggtgatcatcaaccggatcaaaggtatcgaaattcatgatgaa

SEQ ID NO: 486028 - DNA, 75 bp, synthetic construct
  source 1..75: mol_type = other DNA
gtcgataatagacgataaatcgtttgtatgtagtgaaatagcattcgaaataggtgaggttaacaacatacttac

SEQ ID NO: 486029 - DNA, 75 bp, synthetic construct
  source 1..75: mol_type = other DNA
tttgcgctggattcatggcgttatagttcaggcagcgtggtttgtaaaagcatcactggagcagaatgcactatc

SEQ ID NO: 486030 - DNA, 75 bp, synthetic construct
  source 1..75: mol_type = other DNA
ggttgaaccgctaatatgctccgcacgctatacaggaagcacctttcggcgtgggcagataacggttgcgcctgg

SEQ ID NO: 486031 - DNA, 75 bp, synthetic construct
  source 1..75: mol_type = other DNA
gaaaccacgttgagctatttcagccagatggctggcttaacggtgcaaaactttctttctgccgccagcgggatt

SEQ ID NO: 486032 - DNA, 75 bp, synthetic construct
  source 1..75: mol_type = other DNA
gatcgtcgtcaggggcgcatgttgctgtgggcaatgtcggtgatttttgtcatctgcgtggccgtggtgatgtgg

SEQ ID NO: 486033 - DNA, 75 bp, synthetic construct
  source 1..75: mol_type = other DNA
tatcagactgtgacgaccattgaaggggcacaacagctgttacccatggggcctgtagcttctcaggaagcgatc

SEQ ID NO: 486034 - DNA, 75 bp, synthetic construct
  source 1..75: mol_type = other DNA
tcaggatcgcttcgccattgtagccgtaggtctgcgcctgccaaaagagtggcaacctgtactgacctatggtga

SEQ ID NO: 486035 - DNA, 75 bp, synthetic construct
  source 1..75: mol_type = other DNA
tggcagtcggcgtcatgctgggtatcgatcctgcgcaaaaagatcctttaacgccttatctggtcaatgtgaaac

SEQ ID NO: 486036 - DNA, 75 bp, synthetic construct
  source 1..75: mol_type = other DNA
ggcgcttggcgcactgcttgccagccagttaaataatctgatgccgataatcggcgtcctgcttgatggcgcggc

SEQ ID NO: 486037 - DNA, 75 bp, synthetic construct
  source 1..75: mol_type = other DNA
cgctgcttgccagccagttgaataatctgatgccgataatcggcgtcctgcttgatggcgcggcgctgccggtcg

SEQ ID NO: 486038 - DNA, 75 bp, synthetic construct
  source 1..75: mol_type = other DNA
attgccgcgaagccatgcttcagtccggaaactttcgggaaaataaagattcgtcaaccaataattttcggaaaa

SEQ ID NO: 486039 - DNA, 75 bp, synthetic construct
  source 1..75: mol_type = other DNA
tccggatagttggataagctgtagtgagcgaatgccggataccaaaacagccgttcttgttgccagggattttgg

SEQ ID NO: 486040 - DNA, 75 bp, synthetic construct
  source 1..75: mol_type = other DNA
ctgacgctaatgatgggtggataattcctggtgcgtcgtggaaaccgtcacactggatgccgctaccagaaccgc

SEQ ID NO: 486041 - DNA, 75 bp, synthetic construct
  source 1..75: mol_type = other DNA
aaaggctaaattggctatggggcgaaccggcgctgcttatataagtaaggcaaatcgtcttgatgctgaaattat

SEQ ID NO: 486042 - DNA, 75 bp, synthetic construct
  source 1..75: mol_type = other DNA
aaccatcgtcggcccggaagcgccgctggtgaaaggcgtggtcgatactttccgcgccgccgggctgaaaatctt

SEQ ID NO: 486043 - DNA, 75 bp, synthetic construct
  source 1..75: mol_type = other DNA
taatgaccgatattcactgggacgactgcttctgccggaaagatatcggctggcgcgccatcgaacgcgatcact

SEQ ID NO: 486044 - DNA, 75 bp, synthetic construct
  source 1..75: mol_type = other DNA
aagccaacctcgagccggggaaatataatgtcatcctcggtgaacagcttgcctcacagttaggtgtcaatcgcg

SEQ ID NO: 486045 - DNA, 75 bp, synthetic construct
  source 1..75: mol_type = other DNA
aaatcatgatggtctttatggtgcaagggccagcgccgggattatcggtgcgatcctcggtgcggcgcttggcgc

SEQ ID NO: 486046 - DNA, 75 bp, synthetic construct
  source 1..75: mol_type = other DNA
gaagcgtcaaccagctctccggtaactccggctcttctgcctggtggtttcaccattgaggaggcgaaggaatta

SEQ ID NO: 486047 - DNA, 75 bp, synthetic construct
  source 1..75: mol_type = other DNA
tgcattattgaagatgggtgcatgtgtgttgacgggttcggtgagtatgttggtcactcgctgcctgatggaacg

SEQ ID NO: 486048 - DNA, 75 bp, synthetic construct
  source 1..75: mol_type = other DNA
ggtggcatggctgcattcagacaatggcttaggtattccggcaataacacggagtaaaaacattgctgacagttg

SEQ ID NO: 486049 - DNA, 75 bp, synthetic construct
  source 1..75: mol_type = other DNA
tacaaaaaatatagagctttcacgtatttatcaggatatatcttggatgacgtaacccactggatgcctctacca

SEQ ID NO: 486050 - DNA, 75 bp, synthetic construct
  source 1..75: mol_type = other DNA
cgacgacgatgaaccaattgacggtgtaacccactggatgcatctaccagaaccgccgcaggaggttaaccgtgg

SEQ ID NO: 486051 - DNA, 75 bp, synthetic construct
  source 1..75: mol_type = other DNA
ggatgtcgatatcttcctgcaactgccgaaaacacgctggacctccgcgcagctcttgcgtccgcaggcactgga

SEQ ID NO: 486052 - DNA, 75 bp, synthetic construct
  source 1..75: mol_type = other DNA
gatgacggtgatggcgaagacctgcatctcaaagaagtaacccactggatgccgctaccagaaccgccgaaggag

SEQ ID NO: 486053 - DNA, 75 bp, synthetic construct
  source 1..75: mol_type = other DNA
aacaaatggtgggcagttactgacgatgtggaagaaccggcatcgaaagtaacccactggatgccgctaccggaa

SEQ ID NO: 486054 - DNA, 75 bp, synthetic construct
  source 1..75: mol_type = other DNA
caattcaggcactgcgaatcgcgctggatggcatagagcggagcggcgccatgcttcatggtgccgaacctgtaa

SEQ ID NO: 486055 - DNA, 75 bp, synthetic construct
  source 1..75: mol_type = other DNA
taaatttttatatatgcatcagtgaagatattatggaagagttattttcttatagacagaaaaatttcctaagta

SEQ ID NO: 486056 - DNA, 75 bp, synthetic construct
  source 1..75: mol_type = other DNA
cagaaacggttggcctcttgcgtatagtgattatgctgaaggctggaacgactgccgcgaagccatgcttcagtc

SEQ ID NO: 486057 - DNA, 75 bp, synthetic construct
  source 1..75: mol_type = other DNA
ttcatggtgccgaacctgtaagccaaacttacaagttgcctcccctgtcatccagcgaagtaaacgacgcggcat

SEQ ID NO: 486058 - DNA, 75 bp, synthetic construct
  source 1..75: mol_type = other DNA
cgaatgcccgctcaagatgattggattttaatttattcaaagcacggcgagtatatggcaggacaggtacaaggg

SEQ ID NO: 486059 - DNA, 75 bp, synthetic construct
  source 1..75: mol_type = other DNA
cgcccctccagtgccagtagtacctgaagaaaaaccaatgcctaaccctcttaaaatgtacgcggtcgatgctgt

SEQ ID NO: 486060 - DNA, 75 bp, synthetic construct
  source 1..75: mol_type = other DNA
taatccgcttcacaccatgcacacccacgcgcgggaaacctgcctggcgttagggaaacccgccgatgacgccac

SEQ ID NO: 486061 - DNA, 75 bp, synthetic construct
  source 1..75: mol_type = other DNA
cagcccgaaacgtgtcagtacacccggttatggtaccggcgatcgttttatgcgtgccggggtggaaatcaaccg

SEQ ID NO: 486062 - DNA, 75 bp, synthetic construct
  source 1..75: mol_type = other DNA
tgcgtttgagtatcgctatacgctggaagtgctggtgatggattaccctgaatctctggatactatcagcgtgcc

SEQ ID NO: 486063 - DNA, 75 bp, synthetic construct
  source 1..75: mol_type = other DNA
gtatgagaaagagctggccctgatgggcgatgactatcaggagattttccgccagcaactgcgtgaaagccagga

SEQ ID NO: 486064 - DNA, 75 bp, synthetic construct
  source 1..75: mol_type = other DNA
acaggcagcagaacggcataacattcgaagccgatatcctgagtaacagcacgatggacgtgctgatccagattc

SEQ ID NO: 486065 - DNA, 75 bp, synthetic construct
  source 1..75: mol_type = other DNA
ggcattctgcccgcaggcgttcgccagacggcgggggaaattttagccgatggcaaaccggtttctccctgtgcc

SEQ ID NO: 486066 - DNA, 75 bp, synthetic construct
  source 1..75: mol_type = other DNA
cagactggataatccaatgtgctcttgaaacaggaacctcactgaaatggttaaccaccgggcaaggccttaagc

SEQ ID NO: 486067 - DNA, 75 bp, synthetic construct
  source 1..75: mol_type = other DNA
gaagggaaacgcacgtttacggaatttattcgtgaaggtgtgggcgttcatgcgtttaacggcgaaatctttgtg

SEQ ID NO: 486068 - DNA, 75 bp, synthetic construct
  source 1..75: mol_type = other DNA
gaagggaaacgcacgtttaccgaatttattcgtgaaggtgtgggggttcatgcgtttaacggcgaaatctttgtg

SEQ ID NO: 486069 - DNA, 75 bp, synthetic construct
  source 1..75: mol_type = other DNA
caccagcgcctatatccgtccgctgatcttcgtcggtgatgttggcatgggcgtaaacccgccagcgggatactc

SEQ ID NO: 486070 - DNA, 75 bp, synthetic construct
  source 1..75: mol_type = other DNA
tgcagtggaaattcataaggatcatattgtcgggcacatgtttcgtctgagttaccgtcccaactggcgctggct

SEQ ID NO: 486071 - DNA, 75 bp, synthetic construct
  source 1..75: mol_type = other DNA
ttgttagtttgaatcttttaactctaattattacggatttagaccctaaggattcacaagatggcaaggttaaac

SEQ ID NO: 486072 - DNA, 75 bp, synthetic construct
  source 1..75: mol_type = other DNA
gataatccgattattaatattctggagaagttctccagctggtatgacacgaatcacgtgacgctgggcggcgtc

SEQ ID NO: 486073 - DNA, 75 bp, synthetic construct
  source 1..75: mol_type = other DNA
atgaaacgaacgcctgccctgattgatgtgaacggcgttccgcttcgtgagagtctcagctacaacgggggcggt

SEQ ID NO: 486074 - DNA, 75 bp, synthetic construct
  source 1..75: mol_type = other DNA
gtttaaagataaaaaaaggacatatgttcggtttcaaagaatcgaaacgaaaaattctgtccattagattgccgt

SEQ ID NO: 486075 - DNA, 75 bp, synthetic construct
  source 1..75: mol_type = other DNA
cgggacgtctttgttgtccggtgtgctgatccgcctcagtgctctgaaagagtatgaagattctgagctgactgc

SEQ ID NO: 486076 - DNA, 75 bp, synthetic construct
  source 1..75: mol_type = other DNA
atctggtgcgcaataacggaatagcggctaatgcggtggccctgcataaggatcatattgtcgggcatatgtttc

SEQ ID NO: 486077 - DNA, 75 bp, synthetic construct
  source 1..75: mol_type = other DNA
atgaattgtataaactcacggaagataagaaagaaaagaaatataatgaattcttttatgtttactcagcttttc

SEQ ID NO: 486078 - DNA, 75 bp, synthetic construct
  source 1..75: mol_type = other DNA
caggagcatttatattgttgcctgtggtaacatttgccgattctggagataatgaatatttgtctggctggtggc

SEQ ID NO: 486079 - DNA, 75 bp, synthetic construct
  source 1..75: mol_type = other DNA
atggccattgacgggctcaaggaggttcaggaatcagtgatgcgcattgaggccggactgagcacgtatgagaaa

SEQ ID NO: 486080 - DNA, 75 bp, synthetic construct
  source 1..75: mol_type = other DNA
gttttctgcgggccggtgtggaggtcgatcgatatggccgtgccgtcgcgtaccatatttgtgaggatgattttc

SEQ ID NO: 486081 - DNA, 75 bp, synthetic construct
  source 1..75: mol_type = other DNA
ttcagcctggtcacgggcagagtggattagctccggaagaatggccattgacgggctcaaggaggtccaggaatc

SEQ ID NO: 486082 - DNA, 75 bp, synthetic construct
  source 1..75: mol_type = other DNA
tgggttccagaagttaccggtgtcgatgaattgtataaactcacggaagataagaaagaaaagaaatataatgaa

SEQ ID NO: 486083 - DNA, 75 bp, synthetic construct
  source 1..75: mol_type = other DNA
gaagggaaacgcacgtttaccgaatttatacgtgaaggtgtgggtgttcatgcgtttaacggcgaaatctttgtg

SEQ ID NO: 486084 - DNA, 75 bp, synthetic construct
  source 1..75: mol_type = other DNA
ggcgaagacctgtatctcaaggaggtaacccactggatgcctctaccagaaccgccgcaggaggttaaccgtggc

SEQ ID NO: 486085 - DNA, 75 bp, synthetic construct
  source 1..75: mol_type = other DNA
agtgttcgctgagagtagtgttaagcaatggggagggcgagttgttccactttacaccgcccagccagtgccggt

SEQ ID NO: 486086 - DNA, 75 bp, synthetic construct
  source 1..75: mol_type = other DNA
gaacttaactcagatatctttgccgatgaaataactcactggatgccgctaccagaaccgccgcaggaggttaac

SEQ ID NO: 486087 - DNA, 75 bp, synthetic construct
  source 1..75: mol_type = other DNA
gcgcgttgacgtggtcgatgacaaacgcaacccgatggacttcgttctgtggaagatgtcgaaagagggcgaacc

SEQ ID NO: 486088 - DNA, 75 bp, synthetic construct
  source 1..75: mol_type = other DNA
accgtgcgcgatgtgctgaaatactacgacgcggaaaccgtgcgttacttcctgatgtcgggcactatcgcagcc

SEQ ID NO: 486089 - DNA, 75 bp, synthetic construct
  source 1..75: mol_type = other DNA
gctttataccgctcagccagtgccggtaactccggatggttggataagctgtagtgagcgaatgccggacgacac

SEQ ID NO: 486090 - DNA, 75 bp, synthetic construct
  source 1..75: mol_type = other DNA
tgcggatgagtcctacaaccgttttgtcgccatcgccagtttaaataaacaacgttttgccgatgataagccctg

SEQ ID NO: 486091 - DNA, 75 bp, synthetic construct
  source 1..75: mol_type = other DNA
cggcgcggaggtatagcagttagtccgggtaatgatcttaggcaagcaacccactggatgtcgctaccagaaccg

SEQ ID NO: 486092 - DNA, 75 bp, synthetic construct
  source 1..75: mol_type = other DNA
gtaacgccacagcaagtatttgatgcggtgtgtcatatgcgcaccaccaaactccctgatccaaaagtgaatggc

SEQ ID NO: 486093 - DNA, 75 bp, synthetic construct
  source 1..75: mol_type = other DNA
actaacgaggatgttcaccctggtagcgataacatgctacgcctgtgggatgacctgaatgaccgttacgcgccc

SEQ ID NO: 486094 - DNA, 75 bp, synthetic construct
  source 1..75: mol_type = other DNA
gtgagcaagattgactatcaggcactgcgtgaggcggcagagaaagcaactaaaggaagctacatcgtagggcat

SEQ ID NO: 486095 - DNA, 75 bp, synthetic construct
  source 1..75: mol_type = other DNA
gacgcagagccaaacttcgatgtaaatggcaactctccggtaactccggatagttggataagctgtagtgagcga

SEQ ID NO: 486096 - DNA, 75 bp, synthetic construct
  source 1..75: mol_type = other DNA
agttgagcgacggcactttatcgtggttagggaacgccttattctggatgccgctgccagaaccgccgaaggagg

SEQ ID NO: 486097 - DNA, 75 bp, synthetic construct
  source 1..75: mol_type = other DNA
gtgcaaataaccgaagcattattttcagagccgggagacatccggcgtttttttcagcaggcggtggaccactgg

SEQ ID NO: 486098 - DNA, 75 bp, synthetic construct
  source 1..75: mol_type = other DNA
actgttcgggtaaaaaaacctgtacaaaatgtgactgcatcattgaagcgccggtcccgtccccgtcccgtccga

SEQ ID NO: 486099 - DNA, 75 bp, synthetic construct
  source 1..75: mol_type = other DNA
tctgatcctgcaggactgttttattggtgctgtaacccgtccggtgtaccgggcatggctgaatatggtggttgc

SEQ ID NO: 486100 - DNA, 75 bp, synthetic construct
  source 1..75: mol_type = other DNA
gaagggaaacgcacgtttactgaatttatacgtgaaggtgtgggcgttcatgcgtttaacggcgaaatctttgtg

SEQ ID NO: 486101 - DNA, 75 bp, synthetic construct
  source 1..75: mol_type = other DNA
gttcagtcattacgtgagttttacgccgatgtcatcgaagagttttactgggttgcgctcccgcttacgacgcaa

SEQ ID NO: 486102 - DNA, 75 bp, synthetic construct
  source 1..75: mol_type = other DNA
cgggaacaacatggaggagcaacaatacgatgcctgttactgctcagccagacgagtgtttgctatccgcgggcc

SEQ ID NO: 486103 - DNA, 75 bp, synthetic construct
  source 1..75: mol_type = other DNA
agccagatgggggcggtttcactgaggcagcaggcgcgctggctggacaacaaccacgatctggtgattggcgtt

SEQ ID NO: 486104 - DNA, 75 bp, synthetic construct
  source 1..75: mol_type = other DNA
gcctgttttcaccaggctggaaagcctcacgcctgcgtgcccgcgcagttattaaggcgtatgaggcggtaaagc

SEQ ID NO: 486105 - DNA, 75 bp, synthetic construct
  source 1..75: mol_type = other DNA
atggaagtttccattgatgtaagcacttgtgatgctgatttaggcaatcgctatttcggcaccgtcaccgaggcg

SEQ ID NO: 486106 - DNA, 75 bp, synthetic construct
  source 1..75: mol_type = other DNA
ttatccgtcgtttgtgggcggaatggtctgtcagtccggatgtgaccgggcagcatacgcgccccatgctcgaac

SEQ ID NO: 486107 - DNA, 75 bp, synthetic construct
  source 1..75: mol_type = other DNA
gcgtgttttcccccggatggaaagcagccagactgcgttcaagggcattaatcatggcctatgaggcggtgaaaa

SEQ ID NO: 486108 - DNA, 75 bp, synthetic construct
  source 1..75: mol_type = other DNA
accgcatccgatgctgactaacgggaagatagctaaaaagctggccactgatatccgcagaaagtggggcgaatg

SEQ ID NO: 486109 - DNA, 75 bp, synthetic construct
  source 1..75: mol_type = other DNA
cttaaagctcagcgggcgcagacggatgtaaataataagcaggctgcatttgatgctgctgcaaaagagaaggca

SEQ ID NO: 486110 - DNA, 75 bp, synthetic construct
  source 1..75: mol_type = other DNA
atgaatatgatgatctcatatcaggaacttgttcgcaccttccttaatactacagaagcgttttcctgtaccgaa

SEQ ID NO: 486111 - DNA, 75 bp, synthetic construct
  source 1..75: mol_type = other DNA
taatggagataccaagaatccattcatctcaccagaaaaaggtcataaattgagagatgcaggattaatagttac

SEQ ID NO: 486112 - DNA, 75 bp, synthetic construct
  source 1..75: mol_type = other DNA
gctgcctggtggaacgttccagctatacaccgcttcacctgtgccggtagtgcctgaaggactggttaaagcagt

SEQ ID NO: 486113 - DNA, 75 bp, synthetic construct
  source 1..75: mol_type = other DNA
tccctatgtatcgagagccgccagcgccagcagtaccagatggactggttagagcggtgcgtttctatgaacagg

SEQ ID NO: 486114 - DNA, 75 bp, synthetic construct
  source 1..75: mol_type = other DNA
gagctggaagtccgtaaggtttccaccgatccgaaactgaaaatgatggatctgatcagcaaaatcgataagtaa

SEQ ID NO: 486115 - DNA, 75 bp, synthetic construct
  source 1..75: mol_type = other DNA
tgcctgcatactctaaacaagtaatttttaaaattatgatgcagacaaacggagataatcgtttcttggaagatt

SEQ ID NO: 486116 - DNA, 75 bp, synthetic construct
  source 1..75: mol_type = other DNA
aattatcagaaaacaattaacgacaataaagatagagtaaaaaaactaattcttgatttacagaaacaatttggt

SEQ ID NO: 486117 - DNA, 75 bp, synthetic construct
  source 1..75: mol_type = other DNA
tgagcaaggtggttcctggtgctacgacaaccctatgtcggtgctcaacctggaaacttggaaagcacagaaaat

SEQ ID NO: 486118 - DNA, 75 bp, synthetic construct
  source 1..75: mol_type = other DNA
catgtatgcaggtgatggagcgcatacaaaaacgttatcccagtgaaatcttttattgcgaagaggtattaagaa

SEQ ID NO: 486119 - DNA, 75 bp, synthetic construct
  source 1..75: mol_type = other DNA
atgattaagtcaattggctttgtcctgctggttggcacctgcgggagtgatgcctgtgatgctatcccggcaaca

SEQ ID NO: 486120 - DNA, 75 bp, synthetic construct
  source 1..75: mol_type = other DNA
aagactgagcataatatttttataaaggatttattctccttcgcagttatggaaaatgagttaagagacattatc

SEQ ID NO: 486121 - DNA, 75 bp, synthetic construct
  source 1..75: mol_type = other DNA
tcttatcaaccgtaggcacatttgccgttaactattacttcaaatcacaggagaacaagcgagcgcaagaggaac

SEQ ID NO: 486122 - DNA, 75 bp, synthetic construct
  source 1..75: mol_type = other DNA
gggcgctgactgatgccgtcacggtgctgaaaaccagtcctgagatgctgcggatattcgtggataacgggagta

SEQ ID NO: 486123 - DNA, 75 bp, synthetic construct
  source 1..75: mol_type = other DNA
gggcgctgactgatgccgtcacggtgctgaaaaccagccccgagatgctgcggatattcgtggataacgggagta

SEQ ID NO: 486124 - DNA, 75 bp, synthetic construct
  source 1..75: mol_type = other DNA
acgatattgacctgttgtttgcaccgattatggcctggctgcgcgtcaatcaaccggacatcatgacaaccgacg

SEQ ID NO: 486125 - DNA, 75 bp, synthetic construct
  source 1..75: mol_type = other DNA
cgcggagaacatcttcctcggtcgcaaagcggcaaccaaagaagaagcgattcgttttgctggcgagcagctggt

SEQ ID NO: 486126 - DNA, 75 bp, synthetic construct
  source 1..75: mol_type = other DNA
tttgagatgctggtgaacaacttctctgccggtatcatggggatgatcctcgcgattctggcattcatggggatt

SEQ ID NO: 486127 - DNA, 75 bp, synthetic construct
  source 1..75: mol_type = other DNA
ggttttgctgtggctgcgtgataaccagcccgatgccatcaataatcccgctttacgggaaaagttattcacctt

SEQ ID NO: 486128 - DNA, 75 bp, synthetic construct
  source 1..75: mol_type = other DNA
acgggcgggaaaaaggattcacctggattattgatatcaataacgacgattcgctcgatatcagtatcagcctga

SEQ ID NO: 486129 - DNA, 75 bp, synthetic construct
  source 1..75: mol_type = other DNA
tggttgccacgggggccagctccatgtcatgggagtaccgctataccctgaacgtggtgattgaggatttcagcg

SEQ ID NO: 486130 - DNA, 75 bp, synthetic construct
  source 1..75: mol_type = other DNA
atggcggtcaagttagaagtaattatctataccgatgaaaacggtacgcttcgtgtcaggagcatgggggctgtt

SEQ ID NO: 486131 - DNA, 75 bp, synthetic construct
  source 1..75: mol_type = other DNA
cgttacgggaaaaactattcacctttgaggtggatattctgcgcaacgatgtctgtgatatcagcttgaacctgc

SEQ ID NO: 486132 - DNA, 75 bp, synthetic construct
  source 1..75: mol_type = other DNA
ccattcgctacgtcattttaccgctggcactgcgccgtatgctgccgccgctgggtaaccagtggatcatcagca

SEQ ID NO: 486133 - DNA, 75 bp, synthetic construct
  source 1..75: mol_type = other DNA
atgcagaagcacaaaagcctgcgcaaagcgctgattaacgccgtgccgcagctccgaaataatcccgatatgctg

SEQ ID NO: 486134 - DNA, 75 bp, synthetic construct
  source 1..75: mol_type = other DNA
gaaaaataatccgggcgcggtggtggtagcgatcatctgcgatcgtggcgaccgctacctttcgactggagtgtt

SEQ ID NO: 486135 - DNA, 75 bp, synthetic construct
  source 1..75: mol_type = other DNA
atacagcggtgaaaccacgttgagctatttcagccagatggcaggcctaacggtacaaaactttctttctgccgc

SEQ ID NO: 486136 - DNA, 75 bp, synthetic construct
  source 1..75: mol_type = other DNA
ggcgtctctgacagtgagatgaactggaagcagtatctctgtgccattctcggcctgaacatgctggggctggcg

SEQ ID NO: 486137 - DNA, 75 bp, synthetic construct
  source 1..75: mol_type = other DNA
cctggtacccgttttcttcatcatctttaccctcggggtcggtaagcttcgctatccgtttttaaatctcacctg

SEQ ID NO: 486138 - DNA, 75 bp, synthetic construct
  source 1..75: mol_type = other DNA
ctttgcctttggtgaagtggcgggcgatcgtcgccaggggcgcatgttgctgtgggcgatgtcagtgatttttgt

SEQ ID NO: 486139 - DNA, 75 bp, synthetic construct
  source 1..75: mol_type = other DNA
tatcaggctgtgacgaccattgaaggatcgcaacagctgttaccaatggggccagtagcttctcaggaagcgatc

SEQ ID NO: 486140 - DNA, 75 bp, synthetic construct
  source 1..75: mol_type = other DNA
tccgtttgaaaacccaaccgcactgaccaacttcgtgcagatgctggcgatcttcttgatcccaacagcgctgtg

SEQ ID NO: 486141 - DNA, 75 bp, synthetic construct
  source 1..75: mol_type = other DNA
gaaagccgagaagattgatgacgactctgcgcttaacggcaaatgggcgttgttcgctaaaatcaccccgaccga

SEQ ID NO: 486142 - DNA, 75 bp, synthetic construct
  source 1..75: mol_type = other DNA
cgcacgctgggccgtccggtagatatcgcctcctggcgttatgcggagcagcttccggcactgtttaacggtatg

SEQ ID NO: 486143 - DNA, 75 bp, synthetic construct
  source 1..75: mol_type = other DNA
gcgtgcaacaggcgtcagcaaaggtccggggcagcagtaagccgtcaggagcgccgcgtcggctgaagagctgac

SEQ ID NO: 486144 - DNA, 75 bp, synthetic construct
  source 1..75: mol_type = other DNA
gtgctgatttacaacatgcttttctactatctcactcgcatttaccttaagctggctggcagcgttaagcgtgct

SEQ ID NO: 486145 - DNA, 75 bp, synthetic construct
  source 1..75: mol_type = other DNA
gtccatttttggccgcaaacaggccagcgatgacgcccgtctgaatgacgtgcatgaagcggtgaccgctgttgc

SEQ ID NO: 486146 - DNA, 75 bp, synthetic construct
  source 1..75: mol_type = other DNA
atgcatctaacgccagcaaaccatcctgaattatggacacaagagaatggtgaatggatctacttgcgaaactaa

SEQ ID NO: 486147 - DNA, 75 bp, synthetic construct
  source 1..75: mol_type = other DNA
cggcagcgcctttgccggattaagcgccaactctccgttctggaactgtttactggcgttctgcatgtttgttgg

SEQ ID NO: 486148 - DNA, 75 bp, synthetic construct
  source 1..75: mol_type = other DNA
cctgctggagcaagaaccggaagcgttcctgcaaagcggtgcgcaggcagacgacagcgaagtggctgagattga

SEQ ID NO: 486149 - DNA, 75 bp, synthetic construct
  source 1..75: mol_type = other DNA
atgaataatttcccgctacagattttcgttgatagcgacaccgctatgatgattcaggctttcactgatgcaggt

SEQ ID NO: 486150 - DNA, 75 bp, synthetic construct
  source 1..75: mol_type = other DNA
aacagatacagcgttagccctgaaaaatatctcaaggcagctatagcaattttgtacgctgacaatattctggtg

SEQ ID NO: 486151 - DNA, 75 bp, synthetic construct
  source 1..75: mol_type = other DNA
agccgggcgatgcgttaatcgaagcgactagcggtaataccggcattgcgttggcaatgatcgccgcgctaaaag

SEQ ID NO: 486152 - DNA, 75 bp, synthetic construct
  source 1..75: mol_type = other DNA
tcgtgcggcactttcgatgatcgtcgaggcggaaaagcgcggggaaattaaaccgggtgatgtcttaatcgaagc

SEQ ID NO: 486153 - DNA, 75 bp, synthetic construct
  source 1..75: mol_type = other DNA
gttggtgaagccgtcttacaagcattatcaaatagcagaacattggttaatttagaggatcgcattgtttttttt

SEQ ID NO: 486154 - DNA, 75 bp, synthetic construct
  source 1..75: mol_type = other DNA
ctgaaagatatctcaaggcagctatagcaattttgtacgctgacaatattttggtgacggattcgaaggtggtgc

SEQ ID NO: 486155 - DNA, 75 bp, synthetic construct
  source 1..75: mol_type = other DNA
gaaaagattggttattgagcaaacgaacaaatacagtatttccccagagcaatttttgaaaggtgctgtgacaat

SEQ ID NO: 486156 - DNA, 75 bp, synthetic construct
  source 1..75: mol_type = other DNA
agccagacgtttgtcgtgttgtgtgcctgcgcaatattacgctggcagctggggacgcgttggcgttatggattg

SEQ ID NO: 486157 - DNA, 75 bp, synthetic construct
  source 1..75: mol_type = other DNA
taaagctaatggctgataatgcagaaaacatctctgactttattcaggaaattgaaactggtgaaccgcgtttta

SEQ ID NO: 486158 - DNA, 75 bp, synthetic construct
  source 1..75: mol_type = other DNA
aacaaatacagcgttagccctgaacaatatctcaaggcggctatagcaattttgtacgctgacaatattttggtt

SEQ ID NO: 486159 - DNA, 75 bp, synthetic construct
  source 1..75: mol_type = other DNA
ctcagaagcaattgaagattttattcagggggttgaaactggtgaaccacgttttatgtttcccgttaccgactc

SEQ ID NO: 486160 - DNA, 75 bp, synthetic construct
  source 1..75: mol_type = other DNA
tgcaaatgttcatggtcatacggcaataataaaattattaccgatactggctgtggaactattcatcttgcaggt

SEQ ID NO: 486161 - DNA, 75 bp, synthetic construct
  source 1..75: mol_type = other DNA
tcaccactgccggtgcagcaaagctggcagcagcaaccgcaccgggagggcggaaggtcaacattaccacgatgg

SEQ ID NO: 486162 - DNA, 75 bp, synthetic construct
  source 1..75: mol_type = other DNA
tatgaccttgctaacgggaaatataccgcacaggacgccaccaccgcgcgaaaaggccttgtccagctaagtagc

SEQ ID NO: 486163 - DNA, 75 bp, synthetic construct
  source 1..75: mol_type = other DNA
tgataaccgacgaagatggagaagatgctttcatccgtattggttctatcgctatggtgcgagtcgcgcttgacg

SEQ ID NO: 486164 - DNA, 75 bp, synthetic construct
  source 1..75: mol_type = other DNA
atgcaggttatagcggaaccagtatgacgggcgggaaaggtgctgatggggtttgtattatcgaggagtttgcat

SEQ ID NO: 486165 - DNA, 75 bp, synthetic construct
  source 1..75: mol_type = other DNA
gtgtgaattataagaacggcggtatttattatcgttcagcgcgagatggttatggatttgaggctgactggtcag

SEQ ID NO: 486166 - DNA, 75 bp, synthetic construct
  source 1..75: mol_type = other DNA
gtggagattatgcgccaggctggcggcgtgactacagtaccaaaaatcagcagcctgcatttgctttagggcaga

SEQ ID NO: 486167 - DNA, 75 bp, synthetic construct
  source 1..75: mol_type = other DNA
cgaatgcggcagtgtcacaacaatcagcagccacttctgcatccactgcgaccacgaaagcgtcagaagcagcca

SEQ ID NO: 486168 - DNA, 75 bp, synthetic construct
  source 1..75: mol_type = other DNA
gtcactggcggcaacaccaaaggcagtaaaggcagcatatgaccttgctaacgcaaaatataccgctcaggatgc

SEQ ID NO: 486169 - DNA, 75 bp, synthetic construct
  source 1..75: mol_type = other DNA
atgcaacaacagcacagaaagggataatccagctaagcagcgcgaccaacagcacatctgaaacgcttgccgcga

SEQ ID NO: 486170 - DNA, 75 bp, synthetic construct
  source 1..75: mol_type = other DNA
gtggctggattctcagggagcatttaaccatccatactggatgtgcaagggttcctggtcttatggcaataataa

SEQ ID NO: 486171 - DNA, 75 bp, synthetic construct
  source 1..75: mol_type = other DNA
aaaccattatcactgatactggtgccaaaaaattagctcaggcagccgcgccagatggtaatcctgtccacctga

SEQ ID NO: 486172 - DNA, 75 bp, synthetic construct
  source 1..75: mol_type = other DNA
ttctggctaaaacaagcaaacaggaggttattcattatcttggtttgggagctacaaacggatacgtgggacgct

SEQ ID NO: 486173 - DNA, 75 bp, synthetic construct
  source 1..75: mol_type = other DNA
atgaaagtattagtgattggtaatggcgggcgcgagcatgcgctggcatggaaagcggcacagtcgccgctggtt

SEQ ID NO: 486174 - DNA, 75 bp, synthetic construct
  source 1..75: mol_type = other DNA
atgaaagtattagtgattggtaacggcgggggcgagcacgcgctggcctggaaagcggcccagtcgccgctggtt

SEQ ID NO: 486175 - DNA, 75 bp, synthetic construct
  source 1..75: mol_type = other DNA
tcgttatcgaagagttcctcgatggcgaagaagcgagctttatcgtgatggtggacggcgagcatgtgctgccga

SEQ ID NO: 486176 - DNA, 75 bp, synthetic construct
  source 1..75: mol_type = other DNA
ctggcggatgacgagcaggtagtgaccagcggcgggcgcgtactgtgcgtcaccgcgctgggtcataccgtggca

SEQ ID NO: 486177 - DNA, 75 bp, synthetic construct
  source 1..75: mol_type = other DNA
gaaactgtttttgttgctccgggtaatgcaggcactgcgctggaacccgcgctacagaacgtcgctatcggcgta

SEQ ID NO: 486178 - DNA, 75 bp, synthetic construct
  source 1..75: mol_type = other DNA
atgcgggaacggcgctggaacctgcgctgcaaaacgtcgctatcggcgtgaccgatatcccggcactgctggatt

SEQ ID NO: 486179 - DNA, 75 bp, synthetic construct
  source 1..75: mol_type = other DNA
tgacgctggaagaagcggaagcggctgttcacgatatgctggcgggcaacgcttttggcgacgcgggtcatcgca

SEQ ID NO: 486180 - DNA, 75 bp, synthetic construct
  source 1..75: mol_type = other DNA
cgttcacgacatgctggcgggcaatgcgtttggcgatgcgggccatcgcatcgtcatcgaagaattcctcgacgg

SEQ ID NO: 486181 - DNA, 75 bp, synthetic construct
  source 1..75: mol_type = other DNA
gaaagcggctcagtcgccgctggttgaaactgtttttgttgctccgggtaatgcaggcactgcgctggaacccgc

SEQ ID NO: 486182 - DNA, 75 bp, synthetic construct
  source 1..75: mol_type = other DNA
gcggccgcgagcacgcgctggcctggaaagcggcgcaatcgccgctggttgagactgtttttgttgctccgggta

SEQ ID NO: 486183 - DNA, 75 bp, synthetic construct
  source 1..75: mol_type = other DNA
cggcccaacggaaggtgctgcacagctggaaggttccaaagcgttcaccaaggatttcctggctcgccataaaat

SEQ ID NO: 486184 - DNA, 75 bp, synthetic construct
  source 1..75: mol_type = other DNA
aggggattaccgcaccggcgatgtgatccacggcctgccgctggaagaagtggaagacggcaaagtgttccatgc

SEQ ID NO: 486185 - DNA, 75 bp, synthetic construct
  source 1..75: mol_type = other DNA
tgaccttgctaacgcaaaatataccgctcaggacgcaacgacggcacgaaaagggatagttcagctcagtagcgc

SEQ ID NO: 486186 - DNA, 75 bp, synthetic construct
  source 1..75: mol_type = other DNA
aacgtggcgccttcagaccaggactctggatattcaaagccaatatttcactttcccggcacagcgtgctcactg

SEQ ID NO: 486187 - DNA, 75 bp, synthetic construct
  source 1..75: mol_type = other DNA
aggtggtgagtaaatccggtgttgtgaatgaaaactctgtcgtttattccgtcacgatgggggcagatgtgggtg

SEQ ID NO: 486188 - DNA, 75 bp, synthetic construct
  source 1..75: mol_type = other DNA
atgtcacaggccgttattacaaaagcatttacagagtggaaagccaggcaggctattaataatcagcccgtcgcg

SEQ ID NO: 486189 - DNA, 75 bp, synthetic construct
  source 1..75: mol_type = other DNA
tggaagtggcgcaccttttatcagtccgcgaataacccgaccaaatgatgacaacaattatttccctttctggaa

SEQ ID NO: 486190 - DNA, 75 bp, synthetic construct
  source 1..75: mol_type = other DNA
gctgaataaggccagcggcaccctggccatgattgttcatgcgcctgtgcagcaaaagctgaaaacagcggaagg

SEQ ID NO: 486191 - DNA, 75 bp, synthetic construct
  source 1..75: mol_type = other DNA
acaactggcgctaaaggatttgttcagctgagtagcgcaactgacagcaccagtgaggcgctggcggcaacgcca

SEQ ID NO: 486192 - DNA, 75 bp, synthetic construct
  source 1..75: mol_type = other DNA
cgtcagacaccccacctgccggttacgccatcatggtggggcagacattcgataaagcacgatatcccctgctgg

SEQ ID NO: 486193 - DNA, 75 bp, synthetic construct
  source 1..75: mol_type = other DNA
ccgctgccagagccggtgatgcgcccggtcgagctgtacgttaacggcgaactggtgagtaagtgggatgagtga

SEQ ID NO: 486194 - DNA, 75 bp, synthetic construct
  source 1..75: mol_type = other DNA
ttatgcggacatcaacaatgacagcagctttgatatcagcatcagcctgatgctgaccgagcgcacgctggtcag

SEQ ID NO: 486195 - DNA, 75 bp, synthetic construct
  source 1..75: mol_type = other DNA
cggcgacaataataactggaataactggtttgagttttaccatactggaaataaacctaccccgcaggatatagg

SEQ ID NO: 486196 - DNA, 75 bp, synthetic construct
  source 1..75: mol_type = other DNA
tactgacacggggtatggcgatatctgcctgggtggctgcctgattgaagtgtttggcgaactcatcggcggaat

SEQ ID NO: 486197 - DNA, 75 bp, synthetic construct
  source 1..75: mol_type = other DNA
ttacggaaaacgtatcccagggacggcattcagcaatatttttgtgccatcgctgaaattgatgaagacggcaac

SEQ ID NO: 486198 - DNA, 75 bp, synthetic construct
  source 1..75: mol_type = other DNA
tcgttctggggaatgaacgttcaggactatggaatatctcctggctattccctgcgcaacagcatcatttttggt

SEQ ID NO: 486199 - DNA, 75 bp, synthetic construct
  source 1..75: mol_type = other DNA
atactgccgaaagttacaagccaaccgttgccgaggggtccggacgtgcacaaacatttcgcaccattctgaccg

SEQ ID NO: 486200 - DNA, 75 bp, synthetic construct
  source 1..75: mol_type = other DNA
tcaacacaatacggatttggtgacactttaagctctaatcaatggggggccataaatggcaaaaagtggatattt

SEQ ID NO: 486201 - DNA, 75 bp, synthetic construct
  source 1..75: mol_type = other DNA
atgttaaatacacagaaaaccattaacgcggaaaaatataacgagtgggtaaaaaaattctctgagcagattttt

SEQ ID NO: 486202 - DNA, 75 bp, synthetic construct
  source 1..75: mol_type = other DNA
gtggcgcttgaggatgcgagcacgacgaaaaaggggatagtacagctcagcagtgcgaccaacagcacgtctgaa

SEQ ID NO: 486203 - DNA, 75 bp, synthetic construct
  source 1..75: mol_type = other DNA
ttgagtttattaatcctcccgcgaccgaaactgttgttggggttgcaagatttgctaatgaacaagaaattgatg

SEQ ID NO: 486204 - DNA, 75 bp, synthetic construct
  source 1..75: mol_type = other DNA
gaaataaaacgacttaccacaataggtggcaaagttgtttcccctgatacaattcatgtaacggcgaaggatgat

SEQ ID NO: 486205 - DNA, 75 bp, synthetic construct
  source 1..75: mol_type = other DNA
cggaaacagcaacaccgatgaatttattgatacattaaccagaaggcctattcagaagttgattggtgggacata

SEQ ID NO: 486206 - DNA, 75 bp, synthetic construct
  source 1..75: mol_type = other DNA
gtcaatcagaaactgaggctgccacgccgaaggctgtgaaaatcgcgtatgatctggcccggggaaaatacacag

SEQ ID NO: 486207 - DNA, 75 bp, synthetic construct
  source 1..75: mol_type = other DNA
gaggtgcgggacacgcaattaaatttcatgatggcatcgccggaaatcagccaggattttcacgatttaatttca

SEQ ID NO: 486208 - DNA, 75 bp, synthetic construct
  source 1..75: mol_type = other DNA
acgcggaaaaatataacgagtgggtaaaaaaattctctgagcagatttttaaaattactgctgacgagaatgtag

SEQ ID NO: 486209 - DNA, 75 bp, synthetic construct
  source 1..75: mol_type = other DNA
gcacgtgatggttatggatttgaggctaactggtcagagttttacaccacaacccgcaaaccctctgcgggagat

SEQ ID NO: 486210 - DNA, 75 bp, synthetic construct
  source 1..75: mol_type = other DNA
taattcacgatttattacaggcgtccgtttaggaggcctatcatctgttcagacatggaatggacctggttggtc

SEQ ID NO: 486211 - DNA, 75 bp, synthetic construct
  source 1..75: mol_type = other DNA
gtggcatcaacgccgggcttgcgacctgctggctgaatgcgcaccatcgcgagcaaccagaaggcatcgcgccca

SEQ ID NO: 486212 - DNA, 75 bp, synthetic construct
  source 1..75: mol_type = other DNA
aaatcccagcaaaatggcgttgtggatgcagcgaaatttaccttcaccccgccgcaaggcgtaacggtagatgac

SEQ ID NO: 486213 - DNA, 75 bp, synthetic construct
  source 1..75: mol_type = other DNA
atctgtgggtgaaacgtcctaacttgttcaactggcatatgactcaacctgatgaaagcatcctggtttctgacg

SEQ ID NO: 486214 - DNA, 75 bp, synthetic construct
  source 1..75: mol_type = other DNA
acgacttgtttgtgcgaccaatgccgacttacctcgcatggttagcgaaggcactttccgcgcggacctgctgga

SEQ ID NO: 486215 - DNA, 75 bp, synthetic construct
  source 1..75: mol_type = other DNA
cagcttacagcaggcgaaatttaatcagaaaaaagccgctgaattattaggtctgacctaccatcaactccgcgc

SEQ ID NO: 486216 - DNA, 75 bp, synthetic construct
  source 1..75: mol_type = other DNA
aagcctttattaatgcgatggcggaaatctgcacgccgctgccgggcgcggtttctctgcttaacgccattcgtg

SEQ ID NO: 486217 - DNA, 75 bp, synthetic construct
  source 1..75: mol_type = other DNA
ctgccgccactacgcgaacgtgaaagcgacattatgttaatggcagaacactttgccatccagatgtgtcgggaa

SEQ ID NO: 486218 - DNA, 75 bp, synthetic construct
  source 1..75: mol_type = other DNA
aaccagaagcgcgccgctgaattgctggggttaacctatcatcagttccgcgcgttgctgaaaaagcaccagctt

SEQ ID NO: 486219 - DNA, 75 bp, synthetic construct
  source 1..75: mol_type = other DNA
tcggtgaggcgaacagctttctcgaagtgctggaacaggtttcgcatctcgcaccgctggacaaaccggtgctca

SEQ ID NO: 486220 - DNA, 75 bp, synthetic construct
  source 1..75: mol_type = other DNA
atgaaaaaaattgccatcacctgtgtattactctcaagctttgtggcgagcagcgtttgggctgatgccgcaagc

SEQ ID NO: 486221 - DNA, 75 bp, synthetic construct
  source 1..75: mol_type = other DNA
aaaagcgcgcggtcaatcgctttatgctgctgttgtctacactatattctcttgacgcccaggcgtttgccgaag

SEQ ID NO: 486222 - DNA, 75 bp, synthetic construct
  source 1..75: mol_type = other DNA
ccacggaatcgttgcacggtcgtacacgcgtgtactttgcggcagatgaacaaacgctgctgaaaaatggtaatc

SEQ ID NO: 486223 - DNA, 75 bp, synthetic construct
  source 1..75: mol_type = other DNA
tcgtctggcctttgacgtggtgcaacttcccccgttacgcgaacgtcaaagcgatatcatgttaatggctgaaca

SEQ ID NO: 486224 - DNA, 75 bp, synthetic construct
  source 1..75: mol_type = other DNA
ccctgcttggcggacgcttaaaacaacgcgaggcaccgtggtacgcgttatttgacaccctgttgcaactggcag

SEQ ID NO: 486225 - DNA, 75 bp, synthetic construct
  source 1..75: mol_type = other DNA
gcgcattaaccgtcagccccgaccaggtgctgcaactgacgccagaaaaaatcgcgatgctgccgcaaggcagtc

SEQ ID NO: 486226 - DNA, 75 bp, synthetic construct
  source 1..75: mol_type = other DNA
cggcacacgtccgtctggtgatggtggcaaacgatcttcccgccctgaccgatcctctggtgagcgatgttctgc

SEQ ID NO: 486227 - DNA, 75 bp, synthetic construct
  source 1..75: mol_type = other DNA
gaaggagtgcatcctgaaagcggtttcgatgaagatttccaaatggaacagcaggccaatgctgaattcatcgcc

SEQ ID NO: 486228 - DNA, 75 bp, synthetic construct
  source 1..75: mol_type = other DNA
gaagtttattgaagataacgccacggcgtgtgacagctcgccgcttaatcaatatcagcgacgctttagtcagga

SEQ ID NO: 486229 - DNA, 75 bp, synthetic construct
  source 1..75: mol_type = other DNA
gaactggatgctcgggaaatatcgctcccggaacgtagcagcatgcttcatcgaacagattttcacgatgattac

SEQ ID NO: 486230 - DNA, 75 bp, synthetic construct
  source 1..75: mol_type = other DNA
ccatggggcatgacgaagcggtgaaagcctatgaacagaatatttctgcgttggcgattgcggctcagtttatta

SEQ ID NO: 486231 - DNA, 75 bp, synthetic construct
  source 1..75: mol_type = other DNA
gctctatttcgtgatgttggttatctggatgtttgtttattccactgccatcaccaacgatagcgcctcctacct

SEQ ID NO: 486232 - DNA, 75 bp, synthetic construct
  source 1..75: mol_type = other DNA
gactggtactgatttgcattctggtagccatctcctcacgcggcgagaaactgttattcaagatttcgactggca

SEQ ID NO: 486233 - DNA, 75 bp, synthetic construct
  source 1..75: mol_type = other DNA
gcacgccattgctcacctgaccggcggtggcttctgggaaaatattccgcgtgtattaccggaaaacactcaggc

SEQ ID NO: 486234 - DNA, 75 bp, synthetic construct
  source 1..75: mol_type = other DNA
gtatcgatctggtcgccatgtgcgttaatgacctggtggtgcaaggcgctgaaccgctgtttttcctcgactatt

SEQ ID NO: 486235 - DNA, 75 bp, synthetic construct
  source 1..75: mol_type = other DNA
gcgtattgccagataatactcaggcagtgattgatgaatcttcctggcagtggccggaagtgttcaactggctgc

SEQ ID NO: 486236 - DNA, 75 bp, synthetic construct
  source 1..75: mol_type = other DNA
aattgcatcaggtgttgttgaaggaattcgcactggaagttaacccgtgtgaagaaggctatttgctggccaacc

SEQ ID NO: 486237 - DNA, 75 bp, synthetic construct
  source 1..75: mol_type = other DNA
attaccatgaatgacgattcctgcatgggtaatgactccaacttattgatagtgttttatgttcagataatgccc

SEQ ID NO: 486238 - DNA, 75 bp, synthetic construct
  source 1..75: mol_type = other DNA
aggcatcgacagctttgagattagccagatggtggggcgtcagctaccgtttatgaccattatcgtgctgttctg

SEQ ID NO: 486239 - DNA, 75 bp, synthetic construct
  source 1..75: mol_type = other DNA
aaataatggcgagtgacggaaacagattttgtatgatattggattcaaaaaatggtttaccattatattatcaaa

SEQ ID NO: 486240 - DNA, 75 bp, synthetic construct
  source 1..75: mol_type = other DNA
gtgcagctgatggagtctgcccgagcaagcgccgaaccgccaacagatccggttattaataatccggaaccggcg

SEQ ID NO: 486241 - DNA, 75 bp, synthetic construct
  source 1..75: mol_type = other DNA
tggcgtctcatttatctcgatgatgattttattcagagtatatgactttcttttacccgcccaagatactttccc

SEQ ID NO: 486242 - DNA, 75 bp, synthetic construct
  source 1..75: mol_type = other DNA
gttgtgtgtccatccatattaatctggtttcagttttcggtatatgtcatgaggaaatattacagacatattctg

SEQ ID NO: 486243 - DNA, 75 bp, synthetic construct
  source 1..75: mol_type = other DNA
gatgttgttcagcgggtggtttttagtatggatgtggttgcgtcatcctgtcatgtggtggtggatgcggacagc

SEQ ID NO: 486244 - DNA, 75 bp, synthetic construct
  source 1..75: mol_type = other DNA
ggcgatattcagggccacgttgatggctggatcaaagcccaccagcaacagttcgatggctgggtgaatgaggcg

SEQ ID NO: 486245 - DNA, 75 bp, synthetic construct
  source 1..75: mol_type = other DNA
caggctggggctgcgaaggtgcgatcaaccaccagcttgccgcgtatgaactgaccaacaccgtgacgcataatc

SEQ ID NO: 486246 - DNA, 75 bp, synthetic construct
  source 1..75: mol_type = other DNA
aatccacttaaaacgccttccggtaagattgaaatttattccagcaagctggcggaaattgcccgtacctgggaa

SEQ ID NO: 486247 - DNA, 75 bp, synthetic construct
  source 1..75: mol_type = other DNA
atttcaccttcgaagccgctcaccgcttaccacacgtcccacaagggcataaatgtggtcgcctgcacgggcatt

SEQ ID NO: 486248 - DNA, 75 bp, synthetic construct
  source 1..75: mol_type = other DNA
cagtttcgttttcgtgcacagccagtatttccggcagatgtgaaggcaggagaatatgctggtgcactgaccttt

SEQ ID NO: 486249 - DNA, 75 bp, synthetic construct
  source 1..75: mol_type = other DNA
cccagtaaaacctgattttatatcagtgatcgttttcgaggataataatggttcgactgttactaggaaaataga

SEQ ID NO: 486250 - DNA, 75 bp, synthetic construct
  source 1..75: mol_type = other DNA
cggtcaatatcactgagttacgtaaaaacccagctaaatactttattgatcaaccggttgcggttctttctaata

SEQ ID NO: 486251 - DNA, 75 bp, synthetic construct
  source 1..75: mol_type = other DNA
atgcttaagagcttttttaactggtttggggcgtggcttttggctacgctttttgttttccttgcggccctgact

SEQ ID NO: 486252 - DNA, 75 bp, synthetic construct
  source 1..75: mol_type = other DNA
gtcacgacctactggatacagcaataatcaattacctttttaaggtgggaaaaatcaacgagcaagagattttgt

SEQ ID NO: 486253 - DNA, 75 bp, synthetic construct
  source 1..75: mol_type = other DNA
tgcaaggtctggtggtgctgatggatattcgccatccgctgaaagatcttgatcagcaaatgattgagtgggcgg

SEQ ID NO: 486254 - DNA, 75 bp, synthetic construct
  source 1..75: mol_type = other DNA
gaggaaattacacgccgagctgaaaaatatcttaatgatatgacggatgatgatttcaatgactttaaggaataa

SEQ ID NO: 486255 - DNA, 75 bp, synthetic construct
  source 1..75: mol_type = other DNA
tccgagtgctgcaagattagaggaaattacacgccgcgctgaacaatatcttaatgatatgacggatgatgattt

SEQ ID NO: 486256 - DNA, 75 bp, synthetic construct
  source 1..75: mol_type = other DNA
agcataaaaaaatgggggcaaaatcaactcaaagaccaatatgatgggagtgaaaagttagacttcgggggcatt

SEQ ID NO: 486257 - DNA, 75 bp, synthetic construct
  source 1..75: mol_type = other DNA
atgtttgtaacgagcaaaaaaatgaccgcagctgttctggcaattactttggcaatgtctctgagtgcctgttct

SEQ ID NO: 486258 - DNA, 75 bp, synthetic construct
  source 1..75: mol_type = other DNA
ttatggctattaggatctataaatcctgtatgagtagtaaggcagaaaaaacgcagatgttataccacgcccata

SEQ ID NO: 486259 - DNA, 75 bp, synthetic construct
  source 1..75: mol_type = other DNA
gtttatttgggcgccgtggatcgagcgctggcggcttccgcccggtagccaggaacgccgttccaaagacaattg

SEQ ID NO: 486260 - DNA, 75 bp, synthetic construct
  source 1..75: mol_type = other DNA
atgagatgtttaacccatattgctctggtaacggtgatacagtttatcgcctgttatctggctggttgggggaat

SEQ ID NO: 486261 - DNA, 75 bp, synthetic construct
  source 1..75: mol_type = other DNA
gctatgcatggaggatttgattcagcaggaaatacttttggaacttgttggcaggactatgatgataggcgataa

SEQ ID NO: 486262 - DNA, 75 bp, synthetic construct
  source 1..75: mol_type = other DNA
aaatgggaagatgtgctgttgtcacttcgaaagaaaatggttatttatgtggaaccggaagtttcatccttaagt

SEQ ID NO: 486263 - DNA, 75 bp, synthetic construct
  source 1..75: mol_type = other DNA
ttagcgagcatttcgacaccctatttaccaccgaagccagcgtggatgcgttaaaacagaccattcttcaactgg

SEQ ID NO: 486264 - DNA, 75 bp, synthetic construct
  source 1..75: mol_type = other DNA
tgccttcgctattattcatccatatacggcgatggatgctaatttcatttattattatctacgttctccggtatt

SEQ ID NO: 486265 - DNA, 75 bp, synthetic construct
  source 1..75: mol_type = other DNA
aaaagcaaaaaccactgccggaaattagcgaggaagagaagccgtttgaattgccgggtggatgggagtggactc

SEQ ID NO: 486266 - DNA, 75 bp, synthetic construct
  source 1..75: mol_type = other DNA
ctattgcctcatcactaatgatcattagaccatttatcacagaaatgggagggtatatttataattatttaacca

SEQ ID NO: 486267 - DNA, 75 bp, synthetic construct
  source 1..75: mol_type = other DNA
ctgaccagtctggacgcacatcagcaactggttgaaaccctattgggaacacttacagacagccaaaacgccgag

SEQ ID NO: 486268 - DNA, 75 bp, synthetic construct
  source 1..75: mol_type = other DNA
gccctggccctgaccgagtgccagccgttgcgccatcgtcacccggcaacactctccggtggagagacacagcgc

SEQ ID NO: 486269 - DNA, 75 bp, synthetic construct
  source 1..75: mol_type = other DNA
gtattgttaataaaattacggagctaatgtccctctgcgaccaactggaacagcaatccctgaccactctggacg

SEQ ID NO: 486270 - DNA, 75 bp, synthetic construct
  source 1..75: mol_type = other DNA
tccgagtttattctggtgacatgattattgccatgacaagaccatacattagttccggcttgaaaatttgtattt

SEQ ID NO: 486271 - DNA, 75 bp, synthetic construct
  source 1..75: mol_type = other DNA
cgtcatcgcacacctttcctgaactattgccagcaagcgtggcaactgcaaaacggagtgctccggtcattatgt

SEQ ID NO: 486272 - DNA, 75 bp, synthetic construct
  source 1..75: mol_type = other DNA
gtggtcatcgcctgcgctatcgccatgcaaccaaaactattaattcttgatgaagcctttagccgactgacgtcg

SEQ ID NO: 486273 - DNA, 75 bp, synthetic construct
  source 1..75: mol_type = other DNA
cgccatcaaacacctttcctgaactactgccagcaagcgtggcaactgcaaaacggagcactccagccattatgt

SEQ ID NO: 486274 - DNA, 75 bp, synthetic construct
  source 1..75: mol_type = other DNA
tacgttactagttttcttttctggttactgaaaagcccgctaggtcaaagtttattttctggagtttcacgttct

SEQ ID NO: 486275 - DNA, 75 bp, synthetic construct
  source 1..75: mol_type = other DNA
ttgaccgtgtattaagcgtgggaaaacaaagccatgctatcagcaccgccagcggtgttggcgaacattttgctg

SEQ ID NO: 486276 - DNA, 75 bp, synthetic construct
  source 1..75: mol_type = other DNA
ttggtgcgaaccatcagggcgaaattgcctggacagttagcctgacccgcccggaagccgcgctggtcaacaacc

SEQ ID NO: 486277 - DNA, 75 bp, synthetic construct
  source 1..75: mol_type = other DNA
ggagtggagttacctatcagatattggcatacttgctagaggaagatctaaacatagacctcgtaacgatcccac

SEQ ID NO: 486278 - DNA, 75 bp, synthetic construct
  source 1..75: mol_type = other DNA
caaaatcacctgataagagttcgcgggataattgaaggttatcaagagtttattgcattatatcttaattcgcca

SEQ ID NO: 486279 - DNA, 75 bp, synthetic construct
  source 1..75: mol_type = other DNA
agtacgcgctttacaggagaatggacatgttagtttggctggccgaacatttggtcaaatattattccggcttta

SEQ ID NO: 486280 - DNA, 75 bp, synthetic construct
  source 1..75: mol_type = other DNA
gaacgccgacaacaacgactggctgaactggcagagcgtaattggctcacgcaaagtgtggcgtttctcacctaa

SEQ ID NO: 486281 - DNA, 75 bp, synthetic construct
  source 1..75: mol_type = other DNA
gccgcaggatccgaatgacgaacctgcctctgaactactcaaacgaattgcgcaggaaaaagctcaactggtgaa

SEQ ID NO: 486282 - DNA, 75 bp, synthetic construct
  source 1..75: mol_type = other DNA
tcgagcaactcatgtccctctgcgaccaactggaacagcaatccctgaccagtctggatgcacatcagcaactag

SEQ ID NO: 486283 - DNA, 75 bp, synthetic construct
  source 1..75: mol_type = other DNA
agggtgggagtggtgtcgattgggttctatttataattttttaaatggatatgcctttaaaagtgagtggtttac

SEQ ID NO: 486284 - DNA, 75 bp, synthetic construct
  source 1..75: mol_type = other DNA
cctatgcgaccaactggaacagcaatccctgacaagtctggacgcacatcagcaactggttgaaaccctgttggg

SEQ ID NO: 486285 - DNA, 75 bp, synthetic construct
  source 1..75: mol_type = other DNA
gatgatttaatatatatatctgatagttttgtaaagcgagatgatcaatacctccaagaacacgatatagtcatg

SEQ ID NO: 486286 - DNA, 75 bp, synthetic construct
  source 1..75: mol_type = other DNA
tagcgaggaagagaagccgtttgaattgccgcagggatgggagtgggtcacactggcaaccgtaggtgaaatagt

SEQ ID NO: 486287 - DNA, 75 bp, synthetic construct
  source 1..75: mol_type = other DNA
cataatttccgagtttattctggtgacatgattattgccatgacaagaccatacattagttccggcttgaaaatt

SEQ ID NO: 486288 - DNA, 75 bp, synthetic construct
  source 1..75: mol_type = other DNA
agaaaccaacgctgttcgtaaccaatggcggccagatatttgcccaataaccggacgtgcattttttatgtggat

SEQ ID NO: 486289 - DNA, 75 bp, synthetic construct
  source 1..75: mol_type = other DNA
cggtggcactggcactactggatgaacgggaaagaaaccagcaatacatcaaacgccgtgaccaggagaacgagg

SEQ ID NO: 486290 - DNA, 75 bp, synthetic construct
  source 1..75: mol_type = other DNA
gttgcacggcattttgatgatggattaacgcttgaagttaatcgcacatgtaccacaggagaacgcaacgcgaac

SEQ ID NO: 486291 - DNA, 75 bp, synthetic construct
  source 1..75: mol_type = other DNA
tgcgaaaagcagcgcaactggcaacacaaggcgaatgggttgcatttatttcgacgggtactggtacgtatgcgg

SEQ ID NO: 486292 - DNA, 75 bp, synthetic construct
  source 1..75: mol_type = other DNA
atcaggcactacgtgagatagcaaaacaggcaacacagggcgaatgggtcgcatttatttcgccgggcaaacacg

SEQ ID NO: 486293 - DNA, 75 bp, synthetic construct
  source 1..75: mol_type = other DNA
agggtctacgaactggaggaacgcgttaaggaactggatgctcgggaaataacgctcccggaacgtagcagcatg

SEQ ID NO: 486294 - DNA, 75 bp, synthetic construct
  source 1..75: mol_type = other DNA
acgcgaggcaccgtggtacgcgttgtttgatgctctgctgcaactggcgggaagtatactttcaagtgacagtgt

SEQ ID NO: 486295 - DNA, 75 bp, synthetic construct
  source 1..75: mol_type = other DNA
gagtcacgcgatcgcggtcaggcaatggtggatctgctggcggagtatgaaaaagtcggcctgcaactaaattgt

SEQ ID NO: 486296 - DNA, 75 bp, synthetic construct
  source 1..75: mol_type = other DNA
atgcagatcctcaaagtgatcggcctgctgatggagtatccagacgagctgttgtgggaatgtaaggaggacgcg

SEQ ID NO: 486297 - DNA, 75 bp, synthetic construct
  source 1..75: mol_type = other DNA
ctcaatgtgccgatcggcgagatcttacatgtaggtgacgatcttaccaccgacgtgggtggggcgatccgcagc

SEQ ID NO: 486298 - DNA, 75 bp, synthetic construct
  source 1..75: mol_type = other DNA
cgttttcgctcgattgaacaagctatgctcgatgccgggctgagtgccgaagaggccagtgcaggcgcacatgct

SEQ ID NO: 486299 - DNA, 75 bp, synthetic construct
  source 1..75: mol_type = other DNA
cggaaaatggcgatctgatgcaaacctgggacagccgtttactgccgcatctggaaatttcccggttggcatctc

SEQ ID NO: 486300 - DNA, 75 bp, synthetic construct
  source 1..75: mol_type = other DNA
acggtgagttttcatgtgagcgttacgatcatgattttggcggttgggtagaaagcgaatgtcttgggttatatc

SEQ ID NO: 486301 - DNA, 75 bp, synthetic construct
  source 1..75: mol_type = other DNA
atcattgggcatatggcctatgactccacctcatggcgtaacgctatcaggctattagccagcggcgctatcaaa

SEQ ID NO: 486302 - DNA, 75 bp, synthetic construct
  source 1..75: mol_type = other DNA
ttggtctgcaagaagatgtggcggtccgcttcccggttgcaaaagaactgggtgcgacggcagtagtaaatggtt

SEQ ID NO: 486303 - DNA, 75 bp, synthetic construct
  source 1..75: mol_type = other DNA
attgcaaccttaacccgttggctggaagaacgtgatcaggcactccttagtgcagcaagtgaacaacaacagacc

SEQ ID NO: 486304 - DNA, 75 bp, synthetic construct
  source 1..75: mol_type = other DNA
gaaagaagggaaaataaaaaaacaaaaatcgttgccaccgattagcgatgaggaaaaaccgtttgaacttccgga

SEQ ID NO: 486305 - DNA, 75 bp, synthetic construct
  source 1..75: mol_type = other DNA
aaaagcaaaaaccactgccggaaattagcgaggaagagaagctatttgaattgccggagggatgggagtgggtgc

SEQ ID NO: 486306 - DNA, 75 bp, synthetic construct
  source 1..75: mol_type = other DNA
gccagcgggctgacattactgacagcagcgatcacgttgtggaacacggtatatatagaaagagctattgagtca

SEQ ID NO: 486307 - DNA, 75 bp, synthetic construct
  source 1..75: mol_type = other DNA
taagccaaacttacaagttgcctcccctgtcatccagagaagtaaacgacgcggcatggaaattacacaacatgc

SEQ ID NO: 486308 - DNA, 75 bp, synthetic construct
  source 1..75: mol_type = other DNA
tgaagcaaactatcgctcaatacgaagccaatcgtgatgaattaccgtttggactggataccaacagtgccattg

SEQ ID NO: 486309 - DNA, 75 bp, synthetic construct
  source 1..75: mol_type = other DNA
gacggtttgtttgaaatccgccttaagggctcggaaggcatagggcgtgttttttactgcacgctaaaaggaaag

SEQ ID NO: 486310 - DNA, 75 bp, synthetic construct
  source 1..75: mol_type = other DNA
ggccaattatcctttgaccactcgttttaccgtgtccggagaagttactggttcgttgattaaacaaaacggaag

SEQ ID NO: 486311 - DNA, 75 bp, synthetic construct
  source 1..75: mol_type = other DNA
gggccggaggcgcattcaacgccattttaaaaagcagcagtctcgctgatacgctggcagttattctctccaata

SEQ ID NO: 486312 - DNA, 75 bp, synthetic construct
  source 1..75: mol_type = other DNA
ggctatgaagcaccggtaatgctggcttactctgcgcgtaaccgttctgcgtctatccgtattccggtggtttct

SEQ ID NO: 486313 - DNA, 75 bp, synthetic construct
  source 1..75: mol_type = other DNA
ggtaaaaccgcgacctttatgccaaaaccgatgtttggtgataacggctcaggtatgcactgccacatgtcgcta

SEQ ID NO: 486314 - DNA, 75 bp, synthetic construct
  source 1..75: mol_type = other DNA
ggtaaaactgcgacctttatgccaaaaccgatgttcggtgataacggctccggtatgcactgccacatgtcgctg

SEQ ID NO: 486315 - DNA, 75 bp, synthetic construct
  source 1..75: mol_type = other DNA
gtgaaaggcggttacttcccggttccgccggtagactcagctcaggatattcgttctgaaatgtgtctggtgatg

SEQ ID NO: 486316 - DNA, 75 bp, synthetic construct
  source 1..75: mol_type = other DNA
acgaaattcagatctacaaatatgtcgtccacaacgtggcgcatcgtttcggtaaaacggcgacctttatgccga

SEQ ID NO: 486317 - DNA, 75 bp, synthetic construct
  source 1..75: mol_type = other DNA
cccgtacctgtgctttgctgccctgctgatggccggtcttgatggtatcaagaacaagatccatccgggcgaagc

SEQ ID NO: 486318 - DNA, 75 bp, synthetic construct
  source 1..75: mol_type = other DNA
gcgcattctcgcatcaatgtctttctactgttgcagcaactctgggcggtgacctattcaaaaaagacgaagtag

SEQ ID NO: 486319 - DNA, 75 bp, synthetic construct
  source 1..75: mol_type = other DNA
caacgattatggagacaaccggaataaccaaagaacaatattcatggattgtcagtgcattccagttggcctata

SEQ ID NO: 486320 - DNA, 75 bp, synthetic construct
  source 1..75: mol_type = other DNA
ggcgacctcggctgtttagccagcggttttgtggcgaagttcttccacgatcgcggcgtgagtttaattaactcg

SEQ ID NO: 486321 - DNA, 75 bp, synthetic construct
  source 1..75: mol_type = other DNA
gtatatcgccctgcgtcgcgaagaagatgatcgcgtgcgtatgactccgcacccggtagagtttgagctgtacta

SEQ ID NO: 486322 - DNA, 75 bp, synthetic construct
  source 1..75: mol_type = other DNA
tcgcgcgttttctcgctgacccggcatggggaaccattacttctgggtaccgattttcttcgtcgaaacgctgca

SEQ ID NO: 486323 - DNA, 75 bp, synthetic construct
  source 1..75: mol_type = other DNA
attggcttcgcgccgttctttattgccctggctttctttgacattattggcgccattgcgctgtggatgcttatc

SEQ ID NO: 486324 - DNA, 75 bp, synthetic construct
  source 1..75: mol_type = other DNA
cacagcgtcaaaattaatgagctgaccactgacgaaacgcgggagctgattaaagcaatgaatcattttcgtgca

SEQ ID NO: 486325 - DNA, 75 bp, synthetic construct
  source 1..75: mol_type = other DNA
tggtcatcacgaccacaggcaatttctggttcaccagtcagctctcccgcagcgaacaccgtcatcaggccgcag

SEQ ID NO: 486326 - DNA, 75 bp, synthetic construct
  source 1..75: mol_type = other DNA
gcaagctggaacagcaacaggctaatgcggagccagaagaacagattgatccgcgcaaagcggcagttgccgcgg

SEQ ID NO: 486327 - DNA, 75 bp, synthetic construct
  source 1..75: mol_type = other DNA
atgctatatttggaatagtttacaaatacttatctgaaaactcatctcttttacctactgaggaaaatataaaaa

SEQ ID NO: 486328 - DNA, 75 bp, synthetic construct
  source 1..75: mol_type = other DNA
tgaagccggaatgctgaaaagaccatccagcggtcgtgggtggcaaatcaggacaccacggctaaaacacctgaa

SEQ ID NO: 486329 - DNA, 75 bp, synthetic construct
  source 1..75: mol_type = other DNA
cacggggcggcgggtcgtgagtgggttaaatggctgtcaggccaccagcaggaggcaaaggatacggtaagggaa

SEQ ID NO: 486330 - DNA, 75 bp, synthetic construct
  source 1..75: mol_type = other DNA
cgttgctacagcggctttgttgaccagcagccggaggactggacaccgcgcatggctggactgaaggatgatgcg

SEQ ID NO: 486331 - DNA, 75 bp, synthetic construct
  source 1..75: mol_type = other DNA
taacatctcacaattgaaagcatcaataaatcatatttacggtgcaggtgttgactcagaaagatatcttgataa

SEQ ID NO: 486332 - DNA, 75 bp, synthetic construct
  source 1..75: mol_type = other DNA
acagagatgagtataatagaaaaatcattgctgaaaaaataataagcttactcgagtcccccttaaaaatatccc

SEQ ID NO: 486333 - DNA, 75 bp, synthetic construct
  source 1..75: mol_type = other DNA
gtttattaaagatatgcgtgaaccacgggatatcaataacgaacaaaataaacgggcactggctgctatattctt

SEQ ID NO: 486334 - DNA, 75 bp, synthetic construct
  source 1..75: mol_type = other DNA
cgggatattaaccatgagcagaataaacgcgcactagccgcaatattctttatggcaaagattccggcggaacgt

SEQ ID NO: 486335 - DNA, 75 bp, synthetic construct
  source 1..75: mol_type = other DNA
gagttaagggcgaaagtttttggtctgaatattgagtcagagcttgaacggtttattaaagatatgcgtgatcca

SEQ ID NO: 486336 - DNA, 75 bp, synthetic construct
  source 1..75: mol_type = other DNA
ctgttccgctaagcgctggcctccgccttaatgggttaaaccacatcgcggaactaagggcgaaagtgtttggct

SEQ ID NO: 486337 - DNA, 75 bp, synthetic construct
  source 1..75: mol_type = other DNA
attattggcgctattgcattatggacgcttatcaaagttaaagatgaagaaccgcaagtacagctagcgacaagc

SEQ ID NO: 486338 - DNA, 75 bp, synthetic construct
  source 1..75: mol_type = other DNA
atggttcgaactgacttctctcttggggagtcggctctaaaagcagaaaacgcggggaagattgccagagaagct

SEQ ID NO: 486339 - DNA, 75 bp, synthetic construct
  source 1..75: mol_type = other DNA
tgtcacgggtgtttgtaagaaggttaaggacaaagagaaagactataccaaagacgagataggccagttcacaga

SEQ ID NO: 486340 - DNA, 75 bp, synthetic construct
  source 1..75: mol_type = other DNA
cgagtcgcttcataaagtaggggcttttgcgtcaattgagccaggcagtctgccagcaactgatcctgaacgact

SEQ ID NO: 486341 - DNA, 75 bp, synthetic construct
  source 1..75: mol_type = other DNA
cgacgatccgacatacgagcaccgcgctcgcctggcgaaagagtcaggaagatgtatggaatcattagttcgtga

SEQ ID NO: 486342 - DNA, 75 bp, synthetic construct
  source 1..75: mol_type = other DNA
agcacttcctaagatggcagacgacgaacctgcaacactgatgaaacttgctgttgcagggctgcgtaagcgtct

SEQ ID NO: 486343 - DNA, 75 bp, synthetic construct
  source 1..75: mol_type = other DNA
ccgcgaccaagctgaattgatgggaaaccttgtcatagacgcagttaaagcctcacgtccgtttgagatgaaccc

SEQ ID NO: 486344 - DNA, 75 bp, synthetic construct
  source 1..75: mol_type = other DNA
cgccagacgaattgattatcccgctggacgaacagaagtcgctccatttcagagtggcttatttctccccaaccc

SEQ ID NO: 486345 - DNA, 75 bp, synthetic construct
  source 1..75: mol_type = other DNA
aaacgcaaatcgccggtgaaagtctgcatcttaacctccaacagcggctgatgcgatttaccgcagagaatgcac

SEQ ID NO: 486346 - DNA, 75 bp, synthetic construct
  source 1..75: mol_type = other DNA
actttcgggaaaacgcgaattcgtcaaccaataattttcgggaaatttcggaaacgtcaaccaactctccggtaa

SEQ ID NO: 486347 - DNA, 75 bp, synthetic construct
  source 1..75: mol_type = other DNA
acgatctaatccgtccaagcattggtattaagccaaaaatcatggttattctggacaacgcgaacggcaatgatg

SEQ ID NO: 486348 - DNA, 75 bp, synthetic construct
  source 1..75: mol_type = other DNA
cgccgatttcgatgattttgacggtgacaggcgaggtatcggtgattgtctggatgaggccgagcaagagcttat

SEQ ID NO: 486349 - DNA, 75 bp, synthetic construct
  source 1..75: mol_type = other DNA
ggcgcatcagcaaaatattcttgtccagatgcttggggatctgccggtcggatttatttaccgtgactgtcaggg

SEQ ID NO: 486350 - DNA, 75 bp, synthetic construct
  source 1..75: mol_type = other DNA
ctttatgcgtgaagagatcaatctggtgcgcccgacctatgtgctgacgtgtggtagccgggcaacggcattgtt

SEQ ID NO: 486351 - DNA, 75 bp, synthetic construct
  source 1..75: mol_type = other DNA
gatacccagtttgtcattaccccaccgcttttttccatgcaaggtaaaaaaagagaatacgcttcggataatcaa

SEQ ID NO: 486352 - DNA, 75 bp, synthetic construct
  source 1..75: mol_type = other DNA
gatagaaaatgcgggtgaccagaaagatacccagtttgtcattgatcctacccacgtaatatggacacaggccta

SEQ ID NO: 486353 - DNA, 75 bp, synthetic construct
  source 1..75: mol_type = other DNA
ttgcctgtcacgaataatgatcctgccagtgtctatctcattcagtcatggatagaaaatgcagatgacagcctt

SEQ ID NO: 486354 - DNA, 75 bp, synthetic construct
  source 1..75: mol_type = other DNA
tgtttcatagctggcaatttgcgtttattgtctcaggtagccttgctttgctcgcggctttattttggttctttt

SEQ ID NO: 486355 - DNA, 75 bp, synthetic construct
  source 1..75: mol_type = other DNA
gttttgtcgcgaagttcttccacgatcgcggcgtgagtttaattaactcacgaagaattaccttcactattgcag

SEQ ID NO: 486356 - DNA, 75 bp, synthetic construct
  source 1..75: mol_type = other DNA
agccagtggttttgtcgcgaagttcttccacgatcgcggcgtgagtttaattaactcacgaagaattaccttcac

SEQ ID NO: 486357 - DNA, 75 bp, synthetic construct
  source 1..75: mol_type = other DNA
agacactgccggatatagcggactcactgacatcccgaattaacgatcactttcaggtgttcacacccgcatctt

SEQ ID NO: 486358 - DNA, 75 bp, synthetic construct
  source 1..75: mol_type = other DNA
ccgttgcattacatacaccagggctgatgaatccggggcctctcttcgggcagctggttttgttcgtgtgaaaga

SEQ ID NO: 486359 - DNA, 75 bp, synthetic construct
  source 1..75: mol_type = other DNA
attccagctggagtccggccccatgcgcaagctgcttaaagatctgggcggtggcattgagccaatgagcttcaa

SEQ ID NO: 486360 - DNA, 75 bp, synthetic construct
  source 1..75: mol_type = other DNA
ccagtgtctatctcattcagtcatggatagaaaatgcaggtgaccaaaaagacacccagtttgtcattaccccac

SEQ ID NO: 486361 - DNA, 75 bp, synthetic construct
  source 1..75: mol_type = other DNA
aaagtaaagtaatcagagcggttacacaagtcgaagagaggcctcataatgttttccttgttgggggaggttcat

SEQ ID NO: 486362 - DNA, 75 bp, synthetic construct
  source 1..75: mol_type = other DNA
gtcagtgtattccagttagcgtacacaatcggtcaaccaattatgggtttttttatcgataatatcggacttaaa

SEQ ID NO: 486363 - DNA, 75 bp, synthetic construct
  source 1..75: mol_type = other DNA
gcttaaaagatgtgtactcacacgcaatcacaacagagaagcgcgaactcttcaatgctgaaattaagtaccgtg

SEQ ID NO: 486364 - DNA, 75 bp, synthetic construct
  source 1..75: mol_type = other DNA
ctgaaacagaatcttatccaaacattgaaatcagcggtgaagtggtcccggttgcagatgctcatggagagcttc

SEQ ID NO: 486365 - DNA, 75 bp, synthetic construct
  source 1..75: mol_type = other DNA
tggcccgcataaagagcggcagaatctgggtatttatcgtcaacagttgattggtaaaaataaactgattatgcg

SEQ ID NO: 486366 - DNA, 75 bp, synthetic construct
  source 1..75: mol_type = other DNA
actgggtgattattgatgaagcagcacgctcaattgcaagtgagctggccattgcaatgcagtcggcccgacgca

SEQ ID NO: 486367 - DNA, 75 bp, synthetic construct
  source 1..75: mol_type = other DNA
ctggataaagacgcgaaggtctctgcagcaaaagacattctaatttccaggctgtgtaaggattatggcgtcaga

SEQ ID NO: 486368 - DNA, 75 bp, synthetic construct
  source 1..75: mol_type = other DNA
ggatatcgtcaggttcagtaaccgtgaaggggctgtttctcctgggctgaaagatgtctattcgaacgcaatcac

SEQ ID NO: 486369 - DNA, 75 bp, synthetic construct
  source 1..75: mol_type = other DNA
agtggtggtgttccttgtgtgctccgggaaatcaggagaatgagcactactgtcattcacatcaaaggggaatga

SEQ ID NO: 486370 - DNA, 75 bp, synthetic construct
  source 1..75: mol_type = other DNA
acaggcattgccgcagcactggcagcgccattaatcggggtggcagagcgtgacggattcgggattcatttttat

SEQ ID NO: 486371 - DNA, 75 bp, synthetic construct
  source 1..75: mol_type = other DNA
gcggcctcatcccggcggattacggtgagcaggtacaccgcgtggccgaacgctttgcaatcctcgaagccgcgc

SEQ ID NO: 486372 - DNA, 75 bp, synthetic construct
  source 1..75: mol_type = other DNA
tacgcgacttcctgacgctgcttgaacagcagggtgagctaaaacgtatcacgctcccggtggatccgcatctgg

SEQ ID NO: 486373 - DNA, 75 bp, synthetic construct
  source 1..75: mol_type = other DNA
ccattccagatacgctctcagaatatgcatttgccggattgttacgcggcaccaaaactgaagtggtgaagtgca

SEQ ID NO: 486374 - DNA, 75 bp, synthetic construct
  source 1..75: mol_type = other DNA
aatgatcactatatctttgagcactatattgatggctttcataatatctaacgttatatttggtaaattgttttt

SEQ ID NO: 486375 - DNA, 75 bp, synthetic construct
  source 1..75: mol_type = other DNA
acggtagtgatgatgctggtgtttcagcgccaccccgagcaacgctggcgtgaggtggcagacgtgctggaagag

SEQ ID NO: 486376 - DNA, 75 bp, synthetic construct
  source 1..75: mol_type = other DNA
cgcatcgcagattgccaggcgcagggcgtcagccatgacacctgttatctcgcagaacagcagcgtcagacggct

SEQ ID NO: 486377 - DNA, 75 bp, synthetic construct
  source 1..75: mol_type = other DNA
ggctggttgtagctctcccgcgtctcgcattgcagactgccaggcgcaaggcgtatctcatgacacctgttatct

SEQ ID NO: 486378 - DNA, 75 bp, synthetic construct
  source 1..75: mol_type = other DNA
agcagccattattgtcggtatttgtcgctgatggcgcaggcagtgtctcgcagggtggcgaaggcgcgatgctcg

SEQ ID NO: 486379 - DNA, 75 bp, synthetic construct
  source 1..75: mol_type = other DNA
caggctggggctgcgaaggtgccatcaactatcagcttgccgcgtatgacctgaccaataccgtaacccacaatc

SEQ ID NO: 486380 - DNA, 75 bp, synthetic construct
  source 1..75: mol_type = other DNA
tcattctccatttcaatgcgttgtagctttttcctcagctcacgtatttcgatttgttctggtgttatcggagag

SEQ ID NO: 486381 - DNA, 75 bp, synthetic construct
  source 1..75: mol_type = other DNA
aacggagaaaaggattgtgtgtgcaggaaagaaggcagtcgctgagccggtttcgtccagggagtctgacatcaa

SEQ ID NO: 486382 - DNA, 75 bp, synthetic construct
  source 1..75: mol_type = other DNA
acactctccaggaaacccggggcggttcatattgctaaacgccgtggctacccgctttcagaaagagcaaccttt

SEQ ID NO: 486383 - DNA, 75 bp, synthetic construct
  source 1..75: mol_type = other DNA
atggggatttctgataacccactgatcatattgctgctgattaatatcgtcttattaattgtcggcatctttatg

SEQ ID NO: 486384 - DNA, 75 bp, synthetic construct
  source 1..75: mol_type = other DNA
ttctcggtggtttagttaccacattcgccatctgcttcggtttcactatctggtctgaagtagatgactggatgt

SEQ ID NO: 486385 - DNA, 75 bp, synthetic construct
  source 1..75: mol_type = other DNA
gctgcacacaggtcaggcatacctctaacaatttttaattatcctttgtgtcatcttcctgaaagagcttgggag

SEQ ID NO: 486386 - DNA, 75 bp, synthetic construct
  source 1..75: mol_type = other DNA
tgaacctttgctgtatggagatgatttccttaacttcattgattttatcatcgagaattcaccagatactgcttt

SEQ ID NO: 486387 - DNA, 75 bp, synthetic construct
  source 1..75: mol_type = other DNA
ggttatgcaaacaaaaaccagtgaaccctttattctttttgcccaatttactggtagttgctgaaggcaataatg

SEQ ID NO: 486388 - DNA, 75 bp, synthetic construct
  source 1..75: mol_type = other DNA
agaccccacgccttaagaacctttatggagcgcaattatgggcctacgggatgttgttcgctaatcacgatgagg

SEQ ID NO: 486389 - DNA, 75 bp, synthetic construct
  source 1..75: mol_type = other DNA
tcgggctggtgggtgctgacggcttcggggtacatcttttcgaacagtccacagcagggaaaaccaccacacaga

SEQ ID NO: 486390 - DNA, 75 bp, synthetic construct
  source 1..75: mol_type = other DNA
tgcagtgatttttgcgggggatgacgcatacagccacgcagagcattacatgcagggcggagaagccagaaagcg

SEQ ID NO: 486391 - DNA, 75 bp, synthetic construct
  source 1..75: mol_type = other DNA
gttgcacgccactttgacgatgggctgacactggaggtcaatcgtacctgtaccactggtgaacgtaacgctaac

SEQ ID NO: 486392 - DNA, 75 bp, synthetic construct
  source 1..75: mol_type = other DNA
aagtcatcacaatggcggttccgtgcggtggcattggcgaccgtgacggctggcggttgctgaaagaccacggac

SEQ ID NO: 486393 - DNA, 75 bp, synthetic construct
  source 1..75: mol_type = other DNA
gcgtgccctggatgctgccggaatgctggagaagggaagcgatcgccgatacaaaaaaaaggcgctgggcaagat

SEQ ID NO: 486394 - DNA, 75 bp, synthetic construct
  source 1..75: mol_type = other DNA
aacgatcgccgttacaagaaaaaggcgctcggcaggattggggggaagcagcatgttttttacgtgctgatgttc

SEQ ID NO: 486395 - DNA, 75 bp, synthetic construct
  source 1..75: mol_type = other DNA
gactggatgcagttaagcggaagccatgaggaatggcagttaagcacaacaacgggctggcattttggcgcgtac

SEQ ID NO: 486396 - DNA, 75 bp, synthetic construct
  source 1..75: mol_type = other DNA
tggtggtaatccgtccatgatgctgggtgtggcggtatcgctatctgcaccattaatcgggctggtgggtgctga

SEQ ID NO: 486397 - DNA, 75 bp, synthetic construct
  source 1..75: mol_type = other DNA
gaagctggcggcggcaggcgtacaggatgctgattactaccccgaaggaatgcaccataacgagcggcagaactg

SEQ ID NO: 486398 - DNA, 75 bp, synthetic construct
  source 1..75: mol_type = other DNA
caaagagcattaccgcgtgatgcgctggaagaaacccgcaaaccatgaagtcatcacaatggcggttccgtgcgg

SEQ ID NO: 486399 - DNA, 75 bp, synthetic construct
  source 1..75: mol_type = other DNA
ggcagttaagcacaacaacgggctggcattttggcgcgtacatcatgccggacggttcggtcattggtgattgcg

SEQ ID NO: 486400 - DNA, 75 bp, synthetic construct
  source 1..75: mol_type = other DNA
gccttgctgcggaataggcgacagtgacggctggcggttactgaaagccaacgggcttaaagtcacgacaaacgg

SEQ ID NO: 486401 - DNA, 75 bp, synthetic construct
  source 1..75: mol_type = other DNA
aggacggttatgtgtcatggtcagacgtgccggaaagctggacggcaaacaggcgctacagattgaaaccatgct

SEQ ID NO: 486402 - DNA, 75 bp, synthetic construct
  source 1..75: mol_type = other DNA
tgatggctttggtgtgcatctgtatgcgcaaagtacagcgggaaaaacaactgcggaagattttgcctcaagtct

SEQ ID NO: 486403 - DNA, 75 bp, synthetic construct
  source 1..75: mol_type = other DNA
gggccgaagcaactggcagacctggcgaatatccgcattattgacgatgagcgccgctttgcgcgtgtttatatc

SEQ ID NO: 486404 - DNA, 75 bp, synthetic construct
  source 1..75: mol_type = other DNA
tttccggtaaaagctttcctgcaagttgcgacacagtggaaaatgccagccaactacatgaagtatggcaaaaag

SEQ ID NO: 486405 - DNA, 75 bp, synthetic construct
  source 1..75: mol_type = other DNA
gagagcgggagaggatggaaaatcaagaccccacgccttaagaacctttatggagcgcaattatgggcctacggg

SEQ ID NO: 486406 - DNA, 75 bp, synthetic construct
  source 1..75: mol_type = other DNA
cgccatggtcaatggatgtgctcacctctggaagtgttaggcgaaggatttgatagagaaaatgacgcaatgttt

SEQ ID NO: 486407 - DNA, 75 bp, synthetic construct
  source 1..75: mol_type = other DNA
gctggctggcgtacaggatgcgaaattatacaaaggcatcaccgaccgggagccggagaactggcgcgactactt

SEQ ID NO: 486408 - DNA, 75 bp, synthetic construct
  source 1..75: mol_type = other DNA
cgcttgaactactgggaacaggaacaatcggcaaagagcattaccgcgtgatgcgctggaaaaaaccagcaaacc

SEQ ID NO: 486409 - DNA, 75 bp, synthetic construct
  source 1..75: mol_type = other DNA
tgtttttgtgacgagaacggcgatttactggaggactggacaccacagcttgcccggctgaaagacgaatacgag

SEQ ID NO: 486410 - DNA, 75 bp, synthetic construct
  source 1..75: mol_type = other DNA
acgtgacaaccaacggcaaatacagggctatcctggctgactggatgcagttaagcggaaaccatgaggaatggc

SEQ ID NO: 486411 - DNA, 75 bp, synthetic construct
  source 1..75: mol_type = other DNA
atgctgggtgtggcaacgtcactggcagcgcctttaattggccttgtgggtgctgacggcttcggggtgcatctt

SEQ ID NO: 486412 - DNA, 75 bp, synthetic construct
  source 1..75: mol_type = other DNA
taccggaaaaagcgccgcgattaacggttattccgtggcgggtacggcggagggctggcgcgagagtgtggcgcg

SEQ ID NO: 486413 - DNA, 75 bp, synthetic construct
  source 1..75: mol_type = other DNA
gcagggcacatcaagccatcaaacatcaatgccattgcgcaaaagctggcggcggcaggcatacgggatgcgaat

SEQ ID NO: 486414 - DNA, 75 bp, synthetic construct
  source 1..75: mol_type = other DNA
atcatatggcaacctggaccacggcgttgcaaacccgttccaccgccgggcgcggcagttccggaaaaattgatt

SEQ ID NO: 486415 - DNA, 75 bp, synthetic construct
  source 1..75: mol_type = other DNA
tgatgtgcgcctgaactatcacgacggggaagcaaccccggaaggaatacaggtcgctatagcctatccgaaaca

SEQ ID NO: 486416 - DNA, 75 bp, synthetic construct
  source 1..75: mol_type = other DNA
ccgtgacgggattgtttatgcctgcgtgggggggcggcgttatacactcccggcaccaaaaggtaagaaaggcaa

SEQ ID NO: 486417 - DNA, 75 bp, synthetic construct
  source 1..75: mol_type = other DNA
agtgatcccagctatctggatgtggaaaccatctacaccctctcctggctgcgttattccctgcgtacttttatc

SEQ ID NO: 486418 - DNA, 75 bp, synthetic construct
  source 1..75: mol_type = other DNA
taaccgtcttgatgtgatgtgtacaccggacctggttaaccagttccgcttcatggcagcgcagatccgtttcat

SEQ ID NO: 486419 - DNA, 75 bp, synthetic construct
  source 1..75: mol_type = other DNA
atgtccacggtgaccgtcgcggccgctgatgtggtgcagattgaacgtcaggtgacgatgtaccgtcagaatgca

SEQ ID NO: 486420 - DNA, 75 bp, synthetic construct
  source 1..75: mol_type = other DNA
gcgcaacgcaaaagaccgtaaccgtctggatgtgatgtgtacaccggacctggttaaccagttccgcttcctggc

SEQ ID NO: 486421 - DNA, 75 bp, synthetic construct
  source 1..75: mol_type = other DNA
gcaccaaacgtgcctgtccgtatccgttccggctcacaggcctgtgcggcgtttggtcagggttccatgctggca

SEQ ID NO: 486422 - DNA, 75 bp, synthetic construct
  source 1..75: mol_type = other DNA
ggcaccttcggtacggcaaccagttttggtgaatcccgtaatgacttcctgtttacctgcacttctattcctaaa

SEQ ID NO: 486423 - DNA, 75 bp, synthetic construct
  source 1..75: mol_type = other DNA
ggagcgtaatgcgtcagatcgaaaccgtcttgacgtgttatgcacgccggatctggttaaccagttccgcttcct

SEQ ID NO: 486424 - DNA, 75 bp, synthetic construct
  source 1..75: mol_type = other DNA
cgtggcgggtatgggcgatcgccagtacaactatgtcgtcatgccctataaggatgatgcaaacctgaaaatcac

SEQ ID NO: 486425 - DNA, 75 bp, synthetic construct
  source 1..75: mol_type = other DNA
atcaggctgatggctttgccgtgacagtgctgtccggcacgtatggggatatttccacgtttggtgtcagccgta

SEQ ID NO: 486426 - DNA, 75 bp, synthetic construct
  source 1..75: mol_type = other DNA
tattccgcaggggaacggcaccggtaatgctgctgtcggtgaaatttcactgtcaggaacggcaggcgaaaacgg

SEQ ID NO: 486427 - DNA, 75 bp, synthetic construct
  source 1..75: mol_type = other DNA
tccataatcggttttgataacatcgacctgacgcaattttgtgatccgccactgacaaccatcgcacagccgcgc

SEQ ID NO: 486428 - DNA, 75 bp, synthetic construct
  source 1..75: mol_type = other DNA
ttcttcaccccgcgcccgaaagtcgactggcccgcccattcggcgatgagcagccacgacgcgctgatggtggca

SEQ ID NO: 486429 - DNA, 75 bp, synthetic construct
  source 1..75: mol_type = other DNA
cgtaaatttaacgtttgtgaggacaggttacaatatttaacaactgacaatatcttgattggagacttgaataag

SEQ ID NO: 486430 - DNA, 75 bp, synthetic construct
  source 1..75: mol_type = other DNA
catcagcaagtgctaatgctttgaaaagatcaacttactcccataatccggacatactaaatactcaggcaatag

SEQ ID NO: 486431 - DNA, 75 bp, synthetic construct
  source 1..75: mol_type = other DNA
gttatgcggatactaaatatattggatgcggcgattatcggacgtgttgctcacgttccgggcaagtctgtatta

SEQ ID NO: 486432 - DNA, 75 bp, synthetic construct
  source 1..75: mol_type = other DNA
aaattagcggttctgaaaacacagggaagtttgcataagcccatcgtgatgggaatacgtccggaagatattcat

SEQ ID NO: 486433 - DNA, 75 bp, synthetic construct
  source 1..75: mol_type = other DNA
cttgatgctaagctgcgtgtgcaaatgcgcgcagagatcagcaagctacaccagaagctgaataccaccatgatc

SEQ ID NO: 486434 - DNA, 75 bp, synthetic construct
  source 1..75: mol_type = other DNA
agctggagctgccgacggttcatatcgacaacctgaccgcggcattcgatgcggtaaattacctgtatgaacagg

SEQ ID NO: 486435 - DNA, 75 bp, synthetic construct
  source 1..75: mol_type = other DNA
atcagcaggaaaaaacctttatcgatttgatcatcaccaagcaaattgatggcatgttgctgctgggttcaaggc

SEQ ID NO: 486436 - DNA, 75 bp, synthetic construct
  source 1..75: mol_type = other DNA
ccgcaccattctggtgattgtcccggatatctgcgatcccttctttagcgaaattattcgcggtatcgaagttac

SEQ ID NO: 486437 - DNA, 75 bp, synthetic construct
  source 1..75: mol_type = other DNA
tttatcgacgatgaccagggaactcatttccgtcgggttatccgcaacgcagagactgacgccggaaggttcgcc

SEQ ID NO: 486438 - DNA, 75 bp, synthetic construct
  source 1..75: mol_type = other DNA
ttatctgacacgaaaatcgctatgcgaaattcgttacagagacggggacagggaggtggcggctttcatggctta

SEQ ID NO: 486439 - DNA, 75 bp, synthetic construct
  source 1..75: mol_type = other DNA
gccggaagaaatgccgctgtgtcactatcgcctgcaaggctacgttcaggctctgcgtcgctgcggaattatggt

SEQ ID NO: 486440 - DNA, 75 bp, synthetic construct
  source 1..75: mol_type = other DNA
atgaccgccgtataccgctgattgaggttgagtttaataactccatggctgtcaccggcactccggcacagcgtc

SEQ ID NO: 486441 - DNA, 75 bp, synthetic construct
  source 1..75: mol_type = other DNA
atgtcagttctgtatatccaaattcgtcgtaatcaaattactgttcgcgatcttgaaagcaaacgtgaagtgtca

SEQ ID NO: 486442 - DNA, 75 bp, synthetic construct
  source 1..75: mol_type = other DNA
acttaaaaagcgctttcatgacaagctcacgtctaatttctttgcaggcgatcatgtatgcgcgggcacagtgga

SEQ ID NO: 486443 - DNA, 75 bp, synthetic construct
  source 1..75: mol_type = other DNA
attataaaggcacgctgggaaagctggcaggaatacaaagcgaaaaataaggcgaaaagaaataatgcggcaaat

SEQ ID NO: 486444 - DNA, 75 bp, synthetic construct
  source 1..75: mol_type = other DNA
tgaatggcgatatcgctacatgggaagagattcttcctgaaattaacgatatcgaaactccagctaccgatgctt

SEQ ID NO: 486445 - DNA, 75 bp, synthetic construct
  source 1..75: mol_type = other DNA
cgccagccgtcttgctgctgcgttcaatcacggatttatcaataagtctttgcgtgaagttttcgacgttacacg

SEQ ID NO: 486446 - DNA, 75 bp, synthetic construct
  source 1..75: mol_type = other DNA
tgcgtgaggcggcagaaaaggcaacacaaggcgaatgggtcgcatttatttcgccgggcaaatacggcacgtacg

SEQ ID NO: 486447 - DNA, 75 bp, synthetic construct
  source 1..75: mol_type = other DNA
tctgggactggcgctgggtgggttctgggcaatgtcagcgtcgctgaccatgcggctggtgccgcctcgaatggt

SEQ ID NO: 486448 - DNA, 75 bp, synthetic construct
  source 1..75: mol_type = other DNA
cgcctgtctgattatcgttgagtttttgcccgtcagtttgttgacgccaatggcccaggatttaggcatttcgga

SEQ ID NO: 486449 - DNA, 75 bp, synthetic construct
  source 1..75: mol_type = other DNA
atgttgattacaacaagccacgacagcgtgcggctgcgtgctaacgatcccctgatcgacatgaactacatcacc

SEQ ID NO: 486450 - DNA, 75 bp, synthetic construct
  source 1..75: mol_type = other DNA
attataaaggcgcgctgggaaagttggcaggaatacaaagcgaaaaataaggtgaaaagaaataatgcggcaaat

SEQ ID NO: 486451 - DNA, 75 bp, synthetic construct
  source 1..75: mol_type = other DNA
tggaggatttaagcacgatcgcggaatacaagcgcggcggtgatcctgataaacctgttacggttgatatgaaat

SEQ ID NO: 486452 - DNA, 75 bp, synthetic construct
  source 1..75: mol_type = other DNA
tggaggatttaagcacaattgcggaatacatgcgcggcaatgattttgataagcttgtaacggttgatatgaaat

SEQ ID NO: 486453 - DNA, 75 bp, synthetic construct
  source 1..75: mol_type = other DNA
gctggttttattgatgatactgcgaagaacgctgcggatattgcccggatgattcttacctctactgagtttatg

SEQ ID NO: 486454 - DNA, 75 bp, synthetic construct
  source 1..75: mol_type = other DNA
cgatcaggatcgtcttgatgtgttgtgcggcccgaacctgattaaccagttccgcatctttgcggcacagatcca

SEQ ID NO: 486455 - DNA, 75 bp, synthetic construct
  source 1..75: mol_type = other DNA
tgacctgctggttgcccgaatcaaaggccagccggatttaccggtgacggcagaagttcgcgcagacagcggaga

SEQ ID NO: 486456 - DNA, 75 bp, synthetic construct
  source 1..75: mol_type = other DNA
tggcacccgctttgccaccggtcaggccgtggtgacgccatccgtgatcaaaacggagctgctggcactgtttga

SEQ ID NO: 486457 - DNA, 75 bp, synthetic construct
  source 1..75: mol_type = other DNA
gacgcacacgttctattggtcttgttatccccgatcttgagaacacaagttatacccgcattgctaactatcttg

SEQ ID NO: 486458 - DNA, 75 bp, synthetic construct
  source 1..75: mol_type = other DNA
tacccgcatcgctaactatcttgaacgccaggcgcggcaacggggttatcaactgctgattgcctgctcggaaga

SEQ ID NO: 486459 - DNA, 75 bp, synthetic construct
  source 1..75: mol_type = other DNA
gacgcacacgttctattggtcttgtgatccccgatctggagaacacaagttacacccgtattgctaactatcttg

SEQ ID NO: 486460 - DNA, 75 bp, synthetic construct
  source 1..75: mol_type = other DNA
atatcagtgacgaaaaccaggtggtggtgatgtttgcggcaatcgaccagcgcgatgaaccgctagccgcactgg

SEQ ID NO: 486461 - DNA, 75 bp, synthetic construct
  source 1..75: mol_type = other DNA
catggaatgttgttggcgctggatttaacgatgatggggtttatttcacgtttgacgatacaaccatccatcgag

SEQ ID NO: 486462 - DNA, 75 bp, synthetic construct
  source 1..75: mol_type = other DNA
cgtcaacgagatgatgactacgttccatggtgtgacgattggtgacacatacattgaagcagcaacaagaaatga

SEQ ID NO: 486463 - DNA, 75 bp, synthetic construct
  source 1..75: mol_type = other DNA
acaaggtgtgggcggcgagcctcctgccgtgaccgcgccgctggagcagatagaccatacggtcatcgacctgat

SEQ ID NO: 486464 - DNA, 75 bp, synthetic construct
  source 1..75: mol_type = other DNA
aaaaccttcacgcggcgcaggaagtggtgaacttaataactaaagcgggtggcaaggcatttgtgctccttacgg

SEQ ID NO: 486465 - DNA, 75 bp, synthetic construct
  source 1..75: mol_type = other DNA
gcagtcgcggcatcgggcgggcaactgcattactgttggcgcaagaagggtatacggtggcggttaattatcaac

SEQ ID NO: 486466 - DNA, 75 bp, synthetic construct
  source 1..75: mol_type = other DNA
ttataaaaatgaggttaaggcgtgggaggtcaaaaccgatcccgagaatgttaactggcctgttcccccggaggc

SEQ ID NO: 486467 - DNA, 75 bp, synthetic construct
  source 1..75: mol_type = other DNA
tagttgcagcctggaaacgtggtgagatcaaccgctttaaagtaaggatgtatagaaacaccgctcgccgttgtg

SEQ ID NO: 486468 - DNA, 75 bp, synthetic construct
  source 1..75: mol_type = other DNA
atgaaatggtttaccccggagcacgtcatctcggcatttaaaaaaggtgagctaacacgccaccaaatagtaatg

SEQ ID NO: 486469 - DNA, 75 bp, synthetic construct
  source 1..75: mol_type = other DNA
gatacaacgaataccggtgtggcgacctacgccagtggccgtactttctggcttgatgtcagcatgaaattttaa

SEQ ID NO: 486470 - DNA, 75 bp, synthetic construct
  source 1..75: mol_type = other DNA
atgcgcaatacatcagcgaatattcagattacaagcagtatgttgacgaaaaactggatagcagcctgacctggg

SEQ ID NO: 486471 - DNA, 75 bp, synthetic construct
  source 1..75: mol_type = other DNA
atgagtaaactggactggttcaataacgtagaaaatcgcccacatccttgggaaggtatggggctgacatggttg

SEQ ID NO: 486472 - DNA, 75 bp, synthetic construct
  source 1..75: mol_type = other DNA
tcgtagaggcatttaaaaaaggtgagctaacacgacatcaagtaaggatgaacaggaacacagcgcggcgctgtg

SEQ ID NO: 486473 - DNA, 75 bp, synthetic construct
  source 1..75: mol_type = other DNA
gttatccagagcgtgaaaaatgttttgacgatgcactgaaaattattgatgaactgcgtaaggcaggagcagaga

SEQ ID NO: 486474 - DNA, 75 bp, synthetic construct
  source 1..75: mol_type = other DNA
gttatccagagcgtgaaaaatgtttcgatgcagcactaaaaattattgataaattaagaaaaaatgaaaaaggtt

SEQ ID NO: 486475 - DNA, 75 bp, synthetic construct
  source 1..75: mol_type = other DNA
atgaaatggtttacaccggagcacgtcgtaaaggcatttaaaaaaggtgagcttacacgccaccaaatagtaatg

SEQ ID NO: 486476 - DNA, 75 bp, synthetic construct
  source 1..75: mol_type = other DNA
atgaaatatttcactccacaggatgtagtagaagcctggaaacgtggtgagatcaaccgctttaaagtaaggatg

SEQ ID NO: 486477 - DNA, 75 bp, synthetic construct
  source 1..75: mol_type = other DNA
tcgtctcggcatttaaaaaaggtgagttatctcgccatcaagtagtaatgaatcgtaatatggcaaggagtcgag

SEQ ID NO: 486478 - DNA, 75 bp, synthetic construct
  source 1..75: mol_type = other DNA
gtttatgaaacaatagccacaaaagcaggcgttatactattaagtgataacgagcaatatgaaggaggtaaagcc

SEQ ID NO: 486479 - DNA, 75 bp, synthetic construct
  source 1..75: mol_type = other DNA
ggaaacgcgaaggtaatcgagctgggcagtccgcgtcgtctggcaaccatttataacgtcaatacccgtacagcg

SEQ ID NO: 486480 - DNA, 75 bp, synthetic construct
  source 1..75: mol_type = other DNA
tcaggtatcttcattgaccaaagagcgttacaaccagtgcactaacatcgagtgtggacataccttcgtgaccca

SEQ ID NO: 486481 - DNA, 75 bp, synthetic construct
  source 1..75: mol_type = other DNA
tgaaacctttgttcgttctgtttgccgtcccgagaaaattagtgacgctccgccgcatcctaaagggatgcagga

SEQ ID NO: 486482 - DNA, 75 bp, synthetic construct
  source 1..75: mol_type = other DNA
ccatgcggacagcatgaaacatcagaatgacggtatcgccctgacgccggaggatttcggtcgattaccggcaat

SEQ ID NO: 486483 - DNA, 75 bp, synthetic construct
  source 1..75: mol_type = other DNA
cggatgtgctggtcagtatcagccgcgtatctgcacagtcgcttgaagccgcgattgctgacgggatgattgacg

SEQ ID NO: 486484 - DNA, 75 bp, synthetic construct
  source 1..75: mol_type = other DNA
tgatgaataccgcagatttgtatccgtactggcagtacgttgccgttatggatggcagaacacgcccggaacatg

SEQ ID NO: 486485 - DNA, 75 bp, synthetic construct
  source 1..75: mol_type = other DNA
ggtggggaaggctattttgaagttgagatgacttttgaaaatatgaagttggaggataaacatatacaggagccc

SEQ ID NO: 486486 - DNA, 75 bp, synthetic construct
  source 1..75: mol_type = other DNA
gccacaccttatccgctatcaatgtgctggtttgatatgttttactcaccggaactggcgcgacgcgtctataac

SEQ ID NO: 486487 - DNA, 75 bp, synthetic construct
  source 1..75: mol_type = other DNA
ggtaatcgaagctgcaccttctgttattgatggtgatattcgccataaggttgttgccactctggagcttcagca

SEQ ID NO: 486488 - DNA, 75 bp, synthetic construct
  source 1..75: mol_type = other DNA
aggccgcacatactcgcagtagttttcaagtctcctctcaaaccaaagagcgttacaatcagtgcactaatatcg

SEQ ID NO: 486489 - DNA, 75 bp, synthetic construct
  source 1..75: mol_type = other DNA
tgccgccgaaaaactcctggcccactatcaggaaaattatcgcactatggtcgagaagattaatctcgctttcac

SEQ ID NO: 486490 - DNA, 75 bp, synthetic construct
  source 1..75: mol_type = other DNA
aaagggattgagaaggggattcagcagggaagacaggaagtaagtcaggaattcgccctgcgtcttctaagtaaa

SEQ ID NO: 486491 - DNA, 75 bp, synthetic construct
  source 1..75: mol_type = other DNA
gttatccagagcgtgaaaaatgctttgacgatgcactaaaaattattgatgaactgcgtaaggcagatgcagaga

SEQ ID NO: 486492 - DNA, 75 bp, synthetic construct
  source 1..75: mol_type = other DNA
ggcgtttagttattgcggatgatgatattgaagctcggctgattggttcattatcgccatcaccgctggacggtg

SEQ ID NO: 486493 - DNA, 75 bp, synthetic construct
  source 1..75: mol_type = other DNA
agtttattcagaaagtttgcgggtaacccttataagctccatacctataccagtcaggagtcatttcaggatgcc

SEQ ID NO: 486494 - DNA, 75 bp, synthetic construct
  source 1..75: mol_type = other DNA
agctttataccggaaacctggaatattatttatggatgaggctacaagttctcttgatacagaaagtgaacgttt

SEQ ID NO: 486495 - DNA, 75 bp, synthetic construct
  source 1..75: mol_type = other DNA
ttttcatcttaggctccattcttgtcaccagcagtattttacttagttcattttcttcacggcttggcattccga

SEQ ID NO: 486496 - DNA, 75 bp, synthetic construct
  source 1..75: mol_type = other DNA
tttttgtcattaaatggtgtacgtcaggcgaccgaccgactgaacaatcagtggtacattaaccaaagccggacg

SEQ ID NO: 486497 - DNA, 75 bp, synthetic construct
  source 1..75: mol_type = other DNA
ccatcaccgctggacggtgtattaagtaaagcgtcaacgctggagatttttcatcaggaactctttttgtcatta

SEQ ID NO: 486498 - DNA, 75 bp, synthetic construct
  source 1..75: mol_type = other DNA
atcgggagggaaaattaaaaataaggcttctctcgaagatttgtgggataatgttcctactgtatcctgtgatat

SEQ ID NO: 486499 - DNA, 75 bp, synthetic construct
  source 1..75: mol_type = other DNA
tgcgtgaggtggcggaacgtgcaattacagcaatggaacgcctgttaatgttgccagttgatgatgatttgttaa

SEQ ID NO: 486500 - DNA, 75 bp, synthetic construct
  source 1..75: mol_type = other DNA
accctgaacatcaggctgattacgtgctaatacaacatcaggttaataatcggtttggcccgtgttcgcatacac

SEQ ID NO: 486501 - DNA, 75 bp, synthetic construct
  source 1..75: mol_type = other DNA
cacacgactggggtaagacgctgaaagagatggatttaaaatctctctttcgatctgcgtgtcgagccattgagt

SEQ ID NO: 486502 - DNA, 75 bp, synthetic construct
  source 1..75: mol_type = other DNA
cgggcaaacagtcgctggatgatttgatgaacagttcgctgtatctgatgcgcagcgaattgcgagagatcgatc

SEQ ID NO: 486503 - DNA, 75 bp, synthetic construct
  source 1..75: mol_type = other DNA
caataaatgagcatattagtcttattattgatgatgcatcaatacaaaaaaacgaagataacaaatacatattta

SEQ ID NO: 486504 - DNA, 75 bp, synthetic construct
  source 1..75: mol_type = other DNA
tatatctatgtggtgattgaacatcagagccgcgaggatattcacatggcttttcgcctgatgcgctattccatg

SEQ ID NO: 486505 - DNA, 75 bp, synthetic construct
  source 1..75: mol_type = other DNA
aaagcaacggcagcagcgtcacattgttccagctttcggcgctgcagcgtattgaatacctcgaatacctgaagc

SEQ ID NO: 486506 - DNA, 75 bp, synthetic construct
  source 1..75: mol_type = other DNA
gccagggggacgcccggaaaaggcataagcaggagaacaacaaaacagacagtaatgagagcatcagaaaaaaga

SEQ ID NO: 486507 - DNA, 75 bp, synthetic construct
  source 1..75: mol_type = other DNA
tggcgggtgcgccagcagctgcctgtcggagtcgggcctgacgaccggatgccgccaggcagccgggagccgaag

SEQ ID NO: 486508 - DNA, 75 bp, synthetic construct
  source 1..75: mol_type = other DNA
acagcgtgttgctgcgtgctgacgatcccctgatcgacatgaactacatcaccagtttcaccggtatgaccgaca

SEQ ID NO: 486509 - DNA, 75 bp, synthetic construct
  source 1..75: mol_type = other DNA
tgctggatgtgacgcgcctgcatcagcttggctggtatcacgaaatctcactggaagcggggcttgccagcactt

SEQ ID NO: 486510 - DNA, 75 bp, synthetic construct
  source 1..75: mol_type = other DNA
attgaatacctcgaatacctgaagcagctggaggcagttgaagctggcgattttcaggcggccatcaccctcacc

SEQ ID NO: 486511 - DNA, 75 bp, synthetic construct
  source 1..75: mol_type = other DNA
ttcgccagcgcgatctgatggggcttatcgaccaactggtagtattactggttacagagtgtgctaatgacagcc

SEQ ID NO: 486512 - DNA, 75 bp, synthetic construct
  source 1..75: mol_type = other DNA
taccggacattcattagagcaaatacaggcattagaacagcccttgcctgaaagaaagcgcgctccatggatcga

SEQ ID NO: 486513 - DNA, 75 bp, synthetic construct
  source 1..75: mol_type = other DNA
gttacagagtgtgctaatgacagccagataactgcgctgttaaattacattttactgactggtgatgaagcgcgt

SEQ ID NO: 486514 - DNA, 75 bp, synthetic construct
  source 1..75: mol_type = other DNA
acggaaatcgtgctgctgactgtcatgaaaacgtctccttctgctgaatcaggtcgccgggccgaccggttgctc

SEQ ID NO: 486515 - DNA, 75 bp, synthetic construct
  source 1..75: mol_type = other DNA
agttttgtggctggtacatctccccctggacggctgacacgtgttgtggccgcttcagcccccggaaagtccaca

SEQ ID NO: 486516 - DNA, 75 bp, synthetic construct
  source 1..75: mol_type = other DNA
gattttatggagatccacttaccaaaaggtttacgtgaactgtgcgatctcgacaccttaaaactggaatcagcc

SEQ ID NO: 486517 - DNA, 75 bp, synthetic construct
  source 1..75: mol_type = other DNA
atgcaaggcttccacgccggatggcgtaaatccggtattggcggcgcagatggtaaacatggcctgcatgaatat

SEQ ID NO: 486518 - DNA, 75 bp, synthetic construct
  source 1..75: mol_type = other DNA
gctggtttacggcttggtgcagtagttgaacggtgccgcatggtaagtcggggggattatctaatcagtgccgga

SEQ ID NO: 486519 - DNA, 75 bp, synthetic construct
  source 1..75: mol_type = other DNA
gtccagaaatacttataaaattcggggaaatcaactggaaacaataaaagaaaaattaggagggatcttactgac

SEQ ID NO: 486520 - DNA, 75 bp, synthetic construct
  source 1..75: mol_type = other DNA
agcgagcgcgatattgctgccgaaatatggaacgcctgccgcgccgccatgcttcagtccggaaactttcgggaa

SEQ ID NO: 486521 - DNA, 75 bp, synthetic construct
  source 1..75: mol_type = other DNA
aatgagtccaatttattacaaaaaatatagagctttcacatatttatcaggaaatatcttggatgacgtaactca

SEQ ID NO: 486522 - DNA, 75 bp, synthetic construct
  source 1..75: mol_type = other DNA
cgctaatgatgggtggataattcctggtgcgtcgtggaaaccgtcacactggatgcctctaccagaaccgccgca

SEQ ID NO: 486523 - DNA, 75 bp, synthetic construct
  source 1..75: mol_type = other DNA
gccagcgttacacaaacggatcaaaaagcgttaccagaggaagaggaagaggaagaggaagaggaagatctaaat

SEQ ID NO: 486524 - DNA, 75 bp, synthetic construct
  source 1..75: mol_type = other DNA
aaagccacgctgaccgtgctgggtacagcgactgaagctggaacggtggcactgctgattaacggtgtgtccgtt

SEQ ID NO: 486525 - DNA, 75 bp, synthetic construct
  source 1..75: mol_type = other DNA
agggtcgatgctggctgaaatgctcaaaatgctgcgtcgtgccaacacgtacacggaaacctgggcaatgccggt

SEQ ID NO: 486526 - DNA, 75 bp, synthetic construct
  source 1..75: mol_type = other DNA
cgtctaaacaattcgagccggaggccattgctctgcccgactggttgccagaaacactctggaatgagtgggtcc

SEQ ID NO: 486527 - DNA, 75 bp, synthetic construct
  source 1..75: mol_type = other DNA
ggcggatcaacaaatgatagacggtaacgtagagtgtaacgctcgcagcgttacaaaaagtgcaatagatcgcat

SEQ ID NO: 486528 - DNA, 75 bp, synthetic construct
  source 1..75: mol_type = other DNA
ggggcgatacgggaactggaaaaattccgccagcagggttttacccctgagcaggtgattcgacatagcatcgcc

SEQ ID NO: 486529 - DNA, 75 bp, synthetic construct
  source 1..75: mol_type = other DNA
agtggaatgcaatcgctataactactgcgcagatgcagttaagggcgtagaggatgcctgccgcgctgccatgct

SEQ ID NO: 486530 - DNA, 75 bp, synthetic construct
  source 1..75: mol_type = other DNA
gttgacgcctcaattaacgggtaaaggccagcagtggttgacgcgtaaactgctcgatgctggcttgttaaaacc

SEQ ID NO: 486531 - DNA, 75 bp, synthetic construct
  source 1..75: mol_type = other DNA
tctgaattacgcaaccgtcgcagccgaaacacgcaaggaggcacacagaatgaaagctactaacgttaaatctga

SEQ ID NO: 486532 - DNA, 75 bp, synthetic construct
  source 1..75: mol_type = other DNA
agttattgcggatgatgatattgaagctcggctgattggttcattgtcgccatcaccgctggacggtgtattaag

SEQ ID NO: 486533 - DNA, 75 bp, synthetic construct
  source 1..75: mol_type = other DNA
tatatacaattgaaatagatgctgataagcatatttatgctaataggtttcaatcagagttttgggatgcggtac

SEQ ID NO: 486534 - DNA, 75 bp, synthetic construct
  source 1..75: mol_type = other DNA
tcagttagcagaatggcgtagccagaatattcatatcccggcgttatccgttaacttgtcggcgctgcactttcg

SEQ ID NO: 486535 - DNA, 75 bp, synthetic construct
  source 1..75: mol_type = other DNA
tctacgttacgcaacggtggcagcagaaatgagaaaggaggcacatagaatgaccagtaataatttgaatgttaa

SEQ ID NO: 486536 - DNA, 75 bp, synthetic construct
  source 1..75: mol_type = other DNA
gctgatgtcgcgcaggcaattgaaaaactcaaacggaaattagtggaatgcaatcgctataactactgcgcagat

SEQ ID NO: 486537 - DNA, 75 bp, synthetic construct
  source 1..75: mol_type = other DNA
tggatgaggctgagcaagagcttatcgttaccattaacaaatatgccagtcagttggcagcagaaccgatagcga

SEQ ID NO: 486538 - DNA, 75 bp, synthetic construct
  source 1..75: mol_type = other DNA
ccgcccctccagcgccggtagtgccggaagaagcaactccggaaaacgtagaaatgctctctggctatgtttcca

SEQ ID NO: 486539 - DNA, 75 bp, synthetic construct
  source 1..75: mol_type = other DNA
aaaacaactacccaccaaacatccccaacactcaggtcggcgtatatggcgactggtttaatgatggcaatccca

SEQ ID NO: 486540 - DNA, 75 bp, synthetic construct
  source 1..75: mol_type = other DNA
cgaagccatgcttcagtccggaaactttcgggaaaataaagattcgtcaaccaataattttcgggaaatctcgga

SEQ ID NO: 486541 - DNA, 75 bp, synthetic construct
  source 1..75: mol_type = other DNA
attcgtgaattgaaaaacgtagtggaacgttcggtgtatcgccacggcaccagcgattatccgctcaatgacatc

SEQ ID NO: 486542 - DNA, 75 bp, synthetic construct
  source 1..75: mol_type = other DNA
caaagcatcgcctgcatggttactgatatcccagctaaatcccgtcattcggggatgggtgaattatcatcgtca

SEQ ID NO: 486543 - DNA, 75 bp, synthetic construct
  source 1..75: mol_type = other DNA
atcccggtttctggactggtatcgcgatttaccgtggaacccgcggtgcagcagcgttttgaaaacgcctcaaag

SEQ ID NO: 486544 - DNA, 75 bp, synthetic construct
  source 1..75: mol_type = other DNA
cgccagcggccagggggtatttatgacgatggttaatggcgttggtgcgtggattggctctcttttgagtggtat

SEQ ID NO: 486545 - DNA, 75 bp, synthetic construct
  source 1..75: mol_type = other DNA
ggccttagcggtgatttttgccctgttcttccgttataagcatgaacctgaaaaaatggcgcagaaatcattagc

SEQ ID NO: 486546 - DNA, 75 bp, synthetic construct
  source 1..75: mol_type = other DNA
tggctggagcacatcagaaccgacgccagcgaacgcgtaatgaatgacgtgacgctgacctcccgcaacatggac

SEQ ID NO: 486547 - DNA, 75 bp, synthetic construct
  source 1..75: mol_type = other DNA
agcggtggtgttcctcgtgtgctccgggaaatcaggagaatgagcactactgtcattcacatcaaaggggaatga

SEQ ID NO: 486548 - DNA, 75 bp, synthetic construct
  source 1..75: mol_type = other DNA
atgaatctggtgatgtcagatattgcccgtaacaagctgggttgctatatggcgcggcaggcgtcgcttaacaat

SEQ ID NO: 486549 - DNA, 75 bp, synthetic construct
  source 1..75: mol_type = other DNA
ctgttcatctgaacctataaaagtacatggtttaagagttgactatgactcacctcgactaccatccgatgaagt

SEQ ID NO: 486550 - DNA, 75 bp, synthetic construct
  source 1..75: mol_type = other DNA
gcaccactggggaatgcagcgattattgatttagacggaaagttcgctcttgctcaacgttctatctgttttcaa

SEQ ID NO: 486551 - DNA, 75 bp, synthetic construct
  source 1..75: mol_type = other DNA
agttccggggctgattagaggcgcagagatatgcgtaagtattgctgaacagcttcgtaaaggagtcatccagtg

SEQ ID NO: 486552 - DNA, 75 bp, synthetic construct
  source 1..75: mol_type = other DNA
tgagtttgctgatagcttcgtggtgaaatatccatccattttgctctcggtttcacaaatggcggaagtcggctt

SEQ ID NO: 486553 - DNA, 75 bp, synthetic construct
  source 1..75: mol_type = other DNA
aaacaatgagttgcagaacggaaagccgcagaagttctatcgcctccgcaaagatggattgatgcttctggttat

SEQ ID NO: 486554 - DNA, 75 bp, synthetic construct
  source 1..75: mol_type = other DNA
atgtcatacccaacagttattaacggacttgatttccgtgacctcatttttgttgctgacaacgacccggtaact

SEQ ID NO: 486555 - DNA, 75 bp, synthetic construct
  source 1..75: mol_type = other DNA
gtactgtcgccagtttgcgccggtgctgaaatcactgtcgcagcagagcggtctcagtgtcttccctgtaagcct

SEQ ID NO: 486556 - DNA, 75 bp, synthetic construct
  source 1..75: mol_type = other DNA
gtcttcaagatggttcaattgagtataatcgtgatcaggatgtaatcattctaaggaatattcctgatagcttca

SEQ ID NO: 486557 - DNA, 75 bp, synthetic construct
  source 1..75: mol_type = other DNA
ctgacaacctttgtgaatgcggtctggccacaagaaccagaactactctcgactaaactagccaaccaagaactg

SEQ ID NO: 486558 - DNA, 75 bp, synthetic construct
  source 1..75: mol_type = other DNA
atgaaacaggtttgcgtcctcgggaacgggcagttaggccgtatgctgcgtcaggcaggcgaaccgttaggcatt

SEQ ID NO: 486559 - DNA, 75 bp, synthetic construct
  source 1..75: mol_type = other DNA
ggacgaattcgcccggcatctgaccgagggcgagcgcctgccgtacacgctggccatccatgccggtgacggcga

SEQ ID NO: 486560 - DNA, 75 bp, synthetic construct
  source 1..75: mol_type = other DNA
cgggaagggaaaactgaaggctatattgattatgatccggaaacaaatattatcaccctacgtaatgtacctgaa

SEQ ID NO: 486561 - DNA, 75 bp, synthetic construct
  source 1..75: mol_type = other DNA
ggaaaggttatggccattttgaagatgaccctgacaattacccgatgcaaacaatcgtatcagactatttagctc

SEQ ID NO: 486562 - DNA, 75 bp, synthetic construct
  source 1..75: mol_type = other DNA
attattgctgaccgtctgactcagaagcagcttttcgataagctccacctgccgaccgcaccgtggcagttactt

SEQ ID NO: 486563 - DNA, 75 bp, synthetic construct
  source 1..75: mol_type = other DNA
agaatgatagtgactggctaacggctcttgattttgtaaaagatgtcaaaggttcaccaaagcatcttacttttc

SEQ ID NO: 486564 - DNA, 75 bp, synthetic construct
  source 1..75: mol_type = other DNA
caaaagcaataatgcaacatactctcgcctctttgctcgacaagcaatttgataaactagagcaatcatcttcat

SEQ ID NO: 486565 - DNA, 75 bp, synthetic construct
  source 1..75: mol_type = other DNA
tgactggctgaaactgccgctggtgcatctgcactggtacgacaaagaagtccgtccgggccgtaaagtggggca

SEQ ID NO: 486566 - DNA, 75 bp, synthetic construct
  source 1..75: mol_type = other DNA
atcaggaaggcattttgcgcaccagcgtcgcttttccgcaggccaacgcacagcaacaaacacaagccgaagaga

SEQ ID NO: 486567 - DNA, 75 bp, synthetic construct
  source 1..75: mol_type = other DNA
accgaccgcaccgtggcagttacttgccgatcgcagcgagtggcctgcggtgtttgatcgtttaggtgagctggc

SEQ ID NO: 486568 - DNA, 75 bp, synthetic construct
  source 1..75: mol_type = other DNA
cctatgctgaagtggaaaccgccgtcgaagcgctacgctgcggggccttcgactatgttatcaaaccgtttgatc

SEQ ID NO: 486569 - DNA, 75 bp, synthetic construct
  source 1..75: mol_type = other DNA
ctggtactacaagccaaattactacgcattctacaggaacgggaatttgaacggattggcggccatcagaccata

SEQ ID NO: 486570 - DNA, 75 bp, synthetic construct
  source 1..75: mol_type = other DNA
atgatggacatctgcaaagacaccgccaaaattgccctttctcaggccagcgtcttgattagcggtgaaagcggc

SEQ ID NO: 486571 - DNA, 75 bp, synthetic construct
  source 1..75: mol_type = other DNA
ggtgaaagtgcgtaacgccagcagccagcgggtcatcagcgcgatggtggcagaaagcggcgtggtgacgacggt

SEQ ID NO: 486572 - DNA, 75 bp, synthetic construct
  source 1..75: mol_type = other DNA
ctggttgcccgcgatacgccgctcaccgcgaatgatgtggagcttaagccctacaacgtcagcgcccagcgccgc

SEQ ID NO: 486573 - DNA, 75 bp, synthetic construct
  source 1..75: mol_type = other DNA
aaagaagaactggtttcgccagtgctggtcgagcgcgatcagccggtgatgattgtttaccagagcgcggggatc

SEQ ID NO: 486574 - DNA, 75 bp, synthetic construct
  source 1..75: mol_type = other DNA
actgatagagactatgttgaaagaagtagcgaattagcaggagtcgaaagtgatagtgcttatataagtgactct

SEQ ID NO: 486575 - DNA, 75 bp, synthetic construct
  source 1..75: mol_type = other DNA
atggcaaaacatttaaacaggagtgaaataaaggcaattacacacatgatactgacttgggacggcaaaatcaca

SEQ ID NO: 486576 - DNA, 75 bp, synthetic construct
  source 1..75: mol_type = other DNA
agctatgtgcaaaggattggttattccccggcggctccccgctatgctgttccgggtacacgggatacgtcccca

SEQ ID NO: 486577 - DNA, 75 bp, synthetic construct
  source 1..75: mol_type = other DNA
gtattcagcatccgatggtgagaaaaagctatctcgataatccactgcaaccggtgaaaggtcgtggcgaagata

SEQ ID NO: 486578 - DNA, 75 bp, synthetic construct
  source 1..75: mol_type = other DNA
ctaggaaagctgctggagaaatagatcaagatctagtagaaaaaaggccgcatcttgctcgtaaaaaaatgagag

SEQ ID NO: 486579 - DNA, 75 bp, synthetic construct
  source 1..75: mol_type = other DNA
gctctttagatgttattaatcatagtataaaaaaacttaatgaactaaaagagctgtcaccaaatgtcccacata

SEQ ID NO: 486580 - DNA, 75 bp, synthetic construct
  source 1..75: mol_type = other DNA
ggtgaaagtacgtaacgccagcagtcagcgggtcattagcgcaatagtggcggaaagcggcgtggtgacaacggt

SEQ ID NO: 486581 - DNA, 75 bp, synthetic construct
  source 1..75: mol_type = other DNA
aaatatccctccattttactgtcagtttcacagatggcagaagtgggctttatactgactatcccattcttttta

SEQ ID NO: 486582 - DNA, 75 bp, synthetic construct
  source 1..75: mol_type = other DNA
cgatattttaatccaattggtgctcatgaatcaggtaatattggtgaacatccaaacggtataccaaataaccta

SEQ ID NO: 486583 - DNA, 75 bp, synthetic construct
  source 1..75: mol_type = other DNA
gtggatatattggaatccacacgatttttactctgattacccaaggtcatagtgttgttgtattagataacttaa

SEQ ID NO: 486584 - DNA, 75 bp, synthetic construct
  source 1..75: mol_type = other DNA
aatggcgatgagaaaacgtggacaggtcaggggcgaacaccaaaagtgattgcagctgcactggaaagcggtaag

SEQ ID NO: 486585 - DNA, 75 bp, synthetic construct
  source 1..75: mol_type = other DNA
cttgatccggtgacggctttcccacccattcgcgtttttggtacggtgggattcattgtcgcgatgtgggcggta

SEQ ID NO: 486586 - DNA, 75 bp, synthetic construct
  source 1..75: mol_type = other DNA
ggtttacagctccaaaggtattgccgcgattattatgcctggcattatggggatcatcgcggacaaatggctgcg

SEQ ID NO: 486587 - DNA, 75 bp, synthetic construct
  source 1..75: mol_type = other DNA
gaactgtcgggcaactatccggtaattccggatggttggataagctgtagtgagcgaatgccccctcaagatgat

SEQ ID NO: 486588 - DNA, 75 bp, synthetic construct
  source 1..75: mol_type = other DNA
aattttcagaaacgacgtttataagctgcccggaatgttttggcgatgatgattgcgatacctgtgacggtagcg

SEQ ID NO: 486589 - DNA, 75 bp, synthetic construct
  source 1..75: mol_type = other DNA
atggagacagtgcgccagttgcgtcgttctggaatcattacggggcacatgtaactcactggatgcctctaccag

SEQ ID NO: 486590 - DNA, 75 bp, synthetic construct
  source 1..75: mol_type = other DNA
gttaggcacagtacatactggcgggcttaatgctgctaataatattccattctttttacaaaatgcagtccctaa

SEQ ID NO: 486591 - DNA, 75 bp, synthetic construct
  source 1..75: mol_type = other DNA
tgtttccgcgcccgtttaaattaagaggcggtaatcgtctttactggaatatcgacgaagtaaacgactacctat

SEQ ID NO: 486592 - DNA, 75 bp, synthetic construct
  source 1..75: mol_type = other DNA
ctttggtatcgctggaagcagaaccggtggcatggctgcattcagacaatggcttaggtattccggcaataacac

SEQ ID NO: 486593 - DNA, 75 bp, synthetic construct
  source 1..75: mol_type = other DNA
gaaggtgcgtcttttgtcctcgtgagcctggaaaacgatgtcagtaacattacccagatcgccgatgagctacgg

SEQ ID NO: 486594 - DNA, 75 bp, synthetic construct
  source 1..75: mol_type = other DNA
cccggaaccggtaactcctacctgacccgcaagggctttcccggccgggaatgccggatgctgaccggcacacac

SEQ ID NO: 486595 - DNA, 75 bp, synthetic construct
  source 1..75: mol_type = other DNA
ttataccataaacacttcttttgatacttgcatatcttccaataatcttttaagtattattaatttagtcttaca

SEQ ID NO: 486596 - DNA, 75 bp, synthetic construct
  source 1..75: mol_type = other DNA
atgtttaaacagaacgaaaaagctatcgctcaaattgctgattatatcccgcgtgcgtgccggggtatgcagttg

SEQ ID NO: 486597 - DNA, 75 bp, synthetic construct
  source 1..75: mol_type = other DNA
ttgacgccttgaaagccgccgcccgtgaatgcggtccgttaccggatgagccgtttattcagatggcgtttcttt

SEQ ID NO: 486598 - DNA, 75 bp, synthetic construct
  source 1..75: mol_type = other DNA
gtttacagtgaaaacggttttgatcgcgatgatgtgtgctttattgccgtgcttgagcgttacgggcaacggctg

SEQ ID NO: 486599 - DNA, 75 bp, synthetic construct
  source 1..75: mol_type = other DNA
atggcaataccattgcccgccagccagtttccgccagcgactttgccctgcaatttacacccggaaaacgctatc

SEQ ID NO: 486600 - DNA, 75 bp, synthetic construct
  source 1..75: mol_type = other DNA
ggttagtccacaataaaggttttataaaaaaaatagaaaaattaactatcgcatctgtagttgaccaatttcctt

SEQ ID NO: 486601 - DNA, 75 bp, synthetic construct
  source 1..75: mol_type = other DNA
taggatgttataatgatttattaaaaagcttttatctttcgatagatcgcacagacttagcaaaagatgttgaag

SEQ ID NO: 486602 - DNA, 75 bp, synthetic construct
  source 1..75: mol_type = other DNA
atcattttatttttataatggcttggataataatccttacatggaaaagtacaatataaaaaatatcgatgtttt

SEQ ID NO: 486603 - DNA, 75 bp, synthetic construct
  source 1..75: mol_type = other DNA
gatacaaaaatctacctagattcacgagagcgtagcgatttttttagtaaatccatagagtttgatgagctggtt

SEQ ID NO: 486604 - DNA, 75 bp, synthetic construct
  source 1..75: mol_type = other DNA
acgtttgcgtatcatatcagaaaaaagggccggatgactccagccctgtatttttacttgctaaacgcagcctgg

SEQ ID NO: 486605 - DNA, 75 bp, synthetic construct
  source 1..75: mol_type = other DNA
gcggcgttcgcaccagctcttaacagtcatactcgggagtcttttttttcgtgcatcgaagcgcaactccgcaaa

SEQ ID NO: 486606 - DNA, 75 bp, synthetic construct
  source 1..75: mol_type = other DNA
ttgccggtattggcgcagaatacgccgatgccccagcccggcaccgaattgatgcgtgcggcgcaacggcggtac

SEQ ID NO: 486607 - DNA, 75 bp, synthetic construct
  source 1..75: mol_type = other DNA
ctcgtactgcaagccaaattactacgcattctgcaggaacgggaatttgaacggattggcggccatcagaccata

SEQ ID NO: 486608 - DNA, 75 bp, synthetic construct
  source 1..75: mol_type = other DNA
tatcactaaaaaaatatgccacgacgaacgccagcaacgacatgatgatcgcctggcgcgaatcggcaataatga

SEQ ID NO: 486609 - DNA, 75 bp, synthetic construct
  source 1..75: mol_type = other DNA
caagactcttagacattacatctaacccactgatagcattatattttgcttgctgttcgaaccccgatgaaaacg

SEQ ID NO: 486610 - DNA, 75 bp, synthetic construct
  source 1..75: mol_type = other DNA
tgcagtctgtctcggaaagaaaaattcttatggcctttgtcaaatattaagcccaaaaagaccttacgcagctcc

SEQ ID NO: 486611 - DNA, 75 bp, synthetic construct
  source 1..75: mol_type = other DNA
gaagaagcactgaaactaatcggtgaactgtacgccatcgagcacgatatacgcgggttaccggtgtctgaacgc

SEQ ID NO: 486612 - DNA, 75 bp, synthetic construct
  source 1..75: mol_type = other DNA
ggtaaaagaaggcaccttccgtgaagatctcttttatcgccttaacgttattcatttaatactgccgcctctgcg

SEQ ID NO: 486613 - DNA, 75 bp, synthetic construct
  source 1..75: mol_type = other DNA
acttatcacttttatcttacgaagagttggaaaaattgtcctcctctgattccagaaaaggtaatatggagttat

SEQ ID NO: 486614 - DNA, 75 bp, synthetic construct
  source 1..75: mol_type = other DNA
caatcaggtgattcaggatggcggcgggctgtgcgtggtccgtaacggccaggtacaaagtcatctaccgttgcc

SEQ ID NO: 486615 - DNA, 75 bp, synthetic construct
  source 1..75: mol_type = other DNA
ccagtgatccccgcgctgaaactaaccagtcaggggctgtttgatggcgagaagtttgccttcaccacgctggaa

SEQ ID NO: 486616 - DNA, 75 bp, synthetic construct
  source 1..75: mol_type = other DNA
ttggagaaataacgaatccccaaacgacattatataaagaaaccctaggactaggatctttcgggttaagtcgta

SEQ ID NO: 486617 - DNA, 75 bp, synthetic construct
  source 1..75: mol_type = other DNA
atgtttagcttaatcatggccggagaaccggacgtttttgaccgctggccgtgtatggaccctgggcttaaagaa

SEQ ID NO: 486618 - DNA, 75 bp, synthetic construct
  source 1..75: mol_type = other DNA
aacagagtggagatagcgaacaaaaataaaattctggaagagctggcgcagcttaatatatccgaaagcactgta

SEQ ID NO: 486619 - DNA, 75 bp, synthetic construct
  source 1..75: mol_type = other DNA
agtagaaaatcaaaaccatgccaaatgggaggtccataattttaccatgggctatcaacggcaagtgaccgaaga

SEQ ID NO: 486620 - DNA, 75 bp, synthetic construct
  source 1..75: mol_type = other DNA
cagcctgattcgcatgtgactgcgttgagccttggtagtcaatccatgctggagaactcaaaaatccgcaaagat

SEQ ID NO: 486621 - DNA, 75 bp, synthetic construct
  source 1..75: mol_type = other DNA
cggcagggtggagcagaacctgcgctaccagggacagtacctcgacagggaaacagggctgcattacaatctgca

SEQ ID NO: 486622 - DNA, 75 bp, synthetic construct
  source 1..75: mol_type = other DNA
ttgaacgatgctgtggaagagctgcgtcagttgctcgataaccaccatgacctgaaagtcgtggaaacaccaatc

SEQ ID NO: 486623 - DNA, 75 bp, synthetic construct
  source 1..75: mol_type = other DNA
tgttgcacattccagcaatcaacgccgtcagtcatattgaaattaatgatggtttcgtcactgtagagcgactcc

SEQ ID NO: 486624 - DNA, 75 bp, synthetic construct
  source 1..75: mol_type = other DNA
tggtgcctgaagagcaagacatcgctattagtgctgacagaacgctgattactgatcacgctggcgaaaaaatca

SEQ ID NO: 486625 - DNA, 75 bp, synthetic construct
  source 1..75: mol_type = other DNA
gggtaaactcagtcataataagcgatgttccacatcttttcagtaatgcccgggaacaatggaaatctgatggtg

SEQ ID NO: 486626 - DNA, 75 bp, synthetic construct
  source 1..75: mol_type = other DNA
gtcgttgcagtttatctaattataaaacccgcaacgccgatgtacatcagtgccttattattgagcatgccatat

SEQ ID NO: 486627 - DNA, 75 bp, synthetic construct
  source 1..75: mol_type = other DNA
aaaaccaaccttaatggggcatctcacattgctggatatcgtagcgaatgggacttctatccgtctgtttcgtga

SEQ ID NO: 486628 - DNA, 75 bp, synthetic construct
  source 1..75: mol_type = other DNA
tcgcaaacagcaagagccagtgcttttggcatctggcaagggagtgaggaagatggtgtcgaataccagcgggta

SEQ ID NO: 486629 - DNA, 75 bp, synthetic construct
  source 1..75: mol_type = other DNA
tgggcagaattttactcgatttatccgatgaggtgattaagcgacttgatgatctcggggtgcagcgtaatcttc

SEQ ID NO: 486630 - DNA, 75 bp, synthetic construct
  source 1..75: mol_type = other DNA
ctcgttaccgctgatgttagtctggtgcgcggcggctatgtttctttgcggttggctggcgctgggcaagaaacc

SEQ ID NO: 486631 - DNA, 75 bp, synthetic construct
  source 1..75: mol_type = other DNA
tcctcactcagccggtttcctttacccagagtgattgggagacccgccatttcagccttaaacagcttaatctgt

SEQ ID NO: 486632 - DNA, 75 bp, synthetic construct
  source 1..75: mol_type = other DNA
atgctttcaaaggtaaaacgaagtctgtgggggccggactctatgcttccgccatgtttgattccggtgcctata

SEQ ID NO: 486633 - DNA, 75 bp, synthetic construct
  source 1..75: mol_type = other DNA
ctggggggttgaacgttggcgaagggactgtcattctggcacaaaatcctgacagcgatgggaatgtccaggcat

SEQ ID NO: 486634 - DNA, 75 bp, synthetic construct
  source 1..75: mol_type = other DNA
agcttgttcttcgggggatttttcctggtgtgaacgtgctgaggtacaacggtttctcgcaggacaatcactttt

SEQ ID NO: 486635 - DNA, 75 bp, synthetic construct
  source 1..75: mol_type = other DNA
tatgtttaagcgtcgaacgggctactcgcccggtaaatttactcgtcgattaacgatgcatgattatgcaatcac

SEQ ID NO: 486636 - DNA, 75 bp, synthetic construct
  source 1..75: mol_type = other DNA
ctggcaccaacgtcaatggcgacattaatgcatggtctgataccaacattaactttgggaatagcggaaaacaaa

SEQ ID NO: 486637 - DNA, 75 bp, synthetic construct
  source 1..75: mol_type = other DNA
gtaaagatagccgtgtaaattttaatttaggtgtcaatgctgaaattaaagaaaacaccaggattagtctcaatg

SEQ ID NO: 486638 - DNA, 75 bp, synthetic construct
  source 1..75: mol_type = other DNA
cataaactgggtaccgggacactgaaggtgaatggcacgggtgtcaaccctggtgggctgaatgtcggtgaggga

SEQ ID NO: 486639 - DNA, 75 bp, synthetic construct
  source 1..75: mol_type = other DNA
aaccggtgtgggcgtttatacgtcggtgatgttcgattctggcctgtatgtggatgccatcggtaaatatgtccg

SEQ ID NO: 486640 - DNA, 75 bp, synthetic construct
  source 1..75: mol_type = other DNA
ggtaatattcaggctgatgatagcgcagatattcactttggaccggcagataatacttcttttactgacagtctg

SEQ ID NO: 486641 - DNA, 75 bp, synthetic construct
  source 1..75: mol_type = other DNA
gccacgggcgttaatcctggcggccttaatgttggtgatggtactgttattctgtcccagaagcctgatgatgag

SEQ ID NO: 486642 - DNA, 75 bp, synthetic construct
  source 1..75: mol_type = other DNA
ttaatcgcagagaacaatattctgtatgtaaaaccgaccagaccacttaacgaaatgtctgtcggtgatattccg

SEQ ID NO: 486643 - DNA, 75 bp, synthetic construct
  source 1..75: mol_type = other DNA
gctgaccatgctgacaaaaaactcattccttgatgaagtgcgcaagcaatacgtggtgaccgcgcgtgcgaaagg

SEQ ID NO: 486644 - DNA, 75 bp, synthetic construct
  source 1..75: mol_type = other DNA
cgcagattagtaaggccgtactggggcagaccatgaccaccgatgacggcagttcacgtgctcaggcggaagtcc

SEQ ID NO: 486645 - DNA, 75 bp, synthetic construct
  source 1..75: mol_type = other DNA
taaaggggttggcgtctgcgaaatcctctggaataccagcaccacactctggaaaccccgcgattatgaatgggt

SEQ ID NO: 486646 - DNA, 75 bp, synthetic construct
  source 1..75: mol_type = other DNA
gggggaagttgtcaccgtgaacaaggacgagctgaagcagacgcaatccgcagcggcggtaatgagtgtacgttc

SEQ ID NO: 486647 - DNA, 75 bp, synthetic construct
  source 1..75: mol_type = other DNA
taaccaactggcaaaggctgacgtatgggagcagaccttctgggacagcgacaaaaaagaagaaatcctcactta

SEQ ID NO: 486648 - DNA, 75 bp, synthetic construct
  source 1..75: mol_type = other DNA
atgatgaacaaagccagagaaacgtcgccttcactgatgcaaatgacgcctccctgcaaaattgatctgtcaggt

SEQ ID NO: 486649 - DNA, 75 bp, synthetic construct
  source 1..75: mol_type = other DNA
ggaagcccgcgaagggcgcaaggattacagcgtccaccgcattaccctggatgatgccattgcggacgggctgta

SEQ ID NO: 486650 - DNA, 75 bp, synthetic construct
  source 1..75: mol_type = other DNA
tgacggtatggcatttgtcaacgagcagatggatatttaccgcaacattggttatcgcgtattaatggtttccag

SEQ ID NO: 486651 - DNA, 75 bp, synthetic construct
  source 1..75: mol_type = other DNA
aaatcgttgagaaaggcaaaactgctcctcgcgttacgccagaccatatcgaaagcattattgctcaggaggcat

SEQ ID NO: 486652 - DNA, 75 bp, synthetic construct
  source 1..75: mol_type = other DNA
atgaacgaccagcaaatcgaaaaagaaattgttgagaaaggcaaaacggcaccgcgaatcactcctcagcacatc

SEQ ID NO: 486653 - DNA, 75 bp, synthetic construct
  source 1..75: mol_type = other DNA
tgcggccctacatcgaggccaactacgggccacaggcgcactatccccgcgttgttctgcgtatcagtgaagcag

SEQ ID NO: 486654 - DNA, 75 bp, synthetic construct
  source 1..75: mol_type = other DNA
ccgttcgccgtctgctgaacccggcaaccggtgaggaagacacgctgaaaaaagaggcgctcaacgaagcacagg

SEQ ID NO: 486655 - DNA, 75 bp, synthetic construct
  source 1..75: mol_type = other DNA
cgcacggcggtgatgtgattgattccccaggtgtgcgtgagttcggcctctggcacctggagccggaacaaatca

SEQ ID NO: 486656 - DNA, 75 bp, synthetic construct
  source 1..75: mol_type = other DNA
atgaaagccagatttgcatcgctgaaaaatcccgtcgtaccggtctgacatgggccgaagcgggccgcaatgtca

SEQ ID NO: 486657 - DNA, 75 bp, synthetic construct
  source 1..75: mol_type = other DNA
atcggctacgctattccggcctttttgtttgccatcctgctgattgtcttcttcgcgggcggcagttatttcgac

SEQ ID NO: 486658 - DNA, 75 bp, synthetic construct
  source 1..75: mol_type = other DNA
aaacatgtgttccgcaacgccatgctgctggtgattgccggttttccggcgacgtttatcagcatgtttttcacc

SEQ ID NO: 486659 - DNA, 75 bp, synthetic construct
  source 1..75: mol_type = other DNA
atgttccctatgaaggcgtaaaagcccgtatgttcagattaaacgagagtattgatcaagctctacaccatttct

SEQ ID NO: 486660 - DNA, 75 bp, synthetic construct
  source 1..75: mol_type = other DNA
gacgtctggagtagcgcatttatcatcatcggctacgccattccggcctttttgtttgccatcctgctgattgtc

SEQ ID NO: 486661 - DNA, 75 bp, synthetic construct
  source 1..75: mol_type = other DNA
ctacggtttcgataaaccgatccacgaacgttacttcaaaatgctccgggactacatttgttttgattttggcga

SEQ ID NO: 486662 - DNA, 75 bp, synthetic construct
  source 1..75: mol_type = other DNA
cccggcgcaggcggtgaaggtgttcgtgccagccatgcgcaaacgggcgtcggcaatatcagcgacagtaattac

SEQ ID NO: 486663 - DNA, 75 bp, synthetic construct
  source 1..75: mol_type = other DNA
cattccatggtttctggctgtggccgtgcaccatgttaaacgtcacgccgatcaaaggaatgatgactgtgattt

SEQ ID NO: 486664 - DNA, 75 bp, synthetic construct
  source 1..75: mol_type = other DNA
aaatttgaagaaggtacagacgctgcgttccacggtttctggctgtggccgtgcactatgctgaacgtcacgcca

SEQ ID NO: 486665 - DNA, 75 bp, synthetic construct
  source 1..75: mol_type = other DNA
gcggactcgagacaattatcgttatatgccgctcatggcgatgcgatattaactgatggcactttatggatgctg

SEQ ID NO: 486666 - DNA, 75 bp, synthetic construct
  source 1..75: mol_type = other DNA
ggggacgttcaaacagcatgagaacgccgaattctccagtagcttcacctgcacgtacatcaagcaggtactgga

SEQ ID NO: 486667 - DNA, 75 bp, synthetic construct
  source 1..75: mol_type = other DNA
tcacgaatgccaacatctatctggatggtactaacctgctgggacgggctgaggaagttaaactccccgatgtct

SEQ ID NO: 486668 - DNA, 75 bp, synthetic construct
  source 1..75: mol_type = other DNA
tggtgaagagttgctggagctggactatctggccaacatcttccgcgttggtggcgttgatcaactgaccgacta

SEQ ID NO: 486669 - DNA, 75 bp, synthetic construct
  source 1..75: mol_type = other DNA
gtttgcatttacaacagcaagaagcggtagcggttgctatcgtgcggagcgcaaaagaatgcttattgcaccgct

SEQ ID NO: 486670 - DNA, 75 bp, synthetic construct
  source 1..75: mol_type = other DNA
tggcggttgtcgcctttatctggcagtgcattagtctgcccagcatggatgcgaataaaagccacacgtcatgtg

SEQ ID NO: 486671 - DNA, 75 bp, synthetic construct
  source 1..75: mol_type = other DNA
gctatgagtagcgtgctgctcctttgcgcgggcgtactaacctttgttaccgcacgccagaaggccggtgcgttt

SEQ ID NO: 486672 - DNA, 75 bp, synthetic construct
  source 1..75: mol_type = other DNA
gacgatgcgtttgcgaaaggaaaaatgctacatcaggtatttataaaaaatgtcgatgcctttaagccggttgcg

SEQ ID NO: 486673 - DNA, 75 bp, synthetic construct
  source 1..75: mol_type = other DNA
catttatcttttttctgagactggcggcaattaattgccagtctctgtattgctctgctgttatttcctttttct

SEQ ID NO: 486674 - DNA, 75 bp, synthetic construct
  source 1..75: mol_type = other DNA
aaaatacagaaaatatgcagttggatatggtgtcgtgataaagaagtatttagtgaaatctcgttatttattact

SEQ ID NO: 486675 - DNA, 75 bp, synthetic construct
  source 1..75: mol_type = other DNA
tgaaatcgccgcggcaggactaccggcgttgtttgtgccgtttcaacataaagaccgccagcaatactggaatgc

SEQ ID NO: 486676 - DNA, 75 bp, synthetic construct
  source 1..75: mol_type = other DNA
atggctggtcgtgaaggtccgattcgtgtgctggttgtgggcggttctcagggcgcgcgcattcttaaccagaca

SEQ ID NO: 486677 - DNA, 75 bp, synthetic construct
  source 1..75: mol_type = other DNA
tgttgtcatcggagggttctggtcaatgtcggctgcaaccgccattcggctcgtgccgcagcaccatgtttcccg

SEQ ID NO: 486678 - DNA, 75 bp, synthetic construct
  source 1..75: mol_type = other DNA
tgacaaagacgggtgtttttcaggtagtgctgtcgatgacaatggtgtcctctcacttatctacaccggacacgt

SEQ ID NO: 486679 - DNA, 75 bp, synthetic construct
  source 1..75: mol_type = other DNA
ggcaagttcgctggctgggtactgccgatcgtatggaagcggacttagtaccgaagcacggtatcgagatcgact

SEQ ID NO: 486680 - DNA, 75 bp, synthetic construct
  source 1..75: mol_type = other DNA
gtgtgttggtggtgggtggttcgcagggcgcgcgtattcttaaccagacaatgcctcaggtcgcagcaaagctgg

SEQ ID NO: 486681 - DNA, 75 bp, synthetic construct
  source 1..75: mol_type = other DNA
agagcaacttcaggatgcaaacacaagctggatggtcgacgactcatttcccgagagcattatgcgagtacaacg

SEQ ID NO: 486682 - DNA, 75 bp, synthetic construct
  source 1..75: mol_type = other DNA
tcaggaaatgcattggctgtcactcagtctgcggggctatatagcgataaccaagcatttgtcgatttagccaag

SEQ ID NO: 486683 - DNA, 75 bp, synthetic construct
  source 1..75: mol_type = other DNA
ctgctgattatttccctggcactttccaccaccattcgccagccgcagcagaaagtgttgcgtgaggcgcatatt

SEQ ID NO: 486684 - DNA, 75 bp, synthetic construct
  source 1..75: mol_type = other DNA
ctgctgattctgtcactggcgctttctacgacgattcgccagccagagcagaaaatgttgcgtgaggcgcatggc

SEQ ID NO: 486685 - DNA, 75 bp, synthetic construct
  source 1..75: mol_type = other DNA
aacgttaagcgatgccgatgcaaaagcgattgccaatcagggttgtgtcgaaatggacagcggcaacaaagtcgc

SEQ ID NO: 486686 - DNA, 75 bp, synthetic construct
  source 1..75: mol_type = other DNA
gtccgggtttatccgtgccggacgcatcacgccggaccaggccagcacgctgggacgaaaagcatatgagaagtc

SEQ ID NO: 486687 - DNA, 75 bp, synthetic construct
  source 1..75: mol_type = other DNA
cggtgtggaaatcggtattcgtcgtctggaagcgcgtccaacagctgatttgtgcatcgactgcaaaacgctggc

SEQ ID NO: 486688 - DNA, 75 bp, synthetic construct
  source 1..75: mol_type = other DNA
ctgctgattctgtcattggcgctttctacgacgattcgtcagccagagcagaaaatgttgcgtgaggcgcatggc

SEQ ID NO: 486689 - DNA, 75 bp, synthetic construct
  source 1..75: mol_type = other DNA
gtttgatctctgcctttgccatcggttcttatggtcttggcagtctgggctttaaatttatcgatactcagctac

SEQ ID NO: 486690 - DNA, 75 bp, synthetic construct
  source 1..75: mol_type = other DNA
ttttgctgggattaggcttcttcctgaccgcgcattctgacaacctgatgatgctgtggttaagcgccggtgtgc

SEQ ID NO: 486691 - DNA, 75 bp, synthetic construct
  source 1..75: mol_type = other DNA
tctggtgctgggcattctgtctgacaaaattgcccgtatccgtgttatcaccattggtcaggtgatttcgctggt

SEQ ID NO: 486692 - DNA, 75 bp, synthetic construct
  source 1..75: mol_type = other DNA
tggcaatttcgtcttctgttgcgggaaaattacaggaacgttttggcgttaaacgcgtcactatggcttccggta

SEQ ID NO: 486693 - DNA, 75 bp, synthetic construct
  source 1..75: mol_type = other DNA
cccgctggctgacactcatcggtactatcattacccagtttgctctggggtcggtttatacctggagcctgttta

SEQ ID NO: 486694 - DNA, 75 bp, synthetic construct
  source 1..75: mol_type = other DNA
cctataatacttaacaacctcgaggattttgaagcaataactttatctgattctacaaagtaccctcattggtcc

SEQ ID NO: 486695 - DNA, 75 bp, synthetic construct
  source 1..75: mol_type = other DNA
acaaatgccgcataagtttgttgcgacaggcaacgtacttttaaaaaccgtactggtttcagaagcggaaagtga

SEQ ID NO: 486696 - DNA, 75 bp, synthetic construct
  source 1..75: mol_type = other DNA
aaattgcccatcgtctgggctatgcctcagctgaatcgttcggcaatatgtttaagcgtcgaacgggctactcgc

SEQ ID NO: 486697 - DNA, 75 bp, synthetic construct
  source 1..75: mol_type = other DNA
gcgctcggggtaggccgtgatttcaccaattggattaaagggcgcattgaggagtatggatttaaaaagggagta

SEQ ID NO: 486698 - DNA, 75 bp, synthetic construct
  source 1..75: mol_type = other DNA
cttattcgcaccttccctaagtgttgttttctttttcatttatctgtctctatttttaattttcctacagtttac

SEQ ID NO: 486699 - DNA, 75 bp, synthetic construct
  source 1..75: mol_type = other DNA
gagccggaactgggcctggcatctggcaccgacggcctgaaactgacgcgtcgcattctcggtaacgcggcagat

SEQ ID NO: 486700 - DNA, 75 bp, synthetic construct
  source 1..75: mol_type = other DNA
cgcttcagcgcggcaaatatctggtacggccacggcactgacaacccgtgggatgaagccgtgcaactggtgttg

SEQ ID NO: 486701 - DNA, 75 bp, synthetic construct
  source 1..75: mol_type = other DNA
ctactgattgaatgtaatggcgaaatcaccaatggtgaatatggcagaaaagttctttgtgactatctgaaaatg

SEQ ID NO: 486702 - DNA, 75 bp, synthetic construct
  source 1..75: mol_type = other DNA
atggaatatgagcagcgcaaaggagaactcacccgcctgtcgcaacgctggctcgccaagcgtctggaggtggtc

SEQ ID NO: 486703 - DNA, 75 bp, synthetic construct
  source 1..75: mol_type = other DNA
gccagctaaaagcccgtctcagtgccgcaaacaactttaagccaatgtgcgatgcgctgaatatggcccgtgccg

SEQ ID NO: 486704 - DNA, 75 bp, synthetic construct
  source 1..75: mol_type = other DNA
ccagcggaaagctgaattaattcgtctttcgcagcgttggttagcccgtcgcatggaggaaaacagccatgtgta

SEQ ID NO: 486705 - DNA, 75 bp, synthetic construct
  source 1..75: mol_type = other DNA
ttccggtatcacctggcattattggcggacatgaaacagccattgtcagcgccagagcgttacataaggcgcttg

SEQ ID NO: 486706 - DNA, 75 bp, synthetic construct
  source 1..75: mol_type = other DNA
ctcctgtttacgcacccggtgaagttgaaaatgcgcgcgacaccgtgacgccatttgcctttgccgaagcggtat

SEQ ID NO: 486707 - DNA, 75 bp, synthetic construct
  source 1..75: mol_type = other DNA
acgtcattccgattcgttccgatctgttccgcgatttgccgaaagtacagtacgacctgattgtcactaatccgc

SEQ ID NO: 486708 - DNA, 75 bp, synthetic construct
  source 1..75: mol_type = other DNA
gtgtggaccagcctgcgagttttaccgaaatcaccacacatcagtgtctgcgggacacgaaaattgagcagtact

SEQ ID NO: 486709 - DNA, 75 bp, synthetic construct
  source 1..75: mol_type = other DNA
tgaatacatcagaagccggtaaaacgatcacggagtccattcttaatacgccaccggataacaagccgtcgctgg

SEQ ID NO: 486710 - DNA, 75 bp, synthetic construct
  source 1..75: mol_type = other DNA
atggcggagcttaacttacaaaatgctgaatttaaccttgcaagaaacgccagccttaataccagaattaatgcc

SEQ ID NO: 486711 - DNA, 75 bp, synthetic construct
  source 1..75: mol_type = other DNA
agaaatttattacgctatatagtcaacacacggaaattaagtgatttctcacaagcacttttgaagattgaagag

SEQ ID NO: 486712 - DNA, 75 bp, synthetic construct
  source 1..75: mol_type = other DNA
ggtcaggccgtctccgcgctggccgcggtcgctgctgcaggcgaagacgtggcggaactgaacggggagaacgtc

SEQ ID NO: 486713 - DNA, 75 bp, synthetic construct
  source 1..75: mol_type = other DNA
tactggcggcatctttctgtccggtacagccgcttgtcgcaaatgaccagtttaaccagggtatgcagcagggga

SEQ ID NO: 486714 - DNA, 75 bp, synthetic construct
  source 1..75: mol_type = other DNA
ggacaggcaagagttttatggatctcggttataaaaactttattacagaaattaataatctgaatgatcgtatgg

SEQ ID NO: 486715 - DNA, 75 bp, synthetic construct
  source 1..75: mol_type = other DNA
gggaaatatgtgcgtcatgacaatcattactcatcaagtgcgttaggaatgccagaacaagattatggctcgcac

SEQ ID NO: 486716 - DNA, 75 bp, synthetic construct
  source 1..75: mol_type = other DNA
cagcgcgtatggatgcgatcacggtcagaaagatgggaaagacagcctcgattaatgatgtcgatatgactgtga

SEQ ID NO: 486717 - DNA, 75 bp, synthetic construct
  source 1..75: mol_type = other DNA
tgacccaaccagtgtcatttactcagaacgattgggaaaatcgacagttcagtatggcggagcttaacttacaaa

SEQ ID NO: 486718 - DNA, 75 bp, synthetic construct
  source 1..75: mol_type = other DNA
tcaaacgtatcgtgattttgctgagaataagggagagttccgtcctggcgcagaaaatgttcctctatatgataa

SEQ ID NO: 486719 - DNA, 75 bp, synthetic construct
  source 1..75: mol_type = other DNA
ttttgaagttaaaattacccacattattattgataagcataatggcgggaggatacagctttccatcgtgtgctt

SEQ ID NO: 486720 - DNA, 75 bp, synthetic construct
  source 1..75: mol_type = other DNA
ttatgacctgggtggtggtactttcgatatttctattatcgaaatcgacgaagttgacggtgaaaaaaccttcga

SEQ ID NO: 486721 - DNA, 75 bp, synthetic construct
  source 1..75: mol_type = other DNA
cgcaggattcgtccgcgccgggcgacttactcagggtcaggccaacgcgctgggccgccgtgctggcgagccatc

SEQ ID NO: 486722 - DNA, 75 bp, synthetic construct
  source 1..75: mol_type = other DNA
cctggacgctctggagtccgagctttaccgcaacctgctacccatctatcccaagaccgctatccgcatccgtaa

SEQ ID NO: 486723 - DNA, 75 bp, synthetic construct
  source 1..75: mol_type = other DNA
tttaatcccttacagcaggtagcctatgtcggggtgatgtatggattactgccgttgttactggtgacggggctg

SEQ ID NO: 486724 - DNA, 75 bp, synthetic construct
  source 1..75: mol_type = other DNA
cgtgctcgtggtgtgaagaaatcagccaccgatcatggcgagaaggtttatctttacagcaaggcggtcagatta

SEQ ID NO: 486725 - DNA, 75 bp, synthetic construct
  source 1..75: mol_type = other DNA
ggacgaagctgtagcaatcggtgctgctgttcagggtggtgttctgactggtgacgtaaaagacgtactgctgct

SEQ ID NO: 486726 - DNA, 75 bp, synthetic construct
  source 1..75: mol_type = other DNA
atcagtcacataaagtagccatagagccatttatacatgcagtatgggttgctggcgcacctcctgataatacat

SEQ ID NO: 486727 - DNA, 75 bp, synthetic construct
  source 1..75: mol_type = other DNA
atttttaaaagatatcaaaaatggacagaaaacagctggaatattagagggaataataatttcatgctaactcac

SEQ ID NO: 486728 - DNA, 75 bp, synthetic construct
  source 1..75: mol_type = other DNA
ataattattttaaacctgttgagacaacagttattagagatagttttaaaatttttaaaagatatcaaaaatggt

SEQ ID NO: 486729 - DNA, 75 bp, synthetic construct
  source 1..75: mol_type = other DNA
aagagcagaagattagtcagtctaccctggacgctctggagtccgagctttaccgcaacctgcaacccatctatc

SEQ ID NO: 486730 - DNA, 75 bp, synthetic construct
  source 1..75: mol_type = other DNA
attatcgttcgtgagctgggcttaaatgatcgttatctggcagaagaaatcaaaaagtacccgttggcaaaagta

SEQ ID NO: 486731 - DNA, 75 bp, synthetic construct
  source 1..75: mol_type = other DNA
aaaggtgaacatgagcgattaccgaatccgacgctggcggtcaccgatggcaaaacaacgattaagtttcatccg

SEQ ID NO: 486732 - DNA, 75 bp, synthetic construct
  source 1..75: mol_type = other DNA
ccaaaacggtaattcgtatccgcaaaggtagctctaacggtgtggaacttactggattgcaactggacgaagaaa

SEQ ID NO: 486733 - DNA, 75 bp, synthetic construct
  source 1..75: mol_type = other DNA
gtaaacgggaataccagccctggcgggtccagtatgtgctggatgaaatgctgcgtgaaattcgccaccagcttg

SEQ ID NO: 486734 - DNA, 75 bp, synthetic construct
  source 1..75: mol_type = other DNA
atgacagctccggcaggatcgaaaccaagctttcctgatggaatgttaatcttggttgaccctgaacaacctgtt

SEQ ID NO: 486735 - DNA, 75 bp, synthetic construct
  source 1..75: mol_type = other DNA
agtccccgaccgttaccgattacgacgagcgtccggctgacggctgggatatccgtgccgaaggctggctgcctg

SEQ ID NO: 486736 - DNA, 75 bp, synthetic construct
  source 1..75: mol_type = other DNA
tggttgccagttttattacccaatatgccgtaaccgcttatgccagccagcgctatcttgagaaacatcccatta

SEQ ID NO: 486737 - DNA, 75 bp, synthetic construct
  source 1..75: mol_type = other DNA
gcgtaatgccttttatgaaggcgtcgaatttcctgatgattgtgatgttttaatcagctacgctccaccaaaaga

SEQ ID NO: 486738 - DNA, 75 bp, synthetic construct
  source 1..75: mol_type = other DNA
attatatataattgggctgttgcgatgacaaaattacaacttaagtaccgggagttaaaaattatctcggtaatc

SEQ ID NO: 486739 - DNA, 75 bp, synthetic construct
  source 1..75: mol_type = other DNA
agacggtgcggacagtgtgcgctacaccctgaccgtcacgggcagtgacggaaaaccggtcagcggacaggctgt

SEQ ID NO: 486740 - DNA, 75 bp, synthetic construct
  source 1..75: mol_type = other DNA
cgacgcagaactgcgtcaggccggcgggaaggttatcagcaacaccggcaaccggattacgctgcagttacccgc

SEQ ID NO: 486741 - DNA, 75 bp, synthetic construct
  source 1..75: mol_type = other DNA
atcagtggtaatggcgtgaaaagcaccattgcttattacttcccgggcggcagggaagggcagttgtccggtatc

SEQ ID NO: 486742 - DNA, 75 bp, synthetic construct
  source 1..75: mol_type = other DNA
cgtaagcagacgctgattaccctgcagctgccaccggatgtgtatggcgcagaactgacgactgtcaccctgacg

SEQ ID NO: 486743 - DNA, 75 bp, synthetic construct
  source 1..75: mol_type = other DNA
cgatgcagaactgcgtcaggccggcgggaagattatcagcaataccggcaaccagattacgctgcagttacccgc

SEQ ID NO: 486744 - DNA, 75 bp, synthetic construct
  source 1..75: mol_type = other DNA
caaaagcggctgatgtgaccttcgttgccgccatgcagggagaactgctggctgaccgtactcaggcgctggccg

SEQ ID NO: 486745 - DNA, 75 bp, synthetic construct
  source 1..75: mol_type = other DNA
ctggcttttccaatggcgtggtatatggcgcgctataccagcgggaaaatgaaagctttttttatattgcggtaa

SEQ ID NO: 486746 - DNA, 75 bp, synthetic construct
  source 1..75: mol_type = other DNA
catcatttttctcatcacgcagcgccatcgcgatggcagcatgatgcaattgttactcgccggtatcgccatcaa

SEQ ID NO: 486747 - DNA, 75 bp, synthetic construct
  source 1..75: mol_type = other DNA
caccagcaccagtgtgacgttaagcgacgcgcaagcaaaactgatgcaacccggcagcagtgatatcaatcttga

SEQ ID NO: 486748 - DNA, 75 bp, synthetic construct
  source 1..75: mol_type = other DNA
atgcaaccaggcagcagtgatatcaatcttgagcgcgtagaagcgttgaaactggcgattcgtaacggtgaacta

SEQ ID NO: 486749 - DNA, 75 bp, synthetic construct
  source 1..75: mol_type = other DNA
cgtatcgagtgacggcgtaagttcggaagaaaagcagaaaatgatgggctttctgcgctcttcagaagagctgaa

SEQ ID NO: 486750 - DNA, 75 bp, synthetic construct
  source 1..75: mol_type = other DNA
cagtgctggtaggcgcagcgttggcaaccgccggggtgattatgcaggggctttttcgcaaccccatggctgacc

SEQ ID NO: 486751 - DNA, 75 bp, synthetic construct
  source 1..75: mol_type = other DNA
ccctggtgctgttcggcgccagtcagggagcattaaaaatcagttttaacgccctgtttgatgaggaatatcgcg

SEQ ID NO: 486752 - DNA, 75 bp, synthetic construct
  source 1..75: mol_type = other DNA
atactttattaggcgagaatggtgccggtaaatcgacattaatgaaaatactggccggtgtttatccgccaaccc

SEQ ID NO: 486753 - DNA, 75 bp, synthetic construct
  source 1..75: mol_type = other DNA
caaaatttgaaatttataacgtgatacgccaactggcggcggcggggacggccattattctggtgtcttctgaac

SEQ ID NO: 486754 - DNA, 75 bp, synthetic construct
  source 1..75: mol_type = other DNA
caggctattgatcatggcattgcttttgtgaccgaaaaccgcaaggaagaagggttagtgctgatgcacgacatc

SEQ ID NO: 486755 - DNA, 75 bp, synthetic construct
  source 1..75: mol_type = other DNA
atgctggtgctggtggggattgctcccgccgggtttgtcgtcaatatgaatgcgtccggctatgaaattacccgt

SEQ ID NO: 486756 - DNA, 75 bp, synthetic construct
  source 1..75: mol_type = other DNA
gtcaatatgaacacgcaccatgtggcgtttcaatataacgcttcgcggatgggactcatcaatcaccgacaagaa

SEQ ID NO: 486757 - DNA, 75 bp, synthetic construct
  source 1..75: mol_type = other DNA
cggtaaatcgacattaatgaaaatactggccggtgtttatccgccaacccagggaacgataacactacgtggtga

SEQ ID NO: 486758 - DNA, 75 bp, synthetic construct
  source 1..75: mol_type = other DNA
atggatcgtattgttagttcttcacatgaccgtacatcgctgcttagtacccataaggtactgcgtaatacttat

SEQ ID NO: 486759 - DNA, 75 bp, synthetic construct
  source 1..75: mol_type = other DNA
acgatgttgtaaggctgaaacatttacgcaatgtgggtgagtatgtaactggcatggcagccctgcaggactgtt

SEQ ID NO: 486760 - DNA, 75 bp, synthetic construct
  source 1..75: mol_type = other DNA
cagaagcgaaaagccataattttggcggctcacatcaaccaagccgttactacttcccgctctcctgccgagata

SEQ ID NO: 486761 - DNA, 75 bp, synthetic construct
  source 1..75: mol_type = other DNA
gcgacgttcaccgctgcaatattcgccgtaccatccgttcgctggtaaccggcgaccgcgtagtctggcgtccgg

SEQ ID NO: 486762 - DNA, 75 bp, synthetic construct
  source 1..75: mol_type = other DNA
tgctcacgattcgccctgcgttccggtttatgacgatcagggtcgactggttcacaccaatacctgtatgaaagg

SEQ ID NO: 486763 - DNA, 75 bp, synthetic construct
  source 1..75: mol_type = other DNA
aggtaaaaacgacattgccggattcggcaagtgtaagggagtttgcccggctgcaaatcgccttcgctcactgtt

SEQ ID NO: 486764 - DNA, 75 bp, synthetic construct
  source 1..75: mol_type = other DNA
acgatgttgtacgcctgaaacatttacgcaatgtgggtgagtatgttaccggcatggttgccctgcaggactgtt

SEQ ID NO: 486765 - DNA, 75 bp, synthetic construct
  source 1..75: mol_type = other DNA
tgggggcgctgataacgtcgttgttgttcgtcgccgcgcaccgccagtatcagaacctgctgacactggcagaac

SEQ ID NO: 486766 - DNA, 75 bp, synthetic construct
  source 1..75: mol_type = other DNA
ccgccggtatcagtgaggtgctggccgcgcgctggtatctgcatatcacagcagccatgaaagagtttggtatcg

SEQ ID NO: 486767 - DNA, 75 bp, synthetic construct
  source 1..75: mol_type = other DNA
ccctgcatctggcaatcagtgcggtattcattctgatctcctctggcgcgattctgtttgaaaccagcaacatca

SEQ ID NO: 486768 - DNA, 75 bp, synthetic construct
  source 1..75: mol_type = other DNA
tattagaaaatatcatgcacaaaaaatttccaactatcgaggaaaggatggcacctggaacaacccagtcttaca

SEQ ID NO: 486769 - DNA, 75 bp, synthetic construct
  source 1..75: mol_type = other DNA
cagagtgttcttgctggtgtcaatgtgagaacttcttatttttctaatgggaaatataatgtaaatggtcgaatg

SEQ ID NO: 486770 - DNA, 75 bp, synthetic construct
  source 1..75: mol_type = other DNA
agaatacaatatttattgtggcagctcttgttggaatctgttcctacatttttcccagaagccctgatactcaaa

SEQ ID NO: 486771 - DNA, 75 bp, synthetic construct
  source 1..75: mol_type = other DNA
atgagtggattacgtccggcattatcgacatttatctttctgttattgattactggcggcgtttacccgctgctg

SEQ ID NO: 486772 - DNA, 75 bp, synthetic construct
  source 1..75: mol_type = other DNA
caacatttatctttctgttattgatcactggcggcgtttacccgctgctgaccaccgtgctggggcaatggtggt

SEQ ID NO: 486773 - DNA, 75 bp, synthetic construct
  source 1..75: mol_type = other DNA
gcatgttgcgcctgctcgatctgcgagctgcgcccgttgcactgccgcttctggaagcggtgacggcccttcgta

SEQ ID NO: 486774 - DNA, 75 bp, synthetic construct
  source 1..75: mol_type = other DNA
tactctgagtccgatcgtatgaaaatcattagttctttgaaatttgtcacctcagtttttcttgaagaatcatta

SEQ ID NO: 486775 - DNA, 75 bp, synthetic construct
  source 1..75: mol_type = other DNA
tgcggggttcggcattaatcgggcagaattttaccggcaacggctattttcatggtcgcccgtcggcaacggcag

SEQ ID NO: 486776 - DNA, 75 bp, synthetic construct
  source 1..75: mol_type = other DNA
gggggatgattgggctgggagattcgattgggtgaaaagtgattgtgaagttatttatctgcctcgaacaccatc

SEQ ID NO: 486777 - DNA, 75 bp, synthetic construct
  source 1..75: mol_type = other DNA
atcatggtctctcatgatatgaaaaatttacgccaacaatgcgatataggtattttgctacgtaacagcaatctt

SEQ ID NO: 486778 - DNA, 75 bp, synthetic construct
  source 1..75: mol_type = other DNA
tggctgcgttgacgtcatcttttatgctggctgcctgtacgccgcgtattgaagtcgctgcgcccaaggaaccga

SEQ ID NO: 486779 - DNA, 75 bp, synthetic construct
  source 1..75: mol_type = other DNA
acggttttagtttgccagaagtcattttggcgatggtactcatggtggtgattgtcacggcgttatctggctacc

SEQ ID NO: 486780 - DNA, 75 bp, synthetic construct
  source 1..75: mol_type = other DNA
tctctaccgtgcttcggagcgtatttgccatgcaaaggtcgcagacgaagcgggggtggtgcgtgacaccctgaa

SEQ ID NO: 486781 - DNA, 75 bp, synthetic construct
  source 1..75: mol_type = other DNA
ttgctgtcagcatggcctttgattttgatatctacctgaccgacgaaattatgtcagtgggcgacgcccgcttta

SEQ ID NO: 486782 - DNA, 75 bp, synthetic construct
  source 1..75: mol_type = other DNA
ctgggtggcatggatacaccaagcaaaggaaaagtaacccgtcactgtcgtgtttcctggccactcgcattaggg

SEQ ID NO: 486783 - DNA, 75 bp, synthetic construct
  source 1..75: mol_type = other DNA
gattgggtaaaaacagattgcgaagtgatttatttaccaagaacaccttcggtttcaaccacagaaattatagaa

SEQ ID NO: 486784 - DNA, 75 bp, synthetic construct
  source 1..75: mol_type = other DNA
aaagttcggcgctgttcatcagcctgctgaagcggcttaaagcgacataccgtcgggcgaaaaccatcacgctga

SEQ ID NO: 486785 - DNA, 75 bp, synthetic construct
  source 1..75: mol_type = other DNA
tttatggaaaccgccagcccattccccggaggaaaacatggtcaggtgacctgctccccgttgattagtacaccc

SEQ ID NO: 486786 - DNA, 75 bp, synthetic construct
  source 1..75: mol_type = other DNA
ggtcacctgatgtatgggctggtgggggtgtgggtctgttcgcaggcttactacttcgctatgtcattgtcaggg

SEQ ID NO: 486787 - DNA, 75 bp, synthetic construct
  source 1..75: mol_type = other DNA
ggaagatttacacattcaactatttgagcgtacaactcgcaaggttacgttaacaaaagcaggaaaaggttgctc

SEQ ID NO: 486788 - DNA, 75 bp, synthetic construct
  source 1..75: mol_type = other DNA
gcgttaccttaaccgcctgcggttgatgaaagcgcgccatctgttacgccatagtgaggccagtgtaacggatat

SEQ ID NO: 486789 - DNA, 75 bp, synthetic construct
  source 1..75: mol_type = other DNA
accgataatctgtgtctgaccaatgtgctgtatcgctcgccggatcgatttcagtttctcgccgggctgaatcag

SEQ ID NO: 486790 - DNA, 75 bp, synthetic construct
  source 1..75: mol_type = other DNA
acgtgagctgataaagcattctcccggcgattttggttatcaacgttcacgctggagcaccgaattactggcaat

SEQ ID NO: 486791 - DNA, 75 bp, synthetic construct
  source 1..75: mol_type = other DNA
tgtcagcgacgttgccagaacgctctgctgcgcccgttcctctgttggatgttggattaactggttcacgcagtc

SEQ ID NO: 486792 - DNA, 75 bp, synthetic construct
  source 1..75: mol_type = other DNA
ccttataatccacaggcttctggcgggagcaatctggcggtcagtaaccctgagctggataaactaatagccgca

SEQ ID NO: 486793 - DNA, 75 bp, synthetic construct
  source 1..75: mol_type = other DNA
tttatcagccagtttactcgccgtgggtgaatcatgtcgaacggttgtggcaggcgcttcatgagacaataaccc

SEQ ID NO: 486794 - DNA, 75 bp, synthetic construct
  source 1..75: mol_type = other DNA
tcgttgataactacattatccataaaagccgcgaaacacagcgctggttgaaagcaaatcccaagttcagggtaa

SEQ ID NO: 486795 - DNA, 75 bp, synthetic construct
  source 1..75: mol_type = other DNA
gctggttgccatctgcggggcttgtatggcgcagggccgcgccaactctgcgtatccgtgacccacataaagatg

SEQ ID NO: 486796 - DNA, 75 bp, synthetic construct
  source 1..75: mol_type = other DNA
tgaacgttaaaattgagcatgagatcatcatcaaagcagataaggacgttgaagacttgctcaaaacccgtagcg

SEQ ID NO: 486797 - DNA, 75 bp, synthetic construct
  source 1..75: mol_type = other DNA
aacagaatggtgacggcctgctggatgtttatgccaatggtcagcacgtattccgttttcagaatggcattatcc

SEQ ID NO: 486798 - DNA, 75 bp, synthetic construct
  source 1..75: mol_type = other DNA
aaggggtttgctcagtacagtaatgacacagacagcgatgcagaagaccgcgccgccacatcaaaagcggtaaag

SEQ ID NO: 486799 - DNA, 75 bp, synthetic construct
  source 1..75: mol_type = other DNA
gaaacagaatggtgatggcctgctggatgtttatgccaatagcgtgcatgtgttgcgttttcagagtggcagcat

SEQ ID NO: 486800 - DNA, 75 bp, synthetic construct
  source 1..75: mol_type = other DNA
tcactgcccgatcaaaagctgtccgttgcagaactacttagtgagctacctcttctgcatcagagcacccgtatt

SEQ ID NO: 486801 - DNA, 75 bp, synthetic construct
  source 1..75: mol_type = other DNA
acggggattttcttaatcgggaatacgatgctgtcattatgcgcgaaaatttttgcgccccctggtcgaaggtag

SEQ ID NO: 486802 - DNA, 75 bp, synthetic construct
  source 1..75: mol_type = other DNA
agctgctggtgacttttgaggtcgtcgcacgtcatgaaagttataccagagcggcagaggagttagcgttaaccc

SEQ ID NO: 486803 - DNA, 75 bp, synthetic construct
  source 1..75: mol_type = other DNA
ataccctataaagaagggaattcagagttaaaggctggagttttttttgctacagcaagtattagtatcagatat

SEQ ID NO: 486804 - DNA, 75 bp, synthetic construct
  source 1..75: mol_type = other DNA
atcagggatagcggtcaggtgttcctacagccactaaacccgcaatatccaatgattccatgcaatgatagctgt

SEQ ID NO: 486805 - DNA, 75 bp, synthetic construct
  source 1..75: mol_type = other DNA
gttaatgcactgaggattttcaacgaagcttttggcctgatttttcgtcgctctgaagagtgcctgcatcttatt

SEQ ID NO: 486806 - DNA, 75 bp, synthetic construct
  source 1..75: mol_type = other DNA
tacagcagattctggactccatcgcgcccggcctgctgccgctggcggcagtgttcgccatctacttctatttgg

SEQ ID NO: 486807 - DNA, 75 bp, synthetic construct
  source 1..75: mol_type = other DNA
gcgatgggcggtattttgccgctgattctctacccggcgattacgctggcaatcagctacggcatggtgcacaag

SEQ ID NO: 486808 - DNA, 75 bp, synthetic construct
  source 1..75: mol_type = other DNA
gaagagaaggctgaatatccgcacttgcagctctttcgtgagtggttgctggcaaaatcggtggtgccggaggat

SEQ ID NO: 486809 - DNA, 75 bp, synthetic construct
  source 1..75: mol_type = other DNA
attactggcgtctgggtgccatcttcggggtcatttacatcgccatgttgctgttggttggctggccaattctgg

SEQ ID NO: 486810 - DNA, 75 bp, synthetic construct
  source 1..75: mol_type = other DNA
cggctcgtagcgcggcgtggttttttgccagcaaaggctgcatgaagtataccggcgatattgcacgtgtaactc

SEQ ID NO: 486811 - DNA, 75 bp, synthetic construct
  source 1..75: mol_type = other DNA
caaccgcaatatcatgatgatgataaatcactatatttatctgtatctttaccattgaattccttttcaaattat

SEQ ID NO: 486812 - DNA, 75 bp, synthetic construct
  source 1..75: mol_type = other DNA
cgcccgatgcgacgctggcagtagcggaccgcgagatgccaggctttggtgaacagatgcgccaaattagcctgc

SEQ ID NO: 486813 - DNA, 75 bp, synthetic construct
  source 1..75: mol_type = other DNA
cgcctgatgcgacgctggcagtagctgaccgcgagatgccgggctttggtgaacagatgcgccagattagcctgc

SEQ ID NO: 486814 - DNA, 75 bp, synthetic construct
  source 1..75: mol_type = other DNA
attttgtaccaactgcgatcctttcgcgtcaggtgggtgtgattcgcaaacaggcgctgatccttaacttacccg

SEQ ID NO: 486815 - DNA, 75 bp, synthetic construct
  source 1..75: mol_type = other DNA
gcgtatggtcgttatccggatacgtatttaccggcacagacggattccgttatcaaggaggtgatactgacactg

SEQ ID NO: 486816 - DNA, 75 bp, synthetic construct
  source 1..75: mol_type = other DNA
aacgttatgcaaggcatctggcaaatgaccaaacagggcgatgcgataacgggggcgatggtctttttctgcgtt

SEQ ID NO: 486817 - DNA, 75 bp, synthetic construct
  source 1..75: mol_type = other DNA
gtaaatgttacaggacgggtaacaccaactgattacggtaattttgatgcgcgttatcaggctaaaacaggcggc

SEQ ID NO: 486818 - DNA, 75 bp, synthetic construct
  source 1..75: mol_type = other DNA
ttcagtttgcttctgatgatggaatgataacgccattgctatccagctttagtcctgtaatcaggggaattgcta

SEQ ID NO: 486819 - DNA, 75 bp, synthetic construct
  source 1..75: mol_type = other DNA
acgattgcctggggggcaaaatctgatgtcacgctctatggaggcctgatgctagcagataattaccgcgcttac

SEQ ID NO: 486820 - DNA, 75 bp, synthetic construct
  source 1..75: mol_type = other DNA
ctctatgcgctgatgcagcgtggcgacttgcgccagaacaaactgctgcacccgggcgatattttatttattccg

SEQ ID NO: 486821 - DNA, 75 bp, synthetic construct
  source 1..75: mol_type = other DNA
ctgggcgcatccggctgtggcaagtccacgctgctgcgtatgctggcaggtttcgaacaaccttctgccggacag

SEQ ID NO: 486822 - DNA, 75 bp, synthetic construct
  source 1..75: mol_type = other DNA
atctacaacgatcaaacctacaccgggcaaagctatcgtatttcgtggaacaaaatgttcagtgccaccaatacc

SEQ ID NO: 486823 - DNA, 75 bp, synthetic construct
  source 1..75: mol_type = other DNA
tgtctgcgggatgcgcggtcatggcgatgcaaatggcagcagttgcccaggggtttggcggcatctggcgcagtg

SEQ ID NO: 486824 - DNA, 75 bp, synthetic construct
  source 1..75: mol_type = other DNA
ccggattgatattaaaccgtcgcgggaatatgccagcacaatcatgaacgctatctggaccggtgaaccgagtgt

SEQ ID NO: 486825 - DNA, 75 bp, synthetic construct
  source 1..75: mol_type = other DNA
gggctcctggagtgcttccattcagcgtacctggaatgaagatggcgagcaggatgatagtttctatctgagcgt

SEQ ID NO: 486826 - DNA, 75 bp, synthetic construct
  source 1..75: mol_type = other DNA
gctggttttgaaaccaatcagggacaatctgcgattatgaatatcaaacgcagtgacggaaaaggtatccccttc

SEQ ID NO: 486827 - DNA, 75 bp, synthetic construct
  source 1..75: mol_type = other DNA
gtagcaactattcggtcggctacagtaacagcgcttcatggggaagctacagtatcagcgctcaacgatcctggg

SEQ ID NO: 486828 - DNA, 75 bp, synthetic construct
  source 1..75: mol_type = other DNA
ccattgtgaaggatccacaacatgtcgagacggaagaacagttgtgggataaatttgtgctaatgcaccacgcgg

SEQ ID NO: 486829 - DNA, 75 bp, synthetic construct
  source 1..75: mol_type = other DNA
gcatcaattgtgatatgtgtgaacccgaatgcccgaatgaggcgatttcaatgggagatcatatctacgagatta

SEQ ID NO: 486830 - DNA, 75 bp, synthetic construct
  source 1..75: mol_type = other DNA
aagataaagattttgtatgtgcgtttgtaacttcaccggatagtttttatgaggctattgaaagttatcgtaatt

SEQ ID NO: 486831 - DNA, 75 bp, synthetic construct
  source 1..75: mol_type = other DNA
gggcggtattatgcgcgcgctacgtaccattccgcacctgtggcaaatttgcgaggacatgacggaagtctgccc

SEQ ID NO: 486832 - DNA, 75 bp, synthetic construct
  source 1..75: mol_type = other DNA
ggaattgacgaaatatatgcccttgttgacgatctgattgccgcccacggcgactggctgccaggctggttgcac

SEQ ID NO: 486833 - DNA, 75 bp, synthetic construct
  source 1..75: mol_type = other DNA
accaaagtcggtacgctaccgtcgcatctggcagccctgatgcaaaccaatatcaacgtacagacgctgcttacc

SEQ ID NO: 486834 - DNA, 75 bp, synthetic construct
  source 1..75: mol_type = other DNA
gaacattttcaggctcagcctccaccagtagcgatcactcacgtcagtatgggctcagcaccgatggcggttttg

SEQ ID NO: 486835 - DNA, 75 bp, synthetic construct
  source 1..75: mol_type = other DNA
ctcgttttgcgcattgctattaagcccctgtgccataagcgctgaacacgttgaatatgataatacctttttgat

SEQ ID NO: 486836 - DNA, 75 bp, synthetic construct
  source 1..75: mol_type = other DNA
tggggctagggatcaataccagtattggtgcctttgcggtagatattacacatgcccgtaccgaaattcctgacg

SEQ ID NO: 486837 - DNA, 75 bp, synthetic construct
  source 1..75: mol_type = other DNA
ttccggatgataaaacctatcaggggcaaagctatcgcctctcctggaacaaattattcgaaaataccaatacat

SEQ ID NO: 486838 - DNA, 75 bp, synthetic construct
  source 1..75: mol_type = other DNA
cttatcatgaaaaccgaattgcactcgatattaacggtctggaaaatgacgttgaattgaaaagtaccagtgcta

SEQ ID NO: 486839 - DNA, 75 bp, synthetic construct
  source 1..75: mol_type = other DNA
tatggcgttactaatgcactttcgccataccatgaaaaccgaattgcactcgatattaacggtctcgaaaatgac

SEQ ID NO: 486840 - DNA, 75 bp, synthetic construct
  source 1..75: mol_type = other DNA
ctgatataaaagacgagaatgccatccttcttcaacgagaagaagagctaggggactgtctcgatctggggaatg

SEQ ID NO: 486841 - DNA, 75 bp, synthetic construct
  source 1..75: mol_type = other DNA
cacgtagcgggtccgttgttttgacccgttttgaaactgacgaagggcgttctgccgtgctgaatattacctcca

SEQ ID NO: 486842 - DNA, 75 bp, synthetic construct
  source 1..75: mol_type = other DNA
taactggacaacagataacggcagcgatttcgatttccaggatcgttacttacagcgtgacattccggcaatccg

SEQ ID NO: 486843 - DNA, 75 bp, synthetic construct
  source 1..75: mol_type = other DNA
ctgaacagcctgtcactttactcgccagagaaggtgaagaagaggattgtctggatctggcaaagtcatacgaaa

SEQ ID NO: 486844 - DNA, 75 bp, synthetic construct
  source 1..75: mol_type = other DNA
cgatagctttagcgactccgacacgcttgccgttgtacaagcccctggagcaaaaggtgcgcgcattaactatgg

SEQ ID NO: 486845 - DNA, 75 bp, synthetic construct
  source 1..75: mol_type = other DNA
agttacgaatctccctggggaacgcttgctggttccgtttccgcaagtagcgataacagtcgtcaattctcgctt

SEQ ID NO: 486846 - DNA, 75 bp, synthetic construct
  source 1..75: mol_type = other DNA
taacgatagtgtctatggcgcatttaactcaggtatcaatttaggtgcctggcatttccgtgcgcgcggcaacta

SEQ ID NO: 486847 - DNA, 75 bp, synthetic construct
  source 1..75: mol_type = other DNA
cgatcaaagtgatggatctcttaatgatgctggaagacagattcgatatttccattcctattaatattctgctgg

SEQ ID NO: 486848 - DNA, 75 bp, synthetic construct
  source 1..75: mol_type = other DNA
gttggatattgacccttcggctacggctgaaatttacggtgattatgatgcatcagacgcaggatatgacgccgg

SEQ ID NO: 486849 - DNA, 75 bp, synthetic construct
  source 1..75: mol_type = other DNA
aacaagagtgtgaagctctgttggtcgacttccctgaacaggaaaaagagctaagggaattatcggcgtggatgg

SEQ ID NO: 486850 - DNA, 75 bp, synthetic construct
  source 1..75: mol_type = other DNA
aacaggaatgcgaagctctgttggttgacttccctgaacaggaaaaagagctacgggaattgtcggcgtggatgg

SEQ ID NO: 486851 - DNA, 75 bp, synthetic construct
  source 1..75: mol_type = other DNA
gctgatatctacggtgattatgacgcgggggataccggttttgatgctgtagatgacgagattgcgatagaccag

SEQ ID NO: 486852 - DNA, 75 bp, synthetic construct
  source 1..75: mol_type = other DNA
tgtgatgaaatgggggaaatgatccctaaaagcagcgaaaaagcccaacgaaacaagggatcattgcaaatgatc

SEQ ID NO: 486853 - DNA, 75 bp, synthetic construct
  source 1..75: mol_type = other DNA
gtatcgcattggcgctgacgcacgcgccgccagagttatcgccgccgctatacgtatgcgtgagcgcgaggagct

SEQ ID NO: 486854 - DNA, 75 bp, synthetic construct
  source 1..75: mol_type = other DNA
aacaagagtgtgaagcgctgttggttgacttccctgaacaggaaaaagagctacgggagttgtcgacgtggatag

SEQ ID NO: 486855 - DNA, 75 bp, synthetic construct
  source 1..75: mol_type = other DNA
cctgctttacctttatggctggcaagccggagtacgataaaaccatctccacgtcgattgtgctcaatgcgctga

SEQ ID NO: 486856 - DNA, 75 bp, synthetic construct
  source 1..75: mol_type = other DNA
gcgtgaccaatctgaccgaattgctaccgggaattacccatgagcaaatttgcgaggccataaccgaggcttttt

SEQ ID NO: 486857 - DNA, 75 bp, synthetic construct
  source 1..75: mol_type = other DNA
aacaagagtgcgaagctctgctggtcgacttccctgaacaggaaaaagagctacgggaattgtcggcgtggatgg

SEQ ID NO: 486858 - DNA, 75 bp, synthetic construct
  source 1..75: mol_type = other DNA
tcgcccattatggcgagcgcgtggaagcggaaatcatctccccggacaaaacgccagacttgccaaacttcgccg

SEQ ID NO: 486859 - DNA, 75 bp, synthetic construct
  source 1..75: mol_type = other DNA
tgaacgcgcttggcgtcagcgccgaagcgtccgggcgtaacgatctggtggtgaaaaccgccgaaggcgaccgca

SEQ ID NO: 486860 - DNA, 75 bp, synthetic construct
  source 1..75: mol_type = other DNA
agagataataacggaccggcccgggaggcatggaaatgtgatgatggcgtgatttactggaaaaatcgcacctga

SEQ ID NO: 486861 - DNA, 75 bp, synthetic construct
  source 1..75: mol_type = other DNA
gaagatttcccggcgtttatccttgtggatgataaaggaaatgacttcttccagcagatacaactcacacaatgc

SEQ ID NO: 486862 - DNA, 75 bp, synthetic construct
  source 1..75: mol_type = other DNA
cagccggtattactgaacaacaggccacgcgctggtattcacatatctccgcagccatgaaagagtttggcatta

SEQ ID NO: 486863 - DNA, 75 bp, synthetic construct
  source 1..75: mol_type = other DNA
gaaaaactgacggcgctcccttctctttcgggcttccttgcggtcggatatctggcgctgttcggctcgatcatc

SEQ ID NO: 486864 - DNA, 75 bp, synthetic construct
  source 1..75: mol_type = other DNA
ctcacccagggacaggctaatgcactggggcgccgtgctggtgaaccaccattgccacttgagcgccagcgcgcg

SEQ ID NO: 486865 - DNA, 75 bp, synthetic construct
  source 1..75: mol_type = other DNA
ctccagcaaaggctgcatgaagtataccggagatattgcacgtgtaactctgcttatcaatggtggccggaacgg

SEQ ID NO: 486866 - DNA, 75 bp, synthetic construct
  source 1..75: mol_type = other DNA
ggggtatatcctgccagaattaatatagcgcccggagatacccgcccgggcagtaaactcagactgatgagcatg

SEQ ID NO: 486867 - DNA, 75 bp, synthetic construct
  source 1..75: mol_type = other DNA
ttaatggcctttttactgctgcgtgggcacaaattgccgccactgcgtcccctgcttaatgccgcgttgattggt

SEQ ID NO: 486868 - DNA, 75 bp, synthetic construct
  source 1..75: mol_type = other DNA
gcgaataatgacgattgcagagcgaattcataatgatggatatataaaaggggaacagcgcattcttcgattgtt

SEQ ID NO: 486869 - DNA, 75 bp, synthetic construct
  source 1..75: mol_type = other DNA
tatatttacgtagtgattgaacatcagagccgcgaggatattcatatggcgtttcgcctgatgcgatattccatg

SEQ ID NO: 486870 - DNA, 75 bp, synthetic construct
  source 1..75: mol_type = other DNA
cggtaatttaagcggcaatccgtggggcgcgatcctgattttgatcgggtctgtgagttgggcatttggttcagt

SEQ ID NO: 486871 - DNA, 75 bp, synthetic construct
  source 1..75: mol_type = other DNA
gagacgctgtcgaagattgaatggctggcgctcggcgtaattgttttcgcggtggtactggtcacgttgggaaaa

SEQ ID NO: 486872 - DNA, 75 bp, synthetic construct
  source 1..75: mol_type = other DNA
ttcgattatcgccattaacgcttatatgtatttaatccgtaatgtcagtccggctctcgccaccagctacgccta

SEQ ID NO: 486873 - DNA, 75 bp, synthetic construct
  source 1..75: mol_type = other DNA
tgatgatcccctggcaaaacgagcacatgcccatatgaaggccggttctttaaccggcctttctgttggctacat

SEQ ID NO: 486874 - DNA, 75 bp, synthetic construct
  source 1..75: mol_type = other DNA
cagccggtattactgaacaactggccacgcgctggtacccacacatcaccgcagccatgaatgagtttggcatta

SEQ ID NO: 486875 - DNA, 75 bp, synthetic construct
  source 1..75: mol_type = other DNA
atcgaaccactggacaccctccggaagattgtcaccgaccaggacatgccggacgaagtgcgcgccaaattatgc

SEQ ID NO: 486876 - DNA, 75 bp, synthetic construct
  source 1..75: mol_type = other DNA
cacgcccatatgaaggccggttctttaaccggcctttctgttggctacatcctgaaagactgggagtacgaccgg

SEQ ID NO: 486877 - DNA, 75 bp, synthetic construct
  source 1..75: mol_type = other DNA
ttaagcggcaatccgtggggcgcgattctgattttaatcggctcgattagctgggcgtttggctcggtttatggc

SEQ ID NO: 486878 - DNA, 75 bp, synthetic construct
  source 1..75: mol_type = other DNA
ttgatggcctttttattgttgcgtggacataaattgccgccactgcgcccactgctcaacgccgcgctgattggc

SEQ ID NO: 486879 - DNA, 75 bp, synthetic construct
  source 1..75: mol_type = other DNA
tctgctggcttgatgaatttgcggagccaactatagcccgcaaaatttattcatcggcttttccgctggtggata

SEQ ID NO: 486880 - DNA, 75 bp, synthetic construct
  source 1..75: mol_type = other DNA
ttttttacgtcctgattcagacctcctttcaaatgaatgcccaacgcttaattcacacctacacctttctctaca

SEQ ID NO: 486881 - DNA, 75 bp, synthetic construct
  source 1..75: mol_type = other DNA
agatgtgggctatctcactccagccagagccaccaactcagggctgaacgtaaaaaacacgcgacgacggtttac

SEQ ID NO: 486882 - DNA, 75 bp, synthetic construct
  source 1..75: mol_type = other DNA
atgcagacgaaacaacgtcttgatgtaccgctgagtctgaaatctgtcagtgactccggtgagtttgaagggtat

SEQ ID NO: 486883 - DNA, 75 bp, synthetic construct
  source 1..75: mol_type = other DNA
ctgcctgtatgctgacttttgcccttagtgcctgttccggttcaaactatgtcatgcacaccaacgatggacgca

SEQ ID NO: 486884 - DNA, 75 bp, synthetic construct
  source 1..75: mol_type = other DNA
cgcatgatgcggtatttaaatcctttttacgccatccggacaccgcgcgggattttattgatattcaccttcccg

SEQ ID NO: 486885 - DNA, 75 bp, synthetic construct
  source 1..75: mol_type = other DNA
atcagtctagccgaagtaaaaagcgcgctggatgcttcaaaccaggaagcgggtggttcgtcgatcgaactggcg

SEQ ID NO: 486886 - DNA, 75 bp, synthetic construct
  source 1..75: mol_type = other DNA
agggtgggatcagggggaatacgtggtttatccggcaacgttaagcgggacggaaacccacagcgcaacattcag

SEQ ID NO: 486887 - DNA, 75 bp, synthetic construct
  source 1..75: mol_type = other DNA
tcggtttaagggggagccgctcgacatcttccgcaagcgggtgagttacgcatttatcaatgcgcagcaggccgg

SEQ ID NO: 486888 - DNA, 75 bp, synthetic construct
  source 1..75: mol_type = other DNA
ccggtctgaaattgccgtcgtggctgaacaaaggcgaccccgccaggctgttgcgtggcagcgtgaagttctggt

SEQ ID NO: 486889 - DNA, 75 bp, synthetic construct
  source 1..75: mol_type = other DNA
acgaaatcaaagtttacaatgaatctaccagattattccttgtgaagtcattttattgctatgagctttatatca

SEQ ID NO: 486890 - DNA, 75 bp, synthetic construct
  source 1..75: mol_type = other DNA
tgctggtgcagatccccttcctgaatcaaaagctgtatcagggacccatttctgtcctgatggatggggcggata

SEQ ID NO: 486891 - DNA, 75 bp, synthetic construct
  source 1..75: mol_type = other DNA
tcctataaaattatcccttctgtaaaactggtaggagaaatatacaggcaaacaaccaacgttgaaaactattat

SEQ ID NO: 486892 - DNA, 75 bp, synthetic construct
  source 1..75: mol_type = other DNA
gcctggatgctcgctatccagtactgcgactatccattcgataaccataaagtaccatttaaagagatgcgcaca

SEQ ID NO: 486893 - DNA, 75 bp, synthetic construct
  source 1..75: mol_type = other DNA
tctgttcacgatgatcccggtgctcaacctgttcatcatgccggtggccgtctgtggcgcgacagcaatgtgggt

SEQ ID NO: 486894 - DNA, 75 bp, synthetic construct
  source 1..75: mol_type = other DNA
cgctacaccgccagataccgggattttcggtatcatgaaagatgtgccgcgaatcatgaaacgcgaatggcaaaa

SEQ ID NO: 486895 - DNA, 75 bp, synthetic construct
  source 1..75: mol_type = other DNA
acaccatctggttaaccgcttcgctacaggcaggacattacggcctgtccgtggagcattacacattacaggcag

SEQ ID NO: 486896 - DNA, 75 bp, synthetic construct
  source 1..75: mol_type = other DNA
cgacgcagaaggcgaagcgcggttatacacctcaaagatgtaggcgttcgtttccggtgtgcggttgccccagaa

SEQ ID NO: 486897 - DNA, 75 bp, synthetic construct
  source 1..75: mol_type = other DNA
tgcaggactggtttctgaaatttgaactgaagaccatcccgaacgtggctgaggtagcctcggtcggtggcgtgg

SEQ ID NO: 486898 - DNA, 75 bp, synthetic construct
  source 1..75: mol_type = other DNA
ggactcagatgatgtatatcaccagccagcaacggttctttttgtcgtaaaaccatcggcgtggggacagcctcg

SEQ ID NO: 486899 - DNA, 75 bp, synthetic construct
  source 1..75: mol_type = other DNA
ttgacggagaaggctcgcttggtccgtgagcgctacgacctggcgacatatccgaccatctacgcgtacggagac

SEQ ID NO: 486900 - DNA, 75 bp, synthetic construct
  source 1..75: mol_type = other DNA
actgtgagagcaaattaaatgcacggaagcgccgccggatgaagcgggcagccgaacaagacgaaggcccgcaca

SEQ ID NO: 486901 - DNA, 75 bp, synthetic construct
  source 1..75: mol_type = other DNA
ggacgcgggcatcgcgatcgggcgctggcgcaactgctgtgccgcattacgggcgcggaagatgcctgcatcgtc

SEQ ID NO: 486902 - DNA, 75 bp, synthetic construct
  source 1..75: mol_type = other DNA
tggtggaaaaatcaaagccggaaaacgcgtcatcaggtggcgttgcaggtggcaatggcggaacaccttattgag

SEQ ID NO: 486903 - DNA, 75 bp, synthetic construct
  source 1..75: mol_type = other DNA
ggcgcatggagttcgctactggacatcatcccatcaatggcgaaagcccacgttagcgatgaagaacaccgcgca

SEQ ID NO: 486904 - DNA, 75 bp, synthetic construct
  source 1..75: mol_type = other DNA
tggcccgatgattgccggtcatcagggttacgtgctgatccagaccgacaactacaatattgaaaccagcgtcac

SEQ ID NO: 486905 - DNA, 75 bp, synthetic construct
  source 1..75: mol_type = other DNA
caaagaggtggtggtttctcgcggtgaactggtggagattggtggctcgtttcgtatccctgacgtaatgcgtca

SEQ ID NO: 486906 - DNA, 75 bp, synthetic construct
  source 1..75: mol_type = other DNA
gcggaagccgcggtggaagccgttgcgcaggctatgcgttcgccagtgaccctcgagtacgatctggacgacgcc

SEQ ID NO: 486907 - DNA, 75 bp, synthetic construct
  source 1..75: mol_type = other DNA
gcccagttttcgtactactacggcttcaacaactcttttaccgggtataccggtattcaggtaaccgataacaat

SEQ ID NO: 486908 - DNA, 75 bp, synthetic construct
  source 1..75: mol_type = other DNA
tctttgcgtgatacttatggtcacacccgcgtggtggaattgctgcgtcagatgcttgacgaagcgcgagaagtg

SEQ ID NO: 486909 - DNA, 75 bp, synthetic construct
  source 1..75: mol_type = other DNA
tatgacggacgattgtggctggatttacgctgccttgaagatgagcaacggtttttggagatgttgttgaaatga

SEQ ID NO: 486910 - DNA, 75 bp, synthetic construct
  source 1..75: mol_type = other DNA
tgatgttggcggccactgccagcggtaaagaggtggtggtgtctcgtggcgaactggtggagatcggcggcgcgt

SEQ ID NO: 486911 - DNA, 75 bp, synthetic construct
  source 1..75: mol_type = other DNA
atgctaaaagtgttattgctctttgtgttgctgattgcggggatcgtggttggcccgatgattgccggtcatcag

SEQ ID NO: 486912 - DNA, 75 bp, synthetic construct
  source 1..75: mol_type = other DNA
gtaataaccagcatgagtcactgcttggcgtgtatcgctcaccgtcaccgcgttatatctgggcggcggcactga

SEQ ID NO: 486913 - DNA, 75 bp, synthetic construct
  source 1..75: mol_type = other DNA
ccggcggcgccggcgcgccggattttgttgatgcccttggcaacctgcaggataagacctttgattttgtcatca

SEQ ID NO: 486914 - DNA, 75 bp, synthetic construct
  source 1..75: mol_type = other DNA
ggaggaagactccgattccatggtggctgcaaccggcaccattaaagtaagcagcgcaccgacggcaaccggagt

SEQ ID NO: 486915 - DNA, 75 bp, synthetic construct
  source 1..75: mol_type = other DNA
tgcgctgaactcgtcgaatatgaccatacatttctgatgggaaacgatgcttcaaatatcgaccttagtcggtat

SEQ ID NO: 486916 - DNA, 75 bp, synthetic construct
  source 1..75: mol_type = other DNA
tatacagcggatcgtggtaaggaagcgaaagaacagattcttagtgaacatgggatctcaatcgcccaattctat

SEQ ID NO: 486917 - DNA, 75 bp, synthetic construct
  source 1..75: mol_type = other DNA
ggctgaactatctcgggtcatccggcggcgagtccaccccggacggcctgacgctgaccatcacggcgatgagtg

SEQ ID NO: 486918 - DNA, 75 bp, synthetic construct
  source 1..75: mol_type = other DNA
gtagataagttgctggaagtcacgccacgccatcctgaagtgctgcgtctggcggaacaagcttatatccgcacc

SEQ ID NO: 486919 - DNA, 75 bp, synthetic construct
  source 1..75: mol_type = other DNA
tgttggtgatgaagaacatcgcgcaatgctggaacaacaggcatggattggcctgatggatcaggctcgtgccga

SEQ ID NO: 486920 - DNA, 75 bp, synthetic construct
  source 1..75: mol_type = other DNA
gcaatggtggtgctgtttgctatcgagtggctactgcgacggattttccgcaccggcgcgcacacccgcggttgg

SEQ ID NO: 486921 - DNA, 75 bp, synthetic construct
  source 1..75: mol_type = other DNA
atgcatttcacaacttttctaaaaaaacatttcgatatagaaaaagtcgttggtacttctgattctggaaatgat

SEQ ID NO: 486922 - DNA, 75 bp, synthetic construct
  source 1..75: mol_type = other DNA
cggggtgatgttccaagcgatcaaggcagtcattatacgagcaggcagttccggcagttactgtggcgataccgg

SEQ ID NO: 486923 - DNA, 75 bp, synthetic construct
  source 1..75: mol_type = other DNA
gtggataagctgctggaagttacgccacgccatccggaagtattacgtctggcggaacaggcgtatatccgcact

SEQ ID NO: 486924 - DNA, 75 bp, synthetic construct
  source 1..75: mol_type = other DNA
agaacggctgcgtattgccctgctgaatgtggattacgtcaccagttttgaactgccttttcgtctgcttttaac

SEQ ID NO: 486925 - DNA, 75 bp, synthetic construct
  source 1..75: mol_type = other DNA
ttgctgcgctgcgtgaagaatggggcatcagccagaaaaatgtggtgttcaacgataaacgttttggctgcgtgt

SEQ ID NO: 486926 - DNA, 75 bp, synthetic construct
  source 1..75: mol_type = other DNA
gaatgaatctccacgtcttcgccggcagtggcaggatgttctggaggagtgccggcagacagaggccgggccaga

SEQ ID NO: 486927 - DNA, 75 bp, synthetic construct
  source 1..75: mol_type = other DNA
gtttggctgcgtgtacagcctgaaggccagtctttctggtgtgccggatacattccggtatcatctgtctcatcg

SEQ ID NO: 486928 - DNA, 75 bp, synthetic construct
  source 1..75: mol_type = other DNA
tgccttttcgcttgttgcttacccgtacaccacaactgattgctgcgctgcgtgaagaatggggaatcagccaga

SEQ ID NO: 486929 - DNA, 75 bp, synthetic construct
  source 1..75: mol_type = other DNA
cgtcgcgtggttgggaatgaaaacacatcattgccatatcagcaggttgcccgggaagtgaaagcgccccgtgaa

SEQ ID NO: 486930 - DNA, 75 bp, synthetic construct
  source 1..75: mol_type = other DNA
tgccggatacataccggtatcatctgtctcatcgtattcgccgggtggttgggagtgaaaagacatcatcgccat

SEQ ID NO: 486931 - DNA, 75 bp, synthetic construct
  source 1..75: mol_type = other DNA
tgccggatacataccggtatcatctgtctcatcgtattcgccgggtgcttgggactgaaaagacatcatcgccat

SEQ ID NO: 486932 - DNA, 75 bp, synthetic construct
  source 1..75: mol_type = other DNA
tgccggatacataccggtatcatctgtctcatcgtattcgccgggtgtttgggattgaaaagacatcatcgccat

SEQ ID NO: 486933 - DNA, 75 bp, synthetic construct
  source 1..75: mol_type = other DNA
ctgtctcaccgtattcgccgggtggttgcgaatgaaagcacatcatcgccatatcagcaggttgctcgagaagtg

SEQ ID NO: 486934 - DNA, 75 bp, synthetic construct
  source 1..75: mol_type = other DNA
ggagggtttacccggttgcaggaaaacttcaactacagcgtatcagggttgtcaggtttcatccgtgccgggcgt

SEQ ID NO: 486935 - DNA, 75 bp, synthetic construct
  source 1..75: mol_type = other DNA
gtggattacggcaccagttttgaactgccttttcgcttgttgcttacccgtacaccacaactgattgctgcgctg

SEQ ID NO: 486936 - DNA, 75 bp, synthetic construct
  source 1..75: mol_type = other DNA
ctgcgtgaagaatggtgcatcagccagaaaaatgtggtgttcaacgataaacgctttggctgcgtgtacagcctg

SEQ ID NO: 486937 - DNA, 75 bp, synthetic construct
  source 1..75: mol_type = other DNA
ttcgtgagattgaagcagagtttccggtgtcgatcaccggaatgttaatggatgccatcgaagcacgtttacagc

SEQ ID NO: 486938 - DNA, 75 bp, synthetic construct
  source 1..75: mol_type = other DNA
taacgccagaaacgctggttacgcgcaataaagcgcagctaaaagcgttctgggagaaacacagcgacatcattc

SEQ ID NO: 486939 - DNA, 75 bp, synthetic construct
  source 1..75: mol_type = other DNA
caacggcgaatatgcctgggcggtggattccccccggaataccttcaatccactgcatcataaaaaagtgggatt

SEQ ID NO: 486940 - DNA, 75 bp, synthetic construct
  source 1..75: mol_type = other DNA
attaccgctttaggtttggcggcaaccgcaggactggcctggatagctaattatctcgaaattacggcaaccaaa

SEQ ID NO: 486941 - DNA, 75 bp, synthetic construct
  source 1..75: mol_type = other DNA
acccgtaccgtactgtctggcgcgtattccgcaaggtggcgaaactcgtggcaacctggccgccggtggtcgcgg

SEQ ID NO: 486942 - DNA, 75 bp, synthetic construct
  source 1..75: mol_type = other DNA
ctgtttaccgcctggttctctgacttaacaccggaaacgctggtcacgcgcaataaagcacagttgaaagcgttc

SEQ ID NO: 486943 - DNA, 75 bp, synthetic construct
  source 1..75: mol_type = other DNA
tggaaacagcgaagtaaaacctatcgtagaatcaatagtttatgaaggaatcttaaaatttttcgaagaaaatcc

SEQ ID NO: 486944 - DNA, 75 bp, synthetic construct
  source 1..75: mol_type = other DNA
agtttggacataagcaaccagaaactggtgtatgtcttccaaacgtagctctttacgcggcaggctaccggaaat

SEQ ID NO: 486945 - DNA, 75 bp, synthetic construct
  source 1..75: mol_type = other DNA
gcaattcacgttctcgtcgtcgtgagcgtttaaaggcaaaggcattagctaacggcgtactggcccgcgaagaag

SEQ ID NO: 486946 - DNA, 75 bp, synthetic construct
  source 1..75: mol_type = other DNA
ctcaatcctcatttacaaaatgatgcagccttaaaaacgcagggaattgtgctgatcgatgaagttgatatgttc

SEQ ID NO: 486947 - DNA, 75 bp, synthetic construct
  source 1..75: mol_type = other DNA
cactcaaattcaatttaacataatatacattatgcgcaccaacataaaccaagggagaatccagtcgttggcggt

SEQ ID NO: 486948 - DNA, 75 bp, synthetic construct
  source 1..75: mol_type = other DNA
attaaaccggatagcggaacagtcaacatctctgcatcacagtgtgccatggtgtttcaggaaccacgtttatta

SEQ ID NO: 486949 - DNA, 75 bp, synthetic construct
  source 1..75: mol_type = other DNA
tgccggatacataccggtatcatctgtctcatcgtattcgccgggtgattgggaatgaaaagacatcatcgccat

SEQ ID NO: 486950 - DNA, 75 bp, synthetic construct
  source 1..75: mol_type = other DNA
gaaagcacatcatcgccatatcagcaggttgcccgggaagtgaaagcgccccgtgaacggctgaagtatgcactg

SEQ ID NO: 486951 - DNA, 75 bp, synthetic construct
  source 1..75: mol_type = other DNA
tactcaaagagcgtcaggaagatggtctggtgctttattcgccgggactggtgcatccactgaaagtcgatgcgg

SEQ ID NO: 486952 - DNA, 75 bp, synthetic construct
  source 1..75: mol_type = other DNA
ggggcgtatcgccattatgaatcgtgggaaatttgtccagattggcgagccggaagagatctacgagcatccgac

SEQ ID NO: 486953 - DNA, 75 bp, synthetic construct
  source 1..75: mol_type = other DNA
atagaagattgtatgcctatgatattttgcagaaaaaacagtctgacatacctgaaaggattaacggttattttc

SEQ ID NO: 486954 - DNA, 75 bp, synthetic construct
  source 1..75: mol_type = other DNA
caggaggtggaattaaagaatgcgatggatggtatatttacgaaaaaataattgatgataattttgccatagtca

SEQ ID NO: 486955 - DNA, 75 bp, synthetic construct
  source 1..75: mol_type = other DNA
ccgtattcgtcgcgtggttgggaatgaaaacacatcattgccatatcagcaggttgcccgggaagtgaaagcgcc

SEQ ID NO: 486956 - DNA, 75 bp, synthetic construct
  source 1..75: mol_type = other DNA
aggcgaaaacccgtaaggcgctgacgccgctattagaaatccgcaatctgaccaaatcctacgatggtcagcacg

SEQ ID NO: 486957 - DNA, 75 bp, synthetic construct
  source 1..75: mol_type = other DNA
aaaatcatgctttgcgaagagccgcccgccaatggttgtaacttcgcggtgggggaggtgatacacattgcctat

SEQ ID NO: 486958 - DNA, 75 bp, synthetic construct
  source 1..75: mol_type = other DNA
tcggcctggtgcacatgcaggagttcgccaaacgcaaaccgcatcagctttccggtggtcagcgacagcgtgtgg

SEQ ID NO: 486959 - DNA, 75 bp, synthetic construct
  source 1..75: mol_type = other DNA
tcaaagagcgtcaggaagatggcctggtgcttgattcgccggggctggtgcatccactgaaagtcgatgcggatg

SEQ ID NO: 486960 - DNA, 75 bp, synthetic construct
  source 1..75: mol_type = other DNA
ggttcagttaacgtctttgaagggctgctaaaagagcgccaggaagacggactattgctctattcgccggggctg

SEQ ID NO: 486961 - DNA, 75 bp, synthetic construct
  source 1..75: mol_type = other DNA
catcaatatgatgtttcagtcttacgcattgtttccccatatgactgtggagcagaacatcgcctttggcctgaa

SEQ ID NO: 486962 - DNA, 75 bp, synthetic construct
  source 1..75: mol_type = other DNA
agtgatattaccaaagaaaagatttgcgagaaatataaatcgaccattgaggcgtttaaaaaagagcaactagcg

SEQ ID NO: 486963 - DNA, 75 bp, synthetic construct
  source 1..75: mol_type = other DNA
ggtgaaccgcataaaccaggatgcgttgtcggcgagcctggagagattaaaaaggttgtggtgaaggttaaggct

SEQ ID NO: 486964 - DNA, 75 bp, synthetic construct
  source 1..75: mol_type = other DNA
tgggtaacaatattaatggcacgccggtcaactataaggtttatatgaccagcgacgtcaacgcatgggcgatgg

SEQ ID NO: 486965 - DNA, 75 bp, synthetic construct
  source 1..75: mol_type = other DNA
agaaaaatgtggtgttcaacgataaacggtttggctgcgtgtacagcctgaaggccagtctttctggtgtaccgg

SEQ ID NO: 486966 - DNA, 75 bp, synthetic construct
  source 1..75: mol_type = other DNA
tgccggatacataccggtatcatctgtctcatcgtattcgccggctggttgggactgaaaagacatcatcgccat

SEQ ID NO: 486967 - DNA, 75 bp, synthetic construct
  source 1..75: mol_type = other DNA
tgccggatacataccggtatcatctgtctcatcgtattcgccggatggttgggaatgaaaagacatcatcgccat

SEQ ID NO: 486968 - DNA, 75 bp, synthetic construct
  source 1..75: mol_type = other DNA
tgaagagttccaccatgaagatgattaccagctttgcagcgccattgagaatgagcaaaccatcatcctgaaacc

SEQ ID NO: 486969 - DNA, 75 bp, synthetic construct
  source 1..75: mol_type = other DNA
atacccatctttgtgaaaataaagatgaaattgcctgggtcaaatcgctttatcctgaccatgatggttatctgg

SEQ ID NO: 486970 - DNA, 75 bp, synthetic construct
  source 1..75: mol_type = other DNA
atggcgatggcgcaacgcctgaaagaagaatatccggatacgtgggtacatacccatctctgtgaaaacaaagat

SEQ ID NO: 486971 - DNA, 75 bp, synthetic construct
  source 1..75: mol_type = other DNA
atgttacccaggatcagacacaataattttattggtgcggtggagttattcgtaaaatcatcgcatacaaaaata

SEQ ID NO: 486972 - DNA, 75 bp, synthetic construct
  source 1..75: mol_type = other DNA
cttcgggaagaatggggcctcagccagaaaaatgtggtgttcaacgataaacgttttggctgcgtgtacagcctg

SEQ ID NO: 486973 - DNA, 75 bp, synthetic construct
  source 1..75: mol_type = other DNA
atgtttatcatcagtacggtctgacgggtaaaaactgcgtctttgctcactgcgtccacctggaagaaaaagagt

SEQ ID NO: 486974 - DNA, 75 bp, synthetic construct
  source 1..75: mol_type = other DNA
gctatcaccaaagcaaagaactgattgaacgctggcacaaaaatggtcgtctgctatatgcgattacgccacgct

SEQ ID NO: 486975 - DNA, 75 bp, synthetic construct
  source 1..75: mol_type = other DNA
cacacgtactttacaactgtttctgacgctggtggcggtgatttcgctggtggtgggcggtattggtgtaatgaa

SEQ ID NO: 486976 - DNA, 75 bp, synthetic construct
  source 1..75: mol_type = other DNA
gtgtcttgaaaacggttgaaaagactacacgtacattacaactgtttttgacgctggtagcggtgatttctctgg

SEQ ID NO: 486977 - DNA, 75 bp, synthetic construct
  source 1..75: mol_type = other DNA
tcagtgaagggaatacgtttaatcaggagcaattgaatggccgtgcccaggtggtggttcttgacagtaattcgc

SEQ ID NO: 486978 - DNA, 75 bp, synthetic construct
  source 1..75: mol_type = other DNA
atacgcacggcatccagctgagaaagcacatcacaagcggagcaaggagcaatggactgctcaatatcagtaagg

SEQ ID NO: 486979 - DNA, 75 bp, synthetic construct
  source 1..75: mol_type = other DNA
tttccccggagaggtttatcagatcgatattggctgcgataaattactgactattaaaaatgctctttcatgggt

SEQ ID NO: 486980 - DNA, 75 bp, synthetic construct
  source 1..75: mol_type = other DNA
actggatcccaaaaccatggtgaacaacattgaccattctctggcaaatgaaggtattccctctgcccctgacct

SEQ ID NO: 486981 - DNA, 75 bp, synthetic construct
  source 1..75: mol_type = other DNA
gttgagtggaagactttgggggaaattggtgagtttattcgtggaaaacgttttactaaagcagattatgtagaa

SEQ ID NO: 486982 - DNA, 75 bp, synthetic construct
  source 1..75: mol_type = other DNA
ggactctggataagtttactgcacttaccgctgagcttaccgctgagcttaccgctgagcttaacatgcgtaaaa

SEQ ID NO: 486983 - DNA, 75 bp, synthetic construct
  source 1..75: mol_type = other DNA
ttgtatgctggagctgcaaatcaatgcctactgggccacgcgtcccagtcatttcgtgttattgaacgcgcaaaa

SEQ ID NO: 486984 - DNA, 75 bp, synthetic construct
  source 1..75: mol_type = other DNA
taaccaggttattcgcctgcaggaatttactgtcaaaaacggcaacactacctatcaagtgtcagccggaacgaa

SEQ ID NO: 486985 - DNA, 75 bp, synthetic construct
  source 1..75: mol_type = other DNA
tccatatcccaaagatcacgaaaaatcacttaaggaacaagctcgtatcgtcgcaatactcgataaattcgacac

SEQ ID NO: 486986 - DNA, 75 bp, synthetic construct
  source 1..75: mol_type = other DNA
ctgacagagccaagattgagaaaccgagtctcaccatatctgcaagaggtactattggatggactagctatagaa

SEQ ID NO: 486987 - DNA, 75 bp, synthetic construct
  source 1..75: mol_type = other DNA
atgacagtaaaaaccaaacgtgcccgtttactggcacttacagaagaaggtaaagcgtgccaatgtttcacagta

SEQ ID NO: 486988 - DNA, 75 bp, synthetic construct
  source 1..75: mol_type = other DNA
gaagcactggctggagggccaatcggtaaattacgcaccggggatattattgaaattaaaattgattgtcgcgag

SEQ ID NO: 486989 - DNA, 75 bp, synthetic construct
  source 1..75: mol_type = other DNA
cagcatgacaaagcgacggtgctggtgcccggtggcgcgacgctacccgcaagggatggggaggataacggcaag

SEQ ID NO: 486990 - DNA, 75 bp, synthetic construct
  source 1..75: mol_type = other DNA
caggcggttgtagtgggcggtgcgtgtgctttcggtagctggaaactgactacaaagaaaaatgaaaatagcacg

SEQ ID NO: 486991 - DNA, 75 bp, synthetic construct
  source 1..75: mol_type = other DNA
aacaggagtgcgaagcgctgttggttgacttcccggaccaggaaaaagagctacgggagttgtcggcatggatgg

SEQ ID NO: 486992 - DNA, 75 bp, synthetic construct
  source 1..75: mol_type = other DNA
caagccggagtacgataaaaccatctccacgtcgattgtgctcaatgcgctgaacgcgcttggcgtcagcgccga

SEQ ID NO: 486993 - DNA, 75 bp, synthetic construct
  source 1..75: mol_type = other DNA
tgaacgcgctcggcgtcagcgccgaagcgtccggacgtaacgatctggtggtgaaaaccgtcgaaggcgaccgca

SEQ ID NO: 486994 - DNA, 75 bp, synthetic construct
  source 1..75: mol_type = other DNA
ctcgctgagtgtgaaaaaggcgtaaaaagtgctgtggcgttaacgcctgcgctgcaaccaattgatggcgtggcg

SEQ ID NO: 486995 - DNA, 75 bp, synthetic construct
  source 1..75: mol_type = other DNA
ctcgtttattaattcggcaggccagtatcaactcgaggctaaaaaatacgttcgccgcgtcagagataaagtccc

SEQ ID NO: 486996 - DNA, 75 bp, synthetic construct
  source 1..75: mol_type = other DNA
ttatggcatctacggcattagtgaatccaatctctctgagtgtcaaaaaggaataaaaagagtcgtggcgttaac

SEQ ID NO: 486997 - DNA, 75 bp, synthetic construct
  source 1..75: mol_type = other DNA
ggtggcgcaggccaaagaagcggataaaggtggcatgaatttctcattcatccattcggcagaccaatatcagct

SEQ ID NO: 486998 - DNA, 75 bp, synthetic construct
  source 1..75: mol_type = other DNA
tattgaagaaagagaagggaaaacattccactactactctctggcagtcatgatttcagcgaaacaaattaataa

SEQ ID NO: 486999 - DNA, 75 bp, synthetic construct
  source 1..75: mol_type = other DNA
aagtcccgtactctgactgggataaagagcaacttcaggacgcaaactcaagctggatggtcgaagactctttcc

SEQ ID NO: 487000 - DNA, 75 bp, synthetic construct
  source 1..75: mol_type = other DNA
atcgaatctgatttgccgtaagcgtaaagccaatgccgtctgtaacacctgctccttgcagactaaattagagct

SEQ ID NO: 487001 - DNA, 75 bp, synthetic construct
  source 1..75: mol_type = other DNA
ggcgctcgaccctatctctaccgggcgtattgaagagctgatcaccgaactgaagcaggattacaccgtggtgat

SEQ ID NO: 487002 - DNA, 75 bp, synthetic construct
  source 1..75: mol_type = other DNA
actgattgtgggtgagccgacattcggtaaggggaccgtacagcagtatcgttctctgaatcgtatctacgatca

SEQ ID NO: 487003 - DNA, 75 bp, synthetic construct
  source 1..75: mol_type = other DNA
gagccggatccttatctggatgagacggtgaatatcgcactcgatctggcgaagcttgaaaaagccagacccgcg

SEQ ID NO: 487004 - DNA, 75 bp, synthetic construct
  source 1..75: mol_type = other DNA
ttggcagataaggcagaggctgcctatcaacgggggacgttgtggcctaagcgggtggcgttgatgaatgagtgg

SEQ ID NO: 487005 - DNA, 75 bp, synthetic construct
  source 1..75: mol_type = other DNA
taccacgctttaaaggtatcaattttgtattccctgccactcggaagggacaactctcggatacggctttactgg

SEQ ID NO: 487006 - DNA, 75 bp, synthetic construct
  source 1..75: mol_type = other DNA
cttctactacggcaaattccatgccctaaaaaacatcaacctggatatcgccaaaaaccaggttacggcgtttat

SEQ ID NO: 487007 - DNA, 75 bp, synthetic construct
  source 1..75: mol_type = other DNA
accgttttatcattatgatgacgttgacagggttggccctggtaatcatcgtgaaccgccccggaaatcctggag

SEQ ID NO: 487008 - DNA, 75 bp, synthetic construct
  source 1..75: mol_type = other DNA
tcttatggtcaggcattatctcgcatggacgaaataagctccttgaactgacaggaaaaagccatagtgaagaat

SEQ ID NO: 487009 - DNA, 75 bp, synthetic construct
  source 1..75: mol_type = other DNA
atgaaatcgtactcatcaaaaaacataactaatgattttcagtacgaggccaggatattaaatgccatatggctc

SEQ ID NO: 487010 - DNA, 75 bp, synthetic construct
  source 1..75: mol_type = other DNA
atgggtattaagggaatgtggaaagaccttcgcacttcaccggtggatacgctggtaagatggcaagaacaacgt

SEQ ID NO: 487011 - DNA, 75 bp, synthetic construct
  source 1..75: mol_type = other DNA
caacgaggaggcccagcttcttcaggggtggaaaaatggtggaggttccgaaaacgatgccggttatcagaatga

SEQ ID NO: 487012 - DNA, 75 bp, synthetic construct
  source 1..75: mol_type = other DNA
attatcgtcgtgttcagcactgcgggcgcgatgtttttaatcagtatgctggccggtttattatttaatgttgat

SEQ ID NO: 487013 - DNA, 75 bp, synthetic construct
  source 1..75: mol_type = other DNA
ttagcagaaaaagctgaagcagcttaccagcgtggtactttatggcctaagcgtgttgcgttaatggatgactgg

SEQ ID NO: 487014 - DNA, 75 bp, synthetic construct
  source 1..75: mol_type = other DNA
gtggctttgcgccacgctgacgacgccatgacctatggcgaattgcaacaggccacgatgcagatgtgtacttgg

SEQ ID NO: 487015 - DNA, 75 bp, synthetic construct
  source 1..75: mol_type = other DNA
gtcacatcagatattaacgtgccacgtattccatcgatgaaagccattctcggcgcgggtaaaaaaccggtgaac

SEQ ID NO: 487016 - DNA, 75 bp, synthetic construct
  source 1..75: mol_type = other DNA
caaacagaacgtaaacacatcattctcgataacgattcgccggaagcgattgccgagctggcggaacacctgaag

SEQ ID NO: 487017 - DNA, 75 bp, synthetic construct
  source 1..75: mol_type = other DNA
cactgcttcctttattactcaaatcggacgccggttcactggtctttacctcatcaagcgttggacgtcaggggc

SEQ ID NO: 487018 - DNA, 75 bp, synthetic construct
  source 1..75: mol_type = other DNA
aactggggcgcatatgcagcgtcgaaatttgccaccgaagggatgatgcaggtactggccgatgaatatcagcag

SEQ ID NO: 487019 - DNA, 75 bp, synthetic construct
  source 1..75: mol_type = other DNA
atgcgtgccagcgccttcccgacggaagatccgcagaaactcaaaacccccgctgatatcatgccactttacctc

SEQ ID NO: 487020 - DNA, 75 bp, synthetic construct
  source 1..75: mol_type = other DNA
tgaaaatccgccagtcgaaaccggagcatggaaagacgctgttgactgggttctcgaagaggcttgtcaggctgt

SEQ ID NO: 487021 - DNA, 75 bp, synthetic construct
  source 1..75: mol_type = other DNA
ggagcatcgagttccgttgtctgatgctgctgttgccctgttaaaggctttaccacgctttaagggtatcaattt

SEQ ID NO: 487022 - DNA, 75 bp, synthetic construct
  source 1..75: mol_type = other DNA
tgcgtttctatgaacaggttaagcgtgaaaatccgccagtcgaaaccggagcatggaaagacgctgttgactggg

SEQ ID NO: 487023 - DNA, 75 bp, synthetic construct
  source 1..75: mol_type = other DNA
ttcgcgtaccgccgcaaacagaacgtaagcacatcattatcgataacgattcgccggaggccattgccgagctgg

SEQ ID NO: 487024 - DNA, 75 bp, synthetic construct
  source 1..75: mol_type = other DNA
cggctcattgttgcagaactcgaaagtgcgcaaagacgtgctatcccgcgggccgcacagcctgtatttggtgca

SEQ ID NO: 487025 - DNA, 75 bp, synthetic construct
  source 1..75: mol_type = other DNA
caggttggtttactggtaggggaaattctgcagcttccggtaattaacgctgtcagcgccattcaacgtcagggc

SEQ ID NO: 487026 - DNA, 75 bp, synthetic construct
  source 1..75: mol_type = other DNA
cacgaaagtcgcctgaatattgagagtacagtaggaaaaggtacacgtttcagttttgttatcccggaacgttta

SEQ ID NO: 487027 - DNA, 75 bp, synthetic construct
  source 1..75: mol_type = other DNA
tggaaggcgcggtacgcgaaaaagcgttgcacaccatgcgcgagcagactcagcggatggaagggctggtgaagc

SEQ ID NO: 487028 - DNA, 75 bp, synthetic construct
  source 1..75: mol_type = other DNA
atggaaaccgtattacatgcactgaaagcgatgggaaaagccaattctgttgaactggcggcacgaattggaatc

SEQ ID NO: 487029 - DNA, 75 bp, synthetic construct
  source 1..75: mol_type = other DNA
gtgctggaacggctgtcgtggaaaaggctggtgctggagctgctactttgctgcctcccggctttcatcctgggt

SEQ ID NO: 487030 - DNA, 75 bp, synthetic construct
  source 1..75: mol_type = other DNA
cgggagctgtacaagcaccgggatattgttcgacagattgtcgattcatccggtcgtattgtgtcggaaaagtga

SEQ ID NO: 487031 - DNA, 75 bp, synthetic construct
  source 1..75: mol_type = other DNA
gccatcgtttactgaaacgcgagctgatgacctggttttaccatcgctgcatatggcaaaccgagagctgcgtcg

SEQ ID NO: 487032 - DNA, 75 bp, synthetic construct
  source 1..75: mol_type = other DNA
agaactggctgcgcgatttgatatcagtcgtgaagaagtgctgaacgagctgtgggaacttaaaaaggctggctt

SEQ ID NO: 487033 - DNA, 75 bp, synthetic construct
  source 1..75: mol_type = other DNA
atggagactgtttttgacgcactgaaagcgatgggaaaagccacgtcggtagaactggccgcgcgacttgatatc

SEQ ID NO: 487034 - DNA, 75 bp, synthetic construct
  source 1..75: mol_type = other DNA
gcactcgcaaggttgcttccacgctggcggtggtaaccgcaacgggacgcctggcacgcgtaaatcagaacggta

SEQ ID NO: 487035 - DNA, 75 bp, synthetic construct
  source 1..75: mol_type = other DNA
aggaacagccagcgccagaagaacagccggaagaaaccaccacggcgacagtggcgaaaatctcagagtacgatt

SEQ ID NO: 487036 - DNA, 75 bp, synthetic construct
  source 1..75: mol_type = other DNA
gttgccgattggcatgtgctttaccttgagcggtctggtgctgctggcgctggcgggcagttttggcgcagttct

SEQ ID NO: 487037 - DNA, 75 bp, synthetic construct
  source 1..75: mol_type = other DNA
aagtagcttcaacgctggcaatggcaatcagcaagggacgtctgattcgcgtaaatcagaacggtaaatttcgtt

SEQ ID NO: 487038 - DNA, 75 bp, synthetic construct
  source 1..75: mol_type = other DNA
acgcgttaatcagaacggtaaatttcgttactgcatgccgggcgataatttaccagcagagccgaaagccgcgct

SEQ ID NO: 487039 - DNA, 75 bp, synthetic construct
  source 1..75: mol_type = other DNA
gaatttaccagcagaactgaaagccgcatcggtagcggaaactgatggtaaagcctttcctcagccagcgggggt

SEQ ID NO: 487040 - DNA, 75 bp, synthetic construct
  source 1..75: mol_type = other DNA
tctgtgctgcgctgcgtgagctgaacaagcaccaggatattgttcgacagattactgattcatcctgttgtgttg

SEQ ID NO: 487041 - DNA, 75 bp, synthetic construct
  source 1..75: mol_type = other DNA
ttcaccagaaagcatccggatagtctgattttaccatcgctgcatgtggctaaccgcgaactgcgccgggcaaaa

SEQ ID NO: 487042 - DNA, 75 bp, synthetic construct
  source 1..75: mol_type = other DNA
accgcgaactgcgtagggcgaagaatcatgtccagaagtgggagcgagtctgcgccgcgctgcgggagctgaaca

SEQ ID NO: 487043 - DNA, 75 bp, synthetic construct
  source 1..75: mol_type = other DNA
gcatcggtagcggaaactgatggtaaagcctttcctcagccagcgggggttgcgttaccagtacaggaggttgca

SEQ ID NO: 487044 - DNA, 75 bp, synthetic construct
  source 1..75: mol_type = other DNA
ctggtgcgcgtgtctatcaagggaaaattccgttataaagtgcctgacgtcgaaaacggcgatttgagcgcgtca

SEQ ID NO: 487045 - DNA, 75 bp, synthetic construct
  source 1..75: mol_type = other DNA
gaaattaaaacagaaactgtggcggacattgagcagtcgttgtcattgctcaccgaaatgcaagcggatggcctg

SEQ ID NO: 487046 - DNA, 75 bp, synthetic construct
  source 1..75: mol_type = other DNA
tactgaaacgcgagcggatgacctggttttaccatcgctgcatatggcaaaccgcgaactgcgtcgggcgaaaaa

SEQ ID NO: 487047 - DNA, 75 bp, synthetic construct
  source 1..75: mol_type = other DNA
aagcaatgggaaaagccacatccatagaacttgcggcgcgacttgatatcagtcgtgaagaagtgcttaacgaac

SEQ ID NO: 487048 - DNA, 75 bp, synthetic construct
  source 1..75: mol_type = other DNA
gatgacctggttttaccatcgctgcatatggcaaaccgcgaattgcgtcgggcgaaaaatcatgttcagaagtgg

SEQ ID NO: 487049 - DNA, 75 bp, synthetic construct
  source 1..75: mol_type = other DNA
agtacaggaggctgcaacacaggaagatattaaaacagaaacggtggcggacattgtgcagtcgcttgagaagcg

SEQ ID NO: 487050 - DNA, 75 bp, synthetic construct
  source 1..75: mol_type = other DNA
tgcgccgcgctgcgtgagctgaacaagcaccaggatattgttcgacagattacggattcttaccgccgtgttgca

SEQ ID NO: 487051 - DNA, 75 bp, synthetic construct
  source 1..75: mol_type = other DNA
tttaccggaacaaccgcgatctgcatgacttgctggtggattactacgtgctggggaaaacgtttatggcgctgg

SEQ ID NO: 487052 - DNA, 75 bp, synthetic construct
  source 1..75: mol_type = other DNA
taccgttttctgacgtccgcgaggagctgccgcgcggcacgtttgcttataccgatgttccgacgatgattattc

SEQ ID NO: 487053 - DNA, 75 bp, synthetic construct
  source 1..75: mol_type = other DNA
gcgctattatcgctaagggcagtataaaagatgtcctcaattaccttggtttgggggaaggctcggcgctgcccg

SEQ ID NO: 487054 - DNA, 75 bp, synthetic construct
  source 1..75: mol_type = other DNA
acgatgcttcggttgaggaaattattcaggcacttactgacatctgtgtggatgacatagagtcattaagtcatg

SEQ ID NO: 487055 - DNA, 75 bp, synthetic construct
  source 1..75: mol_type = other DNA
cccattgctgccggatttaagggactgatccccgaaaaagtaaaatcacgtccacagtgctgtgacgatgatgcg

SEQ ID NO: 487056 - DNA, 75 bp, synthetic construct
  source 1..75: mol_type = other DNA
atgcacagtcagttaagagaacgtatccggttgatgcgcgcaaggctggataacgtcgcgccggttgctgaaatc

SEQ ID NO: 487057 - DNA, 75 bp, synthetic construct
  source 1..75: mol_type = other DNA
gcggactggtccggtatctgcgggaaaattttaacggtgtcagggtgcagcatggtgacttcatggcatggcagc

SEQ ID NO: 487058 - DNA, 75 bp, synthetic construct
  source 1..75: mol_type = other DNA
agccggattatcatgaatccgccgttcagccacgggcaggatatccggcatatcctgcgggccttttccctgctg

SEQ ID NO: 487059 - DNA, 75 bp, synthetic construct
  source 1..75: mol_type = other DNA
tatctgcgggaaaattttaacggtgtcagggtacagtgtggcgacttcatggaatggcagccggtgcagtattac

SEQ ID NO: 487060 - DNA, 75 bp, synthetic construct
  source 1..75: mol_type = other DNA
ggtgacgctggcggagatcagcaaccgagagcacattctggaaccatctgccggcaccggggccatactgcgggc

SEQ ID NO: 487061 - DNA, 75 bp, synthetic construct
  source 1..75: mol_type = other DNA
atggttatctgtggttgcatggctcgtctgaaaaagaacaaccgtgacttgcatgatctgctcgtggattattac

SEQ ID NO: 487062 - DNA, 75 bp, synthetic construct
  source 1..75: mol_type = other DNA
atgcgtgatattcagatggttcttgagcgttggggggcgtgggtggcaaataaccacgaagatgttacctggtcg

SEQ ID NO: 487063 - DNA, 75 bp, synthetic construct
  source 1..75: mol_type = other DNA
ggaccacgccagcaggagaagctgttaccgttttctgacgtccgcgaggaagctgccgcgcggtcacgtttgctt

SEQ ID NO: 487064 - DNA, 75 bp, synthetic construct
  source 1..75: mol_type = other DNA
gcctttaccggaacaatcgcgatctgcatgacttgctggttgattattacgtgttgggggagacgttcatggcgc

SEQ ID NO: 487065 - DNA, 75 bp, synthetic construct
  source 1..75: mol_type = other DNA
agtgctggggggcatgggcggcaaataaccatgaggatgtgacctggtcacccattgccgccggatttaagggac

SEQ ID NO: 487066 - DNA, 75 bp, synthetic construct
  source 1..75: mol_type = other DNA
aaagccgaaggggtgattgatggtattttgatgatgcttgatatccggctggagatggacagatatgtagaacga

SEQ ID NO: 487067 - DNA, 75 bp, synthetic construct
  source 1..75: mol_type = other DNA
gcctgaaaaaaaacaacagcgatttacatgatttattggtggactattatgtcggcggcatgacttttatggcgc

SEQ ID NO: 487068 - DNA, 75 bp, synthetic construct
  source 1..75: mol_type = other DNA
cccgcaatgttgtgacgatgacgcgatgattatttgcgggtgcatggcccgtctgaaaaagaacaacagcgattt

SEQ ID NO: 487069 - DNA, 75 bp, synthetic construct
  source 1..75: mol_type = other DNA
cccattgctgccggatttaagggactgatccccgaaaaagtaaaatcacgtccacagtgttgtgacgatgacgcg

SEQ ID NO: 487070 - DNA, 75 bp, synthetic construct
  source 1..75: mol_type = other DNA
cccgccttaaccggaacaacaacgatctacatgacttgctggttgactactacgtgtttgggatgacattcatga

SEQ ID NO: 487071 - DNA, 75 bp, synthetic construct
  source 1..75: mol_type = other DNA
accgctggggagcatgggctgcagctgatagtagtggtgttgattggaaacccattgccgcaggttttaaaggtt

SEQ ID NO: 487072 - DNA, 75 bp, synthetic construct
  source 1..75: mol_type = other DNA
aacgttggggtgcatgggtggcaaataatcacgaggatgtcacttggtcgtctattgctgcaggatttaaaggac

SEQ ID NO: 487073 - DNA, 75 bp, synthetic construct
  source 1..75: mol_type = other DNA
gcttatctggcatttctggaatttattacgcctctcatggtggctgtgggtggatcgcagtatgacgccgccacc

SEQ ID NO: 487074 - DNA, 75 bp, synthetic construct
  source 1..75: mol_type = other DNA
cccgcaatgttgtgacgatgacgcgatgatcatttgcgggtgcatggcccgcctgaaaaagaacaacagcgattt

SEQ ID NO: 487075 - DNA, 75 bp, synthetic construct
  source 1..75: mol_type = other DNA
tgttgatgatgctagatgttcgccttgagatggatcgatatgtgagcacaaattattcgatacgtcgtaaaactg

SEQ ID NO: 487076 - DNA, 75 bp, synthetic construct
  source 1..75: mol_type = other DNA
ggatgctccagaaagctgagggcgtagtggagggcatgctgatggtattggatctccgattggagatggatgctg

SEQ ID NO: 487077 - DNA, 75 bp, synthetic construct
  source 1..75: mol_type = other DNA
aatattagctcaaaaaatatcgataaaataaagtcaacacttttaggtacgcaaactgaaacattgttaataaaa

SEQ ID NO: 487078 - DNA, 75 bp, synthetic construct
  source 1..75: mol_type = other DNA
gaccgccttatcacggaacgtctggtacaggcactgggcctggtggatatccgggtgccggaccatctgatagtc

SEQ ID NO: 487079 - DNA, 75 bp, synthetic construct
  source 1..75: mol_type = other DNA
gtggatatccgggtaccggaccatctgatagttggtggcaaccaggttttctcctttgcggaacacggtctgctt

SEQ ID NO: 487080 - DNA, 75 bp, synthetic construct
  source 1..75: mol_type = other DNA
catcggacaagacaatgacttcttagaccatttaaaaataccgaaacaacatttactagagttaatatcgagagg

SEQ ID NO: 487081 - DNA, 75 bp, synthetic construct
  source 1..75: mol_type = other DNA
ccaacgtaagccatgagttgcgtacaccgttgacggtattacagggctacctggagatgatgcatgagcagccgc

SEQ ID NO: 487082 - DNA, 75 bp, synthetic construct
  source 1..75: mol_type = other DNA
tattacatatgtccagtaatcacgaaacgaaaacactcggcagcgaaattctgagttttgcatgtgagtatacaa

SEQ ID NO: 487083 - DNA, 75 bp, synthetic construct
  source 1..75: mol_type = other DNA
cagcagcaccttcgaaaaactctgcgatgactttggcgcgaccgatggcgagctgaccatggatataacgctgaa

SEQ ID NO: 487084 - DNA, 75 bp, synthetic construct
  source 1..75: mol_type = other DNA
tacgccgaccagctacatcgccacctacatcggaaagaacctggacagccgcgccgtggatggcattgacccgaa

SEQ ID NO: 487085 - DNA, 75 bp, synthetic construct
  source 1..75: mol_type = other DNA
tgaagacgggttcacgattgatctcgagacagtgtattacgcgggagtaagtaacccggttcaccgtaaggcaga

SEQ ID NO: 487086 - DNA, 75 bp, synthetic construct
  source 1..75: mol_type = other DNA
gatggctttggcgcgactgatggcgagctgaccatggatgtaacgctgaaggcgtatcagatgctggcccgcatg

SEQ ID NO: 487087 - DNA, 75 bp, synthetic construct
  source 1..75: mol_type = other DNA
ctcttttttgcgtaaaaagcaagagtcagaccgccagaaagggaaaaaagccagtcaggctgacgggtacgcgca

SEQ ID NO: 487088 - DNA, 75 bp, synthetic construct
  source 1..75: mol_type = other DNA
catgaaaattgcgctgaaggcgtatcagatgctggcccgcatggcgttacatctgcacaccatgccgccgcatta

SEQ ID NO: 487089 - DNA, 75 bp, synthetic construct
  source 1..75: mol_type = other DNA
aaaaggcactctgatgcattagcgttaatacctaataaagcattacctaaaagtgtcccaacaagagtaagaaac

SEQ ID NO: 487090 - DNA, 75 bp, synthetic construct
  source 1..75: mol_type = other DNA
ggcggaactggctaagcaagtagccagaatgctgacaaaagaaaagcctcaagactgctgcaacagttttgaggc

SEQ ID NO: 487091 - DNA, 75 bp, synthetic construct
  source 1..75: mol_type = other DNA
acctgttcagcatgtcatgagcaatacccaatcccaaggagtgccatccctcctgaaaatgcgtgatctttatct

SEQ ID NO: 487092 - DNA, 75 bp, synthetic construct
  source 1..75: mol_type = other DNA
tcaaattgtgtggtgtagggaaatctaaaaataatgatgaggggaatgtaattggcttaaatccctttattcatt

SEQ ID NO: 487093 - DNA, 75 bp, synthetic construct
  source 1..75: mol_type = other DNA
atggcgggactggagcgtgaagaattccgggtgctgtatctgaataaccagaatcatttgattgccggtgaaacc

SEQ ID NO: 487094 - DNA, 75 bp, synthetic construct
  source 1..75: mol_type = other DNA
gctacgcagtgcgatttcgaatctggtctataacgcggtgaatcatacgccagaaggtacacatatcacggtgcg

SEQ ID NO: 487095 - DNA, 75 bp, synthetic construct
  source 1..75: mol_type = other DNA
aatccgaagcgtaaatttaccgaaacgtcagcagctgcacacacactgtatgagaaatccgatccctacttcctg

SEQ ID NO: 487096 - DNA, 75 bp, synthetic construct
  source 1..75: mol_type = other DNA
atgaaaaagttcgaaaacataactgttctccatgttgataactttgattatacaaaccaggaatttctcccggag

SEQ ID NO: 487097 - DNA, 75 bp, synthetic construct
  source 1..75: mol_type = other DNA
ttctccaaattgataactctgattatattaacggacatctcctcccgcctgttgcccggggagctgatactgccg

SEQ ID NO: 487098 - DNA, 75 bp, synthetic construct
  source 1..75: mol_type = other DNA
cagccttagaattagacgacgcaatacttaaaggtgatattccgaggataagggatttttcaagatcgttgtcta

SEQ ID NO: 487099 - DNA, 75 bp, synthetic construct
  source 1..75: mol_type = other DNA
ataataaaatctacacatgaaaaactactgggtgaaattaagcataacattcaggttaatttgaaggtgaaccct

SEQ ID NO: 487100 - DNA, 75 bp, synthetic construct
  source 1..75: mol_type = other DNA
atgatgcagttcgtcgttgttacagggttgccgaaaatatcggtgtgcgtgcaattatggttcatgcgcttacgg

SEQ ID NO: 487101 - DNA, 75 bp, synthetic construct
  source 1..75: mol_type = other DNA
atgcaacagctttcctttctgccaggagatatgacgcccggcgagcgcagcctcattcagcgggccctgaaaacc

SEQ ID NO: 487102 - DNA, 75 bp, synthetic construct
  source 1..75: mol_type = other DNA
agtgtgacgtggcgttatttcgataataagttgggctacgatggttttggcgatcaaatgatttatatgcttggt

SEQ ID NO: 487103 - DNA, 75 bp, synthetic construct
  source 1..75: mol_type = other DNA
atgctatcccgtagggctagggttcattttggcgacctttttcccttacttcagcaaccttgtaacactacttca

SEQ ID NO: 487104 - DNA, 75 bp, synthetic construct
  source 1..75: mol_type = other DNA
gcgtttatggccgcagctgctgggcggcgtgatgctgacgactgctacttcgtccgttaaccctgatggggcttg

SEQ ID NO: 487105 - DNA, 75 bp, synthetic construct
  source 1..75: mol_type = other DNA
aacaagtgatcacagaagaagataaagttgacctggataaccagatcaaatccatgcaaaaaataacggatcacc

SEQ ID NO: 487106 - DNA, 75 bp, synthetic construct
  source 1..75: mol_type = other DNA
tggggtcgggttcgacagtcaaagccgcgatggcgctggggcgtcgtgcaactggcgttgagctggagactgaac

SEQ ID NO: 487107 - DNA, 75 bp, synthetic construct
  source 1..75: mol_type = other DNA
ggggcgttgtgcgattggtgttgagctggagaccggacgttttgaacagacagtcagggaagttcaggatttaat

SEQ ID NO: 487108 - DNA, 75 bp, synthetic construct
  source 1..75: mol_type = other DNA
aaagtatcacggaatcagttaagcagactttgaaggaacgagtagctaaccctttatggggttacatcattttgt

SEQ ID NO: 487109 - DNA, 75 bp, synthetic construct
  source 1..75: mol_type = other DNA
gagcgtgtctgcgccgcgctgcgtgagttgaacaagcacagggatattgtacgacagattactgattcttcccgc

SEQ ID NO: 487110 - DNA, 75 bp, synthetic construct
  source 1..75: mol_type = other DNA
acggaaaccgatggtaaagcctttcctcagtcagccggtgttgcgttaccggtacagaaagatgcaacacaggaa

SEQ ID NO: 487111 - DNA, 75 bp, synthetic construct
  source 1..75: mol_type = other DNA
aattcatcgctggccatggcaatcagcaaagggcgtctgattcgcgtgaatcagggtggtaaatttcgttactgc

SEQ ID NO: 487112 - DNA, 75 bp, synthetic construct
  source 1..75: mol_type = other DNA
attcttcgctctgtaaaaaaatgtgctcagtcactggtgaatgataaatatcaccttgtcttcttggttacggaa

SEQ ID NO: 487113 - DNA, 75 bp, synthetic construct
  source 1..75: mol_type = other DNA
atggtgacaacgccacggacagctatgtgcgccagacgcgcccgctgctggcccgcctttcctgttacagcagtc

SEQ ID NO: 487114 - DNA, 75 bp, synthetic construct
  source 1..75: mol_type = other DNA
cgttgttgataaaacgggtcacacctggtttctggctggtgaaggtgaatccggggtaaccgaagagcagccagc

SEQ ID NO: 487115 - DNA, 75 bp, synthetic construct
  source 1..75: mol_type = other DNA
cagcagataatcagcgcgagcagtcgtccgggggacctggttgcagattttttcatggggtcgggttcgacagtc

SEQ ID NO: 487116 - DNA, 75 bp, synthetic construct
  source 1..75: mol_type = other DNA
atgagtaagtttgtaaaagcagcagttgccacgacaatgctcatgggggcgctgacttcagcatcagtcgttgcc

SEQ ID NO: 487117 - DNA, 75 bp, synthetic construct
  source 1..75: mol_type = other DNA
aactttcaccggcaccatctacactggcatcgctaacagcagcaattacaccattttcagtactgatacgggaat

SEQ ID NO: 487118 - DNA, 75 bp, synthetic construct
  source 1..75: mol_type = other DNA
tgaacttcaaagcatggctggtgggtgaaggcgaaatgccgaccctgggtgcatttgaagctaacaccacgttcc

SEQ ID NO: 487119 - DNA, 75 bp, synthetic construct
  source 1..75: mol_type = other DNA
cggactttggagtgaattttaaagaagccgagttttactcattttatgaaagcaatgtgcttaaccatgccgtag

SEQ ID NO: 487120 - DNA, 75 bp, synthetic construct
  source 1..75: mol_type = other DNA
cagatccgtttacaggattgcgtgtttaccactgaaacaaacatggagaccacgttcaccggcactaactacgcg

SEQ ID NO: 487121 - DNA, 75 bp, synthetic construct
  source 1..75: mol_type = other DNA
cacatttaccggtaatccatactccactaaaacagataactattctttgtctaacatggataatggaactgaaat

SEQ ID NO: 487122 - DNA, 75 bp, synthetic construct
  source 1..75: mol_type = other DNA
caccgtgccggacagcaacggctggccgccgtacatcgggccatgcagcagggggccgcgaatgattactggttt

SEQ ID NO: 487123 - DNA, 75 bp, synthetic construct
  source 1..75: mol_type = other DNA
caccgtgccggacagcaacgtctggccgccgttcatcgggccatgcagcagggggccgcgaatgattactggttt

SEQ ID NO: 487124 - DNA, 75 bp, synthetic construct
  source 1..75: mol_type = other DNA
caccgtgccggacagcaacgactggccgccgtgcatcgggccatgcagcagggggccgcgaatgattactggttt

SEQ ID NO: 487125 - DNA, 75 bp, synthetic construct
  source 1..75: mol_type = other DNA
cacattcaccggtaatccgtactccactaacgcagataactattctctgtctaacatggataatggaactgaaat

SEQ ID NO: 487126 - DNA, 75 bp, synthetic construct
  source 1..75: mol_type = other DNA
cggcactggcgctcgggcgtcgtgcgattggcgttgaactggagaccggacgttttgagcagacagtcagggaag

SEQ ID NO: 487127 - DNA, 75 bp, synthetic construct
  source 1..75: mol_type = other DNA
cagtccggacgccggtatatcggtatcgagctgcttgaacagtatcaccgtgccggacagcaacgtctggcggcc

SEQ ID NO: 487128 - DNA, 75 bp, synthetic construct
  source 1..75: mol_type = other DNA
aaattgtacgcaaaccggatacccgcccggacagccgaatcacgcagctctggcagcgcctgagccgtaatcacg

SEQ ID NO: 487129 - DNA, 75 bp, synthetic construct
  source 1..75: mol_type = other DNA
atgaaccacgaccagctattgatccggccagatttacggagcgcaggcaggaaactgaaaccgacctgcaacgcg

SEQ ID NO: 487130 - DNA, 75 bp, synthetic construct
  source 1..75: mol_type = other DNA
tccacaattcagcaggaccagaacagcatgaaaactcccgttaccgtgctttctgacatgctgcgcgccatccgt

SEQ ID NO: 487131 - DNA, 75 bp, synthetic construct
  source 1..75: mol_type = other DNA
tggcggtattcgatcgggcagcgttaatgcttatctgcctgtttttcctcattcgtatccgtctgtttcgcgaac

SEQ ID NO: 487132 - DNA, 75 bp, synthetic construct
  source 1..75: mol_type = other DNA
tgcggtggcgattactaataccgatcatgtgctggcctatgtcggcgtgggtgaacacaactatcagaatggcga

SEQ ID NO: 487133 - DNA, 75 bp, synthetic construct
  source 1..75: mol_type = other DNA
ttgtatatcaggctggataaacctgaaaatccccaaagcacagcgctggcgctggatatcgccaacaaaacgcta

SEQ ID NO: 487134 - DNA, 75 bp, synthetic construct
  source 1..75: mol_type = other DNA
tggaaagatgttttcgggtggcccggcctggttcatcagggcaatacgtggcgttaaaaacggctgttcagtcct

SEQ ID NO: 487135 - DNA, 75 bp, synthetic construct
  source 1..75: mol_type = other DNA
tgttcagcaggcggtggaccactggtcgcgtctgctggcatttcacttcacgctccattcggcagaaggaaacat

SEQ ID NO: 487136 - DNA, 75 bp, synthetic construct
  source 1..75: mol_type = other DNA
agtgccacagttgatgaacaatgttcgcaagtggtggatttactgcaacagacctggggggagataagtgcaggc

SEQ ID NO: 487137 - DNA, 75 bp, synthetic construct
  source 1..75: mol_type = other DNA
cgtgaacgaggacggcagcctgaacccgaaatacaacggtgccaccgtgcgcgatgccagtgattatctggttta

SEQ ID NO: 487138 - DNA, 75 bp, synthetic construct
  source 1..75: mol_type = other DNA
gacacctccgggacatctggcgtgaagagctgttacgcgccgcaggtctggtgtcacgtaagacatcggtatata

SEQ ID NO: 487139 - DNA, 75 bp, synthetic construct
  source 1..75: mol_type = other DNA
tatcacgccaccctgctggccgtcgctggaaatcaggcccgaccgccgcaccgcccccaacccggaacaggtgcc

SEQ ID NO: 487140 - DNA, 75 bp, synthetic construct
  source 1..75: mol_type = other DNA
aaaacgaagacggtgaacgcctgagtctggaggacgtgtactggtcagggctggggaatccgcgcaaccgccgca

SEQ ID NO: 487141 - DNA, 75 bp, synthetic construct
  source 1..75: mol_type = other DNA
cggtgcggctttttctgctgaagaatacccggaactggcaaaggtttatccgacaaataaattgcctgatttacg

SEQ ID NO: 487142 - DNA, 75 bp, synthetic construct
  source 1..75: mol_type = other DNA
cctgccgccccttggactcgtggcaataactgtccccgtgtacaggaaacggacaacaacgggacagaacagccg

SEQ ID NO: 487143 - DNA, 75 bp, synthetic construct
  source 1..75: mol_type = other DNA
cagagaatcagtgaaaccactgaacgcgcccgccgcaaagcagacctgctgcggggtggcctgaccagtggaaac

SEQ ID NO: 487144 - DNA, 75 bp, synthetic construct
  source 1..75: mol_type = other DNA
atgccgcaacagattgaactgcgcgatatcgcgctacaggccgcgcagccgctggtgcacggtgtatcgttaacc

SEQ ID NO: 487145 - DNA, 75 bp, synthetic construct
  source 1..75: mol_type = other DNA
cggcggcatgttgcagcgcatgatgattgcgatggcggtgttgtgtgaatcgccgtttatcatcgccgatgaacc

SEQ ID NO: 487146 - DNA, 75 bp, synthetic construct
  source 1..75: mol_type = other DNA
caccgtttatcatcgccgatgaaccgaccaccgacctcgacgtggtagcacaggcgcgcatcctcgatctgctgg

SEQ ID NO: 487147 - DNA, 75 bp, synthetic construct
  source 1..75: mol_type = other DNA
ccgtgaaaaacggcggcatcagtgcgcccactgacggcgttcgcgtggatgtcgcactgacagcagagccacaca

SEQ ID NO: 487148 - DNA, 75 bp, synthetic construct
  source 1..75: mol_type = other DNA
atgagtgaccacaatgcacagctggcgtacccgtggaacgccccgctaccggttatcgatcctgaaacgttcggc

SEQ ID NO: 487149 - DNA, 75 bp, synthetic construct
  source 1..75: mol_type = other DNA
tatacatcagccatgaagcgttactggactggcgcgaaaaacgccagcgcacccgcgattttctgaaagcctggg

SEQ ID NO: 487150 - DNA, 75 bp, synthetic construct
  source 1..75: mol_type = other DNA
gcgacgcagagcacgcacagagaatcagtgaaaccactaaacatgctcgcaaaaaaatcagtttattgcatcgaa

SEQ ID NO: 487151 - DNA, 75 bp, synthetic construct
  source 1..75: mol_type = other DNA
ccagttccagttccttggtatcccctcccgtcaggtatggcgtgaactccgccgccttgccagtcagatggcccg

SEQ ID NO: 487152 - DNA, 75 bp, synthetic construct
  source 1..75: mol_type = other DNA
ccagacaaccgcacgggcgagggttttgaccttcagggcgaccccgtcgccccttggactcgtggcaataactgt

SEQ ID NO: 487153 - DNA, 75 bp, synthetic construct
  source 1..75: mol_type = other DNA
gataatccgcttaacaatatgctgcagaagttcatccgctggtatgacacgaataacgtgacgctgggcggtgtc

SEQ ID NO: 487154 - DNA, 75 bp, synthetic construct
  source 1..75: mol_type = other DNA
aaattattcgtcgtgagatcccctccgatatcgtctaccaggatgatctggtaacggcgtttcgcgatatttcgc

SEQ ID NO: 487155 - DNA, 75 bp, synthetic construct
  source 1..75: mol_type = other DNA
gatgactggctaccgttacgagtatgacaaccaggccgacaaaggcatgtacatttcgctcagtatgccgtgggg

SEQ ID NO: 487156 - DNA, 75 bp, synthetic construct
  source 1..75: mol_type = other DNA
gagccacgatggtaaatgcctgaagcccggtcaactggaaggcatggaaattaaggctgatttaagccagtccgc

SEQ ID NO: 487157 - DNA, 75 bp, synthetic construct
  source 1..75: mol_type = other DNA
accgggaaatatcgaacccgtctacatgctggaaaaagtagaaaatacaaaaccatgccaaatgggaggtccata

SEQ ID NO: 487158 - DNA, 75 bp, synthetic construct
  source 1..75: mol_type = other DNA
ttggcaaggataataagcctgctatcgctcgcggtccgctgggtctgcatctcaatagtggttttacgctcgata

SEQ ID NO: 487159 - DNA, 75 bp, synthetic construct
  source 1..75: mol_type = other DNA
cgtctgggcaatgcccgtgcagatgatctggtgcgcaataacgggatagcggccaatgcggtggcactgcataag

SEQ ID NO: 487160 - DNA, 75 bp, synthetic construct
  source 1..75: mol_type = other DNA
ggcatgtacatttcgctcagtatgccgtggggcgacaacagtaccgttagctataacggtaactatggcagtggg

SEQ ID NO: 487161 - DNA, 75 bp, synthetic construct
  source 1..75: mol_type = other DNA
gtgtgagttattccaaagactttgaccagctcaacagccgcgttacttttgctggatatcgcttctcggaagaga

SEQ ID NO: 487162 - DNA, 75 bp, synthetic construct
  source 1..75: mol_type = other DNA
gagcgcctcaagatgctcgacacactgcaggctacgcaactgcagtcggcggtggtgcgggcgatgtatgccgcg

SEQ ID NO: 487163 - DNA, 75 bp, synthetic construct
  source 1..75: mol_type = other DNA
tcgatgcctcatgaaattaagccggtgatccaggagcagacccagcaggtgatgccaacggaagcgccggtatcg

SEQ ID NO: 487164 - DNA, 75 bp, synthetic construct
  source 1..75: mol_type = other DNA
tgccggaaaacgccgaagcaacccagtcggtggtgcaagccacgctaactgaaggtgccattggctaccgtaaat

SEQ ID NO: 487165 - DNA, 75 bp, synthetic construct
  source 1..75: mol_type = other DNA
tggtgttgcgcattgcgatatcaacctgccggacccgctgcctgccgatctgtttaacggcttgttactgccatg

SEQ ID NO: 487166 - DNA, 75 bp, synthetic construct
  source 1..75: mol_type = other DNA
gttttctgcgggccggtgtggaggtcgatcgatatggtcgtgccgttgcgtaccatatctgtgaggatgatttcc

SEQ ID NO: 487167 - DNA, 75 bp, synthetic construct
  source 1..75: mol_type = other DNA
acttccttttatgaacgtattactgtgcgtaatcacactgccagcccatcatcgccggtggtattacgctggttg

SEQ ID NO: 487168 - DNA, 75 bp, synthetic construct
  source 1..75: mol_type = other DNA
cagagccgggagacatccggcgttttgtccagcaggcggtggaccactggcctaatctgttggcatttcacttca

SEQ ID NO: 487169 - DNA, 75 bp, synthetic construct
  source 1..75: mol_type = other DNA
ccaaatctgttggcatttcacttcacgctctattcggcagaaggaatctatggtcaacagattcagacattttgt

SEQ ID NO: 487170 - DNA, 75 bp, synthetic construct
  source 1..75: mol_type = other DNA
tgcggtcacgggaacagaggccgccgtttttgaaggtcagtccggcattgaggccgggctggcggatgaattaat

SEQ ID NO: 487171 - DNA, 75 bp, synthetic construct
  source 1..75: mol_type = other DNA
ttggcgagatcgacgtggaagggaaacgcacgtttacggaatttatccgtgaaggggtgggcgtgcatgccttta

SEQ ID NO: 487172 - DNA, 75 bp, synthetic construct
  source 1..75: mol_type = other DNA
agcttgatgctcccggaatgctggctgaaacggacgagtacatggccggaggtaaacgaccggcccgtgtttacc

SEQ ID NO: 487173 - DNA, 75 bp, synthetic construct
  source 1..75: mol_type = other DNA
ttgatgaagaatgttcacaactggtggatttactacaacagacttggcaggtgataagcgctggcggacaatgcc

SEQ ID NO: 487174 - DNA, 75 bp, synthetic construct
  source 1..75: mol_type = other DNA
gagtctcagctacaacgggggcggcgcaggatttggcgggcaaatggcggagtggttgccaccggcgcagagtgt

SEQ ID NO: 487175 - DNA, 75 bp, synthetic construct
  source 1..75: mol_type = other DNA
ggagcgacaggcagcgggtcttccccgccccatctggataaaggacacgtttcagcagcagatccgacagacaac

SEQ ID NO: 487176 - DNA, 75 bp, synthetic construct
  source 1..75: mol_type = other DNA
atggaggagcaacaattcgatgcctgttgctgctcagccagacgagtatttgtcacccgcgagccagtgtcacag

SEQ ID NO: 487177 - DNA, 75 bp, synthetic construct
  source 1..75: mol_type = other DNA
cactccattcggcagaaggaaatatcaacgggcaacagattcatgcattctgtacttccttttatcgacaactgc

SEQ ID NO: 487178 - DNA, 75 bp, synthetic construct
  source 1..75: mol_type = other DNA
ttacgctggttgcgggaacaacatggaggagcaacaatacgatgcctgttgctgctcagccagacgagcatttgc

SEQ ID NO: 487179 - DNA, 75 bp, synthetic construct
  source 1..75: mol_type = other DNA
gaatctctcggcctgcatatcggtgaacagcagatgcagcacctgttacggggcggcagtctgtacgttgacggc

SEQ ID NO: 487180 - DNA, 75 bp, synthetic construct
  source 1..75: mol_type = other DNA
cggcggtccgcaaaaaactgaaccgcgacggcctgcgctggtatggcatccgcacggtggagcctcaccatgacg

SEQ ID NO: 487181 - DNA, 75 bp, synthetic construct
  source 1..75: mol_type = other DNA
aactgcgccgccttgccagccagatggcacgcaacccggaaggcccgcaacggctgaaggatgacgcaatggatg

SEQ ID NO: 487182 - DNA, 75 bp, synthetic construct
  source 1..75: mol_type = other DNA
cctggtgagagcgcccggacgcggctgttatgggcggaaattttacatagcggaaaattatcgccgttaggtcaa

SEQ ID NO: 487183 - DNA, 75 bp, synthetic construct
  source 1..75: mol_type = other DNA
tctgtgatgcggtgaactttctcgttgaaaaatacgccctggtgcgtaccgaccagcccgggttcagcacttgtc

SEQ ID NO: 487184 - DNA, 75 bp, synthetic construct
  source 1..75: mol_type = other DNA
tttaaggtggagtatgtcgacggctcaaaaggcacaccaaccagctatatcgcgacctacatcggaaaaaacctg

SEQ ID NO: 487185 - DNA, 75 bp, synthetic construct
  source 1..75: mol_type = other DNA
gccgggcgctgatgcgttcgctgcgtgacaaacaggcaaaaaacagcagtgatgaaatgcagagctggacacaga

SEQ ID NO: 487186 - DNA, 75 bp, synthetic construct
  source 1..75: mol_type = other DNA
cgcgggagtaagtaacccggttcaccgtaaggcagaaatgatggccaccatgaaggggctggaacttctggccga

SEQ ID NO: 487187 - DNA, 75 bp, synthetic construct
  source 1..75: mol_type = other DNA
aatacaaggctggaaggcggagatgctcatccattagaggccattatcacccggatgctgttgacgaaagtgaaa

SEQ ID NO: 487188 - DNA, 75 bp, synthetic construct
  source 1..75: mol_type = other DNA
ctgcatatcaggaaaatcttcagtatgaaaacattacccgacacgcatgtacgggaggcatcgcgctgcccgtct

SEQ ID NO: 487189 - DNA, 75 bp, synthetic construct
  source 1..75: mol_type = other DNA
tcctatctgcgcgatccgcttattcgccacctctccttcctgcgcaaaaaacaggaagccgatcgtcagaaagga

SEQ ID NO: 487190 - DNA, 75 bp, synthetic construct
  source 1..75: mol_type = other DNA
agtggaaacaaaaaacagacagaaacgggactcacaaatcccgtaaatgagcaaaaaacgcgccgcgatatatga

SEQ ID NO: 487191 - DNA, 75 bp, synthetic construct
  source 1..75: mol_type = other DNA
atatgaatgatgattttgcttttgatgcttcccgggtagtgccaactgcaaatgaaaatcgcccgcgaaatcttg

SEQ ID NO: 487192 - DNA, 75 bp, synthetic construct
  source 1..75: mol_type = other DNA
gcaccaccattaacaatgcgctgtcaggtaagcaaccactggatgagacgctgactcatttgagtggaaaggatg

SEQ ID NO: 487193 - DNA, 75 bp, synthetic construct
  source 1..75: mol_type = other DNA
tacgggaggcatcgcgctgcccgtctcccgtcaccatctggcagacactgctcacccgactgctggaccagcatt

SEQ ID NO: 487194 - DNA, 75 bp, synthetic construct
  source 1..75: mol_type = other DNA
taataaacagcatcgatatcctccgggctcgccgggcgaccggcctgatgacccgcgacaattacagaacggtaa

SEQ ID NO: 487195 - DNA, 75 bp, synthetic construct
  source 1..75: mol_type = other DNA
atgcacagtcagttaaaagaacgtatccggctgatgcgcgcaagactggataacgccgttccggttgctgaaatc

SEQ ID NO: 487196 - DNA, 75 bp, synthetic construct
  source 1..75: mol_type = other DNA
cgtgatcacattctggaaccctctgccggcaccggagccatactgcgggcgattcgggataccgcgccgggggcc

SEQ ID NO: 487197 - DNA, 75 bp, synthetic construct
  source 1..75: mol_type = other DNA
agagcagatcttctcgaaagcttgatcacatctataaatgaagcaaaaaatgattttgctgcggcaatgaggcgt

SEQ ID NO: 487198 - DNA, 75 bp, synthetic construct
  source 1..75: mol_type = other DNA
attgatatcctccgggctcgccgggcgaccggcctgatgacccgcgacaattacagaacggtaaataacattacc

SEQ ID NO: 487199 - DNA, 75 bp, synthetic construct
  source 1..75: mol_type = other DNA
gttcgctgatgaacgtgtgattgagcagaatattgaggcaggcatttcactgtgtgatgcggtgaactttctcgt

SEQ ID NO: 487200 - DNA, 75 bp, synthetic construct
  source 1..75: mol_type = other DNA
ctcacccgactgctggaccagcactatggccttacgttgaatgacacaccgttcgctgatgaacgtgtgattgag

SEQ ID NO: 487201 - DNA, 75 bp, synthetic construct
  source 1..75: mol_type = other DNA
tgaaaaatacgcactggtacgtaccgaccagccgggattcagcgcctgtacccgctctcagttaatcaacagtat

SEQ ID NO: 487202 - DNA, 75 bp, synthetic construct
  source 1..75: mol_type = other DNA
tacgggcggcatcgcgctgcccgtctccggttgaaatctggcagacactgctcacccggctgctggaccagcact

SEQ ID NO: 487203 - DNA, 75 bp, synthetic construct
  source 1..75: mol_type = other DNA
atgaaaacattacctgtattacccgggcaggtggccagttcacgcctgtctcctgttgaaatctggcagatactg

SEQ ID NO: 487204 - DNA, 75 bp, synthetic construct
  source 1..75: mol_type = other DNA
tcctgttgaaatctggcagatactgctgtcccgactgctggaccagcactatggcctcacacagaatgacacacc

SEQ ID NO: 487205 - DNA, 75 bp, synthetic construct
  source 1..75: mol_type = other DNA
atacgcgctggtgcgtaccgaccagccgggattcagcgcctgtacccgatctcagttaataaacagaatcgatat

SEQ ID NO: 487206 - DNA, 75 bp, synthetic construct
  source 1..75: mol_type = other DNA
ggcctgatgacccgcgacaattacagaacggtaaataatattatcctgggtaagcacccggaggtgaaacaatga

SEQ ID NO: 487207 - DNA, 75 bp, synthetic construct
  source 1..75: mol_type = other DNA
cgatattctccgggctcgcagggcgaccggcctgatgacccgcgacaattacagaacggtaaataacattaccct

SEQ ID NO: 487208 - DNA, 75 bp, synthetic construct
  source 1..75: mol_type = other DNA
atacgcgctggtgcgtaccgaccagccgggattcagcgcctgtacccgctctcagttaataaacagcatcgatat

SEQ ID NO: 487209 - DNA, 75 bp, synthetic construct
  source 1..75: mol_type = other DNA
atacgcgctggtgcgtaccgaccagccgggattcagcgcctgtacccgttctcagttaataaacagcattgatat

SEQ ID NO: 487210 - DNA, 75 bp, synthetic construct
  source 1..75: mol_type = other DNA
atacgcgctggtgcgtaccgaccagccgggattcagcgcctgtacccgatctcagttaataaacagcatagatat

SEQ ID NO: 487211 - DNA, 75 bp, synthetic construct
  source 1..75: mol_type = other DNA
gcattcagggcattactgaattcagaaagtgaacgttttcagccctccgcctggcagaaatttattcaacaatta

SEQ ID NO: 487212 - DNA, 75 bp, synthetic construct
  source 1..75: mol_type = other DNA
agcgattatcactcgtatgctgttgacgaaagtgaagctggagccggtggatgaagatgtcgatgagccaatacc

SEQ ID NO: 487213 - DNA, 75 bp, synthetic construct
  source 1..75: mol_type = other DNA
cggttggtgtgcctgttccgtggccttcagccactccgccaacaggctggctgaaatgcaacggtgcggcatttt

SEQ ID NO: 487214 - DNA, 75 bp, synthetic construct
  source 1..75: mol_type = other DNA
gaccagccgggattcagcccctgtacccgctctcagttaatcaacagtatcgatatcctccgggcacgccgggca

SEQ ID NO: 487215 - DNA, 75 bp, synthetic construct
  source 1..75: mol_type = other DNA
acggcctcacactgaatgacacaccgttcgcagatgaacgtgtgattgagcagcatattgaagcagggatttcac

SEQ ID NO: 487216 - DNA, 75 bp, synthetic construct
  source 1..75: mol_type = other DNA
acggcctcacactgaatgacacaccgttagccgatgaacgtgtgattgagcagcatattgaagcagggatttcac

SEQ ID NO: 487217 - DNA, 75 bp, synthetic construct
  source 1..75: mol_type = other DNA
atacgcgctggtgcgtaccgaccagccgggattcagcgcctgtacccggtctcagttaataaacagcatggatat

SEQ ID NO: 487218 - DNA, 75 bp, synthetic construct
  source 1..75: mol_type = other DNA
gatgttcagtaaggttgaagttaatggcgaaggtcgtcatccgctgtaccaaaaattgattgccgcagcgccgac

SEQ ID NO: 487219 - DNA, 75 bp, synthetic construct
  source 1..75: mol_type = other DNA
cgcagtcgcgccggaagagagcggattctatgcccgtatggtcagcaaaggccgtgcaccgctgtacccggatga

SEQ ID NO: 487220 - DNA, 75 bp, synthetic construct
  source 1..75: mol_type = other DNA
cccgctctcagttaataaacagtattgatatcctccgggcacgccgggcaaccggcctgatgacccgcgacaact

SEQ ID NO: 487221 - DNA, 75 bp, synthetic construct
  source 1..75: mol_type = other DNA
ctcacccggttactggaccagcactacggcctcacactgaatgacacaccgttcgctgatgaacgtgtgattgag

SEQ ID NO: 487222 - DNA, 75 bp, synthetic construct
  source 1..75: mol_type = other DNA
ccgatccgcaagggtttaaagcattacgtcaggcctatgaagaggcgctgcgactggcggtaaatcctgtagaag

SEQ ID NO: 487223 - DNA, 75 bp, synthetic construct
  source 1..75: mol_type = other DNA
cagcatattgaggcaggcatttcactgtgcgatgcagtgaactttctcgtggaaaaatacgcactggtacgaacc

SEQ ID NO: 487224 - DNA, 75 bp, synthetic construct
  source 1..75: mol_type = other DNA
cctccgggctcgctgggcgactggcctgatgaacagcgacaattacagaacggtaaataacattaccctgggtaa

SEQ ID NO: 487225 - DNA, 75 bp, synthetic construct
  source 1..75: mol_type = other DNA
cctccgggctcgcagggctactggcctgatgaccagcgacaattacagaacggtaaataacattaccctgggtaa

SEQ ID NO: 487226 - DNA, 75 bp, synthetic construct
  source 1..75: mol_type = other DNA
atacgcgctggtgcgtaccgaccagccgggattcagcgcctgtacccggtctcagttaataaacaggatcgatat

SEQ ID NO: 487227 - DNA, 75 bp, synthetic construct
  source 1..75: mol_type = other DNA
cgatatcctccgggctcgcagggcgaccggtctgatgacccgcgacaattacagaacggtaaataacattaccct

SEQ ID NO: 487228 - DNA, 75 bp, synthetic construct
  source 1..75: mol_type = other DNA
acaggtctgatgacccgcagcaactacagaacggtaaataacattaccctgggaaagcatccggaggcgaaacaa

SEQ ID NO: 487229 - DNA, 75 bp, synthetic construct
  source 1..75: mol_type = other DNA
cctccgggctcgcggggcgactggcctgatgatcagcgacaattacagaacggtaaataacattaccctgggtaa

SEQ ID NO: 487230 - DNA, 75 bp, synthetic construct
  source 1..75: mol_type = other DNA
aatagatgctgcaagaaatcaaacgggaaagagaattgttgaggacgcaaaaatattacatcaattgcgcaattc

SEQ ID NO: 487231 - DNA, 75 bp, synthetic construct
  source 1..75: mol_type = other DNA
gagcaaaagaacgaatcagcccaggatacgcgctggctggcgtttaatatccaacgtccggtattcagcgatcgc

SEQ ID NO: 487232 - DNA, 75 bp, synthetic construct
  source 1..75: mol_type = other DNA
cggaagtccatccccgggaggtaattaaacgtgccctgtaccacaatgccgctgccgtggtgctggcacacaatc

SEQ ID NO: 487233 - DNA, 75 bp, synthetic construct
  source 1..75: mol_type = other DNA
taaacgcgccctgtatcacaatgccgcagccgtggtgctggcacacaatcacccgtccggtgaagtcacacccag

SEQ ID NO: 487234 - DNA, 75 bp, synthetic construct
  source 1..75: mol_type = other DNA
ataatgctcccggcgtacaaagtccggtcatcgactcgttgatcaaccaaattattgccgcccagggaaataaag

SEQ ID NO: 487235 - DNA, 75 bp, synthetic construct
  source 1..75: mol_type = other DNA
aaaaattactgccgttagggcgagcactggatcgcgtattaacgtggaattattacatgctgccaatgtggtaca

SEQ ID NO: 487236 - DNA, 75 bp, synthetic construct
  source 1..75: mol_type = other DNA
ctggaaaatggggcagaatattgtttattcccgcgtgaaagattactgggcggcaaacttaccggtaaaccgtgg

SEQ ID NO: 487237 - DNA, 75 bp, synthetic construct
  source 1..75: mol_type = other DNA
cttcaccggcaccatcaaccgcacggaagtccatccccgggaagtgattaaacgcgccctgtatcacaatgccgc

SEQ ID NO: 487238 - DNA, 75 bp, synthetic construct
  source 1..75: mol_type = other DNA
acccgtccggtgaagtcacacccagtaaggctgaccgccttattacggaacgtctggtacaggcactggccctgg

SEQ ID NO: 487239 - DNA, 75 bp, synthetic construct
  source 1..75: mol_type = other DNA
acccgtccggtgaagtcacccccagtaaggctgaccggcttatcactgagcgtctggtacaggcgctggccctgg

SEQ ID NO: 487240 - DNA, 75 bp, synthetic construct
  source 1..75: mol_type = other DNA
cggaagtccatccccgggaagtgattaaacgcgccctgtatcacaatgccgcagccgtggtgctggcacataatc

SEQ ID NO: 487241 - DNA, 75 bp, synthetic construct
  source 1..75: mol_type = other DNA
atgcaacagatttcctttctgcccggagaaatgacaaccagagagcgcagcctcattctgcgggccctgaaaacc

SEQ ID NO: 487242 - DNA, 75 bp, synthetic construct
  source 1..75: mol_type = other DNA
agtcacccccagtaaggcagaccgccttattacggaacgtctggttcaggcgctggccctggtggatatccgggt

SEQ ID NO: 487243 - DNA, 75 bp, synthetic construct
  source 1..75: mol_type = other DNA
acatggacattcgcaaggtggataactcgcaaatcactaaccgcatgcgcagtcgcgactatgacatgatgccgc

SEQ ID NO: 487244 - DNA, 75 bp, synthetic construct
  source 1..75: mol_type = other DNA
actgctgacgcaggtttgccagacatggccgcaacatacccgcaatctccgccagccgaagacatggccggagtc

SEQ ID NO: 487245 - DNA, 75 bp, synthetic construct
  source 1..75: mol_type = other DNA
agatttcccgcactgaactcaggaacagcgggctgacagagcctgcccgccgtgtggctgaccttctgaatatcg

SEQ ID NO: 487246 - DNA, 75 bp, synthetic construct
  source 1..75: mol_type = other DNA
ctgccgcgcaggatgcagaaaccaaagcggttgaactgaccgtgcgggcgaaagcagagaaagaagccgcagaga

SEQ ID NO: 487247 - DNA, 75 bp, synthetic construct
  source 1..75: mol_type = other DNA
gcaagaatatgcagagagcttagcaatacctgatgagctctatcagcaactacaaaaaagccacaggatgagcgt

SEQ ID NO: 487248 - DNA, 75 bp, synthetic construct
  source 1..75: mol_type = other DNA
cgtcatggaggccatgaagcacatcaatgactggcttggcgaagaggtgatccgctttaacccttatgcactgct

SEQ ID NO: 487249 - DNA, 75 bp, synthetic construct
  source 1..75: mol_type = other DNA
caaggcagaccgccttatcaccgaacgtctggtacaggcactgggcctggtggatatccgggtgccggaccatct

SEQ ID NO: 487250 - DNA, 75 bp, synthetic construct
  source 1..75: mol_type = other DNA
gtccatccccgggaagtgattaaacgcgccctgcaccacaatgccgctgccgtggtgctggcacacaatcacccg

SEQ ID NO: 487251 - DNA, 75 bp, synthetic construct
  source 1..75: mol_type = other DNA
taaacgcgccctgtaccacaatgccgctgccgtggtgctggcacacaatcacccgtccggtgaagtcacccccag

SEQ ID NO: 487252 - DNA, 75 bp, synthetic construct
  source 1..75: mol_type = other DNA
ccgtcagaaaggtctggcagaagcagaagcacagcgcgcactgaacgatgccattaacgtgctttcggatgagca

SEQ ID NO: 487253 - DNA, 75 bp, synthetic construct
  source 1..75: mol_type = other DNA
cgcagaaaacctatcgtgactctcgttggcaagaacgagatgagttgttccagggaatggttgccgaaggtattt

SEQ ID NO: 487254 - DNA, 75 bp, synthetic construct
  source 1..75: mol_type = other DNA
ctttggaaacgccagtaccgcacataccagataccctgacctatggtgacagcctggagttgaatgtgagtctgt

SEQ ID NO: 487255 - DNA, 75 bp, synthetic construct
  source 1..75: mol_type = other DNA
ctgaggtgcatccccgggaggtcgttaagcgcgccctgtatttcaatgcggcggcggtgatactggcccataacc

SEQ ID NO: 487256 - DNA, 75 bp, synthetic construct
  source 1..75: mol_type = other DNA
atgaataaaaaatcggaaccacaaaactggtcggttgatgaacaacttgcacacatcccactgaaatatcgttga

SEQ ID NO: 487257 - DNA, 75 bp, synthetic construct
  source 1..75: mol_type = other DNA
atgaatgaagacacaaaacgtcagactgatatgaaaaatgcagccctgggggcagcagatgtcctacggggactg

SEQ ID NO: 487258 - DNA, 75 bp, synthetic construct
  source 1..75: mol_type = other DNA
cggtttcaggtaattttgtgagtatcactgtatacaacgacaacgggagcactgatgttaagaacttagaagaag

SEQ ID NO: 487259 - DNA, 75 bp, synthetic construct
  source 1..75: mol_type = other DNA
tggatatccgggtgccggaccatctgatagtcggtggcagccaggatttctcctttgccgaacatggtctgcttt

SEQ ID NO: 487260 - DNA, 75 bp, synthetic construct
  source 1..75: mol_type = other DNA
aaatatttacgcggtaacccctctggcgcgtcacacaaccggactctgtatacctcagaatcccgagttgatcta

SEQ ID NO: 487261 - DNA, 75 bp, synthetic construct
  source 1..75: mol_type = other DNA
cgttcgaccgcgacgaaggaccgagcgtgaaagcgacgcaaattggctttgggcaattaagccgcgcacaacagg

SEQ ID NO: 487262 - DNA, 75 bp, synthetic construct
  source 1..75: mol_type = other DNA
aaatctttatgcgataactgatcaaattcgtaacacgacaggtttctgcttacctcagaaccccgagttaatata

SEQ ID NO: 487263 - DNA, 75 bp, synthetic construct
  source 1..75: mol_type = other DNA
gtttaatattatgcaaaaaacacgcctcaacaaagtttttaaagaagtttacgaacaactggacgatgtatattc

SEQ ID NO: 487264 - DNA, 75 bp, synthetic construct
  source 1..75: mol_type = other DNA
tcaggttattgagagtttcgtagaaaatgaaaaccttacttttgtgctcgatactggcgcatcaacctacgttcc

SEQ ID NO: 487265 - DNA, 75 bp, synthetic construct
  source 1..75: mol_type = other DNA
ccaagatggtaaactcatcaatgagtggaaaggtaatgtatcagtagagtattcaggtaatcatggtaaatataa

SEQ ID NO: 487266 - DNA, 75 bp, synthetic construct
  source 1..75: mol_type = other DNA
aaggaagcaagagcaagaaaggattttcattattagagttattattggtgttaggtgttatagcggcattgatag

SEQ ID NO: 487267 - DNA, 75 bp, synthetic construct
  source 1..75: mol_type = other DNA
catcaatgattacgaacttactaataatattataaagggcagaccattcccctcaatacatgtttcgcataataa

SEQ ID NO: 487268 - DNA, 75 bp, synthetic construct
  source 1..75: mol_type = other DNA
aacgcgccctgtaccacaatgccgctgccgtggtactggcacacaatcacccgtccggtgaagtcacacccagta

SEQ ID NO: 487269 - DNA, 75 bp, synthetic construct
  source 1..75: mol_type = other DNA
ggcacgagaatggctgattctgagcatggcgggactggagcgggaagagttccgggtgctgtatctgaacaacca

SEQ ID NO: 487270 - DNA, 75 bp, synthetic construct
  source 1..75: mol_type = other DNA
atgcaacagatttcctttctgcccggagaaatgacgcccggtgagcgcagcctcattcaacgggccctgaaaacc

SEQ ID NO: 487271 - DNA, 75 bp, synthetic construct
  source 1..75: mol_type = other DNA
accctggaccgccatcttcatgaacccggtgtggccttcacctccacccgtgcggcacgggaatggctgattctg

SEQ ID NO: 487272 - DNA, 75 bp, synthetic construct
  source 1..75: mol_type = other DNA
cgtctggtacaggcactggccctggtggatatccgggtgccggaccatctgatagtcggtggcagccaggttttc

SEQ ID NO: 487273 - DNA, 75 bp, synthetic construct
  source 1..75: mol_type = other DNA
gagcgatgacgcccggcgagcgcagcctcattcaacgggccctgaaaaccctggaccgccatcttcatgaacccg

SEQ ID NO: 487274 - DNA, 75 bp, synthetic construct
  source 1..75: mol_type = other DNA
tggagttcactgcacacctgtggcgtccattttcatgaacccggggtggcattaacctccaacattgcggcacgg

SEQ ID NO: 487275 - DNA, 75 bp, synthetic construct
  source 1..75: mol_type = other DNA
cgactggtacaggtgcttcagttggtggatatccgcgtccctgaccatctgattgtcggcggcaggcaaatctat

SEQ ID NO: 487276 - DNA, 75 bp, synthetic construct
  source 1..75: mol_type = other DNA
gcgagataacgccacaggatcggcgtctcatccagcgcgccctcagggttctggaccggcatctgcatgagcccg

SEQ ID NO: 487277 - DNA, 75 bp, synthetic construct
  source 1..75: mol_type = other DNA
tggatatccgggtgccggaccatctgatagtcggtggcagtcaggttttctcctttgcggaacacggcctgcttt

SEQ ID NO: 487278 - DNA, 75 bp, synthetic construct
  source 1..75: mol_type = other DNA
cggaagtccatccccgggaggtgattaaacgcgccctgcaccacaatgccgctgccgtggtactggccctggttg

SEQ ID NO: 487279 - DNA, 75 bp, synthetic construct
  source 1..75: mol_type = other DNA
taaggcagaccggcttatcaccgaacgtcttgtacaggcgctggccctggttgacatccgggtgccggaccatct

SEQ ID NO: 487280 - DNA, 75 bp, synthetic construct
  source 1..75: mol_type = other DNA
attgttaagacactggatttggtgaaagtgagggtgctggatcatttcattattggggcgggggatgttctctct

SEQ ID NO: 487281 - DNA, 75 bp, synthetic construct
  source 1..75: mol_type = other DNA
cgactgatttaccagcggcttaccacattgaacaacgcgcccacgcctttccgtggagtgaaaaaacctttgcca

SEQ ID NO: 487282 - DNA, 75 bp, synthetic construct
  source 1..75: mol_type = other DNA
ctgcacctttattgatgaagcggccctcggcaatggctggtcgaacaagaacgagtggatcaaacagtcactgct

SEQ ID NO: 487283 - DNA, 75 bp, synthetic construct
  source 1..75: mol_type = other DNA
gggcttattaaccatcccgtcgtggagcgcgccaatcaggtggcaatggggcgctatcttgacgctcagccggta

SEQ ID NO: 487284 - DNA, 75 bp, synthetic construct
  source 1..75: mol_type = other DNA
tgataccgcgctcagtcagttacagtccgagttcgacacgtacaaaacggaacagacaaggattgagaatgctgc

SEQ ID NO: 487285 - DNA, 75 bp, synthetic construct
  source 1..75: mol_type = other DNA
gggctgaggccggttatcttgggcagattgctcaactggagagtcagaacaaacaactacaggggcaaattaacg

SEQ ID NO: 487286 - DNA, 75 bp, synthetic construct
  source 1..75: mol_type = other DNA
cgacaacgcgaagcagtgccgcagctggcgcagccagataaacagtctgctggacgaacgggaaggattacagaa

SEQ ID NO: 487287 - DNA, 75 bp, synthetic construct
  source 1..75: mol_type = other DNA
tcacgaactattccggtcatgactttaagtttgaagagcaaaaacgcctggtgtctctgttgacggatgctcatc

SEQ ID NO: 487288 - DNA, 75 bp, synthetic construct
  source 1..75: mol_type = other DNA
gagtggaacctctctttgccagacgttctgtgtcttgtaagggagacactcgtggtgttgctcatgacgttatgg

SEQ ID NO: 487289 - DNA, 75 bp, synthetic construct
  source 1..75: mol_type = other DNA
cggaagtgggcttgttggtgcttatcgaatggttgcatttggcgaatatgctgatgatgagactgcttctactgt

SEQ ID NO: 487290 - DNA, 75 bp, synthetic construct
  source 1..75: mol_type = other DNA
gcccgtcgatgccattatgggtggtggaaaacaaaaccaacggccatcgtacttttagcaatttcaatgagggtc

SEQ ID NO: 487291 - DNA, 75 bp, synthetic construct
  source 1..75: mol_type = other DNA
tatgtgggggtcgcctcagaaaacggaatctatggtcactcccgtttttgcaacaccgattttgacgacaagtag

SEQ ID NO: 487292 - DNA, 75 bp, synthetic construct
  source 1..75: mol_type = other DNA
aagccgtgccccatttattataaccccaccgctatttcgtcttgaagctggcgatgactcatcactgcgaattat

SEQ ID NO: 487293 - DNA, 75 bp, synthetic construct
  source 1..75: mol_type = other DNA
tccgagttcgacacgtacaaaacggaacagacaaggattgagaatgctgcgctacgggcctgggccagacggtat

SEQ ID NO: 487294 - DNA, 75 bp, synthetic construct
  source 1..75: mol_type = other DNA
gcgatctgaactccatcctcttcctgctaactccggcggaggatatggccaaactgcagcaacttgtcgccttgc

SEQ ID NO: 487295 - DNA, 75 bp, synthetic construct
  source 1..75: mol_type = other DNA
gtgaatatagacgaaagtaattatattgacgttgccgccattattttatcagtcagtgatgttgaacgtggaaaa

SEQ ID NO: 487296 - DNA, 75 bp, synthetic construct
  source 1..75: mol_type = other DNA
gcgcttcttccagtttgtaccaggtgagcactggcattcttttgaaggctatgcagagaatcaatactttgtcga

SEQ ID NO: 487297 - DNA, 75 bp, synthetic construct
  source 1..75: mol_type = other DNA
gtgatggaaagtattcgccagggagatgtcgattttggcatcgtcatcgatccaggcccagtgggcgatctgcaa

SEQ ID NO: 487298 - DNA, 75 bp, synthetic construct
  source 1..75: mol_type = other DNA
gttgatgctggtgcgcaggaagaaccgttcactttccaccgccgctgaagcgttatgggacgtggtacgaggcca

SEQ ID NO: 487299 - DNA, 75 bp, synthetic construct
  source 1..75: mol_type = other DNA
attgcaaacgcatttcagcgtatgccgatgttgatattaatcgtacttgcttcaatcaaattggaaatgatttga

SEQ ID NO: 487300 - DNA, 75 bp, synthetic construct
  source 1..75: mol_type = other DNA
ctatattggcgatgagcagcagctacgacaactcacattgtggatgatgggcaatcttggacaggcgcaatggcc

SEQ ID NO: 487301 - DNA, 75 bp, synthetic construct
  source 1..75: mol_type = other DNA
tgaagtgctgaaaaaaatgaagaaaaccgctgaagattacttgggtgaaccggtaactgaagctgttattaccgt

SEQ ID NO: 487302 - DNA, 75 bp, synthetic construct
  source 1..75: mol_type = other DNA
cgacaacgcagggcaatgtcgtcgctggcgaaaccagataaacgcgctactggatgaacgggaaggattacagaa

SEQ ID NO: 487303 - DNA, 75 bp, synthetic construct
  source 1..75: mol_type = other DNA
tgcgccaatggcctgttttgtcgccgctgtacgtgcactggctgagatcgtcgcaaaggagaatcatcatggtta

SEQ ID NO: 487304 - DNA, 75 bp, synthetic construct
  source 1..75: mol_type = other DNA
tttgcccccaccgcagcctgtctcttgatcagatctcctgatcaagagacttcatcaccaggtaaccctcaacca

SEQ ID NO: 487305 - DNA, 75 bp, synthetic construct
  source 1..75: mol_type = other DNA
gatggcagacacgcttgcccgcacgctggtacagccagcagaaatgcccgtgggattattaaccagcctgcttgg

SEQ ID NO: 487306 - DNA, 75 bp, synthetic construct
  source 1..75: mol_type = other DNA
gctaaatgatgtgaatgctgacctgattaacttttacaagactctgcaacgcgaggcgcattcacttatcactct

SEQ ID NO: 487307 - DNA, 75 bp, synthetic construct
  source 1..75: mol_type = other DNA
ccaccaaagtgcaaaacaccaacggtgtgtatgtggttccggcgtttaccgggctgggtgcgccgtactgggatc

SEQ ID NO: 487308 - DNA, 75 bp, synthetic construct
  source 1..75: mol_type = other DNA
cggaagttcgcgaagtgactgcattgggtgcggcctatcttgctggtctggcagttggcttctggcagaacctcg

SEQ ID NO: 487309 - DNA, 75 bp, synthetic construct
  source 1..75: mol_type = other DNA
agcgcattgcctatacgccaattccctttgcctacaccctgattttgcatcgtaccgtttatctgttttgtatca

SEQ ID NO: 487310 - DNA, 75 bp, synthetic construct
  source 1..75: mol_type = other DNA
tgtttcttttttccccactaacgttatgtatttcagttatggcctccaccgcgaagaccactgtaaaacgtatcc

SEQ ID NO: 487311 - DNA, 75 bp, synthetic construct
  source 1..75: mol_type = other DNA
gcatgtgacgattgcgagatacgaatgattattcgtctggcaatggggaaaacaataactgctctcattactcca

SEQ ID NO: 487312 - DNA, 75 bp, synthetic construct
  source 1..75: mol_type = other DNA
gaaaccactgagcgtaattaccgttacgcaggctggaaaaaagcggtcaaacgcgcgatggcgtgggaagaacac

SEQ ID NO: 487313 - DNA, 75 bp, synthetic construct
  source 1..75: mol_type = other DNA
ctatctggagcggcaggataaccggctgggccagccgttaacgctggtgcctgcgctggcgaagtatgtccggcg

SEQ ID NO: 487314 - DNA, 75 bp, synthetic construct
  source 1..75: mol_type = other DNA
gcgcatcataccagcccgatctgcgtgaagcgcaatgtgctggttggtaccttcatacctcatccgttgttgacc

SEQ ID NO: 487315 - DNA, 75 bp, synthetic construct
  source 1..75: mol_type = other DNA
tcgcaacgatatcgaaatgcttcgcgaaaacatggttaagtcgaaaggccgcaataactttaaaaatctgtttct

SEQ ID NO: 487316 - DNA, 75 bp, synthetic construct
  source 1..75: mol_type = other DNA
gacggtttctttgaaatcggtctgcgcccgtgggatttcgcggcaggcgagctgctggttcgtgaagcaggcggc

SEQ ID NO: 487317 - DNA, 75 bp, synthetic construct
  source 1..75: mol_type = other DNA
gatacgaatgattattcgtctggcgagggggaaaacaataactgctctcattactcctgaaaatctcgcattagc

SEQ ID NO: 487318 - DNA, 75 bp, synthetic construct
  source 1..75: mol_type = other DNA
atgaacggacaaatctcaattgttcgaccaggagcatgtgacgatagcgagatacgcatgattattcgtctggcg

SEQ ID NO: 487319 - DNA, 75 bp, synthetic construct
  source 1..75: mol_type = other DNA
gtcgatggcgatattaatcggctacgttctattgccggaattacccacactgccgcatggaaaaaccagcgcatt

SEQ ID NO: 487320 - DNA, 75 bp, synthetic construct
  source 1..75: mol_type = other DNA
gtcgttcttgcccggattgtttttccactcatcgtacatgcgtgaatattgacgaaagtaattatattgacgttg

SEQ ID NO: 487321 - DNA, 75 bp, synthetic construct
  source 1..75: mol_type = other DNA
aacaactgcaaaaagagatgttccgtaaggaacacttcccacgcgtcagcatgaatccacaggaagccaactatg

SEQ ID NO: 487322 - DNA, 75 bp, synthetic construct
  source 1..75: mol_type = other DNA
tggttttaaacgccctgctaacaccgggtgatctggtgctgtttgaccgcaataaccacaaatctaaccaccacg

SEQ ID NO: 487323 - DNA, 75 bp, synthetic construct
  source 1..75: mol_type = other DNA
ctgtggtttcccctcaaaacgtctggatgcgaaactgcgtttaaccattcatgaatcacttggacgcttgcgtaa

SEQ ID NO: 487324 - DNA, 75 bp, synthetic construct
  source 1..75: mol_type = other DNA
tacctacatcgaaagtcttccccagaatcctgcacctatttccatgaaacggatgcgtgaccggctaaatctcac

SEQ ID NO: 487325 - DNA, 75 bp, synthetic construct
  source 1..75: mol_type = other DNA
acaaacagcatgaagagcgctacgccggttataccctgcgtcagttgtgtcaggaaatgcatgatttgtatgccc

SEQ ID NO: 487326 - DNA, 75 bp, synthetic construct
  source 1..75: mol_type = other DNA
ggtctgattctgacgctggtgggtatgtatggtttgatgttcctgacctacaaaacggcgaataagccgaccggg

SEQ ID NO: 487327 - DNA, 75 bp, synthetic construct
  source 1..75: mol_type = other DNA
ggtggtaaccgatgtccaggctgtggaacaactactccaggagcagggttacgagccgggcgtcattgtttcgtt

SEQ ID NO: 487328 - DNA, 75 bp, synthetic construct
  source 1..75: mol_type = other DNA
atgccaaggatcatcactaggccgtttctttttaccccactgacgttatgtatttcagccgtggcctctgcctcg

SEQ ID NO: 487329 - DNA, 75 bp, synthetic construct
  source 1..75: mol_type = other DNA
gaatactttggcgaaatgctcttccgctctgacttgtgtaatgctgacgtagcaatgggcgatctgctgattcat

SEQ ID NO: 487330 - DNA, 75 bp, synthetic construct
  source 1..75: mol_type = other DNA
gtggaatactttggtgaggcgctgttccgtgccgacttgtgcaacgccgacgtagcgatgggcgatctgctgatt

SEQ ID NO: 487331 - DNA, 75 bp, synthetic construct
  source 1..75: mol_type = other DNA
tactagttactttatataaagcaaagatcaataacaataccgacaatactatacactatgtagatgatgtctgga

SEQ ID NO: 487332 - DNA, 75 bp, synthetic construct
  source 1..75: mol_type = other DNA
tcccggtgtgctggccgtgtttgctgaacgccgtaaggacagttttggcccgtatgtccgactgatgagcgtcac

SEQ ID NO: 487333 - DNA, 75 bp, synthetic construct
  source 1..75: mol_type = other DNA
aacatggcgggactggagcgtgaagagttccgggtgctgtatctgaataaccagaatcagctgattgccggtgaa

SEQ ID NO: 487334 - DNA, 75 bp, synthetic construct
  source 1..75: mol_type = other DNA
ctcctttgccgaacatggtctgctttaacccgtcacaaccacatcacacctgttttcacttttatcttctgtctt

SEQ ID NO: 487335 - DNA, 75 bp, synthetic construct
  source 1..75: mol_type = other DNA
ttaatccaccacaacggaaagctcttttttctgcatggcttggatatgtatttgatggctttgattttatgatga

SEQ ID NO: 487336 - DNA, 75 bp, synthetic construct
  source 1..75: mol_type = other DNA
gcgatgcacctgaacccgaacgcgggcgtgaagcgcgagattgccacgctgtcccgtgcagtgaaaaagctgacc

SEQ ID NO: 487337 - DNA, 75 bp, synthetic construct
  source 1..75: mol_type = other DNA
aaggcatgcgcctttgcccgtcgtggcctgaccgatgccgacagcatggcggtgagtctgaagctgttccgtgag

SEQ ID NO: 487338 - DNA, 75 bp, synthetic construct
  source 1..75: mol_type = other DNA
aagaatacgaggtcaacggagcggacaacctgctagaagcttgtctgtctctgggccttgatattccttactttt

SEQ ID NO: 487339 - DNA, 75 bp, synthetic construct
  source 1..75: mol_type = other DNA
cattatgggcggcggttcgcttgaagaagcgttaaccgaactggaaaccggacgcgccgacgcggtggtggtgct

SEQ ID NO: 487340 - DNA, 75 bp, synthetic construct
  source 1..75: mol_type = other DNA
tgattcaggcggcggctaacgtcgcgaaagccctgaaaggtcgcggcgctgacgtcggtatcaccatgattgccc

SEQ ID NO: 487341 - DNA, 75 bp, synthetic construct
  source 1..75: mol_type = other DNA
atctccatccatctcgcattattatcggtgaatgttctgaacgggcagaacgtttggcagtgttatttcaggaag

SEQ ID NO: 487342 - DNA, 75 bp, synthetic construct
  source 1..75: mol_type = other DNA
tgtttggatggaaggagtcaaatcacacgatgcgcagcctgacggaaggcaacgcattgttgagcaaagcagtgg

SEQ ID NO: 487343 - DNA, 75 bp, synthetic construct
  source 1..75: mol_type = other DNA
tcaggaagaggcattgtcaaaggcgggttttcagcctgataaaatttgtgttgagcatgccagcgcgaaggacac

SEQ ID NO: 487344 - DNA, 75 bp, synthetic construct
  source 1..75: mol_type = other DNA
gtgcgtataggtatcgatttaggcggcactaaaactgaagtgattgcactgggcgaggccggggagcagttgtac

SEQ ID NO: 487345 - DNA, 75 bp, synthetic construct
  source 1..75: mol_type = other DNA
gcaggcgcgtaaagactggcaaaacgcccgcaaaaaactatcaagggcaaagatgaagaaaccggttgtggttga

SEQ ID NO: 487346 - DNA, 75 bp, synthetic construct
  source 1..75: mol_type = other DNA
cgcgagacgttacggcaactggaagccaagacaggtgcgacaagatatctgatgagtgttctcgccagtgagctg

SEQ ID NO: 487347 - DNA, 75 bp, synthetic construct
  source 1..75: mol_type = other DNA
aaaaagcgattacaccggtccggcctggtatctgcttgactgttcccgcgctgtgaaaccgctgatttatcagga

SEQ ID NO: 487348 - DNA, 75 bp, synthetic construct
  source 1..75: mol_type = other DNA
ggcgtcagaacataatctgtcgcgagtgccggaagagtgaggttatgcagcgagcgctggcgttttatcaggggg

SEQ ID NO: 487349 - DNA, 75 bp, synthetic construct
  source 1..75: mol_type = other DNA
ctgcgttatcgcgaggaagtcccttgttattgcggtaaacaaggttgtattgaaacctttatttcgggcacggga

SEQ ID NO: 487350 - DNA, 75 bp, synthetic construct
  source 1..75: mol_type = other DNA
tgggtaagcgaaccattcagcaaatggaagcgcatggctactctatcgccaataaaacgtttgaaggcaccgtgg

SEQ ID NO: 487351 - DNA, 75 bp, synthetic construct
  source 1..75: mol_type = other DNA
agcgggaaaaaattaagaggcaggttgttgaactcgtgcgccagagtgggcgcgagacgttacgacaactggaag

SEQ ID NO: 487352 - DNA, 75 bp, synthetic construct
  source 1..75: mol_type = other DNA
agccagaacataatctgtcgcgagtgccggaagagtgaggttatgcagcgagtgctggcgttttatcagggtaat

SEQ ID NO: 487353 - DNA, 75 bp, synthetic construct
  source 1..75: mol_type = other DNA
cgcggcagcgggagcgcagacggtatttgccgtgattatcggcacgggatgcggcgcgggcgtggcattcaatgg

SEQ ID NO: 487354 - DNA, 75 bp, synthetic construct
  source 1..75: mol_type = other DNA
gatcgccacgttggttgatatggcggagcaggcgacagggcagcgcggaacggtaggtatgggcattcctggttc

SEQ ID NO: 487355 - DNA, 75 bp, synthetic construct
  source 1..75: mol_type = other DNA
caggctacggattattcctgtctgagcaggcccgtaaggactggcaaaacgcccgcaaaaaactatccagggcaa

SEQ ID NO: 487356 - DNA, 75 bp, synthetic construct
  source 1..75: mol_type = other DNA
gcggtaactgccatcttcaggatatgactgtgatgaccggacacagcttccgtcgctaccgtttcaccaaacgta

SEQ ID NO: 487357 - DNA, 75 bp, synthetic construct
  source 1..75: mol_type = other DNA
ggtgccggaccctctccttcagtccgaacaaaccccggtactatgaacgttatctgcagcgtatgaaagaaagga

SEQ ID NO: 487358 - DNA, 75 bp, synthetic construct
  source 1..75: mol_type = other DNA
tggtggatatccgcgtccctgaccatctgattgtcggcggtaggcaaatctattcgttcgcagaacagggtctgc

SEQ ID NO: 487359 - DNA, 75 bp, synthetic construct
  source 1..75: mol_type = other DNA
ggtggtcaaacgcgccctgtatttcaatgcagcagcagtgatactggcgcataaccacccctccggcgataccac

SEQ ID NO: 487360 - DNA, 75 bp, synthetic construct
  source 1..75: mol_type = other DNA
atgcaacagatttcctttctgcccggagaaatgacgcccggcgagtgcagcctcattcaacgggccctgaaaacc

SEQ ID NO: 487361 - DNA, 75 bp, synthetic construct
  source 1..75: mol_type = other DNA
tttattcaacaaagccttgccacaaccatcttgtggacattatttgcgttgttcatattcttattcgccatggat

SEQ ID NO: 487362 - DNA, 75 bp, synthetic construct
  source 1..75: mol_type = other DNA
tcattaacagaaaaacacttctggaaatgatcccattgtcagcccgcaccatttataaccttgaacagcgaggcg

SEQ ID NO: 487363 - DNA, 75 bp, synthetic construct
  source 1..75: mol_type = other DNA
gggagtggtcctctattcgtttttacggtgtctggcgaaacagaagcgcgacacaaaaccgctggaagaatcaca

SEQ ID NO: 487364 - DNA, 75 bp, synthetic construct
  source 1..75: mol_type = other DNA
atgaaaaaccgtaaagcaagactgctgatagcaaaacccgggcagcttatccgtatctcaaatcggcttgttgtt

SEQ ID NO: 487365 - DNA, 75 bp, synthetic construct
  source 1..75: mol_type = other DNA
gataaataaacaattagagaaagtgttgggggggatagcacgaaaacaaacctcagaaaggaataaaggcggtct

SEQ ID NO: 487366 - DNA, 75 bp, synthetic construct
  source 1..75: mol_type = other DNA
cacctgaactgccgttaccagcactgcgtaccattaagcgagccttggttctgcttgaccagcacttgctagaac

SEQ ID NO: 487367 - DNA, 75 bp, synthetic construct
  source 1..75: mol_type = other DNA
aatcacaaagtccatttaatgagcctcgcgatgcggggcttttttatgtccgcagtaaacgcgcttcacacgcgc

SEQ ID NO: 487368 - DNA, 75 bp, synthetic construct
  source 1..75: mol_type = other DNA
ttggtgatggccgcattctgaaagccttaaaactggcggctccggatgcattgattaccgggatcgaattgaacg

SEQ ID NO: 487369 - DNA, 75 bp, synthetic construct
  source 1..75: mol_type = other DNA
aaaccctggaccgccatcttcatgaacccggcgtggccttcacctccacccgtgcggcacgagaatggctgattc

SEQ ID NO: 487370 - DNA, 75 bp, synthetic construct
  source 1..75: mol_type = other DNA
gcaggtgggcttgccgatgggtatgtccggcattgctccggtgctggctggcgcgcatcttgaggatctcaagga

SEQ ID NO: 487371 - DNA, 75 bp, synthetic construct
  source 1..75: mol_type = other DNA
cctttagttacgatggcaacacggtcacgctgccggttgaaatcgccgaagggctgacggcagggcaggtgggct

SEQ ID NO: 487372 - DNA, 75 bp, synthetic construct
  source 1..75: mol_type = other DNA
gcgtaggaactccagcggtgactccttaaaacagtacaaggaggcctttcacatggctgtatccgcacgccctta

SEQ ID NO: 487373 - DNA, 75 bp, synthetic construct
  source 1..75: mol_type = other DNA
gaaagccctgaaaggtcgcggcgctgacgtaggtatcactatgattgcccgttccgtaaacagtatggggctggg

SEQ ID NO: 487374 - DNA, 75 bp, synthetic construct
  source 1..75: mol_type = other DNA
gagccggagctgcaaagcaaagtcgacgtcatcgtacaggcactggctggtgcgaagaaaccgttgattatctcc

SEQ ID NO: 487375 - DNA, 75 bp, synthetic construct
  source 1..75: mol_type = other DNA
tgcccgaccggcgtatttaccgacaaaacgcactccgagcgttataaccgtaaatgggatatgcagtttgcgccg

SEQ ID NO: 487376 - DNA, 75 bp, synthetic construct
  source 1..75: mol_type = other DNA
atggtttcttgccgaccggtctttggctttaatttctgggggttaaagagtttgccggaagggtggatcaacatt

SEQ ID NO: 487377 - DNA, 75 bp, synthetic construct
  source 1..75: mol_type = other DNA
tcagggtcaagtgacggtcaatttttcagcgcaaggctggcggattagcagcctcagagagcaaattttacctcg

SEQ ID NO: 487378 - DNA, 75 bp, synthetic construct
  source 1..75: mol_type = other DNA
tcagcgcaaggctggcggattagcagcctcagagagcaaattttacctcgttggtatcatcagtggtttggcgtg

SEQ ID NO: 487379 - DNA, 75 bp, synthetic construct
  source 1..75: mol_type = other DNA
cgtctggtacaggcgctggccctggtggatatccgggtaccggaccatctgatagtcggtggcagccaggttttc

SEQ ID NO: 487380 - DNA, 75 bp, synthetic construct
  source 1..75: mol_type = other DNA
atgagtataaaaaacagtggcttgctagttttaatgatgacgttttcattggtcaatgtcgctgatgcgaaaaat

SEQ ID NO: 487381 - DNA, 75 bp, synthetic construct
  source 1..75: mol_type = other DNA
ccagcaaggcagaccggcttatcacggaacgtctggtacaggcactgggcctggtggatatccgggtgccggacc

SEQ ID NO: 487382 - DNA, 75 bp, synthetic construct
  source 1..75: mol_type = other DNA
tccggaccttatctggtcattacctgacggagaaatacgtcgttatgacaggcaccaaaacataatttgctgtga

SEQ ID NO: 487383 - DNA, 75 bp, synthetic construct
  source 1..75: mol_type = other DNA
gaggagcgaagctatgcagcgcgtactggcgttttaccagaatggttttcgagagatattcggtgaacaggttat

SEQ ID NO: 487384 - DNA, 75 bp, synthetic construct
  source 1..75: mol_type = other DNA
agctgaagaaaccggttgtggttgatccggaccttatctggtcgttacctgacggagaaatacgtcgctacgaca

SEQ ID NO: 487385 - DNA, 75 bp, synthetic construct
  source 1..75: mol_type = other DNA
atggcaaaagtatttacacaagaagagcgagaaaaaattaaagggcaggttgttgagctagtacgccggagtggg

SEQ ID NO: 487386 - DNA, 75 bp, synthetic construct
  source 1..75: mol_type = other DNA
atggcaaaagtatttacaccagaagagcgggaaaaaattaaagggcaggttgttgaacttgtacgtctgagcggc

SEQ ID NO: 487387 - DNA, 75 bp, synthetic construct
  source 1..75: mol_type = other DNA
agcgggaaaaaattaaggggcaggttgttgaactcgtacgccagagtgggcgcgagacgttacgacaactggaag

SEQ ID NO: 487388 - DNA, 75 bp, synthetic construct
  source 1..75: mol_type = other DNA
gcccgcaaaaaattatcgagggcaaagctgaagaaaccggttgtggttgatccggaccttatctggtcattacct

SEQ ID NO: 487389 - DNA, 75 bp, synthetic construct
  source 1..75: mol_type = other DNA
tgttgaacttgtacgtctgagcggtcgcgagacgttgcggcaactggaagccaagacaggtacgacaagatatct

SEQ ID NO: 487390 - DNA, 75 bp, synthetic construct
  source 1..75: mol_type = other DNA
cgagtgccggaagagcgaagttatgcagcgcatactggcattttatcagggaaatgtttggtatttattgaaatg

SEQ ID NO: 487391 - DNA, 75 bp, synthetic construct
  source 1..75: mol_type = other DNA
ggtcgaacttgtgcgccagagcggtcgcgagacattacgacagttggaagctaaaacaggtgcgacaagatatct

SEQ ID NO: 487392 - DNA, 75 bp, synthetic construct
  source 1..75: mol_type = other DNA
atggcaaaagtatttacacaggaagagcgggaaaaaattaaagggcagattgttgatctcgtacgccagagcgag

SEQ ID NO: 487393 - DNA, 75 bp, synthetic construct
  source 1..75: mol_type = other DNA
ggcgtctgaacataatctgtcgcgagtgccgtaaaagcgaagttatgcagcgcatattgtcgttttatcagggag

SEQ ID NO: 487394 - DNA, 75 bp, synthetic construct
  source 1..75: mol_type = other DNA
agcaggagaaaattaaagggcaggttgttgaactcgtacgccagagtgggcgcgagacgttacgacaactggaaa

SEQ ID NO: 487395 - DNA, 75 bp, synthetic construct
  source 1..75: mol_type = other DNA
tgaaggcactcatcgctttagcgacctgcgccgtaaaatgggcggggtgagtgaaaagatgctagcgcagtcgtt

SEQ ID NO: 487396 - DNA, 75 bp, synthetic construct
  source 1..75: mol_type = other DNA
tgccgccgcatgtggaatacagcctcacgccgctgggcgagcaggtgagcgaaaaggttgctgcactggcggact

SEQ ID NO: 487397 - DNA, 75 bp, synthetic construct
  source 1..75: mol_type = other DNA
gttgccagtggcgatttatacaactccggctacgggctatttccgtctgaacaggcacgtaaggactggataaag

SEQ ID NO: 487398 - DNA, 75 bp, synthetic construct
  source 1..75: mol_type = other DNA
atgcaacaactttcctttctgcccggagagatgacgcccggcgagcgcagcctcattcagcgggccctgaaaact

SEQ ID NO: 487399 - DNA, 75 bp, synthetic construct
  source 1..75: mol_type = other DNA
gtcgccagtggtgatgtttacaattctggctacggattattcccgtttgagcaggcgcgtaaagactggcaaaac

SEQ ID NO: 487400 - DNA, 75 bp, synthetic construct
  source 1..75: mol_type = other DNA
atgagtcaggttagtctgtcgcaacaactgaaagagggaaatctcttcgctgaacagtgcccgtcgcgcgaggtg

SEQ ID NO: 487401 - DNA, 75 bp, synthetic construct
  source 1..75: mol_type = other DNA
ctaaaacaggggcgacaagatacctgatgagcgttctcgccagagagctggttgccagtggtgatgtatacaact

SEQ ID NO: 487402 - DNA, 75 bp, synthetic construct
  source 1..75: mol_type = other DNA
gttgccagtggcgatgtatacaactctggctacgggttattcccgtcagaacaggctcgtaaggactggcaaaat

SEQ ID NO: 487403 - DNA, 75 bp, synthetic construct
  source 1..75: mol_type = other DNA
gtgattgccggaggcgcttatggcaaaagtatttacacaagaagagcgggaaaaattaaagggcaggttgttgag

SEQ ID NO: 487404 - DNA, 75 bp, synthetic construct
  source 1..75: mol_type = other DNA
cggagaaatacgccgctacgacagacaacagaacataatctgtggcgagtgccggaagagtgaagctatgcagcg

SEQ ID NO: 487405 - DNA, 75 bp, synthetic construct
  source 1..75: mol_type = other DNA
gcccgcaaaaagatgtcgaaagcagcagtgaaaaaaaagagcgacccggacttggtttattcattaccagacgga

SEQ ID NO: 487406 - DNA, 75 bp, synthetic construct
  source 1..75: mol_type = other DNA
gtcgtctaaacataatttgtagcgagtgccggaggagtgaagttatgcagcgcatactggcattttatcagggaa

SEQ ID NO: 487407 - DNA, 75 bp, synthetic construct
  source 1..75: mol_type = other DNA
atgaaaatcaggcatgagcatatcgaatcagtgttgttggccatggcatctgaaaaagggcaggcatgggttgcc

SEQ ID NO: 487408 - DNA, 75 bp, synthetic construct
  source 1..75: mol_type = other DNA
acagctgccgcaagtggcctggctggcggaacatctggcggcacaactggaagccatcgcgcgtgaagcctccgc

SEQ ID NO: 487409 - DNA, 75 bp, synthetic construct
  source 1..75: mol_type = other DNA
aacagcaaacgctgcatcgtgaagtggaagcctatgaagcgcgcctggcacgctgccgccatgcgctggaaaaaa

SEQ ID NO: 487410 - DNA, 75 bp, synthetic construct
  source 1..75: mol_type = other DNA
gatgaagcgggggatcatttgtccgcgcttcgtcatgcggttgagcaacagcaactaccgcaagtggcctggctg

SEQ ID NO: 487411 - DNA, 75 bp, synthetic construct
  source 1..75: mol_type = other DNA
ggcgtcagaacataatctgtcacgagtgccggaagagtgaagttatgcagcgcatactagcattctatcagggaa

SEQ ID NO: 487412 - DNA, 75 bp, synthetic construct
  source 1..75: mol_type = other DNA
ctggctacgggttattcccgtcagaacaggctcgtaaggactggcaaaacgcccgcaaaaaactctcgagggcaa

SEQ ID NO: 487413 - DNA, 75 bp, synthetic construct
  source 1..75: mol_type = other DNA
aacgaaaaaggattcaacatcaggattttgaacggcgattacgtgagatggtagcggaacgtaaatcccgtctgg

SEQ ID NO: 487414 - DNA, 75 bp, synthetic construct
  source 1..75: mol_type = other DNA
agcgggaaaaaattaaggggcaggttgttgaactcgtgcgccagagtgggcgcgagacgttacggcaactggaag

SEQ ID NO: 487415 - DNA, 75 bp, synthetic construct
  source 1..75: mol_type = other DNA
gtggcaaaagtttttacacaagaagagcgggaaaaaattaaagggcaggttgttgaacttgtacgccggagtggg

SEQ ID NO: 487416 - DNA, 75 bp, synthetic construct
  source 1..75: mol_type = other DNA
ctggctacgggttatttccctctgaacaggctcgtaaggactggcaaaacgcccgcaaaaaactatcgagggcaa

SEQ ID NO: 487417 - DNA, 75 bp, synthetic construct
  source 1..75: mol_type = other DNA
gggcgaagaaacccgctgtggttgatccggaccttatctggtcattaccagacggagaaatacgccgctacgaca

SEQ ID NO: 487418 - DNA, 75 bp, synthetic construct
  source 1..75: mol_type = other DNA
ctgggccagtttccgcaattccgtgagtggattggttcgcgtgtcatcgagaagatgaaagcctatggctattcc

SEQ ID NO: 487419 - DNA, 75 bp, synthetic construct
  source 1..75: mol_type = other DNA
ctaaaactggggcaacaagatatctgatgagcgttctcgcaagagagctggttgccagcggcgatgtatacaact

SEQ ID NO: 487420 - DNA, 75 bp, synthetic construct
  source 1..75: mol_type = other DNA
ttcgcagacggtaacgccaccgtctctaacgagatgaagggcaagctggagctggttgtcgcggattatctgtaa

SEQ ID NO: 487421 - DNA, 75 bp, synthetic construct
  source 1..75: mol_type = other DNA
gacggagaaatacgccgctacgacaggcgtcagaacataatctgtagcgagtgccggaagagcgcagctatgcag

SEQ ID NO: 487422 - DNA, 75 bp, synthetic construct
  source 1..75: mol_type = other DNA
aggtgaagaaacctgctgtggttgatccggaccttatctggtcattacctgacggagaaatacgtcgctacgaca

SEQ ID NO: 487423 - DNA, 75 bp, synthetic construct
  source 1..75: mol_type = other DNA
gcccgcaaaaaactatcgagggcaaaggggaagaaaccgtctatggttgatccggaccttatctggtcattacct

SEQ ID NO: 487424 - DNA, 75 bp, synthetic construct
  source 1..75: mol_type = other DNA
gccaggggggcggcgaattgcccctgataccaggtaaagactggaacaatcagcagaacatctatcaccgttggt

SEQ ID NO: 487425 - DNA, 75 bp, synthetic construct
  source 1..75: mol_type = other DNA
agcgggaaaaaattaaagggcaggtggtggaactcgtacgccagagtgggcgcgagacgttacgacaactggaaa

SEQ ID NO: 487426 - DNA, 75 bp, synthetic construct
  source 1..75: mol_type = other DNA
atggcgatttatcatctcagcatgaaaatcatttcgcgaaaaaacggctacagtgccgttgcttctgctgcctac

SEQ ID NO: 487427 - DNA, 75 bp, synthetic construct
  source 1..75: mol_type = other DNA
cgcaggcaggcgtggacggagatgaccggcgatgccgggttgttatcgctgccgccggaaacgtaccgacaaccg

SEQ ID NO: 487428 - DNA, 75 bp, synthetic construct
  source 1..75: mol_type = other DNA
gcggtcatgctcgatgggtattaccgggaaggagagctactgcgtctcggtctgggattatcccccggcgaacaa

SEQ ID NO: 487429 - DNA, 75 bp, synthetic construct
  source 1..75: mol_type = other DNA
agtcgaagaaaccgcttgtcgttgatcccggtcttatccggacattacctaatggggaaattcggcgctacgaca

SEQ ID NO: 487430 - DNA, 75 bp, synthetic construct
  source 1..75: mol_type = other DNA
ggcgtcagaacataatttgtcgtgagtgccgccagagcgaagttatgcagcgtgtgctggcgttctatcggggaa

SEQ ID NO: 487431 - DNA, 75 bp, synthetic construct
  source 1..75: mol_type = other DNA
ctggctacgggttatttccctctgaacaggctcgtaaagactggcaaaacgcccgcaaaaagctatcgagggcaa

SEQ ID NO: 487432 - DNA, 75 bp, synthetic construct
  source 1..75: mol_type = other DNA
gtagccagtggtgttgtatatggctcagggtatggaatatttccttcagagcaggcacgtaaggactggatgaaa

SEQ ID NO: 487433 - DNA, 75 bp, synthetic construct
  source 1..75: mol_type = other DNA
tgtatggtcaatctggggggcttcagtatcaatctcggcaagaccggtatggggaccgcgagaaaggacgacaag

SEQ ID NO: 487434 - DNA, 75 bp, synthetic construct
  source 1..75: mol_type = other DNA
gctggcccccgccttggttggttatgccaaatcaacagaaacctaccggagctggcggagagtgtcagaggtagg

SEQ ID NO: 487435 - DNA, 75 bp, synthetic construct
  source 1..75: mol_type = other DNA
aggctggggtatggatgcctttaaccactccaacccatttgagagtcatgtcatctatgtgcgtgactaccgcaa

SEQ ID NO: 487436 - DNA, 75 bp, synthetic construct
  source 1..75: mol_type = other DNA
atttacggcggttataccattgatcctttattggtcacctatccaaaagaagaagccgacgagctaagagcaaaa

SEQ ID NO: 487437 - DNA, 75 bp, synthetic construct
  source 1..75: mol_type = other DNA
cagtcctccctgctggtcagtgaacgcatggcgttcaagctgcaccgtcagggcatgattatggaaaccatcggg

SEQ ID NO: 487438 - DNA, 75 bp, synthetic construct
  source 1..75: mol_type = other DNA
tggacggacagcagcctgaccaccattctcaatccggaagctgtcatctttgccaatccgatagcacagggggcc

SEQ ID NO: 487439 - DNA, 75 bp, synthetic construct
  source 1..75: mol_type = other DNA
tattgacggtggtaaagcactaactacagactccctgagtagcgttttctccggcctggttggcgcggcaccggc

SEQ ID NO: 487440 - DNA, 75 bp, synthetic construct
  source 1..75: mol_type = other DNA
gctgttcctgctgattctgttcctctctccgctctcttacctcgttccggggtacgcaacggctccggcgctgat

SEQ ID NO: 487441 - DNA, 75 bp, synthetic construct
  source 1..75: mol_type = other DNA
acctgtaacatcgtgactggcatcatgattggtttcgcaactctggtgattggtcgtctggtttccggcgaatgg

SEQ ID NO: 487442 - DNA, 75 bp, synthetic construct
  source 1..75: mol_type = other DNA
ctgggcgcaggactacaatattaagaacggtttgccatcagaaacctatattacttgcgcagaagccaacgaaat

SEQ ID NO: 487443 - DNA, 75 bp, synthetic construct
  source 1..75: mol_type = other DNA
cgggcgatcatgattcatgccggaggggataatcattccgattcacctgctcctctggggggtgggggcgcaaga

SEQ ID NO: 487444 - DNA, 75 bp, synthetic construct
  source 1..75: mol_type = other DNA
tggtcgtctggtctctggcgaatggcgtaggctgaacattggtacggtcgttatcgccgtggcgctggtcacctt

SEQ ID NO: 487445 - DNA, 75 bp, synthetic construct
  source 1..75: mol_type = other DNA
actgaaagcaaatatggcggattatctgctgctcgacggtgagttatgcgccagcgtacagggtaatttgatgga

SEQ ID NO: 487446 - DNA, 75 bp, synthetic construct
  source 1..75: mol_type = other DNA
ctcgaagtcattgtatttaaatccagacaaaaatacggttaacgcttttatacatcagcaagatattaatgtgct

SEQ ID NO: 487447 - DNA, 75 bp, synthetic construct
  source 1..75: mol_type = other DNA
gctttgaaaataactatcttcgccagacaacagcgcaaagtatctctgaaactgtacaacttagcgcttcccgcg

SEQ ID NO: 487448 - DNA, 75 bp, synthetic construct
  source 1..75: mol_type = other DNA
accgataccataaacagcgcggttaacgggcgttgggatgggcaatacggaaatgtctacgctaccgtatctgat

SEQ ID NO: 487449 - DNA, 75 bp, synthetic construct
  source 1..75: mol_type = other DNA
ataacgccttaagctgttatgaaagtatttccgcgacggtttcacagaattttgtcggctggaatatgatgctag

SEQ ID NO: 487450 - DNA, 75 bp, synthetic construct
  source 1..75: mol_type = other DNA
tttaggcggggtagggaatcttgcaatcagcgccagcgtgttccgtaacgatgacggcggcaaaggtgatatgca

SEQ ID NO: 487451 - DNA, 75 bp, synthetic construct
  source 1..75: mol_type = other DNA
agctctacgcagggctggcgaatgccgatgatgtaagtgctttcgagttaggcaataactggacggcggatttag

SEQ ID NO: 487452 - DNA, 75 bp, synthetic construct
  source 1..75: mol_type = other DNA
gtatggcggttgcagagaggtaacagtgctgtaattatggaccctgtggcaggtgatattggtctgattgcggtc

SEQ ID NO: 487453 - DNA, 75 bp, synthetic construct
  source 1..75: mol_type = other DNA
ctggcagacgtttgtgaatggctgcatttactggtggtgtaccacgctggaaggtatgcgggatttaatcaagtc

SEQ ID NO: 487454 - DNA, 75 bp, synthetic construct
  source 1..75: mol_type = other DNA
tcaccgatatctgctgggagtgtatttttccggtaaccattggcaatgttccggtcgccaaaggacgtcagccgg

SEQ ID NO: 487455 - DNA, 75 bp, synthetic construct
  source 1..75: mol_type = other DNA
ggaatcgtgaattaatgttgttgcctggcaagctgcgctatcgcgaagtgtctgccagctttaactacaactata

SEQ ID NO: 487456 - DNA, 75 bp, synthetic construct
  source 1..75: mol_type = other DNA
tggatattctgttctggtgtgcaggttcgcagggcagcatgtacccgttcaacggctgggtgagcaatgaatcca

SEQ ID NO: 487457 - DNA, 75 bp, synthetic construct
  source 1..75: mol_type = other DNA
cacaaacattctgtttcaggagtacaaagtggtgggtcaacaataaattccaatgcaacggataaaccgacatga

SEQ ID NO: 487458 - DNA, 75 bp, synthetic construct
  source 1..75: mol_type = other DNA
ggtatgcaacggctccggcgctgatgtacgttggcctgctgatgctgagcaacgtggcgaaaatcgactttgctg

SEQ ID NO: 487459 - DNA, 75 bp, synthetic construct
  source 1..75: mol_type = other DNA
ccggatatatggcagtgataaggggtgggtgagtcgccacggatactacagtctcagcaacgtgaacgggctggg

SEQ ID NO: 487460 - DNA, 75 bp, synthetic construct
  source 1..75: mol_type = other DNA
ttctcctataccggtggggattttctggtaggagaaactccggcgctgaccttaggcgagggcttttcatatacc

SEQ ID NO: 487461 - DNA, 75 bp, synthetic construct
  source 1..75: mol_type = other DNA
caccgagctggacgcgctgtgctacaacacaggcgatcgcatcgtgctcacggatgatattccggggaacaacac

SEQ ID NO: 487462 - DNA, 75 bp, synthetic construct
  source 1..75: mol_type = other DNA
tgaggcaatagatgccctggagcagacttactggaccccgaacggcgagtatttcgattttgccacgggtgacag

SEQ ID NO: 487463 - DNA, 75 bp, synthetic construct
  source 1..75: mol_type = other DNA
accccatacgtgaggtgtttggccgctgccgtatttatcccgattatgttgtgcaacccgtgacccggtttaacc

SEQ ID NO: 487464 - DNA, 75 bp, synthetic construct
  source 1..75: mol_type = other DNA
actggacggcgtcacagaccgtgacagggcttaccgcatcggtatgcggcggctgatgaaataccgtcatcgtcg

SEQ ID NO: 487465 - DNA, 75 bp, synthetic construct
  source 1..75: mol_type = other DNA
acgtcctagggtcgctggggttcacggccagtcagatagatacggcggcaattgacgcgctggaacaaacctact

SEQ ID NO: 487466 - DNA, 75 bp, synthetic construct
  source 1..75: mol_type = other DNA
ctcgaggtgttgcagaaaatcaccaacgcagggatgggatatttccttctgtctgacgggctggcgtctgccggc

SEQ ID NO: 487467 - DNA, 75 bp, synthetic construct
  source 1..75: mol_type = other DNA
gcgttccggcggtgccgggggtaggaggtagcgccgccagaataaccgccagtgcagcgccgacgacatacgatt

SEQ ID NO: 487468 - DNA, 75 bp, synthetic construct
  source 1..75: mol_type = other DNA
ctccagtacgttcatgatcacatggcagggcaccacctatacggtatcgctggtagcgaactacatctcgatgtc

SEQ ID NO: 487469 - DNA, 75 bp, synthetic construct
  source 1..75: mol_type = other DNA
gacggtatcagtcaggtaacagcaattcagtatcaccccggaaaatatgcctacgatgacgccacttaccccggc

SEQ ID NO: 487470 - DNA, 75 bp, synthetic construct
  source 1..75: mol_type = other DNA
atggatgcactctgctatgagttcatggatcgtattgtactggctgacgacatccctggtggtcagcaactgagt

SEQ ID NO: 487471 - DNA, 75 bp, synthetic construct
  source 1..75: mol_type = other DNA
ccagcctgctggatggcattgtcgtggaatattacggcacgccgacgccgctgcgtcagctggcaagcgtaacgg

SEQ ID NO: 487472 - DNA, 75 bp, synthetic construct
  source 1..75: mol_type = other DNA
tatgggccgtattctgtggtgcaaccgcgctggctggtagctggggtggcctggcgattgctcgtggtgcagtcg

SEQ ID NO: 487473 - DNA, 75 bp, synthetic construct
  source 1..75: mol_type = other DNA
acatgggcgatgttttcaaagaccctcaggtgattcagggactaactgacctggttggcggcgttgttgacctgg

SEQ ID NO: 487474 - DNA, 75 bp, synthetic construct
  source 1..75: mol_type = other DNA
cgcttcaaacggccttcgttgcaccatcagccgatgattatgatggagtggatgtcacttacattaacggcacta

SEQ ID NO: 487475 - DNA, 75 bp, synthetic construct
  source 1..75: mol_type = other DNA
cattgagcgatgaaaacggcaattcactgattggcagcctggacattatgggcgcgctgaaccctgtggttctgc

SEQ ID NO: 487476 - DNA, 75 bp, synthetic construct
  source 1..75: mol_type = other DNA
agaccatcgcggggccagtagcgttgccgctggtgatggatacgctttccggcatgggtgttgatctgatttatg

SEQ ID NO: 487477 - DNA, 75 bp, synthetic construct
  source 1..75: mol_type = other DNA
cgatatttactcgcagtggttaaacattatttcattctttaacctcatgattgtcacagatgatgacctcgccga

SEQ ID NO: 487478 - DNA, 75 bp, synthetic construct
  source 1..75: mol_type = other DNA
atttgacctgcgagtcgtgcaggggcatggctctcatccacgcgtattgcgggaggcaggtgccgacgacgccga

SEQ ID NO: 487479 - DNA, 75 bp, synthetic construct
  source 1..75: mol_type = other DNA
atcgcctgatcgaatatcctggcgcattacaggtggtaaattttgcggaaggcaaagtcagtctggctgtggtaa

SEQ ID NO: 487480 - DNA, 75 bp, synthetic construct
  source 1..75: mol_type = other DNA
tctggttcgaactgagggaacgaatcccgcatattatcagacagcaacggaactcattcagcgccggcaaatgcc

SEQ ID NO: 487481 - DNA, 75 bp, synthetic construct
  source 1..75: mol_type = other DNA
gtgtggcagcaattttccgccacgatcgccccattcgtccacaaggttcgaccattgtggaagctggtgatgaag

SEQ ID NO: 487482 - DNA, 75 bp, synthetic construct
  source 1..75: mol_type = other DNA
acgcgttgtcggcagagtcattgatgaaatcaagctaccgccaggaacgattattggagcggtggtacgtggaaa

SEQ ID NO: 487483 - DNA, 75 bp, synthetic construct
  source 1..75: mol_type = other DNA
gatgaaaccaatatggttgcctgccaggtagcctactcacttttcaacacccctaatcgcatcgctcgcatccgc

SEQ ID NO: 487484 - DNA, 75 bp, synthetic construct
  source 1..75: mol_type = other DNA
accggcagcgataccaactcgaacattctgtttggcaagctgcaaaccatagctgccggcaagttacatatcgat

SEQ ID NO: 487485 - DNA, 75 bp, synthetic construct
  source 1..75: mol_type = other DNA
tctgtttatttttgtgtttatcctgctgtgttcgccgctgttcccgacaataaaaggcgcggcatcccaactggc

SEQ ID NO: 487486 - DNA, 75 bp, synthetic construct
  source 1..75: mol_type = other DNA
gccaaccaaacgatcctccataaagtacacaacgataagagatatagagatctaactaaaaatcacatcagtttt

SEQ ID NO: 487487 - DNA, 75 bp, synthetic construct
  source 1..75: mol_type = other DNA
gggcgttgttacgtgcgtgctcaatctacattctgatctttctgttcattctgctttgctctccactgttcccga

SEQ ID NO: 487488 - DNA, 75 bp, synthetic construct
  source 1..75: mol_type = other DNA
gttactggcagtgacacaaactccaacattctgtttggtaaattgcagaccactgcggctgaaaaattgcatgtg

SEQ ID NO: 487489 - DNA, 75 bp, synthetic construct
  source 1..75: mol_type = other DNA
gcgctggcggatacatcctctccgaagataattttcctgcacatgatgggttctcatccaaatccgtgtgacagc

SEQ ID NO: 487490 - DNA, 75 bp, synthetic construct
  source 1..75: mol_type = other DNA
gacattaaaactttcgaagaaagcgttgggagagtggcaggaaaaccagattaaaattgaaagcaaagcgcttgc

SEQ ID NO: 487491 - DNA, 75 bp, synthetic construct
  source 1..75: mol_type = other DNA
gcctgacattttcattaatgtctcagccgaatgtttttacggattatataaataaaaatgatgtactggcatggg

SEQ ID NO: 487492 - DNA, 75 bp, synthetic construct
  source 1..75: mol_type = other DNA
gctggagctcatttttaatactgtactggcaacgctctcactctcctgtcagtcactggttgacgttgttcatcc

SEQ ID NO: 487493 - DNA, 75 bp, synthetic construct
  source 1..75: mol_type = other DNA
gattttagtaatggttttgatagtgctgaaagttatatgaaaacaagactttcagatctaagtgaccactcaaaa

SEQ ID NO: 487494 - DNA, 75 bp, synthetic construct
  source 1..75: mol_type = other DNA
tacgaatttgccgatcgactcattcaacaatacgaagagagaaacaaagattataagactgaactacagatctgg

SEQ ID NO: 487495 - DNA, 75 bp, synthetic construct
  source 1..75: mol_type = other DNA
agtcattggttgacgttgttcatcctcacaccaacatgccggaaccctgctcactttatctgttggcaatcgcag

SEQ ID NO: 487496 - DNA, 75 bp, synthetic construct
  source 1..75: mol_type = other DNA
gatgctggaagacggtcactgtttgcgcgatcaggcaatgggtttctgctttgaagccggggcggatgaagatac

SEQ ID NO: 487497 - DNA, 75 bp, synthetic construct
  source 1..75: mol_type = other DNA
tgcagcaaccgttggtgtggatggatggtcctgccaacctgcgccattttgatcgtcaactggaaggtattaccg

SEQ ID NO: 487498 - DNA, 75 bp, synthetic construct
  source 1..75: mol_type = other DNA
cgctactgccgacgcgcatcaggcaacgcgcattgatgcggagctgtcgatggtggcattgcgggaatatagaga

SEQ ID NO: 487499 - DNA, 75 bp, synthetic construct
  source 1..75: mol_type = other DNA
cgcaatctcaacgattatgacctcgccctgtacgtcgccaactggcctgctccgcgctctctgcactggcaggca

SEQ ID NO: 487500 - DNA, 75 bp, synthetic construct
  source 1..75: mol_type = other DNA
tagcatctacaatttccggtatgaagtgtcatgttcttattgcggcttcacatccacatatacagctcacacagt

SEQ ID NO: 487501 - DNA, 75 bp, synthetic construct
  source 1..75: mol_type = other DNA
tggtctgccgctgatcgccatgattacggtggtgctgctgacagcgtttatcatgaatttcaccagtgtagggcg

SEQ ID NO: 487502 - DNA, 75 bp, synthetic construct
  source 1..75: mol_type = other DNA
gggcggcacggtacatttttatgataagcgtcatctgttccgcatggcagatgagcatctacattataaagcggg

SEQ ID NO: 487503 - DNA, 75 bp, synthetic construct
  source 1..75: mol_type = other DNA
gcggtaatcttattccggcgattgttattctctttggcataaccgtgattttgtgctggtttggtaacgtcttta

SEQ ID NO: 487504 - DNA, 75 bp, synthetic construct
  source 1..75: mol_type = other DNA
cccgtatatatttatggctttgccggtgtgtctggcgtcattcggtttccacggcaatatacccagcctgattat

SEQ ID NO: 487505 - DNA, 75 bp, synthetic construct
  source 1..75: mol_type = other DNA
accgtgctgttaaccttcctgccacctgctttgttatatctcgtcttcccaaacggctttatttacgggatcggc

SEQ ID NO: 487506 - DNA, 75 bp, synthetic construct
  source 1..75: mol_type = other DNA
ctgattgcaggcagtgttgcattacaaacggagtctggttcggttaaccgctttttgctggttgagccgggcggc

SEQ ID NO: 487507 - DNA, 75 bp, synthetic construct
  source 1..75: mol_type = other DNA
cgaagcgagtgaattgttgcgtgagtttgtcgagttaactggcgttcccgtcattcaaaccttacgcggttgggg

SEQ ID NO: 487508 - DNA, 75 bp, synthetic construct
  source 1..75: mol_type = other DNA
ttggttcggtactggtcattcaggatgtgactgagtcacgcaaaatgctgcgccagcttagttatagcgcctccc

SEQ ID NO: 487509 - DNA, 75 bp, synthetic construct
  source 1..75: mol_type = other DNA
ttcggcctggagaagtgccgcgtacctggtgggatcttgctggtgattatcgccatctcgatcatcggcttaatc

SEQ ID NO: 487510 - DNA, 75 bp, synthetic construct
  source 1..75: mol_type = other DNA
caggttttcctcccgcagcggtcttcgttgccacctgtctggtcgcaggcttcggctctctgctgatggggttat

SEQ ID NO: 487511 - DNA, 75 bp, synthetic construct
  source 1..75: mol_type = other DNA
cgaaactggacttcaatgactttattgatgctatggcaggtctggtttgtgcggtctttatcgtcctgacctgca

SEQ ID NO: 487512 - DNA, 75 bp, synthetic construct
  source 1..75: mol_type = other DNA
gctacccaagcgagaaatatcttaatgagctgatcaccaacattgagttcgctgcaagggcaccagttgaagtcg

SEQ ID NO: 487513 - DNA, 75 bp, synthetic construct
  source 1..75: mol_type = other DNA
ggcgcgatgtgatcgttctaccggagatgtttaccagcggctttgccatggaagcggcagcttcgtcgctagcac

SEQ ID NO: 487514 - DNA, 75 bp, synthetic construct
  source 1..75: mol_type = other DNA
cgccatctcgatcatcggcttaatctttgatccggcggtgaaataccacggtctggtggcaatgccgagcctgac

SEQ ID NO: 487515 - DNA, 75 bp, synthetic construct
  source 1..75: mol_type = other DNA
tagcgttcctgtcgcactgggcgcggtctttctgatgggcgtcatcttcaccgccatttccgtaaccggtgtgcg

SEQ ID NO: 487516 - DNA, 75 bp, synthetic construct
  source 1..75: mol_type = other DNA
tggtatcacaacatttttcaaccgtgacgaacgtcgcttcaaaaagcagctttcggtctatagcgccgttattgg

SEQ ID NO: 487517 - DNA, 75 bp, synthetic construct
  source 1..75: mol_type = other DNA
cttacgcacgcgcagcttatgggtaatggcgatttttattgtgctgactggcggaattggcctcgcgaagttcca

SEQ ID NO: 487518 - DNA, 75 bp, synthetic construct
  source 1..75: mol_type = other DNA
ttctgttcttatcaccgctgtcatttttgatccctggttacgccactgcacccgctctgatgtacgtaggtttgc

SEQ ID NO: 487519 - DNA, 75 bp, synthetic construct
  source 1..75: mol_type = other DNA
cgcaatttcgattatcggcttaatctttgacccagcggtgaaataccacggtctggtggcgatgccaagtctgac

SEQ ID NO: 487520 - DNA, 75 bp, synthetic construct
  source 1..75: mol_type = other DNA
tggaaaagtgccgcgtacccggcgggatcttgttggtgattattgccatctcgatcatcggcttaatctttgatc

SEQ ID NO: 487521 - DNA, 75 bp, synthetic construct
  source 1..75: mol_type = other DNA
agacattatggctttatggagagttttaaatacggagatgagcacggcaaccaccctcaaactaatgaatatggc

SEQ ID NO: 487522 - DNA, 75 bp, synthetic construct
  source 1..75: mol_type = other DNA
catagcgaacgggcggcgagaaatcccaacatccacgaccagtcatacggcggctgccagttcagggtatacatc

SEQ ID NO: 487523 - DNA, 75 bp, synthetic construct
  source 1..75: mol_type = other DNA
tttgtttggtaccgggctgagtgagtggaagtcggttaaagctgcacatgtatcaaaaattcgcacgttgataaa

SEQ ID NO: 487524 - DNA, 75 bp, synthetic construct
  source 1..75: mol_type = other DNA
acggcaactctctttatgtagttaaccataatggcgagccatacgttcccatgaaacctgtcgttgcggggatgg

SEQ ID NO: 487525 - DNA, 75 bp, synthetic construct
  source 1..75: mol_type = other DNA
agaagctatctgaaaaattatccgggcctgttgaataaagcatggagtgggcaaccgtttgattttggacgggct

SEQ ID NO: 487526 - DNA, 75 bp, synthetic construct
  source 1..75: mol_type = other DNA
agttcagaacaaaaccaaccctggagaagtttcataaaaagattaacggatttctgttaagccataacattaatt

SEQ ID NO: 487527 - DNA, 75 bp, synthetic construct
  source 1..75: mol_type = other DNA
actgagtgactatccgtgggctgggatgatttctgatgaagcaattatatttttcaaaagtcatctgaaaaataa

SEQ ID NO: 487528 - DNA, 75 bp, synthetic construct
  source 1..75: mol_type = other DNA
tcaaaacttaacccacctaaacaaagcatataaagagtggctggatatagatgtgagagcgattctttataagaa

SEQ ID NO: 487529 - DNA, 75 bp, synthetic construct
  source 1..75: mol_type = other DNA
ggtgtccctgccgcttcgaaaacttgcaggctggttacaaaccatcaatcccaacaaagtaaaacccgaaatccg

SEQ ID NO: 487530 - DNA, 75 bp, synthetic construct
  source 1..75: mol_type = other DNA
gcgcatgtatcaaaaatccgcacattgataaacgaagcgaatctgctgattgattttgtcctggctgatacaggc

SEQ ID NO: 487531 - DNA, 75 bp, synthetic construct
  source 1..75: mol_type = other DNA
gcggttattcaagcctgtcttactttatatcagtattccacaggtattatggagtacctccagacaaatatgtgt

SEQ ID NO: 487532 - DNA, 75 bp, synthetic construct
  source 1..75: mol_type = other DNA
gcaatacaagctataaagtcagggcaataattcagggcgatatatccgtaaactggaagcttggtgttattgcgt

SEQ ID NO: 487533 - DNA, 75 bp, synthetic construct
  source 1..75: mol_type = other DNA
tgccaaagtcagagcgataattcaaacagatatatcagcaagctggacgcttggtgcgattgctctacagttgca

SEQ ID NO: 487534 - DNA, 75 bp, synthetic construct
  source 1..75: mol_type = other DNA
cttcacgaagcaggtaagatgctgactaatggccttgaaaaaatgatgcccggtttgtggttcgaagttgccctc

SEQ ID NO: 487535 - DNA, 75 bp, synthetic construct
  source 1..75: mol_type = other DNA
gtgatctgccctttccaagagataagaacggtattacgcttattgattatgagattcttactcgtttaccgactg

SEQ ID NO: 487536 - DNA, 75 bp, synthetic construct
  source 1..75: mol_type = other DNA
ggaagaaggtgcagtcgctgtagccactgccattgaagctggcgacgaacgccgtgctcgagcaaaatttcactg

SEQ ID NO: 487537 - DNA, 75 bp, synthetic construct
  source 1..75: mol_type = other DNA
gtactcgataagttacctgtggttgaaaagcttgatgagaacgctgctgatgcaatccttcgccacgcttccggg

SEQ ID NO: 487538 - DNA, 75 bp, synthetic construct
  source 1..75: mol_type = other DNA
cgcgatgccagcacttgaccccatcgttgatctctataatgccgttagccttcgctacgccgtgccggtgggggg

SEQ ID NO: 487539 - DNA, 75 bp, synthetic construct
  source 1..75: mol_type = other DNA
cccctgaaatttatcgtattgcacccggtttccgggcactcagtatctatgtaaacgctgcgccggtgctgaacc

SEQ ID NO: 487540 - DNA, 75 bp, synthetic construct
  source 1..75: mol_type = other DNA
ctcagaacgctatggctaccgcccggcgcttatcccacgtcccgtaatggccggcacgctcccggcacgggtcac

SEQ ID NO: 487541 - DNA, 75 bp, synthetic construct
  source 1..75: mol_type = other DNA
cgcttcgccatccttcagggctgtttgatggtgaaacggaagccgtatgggggctgaacaccgcctacagcgtgg

SEQ ID NO: 487542 - DNA, 75 bp, synthetic construct
  source 1..75: mol_type = other DNA
accttcgaaggccgcgaacaactgagtaccccgttccgctacgacattcagtttaccagcagcgataaagccatc

SEQ ID NO: 487543 - DNA, 75 bp, synthetic construct
  source 1..75: mol_type = other DNA
cgttttatcgctacacgcattatcagtgccgtgaatgactatcactttatctgggaaggacgtgtacatcgggta

SEQ ID NO: 487544 - DNA, 75 bp, synthetic construct
  source 1..75: mol_type = other DNA
gccccccccgaacctgagaaaactaaagaacagttaatccaggaagcagaactcgaaaaagaagggcgcatacgt

SEQ ID NO: 487545 - DNA, 75 bp, synthetic construct
  source 1..75: mol_type = other DNA
tttggcttgattacctggatgcactggaagcggttaatacatctactgcaccagatatcacctggcctcagcaac

SEQ ID NO: 487546 - DNA, 75 bp, synthetic construct
  source 1..75: mol_type = other DNA
aaaagcttgatgagaacgctgctgatgcaatccttcgccacgcttccgggcaacacttttacaatacttcgcctt

SEQ ID NO: 487547 - DNA, 75 bp, synthetic construct
  source 1..75: mol_type = other DNA
gacaggtcaggctattaatgactgtcctgccatatgtggcaaaggagtcctgcttcgccctgaaaggcggcacag

SEQ ID NO: 487548 - DNA, 75 bp, synthetic construct
  source 1..75: mol_type = other DNA
gctgaatatgctggagaaaccgggactgatgcgggagatctttgacggttttctttgttatctggcaggccatcc

SEQ ID NO: 487549 - DNA, 75 bp, synthetic construct
  source 1..75: mol_type = other DNA
agccggatggcgacctgcgtgataacgagaatgtgccactgaacccggcggtatcgaccagcgagttgatcgagg

SEQ ID NO: 487550 - DNA, 75 bp, synthetic construct
  source 1..75: mol_type = other DNA
cagtgctgaatgataaaaatccggccaaatttgcggcggcggtgagtaagttagagggggttctggagcagtatt

SEQ ID NO: 487551 - DNA, 75 bp, synthetic construct
  source 1..75: mol_type = other DNA
aggaatgacacagcgggaaacatcgctggagtcgcttttatcagtaacgatgttgctgccacaagcgctgaaatc

SEQ ID NO: 487552 - DNA, 75 bp, synthetic construct
  source 1..75: mol_type = other DNA
ccgcgattcggcaggaaaataaagcggatgaaaagcgcatcattgtgaataccgctgatgcaaagattaagatcg

SEQ ID NO: 487553 - DNA, 75 bp, synthetic construct
  source 1..75: mol_type = other DNA
atcagtatcaaccgccacgttcgctggaggatattgaccgcgatttggataaggtgagcagagaaattatggcct

SEQ ID NO: 487554 - DNA, 75 bp, synthetic construct
  source 1..75: mol_type = other DNA
ccctatatacctgatgcgtggatcgatatcgaaaaaaccgatccttatgatggacaggtcggtttagtgggttat

SEQ ID NO: 487555 - DNA, 75 bp, synthetic construct
  source 1..75: mol_type = other DNA
cctctctgacgatcagctctggaatgagcgttttgattactgcctgtccaacccaccgtttggcgttgactggaa

SEQ ID NO: 487556 - DNA, 75 bp, synthetic construct
  source 1..75: mol_type = other DNA
aatcggatggcgacctgcgtgataacgagaatgtgccgttaaatccggcggtatctaccaacgagttgatcgagg

SEQ ID NO: 487557 - DNA, 75 bp, synthetic construct
  source 1..75: mol_type = other DNA
cgagaatgtgccgctgaacccggcggtatctaccagcgagttgatcgaggggtacttcaaagcagaagcattgcc

SEQ ID NO: 487558 - DNA, 75 bp, synthetic construct
  source 1..75: mol_type = other DNA
cgccgcgcccactggaagagattgatgccgatctggatgcagtcagtaccgagattatgaagctgctgcgggagg

SEQ ID NO: 487559 - DNA, 75 bp, synthetic construct
  source 1..75: mol_type = other DNA
gaaaaacctccagataaatgcgggaaacaacgccgatatcggcgtggtgaagaatatgtttatcggcgtggggcg

SEQ ID NO: 487560 - DNA, 75 bp, synthetic construct
  source 1..75: mol_type = other DNA
gatgcacgcaccgaaaggcgtggcggtcgccagcggcgagcacctgcaactggccgccgtgaaaaacctccagat

SEQ ID NO: 487561 - DNA, 75 bp, synthetic construct
  source 1..75: mol_type = other DNA
gtcaggtgctggatatgcaggcagcgatagcgcaactggagaatgcgctgtcgatagcaaaaaatctgtcacagg

SEQ ID NO: 487562 - DNA, 75 bp, synthetic construct
  source 1..75: mol_type = other DNA
gtcaggtgcgcgaaatggctccggcgatggcaatactggatggcgcacagtcacagatgaagtcgctgtccactg

SEQ ID NO: 487563 - DNA, 75 bp, synthetic construct
  source 1..75: mol_type = other DNA
gatgcacgccccgaaaggcgtggcggtcgccagcggcgagcacctgcaactggccgcagtgaaaaacctccagat

SEQ ID NO: 487564 - DNA, 75 bp, synthetic construct
  source 1..75: mol_type = other DNA
gatgcacgccccgaaaggagtggcggtcgccagcggcgagcacctgcaactggccgccgtgaaaaacctccagat

SEQ ID NO: 487565 - DNA, 75 bp, synthetic construct
  source 1..75: mol_type = other DNA
gatgcacgctccgaaaggtgtggcggtcgccagcggcgagcacctgcaactggccgcggtgaaaaacctccagat

SEQ ID NO: 487566 - DNA, 75 bp, synthetic construct
  source 1..75: mol_type = other DNA
gtaccgatctgtggggcgcggtgcgggcgaagaaaggcatctttatcagcgccgatgcgcaggataaggcgcagg

SEQ ID NO: 487567 - DNA, 75 bp, synthetic construct
  source 1..75: mol_type = other DNA
catatcaaggtcagcaccgagtatggcggcaagagccagttgaatctgggtcatctggtggatgccggaaaacag

SEQ ID NO: 487568 - DNA, 75 bp, synthetic construct
  source 1..75: mol_type = other DNA
gtgggtcaggcgctgagcgtgtttgtacgcaaagcgggtatcaaactgtttgccaataaaggggcgatctcggta

SEQ ID NO: 487569 - DNA, 75 bp, synthetic construct
  source 1..75: mol_type = other DNA
tcatctggtggatgccgggaaacagcagcgcggcgaaggctttgaactgcgtaccgatatgtggggggcagtacg

SEQ ID NO: 487570 - DNA, 75 bp, synthetic construct
  source 1..75: mol_type = other DNA
ggccgtatggcagaagttcagcggccagagcatcagtcaggcgatgcaacagtgggattctgctgattttgctgt

SEQ ID NO: 487571 - DNA, 75 bp, synthetic construct
  source 1..75: mol_type = other DNA
gtaatggccggcacgctcccggcgcgggtcaccagcacggtgaagaacgatatttatgcccatatcgacaaggac

SEQ ID NO: 487572 - DNA, 75 bp, synthetic construct
  source 1..75: mol_type = other DNA
gatgcacgcgccgaaaggtgtggcggtcgccagcggcgagcacctgcaactggccgctgtgaaaaacctccagat

SEQ ID NO: 487573 - DNA, 75 bp, synthetic construct
  source 1..75: mol_type = other DNA
ctgacgccggagctgatggcgtttccagtgattgagagcggggaatttaatgctaagttcctttttactgatgat

SEQ ID NO: 487574 - DNA, 75 bp, synthetic construct
  source 1..75: mol_type = other DNA
cagagcggctacgagcgcgggctgacactgccgcttcgccatccttcagggctgtttgatggtgaaacggaagcc

SEQ ID NO: 487575 - DNA, 75 bp, synthetic construct
  source 1..75: mol_type = other DNA
cgccatctaccagaagcagacggtgccgcaaatcgtcgaaaaaatcctgcgcgagcggcatcacatgcgcggtca

SEQ ID NO: 487576 - DNA, 75 bp, synthetic construct
  source 1..75: mol_type = other DNA
gcgagcacctgcaactggcagcggtgaaaaacctccagataaatgcgggaaacaacgccgatatcggcgtggtga

SEQ ID NO: 487577 - DNA, 75 bp, synthetic construct
  source 1..75: mol_type = other DNA
ctacctgaatgaacaggccattctcaaaggccagagcaccagttcactgctgatgccggggctggaaatcagggt

SEQ ID NO: 487578 - DNA, 75 bp, synthetic construct
  source 1..75: mol_type = other DNA
gaagtgatgtcgcaggctgatatcgcctgttatgcctccaaaaatggtggccggggccgggtgacggtttacgaa

SEQ ID NO: 487579 - DNA, 75 bp, synthetic construct
  source 1..75: mol_type = other DNA
cgccatctaccagaaacagacggtgccgcaaatcgtcgaaaaaatcctgcgcgagcgacatcacatgcgcggtca

SEQ ID NO: 487580 - DNA, 75 bp, synthetic construct
  source 1..75: mol_type = other DNA
tggccgctgtgaaaaacctccagataaatgcgggaaacaacgccgatatcggcgtagtgaagaatatgtttatcg

SEQ ID NO: 487581 - DNA, 75 bp, synthetic construct
  source 1..75: mol_type = other DNA
tggccgcagtgaaaaacctccagataaatgcgggaaacaacgccgatatcggcgttgtgaagaatatgtttatcg

SEQ ID NO: 487582 - DNA, 75 bp, synthetic construct
  source 1..75: mol_type = other DNA
cgccatctaccagaaccagacggtgccgcaaatcgtcgaaaaaatcctgcgcgagcggcatcagatgcgcggtca

SEQ ID NO: 487583 - DNA, 75 bp, synthetic construct
  source 1..75: mol_type = other DNA
cgccatctaccagaaccagacggtgccgcaaatcgtcgaaaaaatcctgcgcgagcgccatcacatgcgcggtca

SEQ ID NO: 487584 - DNA, 75 bp, synthetic construct
  source 1..75: mol_type = other DNA
cgccatctaccagaaccagacggtgccgcaaatcgtcgaaaaaatcctgcgcgagcgacatcaaatgcgcggtca

SEQ ID NO: 487585 - DNA, 75 bp, synthetic construct
  source 1..75: mol_type = other DNA
cgtcaccacgcgggactacaactaccgcaccgccacagcagagatgatgacagagcagcatgacgccaccggggg

SEQ ID NO: 487586 - DNA, 75 bp, synthetic construct
  source 1..75: mol_type = other DNA
gcgaagctgacgccggagctgatggcatttccggtgattaagtctgaggattttaatcagagctttattttgctg

SEQ ID NO: 487587 - DNA, 75 bp, synthetic construct
  source 1..75: mol_type = other DNA
ctatgcccatatcgacaaggacgggcgctaccgggtcaacctcgactttgaccgcgatacgtggaaaccgggtta

SEQ ID NO: 487588 - DNA, 75 bp, synthetic construct
  source 1..75: mol_type = other DNA
tgatgatgggataccttatgcaaatacgagatatattgcgtttatggccgatggaacaaggaaagaaggtattac

SEQ ID NO: 487589 - DNA, 75 bp, synthetic construct
  source 1..75: mol_type = other DNA
gatattacgggcgtaaaccaaaggcgaagctgacgccggagctgatggcgtttccggtgattgagagcggggaat

SEQ ID NO: 487590 - DNA, 75 bp, synthetic construct
  source 1..75: mol_type = other DNA
gcacccctgccaacaacaaaatccggctggatgatgagcgcggcaaagagcatatcaaggtcagtaccgagtacg

SEQ ID NO: 487591 - DNA, 75 bp, synthetic construct
  source 1..75: mol_type = other DNA
cagcactgacaccacgaagatttttaaagaatttgatcagattgctactaacatttttgaaatcacacaaagcca

SEQ ID NO: 487592 - DNA, 75 bp, synthetic construct
  source 1..75: mol_type = other DNA
ggtgacagcgttcactattccaggaactaacattgatgttattaaactggtagatccgctacaccttgcacatat

SEQ ID NO: 487593 - DNA, 75 bp, synthetic construct
  source 1..75: mol_type = other DNA
gggaagacctgatcaaaccgcaggacgtgcaaggcaaacgtaagcctggcactgattttcaggaaacactcactg

SEQ ID NO: 487594 - DNA, 75 bp, synthetic construct
  source 1..75: mol_type = other DNA
tgacgcaggccgtgatcctgctaagtgcacccaagggcgtggcgatcgccagcggcgagcacctgcaactggcgg

SEQ ID NO: 487595 - DNA, 75 bp, synthetic construct
  source 1..75: mol_type = other DNA
gtgaagaatatgtttatcggtgtgggtcaggcgctgagcgtgtttgtgcgtaaagcgggcatcaagctgtttgcc

SEQ ID NO: 487596 - DNA, 75 bp, synthetic construct
  source 1..75: mol_type = other DNA
tagatccgctacaccttgcacatatgacttctgatgcggttgcgattccgaagtttgctaaaggctctaatgtat

SEQ ID NO: 487597 - DNA, 75 bp, synthetic construct
  source 1..75: mol_type = other DNA
ctgtttgccaataaaggggcgatctcggtacaggcacagaacgatctgatggaactgttggcacagaaatcgata

SEQ ID NO: 487598 - DNA, 75 bp, synthetic construct
  source 1..75: mol_type = other DNA
ggcatgggtgttgatctgatttatggcgatgtcattgccgacgctcagcctctggatttgctgattaatagcagt

SEQ ID NO: 487599 - DNA, 75 bp, synthetic construct
  source 1..75: mol_type = other DNA
cggcacgaaaagggcttgtccagctaagtagtgccaccaacagcgattctgaaacgcttgccgcgactccgaaag

SEQ ID NO: 487600 - DNA, 75 bp, synthetic construct
  source 1..75: mol_type = other DNA
aaacttgttaatgaggtctggcgacatgccctgaataaaatcagtcaggacaatcgacacagtaattatattatc

SEQ ID NO: 487601 - DNA, 75 bp, synthetic construct
  source 1..75: mol_type = other DNA
gtcgtctggcggttacagcgtgatttatggcgggatagaggagctggcaccagtggtcggaatgccggtatccct

SEQ ID NO: 487602 - DNA, 75 bp, synthetic construct
  source 1..75: mol_type = other DNA
gcaaataaatattgttcatgctcccggacatgcgtttattgcttacaccgacgagaatggtctgccgcagttctg

SEQ ID NO: 487603 - DNA, 75 bp, synthetic construct
  source 1..75: mol_type = other DNA
cttggtgctgaccagaatctggataattaccagacgccgggtctgtattttcagcctgcaaatgccaataccagt

SEQ ID NO: 487604 - DNA, 75 bp, synthetic construct
  source 1..75: mol_type = other DNA
ctatacccgcagccagtactcaacgggtgactggacaccatggacgccacaagattcatttccggtaggtgcggc

SEQ ID NO: 487605 - DNA, 75 bp, synthetic construct
  source 1..75: mol_type = other DNA
cagcgcggggaaggctttgaactgcgtaccgatatgtggggcgcggtgcgggcgaagaaaggcatctttatcagc

SEQ ID NO: 487606 - DNA, 75 bp, synthetic construct
  source 1..75: mol_type = other DNA
acttttacaggccgcgaacagctcagcgccccgttccgctacgacattgagtttaccagtaccgataaagccatc

SEQ ID NO: 487607 - DNA, 75 bp, synthetic construct
  source 1..75: mol_type = other DNA
tgacatggacacatcaggcaccgtccgggtgtatatattccggcattattgttcaggataccggctcaaactctg

SEQ ID NO: 487608 - DNA, 75 bp, synthetic construct
  source 1..75: mol_type = other DNA
gtaaggttaatggcaaatcactagccaatgatgtcaatgttacatcgcaggatatttttaacgaccagagtattg

SEQ ID NO: 487609 - DNA, 75 bp, synthetic construct
  source 1..75: mol_type = other DNA
ctcagtagcgccaccaacagcgattcagaaacgctggcggcaacaccaaaggcggtaaaggcagcctatgacctt

SEQ ID NO: 487610 - DNA, 75 bp, synthetic construct
  source 1..75: mol_type = other DNA
tgtttagtggtcgcacttataccccgaaaactgatgatgttcttatcgagtggggcaagctgtttaacgtatcag

SEQ ID NO: 487611 - DNA, 75 bp, synthetic construct
  source 1..75: mol_type = other DNA
actctggattttactgatcctgtgcctgtagaaagtcacaaagtggctgtttcccagcttatcgagagcaatgaa

SEQ ID NO: 487612 - DNA, 75 bp, synthetic construct
  source 1..75: mol_type = other DNA
actgcgtgccttatttgcgccagaaacggcaaccgcgacgctgctgctgtggttgtgttatttcttcactctgct

SEQ ID NO: 487613 - DNA, 75 bp, synthetic construct
  source 1..75: mol_type = other DNA
ttggctcagttgcgctgtttggtttgttctcgctggcaacggcgattgcctgggatttcccctcactggtctttg

SEQ ID NO: 487614 - DNA, 75 bp, synthetic construct
  source 1..75: mol_type = other DNA
cagtattgatgtcaccagtattcgttttcttgatgaagacgaaatgcaacggctgaataaagcgcacttgttaaa

SEQ ID NO: 487615 - DNA, 75 bp, synthetic construct
  source 1..75: mol_type = other DNA
accttatttaaccagccgccatcaggaaattaatgagtggaatcgccagcaaggttctacggagtcagtattaaa

SEQ ID NO: 487616 - DNA, 75 bp, synthetic construct
  source 1..75: mol_type = other DNA
gatcaatgctttccagtatgcaagccctaccgatgacgctaacgtcgtttatagtgtgcgctcactgctgccagg

SEQ ID NO: 487617 - DNA, 75 bp, synthetic construct
  source 1..75: mol_type = other DNA
ttgccggatgctatcccatcgatgaggactattttgcatggtcagatgccaccgctaccggtttgcaggtaaaca

SEQ ID NO: 487618 - DNA, 75 bp, synthetic construct
  source 1..75: mol_type = other DNA
ctggcgtataagagctttgcggatcgcgataccgatctggcggctatcaacgacgctttgaagagaattactgca

SEQ ID NO: 487619 - DNA, 75 bp, synthetic construct
  source 1..75: mol_type = other DNA
ctggcggctatcaacgacgctttgaagaggattactgcatcgctgaacggcagaccggggatcaccgcgattcgg

SEQ ID NO: 487620 - DNA, 75 bp, synthetic construct
  source 1..75: mol_type = other DNA
tcgtcatttaacggtatgttgctggcgggatttgtcgcggggttgtttgcgacaggtgggcaaagcgttttgtat

SEQ ID NO: 487621 - DNA, 75 bp, synthetic construct
  source 1..75: mol_type = other DNA
ctcctgccagtgatgcccgtacgcagggcacacagcatacttacgacatactcaaaagttatctgatgctggcgc

SEQ ID NO: 487622 - DNA, 75 bp, synthetic construct
  source 1..75: mol_type = other DNA
atggcacagatactgaatgattctgctgatttcggtttccttcagttgtcactcagactgcagcaggagctgaaa

SEQ ID NO: 487623 - DNA, 75 bp, synthetic construct
  source 1..75: mol_type = other DNA
actgattttcaggaaacactcactgatatttatgcggaatatatcgctaaacaccacgtagcgtatcagcgcact

SEQ ID NO: 487624 - DNA, 75 bp, synthetic construct
  source 1..75: mol_type = other DNA
agctcagcagtgcgactaacagcacttccgagtcacaggcggcaacgccaaaagccgttaaggccgcgtatgacc

SEQ ID NO: 487625 - DNA, 75 bp, synthetic construct
  source 1..75: mol_type = other DNA
tttttaacgaccagagtattgagattggtgcaaatcagaatctggataattacaaaacaccggggctgtaccatc

SEQ ID NO: 487626 - DNA, 75 bp, synthetic construct
  source 1..75: mol_type = other DNA
atatctacgcggaatatgttgctaagcaccacattgctttccagcgtactaaagaaagcgtactggctgcttccc

SEQ ID NO: 487627 - DNA, 75 bp, synthetic construct
  source 1..75: mol_type = other DNA
tctgtttattcgctgtatatttcgcctcatgaactttatccggttggcgcaccgatcccttggccatcagatacc

SEQ ID NO: 487628 - DNA, 75 bp, synthetic construct
  source 1..75: mol_type = other DNA
tcaatgggattataccagtaatgccagcgtaacgattcatacgtcaccagcatattctgctaataagccggaagg

SEQ ID NO: 487629 - DNA, 75 bp, synthetic construct
  source 1..75: mol_type = other DNA
gtattagcgggactgcaaatagtgccggtgcgcaccaacacaagagttccggtgcatttggtggcacgaacacga

SEQ ID NO: 487630 - DNA, 75 bp, synthetic construct
  source 1..75: mol_type = other DNA
cgggaccgttcacccggatacaagcggaagttgtcatggtaacgtatcgcaatatcaccattgaagacgaccagg

SEQ ID NO: 487631 - DNA, 75 bp, synthetic construct
  source 1..75: mol_type = other DNA
cgtggtgatgctgttaacgttgttacagagaatagccagatggttgtaaaccacggtgtaggcttctccgttcaa

SEQ ID NO: 487632 - DNA, 75 bp, synthetic construct
  source 1..75: mol_type = other DNA
atagtgtgcgctccctgctgccaggtgtgactaccttcactattccaggaactaacatcgatgttgttaaactgg

SEQ ID NO: 487633 - DNA, 75 bp, synthetic construct
  source 1..75: mol_type = other DNA
gacggcagacgctgtagctgttcctaaatttgctaaaggtgcaggtgtttacaaatctatctatggagcgccttc

SEQ ID NO: 487634 - DNA, 75 bp, synthetic construct
  source 1..75: mol_type = other DNA
ctttcgaatcgaatcgcggcgacgcagtgcacgtagtgaccgagaatagctcgcttgtggttaaccacggtgttg

SEQ ID NO: 487635 - DNA, 75 bp, synthetic construct
  source 1..75: mol_type = other DNA
tgccgatgaagtgggcggtgtcgtgcttgacgatcagcgccgtatgatgactccgcagaaattgcgcgagtacca

SEQ ID NO: 487636 - DNA, 75 bp, synthetic construct
  source 1..75: mol_type = other DNA
ttgaagcgggagcggatgaagatacgcattttcgcgccaccagcctggagacgttgcgtaacatggtggcggcgg

SEQ ID NO: 487637 - DNA, 75 bp, synthetic construct
  source 1..75: mol_type = other DNA
gcggcaacgtagacgtcacgatgaccaaaaacgcctatacggatgttgtgacggattcttcagttaataatgtcg

SEQ ID NO: 487638 - DNA, 75 bp, synthetic construct
  source 1..75: mol_type = other DNA
ttaatgtcgataccggccaggcgttttataacgacggtacagggacaatcctgaattatggtgagataaaccttc

SEQ ID NO: 487639 - DNA, 75 bp, synthetic construct
  source 1..75: mol_type = other DNA
tgagatcagaaagcgctatcgtgaaggtcaggaagatcagctgggggcactgggcctggtcactaacgcagtggt

SEQ ID NO: 487640 - DNA, 75 bp, synthetic construct
  source 1..75: mol_type = other DNA
caccgcagtggcttcagaacggagatgaaaaagataagcattgggaaaataatgttaagagctgcccacagagag

SEQ ID NO: 487641 - DNA, 75 bp, synthetic construct
  source 1..75: mol_type = other DNA
gtgtttaaccggggtatcgccaccatcgtctggcggaactggcgtatcaccgccgtcatctggcggaaccggcgt

SEQ ID NO: 487642 - DNA, 75 bp, synthetic construct
  source 1..75: mol_type = other DNA
aggcccacttcccggtgattatcacattggctatgactcaggtgcagaatcgcaatacgaaagcgatgtagaggc

SEQ ID NO: 487643 - DNA, 75 bp, synthetic construct
  source 1..75: mol_type = other DNA
cagaagaacgggagtgttcgtttccgtgaccgtcggacgggagagtttgtctgtacggattatggtgacagggtt

SEQ ID NO: 487644 - DNA, 75 bp, synthetic construct
  source 1..75: mol_type = other DNA
aaaattaaactttggcagggcttgcttgcaggcgctttagcacaactttttgttcatatgatttcattccctcta

SEQ ID NO: 487645 - DNA, 75 bp, synthetic construct
  source 1..75: mol_type = other DNA
acgaagtggtgctggatgacgccggaaaccgcatgtttgtctgctccgataccgattattgccgccaacagagcg

SEQ ID NO: 487646 - DNA, 75 bp, synthetic construct
  source 1..75: mol_type = other DNA
aacaagacgctgtaccttcttaattatattgatgatgaggattatcgtcggcggatcctgacgcagctaaaccgg

SEQ ID NO: 487647 - DNA, 75 bp, synthetic construct
  source 1..75: mol_type = other DNA
gatgcgttcgtcagggaggaacgcgaagcaatggacgttgtgttacaggcgctggacggggagcacatgtcatga

SEQ ID NO: 487648 - DNA, 75 bp, synthetic construct
  source 1..75: mol_type = other DNA
agattctagccaaaggcaaaacagcaccacgcctgactcctgatcacatcgagagtgtgattgccgaagagcatt

SEQ ID NO: 487649 - DNA, 75 bp, synthetic construct
  source 1..75: mol_type = other DNA
agattaccttgccagcaaagacggaatgcaacattttgaacagttgcgactttttttcgagttaatgttagtcag

SEQ ID NO: 487650 - DNA, 75 bp, synthetic construct
  source 1..75: mol_type = other DNA
tgctgctgggactgggcctgatagctattatcctgcttgcaggtatatgtaaacgtcagccacattcatctgcga

SEQ ID NO: 487651 - DNA, 75 bp, synthetic construct
  source 1..75: mol_type = other DNA
atccagacgctaccgatggatgggtttcaccattacaacggctggctggatgcgcaccaattacgccccttcaaa

SEQ ID NO: 487652 - DNA, 75 bp, synthetic construct
  source 1..75: mol_type = other DNA
gtgttacaacttcttttagcagtttttataggcggtggtacgggaagcgtggcgagatggctgttaagtatgcga

SEQ ID NO: 487653 - DNA, 75 bp, synthetic construct
  source 1..75: mol_type = other DNA
tgaacaacgtgaaattcagcagcttaaagcgcagataaagcgccttgagatggaaaaagaaatactaaagcaggc

SEQ ID NO: 487654 - DNA, 75 bp, synthetic construct
  source 1..75: mol_type = other DNA
ctatttgcgtaaatggatacggttgtataagcaggaacttcagggtattgagcccgctggtaatgctattacccc

SEQ ID NO: 487655 - DNA, 75 bp, synthetic construct
  source 1..75: mol_type = other DNA
gaaccttttccccggagttcaggcttgaagctatcgaacaggtggttaaataccagcgtgatgtcagagaggtcg

SEQ ID NO: 487656 - DNA, 75 bp, synthetic construct
  source 1..75: mol_type = other DNA
attgcagcctctggtcaaattggcgatccgcagacaatcaatttccccgtaccttttacaaattacagtacagtt

SEQ ID NO: 487657 - DNA, 75 bp, synthetic construct
  source 1..75: mol_type = other DNA
ccgcagccattaacaatgacccgaaattcagcaccactattaacaatgcgctgtcaggtaagcagccactggatg

SEQ ID NO: 487658 - DNA, 75 bp, synthetic construct
  source 1..75: mol_type = other DNA
caatagatatttgctggaaatatgttaatgataatgttaactttattcgtgcagatattaactttcatcgtattt

SEQ ID NO: 487659 - DNA, 75 bp, synthetic construct
  source 1..75: mol_type = other DNA
ctgaacgtcttcgtaaacctgttaggttcttttgccatgactgcactggctttctggttgttttcagcatcaacc

SEQ ID NO: 487660 - DNA, 75 bp, synthetic construct
  source 1..75: mol_type = other DNA
attaatcaccaccggattttgtggcggtctaacaaccttctcaacattttcggcagaagtggtgtttttgttaca

SEQ ID NO: 487661 - DNA, 75 bp, synthetic construct
  source 1..75: mol_type = other DNA
ttattggcggtggtacgggaagcgtggcgagatggctgttaagtatgcgatttaacccgctgcatcaggcgattc

SEQ ID NO: 487662 - DNA, 75 bp, synthetic construct
  source 1..75: mol_type = other DNA
aaggtgaacgggcgctacgtgatggacccgtcgccgatcccgaaattcgataacccaaaaatggacatgatgccc

SEQ ID NO: 487663 - DNA, 75 bp, synthetic construct
  source 1..75: mol_type = other DNA
ccggcagaatcagcagcaatcaccattctcaacaagaacgcagcacctgctaacctgttctgggctgatggttct

SEQ ID NO: 487664 - DNA, 75 bp, synthetic construct
  source 1..75: mol_type = other DNA
cggtggtggtattccggtggtgcgagacggacaacaactgaaaggtgtggaagctgtgatcgataaagatctggc

SEQ ID NO: 487665 - DNA, 75 bp, synthetic construct
  source 1..75: mol_type = other DNA
atggttaagccactggctgtcgtcgcggttggcggcaatgcgctcattcaggacgataaacgcaatagtattccc

SEQ ID NO: 487666 - DNA, 75 bp, synthetic construct
  source 1..75: mol_type = other DNA
attgtcgaagaagaacacttcggcctgtcgcacgatgtcgaaacgtccgtaccttacgatttccactcagcaggt

SEQ ID NO: 487667 - DNA, 75 bp, synthetic construct
  source 1..75: mol_type = other DNA
tcagggggagattggcgtggcctgttcaatggcggcggcagggttaactgaactactgggcggcagtccggcgca

SEQ ID NO: 487668 - DNA, 75 bp, synthetic construct
  source 1..75: mol_type = other DNA
accaattacgcaagtagaagaactacttggagcattggatttattaagtccttcctttgattttatttttattgg

SEQ ID NO: 487669 - DNA, 75 bp, synthetic construct
  source 1..75: mol_type = other DNA
acagagattattacggatagtcagcttgatgggcagacgcgtagaacgcttgcgtccttgtcgacgcgtttaatc

SEQ ID NO: 487670 - DNA, 75 bp, synthetic construct
  source 1..75: mol_type = other DNA
gaacttgaaggggcgatcccggaagagttgcgaccgttaatgggaaaccgtatttacggttgcgatgactgccag

SEQ ID NO: 487671 - DNA, 75 bp, synthetic construct
  source 1..75: mol_type = other DNA
gtacgatagctggtattgctgggggcgtgggagcatggatctttgccaagatagatgaacgaaagactcgtaaat

SEQ ID NO: 487672 - DNA, 75 bp, synthetic construct
  source 1..75: mol_type = other DNA
ttagtcctgccgatctgatgcatatgcgtgctggcgatgtctctgcgtttaggccagaagcacagttacagtatg

SEQ ID NO: 487673 - DNA, 75 bp, synthetic construct
  source 1..75: mol_type = other DNA
actaccacaaacttctgcgcaaccgactcaaaaagctgggcgagatgattcagcaacattgtgtttcgctgaatt

SEQ ID NO: 487674 - DNA, 75 bp, synthetic construct
  source 1..75: mol_type = other DNA
gggggattccgtcgtccttgatgccggtacgacaatgattgaacttgcgcggcagattacacatttaccgcttcg

SEQ ID NO: 487675 - DNA, 75 bp, synthetic construct
  source 1..75: mol_type = other DNA
gcggcagtccggcgcaggtatgcaatgcggcggaaatcgcgatggagcataaccttgggctgacctgcgatccgg

SEQ ID NO: 487676 - DNA, 75 bp, synthetic construct
  source 1..75: mol_type = other DNA
tcttggcaaagagcgtcgcgagatatcggtcattaatgatcagtttggcgctccaactggagctgagttgctggc

SEQ ID NO: 487677 - DNA, 75 bp, synthetic construct
  source 1..75: mol_type = other DNA
cggttggcggcaatgcgctcattcaggacgataaacgcaatagtattcccgatcaatatgttgcagtaatggaaa

SEQ ID NO: 487678 - DNA, 75 bp, synthetic construct
  source 1..75: mol_type = other DNA
cgtctcctgcgatacggcggtgcgaatgatgctagatatgggcgcacacgcggcgaagttctttccgatgggcgg

SEQ ID NO: 487679 - DNA, 75 bp, synthetic construct
  source 1..75: mol_type = other DNA
tgattggcgaaagcgacgtgctgaaggtgattgaccagggcgcggatgacaccaccaacgccgtgtcgatccgca

SEQ ID NO: 487680 - DNA, 75 bp, synthetic construct
  source 1..75: mol_type = other DNA
gccgatgccatacggctggggaaccggcggcatacagctcaccgccagcgtgattggcgaaagcgacgtgctgaa

SEQ ID NO: 487681 - DNA, 75 bp, synthetic construct
  source 1..75: mol_type = other DNA
cggtactaccacttggtttgactacgcccggttggtgtttgacaaagccagagacgcaggagttgaactggcggt

SEQ ID NO: 487682 - DNA, 75 bp, synthetic construct
  source 1..75: mol_type = other DNA
aaattggtattggtccctccagttcgcataccgtggggccaatgaatgctggaaaaagttttatcgaccgactgg

SEQ ID NO: 487683 - DNA, 75 bp, synthetic construct
  source 1..75: mol_type = other DNA
tataaaatgaatgcttctatttccggggcggaagtcggctgtcagggggaaattggcgtggcttgctcgatggcg

SEQ ID NO: 487684 - DNA, 75 bp, synthetic construct
  source 1..75: mol_type = other DNA
aaccttgggctgacctgcgatccggttgccggacaagtgcaaattccgtgtattgaacgtaacgctatcaacgct

SEQ ID NO: 487685 - DNA, 75 bp, synthetic construct
  source 1..75: mol_type = other DNA
aacagatccagctatgcgcccggatggacgcaaattatacccgcgaagcgcaggtatttggcgagctgatccgct

SEQ ID NO: 487686 - DNA, 75 bp, synthetic construct
  source 1..75: mol_type = other DNA
cgccgcagcctgcgcatctgatcgatttgatctggaaacccgtcaacgtcaccctgaacaatggcgatacacaca

SEQ ID NO: 487687 - DNA, 75 bp, synthetic construct
  source 1..75: mol_type = other DNA
atgacaaacaataacgagctaccgattaccttgtcggcgctgctgcgggattattccgtggtggagggcattcag

SEQ ID NO: 487688 - DNA, 75 bp, synthetic construct
  source 1..75: mol_type = other DNA
atccgcaggcgggtaaatactacggcggtgccgtttccgcgccggtctttggtgccatcatgggcggcgtattgc

SEQ ID NO: 487689 - DNA, 75 bp, synthetic construct
  source 1..75: mol_type = other DNA
tgagaagagttttgataaatggctcactgggcaaccgggcgagcgtattgtgcgtaaagaccgctacggccgcgt

SEQ ID NO: 487690 - DNA, 75 bp, synthetic construct
  source 1..75: mol_type = other DNA
cgagaagagtttcgataaatggcttaccgggcagccgggtgagcgcattgtgcgtaaagaccgctatggtcgcgt

SEQ ID NO: 487691 - DNA, 75 bp, synthetic construct
  source 1..75: mol_type = other DNA
gttgtgtaaccagacgcccgccgcgacggaatctccgctgtggctgggggtagatctgggcacctgcgatgtggt

SEQ ID NO: 487692 - DNA, 75 bp, synthetic construct
  source 1..75: mol_type = other DNA
ccctcgagcagcaattcggtcgccgttttagccatgcggcgacctcatttcctcctggtacggacccgcgtattt

SEQ ID NO: 487693 - DNA, 75 bp, synthetic construct
  source 1..75: mol_type = other DNA
atgttgatccgtcacaagaaaatatcgtagtgcaaaaaaaagaaaaaacgcgacgcatgaaagcagcggcgaaaa

SEQ ID NO: 487694 - DNA, 75 bp, synthetic construct
  source 1..75: mol_type = other DNA
aaccaaaacgtcaggaagaacatgccaactttattagttggcgttttgcgttgttatgcggctgtattctcctgg

SEQ ID NO: 487695 - DNA, 75 bp, synthetic construct
  source 1..75: mol_type = other DNA
atccaacgcgaacttcgtaaaaaggatcttgcactggctaatgagttaagaaaacgtgtagagatagaacgctca

SEQ ID NO: 487696 - DNA, 75 bp, synthetic construct
  source 1..75: mol_type = other DNA
agtttttggatgtaaaacgccttcagaccctgcaggacaacttttcaaaatcaatgatgatcgcgctcgtggttg

SEQ ID NO: 487697 - DNA, 75 bp, synthetic construct
  source 1..75: mol_type = other DNA
ggcgctttatttatctggcgcgtcaggtaaaccctgacatggcagagtacatcaaaaaactgaaactgccgggga

SEQ ID NO: 487698 - DNA, 75 bp, synthetic construct
  source 1..75: mol_type = other DNA
ggccgacccgaaagaagtgcatgaagctggcggcatcagcgtcggtgaccgctggaaggcgctggctaacgcgct

SEQ ID NO: 487699 - DNA, 75 bp, synthetic construct
  source 1..75: mol_type = other DNA
atcaaaaaactgaaactgccggggattcatctgcgtgaagaatctcgccgttattatccatccggcgaagtgact

SEQ ID NO: 487700 - DNA, 75 bp, synthetic construct
  source 1..75: mol_type = other DNA
gttagcacaatatactatttcgttaggcatcaaaaatattagagttttaaagaaaatagagcgaaacgtagaaaa

SEQ ID NO: 487701 - DNA, 75 bp, synthetic construct
  source 1..75: mol_type = other DNA
atgacagccagggaaacccaatgccgttaatggcgagaagctttagtacgccaggccaagcccgccagttggcat

SEQ ID NO: 487702 - DNA, 75 bp, synthetic construct
  source 1..75: mol_type = other DNA
gaggcaccagcccgaacaccagaacgctgggaacaactcaaagatcaaatcgttgaagccttactggcctggcac

SEQ ID NO: 487703 - DNA, 75 bp, synthetic construct
  source 1..75: mol_type = other DNA
ggtcgggcctggcctcatgctctgggcgccgcgcgagtatgagctgtttcgcttgatggataatcccctggcgga

SEQ ID NO: 487704 - DNA, 75 bp, synthetic construct
  source 1..75: mol_type = other DNA
ttgccgggggcggggttatcaacgccgatgctgctgctctgttacaacagtttgccgaactgaccagcgttccgg

SEQ ID NO: 487705 - DNA, 75 bp, synthetic construct
  source 1..75: mol_type = other DNA
ccgggagcagcaatcaatcctttctattcagcgatgcgtaagcacggcggtattcgtcacattctggcgcgtcac

SEQ ID NO: 487706 - DNA, 75 bp, synthetic construct
  source 1..75: mol_type = other DNA
ttcaaaccggaagatattgcaccagcctttgaacaggcgaaagccttaatggcgcaatatcgggtaccggtagtc

SEQ ID NO: 487707 - DNA, 75 bp, synthetic construct
  source 1..75: mol_type = other DNA
attaaaagatggcagcagctggacgcgtgatattctctggagcgaagataaccattttcgctctgcgaccgtcag

SEQ ID NO: 487708 - DNA, 75 bp, synthetic construct
  source 1..75: mol_type = other DNA
ttcccccggataataccgcaccggccaggaagtacggtgcagcttctgaagtcgctgtcacacgacatgcacagt

SEQ ID NO: 487709 - DNA, 75 bp, synthetic construct
  source 1..75: mol_type = other DNA
acgacgcacttcagtgtttacggtttatgtcaacgcggtatgcgctggccgttgatctgtgtgccgcgtatgtgt

SEQ ID NO: 487710 - DNA, 75 bp, synthetic construct
  source 1..75: mol_type = other DNA
ggtgaggttgcaggatcatttgcaacgttatccagatttttataacgaagagatattcagggaggtgacagaaga

SEQ ID NO: 487711 - DNA, 75 bp, synthetic construct
  source 1..75: mol_type = other DNA
gctgtcggcgagtgttaacgtagtcggttcttatacttacaccgatgcggaatacaccaccgatactacctataa

SEQ ID NO: 487712 - DNA, 75 bp, synthetic construct
  source 1..75: mol_type = other DNA
actccggcccttaccgcattctgaataaacagaaacaaacgggcgtttatgttcaggatcaggcgcagtgggata

SEQ ID NO: 487713 - DNA, 75 bp, synthetic construct
  source 1..75: mol_type = other DNA
ctcagcttgtggggctcgctatggttgttcactttgcacagccgtcttagttaaccactcaatggaagcgcttat

SEQ ID NO: 487714 - DNA, 75 bp, synthetic construct
  source 1..75: mol_type = other DNA
tgaacggacacatctacagagtatcaaatcgtcgtaagcgtaagcctgagccgaagccatccgaaataccaacac

SEQ ID NO: 487715 - DNA, 75 bp, synthetic construct
  source 1..75: mol_type = other DNA
gctttttatgcccgaaccgatggtcccaatgtcgagcgtgtgctggtgaatagtcgtcaggccaatctgatatta

SEQ ID NO: 487716 - DNA, 75 bp, synthetic construct
  source 1..75: mol_type = other DNA
tgaacggacacatctacagagtaccaaatcgtcgtaagcgtaagcctgagctgaagccatccgaaataccaacac

SEQ ID NO: 487717 - DNA, 75 bp, synthetic construct
  source 1..75: mol_type = other DNA
ttgtgatttctcgatctttatcaacgcgcccgcagctgcgttacgggaacggctggtggggcgcaagctggcggg

SEQ ID NO: 487718 - DNA, 75 bp, synthetic construct
  source 1..75: mol_type = other DNA
cgaaactggcggaaaatctgtgccaggtagtggaaggggattgtacgtggccgcagtatgatcgacaaaagcatg

SEQ ID NO: 487719 - DNA, 75 bp, synthetic construct
  source 1..75: mol_type = other DNA
tgaacggacacatctacaaagtaccaaatcgtcgtaagcgtaagcctgagctgaaaccatccgaaataccaacac

SEQ ID NO: 487720 - DNA, 75 bp, synthetic construct
  source 1..75: mol_type = other DNA
tagcagcccggcttaatcatcagcgcaaagaggcacctgtcgtgtgggtccacgacggtgaacgcgatcacccga

SEQ ID NO: 487721 - DNA, 75 bp, synthetic construct
  source 1..75: mol_type = other DNA
gcgttgtgctggcgggcggtaaagccagacgaatgggcggcgtagataaaggattgcttgaattaaacggcaaac

SEQ ID NO: 487722 - DNA, 75 bp, synthetic construct
  source 1..75: mol_type = other DNA
aaagcgcagataaagcgctttgagatggaaaaagaaatactaaagcaggctgccgtgctgatgagcgaaatcccc

SEQ ID NO: 487723 - DNA, 75 bp, synthetic construct
  source 1..75: mol_type = other DNA
gtttatggaaagcgcttacccggtttgttttggtcacaatgaatcacacgtttatttctcagagttcgacggcat

SEQ ID NO: 487724 - DNA, 75 bp, synthetic construct
  source 1..75: mol_type = other DNA
ccgctgcaaactgaaattggcagcatggtctatgcggtgaaaccaggcgatggttctgcgcgtgaacaggcggcg

SEQ ID NO: 487725 - DNA, 75 bp, synthetic construct
  source 1..75: mol_type = other DNA
gtgcttagcgtcgaagacgaagcgcaggttgatgaggctctggcatggcttaatgaattaatatttgctctaata

SEQ ID NO: 487726 - DNA, 75 bp, synthetic construct
  source 1..75: mol_type = other DNA
atggctacaccgcttattcgtgtcatgaacggacacatctacagagtatcaaatcgtcgtaagcgtaagcctgag

SEQ ID NO: 487727 - DNA, 75 bp, synthetic construct
  source 1..75: mol_type = other DNA
ggtccgctgtaaaatctgcggtgcagttgtggagccgtttgactggatgctctctgtggcgaaaagagaaaccag

SEQ ID NO: 487728 - DNA, 75 bp, synthetic construct
  source 1..75: mol_type = other DNA
ctgcgctccagcgacgtgctggcgcgactcggtggcgatgaatttggtctgctgctgccagattgtaatgtcgaa

SEQ ID NO: 487729 - DNA, 75 bp, synthetic construct
  source 1..75: mol_type = other DNA
ttgagtcaccccggattgaagcaaacaagctccgtggtatgcctgattgttacaagattaagctccggtctatcg

SEQ ID NO: 487730 - DNA, 75 bp, synthetic construct
  source 1..75: mol_type = other DNA
tccgggtgaaagaaaatactaaccagccagaggagttccgctattaccgtgccgtaagagctcgtttcatgcgcc

SEQ ID NO: 487731 - DNA, 75 bp, synthetic construct
  source 1..75: mol_type = other DNA
atggtaacgctgatcgaaaaccctgagatgcactatcaggcttcacaggttctcaaccagcttagaatgttcatt

SEQ ID NO: 487732 - DNA, 75 bp, synthetic construct
  source 1..75: mol_type = other DNA
tttaccgccaggtgtgggaagggggggcactggatcttctcgacgatgagccagctatgcaaccagtaccccgca

SEQ ID NO: 487733 - DNA, 75 bp, synthetic construct
  source 1..75: mol_type = other DNA
gttacttctgtgtacttacaggaatacttatattcaatggcaaaaaaaaatgccttctcagagtttatatctgaa

SEQ ID NO: 487734 - DNA, 75 bp, synthetic construct
  source 1..75: mol_type = other DNA
tcgttttgttgtctctggtagcttcaactcaggcctttgccggtcgttgtcagcacgacagcgatactgccgctg

SEQ ID NO: 487735 - DNA, 75 bp, synthetic construct
  source 1..75: mol_type = other DNA
aactcaggcctttgccggtcgttgtcagcacgacagcgatactgccgctgacggctcccgctgcggtgggcgttc

SEQ ID NO: 487736 - DNA, 75 bp, synthetic construct
  source 1..75: mol_type = other DNA
acagctacatggacgtaaggaccagtataaaattaagctacgtggtgccggatatcgccttgtcggtgatgctgc

SEQ ID NO: 487737 - DNA, 75 bp, synthetic construct
  source 1..75: mol_type = other DNA
gcacctagtagagcaaggcaactggtttttgctggtgatatcatcatttcaactgttaggccgaatctcaatacc

SEQ ID NO: 487738 - DNA, 75 bp, synthetic construct
  source 1..75: mol_type = other DNA
aaaatcaaaaacaggggttttttcaaaaaaatacttacggaatgctaatgttagatggcgaaaaattgatatcca

SEQ ID NO: 487739 - DNA, 75 bp, synthetic construct
  source 1..75: mol_type = other DNA
atgacaattcaggaaattccgctgacagcggataaccagcagttcagtatcgtcctgagcggtgtcacctggcgg

SEQ ID NO: 487740 - DNA, 75 bp, synthetic construct
  source 1..75: mol_type = other DNA
aagccagtaccggaagaaatggtgatatggaatcgtgagcgggttagcgacgcgcaggacggtattgtctcggag

SEQ ID NO: 487741 - DNA, 75 bp, synthetic construct
  source 1..75: mol_type = other DNA
tcagtgtcggagagttctgttcgaagaaagtgctgggtgtctgtctgcagaaaaagcgcagctactgccagtttg

SEQ ID NO: 487742 - DNA, 75 bp, synthetic construct
  source 1..75: mol_type = other DNA
cgtcctgggtggtgtcacctggcggattaacatcatatggcgcgatctttactggattatggacctgcagaacga

SEQ ID NO: 487743 - DNA, 75 bp, synthetic construct
  source 1..75: mol_type = other DNA
cagaggggagccggtaatctccggtattcctctcgtcactggtgctgacctgctggcgcagtacgcctgtatggg

SEQ ID NO: 487744 - DNA, 75 bp, synthetic construct
  source 1..75: mol_type = other DNA
ccaccaaagcagcgccggcgaaaacgacacatcataaaaaacagcataaagcagcacctgcccagaaagcgcagg

SEQ ID NO: 487745 - DNA, 75 bp, synthetic construct
  source 1..75: mol_type = other DNA
taaaaaaagcctcgtacaccccgtatgttgtctggtctgaaagctgcccgttcagcaaggagctggggaaactga

SEQ ID NO: 487746 - DNA, 75 bp, synthetic construct
  source 1..75: mol_type = other DNA
ggctgacagcaacagtgattaccgggccggctctgattttgctcaccagatcaaagggcagggaagcagcagtat

SEQ ID NO: 487747 - DNA, 75 bp, synthetic construct
  source 1..75: mol_type = other DNA
tgtctgcatgaatatgccacgtattcctgcgagtccaggacatccgggaaagtgatggtctgtgggggggacgtc

SEQ ID NO: 487748 - DNA, 75 bp, synthetic construct
  source 1..75: mol_type = other DNA
tgtccgtgctttcaccggtcaggcgaaattttgtaagaaggcagcagccggatacagcaactgctgtaaggacag

SEQ ID NO: 487749 - DNA, 75 bp, synthetic construct
  source 1..75: mol_type = other DNA
gaactgcccgtatggagctgcaggggagtaccacatgggaaacccggacgctggagtatgaaatgagtcagctac

SEQ ID NO: 487750 - DNA, 75 bp, synthetic construct
  source 1..75: mol_type = other DNA
cctgtccggggcgacaggtttgcaggtgacacaggggcaggttctgaccggtagtggctgtactgctaacggtaa

SEQ ID NO: 487751 - DNA, 75 bp, synthetic construct
  source 1..75: mol_type = other DNA
tcgttttcagtacgccgtggtgagtttgtacgcattatgcaccaggaacgcaaagatgaggggcaagtcgccgta

SEQ ID NO: 487752 - DNA, 75 bp, synthetic construct
  source 1..75: mol_type = other DNA
atgccgggaagtgacccgaaaaccaatggtgacctgagcgcagatatccgccgccttgagggtgcgctgatcgcc

SEQ ID NO: 487753 - DNA, 75 bp, synthetic construct
  source 1..75: mol_type = other DNA
tttttagttttaagattattccgtgatctattaatacggaggttttataaggaaaacagtttttatggtttctaa

SEQ ID NO: 487754 - DNA, 75 bp, synthetic construct
  source 1..75: mol_type = other DNA
ttcaggggcagggtacaggcagtattcagaattttaatccgcaggaaagcattcccggctataacgcgaatccgg

SEQ ID NO: 487755 - DNA, 75 bp, synthetic construct
  source 1..75: mol_type = other DNA
ctatgactggtttgtcactctcggaaaagaagtgatcaccgggaagctggatgaagtgaaagctaaagcaatggc

SEQ ID NO: 487756 - DNA, 75 bp, synthetic construct
  source 1..75: mol_type = other DNA
gtatagcgctgatttgcctgatgctgtgcgccggttgcaccagcgcgccgcctgtgccgacgccggtgattgttt

SEQ ID NO: 487757 - DNA, 75 bp, synthetic construct
  source 1..75: mol_type = other DNA
acggtgatctgagtgtcgatattcgcaggcttgagcatgcgctcaccgcctgtgcgattaaggtcgaaaccatca

SEQ ID NO: 487758 - DNA, 75 bp, synthetic construct
  source 1..75: mol_type = other DNA
aactgctgtaaggatggtggctggggtcaggatgtggggctggcgaagtgcaacagcgaagaaaaggcgctggga

SEQ ID NO: 487759 - DNA, 75 bp, synthetic construct
  source 1..75: mol_type = other DNA
cgaccggtgaaaccggcaaaaccatcacagagtcattcatgaacaaaccgaaagatattctgtcaccggatgcgc

SEQ ID NO: 487760 - DNA, 75 bp, synthetic construct
  source 1..75: mol_type = other DNA
aatacagttcctgtttttattgacgtgaacaagttggtcactgagcatttggctgttctggcaatgacgggttca

SEQ ID NO: 487761 - DNA, 75 bp, synthetic construct
  source 1..75: mol_type = other DNA
gtttgattcgaagctggcgcagatagtccagcagcaggggcgtaacgggcagttgcgtatcgggtttggcagcgc

SEQ ID NO: 487762 - DNA, 75 bp, synthetic construct
  source 1..75: mol_type = other DNA
tgagtgtgggcgagttctgctcccggaaagtgctgggtgtctgtctgcagaaaaagcgcagttactgccagtttg

SEQ ID NO: 487763 - DNA, 75 bp, synthetic construct
  source 1..75: mol_type = other DNA
gccctgaatggtgtggatgtcagggctttcaccggcgaggcgaaattctgccgtaaggccgcagccggcttcagt

SEQ ID NO: 487764 - DNA, 75 bp, synthetic construct
  source 1..75: mol_type = other DNA
gtcatggaatttgaagatatcgccgataacgcagcggatgcaccgactgaaacctgtttcatgcactatgaataa

SEQ ID NO: 487765 - DNA, 75 bp, synthetic construct
  source 1..75: mol_type = other DNA
cgaatcacgcaaaatgctgcgccagctgagctacagcgcctcccatgatgcactgacgcatctcgccaaccgcgc

SEQ ID NO: 487766 - DNA, 75 bp, synthetic construct
  source 1..75: mol_type = other DNA
gcggatatcatcatcgcttctacgcacatcgcgggcgaaatcaccgtgaccggcaacaaatatgtcgttggcgtg

SEQ ID NO: 487767 - DNA, 75 bp, synthetic construct
  source 1..75: mol_type = other DNA
gcggatatcatcatcgcttctacccatatcgcaggcgaaatcaccgtgaccggcaacaaatatgtggtgggggtg

SEQ ID NO: 487768 - DNA, 75 bp, synthetic construct
  source 1..75: mol_type = other DNA
atcccgtcagtgcgcgttttattccgatgagggaacctgcctgcatgaatatgccacgtactcctgtgagtcaaa

SEQ ID NO: 487769 - DNA, 75 bp, synthetic construct
  source 1..75: mol_type = other DNA
cggcaccaccattccgtcagacagtgaactggctgaacgtgtgaaagaacaggttgcttcggcgctgcagcagtc

SEQ ID NO: 487770 - DNA, 75 bp, synthetic construct
  source 1..75: mol_type = other DNA
ggtacagtaaccaggagtctgtgcaggtgacaataacgctgactctggatgttgaggttaccgaacataagcctt

SEQ ID NO: 487771 - DNA, 75 bp, synthetic construct
  source 1..75: mol_type = other DNA
agatgttgaaaattttgacaatctccatgctttttttatggttaaaggcaatcagattgcttcacttcttcaaat

SEQ ID NO: 487772 - DNA, 75 bp, synthetic construct
  source 1..75: mol_type = other DNA
acaatttaacaaagaaatgtcaagttagggcttttaatgtgaaccttgacgggaagagtaatttatttcagcaaa

SEQ ID NO: 487773 - DNA, 75 bp, synthetic construct
  source 1..75: mol_type = other DNA
tcgtccgaactggttcagatggccgctcagtactcacctgctttccagaaactgccagcggaccggcaggctttt

SEQ ID NO: 487774 - DNA, 75 bp, synthetic construct
  source 1..75: mol_type = other DNA
cggcaacaaatacgtggttggcgtgcgcaacatgctctctcctgccgattttggcccgaaactgctggaagtgat

SEQ ID NO: 487775 - DNA, 75 bp, synthetic construct
  source 1..75: mol_type = other DNA
acatcgcgggcgagatctccgtgaccggcaacaaatacgtggttggcgtgcgcaacatgctctctcctgccgatt

SEQ ID NO: 487776 - DNA, 75 bp, synthetic construct
  source 1..75: mol_type = other DNA
gcatagatattataccgtcagctatcttaaagaaaaatgtaatccaaaaagtcaaagatgatggtttgcgcgctg

SEQ ID NO: 487777 - DNA, 75 bp, synthetic construct
  source 1..75: mol_type = other DNA
ctgtaaggatgggggctggggtcaggatgtgggcctggcgaagtgcaacagcgaagaaaaggcgctgggaaaagc

SEQ ID NO: 487778 - DNA, 75 bp, synthetic construct
  source 1..75: mol_type = other DNA
cgaccggtgaaaccggaaaaaccatcacagagtccttcatgaacaagccgaaagacattctttcaccggatgcgc

SEQ ID NO: 487779 - DNA, 75 bp, synthetic construct
  source 1..75: mol_type = other DNA
taatctcaatgaatgattctaaggggagcgttacgctgagttccgggctggatataacagatgggcagtcattgc

SEQ ID NO: 487780 - DNA, 75 bp, synthetic construct
  source 1..75: mol_type = other DNA
ggctgacagcaacagtgattaccgggctggttctgattttgctcaccagatcaaagggcagggaagcagcagtat

SEQ ID NO: 487781 - DNA, 75 bp, synthetic construct
  source 1..75: mol_type = other DNA
aaggttatacccgcgcaacggcagggaatatcggcgtatgtctggggacttccggtcctgcgggcacggacatga

SEQ ID NO: 487782 - DNA, 75 bp, synthetic construct
  source 1..75: mol_type = other DNA
tggggctggcagtcagtgtggcacaggctgacagcaacagtgattaccgtgcgggttctgattttgcccgtcaga

SEQ ID NO: 487783 - DNA, 75 bp, synthetic construct
  source 1..75: mol_type = other DNA
cactcacagttccggttcagtatgaacggtctgaaactggtgttcagcgttaccgtacctgttgccgggacagtg

SEQ ID NO: 487784 - DNA, 75 bp, synthetic construct
  source 1..75: mol_type = other DNA
gccagcgggatgaactggacggtgacgttactgggttttctggcgggtaactgcgtggggataatttcagaatat

SEQ ID NO: 487785 - DNA, 75 bp, synthetic construct
  source 1..75: mol_type = other DNA
tgagtgtgggcgagttctgttcgaaaaaggtgctgggtgtctgcctgcagaaaaagcgcagttactgccagtttg

SEQ ID NO: 487786 - DNA, 75 bp, synthetic construct
  source 1..75: mol_type = other DNA
gccgtcgtgggggcaatgctgctgcggaaattgctgccgtggtataacccactgcaaaatctggctgactggcta

SEQ ID NO: 487787 - DNA, 75 bp, synthetic construct
  source 1..75: mol_type = other DNA
cattactgggttttctggcgggtaactgcgtggggataatttcagaatacggcggacaaaaattaagcgaagcga

SEQ ID NO: 487788 - DNA, 75 bp, synthetic construct
  source 1..75: mol_type = other DNA
ggttactgtcttttattcccggtggctttctcggcatgacgctattttttgccagcgggatgaactggacggtga

SEQ ID NO: 487789 - DNA, 75 bp, synthetic construct
  source 1..75: mol_type = other DNA
ggtaaatcggggtttatcagaagtctggcggttaattattccgggatggtgtgggcgtttttcgccgcgctggct

SEQ ID NO: 487790 - DNA, 75 bp, synthetic construct
  source 1..75: mol_type = other DNA
attttgggaagaatgttcccttctcatcccagtggcctctttatgaggccctgcgaactacagcatccattatct

SEQ ID NO: 487791 - DNA, 75 bp, synthetic construct
  source 1..75: mol_type = other DNA
atatggttaaaagacataactcgttccaagagagagagaaagatgctgctaattctatattacctgtcaataaac

SEQ ID NO: 487792 - DNA, 75 bp, synthetic construct
  source 1..75: mol_type = other DNA
agttgcgctttaccggctctatccagcgtgatgataccggggaagtgcaggccgtggagcttgtggtgcgtggac

SEQ ID NO: 487793 - DNA, 75 bp, synthetic construct
  source 1..75: mol_type = other DNA
ataagcctggtcttccatcagcattattgtgtgcccgacgtggagctggcgagagtgcgaacagccatgaaggcc

SEQ ID NO: 487794 - DNA, 75 bp, synthetic construct
  source 1..75: mol_type = other DNA
ggattcgaaactggtctacaaactgcatgaccgctttaacgacagcatgtgcattctgccgaccatagaagaccg

SEQ ID NO: 487795 - DNA, 75 bp, synthetic construct
  source 1..75: mol_type = other DNA
cgtacagagcttacgcatgggacggagagaaaagcgtttacgtcgggtgctatccgactgtggatgaggctgtcg

SEQ ID NO: 487796 - DNA, 75 bp, synthetic construct
  source 1..75: mol_type = other DNA
cgatgcagaaagcgacctgtatgaagtcgaaatgcgcggacgtgtgacggaaattgatatgggggaagccaaaac

SEQ ID NO: 487797 - DNA, 75 bp, synthetic construct
  source 1..75: mol_type = other DNA
tttttacgctgtttgtggatggtgaaaacgaagtgggtaaggtgacgtccgtcactttgcctaagctgacgcgca

SEQ ID NO: 487798 - DNA, 75 bp, synthetic construct
  source 1..75: mol_type = other DNA
taaagatatggtcgaaattgacaccgtgaacctcgtcgaaatggtgaacggtaccgacatgctcgaggcacaccg

SEQ ID NO: 487799 - DNA, 75 bp, synthetic construct
  source 1..75: mol_type = other DNA
ctcggccttgatgatgatgcgctgtcaatggagtggtcgctcgggggcttcccggattcggttatctgggagctt

SEQ ID NO: 487800 - DNA, 75 bp, synthetic construct
  source 1..75: mol_type = other DNA
ggcaaagccacggtggatggtatccagttgcgctttaccggctctatccagcgtgatgataccggagaagtgcag

SEQ ID NO: 487801 - DNA, 75 bp, synthetic construct
  source 1..75: mol_type = other DNA
ggacgacgcaaccggcgacgctgtaccgtgcgaaatccagacgcgtggccgcttcactgaactggatcccggttc

SEQ ID NO: 487802 - DNA, 75 bp, synthetic construct
  source 1..75: mol_type = other DNA
gtttttacccactgcaaagaaaaccggatatgcactggcctgaatatgtcgatccacgtatgcgcaaatatcgcg

SEQ ID NO: 487803 - DNA, 75 bp, synthetic construct
  source 1..75: mol_type = other DNA
ggcttccaacatcttcttcgctgagggttctgttgagctgatgtatggcaagttggcattccctaccggccaggg

SEQ ID NO: 487804 - DNA, 75 bp, synthetic construct
  source 1..75: mol_type = other DNA
gctggacaaacctgagaatggagtgttcatgagaaactcacaaggtgctgagatatgctctctatatgataagga

SEQ ID NO: 487805 - DNA, 75 bp, synthetic construct
  source 1..75: mol_type = other DNA
aacctataacagaagcaatgattatgagaaaagacgagtgtcactttgattcaaaaagagaagcctttgttgcga

SEQ ID NO: 487806 - DNA, 75 bp, synthetic construct
  source 1..75: mol_type = other DNA
acataaacttgaaacttttattattaagtattgtttatcttattgcttgttgttgcgtgttttttcttatcgcca

SEQ ID NO: 487807 - DNA, 75 bp, synthetic construct
  source 1..75: mol_type = other DNA
accgttaccatcagcccgaaaattctgccaccaaacaacgctgatgcgccgtctattccttaccagaacgttacc

SEQ ID NO: 487808 - DNA, 75 bp, synthetic construct
  source 1..75: mol_type = other DNA
cttaccaattcgacgctaaatctggcaaaacgtggactcgcttcaccacgctggctggcgcaagcgtactggtcc

SEQ ID NO: 487809 - DNA, 75 bp, synthetic construct
  source 1..75: mol_type = other DNA
acgtattgagaatgaatgacacaaataacaacatccagactcgacttggtttccgcacctttattcgtactcagg

SEQ ID NO: 487810 - DNA, 75 bp, synthetic construct
  source 1..75: mol_type = other DNA
ggaatgtgggcgtgcagctgggtgataatggctacaatgacaccgcagtgatggtgggcctgaaatataagttct

SEQ ID NO: 487811 - DNA, 75 bp, synthetic construct
  source 1..75: mol_type = other DNA
ccataacagtaaagattttgctgtctcaatgaacggtgtgaaagtcgaacaagatggggcgagtaatttggggga

SEQ ID NO: 487812 - DNA, 75 bp, synthetic construct
  source 1..75: mol_type = other DNA
atccagagccgacttggtttccgcacctttattcgtactcaggagaaaacagcggtccgcacggtgacgactttg

SEQ ID NO: 487813 - DNA, 75 bp, synthetic construct
  source 1..75: mol_type = other DNA
catcaggtattcactgacgggcatctttctggtgaatattcctgcgtgcaactgaccgggctcttttcccggggc

SEQ ID NO: 487814 - DNA, 75 bp, synthetic construct
  source 1..75: mol_type = other DNA
gggggtcgaacccgcatacatgatcagcctgtacaggctggcaccgactctacccgttgagcgtacaccagcaaa

SEQ ID NO: 487815 - DNA, 75 bp, synthetic construct
  source 1..75: mol_type = other DNA
gacgtcagaaagaaatcgacaccggcgagggtaaacagggagaagacactgagtcgaaaatctccgtggtctgca

SEQ ID NO: 487816 - DNA, 75 bp, synthetic construct
  source 1..75: mol_type = other DNA
ggatgatctgcaacgtgttgatgatatgctcggcgcaaccttaagtttgcatggctggcgcttgcggggcgatcc

SEQ ID NO: 487817 - DNA, 75 bp, synthetic construct
  source 1..75: mol_type = other DNA
aagaggccgaacccagccttgagcagcaactggcgcaactgcaaatgcaggcccacgagcaaggttatcaggcgg

SEQ ID NO: 487818 - DNA, 75 bp, synthetic construct
  source 1..75: mol_type = other DNA
gaggcggcacgtcaggtgatcggtcagacgccaacagtggataactcggcactgatcaaacagatccaacagttg

SEQ ID NO: 487819 - DNA, 75 bp, synthetic construct
  source 1..75: mol_type = other DNA
aggcgcgttgctcatgctgatgtgttttcctctgctggctcttttttatggctgccacagtggcgaagccaacaa

SEQ ID NO: 487820 - DNA, 75 bp, synthetic construct
  source 1..75: mol_type = other DNA
aggcgcgttgttcatgctgatgtgttttcctctgctggctctttttttttatggctgccacagtggcgaagccaa

SEQ ID NO: 487821 - DNA, 75 bp, synthetic construct
  source 1..75: mol_type = other DNA
tggtcaggcgggagatctcacgcatctggatatctgcgctacgaattaaatcgacgttttgtaacgcgcgagcgc

SEQ ID NO: 487822 - DNA, 75 bp, synthetic construct
  source 1..75: mol_type = other DNA
ggagcagatggtcaggaaaacggggagggcgctggcgcagatatcggtaactggaatttgcaggagtttcagtaa

SEQ ID NO: 487823 - DNA, 75 bp, synthetic construct
  source 1..75: mol_type = other DNA
ctaccgtcctggtggatacatcaaacggctgccaaaggatccgtggggcaatgattatcagtatctcagcccggg

SEQ ID NO: 487824 - DNA, 75 bp, synthetic construct
  source 1..75: mol_type = other DNA
aaagaagtgattactggtaaactggatgaagtgaaagctaaagcaatggcctacgcctgcaagcaaaccaggaag

SEQ ID NO: 487825 - DNA, 75 bp, synthetic construct
  source 1..75: mol_type = other DNA
tttactccgaagaaggtgcctgtctgcatgaatatgccacgtactcctgtgagtcaaaaacatccgggaaagtga

SEQ ID NO: 487826 - DNA, 75 bp, synthetic construct
  source 1..75: mol_type = other DNA
aaatggagaaagtccaaatgtatgcggcagaaagtgaagtggtttatcagtttcgttacagaggggagagttatt

SEQ ID NO: 487827 - DNA, 75 bp, synthetic construct
  source 1..75: mol_type = other DNA
atgcttacgaaagaaccatcatttgcatcgctgctggttaaacaaagcccggcaatgcactacggtcacggctgg

SEQ ID NO: 487828 - DNA, 75 bp, synthetic construct
  source 1..75: mol_type = other DNA
cggaaatgttgtgtgaccgcacttgcgcgtgaagcggcaattacccgaaacattcagttaatcaggcaggagtaa

SEQ ID NO: 487829 - DNA, 75 bp, synthetic construct
  source 1..75: mol_type = other DNA
tgcttacgggattatagaaaatagcagcagccgtgatgcctatttatcggcactgaaaggacgtgatggcctttc

SEQ ID NO: 487830 - DNA, 75 bp, synthetic construct
  source 1..75: mol_type = other DNA
cgtctatctgaaagataacctgacgtatatctcagataaaatgaacgccgcgtttcctgaactcaactgccttac

SEQ ID NO: 487831 - DNA, 75 bp, synthetic construct
  source 1..75: mol_type = other DNA
ggcgtcgttgatgctgagtatgctgcgctccagcgacgtgctggcgcggctcggtggtgatgaatttggtctgct

SEQ ID NO: 487832 - DNA, 75 bp, synthetic construct
  source 1..75: mol_type = other DNA
cctatttccggctgacgatggacggtaaggagttggtcgaaatcgacaccatcaacatgattgagaaggtgaacg

SEQ ID NO: 487833 - DNA, 75 bp, synthetic construct
  source 1..75: mol_type = other DNA
gctgctaccagactgtaatgtcgaaagtgcgcgttttatcgctacacgcattatcagtgccgtgaatgactatca

SEQ ID NO: 487834 - DNA, 75 bp, synthetic construct
  source 1..75: mol_type = other DNA
aaggtcgtggttttgtccgactcaatgccggctgcccacgttcgaaactggaaaaaggtgtggctggattaatta

SEQ ID NO: 487835 - DNA, 75 bp, synthetic construct
  source 1..75: mol_type = other DNA
atgagtaaaccatcacaacgtgttttaattaccctgcctcatcccctgcttcacctcgtcagtttaggtttagtc

SEQ ID NO: 487836 - DNA, 75 bp, synthetic construct
  source 1..75: mol_type = other DNA
gaacgccatcaaattaaagtcactcgcccgtctaccgttaacctggtgcgacgaacaagggcaaccggtctacct

SEQ ID NO: 487837 - DNA, 75 bp, synthetic construct
  source 1..75: mol_type = other DNA
acgccagcgttcaagagagcgttcatcagtatgcgtcattacaaatccgatatgtcgatctgccgctgctgcgac

SEQ ID NO: 487838 - DNA, 75 bp, synthetic construct
  source 1..75: mol_type = other DNA
ggggcagatggtcaggaaaacggggaaggcgctggcgcagatatcggtaactggaatttgcaggagtttcagtaa

SEQ ID NO: 487839 - DNA, 75 bp, synthetic construct
  source 1..75: mol_type = other DNA
cggccaatatggcggactcccgcaactaccgtcctggtggatacatcaaacggctgccaaaggatccgtggggca

SEQ ID NO: 487840 - DNA, 75 bp, synthetic construct
  source 1..75: mol_type = other DNA
cgccaggcgcgccaggtgggctttaacctggaagagagcggcgaactggtgaatctgtttaacgatccgcagcgt

SEQ ID NO: 487841 - DNA, 75 bp, synthetic construct
  source 1..75: mol_type = other DNA
ttccgtcggataatatcagaatcatcgttgttactgacggtgaacgtattctgggactgggagatttgggcattg

SEQ ID NO: 487842 - DNA, 75 bp, synthetic construct
  source 1..75: mol_type = other DNA
aaggttacggtacctattgctgagctatttcgcttaaccaccgtgaaaagaattgccggttatttgcaggctatg

SEQ ID NO: 487843 - DNA, 75 bp, synthetic construct
  source 1..75: mol_type = other DNA
taggccaatataatattcaggtgaatggtattgctcctggttattatgcaaccgatattacgctggcaacacgca

SEQ ID NO: 487844 - DNA, 75 bp, synthetic construct
  source 1..75: mol_type = other DNA
atggacaatattaggactctgttaagacaagtaagggctgttataatgactagtgcgaatcttggccctagaacg

SEQ ID NO: 487845 - DNA, 75 bp, synthetic construct
  source 1..75: mol_type = other DNA
gatcaggcgcgcagcgatgctcttgatgctgccgctcgcgctggcaggttgcagcaacagctcgttgccatccgt

SEQ ID NO: 487846 - DNA, 75 bp, synthetic construct
  source 1..75: mol_type = other DNA
gatgcttgctgcgctggttgtcatcggtgtggttgcctggaatgttcacggtgacctgcagtatgccgccggcta

SEQ ID NO: 487847 - DNA, 75 bp, synthetic construct
  source 1..75: mol_type = other DNA
tgattcaacctggcctcaatttgattcacccgcttcaggtgttcgaggttgatgtcacgaacggtgcaatagtga

SEQ ID NO: 487848 - DNA, 75 bp, synthetic construct
  source 1..75: mol_type = other DNA
tcgtacctgggatgaatggcggcgcgaggaagatgcaagaacacacaccaccgagaggagacatgatcgcggttg

SEQ ID NO: 487849 - DNA, 75 bp, synthetic construct
  source 1..75: mol_type = other DNA
ttgggcgctggacctaatctgggcgggctgaccagtacgcatgtgctgaatactgacctgctgttaaacctgacg

SEQ ID NO: 487850 - DNA, 75 bp, synthetic construct
  source 1..75: mol_type = other DNA
aatgccggtatttgtaagctgaataaggtgctggactttggtcgtgccgactgggacccgatgattgacgtgaac

SEQ ID NO: 487851 - DNA, 75 bp, synthetic construct
  source 1..75: mol_type = other DNA
cgcaaatgtctttattcctagtttcgtcaaagataacggcgaaacaaaggaaatgattgaaaaacagggtgtcga

SEQ ID NO: 487852 - DNA, 75 bp, synthetic construct
  source 1..75: mol_type = other DNA
aaaaagcctctgtttttgaactatggaagaacggtgtcacgaacggtgcaatagtgatccacacccaacgcctga

SEQ ID NO: 487853 - DNA, 75 bp, synthetic construct
  source 1..75: mol_type = other DNA
agccggggcagtgctgggtaccgcgctggctatcaaaatgagcgcctatattcttgttgcgcccgtggcggcggc

SEQ ID NO: 487854 - DNA, 75 bp, synthetic construct
  source 1..75: mol_type = other DNA
tcttatcgcggctctgtagataaaatactctatcctgaagatattcgcaaggggccgtattactcccgcaccagc

SEQ ID NO: 487855 - DNA, 75 bp, synthetic construct
  source 1..75: mol_type = other DNA
tggcaatcaacctgacaaaaggtaacggaccgggggcgctggcccacgaatggttccattcactggataattatt

SEQ ID NO: 487856 - DNA, 75 bp, synthetic construct
  source 1..75: mol_type = other DNA
gttaagcgtgcgaaaacatcgacaattattgcaaaaaacaaacatgtgtgtttctggaacaaaaatggtatcgag

SEQ ID NO: 487857 - DNA, 75 bp, synthetic construct
  source 1..75: mol_type = other DNA
tttaccgttccgcgacagaaagaaatgcggttgtgatgctgcttgatgccgtggataaaaatggtgatccggtgg

SEQ ID NO: 487858 - DNA, 75 bp, synthetic construct
  source 1..75: mol_type = other DNA
cacagtggcagaaggtgtggaaagagtttgttgaggacggagggaaaaccggctggtttaacatgggtgaccttg

SEQ ID NO: 487859 - DNA, 75 bp, synthetic construct
  source 1..75: mol_type = other DNA
agagcggcgtggtggatgcctggcagaaagcctaccgttactacgtccccctgaaagggcaggatgttgacggtg

SEQ ID NO: 487860 - DNA, 75 bp, synthetic construct
  source 1..75: mol_type = other DNA
cgcgcagaggccgttcgcgactggatgcgggatacgggcgatatccctcaaagctgttttgccgtacagggatat

SEQ ID NO: 487861 - DNA, 75 bp, synthetic construct
  source 1..75: mol_type = other DNA
aagctgttttgccgtgcagggatacggtgaaagccgccctgtggccccgaatgacacggcggaaggccgtgcgcg

SEQ ID NO: 487862 - DNA, 75 bp, synthetic construct
  source 1..75: mol_type = other DNA
accatcgtagcggcgctgtcgttgctcaccgccgtgcttatctggcgtcctgagcatgaagaatatgttcagctg

SEQ ID NO: 487863 - DNA, 75 bp, synthetic construct
  source 1..75: mol_type = other DNA
agaattatttacagggtcgactgggaacatattcaggcagtgtatctgaatccagaaaagaaacagcataatgta

SEQ ID NO: 487864 - DNA, 75 bp, synthetic construct
  source 1..75: mol_type = other DNA
gtgacatggaaccaaaaacaaaaaaaacagcgttcgctttatatcccttacgctggccctgtattgctggaattt

SEQ ID NO: 487865 - DNA, 75 bp, synthetic construct
  source 1..75: mol_type = other DNA
cgcatcacggaaagcggcgcgtacaccctctgcacacaggggacgggggtgacggacggcagcgaaacgccggtg

SEQ ID NO: 487866 - DNA, 75 bp, synthetic construct
  source 1..75: mol_type = other DNA
cgaagatggcggtgcagcaggaaaaagcgcggcagctgatcgacggcatgtcgcgcttcccgcaaacggaaaacg

SEQ ID NO: 487867 - DNA, 75 bp, synthetic construct
  source 1..75: mol_type = other DNA
tcgggcggagctgctcaggaaaaatgacaatgccgttatgaattcaggggtactgagagcagtcgttacggggta

SEQ ID NO: 487868 - DNA, 75 bp, synthetic construct
  source 1..75: mol_type = other DNA
cattggattttttttcattacataacaaggtggccatcgtaactggggccgcgggtgaactggggagaggcttat

SEQ ID NO: 487869 - DNA, 75 bp, synthetic construct
  source 1..75: mol_type = other DNA
gaagtgaaaccctcaaccatagtttgtcagagataaaagaaataaaaggcaaacttaaggcattggatgaagaaa

SEQ ID NO: 487870 - DNA, 75 bp, synthetic construct
  source 1..75: mol_type = other DNA
gcaacgatacccaagtgaaggtgaatggttaccgtatcgaactgggggaagtcaaaagccaccttgaacagctcg

SEQ ID NO: 487871 - DNA, 75 bp, synthetic construct
  source 1..75: mol_type = other DNA
tttgagcgcacctgggatgaatggcaacgtgatgaatatgcccgaacacacgccaccgagaggagacatgatcgc

SEQ ID NO: 487872 - DNA, 75 bp, synthetic construct
  source 1..75: mol_type = other DNA
ggtcaacgtccaccactgcaacgtgtttattcctctgcgacctttgagcaacttctgattcaggtttgccagaca

SEQ ID NO: 487873 - DNA, 75 bp, synthetic construct
  source 1..75: mol_type = other DNA
taaatggttcgcgtattgattcaagggatatattcttttacacaaaaaaaaataggcatggtgaatattacctga

SEQ ID NO: 487874 - DNA, 75 bp, synthetic construct
  source 1..75: mol_type = other DNA
atgccacagagatgtttcagtttgccagtcagcagttacgtctagggattcctcaagcggctttacgaccacctc

SEQ ID NO: 487875 - DNA, 75 bp, synthetic construct
  source 1..75: mol_type = other DNA
ggtatctaaagtataatataagtgctggacagtatcgttcatcggatgaatctgtagaaaaagcatatctatggc

SEQ ID NO: 487876 - DNA, 75 bp, synthetic construct
  source 1..75: mol_type = other DNA
ggaggcttggttgctcaccgccatggtgttactttgggacagagaacaggggaaacggtggcactggttgaagcc

SEQ ID NO: 487877 - DNA, 75 bp, synthetic construct
  source 1..75: mol_type = other DNA
ggagaacgatatcaggagcacagcacagatgcagcataccacaggacaaaatgctcgttatgaaacaggcatgaa

SEQ ID NO: 487878 - DNA, 75 bp, synthetic construct
  source 1..75: mol_type = other DNA
agtgtatttgagcggactggatgaaaccggacagttgaaggttcaatgggggcgtaacagttcttgccgtgcaaa

SEQ ID NO: 487879 - DNA, 75 bp, synthetic construct
  source 1..75: mol_type = other DNA
aggagcaggaggatacagaacgtagtcgcacggagcgacgagcggaacagctcaggaaaaatgacaatgccgtta

SEQ ID NO: 487880 - DNA, 75 bp, synthetic construct
  source 1..75: mol_type = other DNA
ctggaaaacattaatcagcagcgcgcgcagatggcggtgcagcaggaaaaagcccgccaattgatcgacggcatg

SEQ ID NO: 487881 - DNA, 75 bp, synthetic construct
  source 1..75: mol_type = other DNA
cggcgtgctcgatagcgcgaatcataattatcaggtgttattgcaggcggtgaacggtcaggcgcgaatttccag

SEQ ID NO: 487882 - DNA, 75 bp, synthetic construct
  source 1..75: mol_type = other DNA
atgctggacaagcgcaccgcgctttccggcggcgcggtggaccgccagttacagccggtgttgcagggtgaagcg

SEQ ID NO: 487883 - DNA, 75 bp, synthetic construct
  source 1..75: mol_type = other DNA
ccttaagcgtgcgcaccgatggtgataagtcggcgtttatgccgctgaaaacttttgccgagccgtctgaggcag

SEQ ID NO: 487884 - DNA, 75 bp, synthetic construct
  source 1..75: mol_type = other DNA
tatcaggttttattgcaggcggtgaacggtcaggcgcgaatttccagccagacggtgaggaatttattggggtaa

SEQ ID NO: 487885 - DNA, 75 bp, synthetic construct
  source 1..75: mol_type = other DNA
ccttaagcgtgcgcaccgatggtgataagtcggcgtttatgccgctaaaaacctttgccgaaccgtcgcaggccg

SEQ ID NO: 487886 - DNA, 75 bp, synthetic construct
  source 1..75: mol_type = other DNA
atgttcagtttactctcggtcgccgcagtacttatgggtttactgctgatgccgttactgatggcgggcatcacc

SEQ ID NO: 487887 - DNA, 75 bp, synthetic construct
  source 1..75: mol_type = other DNA
tggagtgtgggcacaaagctgcggcgggttcaatcaccggatttctcggcctgttcgcttaccttggcgcggcgc

SEQ ID NO: 487888 - DNA, 75 bp, synthetic construct
  source 1..75: mol_type = other DNA
agcgccaacgccacggtaatgctgtttgaagtgggcggcttactcggcgcgttatttgccggatggggatcggat

SEQ ID NO: 487889 - DNA, 75 bp, synthetic construct
  source 1..75: mol_type = other DNA
ctttaagcgtgcgcagcgatggtgataaatcagcgtttatgccgctgaaaatctttgccgaaccgtcacaggcgg

SEQ ID NO: 487890 - DNA, 75 bp, synthetic construct
  source 1..75: mol_type = other DNA
ccttaagcgtgcgcaccgatggcgataagtcggcgtttatgccgctgaaaacttttgccgaaccgtcgcaggcgg

SEQ ID NO: 487891 - DNA, 75 bp, synthetic construct
  source 1..75: mol_type = other DNA
caatgctgcaaaatccgatgatctggctgctgggtgtctcttatgtactggtttatgtgatccggattgcgttaa

SEQ ID NO: 487892 - DNA, 75 bp, synthetic construct
  source 1..75: mol_type = other DNA
ggattatatccatgaaactactatccgctctttggatgcatatcctgtacactcagaacatcaggatttaaatta

SEQ ID NO: 487893 - DNA, 75 bp, synthetic construct
  source 1..75: mol_type = other DNA
tcttgagcattatcgctttgtgcaaaatttgccagaaaaatattctgaatttttgtttccacaaaaatcggtatc

SEQ ID NO: 487894 - DNA, 75 bp, synthetic construct
  source 1..75: mol_type = other DNA
ttatcggtttccttaaaaggattatttttttctcagattcactaccggggaagtgggaacacagaaaatttcggt

SEQ ID NO: 487895 - DNA, 75 bp, synthetic construct
  source 1..75: mol_type = other DNA
ggtgtggtttatgggccacgacagcagcaagttccgcattaccgaatcggtgttccgcttcggagccgatgtgcg

SEQ ID NO: 487896 - DNA, 75 bp, synthetic construct
  source 1..75: mol_type = other DNA
gtggtagccgcgcagttagtgaaagaggtgaaacgctacctggcaagcccggcggcggtgggggaatatctcgcc

SEQ ID NO: 487897 - DNA, 75 bp, synthetic construct
  source 1..75: mol_type = other DNA
aaatccggttgtcagtattcgatattattatgaactgcgttccttgcagtgcattgaggatattctggcaataca

SEQ ID NO: 487898 - DNA, 75 bp, synthetic construct
  source 1..75: mol_type = other DNA
atcaatcttgaggaacggtggattgatttgaatattgaaggggctaaaaaccatcgggagcatcgcgttccgatt

SEQ ID NO: 487899 - DNA, 75 bp, synthetic construct
  source 1..75: mol_type = other DNA
ctgaaatggcggcatcgggtactgaatgaccaaaactgtgccacccggacgtggaataacaaagttgcccatatg

SEQ ID NO: 487900 - DNA, 75 bp, synthetic construct
  source 1..75: mol_type = other DNA
cgctggcctccggtgaaatgctgccgaaagtggagctgcactggtggcgtgaaccgccccgggtttcctggagag

SEQ ID NO: 487901 - DNA, 75 bp, synthetic construct
  source 1..75: mol_type = other DNA
ttgcaatcactggattatattgatgacatattaacgatgcaacctattttgcctgcaaaaattcatcgtccctat

SEQ ID NO: 487902 - DNA, 75 bp, synthetic construct
  source 1..75: mol_type = other DNA
gagcaccgatggattaatctccggcctgagggttccaagaaccataaggaacaccgggttccgattactgaaaac

SEQ ID NO: 487903 - DNA, 75 bp, synthetic construct
  source 1..75: mol_type = other DNA
ggaaaatcctttcaacggggtaattacccgacccgatgtcaaacgcaaaaaaacactgactgatgtgcagatgaa

SEQ ID NO: 487904 - DNA, 75 bp, synthetic construct
  source 1..75: mol_type = other DNA
agctttattgatgacgatctgcgtgaaagctattccgatgtgctgtggtcggtgaaaacggaacaaggaccagga

SEQ ID NO: 487905 - DNA, 75 bp, synthetic construct
  source 1..75: mol_type = other DNA
caattataccagacaataaccatgtgataaaattatcgtctcccattaccgttacgattgagcgaaaggacggtt

SEQ ID NO: 487906 - DNA, 75 bp, synthetic construct
  source 1..75: mol_type = other DNA
aagtacatcccttcaaaccataaagataagcattcagataaagttaataatcatcaacaccatagcaaggttgat

SEQ ID NO: 487907 - DNA, 75 bp, synthetic construct
  source 1..75: mol_type = other DNA
aaatcataaactctcttccggtgatacatataacttaattaaaacgctcgatgtttgtaattatgactcagaaag

SEQ ID NO: 487908 - DNA, 75 bp, synthetic construct
  source 1..75: mol_type = other DNA
tttacttggcgtcgcgtttggcctgctactggatgtgaatcctttctatgcagtgattgcggttacgctgctgct

SEQ ID NO: 487909 - DNA, 75 bp, synthetic construct
  source 1..75: mol_type = other DNA
tttacgatacgccggcgggtccgtcggtagtactatgtgctgcactattgtttattatcagtatgatgaaaaaac

SEQ ID NO: 487910 - DNA, 75 bp, synthetic construct
  source 1..75: mol_type = other DNA
atttaaacagatgaaaaatcctactgatcctgaggaattagcaaatatatttaataaaaaacataaagaacatat

SEQ ID NO: 487911 - DNA, 75 bp, synthetic construct
  source 1..75: mol_type = other DNA
accacgccagcgaactggaatttaagccaccggaagaaccgctggtgttcctgaaagcgccaaataccctcactg

SEQ ID NO: 487912 - DNA, 75 bp, synthetic construct
  source 1..75: mol_type = other DNA
gatttaactcaggcctttgaagaagattgcgcccggttgatggaaggttgtgatgccgtctggcactgtgcagca

SEQ ID NO: 487913 - DNA, 75 bp, synthetic construct
  source 1..75: mol_type = other DNA
ccagcggccttgggcgaaatgccgtgcaatatttgttgcaatcgggtgagtcggttgtggcaacagggcgaaatt

SEQ ID NO: 487914 - DNA, 75 bp, synthetic construct
  source 1..75: mol_type = other DNA
aagttttaaccagtcatcacggaataataagagatgaagaaaaaatgttattgtctcggtgctttgcaggttcca

SEQ ID NO: 487915 - DNA, 75 bp, synthetic construct
  source 1..75: mol_type = other DNA
gtattattgttttatatcgtcgtaaatatgtctttcagacatgtatcatttattttttactaacaggtcaaaaat

SEQ ID NO: 487916 - DNA, 75 bp, synthetic construct
  source 1..75: mol_type = other DNA
gttaaaattatcgtctcccattaccgttactgttgagtgtaagggcggttattattttattaattcctctggaga

SEQ ID NO: 487917 - DNA, 75 bp, synthetic construct
  source 1..75: mol_type = other DNA
gaaagtggagctgcactggtggcgtacctctgttgaaggcaagcaggagcactacttcaccacacgtcttactga

SEQ ID NO: 487918 - DNA, 75 bp, synthetic construct
  source 1..75: mol_type = other DNA
gggccgttaccggagcgccttcgctggaagaatctcaatgtaccgcagaaaatcgcgcttgcagctgtgggagcg

SEQ ID NO: 487919 - DNA, 75 bp, synthetic construct
  source 1..75: mol_type = other DNA
tgcgtctttctgcctataaacacgcccgtgatgccggtttgtcacgccagcaggcggcatctcttgccaaaaaca

SEQ ID NO: 487920 - DNA, 75 bp, synthetic construct
  source 1..75: mol_type = other DNA
ttcgcgaagttgtcgagcgccctgtgccgatggcaatgatggcggatcgctacttcaccaccaaaaaggacggca

SEQ ID NO: 487921 - DNA, 75 bp, synthetic construct
  source 1..75: mol_type = other DNA
atggcttcatgcagtcgggctccaattgcccgaggcgaacaccatcaacggctcttctggatttaaaatactaca

SEQ ID NO: 487922 - DNA, 75 bp, synthetic construct
  source 1..75: mol_type = other DNA
aggcggcgatggtgaaatcggtagagcgggatatgaaaattgccgtggatcggtttaaccgcgagtacaacaaaa

SEQ ID NO: 487923 - DNA, 75 bp, synthetic construct
  source 1..75: mol_type = other DNA
ccagcagaaggaaatggatcgccttgtatcgctggcgaaggggggatggaaaggccagagtatcggtgcatggaa

SEQ ID NO: 487924 - DNA, 75 bp, synthetic construct
  source 1..75: mol_type = other DNA
gatgaccttgccagaatgatgaaatctctgcgtaccacagatttaacggtaaacatcgggcgtacgccgccggta

SEQ ID NO: 487925 - DNA, 75 bp, synthetic construct
  source 1..75: mol_type = other DNA
tcctgttagcttccgccctcgcaaccggattattaatcctcgcgatggcgtggctgccgccgtttcttctggttt

SEQ ID NO: 487926 - DNA, 75 bp, synthetic construct
  source 1..75: mol_type = other DNA
tactgagggaggtaacacgtctcgacatgtcaagttccgttatccagcgggccatgccaatgctgaaaagcctgc

SEQ ID NO: 487927 - DNA, 75 bp, synthetic construct
  source 1..75: mol_type = other DNA
gtttgcatcctggctgaatgcgttctctggtggcagccagtaccgtcccggcgcggtggatgtcacgccggaatc

SEQ ID NO: 487928 - DNA, 75 bp, synthetic construct
  source 1..75: mol_type = other DNA
agccggacacctacgcttatccgacgaatgcagaactggatggcggtattcgtgaggcattcgatcacttgttcc

SEQ ID NO: 487929 - DNA, 75 bp, synthetic construct
  source 1..75: mol_type = other DNA
cgttcatgcgtgacccgcgattccggggttttacgggagatgatacagaagtgcaggcccgccttgcccgtggca

SEQ ID NO: 487930 - DNA, 75 bp, synthetic construct
  source 1..75: mol_type = other DNA
gaaaaagcccaggacctcagcaaacacctgtaccccataatgaaagagctgaactcctcatacacgaacaagctg

SEQ ID NO: 487931 - DNA, 75 bp, synthetic construct
  source 1..75: mol_type = other DNA
aaaaccattcattttcttcagtatgggaaaaatgctaccaaaaagagacggtagtgaaaaaattgattttcaaac

SEQ ID NO: 487932 - DNA, 75 bp, synthetic construct
  source 1..75: mol_type = other DNA
ggcgcagcccgtcacgcaaaaatgctcgaaaccgatcaggcgtgggaagtgttcgaaaaactggaagactgctat

SEQ ID NO: 487933 - DNA, 75 bp, synthetic construct
  source 1..75: mol_type = other DNA
gcactctgaaacggtttaaattttatctggagcaacatgggtggatcgttgcccgtaaagaacaattggtagaaa

SEQ ID NO: 487934 - DNA, 75 bp, synthetic construct
  source 1..75: mol_type = other DNA
atcttaatgaataccgggctgaatattgaatggtcaacctttatggcatccatgctggtcggcaccattggtatt

SEQ ID NO: 487935 - DNA, 75 bp, synthetic construct
  source 1..75: mol_type = other DNA
ttaaccaactttcttacggcttcatcaattgttggcgcattatccattggcctttccgttcctggattatggttg

SEQ ID NO: 487936 - DNA, 75 bp, synthetic construct
  source 1..75: mol_type = other DNA
atccgaaagtgtttaccgtggcggctgttatccctatgttccctggcatatcagcttataccgcaatgatttcgg

SEQ ID NO: 487937 - DNA, 75 bp, synthetic construct
  source 1..75: mol_type = other DNA
tactgcgggaggcggcacggcttgaccagtcaagtttcgttgtccagcgggccagaccaatgctgaaaagcctgc

SEQ ID NO: 487938 - DNA, 75 bp, synthetic construct
  source 1..75: mol_type = other DNA
cgcgaagcagcaaaacttgatcccgccaactatacggtgcacagggccagaagtatgctggcgcaactaagagca

SEQ ID NO: 487939 - DNA, 75 bp, synthetic construct
  source 1..75: mol_type = other DNA
agggaggtaacacgtctcgacatgtcaagttccgttatccagcgggccatgccaatgctgaaaagcctgcgggca

SEQ ID NO: 487940 - DNA, 75 bp, synthetic construct
  source 1..75: mol_type = other DNA
ttgcccgtgacctgttttgcagtgagcgtaatgcgcgggaagatcgcttttttggcgatgcttttttatttatct

SEQ ID NO: 487941 - DNA, 75 bp, synthetic construct
  source 1..75: mol_type = other DNA
ggttgaacaaccggaagcgggctggcgtgggcgtactggcaccgtgttaacggcggtattgcaggatcacggtac

SEQ ID NO: 487942 - DNA, 75 bp, synthetic construct
  source 1..75: mol_type = other DNA
gcagtcatggaccgcattcttaaagatcatcaaatcgtggtcgatattccgcacggtgaggcatggctgcgcgat

SEQ ID NO: 487943 - DNA, 75 bp, synthetic construct
  source 1..75: mol_type = other DNA
aaaccgctggatgccgggaaaccgcacgttgccgcaaggctgttttttctacgaacgttgccctctggcaaccca

SEQ ID NO: 487944 - DNA, 75 bp, synthetic construct
  source 1..75: mol_type = other DNA
accgagccacgggcagtacatccgttctggctcacaacgcattatgcagatggtgtttcaggacccgctctcttc

SEQ ID NO: 487945 - DNA, 75 bp, synthetic construct
  source 1..75: mol_type = other DNA
atgacttccttgacggcacaacagactgcctgcgtctacgcctggctggcgcagttgttttcccgtgaactggac

SEQ ID NO: 487946 - DNA, 75 bp, synthetic construct
  source 1..75: mol_type = other DNA
cagatcagaacgtccacttcggcctcggttataccatcggggtgacggcgcgcgataactggaactatatccctg

SEQ ID NO: 487947 - DNA, 75 bp, synthetic construct
  source 1..75: mol_type = other DNA
acagaaaaatgttgatattgcgttgtttttcatcgttttttctttggggtctggcatctggaaacgtctacgcgt

SEQ ID NO: 487948 - DNA, 75 bp, synthetic construct
  source 1..75: mol_type = other DNA
aatctgtccatgatgccagatatatggttctttatcaggatgtcgctcttcctgtttattatgaatcttcttatc

SEQ ID NO: 487949 - DNA, 75 bp, synthetic construct
  source 1..75: mol_type = other DNA
tgtacagaagccagatatatttgtcctgtgcaacaaattatagataccccccctgttacgcaaactcaaccagtt

SEQ ID NO: 487950 - DNA, 75 bp, synthetic construct
  source 1..75: mol_type = other DNA
ttaaccacccgtttgagactgattttgccggaaaaaggctctttcttcagaaaaacgacgttctgttggcggatg

SEQ ID NO: 487951 - DNA, 75 bp, synthetic construct
  source 1..75: mol_type = other DNA
atagcttagagtcattaggctattatgtttgggcagggacagttgaatgtgtagattatggcattccacaaaata

SEQ ID NO: 487952 - DNA, 75 bp, synthetic construct
  source 1..75: mol_type = other DNA
gtctcttggtttattcctgtccggactggtaaattttctgataggatatattcccgggatcatcacatccgttac

SEQ ID NO: 487953 - DNA, 75 bp, synthetic construct
  source 1..75: mol_type = other DNA
atggatcatttgtttatattctccgatatggtattgtatcgtgggctccaaagtttctaagcgatagcctggatg

SEQ ID NO: 487954 - DNA, 75 bp, synthetic construct
  source 1..75: mol_type = other DNA
tttggattttttggcgatagtgcactggaacatgcaaaagcggcctttattgttccaggggcattatgtatggct

SEQ ID NO: 487955 - DNA, 75 bp, synthetic construct
  source 1..75: mol_type = other DNA
aaccattgctaccagagaataaatcagcgggatttttaccggaaaaagtgctacatgagctaaaattccgccagc

SEQ ID NO: 487956 - DNA, 75 bp, synthetic construct
  source 1..75: mol_type = other DNA
acggcggctacttcatccgtcggattgattactttctacgaaaacatttccctgggcatgagttagacagccaac

SEQ ID NO: 487957 - DNA, 75 bp, synthetic construct
  source 1..75: mol_type = other DNA
agttaagaaaaactcgaaaaacagccttgaaccgccccgggtttcctggagagtgttttatctgtgaactcaggc

SEQ ID NO: 487958 - DNA, 75 bp, synthetic construct
  source 1..75: mol_type = other DNA
gaggaaaaaacaatagcggtaaacgcaggtatggaaacactcaagctgagtctgcaaagaaacatcaaagaaata

SEQ ID NO: 487959 - DNA, 75 bp, synthetic construct
  source 1..75: mol_type = other DNA
acactattaacgctttgattaacgagggcgacaagtctcaggaagatattgctgatgaagccggaatgtctccgg

SEQ ID NO: 487960 - DNA, 75 bp, synthetic construct
  source 1..75: mol_type = other DNA
ctatttgggaaattcctgctgaaagaatgaaaatgcgcaggccgcatcttgcgccattgtcgacccaagcgttag

SEQ ID NO: 487961 - DNA, 75 bp, synthetic construct
  source 1..75: mol_type = other DNA
aaaaacagccaggagtgccctgcaaacacaggaaatatcacagataagtgttttaatcatcgctgcattctggaa

SEQ ID NO: 487962 - DNA, 75 bp, synthetic construct
  source 1..75: mol_type = other DNA
ctactttatagtatatatatgacatctcaaaatatgactaaagaaggacgtaaaaaattaaatattaatgacttc

SEQ ID NO: 487963 - DNA, 75 bp, synthetic construct
  source 1..75: mol_type = other DNA
gtttgttgcgcgttgccatcagcatgacagctttggtttttacgcggcactaagccagttattgctggtgttagt

SEQ ID NO: 487964 - DNA, 75 bp, synthetic construct
  source 1..75: mol_type = other DNA
atggatgattgacgtcatacgccatgcaatgaatggcacgcaggagcgggaattgtcgctggctgaattatcctg

SEQ ID NO: 487965 - DNA, 75 bp, synthetic construct
  source 1..75: mol_type = other DNA
agggatggatatcacgactttagcttatgaaaaacttgttgatgtaattgtccttgttgctggggactcagactt

SEQ ID NO: 487966 - DNA, 75 bp, synthetic construct
  source 1..75: mol_type = other DNA
gcagccaatcaatcatgccgtgtggtagtgcttgaagatgatgctatgccagttgctggtttctgcgaaaagatt

SEQ ID NO: 487967 - DNA, 75 bp, synthetic construct
  source 1..75: mol_type = other DNA
ggggaccgttcctgcgccaggaatcaacagcttgcggcaaaaaacgctgacagcgttgtggcaatggttaccgga

SEQ ID NO: 487968 - DNA, 75 bp, synthetic construct
  source 1..75: mol_type = other DNA
caagtgtttatggacggatgacatgggatgagccatcaccaacaattactactcaatgtaatggttatgggaatg

SEQ ID NO: 487969 - DNA, 75 bp, synthetic construct
  source 1..75: mol_type = other DNA
agttcaggcaactaagaatgatatccgggttaccaaagttggcaagtttttgcggagcacatcccttgatgaact

SEQ ID NO: 487970 - DNA, 75 bp, synthetic construct
  source 1..75: mol_type = other DNA
tggcaacactgctctggctgcatgtactttcacagaagaacatgaccatcacctggggatactatttccgcaccg

SEQ ID NO: 487971 - DNA, 75 bp, synthetic construct
  source 1..75: mol_type = other DNA
gacagtattgattggcgcattgtcaattgatggcagcaccgcgaccggtgttatcaaagaggcgatgatttatgc

SEQ ID NO: 487972 - DNA, 75 bp, synthetic construct
  source 1..75: mol_type = other DNA
gtcaaagtgacttcacctggacccgttatattccgccagatccgttacggcatggatggtaagcctataagagtt

SEQ ID NO: 487973 - DNA, 75 bp, synthetic construct
  source 1..75: mol_type = other DNA
attaaagtctggaaattccgttcaatgactgtaatggaaaatgatgataaaattattcaagcgactaaaaatgat

SEQ ID NO: 487974 - DNA, 75 bp, synthetic construct
  source 1..75: mol_type = other DNA
tcgtttcattcatcattttagttttgatatctccaattttgttggtaattgctattgctgtaaaaaccacatcta

SEQ ID NO: 487975 - DNA, 75 bp, synthetic construct
  source 1..75: mol_type = other DNA
cgaagagaaagtctggcacacgcgcgacgcgatccttttatgcatcggccataacaccggcagcgaaaactggtc

SEQ ID NO: 487976 - DNA, 75 bp, synthetic construct
  source 1..75: mol_type = other DNA
cgtaccgtgggcggcatatcagcgagtttgatctcgatgccgccctcgcccgccgcccggcgctgatcttaatgg

SEQ ID NO: 487977 - DNA, 75 bp, synthetic construct
  source 1..75: mol_type = other DNA
tgcgcgcctggcgggggcatcctggtgaagagaaagtgtggcacacgcgcgacgcgatccttttatgcatcgggc

SEQ ID NO: 487978 - DNA, 75 bp, synthetic construct
  source 1..75: mol_type = other DNA
tcagtgatgaacaatatgccgacggtgctgattggtgcgctgtcgattgacgggagtacggcgactggcgtcgtc

SEQ ID NO: 487979 - DNA, 75 bp, synthetic construct
  source 1..75: mol_type = other DNA
gtgaagtttgccgcgcgttacagcagtttagcgacgatctccgccagcatctgacggcgcaaaattttatggagg

SEQ ID NO: 487980 - DNA, 75 bp, synthetic construct
  source 1..75: mol_type = other DNA
cgttgagaacgtcaacagcgtcatcaacccgcaggaccagcagcgggtgcttgagcagaaactggcggcgctgcc

SEQ ID NO: 487981 - DNA, 75 bp, synthetic construct
  source 1..75: mol_type = other DNA
atgtttttactatctttggttattttccagatgataggtggtatcactgatttttatcgttcctggcgcggcgtt

SEQ ID NO: 487982 - DNA, 75 bp, synthetic construct
  source 1..75: mol_type = other DNA
ggtcaggtatggattgataatatagacaagaatggagaggtcgtatttttttctccaagtccaatggtgttcaaa

SEQ ID NO: 487983 - DNA, 63 bp, synthetic construct
  source 1..63: mol_type = other DNA
atgggatggagattggggtggcgtgatgagagggaatgtgcgcgctggcccctcaccctaacc

SEQ ID NO: 487984 - DNA, 75 bp, synthetic construct
  source 1..75: mol_type = other DNA
cccctgacggcgatatcacccgctaccgttatgataatccacacagtgacttaccctgcgcaacggaagatgcca

SEQ ID NO: 487985 - DNA, 75 bp, synthetic construct
  source 1..75: mol_type = other DNA
tcaatgggcgaaagagcttggtcagtcaccgagtgatttcgaggttaaacgacaggttcgagaggtggttcgagt

SEQ ID NO: 487986 - DNA, 75 bp, synthetic construct
  source 1..75: mol_type = other DNA
taaaattcaacaatcaattcgttcattacacgaacacggtatggtatctggtgatcctcaccgcggtaattttat

SEQ ID NO: 487987 - DNA, 75 bp, synthetic construct
  source 1..75: mol_type = other DNA
cggggttaaccgcctgctcaaacgtgcggaagatattgtgctggcgacgctgatcttgctgctgatctcccctgt

SEQ ID NO: 487988 - DNA, 75 bp, synthetic construct
  source 1..75: mol_type = other DNA
aatgattttgttgaagaaatgatccaaaggaaaaagtttgcatttgctgcagatttgatccgatgtgatgtatta

SEQ ID NO: 487989 - DNA, 75 bp, synthetic construct
  source 1..75: mol_type = other DNA
atgctgtttcacacaatgaacagtatcgttcattgattcatggttatatgctaagacataaagtaaaaccgggaa

SEQ ID NO: 487990 - DNA, 75 bp, synthetic construct
  source 1..75: mol_type = other DNA
catttttacttttaacattcttcagtctcgcacagaggaaataaatggtgtaccggttgttcctttattcgattc

SEQ ID NO: 487991 - DNA, 75 bp, synthetic construct
  source 1..75: mol_type = other DNA
cagcgaatctggatatccgcatcccgtatgccacagacccggcaggtaaccgcctgcccgacccggagctgcacc

SEQ ID NO: 487992 - DNA, 75 bp, synthetic construct
  source 1..75: mol_type = other DNA
tattgaactgatggcgaaagcggcccagggtgaacatgtcgaatttgccctgatcccggtcaccgcggtgaaata

SEQ ID NO: 487993 - DNA, 75 bp, synthetic construct
  source 1..75: mol_type = other DNA
gctttcacaagtgttaatggcatcaaccttccggcaaacgttgctcaagcagtgcaatggtcgcacgataatcca

SEQ ID NO: 487994 - DNA, 75 bp, synthetic construct
  source 1..75: mol_type = other DNA
cggcgtaacattttcggttccggtcacgcctcacacgtttcgccacagttacgccatgcacctgacaatgagtgg

SEQ ID NO: 487995 - DNA, 75 bp, synthetic construct
  source 1..75: mol_type = other DNA
tttggctgcaatggaaaaaaatggtgttaaaaacatcatcttcacaagttctgttgctgtttacggcttgaacaa

SEQ ID NO: 487996 - DNA, 75 bp, synthetic construct
  source 1..75: mol_type = other DNA
cacggcacgttttccaaaacggtccgggaaggggatctgtaccaaatccgtgaaaaggaccgcgtgaacattcgt

SEQ ID NO: 487997 - DNA, 75 bp, synthetic construct
  source 1..75: mol_type = other DNA
tgtaaaaagttattcaaccggctttccggtaccctggtgatcagagcgcgctgggtgatgctgccaacttactga

SEQ ID NO: 487998 - DNA, 75 bp, synthetic construct
  source 1..75: mol_type = other DNA
ttaataaagatcagttaactaaccaggtggcattatattatcagcaacaaaacaatcttcttagcctgagcggac

SEQ ID NO: 487999 - DNA, 75 bp, synthetic construct
  source 1..75: mol_type = other DNA
ttactgaagatgttcaaaaactgctgaccgacgatgaattcagtcgttttcagtttttcctggccttgaatcctg

SEQ ID NO: 488000 - DNA, 75 bp, synthetic construct
  source 1..75: mol_type = other DNA
ccactgagcggcagagcgcctacccggttatgcgtctggtagcgttgatgaatctgggaagccacattttgctga

SEQ ID NO: 488001 - DNA, 75 bp, synthetic construct
  source 1..75: mol_type = other DNA
ataaaaaaaggggatcctgtttatctgattgacatcagtaaaagtacacgcaatggtattgtcactgataatcat

SEQ ID NO: 488002 - DNA, 75 bp, synthetic construct
  source 1..75: mol_type = other DNA
agcgtgcagaggaagggataaaaataatgaaaaataatatggagaattacagatactatcagtcaaaaggactga

SEQ ID NO: 488003 - DNA, 75 bp, synthetic construct
  source 1..75: mol_type = other DNA
tgaagcggccacgcttggccgtttatatgtgacgctgcagcgaatgaccatcagtaaggacctgggctaccagct

SEQ ID NO: 488004 - DNA, 75 bp, synthetic construct
  source 1..75: mol_type = other DNA
gcaggcgaggaaaaagaatcctgcactgccagagttctggtacgcccgggcggtgacttatgaggtgaacggtat

SEQ ID NO: 488005 - DNA, 75 bp, synthetic construct
  source 1..75: mol_type = other DNA
tccatgctcgccaccatcccggataactccattacgctgtttgacaagctcttttacagcgcagacctgctgctg

SEQ ID NO: 488006 - DNA, 75 bp, synthetic construct
  source 1..75: mol_type = other DNA
tcatcatcaccatgcagtcgattgatggatctatcgccctgattggcctgaaagtggcggcggcgctggtgggga

SEQ ID NO: 488007 - DNA, 75 bp, synthetic construct
  source 1..75: mol_type = other DNA
gacatgctgactcgttacgggataaagacggaagaatatcccaacctttttaatactaatagtagaaataacgag

SEQ ID NO: 488008 - DNA, 75 bp, synthetic construct
  source 1..75: mol_type = other DNA
caggtcggataacaacatcagtgctacggcacagatgcagcgttccacggaacagaatacacgttatgaattggg

SEQ ID NO: 488009 - DNA, 75 bp, synthetic construct
  source 1..75: mol_type = other DNA
gtaccacggtaaatctgagccagtcacttggacggtggggatatctggggctgaacggcagtcgggatgagtatc

SEQ ID NO: 488010 - DNA, 75 bp, synthetic construct
  source 1..75: mol_type = other DNA
gacctttccctctttgaggaaggtgcacagcttccgggtgtatatccggtagatattatcctgaacgggtcccgt

SEQ ID NO: 488011 - DNA, 75 bp, synthetic construct
  source 1..75: mol_type = other DNA
agtgacgctgactcgtaaggatggtgtacctctaccctttggtacggtagtaactttggaaggaaaaatggatga

SEQ ID NO: 488012 - DNA, 75 bp, synthetic construct
  source 1..75: mol_type = other DNA
aagtgttatgctgactaccgcctgccagaggaaaaaggggatgcaggaatctttcttactagggcgatttgtatg

SEQ ID NO: 488013 - DNA, 75 bp, synthetic construct
  source 1..75: mol_type = other DNA
tggtgctcggctgcgtatttggcggttattttgaagcgggcggccaattaattgctatctggcagcctgcagaga

SEQ ID NO: 488014 - DNA, 75 bp, synthetic construct
  source 1..75: mol_type = other DNA
ctggacaccgcggaagagtcgctgctaacgccgtcgcgctcgctgcaacgtaccgccgaagcgatgccgggattt

SEQ ID NO: 488015 - DNA, 75 bp, synthetic construct
  source 1..75: mol_type = other DNA
aaaacagctcgggccggagtttcagcgtcagctattaatgtgcctgtatgagttgctcgaaatggtgcaaaacgg

SEQ ID NO: 488016 - DNA, 75 bp, synthetic construct
  source 1..75: mol_type = other DNA
cattggttcttggcgcatcagaaacctgacgacctggaacaaatcgtccgggcaatcggggaaatgggagagttt

SEQ ID NO: 488017 - DNA, 75 bp, synthetic construct
  source 1..75: mol_type = other DNA
caacaaggactatactctcccggctctccagcgcgatgcccgtgcccttaaacggggattatgggcagatgaaaa

SEQ ID NO: 488018 - DNA, 75 bp, synthetic construct
  source 1..75: mol_type = other DNA
aaagcctgaacgatgctaccccgccagaggtgcagaatgacatccgcagcgaatccactgaaaaatcaaaggaaa

SEQ ID NO: 488019 - DNA, 75 bp, synthetic construct
  source 1..75: mol_type = other DNA
atatttaaaagagtatgagttcagctttgaatttaaatccctgatactaaaattctctccttcaatacttttttt

SEQ ID NO: 488020 - DNA, 75 bp, synthetic construct
  source 1..75: mol_type = other DNA
ttggagcttatcgcattttcatcgttaatttcatatgaggaatcctataagactgttgcgaagagtattgatggt

SEQ ID NO: 488021 - DNA, 75 bp, synthetic construct
  source 1..75: mol_type = other DNA
tgaaaagaaatttagttccgattacgtattccattttttagagactcagtatgagagtttgcgccaaatatcatc

SEQ ID NO: 488022 - DNA, 75 bp, synthetic construct
  source 1..75: mol_type = other DNA
ctggtcaaatttgtggtgcatcgtatcgggctttccagccagacacgggtcaaatttggcatcgtcgtctcctcc

SEQ ID NO: 488023 - DNA, 75 bp, synthetic construct
  source 1..75: mol_type = other DNA
gctcccgtcagaacgcgcgggtgctggtgcgtaacgccaaaaaagcgcaagcgattatggccactttttcgcagc

SEQ ID NO: 488024 - DNA, 75 bp, synthetic construct
  source 1..75: mol_type = other DNA
tttgataccacgctgtggggctcagggaagcatgggattatgttagggcgcgatgatattacctgcttaggcggg

SEQ ID NO: 488025 - DNA, 75 bp, synthetic construct
  source 1..75: mol_type = other DNA
tctatgaatatcttccagtccgttcacttcgggcggcaagtgatgtggttattgccatcattcaggagacattca

SEQ ID NO: 488026 - DNA, 75 bp, synthetic construct
  source 1..75: mol_type = other DNA
tcccttcatcggatatgtttggtcaaatggggctggcacaatcaactcacctgaaatatatgctttataacggtt

SEQ ID NO: 488027 - DNA, 75 bp, synthetic construct
  source 1..75: mol_type = other DNA
agaaatacagcatctgcaaagcggcgactttcgtctctattgcctgtatgtggtcgccgcactggttgtgctgct

SEQ ID NO: 488028 - DNA, 75 bp, synthetic construct
  source 1..75: mol_type = other DNA
aaaagaaaccagtggacgtgttaaccccctgctgattattgatgaagctgatcacttaagtgtggatggtctgga

SEQ ID NO: 488029 - DNA, 75 bp, synthetic construct
  source 1..75: mol_type = other DNA
cgcagtggctcagatgacttttacgcacaaaatatttggcccgatgttgatggctgcaggtgtaccgccacaggg

SEQ ID NO: 488030 - DNA, 75 bp, synthetic construct
  source 1..75: mol_type = other DNA
acattatcggtcatgtgccaggcgccgctgttgctcagatgacctttacgcacaaaatatttggtccgatgttga

SEQ ID NO: 488031 - DNA, 75 bp, synthetic construct
  source 1..75: mol_type = other DNA
tgttgcggtgattattcctgtggcggcggcagtacggctgacgcctcccacggtggctgcactgatgatgacggc

SEQ ID NO: 488032 - DNA, 75 bp, synthetic construct
  source 1..75: mol_type = other DNA
gtagccgtgcagaaccgcagccagccatcgccgcgccgatagtggatccgcatcgcagcattcttgacgatgccc

SEQ ID NO: 488033 - DNA, 75 bp, synthetic construct
  source 1..75: mol_type = other DNA
atttattgatactatttcttgtgtacataaatatatcatattctgcaggttcggatattttggtttttgccatgt

SEQ ID NO: 488034 - DNA, 75 bp, synthetic construct
  source 1..75: mol_type = other DNA
tcgcggcgtgacgttaccgcaaactagccctgcgcaaaacacctcgaaaaagtatgacgtaaaagtgattgcaga

SEQ ID NO: 488035 - DNA, 75 bp, synthetic construct
  source 1..75: mol_type = other DNA
gtcaaagacctttcaagtgctgaaggtaaacttatccttcaactattcagtacctttgcagagtttgaacttaac

SEQ ID NO: 488036 - DNA, 75 bp, synthetic construct
  source 1..75: mol_type = other DNA
tagcggccaagcaggcaggggctgactatatcaaactgcagaagcgtgatgttgaaagtttctatagcagggaga

SEQ ID NO: 488037 - DNA, 75 bp, synthetic construct
  source 1..75: mol_type = other DNA
gtctggcagactatcagttcggttgttacagacgccttcagtcctgaaggcttttttatttgtggtaaatgggcg

SEQ ID NO: 488038 - DNA, 75 bp, synthetic construct
  source 1..75: mol_type = other DNA
atgtttgtttttatatttttgtttatgattagtgattttatcttagaaaggttttctgatatagattttaatgat

SEQ ID NO: 488039 - DNA, 75 bp, synthetic construct
  source 1..75: mol_type = other DNA
atggcctttctgtcagttcagacagcactcctgttcatcacgcacccgatttgcgctcagggtatgatgtcccct

SEQ ID NO: 488040 - DNA, 75 bp, synthetic construct
  source 1..75: mol_type = other DNA
ttctgatcatggcctgtctgtcagttcagacagcactcctgttcatcacgcgccgggtttacgctcagggtatga

SEQ ID NO: 488041 - DNA, 75 bp, synthetic construct
  source 1..75: mol_type = other DNA
tggtcctggtaacggtccggcatttattgaacgcagtgcggatatccaccatgcggtgaaagatatcatcaccag

SEQ ID NO: 488042 - DNA, 75 bp, synthetic construct
  source 1..75: mol_type = other DNA
cggttcagtggctgctatggagcgtaaagagttctctaacttggtcacacataaactagaagctggtgatacgct

SEQ ID NO: 488043 - DNA, 75 bp, synthetic construct
  source 1..75: mol_type = other DNA
tataaagacgggcaagggtcttatgacattgtgctaacactcgctcagtgcggatttctccaacgccctcagcaa

SEQ ID NO: 488044 - DNA, 75 bp, synthetic construct
  source 1..75: mol_type = other DNA
tgggatgctgctgtcgctgaggttacagaaagcgaatcggcaagaaagaagggatgcccaagggcaacgtttctc

SEQ ID NO: 488045 - DNA, 75 bp, synthetic construct
  source 1..75: mol_type = other DNA
tacctcgctgttgattattcctgcggctactgcgcgccgttttgcccgcacgccggaacagatggctggtgtcgc

SEQ ID NO: 488046 - DNA, 75 bp, synthetic construct
  source 1..75: mol_type = other DNA
gattcaaatcctttccatcatcggtttgctggcgttgacagccctgctcgtcacgaactcaacccgcaatcggtc

SEQ ID NO: 488047 - DNA, 75 bp, synthetic construct
  source 1..75: mol_type = other DNA
ctggcggtgtttaccatgtgggtcttttctcgctttgcaccggatgacagcgccagcctgaaaacagtcattatc

SEQ ID NO: 488048 - DNA, 75 bp, synthetic construct
  source 1..75: mol_type = other DNA
gcccctgctatggctagcagcaagtaagtccagaaaattacaggagaaaaatcatgtcgaaaaaatacatcatag

SEQ ID NO: 488049 - DNA, 75 bp, synthetic construct
  source 1..75: mol_type = other DNA
gtaagttggcaccattacccgacgattttaatgctgtggtcggtgtcgattaaagctgcatcgttgcttggcgat

SEQ ID NO: 488050 - DNA, 75 bp, synthetic construct
  source 1..75: mol_type = other DNA
ttttttgttagcgataacaacaacctgcgcagtgccaataacgaagaaaaacagtcattccagcttagcgacatc

SEQ ID NO: 488051 - DNA, 75 bp, synthetic construct
  source 1..75: mol_type = other DNA
gtgggtcttttctcgctttgcaccggatgacagcgccagcctgaaaacggtcattatcatctatagtgtggttta

SEQ ID NO: 488052 - DNA, 75 bp, synthetic construct
  source 1..75: mol_type = other DNA
gcgccgccctctaccgtctggccctgcagcgtttcggtccggatgcacaggccctgaaactgacagaagaggccg

SEQ ID NO: 488053 - DNA, 75 bp, synthetic construct
  source 1..75: mol_type = other DNA
atgacacgaaacaccgaactcacccgcaccgccctctaccgtctggccctgcagcagcgtttcgggccggacgca

SEQ ID NO: 488054 - DNA, 75 bp, synthetic construct
  source 1..75: mol_type = other DNA
ccaggctgctccaccccgcgtccgtggatgcgcactatactccgctcgcgttttcatgcaaccttttttttaacc

SEQ ID NO: 488055 - DNA, 75 bp, synthetic construct
  source 1..75: mol_type = other DNA
cagcaataccgagataggtttaataatgagtacctttggtattgcggctattattctttatgcccccagcggcgt

SEQ ID NO: 488056 - DNA, 75 bp, synthetic construct
  source 1..75: mol_type = other DNA
gtgatcgtctttacctttttgctgttccaaaaaattcgtactgctgatagcgcccccgcaatggctagcagcaag

SEQ ID NO: 488057 - DNA, 75 bp, synthetic construct
  source 1..75: mol_type = other DNA
ccttacgcaagtgggggccggagaaacaactggcgaagctagccgaggaagcagccgaactcagcgccgcaaccg

SEQ ID NO: 488058 - DNA, 75 bp, synthetic construct
  source 1..75: mol_type = other DNA
gtggtttacattctgctgggcattttgtgttggttttttgttagcgataacaacaatctgcgcagtgccaataac

SEQ ID NO: 488059 - DNA, 75 bp, synthetic construct
  source 1..75: mol_type = other DNA
gcggctgatgatgttcagtggtgcagcttcagaaaatccctgccgtggattgaagggcatgatattccgtcgatg

SEQ ID NO: 488060 - DNA, 75 bp, synthetic construct
  source 1..75: mol_type = other DNA
gaccgtaacggtttttatgatattccgcgtccccgcccggtgcagccggttcgtcgcaaatgcagccaggagtct

SEQ ID NO: 488061 - DNA, 75 bp, synthetic construct
  source 1..75: mol_type = other DNA
gccgcgcgcgttcaactggtagaaacggtcatcaaaccagctctggctaacggcacctgggtgattggcgatcgc

SEQ ID NO: 488062 - DNA, 75 bp, synthetic construct
  source 1..75: mol_type = other DNA
caagctgtcgaacgcgcaggtgattgatgtcaccaaaatgcctaacaatgggcgcgttatttttggtgctaccgt

SEQ ID NO: 488063 - DNA, 75 bp, synthetic construct
  source 1..75: mol_type = other DNA
cgtcctgaaatcattgctgctatcgcggaagcgcgtgagcatggcgacctgaaagaaaacgccgaataccacgca

SEQ ID NO: 488064 - DNA, 75 bp, synthetic construct
  source 1..75: mol_type = other DNA
catcaatggtgtatttcctgcgtgatgcggttgatgccggcgttctcaccgaatgcaacggattttatgacgttc

SEQ ID NO: 488065 - DNA, 75 bp, synthetic construct
  source 1..75: mol_type = other DNA
attgagcgatgaaaacggcaattcactgattggcagcctggacattatgggcgcgctgaatcctgtagtcctgcc

SEQ ID NO: 488066 - DNA, 75 bp, synthetic construct
  source 1..75: mol_type = other DNA
cctgtatacggaatcaattacacatcaaacccggcgaaaagcgctcgtccatatctacttaaactcggtttgatt

SEQ ID NO: 488067 - DNA, 75 bp, synthetic construct
  source 1..75: mol_type = other DNA
tcacgaactctaacccgcaatcggtcgcgatggggattggcctgattttattactgggattcacctgttacgcct

SEQ ID NO: 488068 - DNA, 75 bp, synthetic construct
  source 1..75: mol_type = other DNA
accccttactacgtttcattcaatgacgtcgcaattgaaagtggcggtaaaagctacaaagtggactccagcatg

SEQ ID NO: 488069 - DNA, 75 bp, synthetic construct
  source 1..75: mol_type = other DNA
ttgcgctatttccttgacggcgtttaccgcattcagtctggtactcgggcaacaaattagcgttcctgtcgcact

SEQ ID NO: 488070 - DNA, 75 bp, synthetic construct
  source 1..75: mol_type = other DNA
gcggtatacattgagtctgcggcgggtacggcggcgggcggtaaaaccggtttgacggctatcaccgttggcgtg

SEQ ID NO: 488071 - DNA, 75 bp, synthetic construct
  source 1..75: mol_type = other DNA
taaataatgcgcgaaatcaaaataaatttccaatcgatgtaaaagaaacggttataaaactacaaggccaaaaat

SEQ ID NO: 488072 - DNA, 75 bp, synthetic construct
  source 1..75: mol_type = other DNA
aaccctggcgcagtattctcctctggtgctgaacggcgaaggtctggtattgccggaactaaaagatattcagaa

SEQ ID NO: 488073 - DNA, 75 bp, synthetic construct
  source 1..75: mol_type = other DNA
tatatatgggatggcgtaatccgcgtatcaccgacgacgaatactatgaatttgttgatgagtttatccaggcag

SEQ ID NO: 488074 - DNA, 75 bp, synthetic construct
  source 1..75: mol_type = other DNA
tttatctcttaccagaaccgccaccacatggacgatattctgcaaaacgtgccaaaccacaatatcaaagtgatt

SEQ ID NO: 488075 - DNA, 75 bp, synthetic construct
  source 1..75: mol_type = other DNA
tttttacaatttccggtttcaccaaaaaagaattaaagtgtttttaccccttttttaatgaaaataaatatgttg

SEQ ID NO: 488076 - DNA, 75 bp, synthetic construct
  source 1..75: mol_type = other DNA
ctgtcgctctataccgcctgtggtggcatcagcccggcgtatactcttccggtggtgctggatgtcggcaccaat

SEQ ID NO: 488077 - DNA, 75 bp, synthetic construct
  source 1..75: mol_type = other DNA
atgccgttacttaaccgctatcgcaatgaaatttgttcttttaacgatgacattcagggcactgcggcggtaaca

SEQ ID NO: 488078 - DNA, 75 bp, synthetic construct
  source 1..75: mol_type = other DNA
atagcctggattactcagaaaagcccaaaagcaagcacatcgtgacgttcgagcgcgattccggtagaaaaggag

SEQ ID NO: 488079 - DNA, 75 bp, synthetic construct
  source 1..75: mol_type = other DNA
tcgttaagcacgcgtcggtgtccgggctggacgatggcgactgcgttacggtgaaagaggcgactgacgccctgc

SEQ ID NO: 488080 - DNA, 75 bp, synthetic construct
  source 1..75: mol_type = other DNA
accgtgcattacctgattatggtcggactgtaccaactactttatacccgtattccgccacacgccgcgcttgcg

SEQ ID NO: 488081 - DNA, 75 bp, synthetic construct
  source 1..75: mol_type = other DNA
aatcagcaactgcttaacgacccgctgtatatgggctggcggaacccgcgtatcaccgacgacgaatactatgaa

SEQ ID NO: 488082 - DNA, 75 bp, synthetic construct
  source 1..75: mol_type = other DNA
gtgcttaatatctggctttctgattcaacaatcgcattacgaaagaatgccgcaacctggcagcaggcattagat

SEQ ID NO: 488083 - DNA, 75 bp, synthetic construct
  source 1..75: mol_type = other DNA
accttagcatccataatctggggcttgctaagtgaatacaaggctacgacaggtttcgttcagcttagtggaagc

SEQ ID NO: 488084 - DNA, 75 bp, synthetic construct
  source 1..75: mol_type = other DNA
gcaattcgatgacattcgcgtaattcgtggtgtgaaagtatcaggtgggcggctggggataaaaatcacagaact

SEQ ID NO: 488085 - DNA, 75 bp, synthetic construct
  source 1..75: mol_type = other DNA
acccggggagatgtcgtgattttggtataccggagtgaaaaaatgagcaggaggcggcgcagtgaaccagcaaac

SEQ ID NO: 488086 - DNA, 75 bp, synthetic construct
  source 1..75: mol_type = other DNA
ttatacccaacaaacgcaggtggccgccgcaccgttgcgcgccctgtttgcgccagcgacggcgagtgccacgct

SEQ ID NO: 488087 - DNA, 75 bp, synthetic construct
  source 1..75: mol_type = other DNA
ttgctggcaggcctggcggtatttattctgatgagccgcaaatcacagatgccgatcccggccagcggtgcttaa

SEQ ID NO: 488088 - DNA, 75 bp, synthetic construct
  source 1..75: mol_type = other DNA
accaataaatatgcccgtggatttaacggcattaccgttttcgttcttctgacgggtgcaagcctatgggtttac

SEQ ID NO: 488089 - DNA, 75 bp, synthetic construct
  source 1..75: mol_type = other DNA
gttgggtattaggcggtgaaaatggcctgaaatatgatgaaatcatcaataatatcaccaccagcccattaagtt

SEQ ID NO: 488090 - DNA, 75 bp, synthetic construct
  source 1..75: mol_type = other DNA
tagcacgcccgtcatgattaaactcatctctgcggcatttaccttaggatttgcttatgctgcatggaatgtcgg

SEQ ID NO: 488091 - DNA, 75 bp, synthetic construct
  source 1..75: mol_type = other DNA
cgtcaaccgcttattcccaaccttctgtcacaggaactgaaaaactttctgaagcttaatgttaaagagaaaaat

SEQ ID NO: 488092 - DNA, 75 bp, synthetic construct
  source 1..75: mol_type = other DNA
gagaaaaagtccaagtagagagaatgagatttttttttttgaaaagaaaaagggggaggcaggcattgagaaacg

SEQ ID NO: 488093 - DNA, 75 bp, synthetic construct
  source 1..75: mol_type = other DNA
catacccgccgtcgctgaacacctactggcgaagacggggaagccaatactacatcagcgataaaggccagaaat

SEQ ID NO: 488094 - DNA, 75 bp, synthetic construct
  source 1..75: mol_type = other DNA
cgcgatgaaaattatcggcgaaatcgatctgcgcttaatgctggcgcaggcgctgcatatgggcgatgagtgcca

SEQ ID NO: 488095 - DNA, 75 bp, synthetic construct
  source 1..75: mol_type = other DNA
cggctgaactggcggcttccggggagatcaccttctcgccgtgtcacgagcacgactgcgtgggatcgatggcgg

SEQ ID NO: 488096 - DNA, 75 bp, synthetic construct
  source 1..75: mol_type = other DNA
cgggattcgtcgcggggttgtttgcgacaggtgggcaaagcgttttgtatgccctggcaccgttgttttacagtt

SEQ ID NO: 488097 - DNA, 75 bp, synthetic construct
  source 1..75: mol_type = other DNA
atgacactatcagctattgagttaatggatctcagcgataagttggatgctctgatgtccaaagcggctaccgcg

SEQ ID NO: 488098 - DNA, 75 bp, synthetic construct
  source 1..75: mol_type = other DNA
ttttaggttcacgaccagaaattcgcttctacgggacgtatatcaatattctggataacgaattatcgaatttta

SEQ ID NO: 488099 - DNA, 75 bp, synthetic construct
  source 1..75: mol_type = other DNA
aattatcgaattttaagtttaatgagaacagcaaagacgagtttatggccggcatccaggcggaagtctggtggt

SEQ ID NO: 488100 - DNA, 75 bp, synthetic construct
  source 1..75: mol_type = other DNA
agctatgaactgacgttcacggcgataccctactcagaacgctacggctaccgcccggcgtttatcccccgcccg

SEQ ID NO: 488101 - DNA, 75 bp, synthetic construct
  source 1..75: mol_type = other DNA
agctatgagctgacgtttaccgccatcccgtactcagagcgctacggctaccgcccggcgcttatcccccgcccg

SEQ ID NO: 488102 - DNA, 75 bp, synthetic construct
  source 1..75: mol_type = other DNA
tgaaagttggcgacatcgttattttcaacgatggctacggtgtgaaatctgagaagatcgacaatgaagaagtgt

SEQ ID NO: 488103 - DNA, 75 bp, synthetic construct
  source 1..75: mol_type = other DNA
tccgttctgagatgcaatcacccgaaaccgtgtacgggatgccggctcataaagacagaacggccgctgtcaatg

SEQ ID NO: 488104 - DNA, 75 bp, synthetic construct
  source 1..75: mol_type = other DNA
taccaggggtaaatgcggtctggttaacggcagcgctgactatttcggtggttgttcacaaaaattcagattact

SEQ ID NO: 488105 - DNA, 75 bp, synthetic construct
  source 1..75: mol_type = other DNA
agaactgtattaaccagaattttcagggggcagccatgccgcagtcggccttcgaggcgatgacggatgcggcct

SEQ ID NO: 488106 - DNA, 75 bp, synthetic construct
  source 1..75: mol_type = other DNA
agcaacagaacaaaactcagcagggtgtaacactaaatgaatcggcttataaaacgacactctggcatgcattga

SEQ ID NO: 488107 - DNA, 75 bp, synthetic construct
  source 1..75: mol_type = other DNA
catattatgtggtgagtctgatttcgtatctggtgaaaggggttcccgggatccacgatgtcatgccacctgagc

SEQ ID NO: 488108 - DNA, 75 bp, synthetic construct
  source 1..75: mol_type = other DNA
aggcgctttgtattgtgaaaaacacggtgagttttccacctacttatggagtaccacatgcgatccgcgtgacgg

SEQ ID NO: 488109 - DNA, 75 bp, synthetic construct
  source 1..75: mol_type = other DNA
gactcggcggcgatgaatttggcttactgttgccggactgcaacgtcgaaagcgcccgttttatcgccacgcgca

SEQ ID NO: 488110 - DNA, 75 bp, synthetic construct
  source 1..75: mol_type = other DNA
aggctgcggaaagcggcgcgttttatgcccgtatccgccacgaacgctacctgaatgaacaggccattctcaaag

SEQ ID NO: 488111 - DNA, 75 bp, synthetic construct
  source 1..75: mol_type = other DNA
tgacgacgcgccagcggtgttccgcaagggcgtactgattaccggcgtgacggccagcgcggcgcgtgaccgcag

SEQ ID NO: 488112 - DNA, 75 bp, synthetic construct
  source 1..75: mol_type = other DNA
ggtgcattacgggcgtatgggaaaagcacatgagcctgttgagttacaaatgttggcagagaaagtagatgagcc

SEQ ID NO: 488113 - DNA, 75 bp, synthetic construct
  source 1..75: mol_type = other DNA
taagcgcacccaaaggcgtggcgatcgccagcggagagcacctgcaactggcggcgtcgaaaaacctgatcgcga

SEQ ID NO: 488114 - DNA, 75 bp, synthetic construct
  source 1..75: mol_type = other DNA
cttattaattggccctatgaactagaactggaaagtgggctaaaaatgagtgggattactgatgaaaatggaaat

SEQ ID NO: 488115 - DNA, 75 bp, synthetic construct
  source 1..75: mol_type = other DNA
gacggccagcgcggcgcgtgactgcagctatgaactgacgtttactgccatcccgtactcagaacgctacggcta

SEQ ID NO: 488116 - DNA, 75 bp, synthetic construct
  source 1..75: mol_type = other DNA
tgagcgataaaatccagaaactgtccgatgacgcgacgacggcgaacgccgacccggcggatgtggccgcgcaga

SEQ ID NO: 488117 - DNA, 75 bp, synthetic construct
  source 1..75: mol_type = other DNA
gcacagtcacagatgaagtctctgtccactgatgcgcagacggcgaatgccgatccggcagatctgtcatcgcag

SEQ ID NO: 488118 - DNA, 75 bp, synthetic construct
  source 1..75: mol_type = other DNA
gtgctgacgtttacgggccgggaacaactcagcgcacccttccgctacgacattgaatttaccagtaccgataaa

SEQ ID NO: 488119 - DNA, 75 bp, synthetic construct
  source 1..75: mol_type = other DNA
tggtggtggaagttatatccggattgagggtagcggcattgagccgggaacgccgggggattataacgtcaaagc

SEQ ID NO: 488120 - DNA, 75 bp, synthetic construct
  source 1..75: mol_type = other DNA
gataaaatccagaaactgtctgacgatgcggccacggcgaacgccgatccggcggatatggccgcgcaggtggcg

SEQ ID NO: 488121 - DNA, 75 bp, synthetic construct
  source 1..75: mol_type = other DNA
gcattacaagcgatgatggtcgatcagaaatatttttttctgataaggatggggaaatattaatacatctatttg

SEQ ID NO: 488122 - DNA, 75 bp, synthetic construct
  source 1..75: mol_type = other DNA
caatgaccaaagcgccgtttcttgatatggctttcgatgagtggcgcaagatttttaccgttgatgtcgatggtg

SEQ ID NO: 488123 - DNA, 75 bp, synthetic construct
  source 1..75: mol_type = other DNA
ggctgaagttgatgagcaggccatgaaagaaggcgtgccccagtttgtgatggcgtatatcgacatccgcctggg

SEQ ID NO: 488124 - DNA, 75 bp, synthetic construct
  source 1..75: mol_type = other DNA
gcggctgatgatgttcagtggtgcagcttcagaaagtccctgccgtggattgaggggcatgatattccgtcgatg

SEQ ID NO: 488125 - DNA, 75 bp, synthetic construct
  source 1..75: mol_type = other DNA
ggaaggtaataccatccccgcgctggcaaaagagtttgcgacgggcgtgctgacctgtgagtcagtccacattgt

SEQ ID NO: 488126 - DNA, 75 bp, synthetic construct
  source 1..75: mol_type = other DNA
ctaccgtttcactggcgtcgcgatcactctctggctgctgattttgtcggtagtgatgggcggaattctggcgct

SEQ ID NO: 488127 - DNA, 75 bp, synthetic construct
  source 1..75: mol_type = other DNA
tatgtaagggatttttttgtttctcctggcgagtttcgtcagactggaacggatgcatcccgcacaataaatgaa

SEQ ID NO: 488128 - DNA, 75 bp, synthetic construct
  source 1..75: mol_type = other DNA
attccgcgtccccgcccggtgcagccggttcgtcgcaaatgcagccaggaatctgcggctgatgatgttcagtgg

SEQ ID NO: 488129 - DNA, 75 bp, synthetic construct
  source 1..75: mol_type = other DNA
atgattgcgccgttcagtaacgacgtcatcaaggtaaatgggatgagtggcagaacaagctctgcaaaagtgcat

SEQ ID NO: 488130 - DNA, 75 bp, synthetic construct
  source 1..75: mol_type = other DNA
cgagtggccaatccaaccccttactacgtctcttttagcagtggtgatttagaagccagcggtaaacgctttccg

SEQ ID NO: 488131 - DNA, 75 bp, synthetic construct
  source 1..75: mol_type = other DNA
tctgcacaccgaaacggaagtcgccgggcgctgggttaatgatatgcaacatgcagaaaactgcataaatcagaa

SEQ ID NO: 488132 - DNA, 75 bp, synthetic construct
  source 1..75: mol_type = other DNA
caaagatgcgaatagtaataaatttaatgagtctggttataaaatagactggccccctgaatctccagacaacca

SEQ ID NO: 488133 - DNA, 75 bp, synthetic construct
  source 1..75: mol_type = other DNA
agtgagacaggctcgatttattcttccatgactctgaaagatttcagtaagtttgtgaaagatgaaattggcttt

SEQ ID NO: 488134 - DNA, 75 bp, synthetic construct
  source 1..75: mol_type = other DNA
gtgccgcaaaacctgatgctgtactggtcaaaaatgaagagaaaaatgccagtgagacaggctcgatttattctt

SEQ ID NO: 488135 - DNA, 75 bp, synthetic construct
  source 1..75: mol_type = other DNA
attttgccatcggcgctgcgtattgcgttaccggcctacagcaacgaagtgatcctgatgctgcactctactgcg

SEQ ID NO: 488136 - DNA, 75 bp, synthetic construct
  source 1..75: mol_type = other DNA
attggcgaagcccggatgctgacgccggaatcatttgacctggatggagtaagaccgtttgtgcggatcctgtcc

SEQ ID NO: 488137 - DNA, 75 bp, synthetic construct
  source 1..75: mol_type = other DNA
caccctctggaataccggaatgcgtattggcgaagcccggatgctgacgccggaatcatttgacctggatggagt

SEQ ID NO: 488138 - DNA, 75 bp, synthetic construct
  source 1..75: mol_type = other DNA
tggtcttcaggttgttcggtcgggaatggtcgtttgacctgaaagacagaagccgtgaagacaaccacaaagacc

SEQ ID NO: 488139 - DNA, 75 bp, synthetic construct
  source 1..75: mol_type = other DNA
cactcggcgggttaaccaaagcgatggcgctcgaactggtcaggcataagattctggtgaatgcggtcgcgccag

SEQ ID NO: 488140 - DNA, 75 bp, synthetic construct
  source 1..75: mol_type = other DNA
gtttaccagtaccgataaagccatcacgccggagttggtgctgatgcaggacggcgcattcagcctgacggcacc

SEQ ID NO: 488141 - DNA, 75 bp, synthetic construct
  source 1..75: mol_type = other DNA
tttgcaacagcgctctccctgagaagaatggccacttccacgggggccacaccggcctacttgctggcctcggaa

SEQ ID NO: 488142 - DNA, 75 bp, synthetic construct
  source 1..75: mol_type = other DNA
tccctgttctggatgatgctcagttcatgttatggatgaagttaatgtatacacttcgttgtttgttttctttgc

SEQ ID NO: 488143 - DNA, 75 bp, synthetic construct
  source 1..75: mol_type = other DNA
gttccttaatgcctttttccgcagtggcctgaactgtaccgtgctggcgctgacgctcaacacctgtgcttacac

SEQ ID NO: 488144 - DNA, 75 bp, synthetic construct
  source 1..75: mol_type = other DNA
gttccttaacgccttttttcgcagtggcctgaactgtaccgtgctggcgctgacgcttaacacctgcgcttacac

SEQ ID NO: 488145 - DNA, 75 bp, synthetic construct
  source 1..75: mol_type = other DNA
agcttgcgatagcactgctgaaaccgtacggacttagtcgctcacaagtcagggttgtgaggggggataatgggg

SEQ ID NO: 488146 - DNA, 75 bp, synthetic construct
  source 1..75: mol_type = other DNA
aagccatttctactatcgttaaaactctggtgctgaccggcacacttcagcctgtcgaggctgtttcatttggtc

SEQ ID NO: 488147 - DNA, 75 bp, synthetic construct
  source 1..75: mol_type = other DNA
aaatgccgatgatattaacacttgagcaacttcagccaaatccggataacccacgtcagggcagaaacccgcgtt

SEQ ID NO: 488148 - DNA, 75 bp, synthetic construct
  source 1..75: mol_type = other DNA
cgcgccctgttagcgctgggcgtgcagcatggcgaccgcgtggcggtggtgatggaaaaaggctggcagcagatt

SEQ ID NO: 488149 - DNA, 75 bp, synthetic construct
  source 1..75: mol_type = other DNA
gtcgtattgcaatctccatttgtatatgacaatcgagtcttatggcgcaggattggaagagttagacgtctcatc

SEQ ID NO: 488150 - DNA, 75 bp, synthetic construct
  source 1..75: mol_type = other DNA
aacatggcgagacttcatcgtctgctttggctcatcgacgattgaatatttctccctgacgggggcaaccacagt

SEQ ID NO: 488151 - DNA, 75 bp, synthetic construct
  source 1..75: mol_type = other DNA
tcgtaacagcctgaacattcagcaacccggcgaaactgacagctatgaagcatttttctctgatccgaatcgctg

SEQ ID NO: 488152 - DNA, 75 bp, synthetic construct
  source 1..75: mol_type = other DNA
ctgacaccggaagagacaattgcatcgcgttttgtgcgccagatgcaggataaattccaggtgctgaaagctgtt

SEQ ID NO: 488153 - DNA, 75 bp, synthetic construct
  source 1..75: mol_type = other DNA
ggttatctgcttggctcgcttaaccgcagtgttgcgggggaggatgatgacggggttaactggtatgacaaggtg

SEQ ID NO: 488154 - DNA, 75 bp, synthetic construct
  source 1..75: mol_type = other DNA
tcagacagtaccgctgggtattgcggtggcgctggagttcaccggaccactggcggtggcctgttctcttctcgt

SEQ ID NO: 488155 - DNA, 75 bp, synthetic construct
  source 1..75: mol_type = other DNA
cccaggcgacgccattttgcttggcacaccacaaacccgcgtggacattcaacccggcgatcgcgttcgtgttct

SEQ ID NO: 488156 - DNA, 75 bp, synthetic construct
  source 1..75: mol_type = other DNA
ataggcatttcgtcggtgacgcctggcgcactggtaaccgcgtcgcaggatacggcgttaacgactattcgtggt

SEQ ID NO: 488157 - DNA, 75 bp, synthetic construct
  source 1..75: mol_type = other DNA
cgacattacgcgcttacgtgggcgttatgcgtggtcaaaagacggaactgattcatggtttatcactgaccctga

SEQ ID NO: 488158 - DNA, 75 bp, synthetic construct
  source 1..75: mol_type = other DNA
atgttaatggtctgcgtcagggcctgttggacgcgatgcgtgagttctgtgaataccgcaacattctgccgcgcg

SEQ ID NO: 488159 - DNA, 75 bp, synthetic construct
  source 1..75: mol_type = other DNA
gcaagtctgtgggtttactattttctcacgccacaaccagaaatggtatttagcacgcccgtcatgattaaactc

SEQ ID NO: 488160 - DNA, 75 bp, synthetic construct
  source 1..75: mol_type = other DNA
cagaaactgaagggcggttttgagtctgcccgtgatgcacatgattatgtgcgcacacatcgtgatgagctggtt

SEQ ID NO: 488161 - DNA, 75 bp, synthetic construct
  source 1..75: mol_type = other DNA
gacggcaaaccttgtgagaacccttgggcaccttaatggtgacggtccgttactggagcgccttcgctggaagaa

SEQ ID NO: 488162 - DNA, 75 bp, synthetic construct
  source 1..75: mol_type = other DNA
cgatccggatgcaatttaccgttccgcgacagaaagaaatgcggttgtgatgctgcttgatgccgtggataaaaa

SEQ ID NO: 488163 - DNA, 75 bp, synthetic construct
  source 1..75: mol_type = other DNA
ggtgcggttgccggatatcgtggcagacgtcaggccgcagaagaaaccgccatgcgtgatgctgaaaccgtgcag

SEQ ID NO: 488164 - DNA, 75 bp, synthetic construct
  source 1..75: mol_type = other DNA
cggaacaggggaaatggcccgtggactcggtgatgcgatgattcagagcccagtgaaaacaggggcgcgtatttt

SEQ ID NO: 488165 - DNA, 75 bp, synthetic construct
  source 1..75: mol_type = other DNA
gcgcgtatttaaagacggcaggtttgttgacgctgaatatccggtgcgtcaggaggtttacgacgcgtttaaagg

SEQ ID NO: 488166 - DNA, 75 bp, synthetic construct
  source 1..75: mol_type = other DNA
ctccgtccactcaggcgatacaggacttgagcgaatcgctgatccgcagtcgcaaaaatgaagtgggtaacgcct

SEQ ID NO: 488167 - DNA, 75 bp, synthetic construct
  source 1..75: mol_type = other DNA
agagcgcaaggaccaggaaactggtgaaaccattcgcgaagttgtcgaacgccctgtaccgatggcaatgatggc

SEQ ID NO: 488168 - DNA, 75 bp, synthetic construct
  source 1..75: mol_type = other DNA
cggtaaaaacaggggtacgtattttaaatgagttcagccgtatggggctgccgggagtcgcaactgttcaggata

SEQ ID NO: 488169 - DNA, 75 bp, synthetic construct
  source 1..75: mol_type = other DNA
ggcgtgattagtggcattaaggacagtgacctgaaggtccgcgtggtgaagtcacagaaagaggctgaagcactg

SEQ ID NO: 488170 - DNA, 75 bp, synthetic construct
  source 1..75: mol_type = other DNA
gcgttcacagatggctgaaggtgatgccggtccgacagcgcaggagttaacggaacgtccacgcctgcccgctcc

SEQ ID NO: 488171 - DNA, 75 bp, synthetic construct
  source 1..75: mol_type = other DNA
cggtttgtcacgccagcaggcggcgtctcttgccaaaaacatgacggtgaactttaaccgtcgtggtgagcaggg

SEQ ID NO: 488172 - DNA, 75 bp, synthetic construct
  source 1..75: mol_type = other DNA
caggtgcctttcctggggaaaatttcaggtgaggtgatgccgtatgctgaccagcagaagatgtatgaccggatg

SEQ ID NO: 488173 - DNA, 75 bp, synthetic construct
  source 1..75: mol_type = other DNA
atgctgatgatgctcagtctacctgtgcacaagataaagccagtgtagcggcgaaaaaagccgcactggaaactg

SEQ ID NO: 488174 - DNA, 75 bp, synthetic construct
  source 1..75: mol_type = other DNA
gccaagcaggcgcgcgatcgtgaatatcaggcgatcatgccgttgaaaggtaagatccttaacacctgggaggtc

SEQ ID NO: 488175 - DNA, 75 bp, synthetic construct
  source 1..75: mol_type = other DNA
ggaaatgaacccgatgcaattgcgtgagacaacgcttgatccgaacactcgccgtctggtgcagttaactatcag

SEQ ID NO: 488176 - DNA, 75 bp, synthetic construct
  source 1..75: mol_type = other DNA
ccgtcttcacgcagggggtaaattctctaataaaaactaccagttctctggcggtttgcacggcgtagggatctc

SEQ ID NO: 488177 - DNA, 75 bp, synthetic construct
  source 1..75: mol_type = other DNA
gagggaacctcattttctgaaatattaagggatatgcgtatggagtcagcacgaaagatgatacttgaaaatact

SEQ ID NO: 488178 - DNA, 75 bp, synthetic construct
  source 1..75: mol_type = other DNA
tctgatcaagaaaagactgaaggaggagggaacctcattctctgaaatattaagggagctgcgtatggagtcagc

SEQ ID NO: 488179 - DNA, 75 bp, synthetic construct
  source 1..75: mol_type = other DNA
gctggcagagatggcgatttccagcgcccagcgtcgtatgcgtgcggctaaaaaagtggtgcgtaaaaagctgac

SEQ ID NO: 488180 - DNA, 75 bp, synthetic construct
  source 1..75: mol_type = other DNA
cggtgattgctgttacgctactgctggcgggcggcctggtgtggctggaaaagcgtccacaactcgcgattgata

SEQ ID NO: 488181 - DNA, 75 bp, synthetic construct
  source 1..75: mol_type = other DNA
atgctcgcctgtgccgcgggtccgctgggttcgtttgtagtctggcgtcgtatgtcttatttcggtgatacgctg

SEQ ID NO: 488182 - DNA, 75 bp, synthetic construct
  source 1..75: mol_type = other DNA
tttacgatacgccagcaggcccgtcagtggtgctgtgtgcggcgctgttgtttattatcagtatgatgaaaaagc

SEQ ID NO: 488183 - DNA, 75 bp, synthetic construct
  source 1..75: mol_type = other DNA
gattgacgatgggcgcgggatgccggtggatattcacccggaagagggtgtaccggcggttgaactgattctttg

SEQ ID NO: 488184 - DNA, 75 bp, synthetic construct
  source 1..75: mol_type = other DNA
ctgaccagcatgctcggcaacggaacgtcggccctcgccagtgccacgctctgcggcgcagcggcgctatttatc

SEQ ID NO: 488185 - DNA, 75 bp, synthetic construct
  source 1..75: mol_type = other DNA
atgattgaattattatttcccggttggttagccgggatcatgctcgcctgtgccgcaggtccgctgggttcgttt

SEQ ID NO: 488186 - DNA, 75 bp, synthetic construct
  source 1..75: mol_type = other DNA
ccgataattggaattccacacaatacagaatagctagaacaagagttgaacagcagtataatgctgttgttcacc

SEQ ID NO: 488187 - DNA, 75 bp, synthetic construct
  source 1..75: mol_type = other DNA
aaagataatcaggataataacgggtattatgactggaaagatacctggatgtttggtacatctttaacgcagaaa

SEQ ID NO: 488188 - DNA, 75 bp, synthetic construct
  source 1..75: mol_type = other DNA
tccggtgctaccgccacagcgtcgccagcttttgctgacggtgggcgaggtgcgggtacaagtaacgcagccggg

SEQ ID NO: 488189 - DNA, 75 bp, synthetic construct
  source 1..75: mol_type = other DNA
gctttcgtctggtctatcaggtgattgatgatcaattaattatcgctgttgtagctgtaggaaaacgtgaacgta

SEQ ID NO: 488190 - DNA, 75 bp, synthetic construct
  source 1..75: mol_type = other DNA
atgatgcgctcaaagaatggctgagactggataaatccatgcagcagccgttcgcgaaaaaattaaagaaatgca

SEQ ID NO: 488191 - DNA, 75 bp, synthetic construct
  source 1..75: mol_type = other DNA
gggttcgtctggtatatcaggtgagtgatgacatgttaattattgctgttgttacagtaggtaaacgtgaacgtg

SEQ ID NO: 488192 - DNA, 75 bp, synthetic construct
  source 1..75: mol_type = other DNA
caaagatgcgaatagcaataaatataatgagtctggttataaaaccacgctcttccatacctttaaagtcaatac

SEQ ID NO: 488193 - DNA, 75 bp, synthetic construct
  source 1..75: mol_type = other DNA
ggaaatgaacccgatgcaattgcgcgaaaccacgcttgatccgaacactcgccgtctggtgcagctgactatcga

SEQ ID NO: 488194 - DNA, 75 bp, synthetic construct
  source 1..75: mol_type = other DNA
taagatccttaacacctgggaagtctcctccgacgaagtgctggcttcgcaggaagtgcacgatatttcggtagc

SEQ ID NO: 488195 - DNA, 75 bp, synthetic construct
  source 1..75: mol_type = other DNA
cacgcaaaacgcgtggatgtaatcttacatgctgaccagtcgttagaagtgattgacgatgggcgcgggatgccg

SEQ ID NO: 488196 - DNA, 75 bp, synthetic construct
  source 1..75: mol_type = other DNA
cggtcgcgaccgctttactccgcacccggatctgcgccgtgaactgatgcgtcagcgtggctatttcgcttacgc

SEQ ID NO: 488197 - DNA, 75 bp, synthetic construct
  source 1..75: mol_type = other DNA
ggtatcgatgatgtcgcgcaggcggatgagatggtgaagctggcgacggcggtggcgcatctgattggtcgctcc

SEQ ID NO: 488198 - DNA, 75 bp, synthetic construct
  source 1..75: mol_type = other DNA
ggggcgaaacacacagtgaagccgaggttcgcgagctgctggaacagaacccgtctttcgttttctttaaaccgc

SEQ ID NO: 488199 - DNA, 75 bp, synthetic construct
  source 1..75: mol_type = other DNA
tgcacaacgacggcacctacgtcgaagagatcaccgactatgtgctgatgatgaaaatcgacgagcagaacatgc

SEQ ID NO: 488200 - DNA, 75 bp, synthetic construct
  source 1..75: mol_type = other DNA
atcgctgtgaacaaggtggaaaaaggagttgaccgttatttgtctgttgctttcgacacgaataactctcagtgc

SEQ ID NO: 488201 - DNA, 75 bp, synthetic construct
  source 1..75: mol_type = other DNA
cgcgagtctaatgttcgctctgtatcttttaaaaatagtgaattaataagtgcaatagcttgtgaaggaatgggg

SEQ ID NO: 488202 - DNA, 75 bp, synthetic construct
  source 1..75: mol_type = other DNA
ggtatcgatgatgtgaagcaggcggacgagatggtgaagctggcaacggcggtggcgcatctgattggtcgttcc

SEQ ID NO: 488203 - DNA, 75 bp, synthetic construct
  source 1..75: mol_type = other DNA
ccggatctgcgccgtgaactgatgcgtcagcgtggctatttcgcttacgccactcaccactaccagacgcatcag

SEQ ID NO: 488204 - DNA, 75 bp, synthetic construct
  source 1..75: mol_type = other DNA
aaagacttcgaagaaggcgtgtggctgagcgagctttccgatgccattgaaaccagcaaaggcattctttctgtg

SEQ ID NO: 488205 - DNA, 75 bp, synthetic construct
  source 1..75: mol_type = other DNA
attcgctgattcctatgcgttcatcagcaatccggcaacaggtgcgccgtctgtatacatcatcggctccggtca

SEQ ID NO: 488206 - DNA, 75 bp, synthetic construct
  source 1..75: mol_type = other DNA
attcatggtttatcactgaccttgaagacgaatcgcatcctgaccgttacagcgcacaatatcgcgcagaatcgc

SEQ ID NO: 488207 - DNA, 75 bp, synthetic construct
  source 1..75: mol_type = other DNA
ggtggcaagctgtataagggcgaaagcgaagtcggtgatgttgccggaagtggtcgcgtatcaatggcgcatggt

SEQ ID NO: 488208 - DNA, 75 bp, synthetic construct
  source 1..75: mol_type = other DNA
ggggagtcggtgctgtccgaactggcgatgaatccagattattttggtggtcgctcgctcgctgatacgctctct

SEQ ID NO: 488209 - DNA, 75 bp, synthetic construct
  source 1..75: mol_type = other DNA
attgtggccttaaagcctgggcaaagcctagcgctaatctgatgtgtggtgattgcaatatagcactcgtatctg

SEQ ID NO: 488210 - DNA, 75 bp, synthetic construct
  source 1..75: mol_type = other DNA
ggtgaaaacagaacaaggaccaggatacatctattgtctgattgaacatcaaagcacctcaaacaaactgatcgc

SEQ ID NO: 488211 - DNA, 75 bp, synthetic construct
  source 1..75: mol_type = other DNA
ataactcagacagctatctgcgtcagccgcaccgcgtgatggaactgcacaacgacggcacgtatgtcgaagaga

SEQ ID NO: 488212 - DNA, 75 bp, synthetic construct
  source 1..75: mol_type = other DNA
actcgggccgccagccagtcgatcatcccggtcgatactaaactggccgccggtatcacgcgttttttcccgcag

SEQ ID NO: 488213 - DNA, 75 bp, synthetic construct
  source 1..75: mol_type = other DNA
agctatgcgcaaagtgcgccagcggcagagatggcagtgagctttaccacagaagtcaaaaaacagcttttgaca

SEQ ID NO: 488214 - DNA, 75 bp, synthetic construct
  source 1..75: mol_type = other DNA
gattctgaagctcggcagtctggatctggtcgatggtacgccggtggtggatatcaaaccgtatctcccctttgc

SEQ ID NO: 488215 - DNA, 75 bp, synthetic construct
  source 1..75: mol_type = other DNA
tcgtattttattagatgcaccttgctctgctaccggtgtgattcgtcgccatcccgatattaaatggctgcgtcg

SEQ ID NO: 488216 - DNA, 75 bp, synthetic construct
  source 1..75: mol_type = other DNA
atggtttgttccgggcaaccgtctggtctgatagtccactcttctaagcccggtcttgccgggcatttttatact

SEQ ID NO: 488217 - DNA, 75 bp, synthetic construct
  source 1..75: mol_type = other DNA
cgcgtattgcatgaacgttcactgcaatcgctcccctggcgcgaacttggtgtcgatgtggttctcgactgcacc

SEQ ID NO: 488218 - DNA, 75 bp, synthetic construct
  source 1..75: mol_type = other DNA
tatccgttcataatgtccagtgatttgccgccacaatttagcggtaaaggttatgaaattttcggagcttacaaa

SEQ ID NO: 488219 - DNA, 75 bp, synthetic construct
  source 1..75: mol_type = other DNA
acgagcatggaaaaccaattgttagtttcaccagtgaagaacaagatataactttagacatttgttaccgaaatc

SEQ ID NO: 488220 - DNA, 75 bp, synthetic construct
  source 1..75: mol_type = other DNA
ctcagaatcatactgtttctgatattctagaaaattcaataagaaagataaatgatataactggatattattatc

SEQ ID NO: 488221 - DNA, 75 bp, synthetic construct
  source 1..75: mol_type = other DNA
gctgaaagcaaagaaaaaccacaaaaactattcttcccattagatggcctcccggaagcatataaagctgcaatc

SEQ ID NO: 488222 - DNA, 75 bp, synthetic construct
  source 1..75: mol_type = other DNA
tggactgggaagaggtctggaaggtcatccgcgactacaatcgcgttgcgctgcttagtgcggtcggctggtggt

SEQ ID NO: 488223 - DNA, 75 bp, synthetic construct
  source 1..75: mol_type = other DNA
aaagatgaatgtggataccttcccacgcagaaattatttaatgagttaacattaaaaattaaacgtgattacggt

SEQ ID NO: 488224 - DNA, 75 bp, synthetic construct
  source 1..75: mol_type = other DNA
attcatggtttatcactgaccttgaagacgaatcgcatcctgaccgttacagcgcacaatatcgtgccgagtctc

SEQ ID NO: 488225 - DNA, 75 bp, synthetic construct
  source 1..75: mol_type = other DNA
cagcagtcagtatgggcttcaacaggaacacctgctgtttactccactcttcaaagcagataacgccagatgctt

SEQ ID NO: 488226 - DNA, 75 bp, synthetic construct
  source 1..75: mol_type = other DNA
catgaactgttactgattcatctcccccgacacgttcttgtttatgacggctctactgcagctaacggtccgcaa

SEQ ID NO: 488227 - DNA, 75 bp, synthetic construct
  source 1..75: mol_type = other DNA
tcttcgctcattcccgggcattgcaaagcgctctgatgtgaacggtgcatctcgcggcgtcgagtacaacatggc

SEQ ID NO: 488228 - DNA, 75 bp, synthetic construct
  source 1..75: mol_type = other DNA
tgtcgggcgcatcaggaaaaatgtcggcttcaaattgcgcgttatcactaagtcacctgtcactctgtcaggctg

SEQ ID NO: 488229 - DNA, 75 bp, synthetic construct
  source 1..75: mol_type = other DNA
agtcgggcgcatcaggaaaaatgtcggcttcaaattgcgcgttatcacgaagtcacctgtcactctgtcaggctg

SEQ ID NO: 488230 - DNA, 75 bp, synthetic construct
  source 1..75: mol_type = other DNA
aagaaatcctgaacagcagcggatatcttcgctcattcccgggcattgccaaacgctctgatgtgaacggtgtat

SEQ ID NO: 488231 - DNA, 75 bp, synthetic construct
  source 1..75: mol_type = other DNA
aacattggtttcaaattgcgcgttatcacgaagtcacctgtcactctgtctggctgccagataaggattgagtaa

SEQ ID NO: 488232 - DNA, 75 bp, synthetic construct
  source 1..75: mol_type = other DNA
tgaagggaatgggtaaagacttcaagaatgccgactatattgattacctaccaatcaatatgttggctacaccta

SEQ ID NO: 488233 - DNA, 75 bp, synthetic construct
  source 1..75: mol_type = other DNA
cgaagggtgtaaacctgattggtgcgcttgtacctgatctggttgctggcggtgtggttagaaaggtgggacagg

SEQ ID NO: 488234 - DNA, 75 bp, synthetic construct
  source 1..75: mol_type = other DNA
tgacgccctgttagcgcgcgttcgtgctcagttagccgtgcagttgccgtattacctgctgccccaacatttctt

SEQ ID NO: 488235 - DNA, 75 bp, synthetic construct
  source 1..75: mol_type = other DNA
attgagaaaatcctccgctcctacactgctgatgaactggctgatggtgtgatggaatcgctgcggtttgatgct

SEQ ID NO: 488236 - DNA, 75 bp, synthetic construct
  source 1..75: mol_type = other DNA
ttgccggaacctactgtaaaacgccattcgctgattcctatgcgttcatcagcaatccggcaacaggtgcgccat

SEQ ID NO: 488237 - DNA, 75 bp, synthetic construct
  source 1..75: mol_type = other DNA
cgaacatcacaggcggtaggcgttaacgggcaactggtcgaataccgctatgatggcacggttaaaaccgtctca

SEQ ID NO: 488238 - DNA, 75 bp, synthetic construct
  source 1..75: mol_type = other DNA
ttatttttacagcactattttgctgcagtgctcaggctgccccgtcctctctggaaaaaagattaggcaagaacg

SEQ ID NO: 488239 - DNA, 75 bp, synthetic construct
  source 1..75: mol_type = other DNA
gaactcgaaagctaaaatactctctcagccgtcaattataaccttaaataatatgcaggcgattcttgataaaaa

SEQ ID NO: 488240 - DNA, 75 bp, synthetic construct
  source 1..75: mol_type = other DNA
gaaattgtcggtttgggggtggttgaaccgcgggagcgcctggaaacaacctgggtatttgacgaccatgccgcc

SEQ ID NO: 488241 - DNA, 75 bp, synthetic construct
  source 1..75: mol_type = other DNA
cgcgcggcgtcgagtacaacatggcgcagaatgctgtttatcgtgtgtgtggtggaaagctctacaaaggcgaaa

SEQ ID NO: 488242 - DNA, 75 bp, synthetic construct
  source 1..75: mol_type = other DNA
aaacgccgactatatcgactatctgccagtgaatatgctggctacacccaaagaaatactcaacagcagcggata

SEQ ID NO: 488243 - DNA, 75 bp, synthetic construct
  source 1..75: mol_type = other DNA
cctttaacagctcaacggcgcaagctaatctcagttcttctgtgataagcaacgccaataatttcatgatcagag

SEQ ID NO: 488244 - DNA, 75 bp, synthetic construct
  source 1..75: mol_type = other DNA
aatcgggtcaggatagcgtaccgttgcttggcgacattccctggttcgggcaattatttcgtcatgacggaaaag

SEQ ID NO: 488245 - DNA, 75 bp, synthetic construct
  source 1..75: mol_type = other DNA
aaacgttctgatgtgaacggtatatcgcgcggcgtcgagtacaacatggcgcagaatgctgtttatcgcgtgtgt

SEQ ID NO: 488246 - DNA, 75 bp, synthetic construct
  source 1..75: mol_type = other DNA
aaacgctctgatgtgaacggtgtatctcgcggcgtcgagtacaacatggcgcagaatgctgtttatcgcgtatgt

SEQ ID NO: 488247 - DNA, 75 bp, synthetic construct
  source 1..75: mol_type = other DNA
cactgggtggtatttttacccgtaaaaataaatcgggtcaggatagcgtaccgctgttgggcgacatcccctggt

SEQ ID NO: 488248 - DNA, 75 bp, synthetic construct
  source 1..75: mol_type = other DNA
catctcactgacgttccctggaaacaggcattacaaaccgtagtgaaaagcgccgggctgataacgcgccaggaa

SEQ ID NO: 488249 - DNA, 75 bp, synthetic construct
  source 1..75: mol_type = other DNA
atgctgatacccggcgtacaggcggcaaagccgcaagatgacgttccggtagctcaggtgttgcaggcgctggct

SEQ ID NO: 488250 - DNA, 75 bp, synthetic construct
  source 1..75: mol_type = other DNA
cggttctggtgattcaggacgtcaccgaatcacgcaaaatgctgcgccagctgagctacagcgcctcccatgatg

SEQ ID NO: 488251 - DNA, 75 bp, synthetic construct
  source 1..75: mol_type = other DNA
gcggttggctatttggccgcatagccgataaacatggtcgcaaaaaatcgatgctgttatcggtgtgtatgatgt

SEQ ID NO: 488252 - DNA, 75 bp, synthetic construct
  source 1..75: mol_type = other DNA
tactgaaggctgagatgttcccggcacaggttcgcgcattaggcgttggtctgtcatatgcggtcgccaatgcta

SEQ ID NO: 488253 - DNA, 75 bp, synthetic construct
  source 1..75: mol_type = other DNA
atgcacgccaacgtagcaagcggcattatgacagccgcactgtttgtatttatgctcatccagccgctcattggt

SEQ ID NO: 488254 - DNA, 75 bp, synthetic construct
  source 1..75: mol_type = other DNA
ccaaccttgccctgatggtgcaaaaagtcggcgcgtcggcccccgctattgattaccacagtcagcagatggcgc

SEQ ID NO: 488255 - DNA, 75 bp, synthetic construct
  source 1..75: mol_type = other DNA
tactgaagcattacgggcgaagattaatatcccgccaacgctctacgctgcgcagggcgatgccgtatccatcta

SEQ ID NO: 488256 - DNA, 75 bp, synthetic construct
  source 1..75: mol_type = other DNA
atcttaatcccgcccgatcagatcatgggcgcgcggatgggctttgtggtggttgttgaactgacccaacgcccg

SEQ ID NO: 488257 - DNA, 75 bp, synthetic construct
  source 1..75: mol_type = other DNA
tttataccaacaaatggcgcaatatcgtcctgaattaatcattcgtttggggattgatattgatactgccatctc

SEQ ID NO: 488258 - DNA, 75 bp, synthetic construct
  source 1..75: mol_type = other DNA
gaaatcgctgcaacaacactggcaaaccgagcggcgctatctggggctgctctccggcgaagacggcgacaaaat

SEQ ID NO: 488259 - DNA, 75 bp, synthetic construct
  source 1..75: mol_type = other DNA
cattgttgaatgaacatttgaaaaaatggagttctgcacaaggtgacattttaagaaagtgtaggcttgtcgcaa

SEQ ID NO: 488260 - DNA, 75 bp, synthetic construct
  source 1..75: mol_type = other DNA
ttatgacggcggcgctgtttgtatttatgctcatccagccgataattggagcattgtcggataagattggccgtc

SEQ ID NO: 488261 - DNA, 75 bp, synthetic construct
  source 1..75: mol_type = other DNA
acggcaaactgacaagtagtgatactcgtcgccgcatttgggcaattgtaggggcctcatcaggtaacctggttg

SEQ ID NO: 488262 - DNA, 75 bp, synthetic construct
  source 1..75: mol_type = other DNA
cctcgccttatgccgcttttggtctggtgatgtgtgccctgctgatagtgagtttttatacttcaatcagtggaa

SEQ ID NO: 488263 - DNA, 75 bp, synthetic construct
  source 1..75: mol_type = other DNA
gattgaccagctgtatagcgttcagtgtccaggccgcaaatgttgatgagtacattactcagcttcctgctggtg

SEQ ID NO: 488264 - DNA, 75 bp, synthetic construct
  source 1..75: mol_type = other DNA
gtttcttcgctcgcctgaaacgcagcctgctgaaaactaaagaaaacctcggttccggatttatcagcctgttcc

SEQ ID NO: 488265 - DNA, 75 bp, synthetic construct
  source 1..75: mol_type = other DNA
agattctggcaaaagtcgatgaaccgcttaacgtcgaaggcaaagcgccgtttgtgatcctgatggtaggcgtta

SEQ ID NO: 488266 - DNA, 75 bp, synthetic construct
  source 1..75: mol_type = other DNA
cggttcaggatttatcagcctgttccgtggcaaaaaaatcgatgatgatctgtttgaagagctggaagaacaact

SEQ ID NO: 488267 - DNA, 75 bp, synthetic construct
  source 1..75: mol_type = other DNA
ggaaggcgcaatcaacgccaagaccgtaacctatgacttcgaacgtctgatggaaggcgctaaactgatgaaatg

SEQ ID NO: 488268 - DNA, 75 bp, synthetic construct
  source 1..75: mol_type = other DNA
gcagcaacagcagcagttgctggatgaaaaccagcatcagcgtgatgcgctggagcgcagtgcgccgctgactat

SEQ ID NO: 488269 - DNA, 75 bp, synthetic construct
  source 1..75: mol_type = other DNA
cgctacattggtgtcggcgaacgtattgaggatttgcgtccgtttaaggcggacgactttatagaggcacttttt

SEQ ID NO: 488270 - DNA, 75 bp, synthetic construct
  source 1..75: mol_type = other DNA
attatgctgaaaaagtcggacaacatgattgccgatacggttttccgcatgatcggccatccgccgcgccccaca

SEQ ID NO: 488271 - DNA, 75 bp, synthetic construct
  source 1..75: mol_type = other DNA
ggggcaattctgaaagatgagttaaaacaggcaggtatcacctggagcggaacactgctgcgccagactcaggtt

SEQ ID NO: 488272 - DNA, 75 bp, synthetic construct
  source 1..75: mol_type = other DNA
gataggccatgcgcgcttcaatgtgcccggaacatggcgggccggatcggatgccgtacgtcagatcctgcgtca

SEQ ID NO: 488273 - DNA, 75 bp, synthetic construct
  source 1..75: mol_type = other DNA
ctgacgctgcaccgcgccattaaatatctgctggcgaaagagcaggggcatcagggcaacaccactgaaaccggc

SEQ ID NO: 488274 - DNA, 75 bp, synthetic construct
  source 1..75: mol_type = other DNA
acatcagacaggatattacaaactcaatgacagcctggatattaaaaccacattacaagcaaacgacattccagg

SEQ ID NO: 488275 - DNA, 75 bp, synthetic construct
  source 1..75: mol_type = other DNA
tgaaagatgagctaaagcaggcgggtatcacttatagcggcacgttgctgcgccagacgcaggttaatgaaccag

SEQ ID NO: 488276 - DNA, 75 bp, synthetic construct
  source 1..75: mol_type = other DNA
cgcaatataaagagatcgatctcgcggcgcgtaccgcggcggcatcgcctctggaactggtgctggtgctgtttt

SEQ ID NO: 488277 - DNA, 75 bp, synthetic construct
  source 1..75: mol_type = other DNA
gaaatcaacccggaaatggagagccgtctgaatgccgtgcttgccgcaagggaagcagaaggtcgccaggtgggc

SEQ ID NO: 488278 - DNA, 75 bp, synthetic construct
  source 1..75: mol_type = other DNA
tcatgaaattgaaagatatctgtacgcaacttttaaatatgatttgattctggaagagaaactatatctttctat

SEQ ID NO: 488279 - DNA, 75 bp, synthetic construct
  source 1..75: mol_type = other DNA
tttctagtcgtgtgttatgtaatgaaaaaataaaacagaaaaatattggtgatatctatgagcagtttcttgaaa

SEQ ID NO: 488280 - DNA, 75 bp, synthetic construct
  source 1..75: mol_type = other DNA
aaattgaaaaactgcgtaccttcctgcgtaattcaccggcggccaacctggtggaagagaaaattgagaaaacgg

SEQ ID NO: 488281 - DNA, 75 bp, synthetic construct
  source 1..75: mol_type = other DNA
gatatccggattggcgatctgccgattatccgggattccgaaatccagaacttctgtctgcacggcacggtcggg

SEQ ID NO: 488282 - DNA, 75 bp, synthetic construct
  source 1..75: mol_type = other DNA
ccccaaccgcagctacagcaaactggtggacacactgctttccatcaaaattgaaaaactgcgtacctacctgcg

SEQ ID NO: 488283 - DNA, 75 bp, synthetic construct
  source 1..75: mol_type = other DNA
tcatggattgagctgtgcgactgggtgccagctctgctttccggtaccacccgcccgcaggatattcgtcgcgga

SEQ ID NO: 488284 - DNA, 75 bp, synthetic construct
  source 1..75: mol_type = other DNA
agccgcaagaatccgtttggcgatatcaaatcggatggcactgtgcaaacggctctcgaaacttttttttttgga

SEQ ID NO: 488285 - DNA, 75 bp, synthetic construct
  source 1..75: mol_type = other DNA
tctagacagatgttcaaaatcacagccaaagagtatgcttctattgctgatgtagatatttctgtcgcatataag

SEQ ID NO: 488286 - DNA, 75 bp, synthetic construct
  source 1..75: mol_type = other DNA
atggatgcactacacacgcaaactgctaatagtacaactgcgccgcagcccaactacattccagggctgattgcg

SEQ ID NO: 488287 - DNA, 75 bp, synthetic construct
  source 1..75: mol_type = other DNA
gaacctcgctaccgacgctccgctgctgttcggcggtttgattgccgccaccgcctttggcgcacgcgcaattat

SEQ ID NO: 488288 - DNA, 75 bp, synthetic construct
  source 1..75: mol_type = other DNA
cacagcctaacgcattggtaaaagttattggtacttcgacctgcgacattctgatcgccgacaaacagagcgttg

SEQ ID NO: 488289 - DNA, 75 bp, synthetic construct
  source 1..75: mol_type = other DNA
cgcaacagccggttgcacagcagccgcaatatcagcagccgcaacagccagttgcgccgcagccgcatgataccc

SEQ ID NO: 488290 - DNA, 75 bp, synthetic construct
  source 1..75: mol_type = other DNA
atgtcttcttatgcaaaccatcaggcacttgcgggcctgactcttggaaaatcaaccgattaccgggatacctat

SEQ ID NO: 488291 - DNA, 75 bp, synthetic construct
  source 1..75: mol_type = other DNA
gatccttgccgatcttgccatgctggagtacgccgccgagcgttacccacatattgagcgtcacgtgtcggtgca

SEQ ID NO: 488292 - DNA, 75 bp, synthetic construct
  source 1..75: mol_type = other DNA
gggcaaaatttttgatgcagtttcgtttgttttatcgttgtagccaggaacataaaacaattgttattggctggg

SEQ ID NO: 488293 - DNA, 75 bp, synthetic construct
  source 1..75: mol_type = other DNA
attcaaatgttatcgcatttaattttagtaacttattaaacgaataccgtaaaaataacggcctgctaccggata

SEQ ID NO: 488294 - DNA, 75 bp, synthetic construct
  source 1..75: mol_type = other DNA
tagttgattttttaaatgacgctgttatctctggtgaggggacaatagttaaatctatccctggatctgaagttg

SEQ ID NO: 488295 - DNA, 75 bp, synthetic construct
  source 1..75: mol_type = other DNA
acttgctgaaatccaactgcctgataactcaccagccagactggggctcaattcaaattcagtaccgcggtcgca

SEQ ID NO: 488296 - DNA, 75 bp, synthetic construct
  source 1..75: mol_type = other DNA
atggctacgatgaaatggtcaaagccctggccagtgcctggaatcaggaagcggcggcgatggcgcaagagatta

SEQ ID NO: 488297 - DNA, 75 bp, synthetic construct
  source 1..75: mol_type = other DNA
cgctatgatggcaaggtcattgtcagtggtgagtggctgttgaaccaccagggacaactgatcaaacgtccgttc

SEQ ID NO: 488298 - DNA, 75 bp, synthetic construct
  source 1..75: mol_type = other DNA
gtatgtgtttgttgccgaaaaaatagtgcaatatgcggagaaaaatctcaatccatcgctactattgattcttgc

SEQ ID NO: 488299 - DNA, 75 bp, synthetic construct
  source 1..75: mol_type = other DNA
gtggcagagttaaaggcttctaaaccactggaatatcataagaaaaaggaaactaaacttcttgttgcgatcgag

SEQ ID NO: 488300 - DNA, 75 bp, synthetic construct
  source 1..75: mol_type = other DNA
atgcgattgcattcgccaaaatcgtcgatgaaataggccttccgcgcggcgtgtttaaccttgtactggggcgtg

SEQ ID NO: 488301 - DNA, 75 bp, synthetic construct
  source 1..75: mol_type = other DNA
gcttggtgtgactaccggcattctgccgtggaacttcccgttcttcctcattgcccgcaaaatggctcccgctct

SEQ ID NO: 488302 - DNA, 75 bp, synthetic construct
  source 1..75: mol_type = other DNA
cctggatttatcggtctggaagcaggtcagtcggcgtttggtgatatctacgcctggttcggtcgcgtactcggc

SEQ ID NO: 488303 - DNA, 75 bp, synthetic construct
  source 1..75: mol_type = other DNA
ctattctcgctatattggcggtatttattccagcgaatggttctgggcgaaaattctccacgttacccgtcagga

SEQ ID NO: 488304 - DNA, 75 bp, synthetic construct
  source 1..75: mol_type = other DNA
ggcggtaagcgccgaacaacattatcttccaacttccgccccggcacaggctgcccaggccgttgcgactctata

SEQ ID NO: 488305 - DNA, 75 bp, synthetic construct
  source 1..75: mol_type = other DNA
aaccagcatggggtttatacgtcagagccacaattgaactttgaggtcgtcaaacgcgtacgcgatgctgtttct

SEQ ID NO: 488306 - DNA, 75 bp, synthetic construct
  source 1..75: mol_type = other DNA
acggtggtgattaaaacgggtaaagacggctgctttatcaagcgtggtgacatgacgatgaaggtgccggcggtc

SEQ ID NO: 488307 - DNA, 75 bp, synthetic construct
  source 1..75: mol_type = other DNA
ctggactcatggtatgaattcattaatgcgtgatgcttccgcatttgatttcgaagaaaatattcgtttaaccaa

SEQ ID NO: 488308 - DNA, 75 bp, synthetic construct
  source 1..75: mol_type = other DNA
caacgccagccaaaaacaactgcttccggcgctgaccgaggcgtgggccaaaaatccttctctggatcacctgcc

SEQ ID NO: 488309 - DNA, 75 bp, synthetic construct
  source 1..75: mol_type = other DNA
tcgttaaaggaaatatcgccttctgaaatcctctcccgcagtgatgtaagtaaggaggaggttttaagagcgata

SEQ ID NO: 488310 - DNA, 75 bp, synthetic construct
  source 1..75: mol_type = other DNA
tgtttgcaaccgggatgaggtttatgtttgctgctccattcttaatcagcattgcatggttaagaaaaacaccgc

SEQ ID NO: 488311 - DNA, 75 bp, synthetic construct
  source 1..75: mol_type = other DNA
tcgtggattgagctgtgcgactgggtgcccgccctgctctccggcaccacccgcccgcaggatatccgtcgcgga

SEQ ID NO: 488312 - DNA, 75 bp, synthetic construct
  source 1..75: mol_type = other DNA
cgtcatcatccgcgcgactatatcgagtcaatggaagcggcgctaaaaaccgtgcttgcagagcttagcgccgaa

SEQ ID NO: 488313 - DNA, 75 bp, synthetic construct
  source 1..75: mol_type = other DNA
catatgggcgcagttggcgcaggcgcacagcctaacgcactggtaaaagttatcggtacttccacctgcgacatt

SEQ ID NO: 488314 - DNA, 75 bp, synthetic construct
  source 1..75: mol_type = other DNA
aactgcaatttcgttgggtatcgcgaaaatcaacattcatacggagctctgtcaggccgcaatggtagcagtgaa

SEQ ID NO: 488315 - DNA, 75 bp, synthetic construct
  source 1..75: mol_type = other DNA
gatgaagtgttgatgaaagtggtgaaaatccttaaatcacagatcccggtagataaaggtaaagtttaccgcttc

SEQ ID NO: 488316 - DNA, 75 bp, synthetic construct
  source 1..75: mol_type = other DNA
cttaatcaaggggtactaatgaatgtggtaaatcatttgcaaacattttactttgcaaaaacttccggccctttt

SEQ ID NO: 488317 - DNA, 75 bp, synthetic construct
  source 1..75: mol_type = other DNA
cacctggaatcgctctatcgccgtctggaagtgaaaaaccgtacccaggcggcgatgatgctaaatatctcctcc

SEQ ID NO: 488318 - DNA, 75 bp, synthetic construct
  source 1..75: mol_type = other DNA
ttgaacatgtcgccaacggtcaatattgtgccgcagaacgactggaacatcaggagtttgttttaacgtataaag

SEQ ID NO: 488319 - DNA, 75 bp, synthetic construct
  source 1..75: mol_type = other DNA
atttatactggcggcacgctggaagagttgctatcgattctaaaagaaatcgttcatttccaggtgggaagcatt

SEQ ID NO: 488320 - DNA, 75 bp, synthetic construct
  source 1..75: mol_type = other DNA
atttgcttataaaaaagacgtttattttcaggtatgtacattgattattttctttgccgcattggtggcagttgc

SEQ ID NO: 488321 - DNA, 75 bp, synthetic construct
  source 1..75: mol_type = other DNA
tgttaaacgagcttgatgatagcaataccgctcatataatccgcagtcagtgcatagggccaatgaaagttggca

SEQ ID NO: 488322 - DNA, 75 bp, synthetic construct
  source 1..75: mol_type = other DNA
tggcactggccgataattatacttgccaaatacagggggattgaacttactacttacaatgcctttatgctggtt

SEQ ID NO: 488323 - DNA, 75 bp, synthetic construct
  source 1..75: mol_type = other DNA
catagatacctctattaacgttggactggtgacggaggatggcgagcggacgtttgtcacaaaccgtaacggcag

SEQ ID NO: 488324 - DNA, 75 bp, synthetic construct
  source 1..75: mol_type = other DNA
agtcaatatttattcatggaatgaaaatcagtttacaacagcgtattccaggggtaggtattcagggcgtcagtc

SEQ ID NO: 488325 - DNA, 75 bp, synthetic construct
  source 1..75: mol_type = other DNA
tacagctattaacttcagaacatttcattcaattgcaaataacaaccaattattatcattgactggtgcattgct

SEQ ID NO: 488326 - DNA, 75 bp, synthetic construct
  source 1..75: mol_type = other DNA
gttactttctgcggcaggatggttcttcgaaagaccacaggtgtcagccttctcatcacactcaatattagctac

SEQ ID NO: 488327 - DNA, 75 bp, synthetic construct
  source 1..75: mol_type = other DNA
aacggctacctctggcgctcaagcggcgataccgaaacgtaccgcgtgaatctgtcgcacgtgctgtttcgcaat

SEQ ID NO: 488328 - DNA, 75 bp, synthetic construct
  source 1..75: mol_type = other DNA
tgttgctggcattcagtcagactacttgggctgcatttttatccccggcagatcgcgacagtatcgaacaacagc

SEQ ID NO: 488329 - DNA, 75 bp, synthetic construct
  source 1..75: mol_type = other DNA
cggtacggggcagttaaatggtgccctttcctttaataatcctctggggctggctgacaactggtttgtcagcgg

SEQ ID NO: 488330 - DNA, 75 bp, synthetic construct
  source 1..75: mol_type = other DNA
gataaatggttttacaagctcatcaaggatggtgtctttcctgccccatcaaactgggccgcagttcccgctggc

SEQ ID NO: 488331 - DNA, 75 bp, synthetic construct
  source 1..75: mol_type = other DNA
tcagggggcgtactgcacataacggtcatggaaggcaggctgcagcaaatccgggcggaaggcgctgaccttcct

SEQ ID NO: 488332 - DNA, 75 bp, synthetic construct
  source 1..75: mol_type = other DNA
accgcagtgcaattcagcagcaacagcagcagttgttggatgaaaaccagcgtcagcgtgatgcgctggagcgca

SEQ ID NO: 488333 - DNA, 75 bp, synthetic construct
  source 1..75: mol_type = other DNA
tcgcatgtcctgttccgtaacggggacatgaagacagcactgaccggaggtctgcagcaccgcattattcacaat

SEQ ID NO: 488334 - DNA, 75 bp, synthetic construct
  source 1..75: mol_type = other DNA
gtctgccgtatggctataccctggtggattacacgtattcatggagtgactacctcagcaccattgataaccggg

SEQ ID NO: 488335 - DNA, 75 bp, synthetic construct
  source 1..75: mol_type = other DNA
cagattgaaatatcgcccggtgaccgtgagggatggtcggtggtgacactgacggcattgccggaatggcctgtc

SEQ ID NO: 488336 - DNA, 75 bp, synthetic construct
  source 1..75: mol_type = other DNA
gcgggtaaccatgttgatgttcttgctgccaccagtacagatacgtcctggcgctttaaggaaacgaagaaatcc

SEQ ID NO: 488337 - DNA, 75 bp, synthetic construct
  source 1..75: mol_type = other DNA
gtcatggaaggcaggctgcagcaaatccgggcggaaggcgctgaccttcctgtccgcaccctgaagatggttttt

SEQ ID NO: 488338 - DNA, 75 bp, synthetic construct
  source 1..75: mol_type = other DNA
gtgcgccgctgaccatcacgccgcctccggaaacgtctgccggtactgaaggcccctgctttacggtgtcacgca

SEQ ID NO: 488339 - DNA, 75 bp, synthetic construct
  source 1..75: mol_type = other DNA
cttctgaaagagggaactttgaggaaagtgtatatattcgtctgagcgatgatggcggagcccagtcatgtatca

SEQ ID NO: 488340 - DNA, 75 bp, synthetic construct
  source 1..75: mol_type = other DNA
cgtaatcttgccccacaatttttgtatcactacccttcatcatgtattgcttcatttgaaccagatagaaaatcc

SEQ ID NO: 488341 - DNA, 75 bp, synthetic construct
  source 1..75: mol_type = other DNA
aacaataatcactcaatatcaatttttattgaatggattaaagagttacagattacaccagtttcgtcccgttta

SEQ ID NO: 488342 - DNA, 75 bp, synthetic construct
  source 1..75: mol_type = other DNA
agtggaataacatccactcataacgttccttcaggtacaacaatatattctaaacatacatctgaaaccatctgc

SEQ ID NO: 488343 - DNA, 75 bp, synthetic construct
  source 1..75: mol_type = other DNA
ctccgggtgaccgcagtgcaattcagcagcaacagcagcagttgctggatgaaaaccagcgtcagcgtgatgcgc

SEQ ID NO: 488344 - DNA, 75 bp, synthetic construct
  source 1..75: mol_type = other DNA
gtcaccggaccgtcttcatggtgtggaacaactgagcctcgggggcgagagttcagtgcgtggctttaaggagca

SEQ ID NO: 488345 - DNA, 75 bp, synthetic construct
  source 1..75: mol_type = other DNA
agaaagagcttctttttcttaagaaacatggggatgagtttgccagaaaatatcctaagatagctcggcgtcttg

SEQ ID NO: 488346 - DNA, 75 bp, synthetic construct
  source 1..75: mol_type = other DNA
cagaaaaataatgatgtattatacggtgtcaaaactaatgtgttcggtgccgggtttaatgagggggaagtaaca

SEQ ID NO: 488347 - DNA, 75 bp, synthetic construct
  source 1..75: mol_type = other DNA
ctcgtggaattgatattaccgtaactctttcaaaggatgcagatatgcaccctgaatgtttcatgttttgctctt

SEQ ID NO: 488348 - DNA, 75 bp, synthetic construct
  source 1..75: mol_type = other DNA
gcgctgaaccgtccatcaagaatgttgccggctatggcattaaaaggaatgaactggagaattgtttctcagtta

SEQ ID NO: 488349 - DNA, 75 bp, synthetic construct
  source 1..75: mol_type = other DNA
tccttgatcactttcttggacttcatgcacctgtaaatagctttactcgcatgattacagtaattgagcatgaag

SEQ ID NO: 488350 - DNA, 75 bp, synthetic construct
  source 1..75: mol_type = other DNA
aatattgcacagatatgaaaacggtttggttacgcagattccactaaaaaatttatttggacttgaacattcttt

SEQ ID NO: 488351 - DNA, 75 bp, synthetic construct
  source 1..75: mol_type = other DNA
tcctttgcatttttaagctctagaattcatcagagattagatgaagatttacctgagctaatggaagcattgctc

SEQ ID NO: 488352 - DNA, 75 bp, synthetic construct
  source 1..75: mol_type = other DNA
gcacatccacaccaggtaagaacggcgctaaacaattcagttgtgtcacccccgcaacggctttgttgaataaat

SEQ ID NO: 488353 - DNA, 75 bp, synthetic construct
  source 1..75: mol_type = other DNA
ctaataatggtccaggatttgctaacgcatcaacggcaacagcaaaagcagcggcggtcgccgttgaggtctgga

SEQ ID NO: 488354 - DNA, 75 bp, synthetic construct
  source 1..75: mol_type = other DNA
aaaagcactcgtaaaattaactaaacgcgcaacttgtgaaggagcagccaacgatgggcctggttttgcaaacgg

SEQ ID NO: 488355 - DNA, 75 bp, synthetic construct
  source 1..75: mol_type = other DNA
tcaagctgtgactatctgaaagatcgcgccacaaaatcaagatactttagtgaacgacctgacttgttagaaaaa

SEQ ID NO: 488356 - DNA, 75 bp, synthetic construct
  source 1..75: mol_type = other DNA
cactcgaccactcatcacttgaagccgcacagcgcgacgtgatgcagttaaaagacagcgtcgatattgtcgaag

SEQ ID NO: 488357 - DNA, 75 bp, synthetic construct
  source 1..75: mol_type = other DNA
ggcgctggcaggcgcagcaaatccggcgcaagtggctggggatttccatgcgcaaatcgactccatctggggagg

SEQ ID NO: 488358 - DNA, 75 bp, synthetic construct
  source 1..75: mol_type = other DNA
gaaaggcaatacctatctgacccccgcgcagcaggtgcagcagcttaccgggccggtaaacaaagcgattgttga

SEQ ID NO: 488359 - DNA, 75 bp, synthetic construct
  source 1..75: mol_type = other DNA
actacagcctactggcggcgctgaagcattggggcattaagcccggacaagtggagattgtgaatctgcaaccgc

SEQ ID NO: 488360 - DNA, 75 bp, synthetic construct
  source 1..75: mol_type = other DNA
ttcttgccgcactggcattcatcgcttttcaggcacaggcggtgaacgtcaccgtggcctatcaaacctcagccg

SEQ ID NO: 488361 - DNA, 75 bp, synthetic construct
  source 1..75: mol_type = other DNA
acgatgggcctgggtttgcaaacggctccgctgcggctgataaagcaagcgctgtggcggttgaagtctggaata

SEQ ID NO: 488362 - DNA, 75 bp, synthetic construct
  source 1..75: mol_type = other DNA
gtcgctcaggaagtgaatatctccactgcaacaggaaatacgtcggtatatcatcctatgagtgcacgcctggtg

SEQ ID NO: 488363 - DNA, 75 bp, synthetic construct
  source 1..75: mol_type = other DNA
ttgttgcatttggtgacgcttatattcctgaaattgatgccaaaacaaaaattaaaacttttaagttacagttta

SEQ ID NO: 488364 - DNA, 75 bp, synthetic construct
  source 1..75: mol_type = other DNA
aaaacatcattcaagataaagagagaaaattacaactagaaagagataaaattaacttactcaaccaactaagac

SEQ ID NO: 488365 - DNA, 75 bp, synthetic construct
  source 1..75: mol_type = other DNA
agtcgcagcaacttaatgctcgtttcccacatgatgtagttgcagaattagaaagcaaccttgaagatggagaaa

SEQ ID NO: 488366 - DNA, 75 bp, synthetic construct
  source 1..75: mol_type = other DNA
cgaagccgaaaagcgccgcgcattgtgctggtgggcggactacgttatgcagacagaagcgaaggttatcccgtt

SEQ ID NO: 488367 - DNA, 75 bp, synthetic construct
  source 1..75: mol_type = other DNA
aagcgggtattcatgcggggattaaaacaatgggtaagttgaaccagggaaaaatcgacgccatcaggcgcggca

SEQ ID NO: 488368 - DNA, 75 bp, synthetic construct
  source 1..75: mol_type = other DNA
cccgaaatacaaccgcgtagccggtgcgcctgctcaggctgctggtaacaacgatctcgataatgaactggacta

SEQ ID NO: 488369 - DNA, 75 bp, synthetic construct
  source 1..75: mol_type = other DNA
aacatgatgcgtgctggctacctgatgccgttcttctacctcggcttcgtaaccgcagcattcaccaacttttaa

SEQ ID NO: 488370 - DNA, 75 bp, synthetic construct
  source 1..75: mol_type = other DNA
tgaccatcatcgttcgtactattaccgttgctttccagcacgctgcggataaggctgctgataacggcaacctga

SEQ ID NO: 488371 - DNA, 75 bp, synthetic construct
  source 1..75: mol_type = other DNA
tggtgctgggttactgtttgcaggaattagtggtttttgtggaatggcaaggttgttagataagatgccgtggaa

SEQ ID NO: 488372 - DNA, 75 bp, synthetic construct
  source 1..75: mol_type = other DNA
gcttacccgccgcttttatcagctcagttgcttgttgggggataagcgcatgggtgttgattatctgttggatga

SEQ ID NO: 488373 - DNA, 75 bp, synthetic construct
  source 1..75: mol_type = other DNA
tgtccatcaaaaatgatgaaggtaaagtcggcaaggttgaactttatgatctttctggaacactaatttttgaaa

SEQ ID NO: 488374 - DNA, 75 bp, synthetic construct
  source 1..75: mol_type = other DNA
ggtatctggtgatccacagcgacaacctgcgaagtatgacgctggataaattgatggtaatggggaaaaagtcgg

SEQ ID NO: 488375 - DNA, 75 bp, synthetic construct
  source 1..75: mol_type = other DNA
cttgtaccgctacattagtaaatgactctgatcaggacatttctgttgttgactttggcgatgtatatatttctg

SEQ ID NO: 488376 - DNA, 75 bp, synthetic construct
  source 1..75: mol_type = other DNA
tccgatgagtgctcgactggtcgtcgaaaaaaataaaaccgtaagcaatgtcactgcgggtaaattttctgcacc

SEQ ID NO: 488377 - DNA, 75 bp, synthetic construct
  source 1..75: mol_type = other DNA
atggcaatttcatcgcgtaacacacttcttgccgcactggtattcatcgcttttcaggtgcaggcagtgaacgtc

SEQ ID NO: 488378 - DNA, 75 bp, synthetic construct
  source 1..75: mol_type = other DNA
gtatccgaacggtgatggctgtgtcactataagctcaccagaaataaataccctgctgccatttgcctggctctg

SEQ ID NO: 488379 - DNA, 75 bp, synthetic construct
  source 1..75: mol_type = other DNA
cagacactacgtcagctggggcttcctgtcctgctgatagcccatcgcccggaaaccatagcctctgcagaccgg

SEQ ID NO: 488380 - DNA, 75 bp, synthetic construct
  source 1..75: mol_type = other DNA
tcggtaaccctgccgttgcgctgtttattgccattgttattgcgattttcacactgggccgacgtaatggacgca

SEQ ID NO: 488381 - DNA, 75 bp, synthetic construct
  source 1..75: mol_type = other DNA
ggaatcggcatgcgtttcagccgcggcggcgaaacggtaaatatcgtctatcccgacgtcttttcgtcccgggta

SEQ ID NO: 488382 - DNA, 75 bp, synthetic construct
  source 1..75: mol_type = other DNA
taaagtctattcaactgcaattcctggaattggtttacgtttctcacgtaaaggggagatcagtatgatctaccc

SEQ ID NO: 488383 - DNA, 75 bp, synthetic construct
  source 1..75: mol_type = other DNA
caccaggcatacttgttagctgtgatagcaataataactttgcctgtcagaccacaatgactgaagatgttattc

SEQ ID NO: 488384 - DNA, 75 bp, synthetic construct
  source 1..75: mol_type = other DNA
ggattttcgccggagttgcaaggtgtctatagcgaaaccgatgcggatggcatgaaacgattgtacggttatgtg

SEQ ID NO: 488385 - DNA, 75 bp, synthetic construct
  source 1..75: mol_type = other DNA
ggtagccagacggtgatgcaatcccaggtcatgaaaaatgtccgcatgatctcgccgcaggaaacagaagtggca

SEQ ID NO: 488386 - DNA, 75 bp, synthetic construct
  source 1..75: mol_type = other DNA
acaactcaataggttacacattccgttattacgccacgcagatgaacgctgataaaaatataaaattgctagcga

SEQ ID NO: 488387 - DNA, 75 bp, synthetic construct
  source 1..75: mol_type = other DNA
gcgggctggcaatgatcctcggtttcggggccatgttaggcaagctgatttctgatacgggtgcggcacaacgta

SEQ ID NO: 488388 - DNA, 75 bp, synthetic construct
  source 1..75: mol_type = other DNA
aaccccgacgccgttccggcacttctccggcaaagataaaggctgtatcagctcatactgaccaaaaggataatg

SEQ ID NO: 488389 - DNA, 75 bp, synthetic construct
  source 1..75: mol_type = other DNA
aatggaagcgacgcggtatctcagtgctttggtgtggcaaaacactggctgaattaaatgctgcaagtcaggtga

SEQ ID NO: 488390 - DNA, 75 bp, synthetic construct
  source 1..75: mol_type = other DNA
ataagaaatacaccgtcggccgcttgaataatcaggagacccgctacatcaccataccgctgcacgcgcgttttt

SEQ ID NO: 488391 - DNA, 75 bp, synthetic construct
  source 1..75: mol_type = other DNA
ccgcatttatacctctggcctgcgcggtccactggcggaagaaatctcccgtggtctgctggcggaaccggtgca

SEQ ID NO: 488392 - DNA, 75 bp, synthetic construct
  source 1..75: mol_type = other DNA
agtgattgccatgcgccgctggtagaacacattcgccagggcgtggttacccgcatttatacctctggcctgcgc

SEQ ID NO: 488393 - DNA, 75 bp, synthetic construct
  source 1..75: mol_type = other DNA
gtggtaatgctcaccgaagagctgctgccttacccgcacaatcctgccagcatcaaacaggatcaggttgatctg

SEQ ID NO: 488394 - DNA, 75 bp, synthetic construct
  source 1..75: mol_type = other DNA
gtacagagctttgacagccacgccgcacaatcactggcccgtaacccgaatcacatcgaaatcagcgccaaccag

SEQ ID NO: 488395 - DNA, 75 bp, synthetic construct
  source 1..75: mol_type = other DNA
gccaacggctacaccggtaaagcctgctgcggctccctcggctatgcaatggttgatgccgacaacgcaaaacag

SEQ ID NO: 488396 - DNA, 75 bp, synthetic construct
  source 1..75: mol_type = other DNA
gtggtctgctggcggaaccggtgcaaatccactctcacggcggacgtgtgcatctggtacagagcggcgaactga

SEQ ID NO: 488397 - DNA, 75 bp, synthetic construct
  source 1..75: mol_type = other DNA
gcgcagaaaagccgcgttgaacgttatttcccgtgccggaatcttgccgcggcgccggaggacaattttgtcctt

SEQ ID NO: 488398 - DNA, 75 bp, synthetic construct
  source 1..75: mol_type = other DNA
gtcgggtcggtggtgtatgaacaaagctggaccctgaaccagggtgcaaccatctattactgtaccggctggaac

SEQ ID NO: 488399 - DNA, 75 bp, synthetic construct
  source 1..75: mol_type = other DNA
cacacatgaaaatctgtgttgctgccgccaaaatcatcctcgctgcttccggcgtggctcgccgttccaaatacg

SEQ ID NO: 488400 - DNA, 75 bp, synthetic construct
  source 1..75: mol_type = other DNA
ataatattgactggtttatatgcctgtgcctctttcttgtggttatctgtgttgttaacgcactggctatgtttg

SEQ ID NO: 488401 - DNA, 75 bp, synthetic construct
  source 1..75: mol_type = other DNA
gtgcaactctgtctgtcgcctttacctcctctgcggtccttgcatctgaaaacgggaaaaaccgatcccgggcaa

SEQ ID NO: 488402 - DNA, 75 bp, synthetic construct
  source 1..75: mol_type = other DNA
gcacagaaaagccgggttgagcgctattttccctgtcgtaatctcgcagcagagccgactgaacattttcacctg

SEQ ID NO: 488403 - DNA, 75 bp, synthetic construct
  source 1..75: mol_type = other DNA
acgaagaaaaacatcattgtccagttcgaagggggcgtcccggccaaagccgaaacgacagagctgatttttagt

SEQ ID NO: 488404 - DNA, 75 bp, synthetic construct
  source 1..75: mol_type = other DNA
gcgccgctctggtgtgcgctgctaaaaacgacgttcgttattacctgaacggtcttcacatcacgccgaaacata

SEQ ID NO: 488405 - DNA, 75 bp, synthetic construct
  source 1..75: mol_type = other DNA
agttgagcagaacggcgatatctacagctgcgatcactatgtggatgcggagcatcggctgggcaatctgctaca

SEQ ID NO: 488406 - DNA, 75 bp, synthetic construct
  source 1..75: mol_type = other DNA
gaggagagtgaggcactggagccagagtcacgctttatcgaaatcccggtggtttatggtggcgcaggcgggccg

SEQ ID NO: 488407 - DNA, 75 bp, synthetic construct
  source 1..75: mol_type = other DNA
taggtgaaacggcggtagtgctggaactggaaccgccggtgacgctggctagccagaaacggatctggcgactgg

SEQ ID NO: 488408 - DNA, 75 bp, synthetic construct
  source 1..75: mol_type = other DNA
ctcagctatccggaaaagatgtttggtcgcgagcggaagtttattcccatccagttacgaccttccggtgaggct

SEQ ID NO: 488409 - DNA, 75 bp, synthetic construct
  source 1..75: mol_type = other DNA
cagattgaagggctttctgcctggagtgagactttaggtgttccttttgttctcctctcttcagataaaggtaat

SEQ ID NO: 488410 - DNA, 75 bp, synthetic construct
  source 1..75: mol_type = other DNA
tcagcacgttggggagcgaaatcagagccgggagatgattatcgtgagcctgaaaaaccacgtttgttgaaacgt

SEQ ID NO: 488411 - DNA, 75 bp, synthetic construct
  source 1..75: mol_type = other DNA
ccgccatattttgcagattgttcgcgacaatgaagcggctgaatatctggagttgaatgtcggtgaaaactggcg

SEQ ID NO: 488412 - DNA, 75 bp, synthetic construct
  source 1..75: mol_type = other DNA
gcggcgctggactgtctgaagcgtcatcgtgtggacgtcaatatcctgacggtggtgaacaatgtgacggcacaa

SEQ ID NO: 488413 - DNA, 75 bp, synthetic construct
  source 1..75: mol_type = other DNA
ttcagccatatggatccgtatatgacctatatggcgcagcagattcgtatgcagcagtctccggctggagtgatg

SEQ ID NO: 488414 - DNA, 75 bp, synthetic construct
  source 1..75: mol_type = other DNA
agcagaaagcgcagctcccagatgattgccatcgttgtccgtggcgctttgcctgccagggcggttgtccgaagc

SEQ ID NO: 488415 - DNA, 75 bp, synthetic construct
  source 1..75: mol_type = other DNA
gatgctgatgaatatcttcgtgaacatattcctgaagcagatctggctccattatccgtgctggaacagtcaggt

SEQ ID NO: 488416 - DNA, 75 bp, synthetic construct
  source 1..75: mol_type = other DNA
ctgatgagaggcagtttcccggcctgattaaatgctgccgccacttcgttgccgcgcatgagcagcggctgtgct

SEQ ID NO: 488417 - DNA, 75 bp, synthetic construct
  source 1..75: mol_type = other DNA
agcaactccctgatgagaggcagtttcccggcctgattaaatgctgccgccacttcgttgccgcgcatgagcagc

SEQ ID NO: 488418 - DNA, 75 bp, synthetic construct
  source 1..75: mol_type = other DNA
ctggataaagatggacttgataaagaggctaaagcgcgtaaagaacaaatggaaaatattgaaaaagagcgggcg

SEQ ID NO: 488419 - DNA, 75 bp, synthetic construct
  source 1..75: mol_type = other DNA
ttcgtcaatcggctgggtgaagcgatgcaggcggttcaatttggaaccccgctgaacgcaacgacattgcgatgg

SEQ ID NO: 488420 - DNA, 75 bp, synthetic construct
  source 1..75: mol_type = other DNA
ggctaaagcgcgtaaagaacaaatggaaaatattgaaaaagagcgggcgaacaagcagaaagggaatggcacact

SEQ ID NO: 488421 - DNA, 75 bp, synthetic construct
  source 1..75: mol_type = other DNA
gaacaaatggaaaatatcgaaaaagagcgggtgaacaagcagaaaggcaatggcacacttgatgaaagtaatcag

SEQ ID NO: 488422 - DNA, 75 bp, synthetic construct
  source 1..75: mol_type = other DNA
gccaaattacagcaagccgaacagcgcgtacaaattttgctgtctgacaacgaagacgcctctccaacacctttt

SEQ ID NO: 488423 - DNA, 75 bp, synthetic construct
  source 1..75: mol_type = other DNA
ttcaatatgccaacacttacagttggcgtgatgtaagtgaagattatgtaaaagaatcatgcaaaaagcacatat

SEQ ID NO: 488424 - DNA, 75 bp, synthetic construct
  source 1..75: mol_type = other DNA
gattgatggctggaaaaaagcaggattgccagttgcggtaaataaatctcaacccttgccgttaatgcgccaggt

SEQ ID NO: 488425 - DNA, 75 bp, synthetic construct
  source 1..75: mol_type = other DNA
cgcacggacgagggttttgacgttgagtgcggctttgccgcaccttggactcgtggcaataactgtccccctgac

SEQ ID NO: 488426 - DNA, 75 bp, synthetic construct
  source 1..75: mol_type = other DNA
ccattcagtactggcactcaacgaatgtggagcgcgaatatttcgctacagacaatggtcgtctggtcaggctgg

SEQ ID NO: 488427 - DNA, 75 bp, synthetic construct
  source 1..75: mol_type = other DNA
tagtatcttcatttattatttcagggtgtgactctgatgggataagcaaagtaaaatcttccatagattattcca

SEQ ID NO: 488428 - DNA, 75 bp, synthetic construct
  source 1..75: mol_type = other DNA
acgggattggcatcggtgaaccgaaagaacccgaaggccattatggtctgaatatcatgcgcgaacgcgcggaaa

SEQ ID NO: 488429 - DNA, 75 bp, synthetic construct
  source 1..75: mol_type = other DNA
tatggaagtgttcactgcgacaggcaaaccgacggtagtggtggattacgcgcatacgccagatgcactggaaaa

SEQ ID NO: 488430 - DNA, 75 bp, synthetic construct
  source 1..75: mol_type = other DNA
tgtgcgggcaagctgtggtgcgtctttggctgtggtggcgatcgtgataaaggcaaacgtccactgatgggcgca

SEQ ID NO: 488431 - DNA, 75 bp, synthetic construct
  source 1..75: mol_type = other DNA
cgggcgatctctttgtagctgtagtaggtcatcaggcggacgggcgtcgatatatcccgcaggcgatagcgcaag

SEQ ID NO: 488432 - DNA, 75 bp, synthetic construct
  source 1..75: mol_type = other DNA
cgcacagcgcgacgtgatgctgttaaaagacagcgtcgatatcgtcgaagcgggcaccattctctgtttaaacga

SEQ ID NO: 488433 - DNA, 75 bp, synthetic construct
  source 1..75: mol_type = other DNA
ttcttgctccgtgggtgccagacgcaccttcgcgagcactgcgagagatgacactcgacagccgtgtggctgcgt

SEQ ID NO: 488434 - DNA, 75 bp, synthetic construct
  source 1..75: mol_type = other DNA
ccatgaggattatcagattgttggcaaccagcgtctggactactccgatcgcgtcacggtagcgcgtctactggg

SEQ ID NO: 488435 - DNA, 75 bp, synthetic construct
  source 1..75: mol_type = other DNA
taacctccagcctgattgccgtgcgtgagcataaagccggagagcctgtcggttatggtggaacctgggtaagcg

SEQ ID NO: 488436 - DNA, 75 bp, synthetic construct
  source 1..75: mol_type = other DNA
ccgcagtcgcattttgactgggcgcgtccggggatcattctttacggtgtctcgccgctggaagatggcacgaca

SEQ ID NO: 488437 - DNA, 75 bp, synthetic construct
  source 1..75: mol_type = other DNA
ccagagatctgccgacgatttctgcgcaacattttcataccgccgtgcataacgaagaacagctggctgcgctgg

SEQ ID NO: 488438 - DNA, 75 bp, synthetic construct
  source 1..75: mol_type = other DNA
gtggtgaaaccgttgggcaagaactggcgggtaacccaaaggtcgcaatggtcagtatgacaggcagcgtctctg

SEQ ID NO: 488439 - DNA, 75 bp, synthetic construct
  source 1..75: mol_type = other DNA
atgatatatttattatttttttttgcactgtttatgatctgtacgtttttaacacacaggcgacaggcattatat

SEQ ID NO: 488440 - DNA, 75 bp, synthetic construct
  source 1..75: mol_type = other DNA
tcgctgaaatgacaaaagtgagcgcttacgaacttatcacgcgcctgacttcaagggtcgcgatgaaatacgtgg

SEQ ID NO: 488441 - DNA, 75 bp, synthetic construct
  source 1..75: mol_type = other DNA
cactcgaccactcatcacttgaagccgcacagcgcgacgtgacgcagttaaaagacagcgtcgatatcgtcgaag

SEQ ID NO: 488442 - DNA, 75 bp, synthetic construct
  source 1..75: mol_type = other DNA
catgcttattcaaccacttattggcgcgctgtcggataagattggtcgccgtacctcaatgttatgtttcggttc

SEQ ID NO: 488443 - DNA, 75 bp, synthetic construct
  source 1..75: mol_type = other DNA
aacaactcacgagcaattgtcaataacactgctttgctgattcgtcagaatgttggatcgctagaacacttcgga

SEQ ID NO: 488444 - DNA, 75 bp, synthetic construct
  source 1..75: mol_type = other DNA
cacagcttaacccgcttattgggcgaaaaacgaggctctggcaaggtacagcgcattctgaaagggttatgtgag

SEQ ID NO: 488445 - DNA, 75 bp, synthetic construct
  source 1..75: mol_type = other DNA
gtactttcttacttacgtatccagttgacgttactgaagcgttcgataccggaagataacgccaccgcacaaagt

SEQ ID NO: 488446 - DNA, 75 bp, synthetic construct
  source 1..75: mol_type = other DNA
tacaatcaaggcttgatttatgttcagcaacgttgtggtctttaataaaccaaaatcataaacctgacaaaataa

SEQ ID NO: 488447 - DNA, 75 bp, synthetic construct
  source 1..75: mol_type = other DNA
atgtcttaaacgcggattaccgcttccgagctgggcacaggctgaccagtttgcgagccagaccattaccgatcc

SEQ ID NO: 488448 - DNA, 75 bp, synthetic construct
  source 1..75: mol_type = other DNA
gcctttgccctatacccgcttgtacgaaggtttagcgagcgggctgaaagctcagtttgatggcattccttttta

SEQ ID NO: 488449 - DNA, 75 bp, synthetic construct
  source 1..75: mol_type = other DNA
tggcgagcaccagttgatttgccgtaaaggcgagtccgcaaacgtgaagcgcgtgggctggataaccgttcggcg

SEQ ID NO: 488450 - DNA, 75 bp, synthetic construct
  source 1..75: mol_type = other DNA
gacgctggacgacgcccgcgactggcatcgtattggcgtgcggcaggccatttatcatcgcggtcgtgacgcgca

SEQ ID NO: 488451 - DNA, 75 bp, synthetic construct
  source 1..75: mol_type = other DNA
aacgatctgcgatttttacaggctactgaagccgtgatactaacgcgtgccgatgattacccaatgcaacaactg

SEQ ID NO: 488452 - DNA, 75 bp, synthetic construct
  source 1..75: mol_type = other DNA
gtgtctatgacatggcggtggtttctcgcctggcggcggaaagttatctcacgcaaaaaggcttatgcctcgctc

SEQ ID NO: 488453 - DNA, 75 bp, synthetic construct
  source 1..75: mol_type = other DNA
gacgatccgcgatttttacaggcaactgaagccgtggttttgacgcgagccgatgattacccgatgcaacaattg

SEQ ID NO: 488454 - DNA, 75 bp, synthetic construct
  source 1..75: mol_type = other DNA
gcttactatgctgccattcgtgatgcgttgaatggcgatggagaaaatccggttccggcaagtcaggcaatccag

SEQ ID NO: 488455 - DNA, 75 bp, synthetic construct
  source 1..75: mol_type = other DNA
acaataaacatcatgaatataatattgaaacttcattagattttagttctcctttgccagagccggagcgagagc

SEQ ID NO: 488456 - DNA, 75 bp, synthetic construct
  source 1..75: mol_type = other DNA
tttgccaccccagccgccgaccatgccagattgagagagtacgggaaatgcctcgataacgatcttgatcgcttc

SEQ ID NO: 488457 - DNA, 75 bp, synthetic construct
  source 1..75: mol_type = other DNA
ctaaaagacaagcgcaaagcaaccaaatatcttaatgttttctttttggttttcctgatgagtgcgatagttttt

SEQ ID NO: 488458 - DNA, 75 bp, synthetic construct
  source 1..75: mol_type = other DNA
cggtactccggtgttggttaacgatgaagagatggcgcgctttgcctggcaggtagcgtgtaaaacgtttggtga

SEQ ID NO: 488459 - DNA, 75 bp, synthetic construct
  source 1..75: mol_type = other DNA
actataaacaacatgaatataatattgaaacttcattagattttagttctcctttgccagagccggagcgagagc

SEQ ID NO: 488460 - DNA, 75 bp, synthetic construct
  source 1..75: mol_type = other DNA
acaatatacaacatgaatataatattgaaacttcattagattttagttctcctttgccagagccggagcgagagc

SEQ ID NO: 488461 - DNA, 75 bp, synthetic construct
  source 1..75: mol_type = other DNA
tgccggacgagctgcatatccggctttcaaaagcaaacggcacaaacaggtggctgagttcactgccagcgcgtt

SEQ ID NO: 488462 - DNA, 75 bp, synthetic construct
  source 1..75: mol_type = other DNA
acgccagcgatgccgatttgctggtgcagatagctcaggggtttgatgttgtgccagagatggtgatgaaattga

SEQ ID NO: 488463 - DNA, 75 bp, synthetic construct
  source 1..75: mol_type = other DNA
aggtgagctatcagtacgctaaagacggtgaagatcgcagtgcagagcgtaagcatgtgcctggcccctactggc

SEQ ID NO: 488464 - DNA, 75 bp, synthetic construct
  source 1..75: mol_type = other DNA
ggtaaagtacaccctgtgtcatcttcaagcatcaaaccggtatccagagccgggttatatctgatgatgccagac

SEQ ID NO: 488465 - DNA, 75 bp, synthetic construct
  source 1..75: mol_type = other DNA
attagatataataagccagcaatttattttggtaaaattcaatctaatatacggctggagataaattcgaataga

SEQ ID NO: 488466 - DNA, 75 bp, synthetic construct
  source 1..75: mol_type = other DNA
aactacagcatagaaaaagaacagctaattagagatgaaattaacaaagaacatttgacagctcatcaaaataga

SEQ ID NO: 488467 - DNA, 75 bp, synthetic construct
  source 1..75: mol_type = other DNA
tggtgcataacccaggttacgacttcaacgatgcaagtctggttccggcaagcagctactggggcgcactggtgg

SEQ ID NO: 488468 - DNA, 75 bp, synthetic construct
  source 1..75: mol_type = other DNA
cagtttcgagtggaattttgggacagaacgccgctgaaagaacagcagacaatttttggtcgcgataagcaaacc

SEQ ID NO: 488469 - DNA, 75 bp, synthetic construct
  source 1..75: mol_type = other DNA
atgcagtatgaagatgaaaacggcgtgaatgaaccgtcacgccgacgtttactgaaagggattggtgcgttggcg

SEQ ID NO: 488470 - DNA, 75 bp, synthetic construct
  source 1..75: mol_type = other DNA
ttgccagtcattaaatatagcagatgatcgttccgtcagaacaatgacgcttatcttactgaaaaaaaaacataa

SEQ ID NO: 488471 - DNA, 75 bp, synthetic construct
  source 1..75: mol_type = other DNA
ggtcggcaagtttttcttccagcctggggcgctgatggcgtcaatggatcagttccatattacggttcgtggttg

SEQ ID NO: 488472 - DNA, 75 bp, synthetic construct
  source 1..75: mol_type = other DNA
ggggacgctttcaccggatgcacgcaatgagaagcagccgttttatggtgagcatcaggcagggatcctgacgcc

SEQ ID NO: 488473 - DNA, 75 bp, synthetic construct
  source 1..75: mol_type = other DNA
cttttcgttgcaactcagacttttgctgacttcgcagctcgactgggtagcaaagacaaagcgctccaagtgttg

SEQ ID NO: 488474 - DNA, 75 bp, synthetic construct
  source 1..75: mol_type = other DNA
cgttaatgtatggaactgcgaagaggtttgaagcatggcaaaactcatttatttttaactggtatactgatagcg

SEQ ID NO: 488475 - DNA, 75 bp, synthetic construct
  source 1..75: mol_type = other DNA
gcgctggacagccatatccggctggcgaatccgcgcacgccagagagtgagtccagcctgatgttgcgccgtggc

SEQ ID NO: 488476 - DNA, 75 bp, synthetic construct
  source 1..75: mol_type = other DNA
tcgcttgttgactcagcgttttgcttttctgactcagggcggaacggcaccagaaacgccaaatccgcgcctgcc

SEQ ID NO: 488477 - DNA, 75 bp, synthetic construct
  source 1..75: mol_type = other DNA
ggagtacgtcaaacccatcggcggcggttatttctttgcgttaccgggagtgaaggatactgacgattatctggg

SEQ ID NO: 488478 - DNA, 75 bp, synthetic construct
  source 1..75: mol_type = other DNA
agggtgaatgcccattggtgattgatgaaagcacaccttcctgtggtaattctcgctttggttgctggacctgta

SEQ ID NO: 488479 - DNA, 75 bp, synthetic construct
  source 1..75: mol_type = other DNA
aacgagcagacagcaaccaaagcaggtattgcagccagcgacggtgatgtttcctacaacgtaggtgtgaacttc

SEQ ID NO: 488480 - DNA, 75 bp, synthetic construct
  source 1..75: mol_type = other DNA
atggttctgctatttatggtaccgctataggtaatcacgcaaaagtggataaaaatgcaactgaaggtgttgcat

SEQ ID NO: 488481 - DNA, 75 bp, synthetic construct
  source 1..75: mol_type = other DNA
gtgaaaggtagagtggaacaactggccagggatacgaatgtcagaatcgggatggaagctaaaaagtcacgggat

SEQ ID NO: 488482 - DNA, 75 bp, synthetic construct
  source 1..75: mol_type = other DNA
gcaggagaaactgcatcagccgattatcatcaccgaatacggcgtggatacgttagccggtctgcactcgatgta

SEQ ID NO: 488483 - DNA, 75 bp, synthetic construct
  source 1..75: mol_type = other DNA
tatcccgccgggaatggtgattaccgatgaaaacggcaagaaaaagcagtcttacttccatgatttctttaacta

SEQ ID NO: 488484 - DNA, 75 bp, synthetic construct
  source 1..75: mol_type = other DNA
gatatgtatcaccgcgtctttgatcgcgtcagcgccgtcgtcggtgaacaggtatggaatttcgccgattttgcg

SEQ ID NO: 488485 - DNA, 75 bp, synthetic construct
  source 1..75: mol_type = other DNA
tgcaggatgattcgccgaagagcggacaggctaaatatggcagcacctatgaagttgtaaagacaggcggtaatg

SEQ ID NO: 488486 - DNA, 75 bp, synthetic construct
  source 1..75: mol_type = other DNA
atgtcaaaaaactctacagtatgtataactcggcgttcctggacgacctgaccaaagcaatgggcagaaaatcct

SEQ ID NO: 488487 - DNA, 75 bp, synthetic construct
  source 1..75: mol_type = other DNA
ttgtggagaaagaagccattattaataaccattttgaacgcgtactagggaaggtgcgaataagcggggaaattc

SEQ ID NO: 488488 - DNA, 75 bp, synthetic construct
  source 1..75: mol_type = other DNA
taatctatcaaatactattattaatcctgaagtattaaaacaatcggatttcatcgcatcaggaccacgtccgga

SEQ ID NO: 488489 - DNA, 75 bp, synthetic construct
  source 1..75: mol_type = other DNA
tcacctgtgtacggtagtatatataaggtctattacaatgaatcttctaactggggaacggttcgctatatcaga

SEQ ID NO: 488490 - DNA, 75 bp, synthetic construct
  source 1..75: mol_type = other DNA
ttacgtaaccggatataacggggaacgcaccaaagttgaagcgggcgatgtgtcaaatgtgtcaacgatggttaa

SEQ ID NO: 488491 - DNA, 75 bp, synthetic construct
  source 1..75: mol_type = other DNA
atggtgatgtcagcgttgaactgcgtgatgcggatcaacaggtggttgcaactggacaaggcaccagcgggactt

SEQ ID NO: 488492 - DNA, 75 bp, synthetic construct
  source 1..75: mol_type = other DNA
cttctttactgtcgataacctgaaacaggttttcagtgatgcaattgatagtgcaattgatttcattaagaaccc

SEQ ID NO: 488493 - DNA, 75 bp, synthetic construct
  source 1..75: mol_type = other DNA
atggaaagaaaaaacgccaatattgacgatgtgataaggacggttgaaaccgccagcgcaaaagagctggaagag

SEQ ID NO: 488494 - DNA, 75 bp, synthetic construct
  source 1..75: mol_type = other DNA
gtaaaaaacgacgcaggaaggctataccagaggatataaaggcacaacggaccgaagcagccgaacacgctcgcg

SEQ ID NO: 488495 - DNA, 75 bp, synthetic construct
  source 1..75: mol_type = other DNA
cgcagcagcgaaagtgcttctcgtgctcaggtgatcgcaaaacacaaaattgatgggtctcgacttgcccggcat

SEQ ID NO: 488496 - DNA, 75 bp, synthetic construct
  source 1..75: mol_type = other DNA
ttgcaaattgaggcaggcgcaaagcgtaatggcctgccgatcactcaacatgcggtaacgcctaaaactaatgaa

SEQ ID NO: 488497 - DNA, 75 bp, synthetic construct
  source 1..75: mol_type = other DNA
aggcaaatctcgataagttggctccgtattttgctgaactagagaataaatatggccttcctgaaggtactcttt

SEQ ID NO: 488498 - DNA, 75 bp, synthetic construct
  source 1..75: mol_type = other DNA
gatagcagccactgaatcaaatggtaatccaaatgcagtatcccagttaagatgggttaatgggaaaaagagtgg

SEQ ID NO: 488499 - DNA, 75 bp, synthetic construct
  source 1..75: mol_type = other DNA
aacgccgttatcgatcagtctactggtctggcgtttacccctggtgatagtccgtttgagaaaggcggtctggta

SEQ ID NO: 488500 - DNA, 75 bp, synthetic construct
  source 1..75: mol_type = other DNA
cctgattaccacgatggttacgcagggctatgagtatcgtcgtgatgacgatatggcgttatggagttctgctga

SEQ ID NO: 488501 - DNA, 75 bp, synthetic construct
  source 1..75: mol_type = other DNA
caatgcgccatcagtggaccctattgttgacgcaatgaaacggcttaatttaggggacgtttctcgtgtagttca

SEQ ID NO: 488502 - DNA, 75 bp, synthetic construct
  source 1..75: mol_type = other DNA
aaaactgtcaaaagtagctgaaggcataggtaacccttcagagactcgtgccgtcgatgcgttaggttatgccgt

SEQ ID NO: 488503 - DNA, 75 bp, synthetic construct
  source 1..75: mol_type = other DNA
gggacgtttctcgtgtagttcaggagggcattgctcaacaggaacagcaggccaaatcaactacaccaaagggta

SEQ ID NO: 488504 - DNA, 75 bp, synthetic construct
  source 1..75: mol_type = other DNA
cgtcgacatggtaaaacttcacgaacagcagcagaaacgactgcgtgaaagtgaaatccgccagcagctcattcg

SEQ ID NO: 488505 - DNA, 75 bp, synthetic construct
  source 1..75: mol_type = other DNA
gtgagctggcgtctggtttatgcatcagccgttggaacgtcgcacatcagcgctgacttgtcttgccaggatgcc

SEQ ID NO: 488506 - DNA, 75 bp, synthetic construct
  source 1..75: mol_type = other DNA
cctgcacgtttctgggattgatttcatcggctaacggcacattgattatgcaaattggcgacggcggtgtagtgg

SEQ ID NO: 488507 - DNA, 75 bp, synthetic construct
  source 1..75: mol_type = other DNA
taaaatgctcgaaaccgatcaggcatgggcattctttgaaaaactggaagacagctacttccgacaaaaagaaca

SEQ ID NO: 488508 - DNA, 75 bp, synthetic construct
  source 1..75: mol_type = other DNA
gcatactgcctgtatgccgacacgggagatccccggcgcaattgctaactatttcatgataaccaggcgttttta

SEQ ID NO: 488509 - DNA, 75 bp, synthetic construct
  source 1..75: mol_type = other DNA
ttgctggccgaacaggtacgttttggtgtgctgggtgtttcagagaaaaccctgtgggaccgtgaaacccgccag

SEQ ID NO: 488510 - DNA, 75 bp, synthetic construct
  source 1..75: mol_type = other DNA
gtggctgaaagatacatctcacaaagacactggagtcagcttcctcccgaagagcaaatccgtgtctgggaagac

SEQ ID NO: 488511 - DNA, 75 bp, synthetic construct
  source 1..75: mol_type = other DNA
ggaaggtgtactgcgtgaggatgaagatatctccgtacatgcggccagaaaacgctggtatctgcagcgcagcca

SEQ ID NO: 488512 - DNA, 75 bp, synthetic construct
  source 1..75: mol_type = other DNA
aacgctggtatctgcagcgcagtcaggatgcgctgaaacaccgtcgtgcgaaagcagcagccagtaagcgcgcca

SEQ ID NO: 488513 - DNA, 75 bp, synthetic construct
  source 1..75: mol_type = other DNA
tggtggtagatttggggcacggtttgcaactgccgctcacgccgatggtgggggaatatgccaatatgacgcact

SEQ ID NO: 488514 - DNA, 75 bp, synthetic construct
  source 1..75: mol_type = other DNA
aagcaatttttgttcagtgaggcagtaaatgaacgcacgaacgatgataaaacgctggcgctggctatttggtta

SEQ ID NO: 488515 - DNA, 75 bp, synthetic construct
  source 1..75: mol_type = other DNA
aaagaattagcggttcgcgattttgcctgcacatttctggggctgatttcatcgcctgacggcacattgattatg

SEQ ID NO: 488516 - DNA, 75 bp, synthetic construct
  source 1..75: mol_type = other DNA
acggttgacgcctcaattaacgggtaaaggccagcagtggttgacgcgtaaactgctcgatgctggcttgttaaa

SEQ ID NO: 488517 - DNA, 75 bp, synthetic construct
  source 1..75: mol_type = other DNA
ccaaccgaaaccggagcatggaaagacgctgttgactgggtgctcagagaagcttgccagactgtaaacattggt

SEQ ID NO: 488518 - DNA, 75 bp, synthetic construct
  source 1..75: mol_type = other DNA
tttcacggtgaaagaagtggtgctggatgatgaagatggctaccagatacggctgacgccccaattaacgggtaa

SEQ ID NO: 488519 - DNA, 75 bp, synthetic construct
  source 1..75: mol_type = other DNA
cgattttgccgaccgggtatcagtggctaaggggatcctgattgggaattttgcaaaggttgttggacttaagca

SEQ ID NO: 488520 - DNA, 75 bp, synthetic construct
  source 1..75: mol_type = other DNA
agacagcaaggggaaggttattccggaactggaagtgacggtctcccgcctttcccgtttgctggccgaacaggt

SEQ ID NO: 488521 - DNA, 75 bp, synthetic construct
  source 1..75: mol_type = other DNA
tccgccagcagctcatccgggaaggtgtactgcgtgaggacgaagatatttccgtgcatgcggccagaaaacgct

SEQ ID NO: 488522 - DNA, 75 bp, synthetic construct
  source 1..75: mol_type = other DNA
gatcaccgactccgcaaaaatcatcaacaacgctcaagtagcttatctgggtctcgactccctgacagacaacat

SEQ ID NO: 488523 - DNA, 75 bp, synthetic construct
  source 1..75: mol_type = other DNA
ggagctggtggttgttcagaatcagtctgatgaaattcccgttctggaatggcagggagtgcgtgtagtgacaac

SEQ ID NO: 488524 - DNA, 75 bp, synthetic construct
  source 1..75: mol_type = other DNA
ttctactaactggttcaaaattaagagaattgaaggacaaggttactcaaagtaacttagtcgcaccgcgagcaa

SEQ ID NO: 488525 - DNA, 75 bp, synthetic construct
  source 1..75: mol_type = other DNA
cgtttttgtgaaggtaagcatttctataaagttattggagatgatttgaacaatttgcgggtgactttaagtaac

SEQ ID NO: 488526 - DNA, 75 bp, synthetic construct
  source 1..75: mol_type = other DNA
gcaataccccggaagtgaagattcgaccggaaaccctgcgcaatgccgctaactggacgccgccgaccgtcgatg

SEQ ID NO: 488527 - DNA, 75 bp, synthetic construct
  source 1..75: mol_type = other DNA
acctacaaacaagccctgcgagtcgccgcgcgcgaatcgaaagcggtccgccgttcgctgatcgacaaactggaa

SEQ ID NO: 488528 - DNA, 75 bp, synthetic construct
  source 1..75: mol_type = other DNA
aacaggctactgatagccgagatcagggattatttgattgaacaaggacgtctacgttacgcaacggtggcagca

SEQ ID NO: 488529 - DNA, 75 bp, synthetic construct
  source 1..75: mol_type = other DNA
tcagtgatgcgggcacacatactgtgggcatgagtgtcactcgcctggctaaagaaatcagcccgaaagacagta

SEQ ID NO: 488530 - DNA, 75 bp, synthetic construct
  source 1..75: mol_type = other DNA
acctctataaagtgctggataaagcccgtgaagaacgcggcgggatctcatttgagagcgaagaagcgaagttca

SEQ ID NO: 488531 - DNA, 75 bp, synthetic construct
  source 1..75: mol_type = other DNA
ttcgctcaacccgcaggtagaccgcctgtgtatggtgtgcgagatgacggtttcgtcgaaaggccgcctgacggg

SEQ ID NO: 488532 - DNA, 75 bp, synthetic construct
  source 1..75: mol_type = other DNA
gcgattgggcgtaatcctgttacgggttatggatcaggcttgatgcaaattgactcgcagcacttcaacgaactg

SEQ ID NO: 488533 - DNA, 75 bp, synthetic construct
  source 1..75: mol_type = other DNA
ccatcggctaaaacgcagaaaatagctgcagcgaccaaagcgaagcgtgcagcgaagaaaaaagtagctgagtga

SEQ ID NO: 488534 - DNA, 75 bp, synthetic construct
  source 1..75: mol_type = other DNA
actcgccgtaccaaagcggtgggtaaaatcgtcgaagtccttggcgataatatgggcaccggcatggcggttgat

SEQ ID NO: 488535 - DNA, 75 bp, synthetic construct
  source 1..75: mol_type = other DNA
tgctgcaaaccatgctgttgcgctcgatgaaacaagcgatttacgatccggaaaaccgtggtcacttcggtctgg

SEQ ID NO: 488536 - DNA, 75 bp, synthetic construct
  source 1..75: mol_type = other DNA
aaaaaaggctatgacctggcgaagacgcgtaaaacggcgattgtctgcggtttgatgatgtcggcattaggcacg

SEQ ID NO: 488537 - DNA, 75 bp, synthetic construct
  source 1..75: mol_type = other DNA
agcaccggacaacctgggggatgattttaggtttctctggggttaactataccggttggctctacatcgcgtggt

SEQ ID NO: 488538 - DNA, 75 bp, synthetic construct
  source 1..75: mol_type = other DNA
atgcttaactatcacgacaacacgcgttctatgcagacaatccgcaccaatacagcggtggtcgatagctttcct

SEQ ID NO: 488539 - DNA, 75 bp, synthetic construct
  source 1..75: mol_type = other DNA
cggcggaaaacatttttattagctcttctttccttgcctctaataaatggtcctttagttaagttcacagagact

SEQ ID NO: 488540 - DNA, 75 bp, synthetic construct
  source 1..75: mol_type = other DNA
tgttgaaagccaggcacaggctgaagaggccgtgaaagtggctaaaggagttgagggtgtgacctctgtcagcga

SEQ ID NO: 488541 - DNA, 75 bp, synthetic construct
  source 1..75: mol_type = other DNA
cgttgaaagccaggctcaggccgaagaggcggtgaaagtggcgaaaggtgttgagggcgtgacctctgtcagcga

SEQ ID NO: 488542 - DNA, 75 bp, synthetic construct
  source 1..75: mol_type = other DNA
tgggcgcgcggatgggctttgtggtggtggtcgaactgacccaacgcccgactcgccgtaccaaagcggtgggta

SEQ ID NO: 488543 - DNA, 75 bp, synthetic construct
  source 1..75: mol_type = other DNA
atctggccagtgctggtcagtttcagcgatgccggtacgcatactgtcgggatgtgtgtgtcccgtctggccaga

SEQ ID NO: 488544 - DNA, 75 bp, synthetic construct
  source 1..75: mol_type = other DNA
atgaaagcgcctgtaatgaaggggcaggggtacatgacgttagccgggcatcaagcctttcaacagcgaaagcac

SEQ ID NO: 488545 - DNA, 75 bp, synthetic construct
  source 1..75: mol_type = other DNA
ctacgacaaaaaccggactattgaagagtctgcctacagcctggatgcggtctacaccattcaggacggtcgcgc

SEQ ID NO: 488546 - DNA, 75 bp, synthetic construct
  source 1..75: mol_type = other DNA
gccatctggccggttctggtcagcttcagtgatgcgggcacacacaccgtgggcatgagtgtttcccgtctggcc

SEQ ID NO: 488547 - DNA, 75 bp, synthetic construct
  source 1..75: mol_type = other DNA
ggaaggcgtactgcgtgaggatgaagacatctccgtacatgcggccagaaaacgctggtatctgcagcgcagcca

SEQ ID NO: 488548 - DNA, 75 bp, synthetic construct
  source 1..75: mol_type = other DNA
acgtatgccggtcgcaaatatgctttccgtccggaaaaacaacgcctcctcgatgccatctggccggttctggtc

SEQ ID NO: 488549 - DNA, 75 bp, synthetic construct
  source 1..75: mol_type = other DNA
tcgctggacaacgactactatcgttttgaccaggtgggtcaacgtctgatgggcgaatccagtggtcagacttat

SEQ ID NO: 488550 - DNA, 75 bp, synthetic construct
  source 1..75: mol_type = other DNA
agctgcataacctctataaagtgctggataaagcccgtgaagagcgcggcgggatctcatttgaaagcgaagaag

SEQ ID NO: 488551 - DNA, 75 bp, synthetic construct
  source 1..75: mol_type = other DNA
catccctagccgagaatttatcctcgaacatttaaccaaacgagaaaaaccagccagccgtgatgagctggcagt

SEQ ID NO: 488552 - DNA, 75 bp, synthetic construct
  source 1..75: mol_type = other DNA
gcggtcttcttcggtgcgatgtatgacctgaaaaactggaatcttccaggcttcgccatcggcgcttcctacgtt

SEQ ID NO: 488553 - DNA, 75 bp, synthetic construct
  source 1..75: mol_type = other DNA
aattattgcacgagaaacactttatcgcggctttttttcattagatctttatagatttcgtcatcgtttattcaa

SEQ ID NO: 488554 - DNA, 75 bp, synthetic construct
  source 1..75: mol_type = other DNA
cggtggcagcccgtgatttgcaaattatcgaatatcgcggtcaacgcgttgtgaccactgaacaactggcggcag

SEQ ID NO: 488555 - DNA, 75 bp, synthetic construct
  source 1..75: mol_type = other DNA
tcacaatccaccaaagattatccaacgtcttaccgtaacctgcgagtaaaagtgagtttcggttatggcaatttt

SEQ ID NO: 488556 - DNA, 75 bp, synthetic construct
  source 1..75: mol_type = other DNA
ccctgtatgccatatctggtctgttaggtgctctgctcagtccgataggtcttgtggttactgcactggcgggcg

SEQ ID NO: 488557 - DNA, 75 bp, synthetic construct
  source 1..75: mol_type = other DNA
gcccatttaccggattgaagcaccgacgcagatcatcatccagacacagccaggacaaagtgcgcaggatattgc

SEQ ID NO: 488558 - DNA, 75 bp, synthetic construct
  source 1..75: mol_type = other DNA
tttacgacacgttgcggaagacgcctcaatattatggagctaaaggtgatggtgttaacgatgatacagatgcat

SEQ ID NO: 488559 - DNA, 75 bp, synthetic construct
  source 1..75: mol_type = other DNA
cgattttgggcaggagggtattataattcaagggccaaacgacggcatattgcgaaaagcatggataggtcgggc

SEQ ID NO: 488560 - DNA, 75 bp, synthetic construct
  source 1..75: mol_type = other DNA
gtcgaaaatgaagacgggtcacacgctcccgtgccgcagcccatcgttattaacgctggcggtttccctgttctg

SEQ ID NO: 488561 - DNA, 75 bp, synthetic construct
  source 1..75: mol_type = other DNA
tgtgaagattcaacatttaatcaaaccattgctgccattttatgctgcattgctagtagcgttgatgatgatcac

SEQ ID NO: 488562 - DNA, 75 bp, synthetic construct
  source 1..75: mol_type = other DNA
cactctccaggaaacccggggcggttcacgaacaccacctttaccctgtatgtcaccaagccatttctcggctcg

SEQ ID NO: 488563 - DNA, 75 bp, synthetic construct
  source 1..75: mol_type = other DNA
ttctgttatttacgatgcacttgaaacattccttgatcgaaaactttcatcggtcaccgacggtacgtcgagtaa

SEQ ID NO: 488564 - DNA, 75 bp, synthetic construct
  source 1..75: mol_type = other DNA
gcagagatcggacgtgttgcagcaggtgcggtatccggtttacgtgctgttgctgtgatgtttatgaatcctctg

SEQ ID NO: 488565 - DNA, 75 bp, synthetic construct
  source 1..75: mol_type = other DNA
tccggcgtttcctggttgctggagaagctcggcattgtcagtaaagaggccgcaaaggcaaaactgccggaaagc

SEQ ID NO: 488566 - DNA, 75 bp, synthetic construct
  source 1..75: mol_type = other DNA
gtttttacaggtatttcgcgaatcaattcccagcctgatgcttatttttatcattatcggcggtattattgcggg

SEQ ID NO: 488567 - DNA, 75 bp, synthetic construct
  source 1..75: mol_type = other DNA
tccgccccggtccgttgcaatcagggatggtggataactttatcgaccgtaaacatggtcgcgaagagatctcct

SEQ ID NO: 488568 - DNA, 75 bp, synthetic construct
  source 1..75: mol_type = other DNA
gcggtgtcagtctggcagcggtcgcgaactccgaagtcgatgcactgattaaggtgctgccgcgcatgacggcac

SEQ ID NO: 488569 - DNA, 75 bp, synthetic construct
  source 1..75: mol_type = other DNA
gattgcccaggtgctttctggttataccctcggtggcgcggatatgctgcgtcgagcgatgggtaagaaaaagcc

SEQ ID NO: 488570 - DNA, 75 bp, synthetic construct
  source 1..75: mol_type = other DNA
cggctatcagaatctgacattgctgatctcaaaagcgtatcagcgcgggtatggggctgccgggccaatcatcga

SEQ ID NO: 488571 - DNA, 75 bp, synthetic construct
  source 1..75: mol_type = other DNA
gacatttgcctggtacttatctggcctggtcttcaaatggctgaaagcgaacggcggtgtggctgcaatggataa

SEQ ID NO: 488572 - DNA, 75 bp, synthetic construct
  source 1..75: mol_type = other DNA
ctggtccggcaatgctaccggcagaggtgcttaaacaggctcaacaggaactgcgcgactggaacggtcttggta

SEQ ID NO: 488573 - DNA, 75 bp, synthetic construct
  source 1..75: mol_type = other DNA
ggagtatatcgcagataacttgccgaagacccggctcaagtacgtcatgcggactcaaggccagaactcggatgg

SEQ ID NO: 488574 - DNA, 75 bp, synthetic construct
  source 1..75: mol_type = other DNA
tgtccggggcgtttgaccgtcttgggccacatcgcgcggcgctgatgaactcgctgggcgatgcgttaaaagcgg

SEQ ID NO: 488575 - DNA, 75 bp, synthetic construct
  source 1..75: mol_type = other DNA
cgatttcaccaacctttgcggtctggtgaagttctacggagcgggacatggcgcagggattaagcctatcgtcgg

SEQ ID NO: 488576 - DNA, 75 bp, synthetic construct
  source 1..75: mol_type = other DNA
tgaggccatcatcgaagcccgcaataaaggtggctacttccgcgaactgtttgatctctgcgcccgtaccgacac

SEQ ID NO: 488577 - DNA, 75 bp, synthetic construct
  source 1..75: mol_type = other DNA
ttgacctgctgttcgaacgtttccttaacccggaacgtgtctccatgcctgactttgacgttgacttctgtatgg

SEQ ID NO: 488578 - DNA, 75 bp, synthetic construct
  source 1..75: mol_type = other DNA
tcgctgggcgatgcgttaaaagcggcagatcaacacgcgaaagcagaagccatcggccaggccgatatgtttggc

SEQ ID NO: 488579 - DNA, 75 bp, synthetic construct
  source 1..75: mol_type = other DNA
acaccgttgagatcgccaaacgttgtaacgtgaccgtgcgtcttggtgaatacttcctgccgcagttcccgaccg

SEQ ID NO: 488580 - DNA, 75 bp, synthetic construct
  source 1..75: mol_type = other DNA
gctgtggtaaaaaccgtgacgccagctgcgccgcgtaaaatggccgtggcagatagcgaggagaactgggaaaca

SEQ ID NO: 488581 - DNA, 75 bp, synthetic construct
  source 1..75: mol_type = other DNA
ccgtttgaatcgtgtggtgagtgagttgctggaactggtcaagccaacgcacctggctttgcaggcggtggatct

SEQ ID NO: 488582 - DNA, 75 bp, synthetic construct
  source 1..75: mol_type = other DNA
atctcaacacgctgattaaccactcattacaactggtaagccaggatgcaaacagtagggagatccaattacgct

SEQ ID NO: 488583 - DNA, 75 bp, synthetic construct
  source 1..75: mol_type = other DNA
atgcaacgttctaaagactctttagctaaatggttaagcgcgatcctccccgtggtcattgttgggctgtttgcg

SEQ ID NO: 488584 - DNA, 75 bp, synthetic construct
  source 1..75: mol_type = other DNA
gacttcgaacgtctgatggaaggtgctaaactgctgaaatgttcagaatttggtgatgcgatcatcaagaatatg

SEQ ID NO: 488585 - DNA, 75 bp, synthetic construct
  source 1..75: mol_type = other DNA
atgggttggactgaagcggctgacctgattgttaaaggtatggaaggcgcaatcaatgccaagaccgtaacctat

SEQ ID NO: 488586 - DNA, 75 bp, synthetic construct
  source 1..75: mol_type = other DNA
agccaggagggaaaaggcgcaacgttcaccctctggcttccggtcaatattacgcgtaaggacccacaaggatga

SEQ ID NO: 488587 - DNA, 75 bp, synthetic construct
  source 1..75: mol_type = other DNA
aattcaggtcgcaagtcaggaggggaaaggcgctacgttcaccctctggcttccggtcaatattacgcataagga

SEQ ID NO: 488588 - DNA, 75 bp, synthetic construct
  source 1..75: mol_type = other DNA
aagggctggtggtttactttctctatttcgaatttatcgcactgattgtgaagtactttcagtccggttttcatt

SEQ ID NO: 488589 - DNA, 75 bp, synthetic construct
  source 1..75: mol_type = other DNA
ggcagccgctgagtcagcacggtatatcgtgcatggatcccgaggcagttatgtgaaatatggcctcgatccaca

SEQ ID NO: 488590 - DNA, 75 bp, synthetic construct
  source 1..75: mol_type = other DNA
acggtggtacaattcaggtcgccagccaggaggggaaaggtgcaacattcaccctctggcttccggtgaatatta

SEQ ID NO: 488591 - DNA, 75 bp, synthetic construct
  source 1..75: mol_type = other DNA
accctgattattctctttgctctggcgacggtattgctggcgagcgtgttgtcattcttctggtatcgccgttac

SEQ ID NO: 488592 - DNA, 75 bp, synthetic construct
  source 1..75: mol_type = other DNA
attatgggcgggcaagtgaggctgaccgtcaggcattactggaaaaaggtaatgtgctcattcgcgctctggagt

SEQ ID NO: 488593 - DNA, 75 bp, synthetic construct
  source 1..75: mol_type = other DNA
acttcacctgctccaaaagcatttgaaaggccgtgacttggagttcatttccatagcggagctccagaagtacat

SEQ ID NO: 488594 - DNA, 75 bp, synthetic construct
  source 1..75: mol_type = other DNA
agcccagtttatcgagaggctccttgagcgagagcttacagaacgcggtcttttagatgtaaagacttcacattc

SEQ ID NO: 488595 - DNA, 75 bp, synthetic construct
  source 1..75: mol_type = other DNA
acgacaaaagctggcagtcgctgttaacgcagcttggcgaaattaccgggcatgagaaacaagcggcagagcgga

SEQ ID NO: 488596 - DNA, 75 bp, synthetic construct
  source 1..75: mol_type = other DNA
tgcctgcagtacaaaacaagcaggtttatgcgctgggaaccgagacgttccgtctggattactacagcgccatgc

SEQ ID NO: 488597 - DNA, 75 bp, synthetic construct
  source 1..75: mol_type = other DNA
acagcgatctgtttatgcagatttttgccgacgtgttcaaccttccggcacgacgtaacgccattaacggttgtg

SEQ ID NO: 488598 - DNA, 75 bp, synthetic construct
  source 1..75: mol_type = other DNA
ccactgaaagatatcatgattgagttgtgtaacagagagggcattacgcaagcccagtttgttgagaagctgctt

SEQ ID NO: 488599 - DNA, 75 bp, synthetic construct
  source 1..75: mol_type = other DNA
cttcctctgcgaatgcaaaacgtgcataccggaaaggtaagccaatgtctgccagtgagagacagcttgccgcga

SEQ ID NO: 488600 - DNA, 75 bp, synthetic construct
  source 1..75: mol_type = other DNA
gctgctccgacctttaaacttatggggtacacgacaacaaggacatcagtaaccttaaaagtatcagccggaaat

SEQ ID NO: 488601 - DNA, 75 bp, synthetic construct
  source 1..75: mol_type = other DNA
gtctgatgccgttcagtcagaaccgtcgaatcctgcaccgctggttttatctgtaaattttgaacatatcagtaa

SEQ ID NO: 488602 - DNA, 75 bp, synthetic construct
  source 1..75: mol_type = other DNA
gaagcggcgaaaagggatgtaggcacaggagaaaatcagataccggatatgtcagcctggaaaagaaatccgagt

SEQ ID NO: 488603 - DNA, 75 bp, synthetic construct
  source 1..75: mol_type = other DNA
ttatgcgctgggaaccgagacgttccgactggattactacagcgccatgcaagtgctggaacgacttaaggcgct

SEQ ID NO: 488604 - DNA, 75 bp, synthetic construct
  source 1..75: mol_type = other DNA
ttatgcgctgggaaccgagacgttccgtctggattactacagcgccatgcaagtgctggatagacttaaggcgct

SEQ ID NO: 488605 - DNA, 75 bp, synthetic construct
  source 1..75: mol_type = other DNA
tctgattttaattagcgcgactggcggcgattcagcgctggcgctatacgatcagctttccactatcgcaccaac

SEQ ID NO: 488606 - DNA, 75 bp, synthetic construct
  source 1..75: mol_type = other DNA
gcgcagatagctgcagcgacggggcgactggactcagtcgcccgaatgattgatgaaaccggacgattatctctg

SEQ ID NO: 488607 - DNA, 75 bp, synthetic construct
  source 1..75: mol_type = other DNA
tgccagcagtgctgatgttgagagtaaaaaagcggcgctgaaagcgcaggagcgtgcccggtatccccgggtgga

SEQ ID NO: 488608 - DNA, 75 bp, synthetic construct
  source 1..75: mol_type = other DNA
cgggcgggaatctgaatttgttcaggccgaagcccgcaggctgatggtccggcagcagataaatacccgcacccg

SEQ ID NO: 488609 - DNA, 75 bp, synthetic construct
  source 1..75: mol_type = other DNA
ccacaacattcaacgattacacagccaagattggcgatgctatttcagcctggttcagtgacacaaccaagagtc

SEQ ID NO: 488610 - DNA, 75 bp, synthetic construct
  source 1..75: mol_type = other DNA
gagcagaccgcagcgaaagcgggtattgcagcgagtgatggcgatgtgtcctacaacatgggcgttaacttcgag

SEQ ID NO: 488611 - DNA, 75 bp, synthetic construct
  source 1..75: mol_type = other DNA
acaataaatccggtaaccgaagccgatcttgaaaatcctttttctctgatgacagagtccagattgttaactgat

SEQ ID NO: 488612 - DNA, 75 bp, synthetic construct
  source 1..75: mol_type = other DNA
tggtatgcattttcactaccgaaaatgaaaaccagtaaagaagtcacaacagacgatgagttacgcatctggaaa

SEQ ID NO: 488613 - DNA, 75 bp, synthetic construct
  source 1..75: mol_type = other DNA
tggtatgcgttttcaatgccgaaaatgaaaatcagtaaagaagtcacaacggacgatgagttacgtatctggaaa

SEQ ID NO: 488614 - DNA, 75 bp, synthetic construct
  source 1..75: mol_type = other DNA
agcgcgctgttgttggggacgagtgtgttggtggtggcgctggcaggtatgatgtttgtgactcgcaatatcgac

SEQ ID NO: 488615 - DNA, 75 bp, synthetic construct
  source 1..75: mol_type = other DNA
atgcgctaagggaaaaacaatccattgcggtgcttgaacagagtctctcacggcatgacgcaattcttaatgatc

SEQ ID NO: 488616 - DNA, 75 bp, synthetic construct
  source 1..75: mol_type = other DNA
acccgtcgtggcttgccagccgggctgatgtggagagtaaaaaagcagcactgaaagcgcaagagcttgccagat

SEQ ID NO: 488617 - DNA, 75 bp, synthetic construct
  source 1..75: mol_type = other DNA
tcaggaacaggcttctgccagagttgtggacttttatcgtcttcagtttcgggtggcaagaaaaacactgattga

SEQ ID NO: 488618 - DNA, 75 bp, synthetic construct
  source 1..75: mol_type = other DNA
tactgtcgataacctgaaacaggttttcagtgatgcaattgatagtgcaattgatttcattaagaacccagggaa

SEQ ID NO: 488619 - DNA, 75 bp, synthetic construct
  source 1..75: mol_type = other DNA
agattgtgaagttgaagggactgattctgaggggaaagctacttatggcattcgctatttctgtgcaaaagggta

SEQ ID NO: 488620 - DNA, 75 bp, synthetic construct
  source 1..75: mol_type = other DNA
gcaagcatacgagaaaaaggggagttggagttctataatagtttagatactgaagagaatggaagatattttcat

SEQ ID NO: 488621 - DNA, 75 bp, synthetic construct
  source 1..75: mol_type = other DNA
tttatcccggtcgatttcgctcgcatcgctgaagggtatggctgtaaaagctatcgcgtcaccaccattgaacaa

SEQ ID NO: 488622 - DNA, 75 bp, synthetic construct
  source 1..75: mol_type = other DNA
ggcgggcttttcttttcggctgccggtaatgactccaacttattgatagtgttttatgttcagataatgcccgat

SEQ ID NO: 488623 - DNA, 75 bp, synthetic construct
  source 1..75: mol_type = other DNA
ttacctctatccggtaactcacaatcgcagtctgatatttttgcttggtctggagcgtttttctttactgtcaaa

SEQ ID NO: 488624 - DNA, 75 bp, synthetic construct
  source 1..75: mol_type = other DNA
ctttggcggcgacgaatttgcggtgatttataccggtggtactctggaagagttgctatcaatactaaaagaaat

SEQ ID NO: 488625 - DNA, 75 bp, synthetic construct
  source 1..75: mol_type = other DNA
cgtaaccggatataacggggaacgcaccaaagttaaagcgggcgatgtgtcaacgatggttaagtacattcttga

SEQ ID NO: 488626 - DNA, 75 bp, synthetic construct
  source 1..75: mol_type = other DNA
agggaaccctcgaagaacgtgcacgaggaaatgggaccgcaacagcagctggcaatgtgtatgttgatactccga

SEQ ID NO: 488627 - DNA, 75 bp, synthetic construct
  source 1..75: mol_type = other DNA
gataagttggctccgtattttgctgaactagagaataaatatggtcttccagaaggcactctttacgcgattgct

SEQ ID NO: 488628 - DNA, 75 bp, synthetic construct
  source 1..75: mol_type = other DNA
agatgattcaaccggcgaagcggtacccgttgaaatccagacgcgcgggcgcttcacggagatggatccgggtac

SEQ ID NO: 488629 - DNA, 75 bp, synthetic construct
  source 1..75: mol_type = other DNA
tcaaaaggtaatgtgaccgttaaaggtaagggtatcacccatacacttcatgacccggcgctgaaagattttgca

SEQ ID NO: 488630 - DNA, 75 bp, synthetic construct
  source 1..75: mol_type = other DNA
acacataagaatagtgttgctttaggtactaagtctgtaaccactcgtgataacgaagtttatattggctataaa

SEQ ID NO: 488631 - DNA, 75 bp, synthetic construct
  source 1..75: mol_type = other DNA
ttatacggtgcaggaagacgataaaaccgtggagcggaaacgaagttttatccatttttggttacctgagtcatt

SEQ ID NO: 488632 - DNA, 75 bp, synthetic construct
  source 1..75: mol_type = other DNA
ttttatgaaaaaattcgaagctaaatttgtagagaaatataattcaactaaaggtgagacaaatataaaaaggac

SEQ ID NO: 488633 - DNA, 75 bp, synthetic construct
  source 1..75: mol_type = other DNA
tggacaatccggtcaaacgtggtgaacaggttatcgaacaggtcacgctgatgaaacctaatgccgggacgctgc

SEQ ID NO: 488634 - DNA, 75 bp, synthetic construct
  source 1..75: mol_type = other DNA
cccggaaggtcagtggcaatcctgtagtgccctggggatgagcaaaaaagatacgctggcgatcctgctgccgta

SEQ ID NO: 488635 - DNA, 75 bp, synthetic construct
  source 1..75: mol_type = other DNA
aggtctatgtactgtcgtctgcctggctgcacggcgaagcgaaccataatgccgaagaaggcacgtgtagattca

SEQ ID NO: 488636 - DNA, 75 bp, synthetic construct
  source 1..75: mol_type = other DNA
atgaagaatttcaaatgttagcggcatcagcagcacaaaagctggaaatcatggcggataaagcagagaaagcgg

SEQ ID NO: 488637 - DNA, 75 bp, synthetic construct
  source 1..75: mol_type = other DNA
agttaaagatttacctaaaatatttctggaatccgttattaccactgcaattgtcttgttattaattggttcttc

SEQ ID NO: 488638 - DNA, 75 bp, synthetic construct
  source 1..75: mol_type = other DNA
gttggcattaggtgtacctattgtttatgccattggtttatcgacactggcatcaatttccacacaactcgattt

SEQ ID NO: 488639 - DNA, 75 bp, synthetic construct
  source 1..75: mol_type = other DNA
caccgcagattatgttgatgccggttactgggcggccagtgccattaaagaagccaaaaaatactgcacgccaaa

SEQ ID NO: 488640 - DNA, 75 bp, synthetic construct
  source 1..75: mol_type = other DNA
ctggaatccgttattaccactgcaattgtcggtaatgactccaacttattgatagtgttttatgttcagataatg

SEQ ID NO: 488641 - DNA, 75 bp, synthetic construct
  source 1..75: mol_type = other DNA
cactggttctttatcgtgaaatctcagttaaagatttactaaaatatttctggaatccgttattaccactgcaat

SEQ ID NO: 488642 - DNA, 75 bp, synthetic construct
  source 1..75: mol_type = other DNA
tcgatttgcttaacactatttctgacaacccaataataatcctgcttattatcaatattatcctgttgattatcg

SEQ ID NO: 488643 - DNA, 75 bp, synthetic construct
  source 1..75: mol_type = other DNA
acgttacaggaatatccggcactgtggcatctgttatcagaaccgtggttatgcgcgctgattgcattgtcactg

SEQ ID NO: 488644 - DNA, 75 bp, synthetic construct
  source 1..75: mol_type = other DNA
atcaaaaagattgccgatactttccattcttggcagatggataaagattataaagatgaagctggtttctgtttt

SEQ ID NO: 488645 - DNA, 75 bp, synthetic construct
  source 1..75: mol_type = other DNA
tactaaccaaggataaatcgggtagtaatggtaaagctcatcgtaaaggggaagtgttgtttattgacgctcgcc

SEQ ID NO: 488646 - DNA, 75 bp, synthetic construct
  source 1..75: mol_type = other DNA
atggacaacgctgaacagcaatttctgaacgatctggatactaagttctggaaagccgcagacaagctacgcgcc

SEQ ID NO: 488647 - DNA, 75 bp, synthetic construct
  source 1..75: mol_type = other DNA
aggttaatggtccggcagcagataaattcccggagcagagtacttaaaaccacgctgggaaaactgtccacctgg

SEQ ID NO: 488648 - DNA, 75 bp, synthetic construct
  source 1..75: mol_type = other DNA
tttgtttcattatatcttgatgcgctaagggaaaagcaatccattgaggtacttgaacagagcctttcccggcat

SEQ ID NO: 488649 - DNA, 75 bp, synthetic construct
  source 1..75: mol_type = other DNA
tacggaaaaagctgcgcaaatagtggcagctaccggacgactggactctgtcgccagaatgattgatgaaactgg

SEQ ID NO: 488650 - DNA, 75 bp, synthetic construct
  source 1..75: mol_type = other DNA
tggcgctgctgctggctaacggctcgatgagttccaacaccaacaacgaaggtgaaatccgccgtaacctgatcg

SEQ ID NO: 488651 - DNA, 75 bp, synthetic construct
  source 1..75: mol_type = other DNA
gctgcacggcgaagcgaaccataatgccgaagaaggcacgtgtagattcaattggtcaacgcaacagttatgtga

SEQ ID NO: 488652 - DNA, 75 bp, synthetic construct
  source 1..75: mol_type = other DNA
tgaaagggctgcataccagcctgacgctgacggtagcctcactggttgtggcgctgattctggcgttgattttta

SEQ ID NO: 488653 - DNA, 75 bp, synthetic construct
  source 1..75: mol_type = other DNA
ggcgagatccgccgcaatctgatcgaagccgatctggtggagtgtatggtggcgctgccgggacagctgtttacc

SEQ ID NO: 488654 - DNA, 75 bp, synthetic construct
  source 1..75: mol_type = other DNA
gcgatgaacatggcgatccgcggtatcgactttaactttggtgccaaaaacgccgacaccctgctagacgaccag

SEQ ID NO: 488655 - DNA, 75 bp, synthetic construct
  source 1..75: mol_type = other DNA
gcgcgtcagcaggagctaatcaccttgttccgcgatgtcggcaacccggacaacatctatgccatgtcgcgcgac

SEQ ID NO: 488656 - DNA, 75 bp, synthetic construct
  source 1..75: mol_type = other DNA
aaaaacgccagtgacagcgagcagtatgccgagtcaccgaccatccgcagccgtctggacgaaatgattgtgctg

SEQ ID NO: 488657 - DNA, 75 bp, synthetic construct
  source 1..75: mol_type = other DNA
gcgattgaagagacgggctatgaagtgggcgaagtgcgcaaattatttgaactgtatatgtcgccaggcggtgtg

SEQ ID NO: 488658 - DNA, 75 bp, synthetic construct
  source 1..75: mol_type = other DNA
gcgccgggctgctggataacgacgaaccggaagtgtgcattcgtaaagaagcgattgaagagacgggctatgaag

SEQ ID NO: 488659 - DNA, 75 bp, synthetic construct
  source 1..75: mol_type = other DNA
agaaaagtacgcgcaatatccggcaacggctgaaagatttacccaatatgtcttaccatcttgaggctattctcg

SEQ ID NO: 488660 - DNA, 75 bp, synthetic construct
  source 1..75: mol_type = other DNA
ggttgcggtgatgttctccctgattatctacatcgagaacaggatgtaccgcacgccgcgtaacctcaaaaaact

SEQ ID NO: 488661 - DNA, 75 bp, synthetic construct
  source 1..75: mol_type = other DNA
ccctcaaccttcaatggtgcagactatgcttacggatgcgctgaaacagctgtcgaaagatgacccccccatatt

SEQ ID NO: 488662 - DNA, 75 bp, synthetic construct
  source 1..75: mol_type = other DNA
aacgcttctctttcagcaccgcgttttttgggatgctggttctgaccttagggatggggttaggccgctttctgt

SEQ ID NO: 488663 - DNA, 75 bp, synthetic construct
  source 1..75: mol_type = other DNA
atggcagcggcgctgaaggccgtcgagcaaggcgcacgtgtcacgctgatcgagcgcggcaccatcggcggcacc

SEQ ID NO: 488664 - DNA, 75 bp, synthetic construct
  source 1..75: mol_type = other DNA
cccgccatccctttgtgcttgcggcgctgttttctggcgttggcgtcggtatcgcgctgggcaatgaatatgtgc

SEQ ID NO: 488665 - DNA, 75 bp, synthetic construct
  source 1..75: mol_type = other DNA
agctgccgttcagccaggcgctggagatgatcaaaaccggcgagatacgtgacggtaagacggtgttattgctta

SEQ ID NO: 488666 - DNA, 75 bp, synthetic construct
  source 1..75: mol_type = other DNA
caggaactagccgaccagttgttcccctacctaacgatggtcgagggcttgaagctcgcggcgcagaccttcagc

SEQ ID NO: 488667 - DNA, 75 bp, synthetic construct
  source 1..75: mol_type = other DNA
ggcattacttctgagtattgactttgttaaaaaactggtcacagaaatgtctgatgaagatttaaataaggttaa

SEQ ID NO: 488668 - DNA, 75 bp, synthetic construct
  source 1..75: mol_type = other DNA
aaccaggaatccggtctgttcatgaatgacaccacgatgggctttatgctggaagccattcccatcaatggtgcg

SEQ ID NO: 488669 - DNA, 75 bp, synthetic construct
  source 1..75: mol_type = other DNA
atgtccgcatggctggcaagtacgctgtttgcactggtagtcggtgcactggctgacaccatcggcttcagcccg

SEQ ID NO: 488670 - DNA, 75 bp, synthetic construct
  source 1..75: mol_type = other DNA
tgccggtctggcaaccgcactcagccgttctcctcaaataacgcttgaagagacacccgcctcgcaggccatcct

SEQ ID NO: 488671 - DNA, 75 bp, synthetic construct
  source 1..75: mol_type = other DNA
aatccttctctctggatttcgtgcacttccgggagcagacggcggcggtccgtccgtactactccgccgaagggt

SEQ ID NO: 488672 - DNA, 75 bp, synthetic construct
  source 1..75: mol_type = other DNA
aagggatacagtgctcagggactggttcagcttattcgcgacagtcttcctccggaaagaaaagacgaagctgtc

SEQ ID NO: 488673 - DNA, 75 bp, synthetic construct
  source 1..75: mol_type = other DNA
ctgtacccggtttatgctcagccccgacacccgcgttgtggccgttgatctgaacaatgtggccggggacaagac

SEQ ID NO: 488674 - DNA, 75 bp, synthetic construct
  source 1..75: mol_type = other DNA
atgtccgttggtcagatcctgcgtaaccgtcagttctggggtatcgcgctgccgcgattcctggcagaaccggca

SEQ ID NO: 488675 - DNA, 75 bp, synthetic construct
  source 1..75: mol_type = other DNA
gcgcacggcgaactgcgcgccgacaagctgctggtcgccaccggccgcgcgcccaacacacgcaagctggcactg

SEQ ID NO: 488676 - DNA, 75 bp, synthetic construct
  source 1..75: mol_type = other DNA
gcgctgctggcccagcagcaggcccgcgtcgatgaactgcgccacgccaagtacgaaggcatcttggagggcaat

SEQ ID NO: 488677 - DNA, 75 bp, synthetic construct
  source 1..75: mol_type = other DNA
tatccgcagtgtgctggactccgggggttttgctgtggtgttcgacatgggggatggctacaagtccctgtgtga

SEQ ID NO: 488678 - DNA, 75 bp, synthetic construct
  source 1..75: mol_type = other DNA
atgcagaaaacaaaaaaaccggcttcagccggaaaagcaaaaccatcgtcacgggagaaaacgccttacgccgat

SEQ ID NO: 488679 - DNA, 75 bp, synthetic construct
  source 1..75: mol_type = other DNA
aaggagtggggggaactgcgtcagcggctgggctccggtcagtcttctgtcgtgtcctacttcctcaacatcaca

SEQ ID NO: 488680 - DNA, 75 bp, synthetic construct
  source 1..75: mol_type = other DNA
atccgcagcgtgctggactccgggggctttgccgtggtgttcgacatgggggatggctacaagtccctgtgtgag

SEQ ID NO: 488681 - DNA, 75 bp, synthetic construct
  source 1..75: mol_type = other DNA
ctgatgtccagtcagctggttggtgacaggattgaatacgggctgcgtgagttctcctggtcaggtgaacaggct

SEQ ID NO: 488682 - DNA, 75 bp, synthetic construct
  source 1..75: mol_type = other DNA
gaggcggtactgcaatcagtgcataacccggtgttacagcaacttagcattgcgattagttcattacagcgggca

SEQ ID NO: 488683 - DNA, 75 bp, synthetic construct
  source 1..75: mol_type = other DNA
atgactctcaataaaaccgatcgcattgtcattacgctgggtaaacagatcgttcacggcaaatacgtacctggc

SEQ ID NO: 488684 - DNA, 75 bp, synthetic construct
  source 1..75: mol_type = other DNA
agcgcgcagagagctttaatgtggccaacctgatgccgttagtggcggataaccccctgacaccggcaggtctgc

SEQ ID NO: 488685 - DNA, 75 bp, synthetic construct
  source 1..75: mol_type = other DNA
cgagaaactgcgccatgcctgcggagctgccgtcgagtgtgtcatttccgatacctgtatcgcgggtatggctga

SEQ ID NO: 488686 - DNA, 75 bp, synthetic construct
  source 1..75: mol_type = other DNA
tggatgggcggcgataacatctctaacctgctcagccctgatctgaccattgccagcccgttcgtcatcaccatg

SEQ ID NO: 488687 - DNA, 75 bp, synthetic construct
  source 1..75: mol_type = other DNA
cgttagggcagcaatctattatttattgtagcaaacaacaaaaatatcagtctgcgctggcgaccgattatctga

SEQ ID NO: 488688 - DNA, 75 bp, synthetic construct
  source 1..75: mol_type = other DNA
caacgcaaggggaggccacacgaaggtatctcgaccgggacaaaaaagcgaaatccccctatgccaccctgtttc

SEQ ID NO: 488689 - DNA, 75 bp, synthetic construct
  source 1..75: mol_type = other DNA
gggcgaactggcggagctctaccctcagatgaacacggacgatctgcaggaacggctggcccgtattctctttgt

SEQ ID NO: 488690 - DNA, 75 bp, synthetic construct
  source 1..75: mol_type = other DNA
ggtaagcacccgaggggtgcaaatgatgcagagattgaaaaactgctggactccatggagcagatggtggaggac

SEQ ID NO: 488691 - DNA, 75 bp, synthetic construct
  source 1..75: mol_type = other DNA
aagtggagcaggacatcctgaacagcttccgtaaaaacggttttgagctgatttcaccgcgctttaaccacatgc

SEQ ID NO: 488692 - DNA, 75 bp, synthetic construct
  source 1..75: mol_type = other DNA
atttaatgattacctggtcttcaacggtggcgcattcatttgcggagcttgaaacattgattggtaacacagaaa

SEQ ID NO: 488693 - DNA, 75 bp, synthetic construct
  source 1..75: mol_type = other DNA
cgacgcaggctgaggccacgcgcaagtatcttgaccgggacaaaaaagcgaaatctccctacgccaccctgtttc

SEQ ID NO: 488694 - DNA, 75 bp, synthetic construct
  source 1..75: mol_type = other DNA
gatgtgtatccgcgacatgatgcaaggcaacagcaaactggccgatattggtcgcgtggaagaatcacttggcta

SEQ ID NO: 488695 - DNA, 75 bp, synthetic construct
  source 1..75: mol_type = other DNA
gacagtgaaacagggttgtttattaaccagaagacagtcggttttattctggaagccaggcctctaccaggcgcc

SEQ ID NO: 488696 - DNA, 75 bp, synthetic construct
  source 1..75: mol_type = other DNA
gagctgcaggcggcaggcgtggtgaagcgggcggagacgttccaggtggctaacctcctgccgatcgtcgctgac

SEQ ID NO: 488697 - DNA, 75 bp, synthetic construct
  source 1..75: mol_type = other DNA
ttgttcaacaattccatccgttaccgaaatttggcgacagctatatgttgattggcagttggctggtaaacgatc

SEQ ID NO: 488698 - DNA, 75 bp, synthetic construct
  source 1..75: mol_type = other DNA
atgataaaattgatatacgaaaataagtatacagataacattatgagcaccgatatctacgaaaaaatcatgtcc

SEQ ID NO: 488699 - DNA, 75 bp, synthetic construct
  source 1..75: mol_type = other DNA
tatactcatcttgattttcaaccccttgcctcggtgtacgatgcggcgcatccacgcgccaaacgggggaaataa

SEQ ID NO: 488700 - DNA, 75 bp, synthetic construct
  source 1..75: mol_type = other DNA
ttgactggctggtcagccagaacgaactcaaagctaacccggcgaaaggtgtttcggcaccgaaagcgccgcgtc

SEQ ID NO: 488701 - DNA, 75 bp, synthetic construct
  source 1..75: mol_type = other DNA
tcctgggggatttacggcaaatatttcaacagcgacaagccgtcactgaccgacgatgcccgctttatcgtcctg

SEQ ID NO: 488702 - DNA, 75 bp, synthetic construct
  source 1..75: mol_type = other DNA
agccgctgcttgcgaagaaaaattcagcagccagaatgtaggcctcaccattacggtaacgccttgctggtgcta

SEQ ID NO: 488703 - DNA, 75 bp, synthetic construct
  source 1..75: mol_type = other DNA
caacagcaaactggccgatattggtcgcgtggaagaatcacttggctacaacgccatcgctgcgggcttccaggg

SEQ ID NO: 488704 - DNA, 75 bp, synthetic construct
  source 1..75: mol_type = other DNA
tcaccagccatcgctttattcgcgtcttgatctggcgtgggacggcacaggcgaacctaagcttctggaaaataa

SEQ ID NO: 488705 - DNA, 75 bp, synthetic construct
  source 1..75: mol_type = other DNA
ggttggaagatcagcttaacgcgggcaacctgccggaaggcagcgaccagtttaacagtctgcaagaaaagctca

SEQ ID NO: 488706 - DNA, 75 bp, synthetic construct
  source 1..75: mol_type = other DNA
gttaagccgatcttctcacgtgaaggtgcaaacgtgtcgatcattgagaacggtaaaaccattgaagcggcggaa

SEQ ID NO: 488707 - DNA, 75 bp, synthetic construct
  source 1..75: mol_type = other DNA
ggatggacggttcttatatctgcgatgccatctggaacggtaataaggttgatgcgttcccgaaagctgttatcg

SEQ ID NO: 488708 - DNA, 75 bp, synthetic construct
  source 1..75: mol_type = other DNA
gccacacagcagccttccccgcaaagaggatggcgaatattacagcccggcagcgtatcgccggaaactgataaa

SEQ ID NO: 488709 - DNA, 75 bp, synthetic construct
  source 1..75: mol_type = other DNA
gtacaccgaatgtgaaaataaccggtcatatctggaaacctatgtggaacaggggaatttgctggagcgtcaagg

SEQ ID NO: 488710 - DNA, 75 bp, synthetic construct
  source 1..75: mol_type = other DNA
aaaacagtctggtgacagaaaagattctgtttatgcttgaaggtgccattatcggcattcatgaagctgcgctcc

SEQ ID NO: 488711 - DNA, 75 bp, synthetic construct
  source 1..75: mol_type = other DNA
aagttgatagataattgcggggttgaacgggaagattattatgaaacattagttaacttaactgacataaaaata

SEQ ID NO: 488712 - DNA, 75 bp, synthetic construct
  source 1..75: mol_type = other DNA
agacgtttctatctcattctcaaattagtcgatgccaatacacttacaaaaagcgagagagatgaaatgtatgaa

SEQ ID NO: 488713 - DNA, 75 bp, synthetic construct
  source 1..75: mol_type = other DNA
agtcagggtttgttacgacattcacgacgcaaacagcgtgattgtcaggcggatggacggttcttatatctgcga

SEQ ID NO: 488714 - DNA, 75 bp, synthetic construct
  source 1..75: mol_type = other DNA
cggccagaggtgacgctggttatggatgcggggcagcgctttgttgtgggctggtcactgtccctgtcggaaaac

SEQ ID NO: 488715 - DNA, 75 bp, synthetic construct
  source 1..75: mol_type = other DNA
tgttatcgaacagcagcaggagaaacgcgccagaggccgcattgcacgggccacgcagaaaatcgaagaggctaa

SEQ ID NO: 488716 - DNA, 75 bp, synthetic construct
  source 1..75: mol_type = other DNA
gagcgatttctttatgttctatcgctcatggaagcgcccgaccgttgaatatgcgtatcgcgagttttcagcctg

SEQ ID NO: 488717 - DNA, 75 bp, synthetic construct
  source 1..75: mol_type = other DNA
gatgcagcaacggattatgcagtcagccattaaggccacccacaaagggaaagaactgacaaaacggcaggttaa

SEQ ID NO: 488718 - DNA, 75 bp, synthetic construct
  source 1..75: mol_type = other DNA
gccgtggttgagcagaaggcagttaaaaacgtcaccgttcgcgatgaactggaagtgatggtcaaatgcccggaa

SEQ ID NO: 488719 - DNA, 75 bp, synthetic construct
  source 1..75: mol_type = other DNA
tctgctgccataccgtgattacaaccaggaatccggtctgttcatgaatgacaccacgatgggctttatgctgga

SEQ ID NO: 488720 - DNA, 75 bp, synthetic construct
  source 1..75: mol_type = other DNA
gcctttggtgcttatccagaagtttctctggcagaagcccgcgaaaaacgggatacagcacgtaagcaactggct

SEQ ID NO: 488721 - DNA, 75 bp, synthetic construct
  source 1..75: mol_type = other DNA
gaagatgctaccatcgctgacctggctgttggtactgctgcaggccagatcaaaacgggttccatgagccgttct

SEQ ID NO: 488722 - DNA, 75 bp, synthetic construct
  source 1..75: mol_type = other DNA
gtgtcctgggaaatgatcagagccaactggcccattctgtgggcattgctgatgacaggaataaacctgcttcag

SEQ ID NO: 488723 - DNA, 75 bp, synthetic construct
  source 1..75: mol_type = other DNA
atctacatcgagaacaggatgtaccgcacgccgcgtaacctcaaaaaactgaacgtcattgatgaaggctggcgt

SEQ ID NO: 488724 - DNA, 75 bp, synthetic construct
  source 1..75: mol_type = other DNA
ggtaagtcggaagttatccgtcgtctggccaactacgcccgtcagcgcggtgatatggtggtgatttatgaccgt

SEQ ID NO: 488725 - DNA, 75 bp, synthetic construct
  source 1..75: mol_type = other DNA
ccacctaccggaaccagctggcgttcatcgatatcttcttccggggaatgaacaacaccaactacaacatggcgg

SEQ ID NO: 488726 - DNA, 75 bp, synthetic construct
  source 1..75: mol_type = other DNA
cgtctgctggacttcaaaaatcacaaggtcggtgagtttattgagaaaggttaccgtaccgcccgccgtcatacc

SEQ ID NO: 488727 - DNA, 75 bp, synthetic construct
  source 1..75: mol_type = other DNA
aacaatgaaacggcgctggaagtggagcaggacatcctgaacagcttccgtaaaaacggttttgagctgatttca

SEQ ID NO: 488728 - DNA, 75 bp, synthetic construct
  source 1..75: mol_type = other DNA
aaaccctgcgttttaacccgttgcgaacatcaccgatattgaccagtcagcggagcgtgtccgtgaccagttgtc

SEQ ID NO: 488729 - DNA, 75 bp, synthetic construct
  source 1..75: mol_type = other DNA
caaacacagaaggtattgccggaggccggtttgccaaaaggcatttatcagctttccgaggcgcagcaggcgtcc

SEQ ID NO: 488730 - DNA, 75 bp, synthetic construct
  source 1..75: mol_type = other DNA
atgaacataagcctcctctttacaaacgtgaatctcttcaggactcatggcgagagtttggatttataccaaagt

SEQ ID NO: 488731 - DNA, 75 bp, synthetic construct
  source 1..75: mol_type = other DNA
tggcgtctgctggacttcaaaaatcacaaggttggtgagtttattgagaaaggttaccgtaccgcccgccgtcat

SEQ ID NO: 488732 - DNA, 75 bp, synthetic construct
  source 1..75: mol_type = other DNA
cagatccgcgaagcgggcaaagcgccggggatcctgatcgccaatgagcaactggcaaaacgctatctggaactg

SEQ ID NO: 488733 - DNA, 75 bp, synthetic construct
  source 1..75: mol_type = other DNA
acaccattctggtgaaagaaggccagtttgttcgagaaggtgaagtgctggcgaagatggatactcgcgtgttgc

SEQ ID NO: 488734 - DNA, 75 bp, synthetic construct
  source 1..75: mol_type = other DNA
tcaataatattcgcgaacacttcatgctttatcttgttctttggtcactgctggcgattatggatctcatctatg

SEQ ID NO: 488735 - DNA, 75 bp, synthetic construct
  source 1..75: mol_type = other DNA
gctggacttcaaaaatcgtaaagtcggtgagtttattcaaaaaggttaccgcacctgtcgccgccataccggtgc

SEQ ID NO: 488736 - DNA, 75 bp, synthetic construct
  source 1..75: mol_type = other DNA
gctatttctgcgcaacagctggatgacgatcgcgccgccgctgagagcgcccgagctgcgctggaatcggcgaaa

SEQ ID NO: 488737 - DNA, 75 bp, synthetic construct
  source 1..75: mol_type = other DNA
cgtggtgggttgtcgggttactggcggtggctgctatcgtggcgtggtggctgttgcgcccggcaggtgtgccgg

SEQ ID NO: 488738 - DNA, 75 bp, synthetic construct
  source 1..75: mol_type = other DNA
gttgccgagccaggcgaagtgctggcggcaggcggtcgggtgctgaatatggtcgatctcagcgacgtctatatg

SEQ ID NO: 488739 - DNA, 75 bp, synthetic construct
  source 1..75: mol_type = other DNA
acgatatcggtttaggcgaaaaaggtcagttcacggatttacaggatcaggttatttccaacctgttcaagctgt

SEQ ID NO: 488740 - DNA, 75 bp, synthetic construct
  source 1..75: mol_type = other DNA
aagatgcttactacaagttgaccctcgcccaggttgaaaagctggaagaagtcaccgccgaactgcaccagatgt

SEQ ID NO: 488741 - DNA, 75 bp, synthetic construct
  source 1..75: mol_type = other DNA
gtggatgcgctgattaatcgtagtcgccggctcctaaccttaagaaccgtaccgatgaggcaactgaacaggctg

SEQ ID NO: 488742 - DNA, 75 bp, synthetic construct
  source 1..75: mol_type = other DNA
cttacggccggtattttaactctgatgaaccgtccctgcgggatgatgccagaatggtggtgctggagctgggtg

SEQ ID NO: 488743 - DNA, 75 bp, synthetic construct
  source 1..75: mol_type = other DNA
attatctacatcgagaacaggatgtaccgcacgccgcgtaacctcaagaaactgaacgttattgatgaaggctgg

SEQ ID NO: 488744 - DNA, 75 bp, synthetic construct
  source 1..75: mol_type = other DNA
atcgccaccgagttcctctacatcgacgagataggtttaggcgaaaaaggccagttcacagatttacaggatcag

SEQ ID NO: 488745 - DNA, 75 bp, synthetic construct
  source 1..75: mol_type = other DNA
gctgacatataaaaagtgtgggcggtttgttaccctcaattactaccgggtcgatgaaagcctatggcgaaatca

SEQ ID NO: 488746 - DNA, 75 bp, synthetic construct
  source 1..75: mol_type = other DNA
gctgcctcatttggtccccgtgaaaacactctgatttttgatgggcggcagagcagtgtctcttacaggatggat

SEQ ID NO: 488747 - DNA, 75 bp, synthetic construct
  source 1..75: mol_type = other DNA
gctttaaggtgccgatgatttatcgaccagctgcacttgctggtaagcctcagcaaccggagtccctgcagtggc

SEQ ID NO: 488748 - DNA, 75 bp, synthetic construct
  source 1..75: mol_type = other DNA
ttcttacgggtgcactgttttgctcatacgcagggggagcctcttttggtcctcgagaaagcatgctgatttttg

SEQ ID NO: 488749 - DNA, 75 bp, synthetic construct
  source 1..75: mol_type = other DNA
acctgcaaaaagccaacgatcaaatgtgcgtgctggtgcagatcgaaacgcgtgaggcaatgaagaacttaccgc

SEQ ID NO: 488750 - DNA, 75 bp, synthetic construct
  source 1..75: mol_type = other DNA
gcgctgtttgtcgccgtcggcgttgacaccaccctgctcgcccgcgccgccgaagcgctggcagcacggtttggc

SEQ ID NO: 488751 - DNA, 75 bp, synthetic construct
  source 1..75: mol_type = other DNA
atgcgtaaactccattctgcttttattttcgtaggggctctgctctgttcgtatgcaggagcagcgtcttttggc

SEQ ID NO: 488752 - DNA, 75 bp, synthetic construct
  source 1..75: mol_type = other DNA
gatgattattctgtatcttctaatccaaatggatattttgtcgggaatcagagaacaacagcatatgggataaat

SEQ ID NO: 488753 - DNA, 75 bp, synthetic construct
  source 1..75: mol_type = other DNA
gcggttggtggatacgtgaagtgggcttgtttgatgagtctggggcattgattgccgtgggcaactgcccggaaa

SEQ ID NO: 488754 - DNA, 75 bp, synthetic construct
  source 1..75: mol_type = other DNA
ctaacaaaaacagaattaaaggccatttgtgctgcaaggactatatcaacttcagccgcaactgaaacaggtgat

SEQ ID NO: 488755 - DNA, 75 bp, synthetic construct
  source 1..75: mol_type = other DNA
agtgcgcagctcagcctggcataccgcttcaaggtgcccatgatttaccgccccgccgcgcttgccggtaagccc

SEQ ID NO: 488756 - DNA, 75 bp, synthetic construct
  source 1..75: mol_type = other DNA
aaagaatttcaaacaagttttgaaccttgcctatgggagttatatctttttgcttatcttaaagaattgggttta

SEQ ID NO: 488757 - DNA, 75 bp, synthetic construct
  source 1..75: mol_type = other DNA
tatcgccattcttacccattctggcgatggcggtgcgccttttggtgcagggcgtggattcgttatgtccgtaga

SEQ ID NO: 488758 - DNA, 75 bp, synthetic construct
  source 1..75: mol_type = other DNA
ctttcaggttaccgctggggcgtgtcgcgtaaagcgcaactgctgcgccgcgaagctgagaatgaggagaggtaa

SEQ ID NO: 488759 - DNA, 75 bp, synthetic construct
  source 1..75: mol_type = other DNA
gggctggcgggcagtacgctgtctgtcgatgcggcagtgcgcaacatggtcgagttgacgggcgtaacgcctgcg

SEQ ID NO: 488760 - DNA, 75 bp, synthetic construct
  source 1..75: mol_type = other DNA
acaagtgctggggagttatctcgaaggaccgtacttcacgccgcagaataaaggcgcgcatccgccggagctgtt

SEQ ID NO: 488761 - DNA, 75 bp, synthetic construct
  source 1..75: mol_type = other DNA
cgggtatcttttgccgtccgtcttgccgcgccagacatgccttgcgggaaaacgtttctttctatacggatgcca

SEQ ID NO: 488762 - DNA, 75 bp, synthetic construct
  source 1..75: mol_type = other DNA
ctgcggcagatgtttcccgctgccgacaacgcacccgctgactcgacgtttcagcagcatgtgcgtgaagtgatc

SEQ ID NO: 488763 - DNA, 75 bp, synthetic construct
  source 1..75: mol_type = other DNA
tttgctggaacaggagactcccgtcacccttgacgctttagccgaacaggtggcgatgagcccattccatttaca

SEQ ID NO: 488764 - DNA, 75 bp, synthetic construct
  source 1..75: mol_type = other DNA
gcgcttgtcttgcctgactggcaggttggtgtgaaacgaatgctcaacgaattatttacgactacagcaatttaa

SEQ ID NO: 488765 - DNA, 75 bp, synthetic construct
  source 1..75: mol_type = other DNA
ttgcgcgaagcatcttattttccgtaccagctgggtatacgcaggtaaaggaaataacttcgccaaaacgatgtt

SEQ ID NO: 488766 - DNA, 75 bp, synthetic construct
  source 1..75: mol_type = other DNA
gaaataactttgccaaaacgatgttgcgtctggcaaaagaacgcgaagagttggctgtgataaacgatcaatttg

SEQ ID NO: 488767 - DNA, 75 bp, synthetic construct
  source 1..75: mol_type = other DNA
ggcaaacgcgccagcgtcgttgcgctggatagcggactgcatgtgcaacaaatctggattcagggtcaattagct

SEQ ID NO: 488768 - DNA, 75 bp, synthetic construct
  source 1..75: mol_type = other DNA
ttatgagcgaggtcatctacttgacctggacgaattgcttgaagttttgccgtacaagacaaccaagcaaagtat

SEQ ID NO: 488769 - DNA, 75 bp, synthetic construct
  source 1..75: mol_type = other DNA
cgagctcaaatcaccccgcgatggacgcgtgcagttccgcgtggcgcagccgggagaagtccttgccgccggcgg

SEQ ID NO: 488770 - DNA, 75 bp, synthetic construct
  source 1..75: mol_type = other DNA
aaaaaggggctggtggagaagggaatgtgccgccagcgcggcgattcaggttatcaccgtcgcacgctgggactg

SEQ ID NO: 488771 - DNA, 75 bp, synthetic construct
  source 1..75: mol_type = other DNA
aggaacagcgactggaagccatcgcgcaaatcaaagaagcacaaagtgccgttgccgccgcgcaggctttgctgg

SEQ ID NO: 488772 - DNA, 75 bp, synthetic construct
  source 1..75: mol_type = other DNA
atggataagagtaagcgccatctggcgtggtgggttgtcgggttactggcggtggctgccgttgtggcgtggtgg

SEQ ID NO: 488773 - DNA, 75 bp, synthetic construct
  source 1..75: mol_type = other DNA
ctgcaggataatccagaaacgggtgacgaaggtgacatcgccattcgtgaagagcagttacgtctgctgttcaga

SEQ ID NO: 488774 - DNA, 75 bp, synthetic construct
  source 1..75: mol_type = other DNA
tttggcctcttgaggttggactggtgtttaaccagattgaaggggctgacgctctacctgtttcgcagcagaaca

SEQ ID NO: 488775 - DNA, 75 bp, synthetic construct
  source 1..75: mol_type = other DNA
gatcagtggcggacaccggacctgcttttttggggcattaatgcgatgttcggcccgctgacgctggatctcttt

SEQ ID NO: 488776 - DNA, 75 bp, synthetic construct
  source 1..75: mol_type = other DNA
gctggaacgaacggccaccagcgaaattatcacaattgcgcgtggtcttgttggcagcatgcagggggtaaccca

SEQ ID NO: 488777 - DNA, 75 bp, synthetic construct
  source 1..75: mol_type = other DNA
gattgtgatgctccagcgcaaagccagcaaaccaggacaggggttaggcaaaaccaccggctggatccatcgcac

SEQ ID NO: 488778 - DNA, 75 bp, synthetic construct
  source 1..75: mol_type = other DNA
gcaaactggcatcccgaatggagcctgctgccccctggcagtttgtatccagttattatcagtaccatcagcaac

SEQ ID NO: 488779 - DNA, 75 bp, synthetic construct
  source 1..75: mol_type = other DNA
tctggtgaaaaacacctgcgtcaccacataactgccgacggttactaccgcggccgcaaggtcatcgctaagtaa

SEQ ID NO: 488780 - DNA, 75 bp, synthetic construct
  source 1..75: mol_type = other DNA
atggttaaagtctcgccgaacagcgtacagggatatagatatgaggcgaagggtaatggcattgtgctactacct

SEQ ID NO: 488781 - DNA, 75 bp, synthetic construct
  source 1..75: mol_type = other DNA
cgtaagttatcagaagattgacgatgacggactgcatgtggtgatcaacggcgaaacgcaggtattagcagtgga

SEQ ID NO: 488782 - DNA, 75 bp, synthetic construct
  source 1..75: mol_type = other DNA
agatcgacgatgacgggctgcatgtggtgatcaacggcgaaacacaggtattcgcggtggacaatgtggtgatct

SEQ ID NO: 488783 - DNA, 75 bp, synthetic construct
  source 1..75: mol_type = other DNA
ggctgattgcaccgctcatgccattcgcgtggcattaaaaaaaccagaagtcgctggcttgtaccatctggtagc

SEQ ID NO: 488784 - DNA, 75 bp, synthetic construct
  source 1..75: mol_type = other DNA
tacagagaaattccagcataactttggtctggtattgcccgcatgggatgttggcgtgaagcgcatgctcgctga

SEQ ID NO: 488785 - DNA, 75 bp, synthetic construct
  source 1..75: mol_type = other DNA
ttagcggttattaacgatcagtttggtgcgccaacaggtgctgaactgctggctgattgtacagcacatgccatt

SEQ ID NO: 488786 - DNA, 75 bp, synthetic construct
  source 1..75: mol_type = other DNA
tacagaaaaatttcagcagaactttgcgcttgtattgcctgactggcaggttggcgtgaaacgaatgcttaacga

SEQ ID NO: 488787 - DNA, 75 bp, synthetic construct
  source 1..75: mol_type = other DNA
cgtgaaacgctgcgcaatccggcgctggccggcacctatcatctggtagccagtggcgagaccagctggtgcgac

SEQ ID NO: 488788 - DNA, 75 bp, synthetic construct
  source 1..75: mol_type = other DNA
gtggtcgcggtggactactttgataaagagctgtgcggcgatctgacgaatctggaaggcatcgcgcagaccgtg

SEQ ID NO: 488789 - DNA, 75 bp, synthetic construct
  source 1..75: mol_type = other DNA
ggttcaggaagtgaagggcattccgacgacggcctatccgacgccggcgaagcgtccgctcaactcacgcctgtc

SEQ ID NO: 488790 - DNA, 75 bp, synthetic construct
  source 1..75: mol_type = other DNA
caactgccatctgaacgcgaacttatggcgttctttaacgttgggcgtccttcggtacgtgaagcgttggcggcg

SEQ ID NO: 488791 - DNA, 75 bp, synthetic construct
  source 1..75: mol_type = other DNA
caccgcgtgctggcggagatccccggtaacccaatcttcatggcgatccacgttgccctgctcgactggctaatc

SEQ ID NO: 488792 - DNA, 75 bp, synthetic construct
  source 1..75: mol_type = other DNA
attcattcgttcagacgttgatttccaccgcgtgctggcggagatccccggtaacccaatcttcatggcgatcca

SEQ ID NO: 488793 - DNA, 75 bp, synthetic construct
  source 1..75: mol_type = other DNA
acaacggcctatcccacaccagcacgtcgtccccataattctcgcctcaataccgaaaaatttcagcagaacttt

SEQ ID NO: 488794 - DNA, 75 bp, synthetic construct
  source 1..75: mol_type = other DNA
tagctatcaacagcatattgcgatcgttgacgcgatccgccgccacgatcccgatgaagccgatcgtgcgttgca

SEQ ID NO: 488795 - DNA, 75 bp, synthetic construct
  source 1..75: mol_type = other DNA
ctggcggagatccctggcaacccgatctttatggcgatccacgttgctctgcttgactggctgatcgcagctcgt

SEQ ID NO: 488796 - DNA, 75 bp, synthetic construct
  source 1..75: mol_type = other DNA
ggttcaggaagtgaagggcatcccgacgacggcctatccgacgccggcgaaacgtccgctcaactctcgcctgtc

SEQ ID NO: 488797 - DNA, 75 bp, synthetic construct
  source 1..75: mol_type = other DNA
ccgttaagcctccggccggagaatcactctgcgtcagccggagcacctctgatgctgaggctggcaggatgtggg

SEQ ID NO: 488798 - DNA, 75 bp, synthetic construct
  source 1..75: mol_type = other DNA
ggggggcgcaccggaagcctggccgtcagtggtgcactgctgtcctccccctgcacgctggtgagtaatgaggtg

SEQ ID NO: 488799 - DNA, 75 bp, synthetic construct
  source 1..75: mol_type = other DNA
agcggaagtgctttacttcctgaccgtaagctatccggctgtgaccatcttgttatacacgatggtgataccttt

SEQ ID NO: 488800 - DNA, 75 bp, synthetic construct
  source 1..75: mol_type = other DNA
cactactctactgactacgtatttccgggaaccggtgaaataccatggcaggaggcggatgcaaccgcaccgcta

SEQ ID NO: 488801 - DNA, 75 bp, synthetic construct
  source 1..75: mol_type = other DNA
cagagtattgtggtgatttcagcaaccctgaaggtgtggctgaaaccgtcaaaaaaattcgtcctgatgttattg

SEQ ID NO: 488802 - DNA, 75 bp, synthetic construct
  source 1..75: mol_type = other DNA
ttagctgtcattaacgatcagtttggtgcaccaacaggtgctgaactgctggctgattgtacggcacatgcaatt

SEQ ID NO: 488803 - DNA, 75 bp, synthetic construct
  source 1..75: mol_type = other DNA
atgaataaagaaaatatgacctgtcaggggatgagctacaaagaacgcgaagcactcaaggcctttgcggggcag

SEQ ID NO: 488804 - DNA, 75 bp, synthetic construct
  source 1..75: mol_type = other DNA
caccagtaaaatcagccatcagagagggaatggccttattaatgtaaccggctcatttaaaccgtctggtctgtt

SEQ ID NO: 488805 - DNA, 75 bp, synthetic construct
  source 1..75: mol_type = other DNA
cgggggaacaggcggctgcgctctgctcccgtcacctgatcttccgcaccagttgggtctatgccgcccgcggcg

SEQ ID NO: 488806 - DNA, 75 bp, synthetic construct
  source 1..75: mol_type = other DNA
cgggctgaagagcggggtatatacgatgacgtctttactgcagatgagttgcatcattaccggataaatgaacgg

SEQ ID NO: 488807 - DNA, 75 bp, synthetic construct
  source 1..75: mol_type = other DNA
ggagacggatgcaaccgcaccactaaatgtttacggtgaaaccaagttagctggagaaaaagcattacaagagca

SEQ ID NO: 488808 - DNA, 75 bp, synthetic construct
  source 1..75: mol_type = other DNA
gagaaaaacccgacttcatacgggcttaagcattgcgttgaacgggcaaataagagactcaccctggaaaacgga

SEQ ID NO: 488809 - DNA, 75 bp, synthetic construct
  source 1..75: mol_type = other DNA
caggtcaatcttaaatatggtcaggagccgggcgtgcagatttatacgcatatctcagaccaatacagcccgttc

SEQ ID NO: 488810 - DNA, 75 bp, synthetic construct
  source 1..75: mol_type = other DNA
tttgtataataacagaggccagggccaccctgactgacgaagtgattgatctgcacgagcgtatcctgggtagtc

SEQ ID NO: 488811 - DNA, 75 bp, synthetic construct
  source 1..75: mol_type = other DNA
gcagtgcaggtaagactttcatcgttggcgacaacatgaatgatattgcgactgatatcgataatttaagaaagt

SEQ ID NO: 488812 - DNA, 75 bp, synthetic construct
  source 1..75: mol_type = other DNA
gccgtgctcaagctgcgggccgctcccgccgcgaaggacgtgctcgacgccatcgaggtgctgcgcggcatgaac

SEQ ID NO: 488813 - DNA, 75 bp, synthetic construct
  source 1..75: mol_type = other DNA
atgctgggggctcaatatctttctatccgtaatagtaataatgaaacgctcttgcgtcgcaaaatcggtatcttg

SEQ ID NO: 488814 - DNA, 75 bp, synthetic construct
  source 1..75: mol_type = other DNA
gctgcgcccaattcgattttatgaatctgaacgacgcaattttctcggaacattattcagtgaaggtggtttacc

SEQ ID NO: 488815 - DNA, 75 bp, synthetic construct
  source 1..75: mol_type = other DNA
cgcttaccaaaaactggtcacaatttcagattttttccagtatctattttccgattcgttcggcggtaatccacc

SEQ ID NO: 488816 - DNA, 75 bp, synthetic construct
  source 1..75: mol_type = other DNA
caactggcgatcccgccgttgtactgggatgtgatcgccgaaagctggcgcgcacgcgatccttcgctgtatggc

SEQ ID NO: 488817 - DNA, 75 bp, synthetic construct
  source 1..75: mol_type = other DNA
ttgacttcacgaatgaatcatcagcatttgataaaaatggaaacaataaaatctccatcagaaatgttaagtcaa

SEQ ID NO: 488818 - DNA, 75 bp, synthetic construct
  source 1..75: mol_type = other DNA
atgaataatgaacaacgcggcgtcgcgctgctcattgtgctgatgctactggcgctcatggctgctctggctgca

SEQ ID NO: 488819 - DNA, 75 bp, synthetic construct
  source 1..75: mol_type = other DNA
attgaactggcggagaaactcgctcttgccagcctcactcaggatgttaaagataacgacagacagaccacgttg

SEQ ID NO: 488820 - DNA, 75 bp, synthetic construct
  source 1..75: mol_type = other DNA
atcagtcacgccatacctatgcgtgctgggctttatcttccggagcaaacccgacatttattgcatcacagatgg

SEQ ID NO: 488821 - DNA, 75 bp, synthetic construct
  source 1..75: mol_type = other DNA
ccgacctctcgatcatccgacagcggcgcgggccagccaatcggctgggcttcgcggtgcagctctgttacctgc

SEQ ID NO: 488822 - DNA, 75 bp, synthetic construct
  source 1..75: mol_type = other DNA
cccggacctgtccatgtgcttctggccggtcgccttcaagaaaggcgggatgaaattctggctccgctttgccga

SEQ ID NO: 488823 - DNA, 75 bp, synthetic construct
  source 1..75: mol_type = other DNA
aaagtttggctccccgtgggtagtcggtaagcacccgaggggcgcaaatgatgcagagattgaagaactgctgga

SEQ ID NO: 488824 - DNA, 75 bp, synthetic construct
  source 1..75: mol_type = other DNA
accccacagtactggaagcgcgagtatcagttacaggatggcgatatcgacgaaaccccgtcacctgcgccggtg

SEQ ID NO: 488825 - DNA, 75 bp, synthetic construct
  source 1..75: mol_type = other DNA
cctccattgaaattaaggaggccgcaggcaaggccgacagcagcgatatttatcagaacctgatcacgcttgccc

SEQ ID NO: 488826 - DNA, 75 bp, synthetic construct
  source 1..75: mol_type = other DNA
gctcagggacgggatatccgtatctaccgcgaactgcgcaccgacccgctggttgggggctgtatccgcagacgt

SEQ ID NO: 488827 - DNA, 75 bp, synthetic construct
  source 1..75: mol_type = other DNA
caggcggcagtgaatcaggtcatcagaacggtggtcaccctgaactttggcgatgtgccgtgtccggtctgggcc

SEQ ID NO: 488828 - DNA, 75 bp, synthetic construct
  source 1..75: mol_type = other DNA
gcccgccgacctggcgaagttcgagccgcagcggcgttacgcgaccctggtggcgctcgccatcgagggcatggc

SEQ ID NO: 488829 - DNA, 75 bp, synthetic construct
  source 1..75: mol_type = other DNA
agacgacgtggctggcctggctgcggcaatccccggtcaaaccgaactcgcggcacatgctggaacacatcgaac

SEQ ID NO: 488830 - DNA, 75 bp, synthetic construct
  source 1..75: mol_type = other DNA
tcaacgccgtcgagcgggcgagtgcagaggcgatcacccgtgctaaccggcgcatctacgacgccttggccgaac

SEQ ID NO: 488831 - DNA, 75 bp, synthetic construct
  source 1..75: mol_type = other DNA
ttaaatcctgggccatcgccgatatcgtgggtaagccaccagagtggttccagtttgacaatgacaacctgctgc

SEQ ID NO: 488832 - DNA, 75 bp, synthetic construct
  source 1..75: mol_type = other DNA
cccgcagatgaatgcggatgacctgcaggaacggctggcccgtatcatgtttgttgcaactgtctgggggcgtct

SEQ ID NO: 488833 - DNA, 75 bp, synthetic construct
  source 1..75: mol_type = other DNA
cgcgctgcgctccggtgatgtctgggtgcagggttctcgccagttcaaggacttcgacgaatacctggtgccggt

SEQ ID NO: 488834 - DNA, 75 bp, synthetic construct
  source 1..75: mol_type = other DNA
gatcaatccacgccgcgtaccgcacattggcgatgtggttctggcgatcggtaacccgtacaacctcgggcagac

SEQ ID NO: 488835 - DNA, 75 bp, synthetic construct
  source 1..75: mol_type = other DNA
tccgccgctggctggttgttgatgaagtcacacagccgaccaaagaaatcactcttgaagccgcacgctttgaag

SEQ ID NO: 488836 - DNA, 75 bp, synthetic construct
  source 1..75: mol_type = other DNA
ttcaggcagtttccaccgagcttggcggcgagcgtatcgatatcgtcctgtgggatgataacccggcgcagttcg

SEQ ID NO: 488837 - DNA, 75 bp, synthetic construct
  source 1..75: mol_type = other DNA
atgaaagcctgaacctgggcgattacgttgaagatcagattgagtctgttacctttgaccgtatcactacccaga

SEQ ID NO: 488838 - DNA, 75 bp, synthetic construct
  source 1..75: mol_type = other DNA
cgaaaatcgcggtgaaaaccaacgataaacgtatcgatccggtaggtgcttgtgtaggtatgcgtggcgcgcgtg

SEQ ID NO: 488839 - DNA, 75 bp, synthetic construct
  source 1..75: mol_type = other DNA
tgctgaaccttgaaggggtagatcgtgatttggcattcaaactggccgcccgtggcgtttgtacgctggaagatc

SEQ ID NO: 488840 - DNA, 75 bp, synthetic construct
  source 1..75: mol_type = other DNA
ggcgaccgcgttcgtggtgtgctctattccgttcgcccggaagcgcgtggcgcacaactgttcgtcacccgttcc

SEQ ID NO: 488841 - DNA, 75 bp, synthetic construct
  source 1..75: mol_type = other DNA
ttattgagaccctcggacgtcagattgtcagcggcaaatatgtgcccaatgaatcgctgccttcagaagccgatc

SEQ ID NO: 488842 - DNA, 75 bp, synthetic construct
  source 1..75: mol_type = other DNA
gaagccatacgtgtcgatccctacacgcaaaagcgcttcacattctttaacgatccggacggactgccgttggaa

SEQ ID NO: 488843 - DNA, 75 bp, synthetic construct
  source 1..75: mol_type = other DNA
atttgaaggtacagaaaaacgcgcaggaccggatcatcaaaaagggtaaggctttattaaatgctttcctgaaaa

SEQ ID NO: 488844 - DNA, 75 bp, synthetic construct
  source 1..75: mol_type = other DNA
gatcgacgtccgcgtacagatcgatcgcaaaagcggtgattttgacaccttccgtcgctggctgattgttgatga

SEQ ID NO: 488845 - DNA, 75 bp, synthetic construct
  source 1..75: mol_type = other DNA
tgcgtgggtatgcgtggtgcacgtgttcaggctgtttccactgagcttggcggcgagcgtatcgatatcgtcctg

SEQ ID NO: 488846 - DNA, 75 bp, synthetic construct
  source 1..75: mol_type = other DNA
gtgcgaaatctggtggaaccggcgattgcccgttgggcagcagagcgcgcgacttccagcgatctggcgcagatt

SEQ ID NO: 488847 - DNA, 75 bp, synthetic construct
  source 1..75: mol_type = other DNA
gatcgacgttcgcgtacagatcgatcgcaaaagcggtgattttgacaccttccgtcgctggctggtagttgatga

SEQ ID NO: 488848 - DNA, 75 bp, synthetic construct
  source 1..75: mol_type = other DNA
tcctctgcacgcccagggtggcggcatcgatcaactgcaagggatcgtggttaatgaagtgtcacctgatggccc

SEQ ID NO: 488849 - DNA, 75 bp, synthetic construct
  source 1..75: mol_type = other DNA
gccaggatctgaaggagtgggtgattgttgaacaccataaattcaatgaattgtctggcgttcgcggttgccata

SEQ ID NO: 488850 - DNA, 75 bp, synthetic construct
  source 1..75: mol_type = other DNA
agcgccactgtctggcagcaggctgattttgcagccttgtggcaggcgattgccgagcgcgagatttttgtcatt

SEQ ID NO: 488851 - DNA, 75 bp, synthetic construct
  source 1..75: mol_type = other DNA
ggcgaaacgccggaaggtatcggctttgcgattcctttccagttagcaaccaaaattatggataaactgatccgc

SEQ ID NO: 488852 - DNA, 75 bp, synthetic construct
  source 1..75: mol_type = other DNA
ttaatgaagtgtcacctgacggcccggcggcgaatgcgggtattcaggtcaacgatctgattatttcggtggata

SEQ ID NO: 488853 - DNA, 75 bp, synthetic construct
  source 1..75: mol_type = other DNA
ttgcgattcctttccagttagcaaccaaaattatggataagctgatccgcgatggtcgcgtgatccgcggctaca

SEQ ID NO: 488854 - DNA, 75 bp, synthetic construct
  source 1..75: mol_type = other DNA
cgatatcaccgtaacagcaggggcgacggaggcgttatacgcggcgattaccgcgctggtacgtagtggcgatga

SEQ ID NO: 488855 - DNA, 75 bp, synthetic construct
  source 1..75: mol_type = other DNA
acctgaaagcacaaaagaatgcacaggaacgggtaatcaagaaaggcaagaagttgcttaacgccttcctgaaaa

SEQ ID NO: 488856 - DNA, 75 bp, synthetic construct
  source 1..75: mol_type = other DNA
catgatctggaaacgattttctgggggtggtgcgggcgttttccatcactgtcatcatttgaccgttttttctgg

SEQ ID NO: 488857 - DNA, 75 bp, synthetic construct
  source 1..75: mol_type = other DNA
aatgggcagtatgtgattgagcttttctcattcccttttccgccagaacgccccagtcgcccagaagcttgcggc

SEQ ID NO: 488858 - DNA, 75 bp, synthetic construct
  source 1..75: mol_type = other DNA
atgctactgcgacgttaaacttgccgcaggaaccgtcactggtggatgcagagctggactggcaggaaaatagcg

SEQ ID NO: 488859 - DNA, 75 bp, synthetic construct
  source 1..75: mol_type = other DNA
atggctatcaaccagatgctgacagcgatatcaccgtaacggcaggggcgacggaggcgctatatgcagcaatta

SEQ ID NO: 488860 - DNA, 75 bp, synthetic construct
  source 1..75: mol_type = other DNA
acaggattgaatacggcctgcgggagttctcctggtccggtgagcaggctgagcggtttaacgcaatcacccgtg

SEQ ID NO: 488861 - DNA, 75 bp, synthetic construct
  source 1..75: mol_type = other DNA
cagagcacggcgcatatcgcctgacggaactgaaacccggcgaggtggccctgtataccgacgaaggcgcgaaaa

SEQ ID NO: 488862 - DNA, 75 bp, synthetic construct
  source 1..75: mol_type = other DNA
aggcagaggagaacgccgcattcacgacaccgttactgacggccagcgataagctgacagtggaaggtaaaatca

SEQ ID NO: 488863 - DNA, 75 bp, synthetic construct
  source 1..75: mol_type = other DNA
gtgaaatgcaaacgctatgaggttgaggcagaggagaacgccgcattcacgacaccgttactgacggccagcgat

SEQ ID NO: 488864 - DNA, 75 bp, synthetic construct
  source 1..75: mol_type = other DNA
aaaagcgccagccaaaaaagaagcgtatcgctggaaggctaccaccccagtgatgcaacaaaaagaagtggtcgc

SEQ ID NO: 488865 - DNA, 75 bp, synthetic construct
  source 1..75: mol_type = other DNA
cattaccgcgacgccgtgcggcgtgtgcgataactgtcgtgaaatcgagcaggggcgctttgtcgatctgattga

SEQ ID NO: 488866 - DNA, 75 bp, synthetic construct
  source 1..75: mol_type = other DNA
gcgcgtgagtcatataaaccaaaaagaaaaattagcccggcaaaaaatgacccgttaacagttgacccgtcaaat

SEQ ID NO: 488867 - DNA, 75 bp, synthetic construct
  source 1..75: mol_type = other DNA
aaatagccgcctggcgacaatgcttttttctcttacccgcgctattaaccctggttggctggataatcgcgctac

SEQ ID NO: 488868 - DNA, 75 bp, synthetic construct
  source 1..75: mol_type = other DNA
tcctttaaccggcacctccggtctacgttgccgtaatttacttctgttcattcttctcttactgggtattgtcgc

SEQ ID NO: 488869 - DNA, 75 bp, synthetic construct
  source 1..75: mol_type = other DNA
tattccgacattcagtctctgccggatctgacctgttatgtcaccctgcccggaccgtatccggcagtaaaactc

SEQ ID NO: 488870 - DNA, 75 bp, synthetic construct
  source 1..75: mol_type = other DNA
tacagcaggcactggcgaccgttcgccaggcgttcagggtgatcaccggcacgacggatagttcaaccaaagtac

SEQ ID NO: 488871 - DNA, 75 bp, synthetic construct
  source 1..75: mol_type = other DNA
tacttctcttacttggtattgtcgctgggtatcaggcccatttatataagcagcaaaaccctggtgttggtgtac

SEQ ID NO: 488872 - DNA, 75 bp, synthetic construct
  source 1..75: mol_type = other DNA
tcaattccctgactgaacaacaagtgcgagacatttttagtggcgcaattaccaactggcgtactgttggcggta

SEQ ID NO: 488873 - DNA, 75 bp, synthetic construct
  source 1..75: mol_type = other DNA
cgtgcactgcaactgctggcacgtgccgccgaaggcagtttgcgagacgcgttaagtctgactgatcaagcgatt

SEQ ID NO: 488874 - DNA, 75 bp, synthetic construct
  source 1..75: mol_type = other DNA
ttatatagtgaaaaaataaggaggaaagtattagttttatgtcctctcgaagaggatagcataaaatctgaagat

SEQ ID NO: 488875 - DNA, 75 bp, synthetic construct
  source 1..75: mol_type = other DNA
tttacatatatagtgtgagaatatacacggcattagtgacgatctttttaattccaatattaattggagaaattg

SEQ ID NO: 488876 - DNA, 75 bp, synthetic construct
  source 1..75: mol_type = other DNA
tcctataccgagcgcgtcgcgcgtcaaagtacctttgagtttgggcgggcacgcatgtgggggtctctgggctgg

SEQ ID NO: 488877 - DNA, 75 bp, synthetic construct
  source 1..75: mol_type = other DNA
ctcctgacgaaacattgctggatgcctggggtgacgtcaggtatatcgcttataaatggctgaacgctgtcgcta

SEQ ID NO: 488878 - DNA, 75 bp, synthetic construct
  source 1..75: mol_type = other DNA
tgctattggcagatggtaaacacagcgccgaagaagagcgccaggcgattcagtatctgctggatttgcgctgcg

SEQ ID NO: 488879 - DNA, 75 bp, synthetic construct
  source 1..75: mol_type = other DNA
cttagtattttagatgcggggttaggaggagtaataacaagagaagcaatagtatcaaggaaaagtcaagaaaca

SEQ ID NO: 488880 - DNA, 75 bp, synthetic construct
  source 1..75: mol_type = other DNA
gcagttgcagcgcgtgcagggagcaaccaaagcaaaaagagtgaaccggcagccgctacccgcgcgcggccggtg

SEQ ID NO: 488881 - DNA, 75 bp, synthetic construct
  source 1..75: mol_type = other DNA
gccatcagcttgagcacatcctcaacgaagaacatatcgctcacgagccgcgggcgctgcaattgctggcacgcg

SEQ ID NO: 488882 - DNA, 75 bp, synthetic construct
  source 1..75: mol_type = other DNA
gagtggcgtcaggcgatatacgaagaaaaacttgcgcaggcgcgcgagtccattattgcggataataatattcag

SEQ ID NO: 488883 - DNA, 75 bp, synthetic construct
  source 1..75: mol_type = other DNA
tttatgaccagagttaacgtcaatgagtggagtctggataatgtagagtgggttaatgttactgatcagatttat

SEQ ID NO: 488884 - DNA, 75 bp, synthetic construct
  source 1..75: mol_type = other DNA
cttcaccatggagaaaaaccagtcttggaactattccttcttttgttgacggaagcactcctgttactgagattc

SEQ ID NO: 488885 - DNA, 75 bp, synthetic construct
  source 1..75: mol_type = other DNA
gaaacgttatggtactgattacatcgctgacaaaatccagtttctgaatacgaaggaaccggctgcttccggcaa

SEQ ID NO: 488886 - DNA, 75 bp, synthetic construct
  source 1..75: mol_type = other DNA
acgctgtttgacgtcatgaacacccgtgcctttttccgttctcccagccataagattgcagagttcgctgccggt

SEQ ID NO: 488887 - DNA, 75 bp, synthetic construct
  source 1..75: mol_type = other DNA
tggcagaccttcatcaatggctgtatttactggtggtgcaccacgctggaagggatgagggatttaatcaaatcc

SEQ ID NO: 488888 - DNA, 75 bp, synthetic construct
  source 1..75: mol_type = other DNA
tgacggggtatcgaccggtaaggatatggagcgtcagacgctggtcagttattccgacattcagtctctgccgga

SEQ ID NO: 488889 - DNA, 75 bp, synthetic construct
  source 1..75: mol_type = other DNA
agtaatgttatgaccgtaagtgcaatgggatttttagccggattgttgggagctttattggttcttatagctaaa

SEQ ID NO: 488890 - DNA, 75 bp, synthetic construct
  source 1..75: mol_type = other DNA
gaggaacaactcagtatcgccgatggctgtgtgaccgcaaccacctttaaaaaggacggcgtttttgccaatttc

SEQ ID NO: 488891 - DNA, 75 bp, synthetic construct
  source 1..75: mol_type = other DNA
aaaaataagctggcagacgtttgtgaacggctgtatttactggtggtgtaccacgctggaaggcatgcgggattt

SEQ ID NO: 488892 - DNA, 75 bp, synthetic construct
  source 1..75: mol_type = other DNA
ggctggcgtctgctggacttcaaaaatcacaaggtcggtgaatttattgagaaaggttaccgtaccgcccgccgt

SEQ ID NO: 488893 - DNA, 75 bp, synthetic construct
  source 1..75: mol_type = other DNA
gccagtggggaacgcaggatgatttgacctgcgcacagtggctctggaaaaaaatcatcgccctgtacgagcaag

SEQ ID NO: 488894 - DNA, 75 bp, synthetic construct
  source 1..75: mol_type = other DNA
ggaagcagaaggtcgtcagatggccagcctcttcgaaccggatgtcccggaggttgtttccggagaagacgtgac

SEQ ID NO: 488895 - DNA, 75 bp, synthetic construct
  source 1..75: mol_type = other DNA
tggcagacgtttatcaacggctgtatttactggtggtgtacgtcactggaaggcatgcgggatttaataaaatcc

SEQ ID NO: 488896 - DNA, 75 bp, synthetic construct
  source 1..75: mol_type = other DNA
tgaacatgaatcccgcagcatcgccatgctctttgaaccggatgccgaagttgtcgcgccagagggcggtgcgga

SEQ ID NO: 488897 - DNA, 75 bp, synthetic construct
  source 1..75: mol_type = other DNA
tttttaagattttacagtcgcttgaactctcaatgacgctatgcgacacgaaaaatgcctcgccagaatcaacag

SEQ ID NO: 488898 - DNA, 75 bp, synthetic construct
  source 1..75: mol_type = other DNA
cctgccagatctgacctgctatgtcaccctgcccggaccgtatccggcagtaaaactctccctgaaatatcaggc

SEQ ID NO: 488899 - DNA, 75 bp, synthetic construct
  source 1..75: mol_type = other DNA
cgagcaggctgccagcgatgatggcgaaatcatgcgaccgaaagaacccaactggactgcatgggccaatgatgt

SEQ ID NO: 488900 - DNA, 75 bp, synthetic construct
  source 1..75: mol_type = other DNA
tcatttgttgaaagcgaagtcgatcactggattcaagagcaaatatatgcctctcgtggtgaacggcatgaaaat

SEQ ID NO: 488901 - DNA, 75 bp, synthetic construct
  source 1..75: mol_type = other DNA
ggtgaaaataggaactcgtgcaatttcatttgttgaaagcgaagtcgatcactggattcaagagcaaatatatgc

SEQ ID NO: 488902 - DNA, 75 bp, synthetic construct
  source 1..75: mol_type = other DNA
atgaatattcagtgcaaacgcgtttatgatccggcagaacagagcgatggttatcgcgtactggtcgaccgcctc

SEQ ID NO: 488903 - DNA, 75 bp, synthetic construct
  source 1..75: mol_type = other DNA
gtcctatgcccagctggaagatatctacggtgagaaagcggctgccacgctgtttgacgtcatgaacacccgtgc

SEQ ID NO: 488904 - DNA, 75 bp, synthetic construct
  source 1..75: mol_type = other DNA
attcaccggcggccaacctggtggaagagaaaatcgagaaaacggcgatttccatccgtgctgtgctgaccaact

SEQ ID NO: 488905 - DNA, 75 bp, synthetic construct
  source 1..75: mol_type = other DNA
gttacctgcaggggattgagcataacggtgagtcttttaccatccgtgactggatgcgtggtgtccgggaagatc

SEQ ID NO: 488906 - DNA, 75 bp, synthetic construct
  source 1..75: mol_type = other DNA
actctttggtctggtattatgggtaaaaataagctggcagacgtttataaacggctgtatttactggtggtgtac

SEQ ID NO: 488907 - DNA, 75 bp, synthetic construct
  source 1..75: mol_type = other DNA
actcattggtctgttattatgggtaaaaataagctggcagacgtttataaacggctgtatttactggtggtgtac

SEQ ID NO: 488908 - DNA, 75 bp, synthetic construct
  source 1..75: mol_type = other DNA
gagcacctgaaagccagtctgcagtattcctacggtgctgaccccgtgcgtgacgggatatcaaccggtaaggag

SEQ ID NO: 488909 - DNA, 75 bp, synthetic construct
  source 1..75: mol_type = other DNA
cgcaaagcttttcatggcgaagtgatcgattttaatgcctttcgcgaacagtatattgcagaactggcgcaacac

SEQ ID NO: 488910 - DNA, 75 bp, synthetic construct
  source 1..75: mol_type = other DNA
gcggccacgctgtttgatgtgctgaatacccgtgcctttttccgctccccgagccatcagattgcagagtttgct

SEQ ID NO: 488911 - DNA, 75 bp, synthetic construct
  source 1..75: mol_type = other DNA
tctcattggtctggtattatgggtaaaaataagctggcagacgtttataaacggctgtatttactggtggtgtac

SEQ ID NO: 488912 - DNA, 75 bp, synthetic construct
  source 1..75: mol_type = other DNA
atggcagaagctaaagcgaaaaaaccatttcatgagattgtggctgaaaacctgatagcccagctcaaagagggt

SEQ ID NO: 488913 - DNA, 75 bp, synthetic construct
  source 1..75: mol_type = other DNA
tggcaatgaaccggctcagaccgacagggaaacaccaccggaaaaacaggaaaagacagaacagacggcgctttc

SEQ ID NO: 488914 - DNA, 75 bp, synthetic construct
  source 1..75: mol_type = other DNA
ctcggcggcacgctgaccacggaagccggagacaaaggcgcgcgctcgctgggtgaagtgcataacgaggtgcgc

SEQ ID NO: 488915 - DNA, 75 bp, synthetic construct
  source 1..75: mol_type = other DNA
tatcagactctgaacgctgaaaaagccgcgattgctcaggggatcatgacaccagatgacgaaatcagtgtcctt

SEQ ID NO: 488916 - DNA, 75 bp, synthetic construct
  source 1..75: mol_type = other DNA
tttcactttcatgacgctggagaatacagcagagcaagccggttacgtcacttattacagtcgcggtacagaaga

SEQ ID NO: 488917 - DNA, 75 bp, synthetic construct
  source 1..75: mol_type = other DNA
aacgggccgaagccattctggaagcgtcaggggccagaatttcgcataatcaggtggaccgtgccttttaccgta

SEQ ID NO: 488918 - DNA, 75 bp, synthetic construct
  source 1..75: mol_type = other DNA
agaaaatgcagaaataattttagatattgatactccggacgactttattacagcgaaaaaaaggtatactgaaat

SEQ ID NO: 488919 - DNA, 75 bp, synthetic construct
  source 1..75: mol_type = other DNA
ggctatcgtggtaatgaactgcacgaacgttatgcgaaccagagcaatatcactattatccacaacccagattat

SEQ ID NO: 488920 - DNA, 75 bp, synthetic construct
  source 1..75: mol_type = other DNA
tgggggatgcggtgcctgcccgccggttacaggaggccatcgacccggtactggagccggtcattgatgccatca

SEQ ID NO: 488921 - DNA, 75 bp, synthetic construct
  source 1..75: mol_type = other DNA
cccagtccgatctggccgctgacattgaagaaaaggatacccacctttttgcagagctgggcaagcgacgtcttg

SEQ ID NO: 488922 - DNA, 75 bp, synthetic construct
  source 1..75: mol_type = other DNA
ccgcagattgccagccgttatattgaacatccggcctcgggtatcaccccgaaccgggcggcacagtgccttcgc

SEQ ID NO: 488923 - DNA, 75 bp, synthetic construct
  source 1..75: mol_type = other DNA
gaaaacctttctcctttgacccggagatgcagagtgccgcgctggatattccgcagattgccagccgttatattg

SEQ ID NO: 488924 - DNA, 75 bp, synthetic construct
  source 1..75: mol_type = other DNA
gcacgaacagcgctataaaagcgctggcagcagttaacgaaggcgagaatcgcactattcacgacagtcgcatat

SEQ ID NO: 488925 - DNA, 75 bp, synthetic construct
  source 1..75: mol_type = other DNA
atgcgttaagcgtaataccggaagatttacacacccgggaatatttggcgaactctcgcacgccggaggcgtata

SEQ ID NO: 488926 - DNA, 75 bp, synthetic construct
  source 1..75: mol_type = other DNA
atgaagactcttgatatccgggtcgctttcagcgccgttgacaggctgacccagcctgccgaaaacgcccgccgc

SEQ ID NO: 488927 - DNA, 75 bp, synthetic construct
  source 1..75: mol_type = other DNA
tggcgactggggaatccatcatgcagcgtcagtcgtgatgttgaaggcgtgattgaaatgctgcgccgtatgggc

SEQ ID NO: 488928 - DNA, 75 bp, synthetic construct
  source 1..75: mol_type = other DNA
actgcattattggctggtatttgtaccagtttatttctggttgctcctgtggaatatcattttctatgtcgcgcc

SEQ ID NO: 488929 - DNA, 75 bp, synthetic construct
  source 1..75: mol_type = other DNA
cgatattatttttgtggcgcaaccctccggcgggcagaaaaaacgcgctgaggaatcgggcgtcactttgctata

SEQ ID NO: 488930 - DNA, 75 bp, synthetic construct
  source 1..75: mol_type = other DNA
tcaaattgttagcgattaacggtattgcacccactgcggaaaatatccgtaacggcaaatatccgtatatcgtcg

SEQ ID NO: 488931 - DNA, 75 bp, synthetic construct
  source 1..75: mol_type = other DNA
gcgtcagccgtgatgtggaaggtgtgattgaaatgctgcgccgtatggggcttgagcgtttcatccgcacgaaag

SEQ ID NO: 488932 - DNA, 75 bp, synthetic construct
  source 1..75: mol_type = other DNA
tgtctacagacagtattcacttaccgcagcaggccgcttttccaagtgccgaccgttactatgccactgcacttc

SEQ ID NO: 488933 - DNA, 75 bp, synthetic construct
  source 1..75: mol_type = other DNA
cggtcttccaccaatggccgttcgccaggataagagctggaacagcattgaacgtgccgaatccattcttgaagc

SEQ ID NO: 488934 - DNA, 75 bp, synthetic construct
  source 1..75: mol_type = other DNA
gctttttaaagggattcatgactggtgtaaaaccaaccgcaatgagctgacgaacggcggcgaaaccaaaactgc

SEQ ID NO: 488935 - DNA, 75 bp, synthetic construct
  source 1..75: mol_type = other DNA
caactcatttcatttgttatatgaatgtttcttaccaccctcacgcgacaaatatcaccacagttaatatgtcat

SEQ ID NO: 488936 - DNA, 75 bp, synthetic construct
  source 1..75: mol_type = other DNA
gctccatggatatgttgtcgcagctggaagtggatatgcttaaacgcaccgccagcagcgacctctatcaactgt

SEQ ID NO: 488937 - DNA, 75 bp, synthetic construct
  source 1..75: mol_type = other DNA
aggtttatgccctggcacagggcagcgtggtggtgggcgggatgaacgccaccggggccagcggttccagcgtaa

SEQ ID NO: 488938 - DNA, 75 bp, synthetic construct
  source 1..75: mol_type = other DNA
aatagtcgcagtccgtattggcatctggctctatcaccgttccgataatccacgcgagttaatcccggggagaaa

SEQ ID NO: 488939 - DNA, 75 bp, synthetic construct
  source 1..75: mol_type = other DNA
ttctcttgctgcggtgatagcgggagttcctccagaggtcgctttgggatctttagctggtgcggtaatttttgt

SEQ ID NO: 488940 - DNA, 75 bp, synthetic construct
  source 1..75: mol_type = other DNA
ttacaaacctacagcatccatccttatcggtgtagccagcctgatccctaccatcacgcaggactctttcgagaa

SEQ ID NO: 488941 - DNA, 75 bp, synthetic construct
  source 1..75: mol_type = other DNA
atgtcagtccagctaaccagtgagtctttaaatcagtggcttagcatgggatctctggctgcggttatcgctgga

SEQ ID NO: 488942 - DNA, 75 bp, synthetic construct
  source 1..75: mol_type = other DNA
catcgccgggttctcctgtctatgctcagtttcctctgcggccttctcttttacaaacctacagcatccatcctt

SEQ ID NO: 488943 - DNA, 75 bp, synthetic construct
  source 1..75: mol_type = other DNA
aagcgtcggttattacttgcgtttctcagctacctatgcggagttctcttctataaagcaacagcaacactgctt

SEQ ID NO: 488944 - DNA, 75 bp, synthetic construct
  source 1..75: mol_type = other DNA
aggccgcagtacccgcagtgcaaacagaacattgttttctcacccacggtgacatgccaaccctcaccatcgata

SEQ ID NO: 488945 - DNA, 75 bp, synthetic construct
  source 1..75: mol_type = other DNA
agaaaatgcagaaataattttagatattgatactccggacgactttattacagcgaagaaaaggtatactaaaat

SEQ ID NO: 488946 - DNA, 75 bp, synthetic construct
  source 1..75: mol_type = other DNA
atgaaatccatggataagttaacaactggcattgcctacggcacctccgcaggcagtgctggctactggttttta

SEQ ID NO: 488947 - DNA, 75 bp, synthetic construct
  source 1..75: mol_type = other DNA
cgtcgccgcgtgctcctgtcgttgctcagcttcctctgcggccttctcttctacaaacccacagcgtcgatcctt

SEQ ID NO: 488948 - DNA, 75 bp, synthetic construct
  source 1..75: mol_type = other DNA
ctttaaatcagtggcttagcatgggttctctggctgctgttattgctggagttccaccggaggtggcgctcggtg

SEQ ID NO: 488949 - DNA, 75 bp, synthetic construct
  source 1..75: mol_type = other DNA
tcagctttctctgcggccttcttttttacaaaccagcagcatcaattcttatcggcatagccagcctgatcccta

SEQ ID NO: 488950 - DNA, 75 bp, synthetic construct
  source 1..75: mol_type = other DNA
ctacaaacccacagcgtccattcttatcggcttggccagcttgatacctaccatcacgcaggactctttcgagaa

SEQ ID NO: 488951 - DNA, 75 bp, synthetic construct
  source 1..75: mol_type = other DNA
cgccacgctgccgccgatgtactcgcgcgggcagaccattgatgtcactgtttcgtcgattggcgatgccaaaag

SEQ ID NO: 488952 - DNA, 75 bp, synthetic construct
  source 1..75: mol_type = other DNA
ttctggtttaatgacaatatttacatctctgctattgtaacatcagtcatattttctgcattacatctacaatat

SEQ ID NO: 488953 - DNA, 75 bp, synthetic construct
  source 1..75: mol_type = other DNA
ctttattttgtgtatcacttatttcattttcagctgtcagcgccggaaataatacggataaatatacgggagatt

SEQ ID NO: 488954 - DNA, 75 bp, synthetic construct
  source 1..75: mol_type = other DNA
aagtgtatgccctggcgcagggcagcgtggtggtgggcgggatgaatgccaccggggccagcggttccagcgtga

SEQ ID NO: 488955 - DNA, 75 bp, synthetic construct
  source 1..75: mol_type = other DNA
gaaacgtccgtcgtttaaagacgctaacaacattgcggcggcgattaacgcctcgtttggcggcattgccaccgc

SEQ ID NO: 488956 - DNA, 75 bp, synthetic construct
  source 1..75: mol_type = other DNA
tattcgcggcggcaccttgctgctgacccagttgcacggcgcagatggcgaagtgtatgccctggcgcagggaag

SEQ ID NO: 488957 - DNA, 75 bp, synthetic construct
  source 1..75: mol_type = other DNA
cggagtggccttttctgttggtgcatttgtttcagcaattgtggctgtgcgtattggcatatggctctatcaccg

SEQ ID NO: 488958 - DNA, 75 bp, synthetic construct
  source 1..75: mol_type = other DNA
ctttggctggggtggtaatttttgttacctctgcagtagagtaccccatccgtcgccgggtgctcctgtcgatgc

SEQ ID NO: 488959 - DNA, 75 bp, synthetic construct
  source 1..75: mol_type = other DNA
gggtattgtctactccgccggcgcgttcgttgcggcaattgtcgcggtgcgggtcgggatatggctgtatcaccg

SEQ ID NO: 488960 - DNA, 75 bp, synthetic construct
  source 1..75: mol_type = other DNA
tacctctgctgtagaatatccaatccgccgccgggtgctcctgtcgatgctcagctttctttgcggtcttctctt

SEQ ID NO: 488961 - DNA, 75 bp, synthetic construct
  source 1..75: mol_type = other DNA
ttgtcgcagtgcgaattggtatctggctctaccaccgttccgacaatccacgcgagttaattccggggagaaaag

SEQ ID NO: 488962 - DNA, 75 bp, synthetic construct
  source 1..75: mol_type = other DNA
gaattggcatctggctctatcaccgttccgataatccacgcgagttaattccggggagaaaaggcgatggtaact

SEQ ID NO: 488963 - DNA, 75 bp, synthetic construct
  source 1..75: mol_type = other DNA
cacctggagggtggtttcgtcggtatggcagctgctccatcaggcgcttctactggctcccgtgaagcactggaa

SEQ ID NO: 488964 - DNA, 75 bp, synthetic construct
  source 1..75: mol_type = other DNA
aatctctcaccgttctggcgaaactgaagatgctaccatcgctgacttggctgttggtactgctgcaggccagat

SEQ ID NO: 488965 - DNA, 75 bp, synthetic construct
  source 1..75: mol_type = other DNA
caaaactggttctatgagccgttctgaccgcgttgctaaatacaaccagctgattcgtattgaagaagctctggg

SEQ ID NO: 488966 - DNA, 75 bp, synthetic construct
  source 1..75: mol_type = other DNA
cgggaggtaaaaccccagatcatgccgttttacgcttgcgaaggccctgatggcgaaaaaggcaaatggacacag

SEQ ID NO: 488967 - DNA, 75 bp, synthetic construct
  source 1..75: mol_type = other DNA
cttttccctctctcgtagtgccattattcgcctgaacgtggcgaatgctcgttttgtttatcaaccgtttacacg

SEQ ID NO: 488968 - DNA, 75 bp, synthetic construct
  source 1..75: mol_type = other DNA
gaccgtgttgctaaatacaaccagctgattcgtatcgaagaagctctgggacgaaaaagcaccgtacaacggtcg

SEQ ID NO: 488969 - DNA, 75 bp, synthetic construct
  source 1..75: mol_type = other DNA
gttatacataacagacgacgacatgatttttactgcaaaccagttattcaaaattaagtcagaaaatagtgaaac

SEQ ID NO: 488970 - DNA, 75 bp, synthetic construct
  source 1..75: mol_type = other DNA
atgaaaagcgataaattcatagcgtgctgttttgttgaagtgcctaaaggtgatgttttctgcaattatgaattt

SEQ ID NO: 488971 - DNA, 75 bp, synthetic construct
  source 1..75: mol_type = other DNA
aacaaggactgggaagccacggttgaagtcgatcgtaacgacatcgaggacgaccagattatgggctatgccctt

SEQ ID NO: 488972 - DNA, 75 bp, synthetic construct
  source 1..75: mol_type = other DNA
tttgaagtcaactcagaagtccgtcaatcctggactggtgagcgcttcggcaacctttacccttgaatttcaata

SEQ ID NO: 488973 - DNA, 75 bp, synthetic construct
  source 1..75: mol_type = other DNA
gcggaaaaggcaccgtcagccgtgactgggttggtcgcgatgcggcgaaaatcgcggcggcaatcggcctgaacg

SEQ ID NO: 488974 - DNA, 75 bp, synthetic construct
  source 1..75: mol_type = other DNA
cgctggcatgtgatgacccacgccgccagcggtacgctgaactgttggcgcaggctggccgcatgactattcccc

SEQ ID NO: 488975 - DNA, 75 bp, synthetic construct
  source 1..75: mol_type = other DNA
taagctgctggaagtacggggtaaattgcccgaagaaattacctgtcctgattcaggtttggtgataaacactcg

SEQ ID NO: 488976 - DNA, 75 bp, synthetic construct
  source 1..75: mol_type = other DNA
aacaacagggaaaaatgcactggcagatcacctttactctcagggaaaaattaagcgtgccagagaaagcatccg

SEQ ID NO: 488977 - DNA, 75 bp, synthetic construct
  source 1..75: mol_type = other DNA
cgctggcgtggcgacggcgatcctgatctttaccaaaggcggtcagacggacgaggtctggttctacgatctgca

SEQ ID NO: 488978 - DNA, 75 bp, synthetic construct
  source 1..75: mol_type = other DNA
aaatcgacggactatgggaagatttctgggtgggtggtatcaccaacccgctgaccgtaatcgaacagatcacct

SEQ ID NO: 488979 - DNA, 75 bp, synthetic construct
  source 1..75: mol_type = other DNA
gaagatgatcatctgcagttattacgcgaattcttagcgcgtaaagaatacgacgattccggcaatgatatgttt

SEQ ID NO: 488980 - DNA, 75 bp, synthetic construct
  source 1..75: mol_type = other DNA
ggttgagcgaagaagaaagtctatggatccagtcgcgcattcatctacgggctctacgttattatcgtaactggc

SEQ ID NO: 488981 - DNA, 75 bp, synthetic construct
  source 1..75: mol_type = other DNA
gatgacctgctgcgcacaattcaccgaatgatcgataacggtcatgccgctcggttggcagggttttatcaccgc

SEQ ID NO: 488982 - DNA, 75 bp, synthetic construct
  source 1..75: mol_type = other DNA
cctaaatcgactgtaattgagaattcagtatttgctaatttagggagaggaaattgggcatcatgcagagcaaac

SEQ ID NO: 488983 - DNA, 75 bp, synthetic construct
  source 1..75: mol_type = other DNA
tactttgctccagctgacggcaatgctgccaaaagacaaaatctggcggtatctgagtgggagaataggaaaaat

SEQ ID NO: 488984 - DNA, 75 bp, synthetic construct
  source 1..75: mol_type = other DNA
tactttgcgccagttgacagcaatgctgccaaaagacaaaatttggcggtctctgagtgggcgcaaaggaaaaat

SEQ ID NO: 488985 - DNA, 75 bp, synthetic construct
  source 1..75: mol_type = other DNA
gcgccacattatccgcacgatggttgaaatgatggagccgaaccccgcccgcggcgagacgatttgcgatccggc

SEQ ID NO: 488986 - DNA, 75 bp, synthetic construct
  source 1..75: mol_type = other DNA
aatcgtctggccgcagttcctgacactgatggcaattggcggcgcgtttttcaccatcgcactgctgcgattcag

SEQ ID NO: 488987 - DNA, 75 bp, synthetic construct
  source 1..75: mol_type = other DNA
tgccgataacgccgtttgagatcatgatggcgaaggtctggtcgatggggctggtggtgctggtggtatcgggat

SEQ ID NO: 488988 - DNA, 75 bp, synthetic construct
  source 1..75: mol_type = other DNA
ttcatcttcggtgctgaagcccgtgcaaatggtggctacggcttctggcagatggcgtatggctccaccggggag

SEQ ID NO: 488989 - DNA, 75 bp, synthetic construct
  source 1..75: mol_type = other DNA
actcaagccccaccgttacggaccaaaaccagtgggtgaaagaagcgaaagcgaaaatcgccaaagagcatcctg

SEQ ID NO: 488990 - DNA, 75 bp, synthetic construct
  source 1..75: mol_type = other DNA
tgccgcaatctctatgaatgtgcaggccgcagagcgtattgcatttattcccaaactggttggcgtgggattttt

SEQ ID NO: 488991 - DNA, 75 bp, synthetic construct
  source 1..75: mol_type = other DNA
agacgccaccgacggcattgcggtcagaaaaagatgatattgaatcgcccattgaaaaactggagggcagcgtcg

SEQ ID NO: 488992 - DNA, 75 bp, synthetic construct
  source 1..75: mol_type = other DNA
atggctcgccttgcagattacagcaatgacgaaggtgtgtcatggcctgcagtggagaccattcgtcgtcagatt

SEQ ID NO: 488993 - DNA, 75 bp, synthetic construct
  source 1..75: mol_type = other DNA
cgggccgacagaacccagtgtttctggtcaggtacagttgattaataacttcgtcaatcagggttataacgccat

SEQ ID NO: 488994 - DNA, 75 bp, synthetic construct
  source 1..75: mol_type = other DNA
atgacacttcatcgctttaagaaaatcgccttacttagcgcccttggcattgccgcaatttctatgaatgtgcat

SEQ ID NO: 488995 - DNA, 75 bp, synthetic construct
  source 1..75: mol_type = other DNA
agtggagaccattcgtcgtcagattggggcaaagagtgaatcaacggttaaagcggcgatagcggaactggaaaa

SEQ ID NO: 488996 - DNA, 75 bp, synthetic construct
  source 1..75: mol_type = other DNA
gaccagttcctgccactgcagcgtgacatgattggtaagtttggtgcggccaaagaccagtggttcagttccttc

SEQ ID NO: 488997 - DNA, 75 bp, synthetic construct
  source 1..75: mol_type = other DNA
tgctgcgcaccaaactgccgcgcggtattccgttgtgtatccatctgatgtccagtcagctggttggtgacagga

SEQ ID NO: 488998 - DNA, 75 bp, synthetic construct
  source 1..75: mol_type = other DNA
ccgtaattttagaggcgcagaatgtgtggataacctacaaaggaaagctaccaggaagaattactgattctctga

SEQ ID NO: 488999 - DNA, 75 bp, synthetic construct
  source 1..75: mol_type = other DNA
atgacgaccaagaccccagcccggcaacatactggctgccgcacgaagtccaaagccagataccaaacccaccag

SEQ ID NO: 489000 - DNA, 75 bp, synthetic construct
  source 1..75: mol_type = other DNA
tccgcaactggaagcgctgataagctggcactgttgcaaagttagcgatgaggcagccttttgtcttattcaaag

SEQ ID NO: 489001 - DNA, 75 bp, synthetic construct
  source 1..75: mol_type = other DNA
ggttgtgttcagtgcgaaaaaacgccagtggggaagtcaggaagatttggcgtgcgcacagtggatctggggacg

SEQ ID NO: 489002 - DNA, 75 bp, synthetic construct
  source 1..75: mol_type = other DNA
tcttgaacgccgaattgaggcttttgccagcaaagctgatttggtgccgggtgagcaaccagaagacaacaaagt

SEQ ID NO: 489003 - DNA, 75 bp, synthetic construct
  source 1..75: mol_type = other DNA
tgcgttaagtaaaaagcataatcgcagcaaattgaatatgatccgccatgctatcctcatgttagcggagtctga

SEQ ID NO: 489004 - DNA, 75 bp, synthetic construct
  source 1..75: mol_type = other DNA
ttcgtggaaacgagctgacgcaaagcggcaaagaaatctggcagagcatggtcaacgacatgagcgataccgtta

SEQ ID NO: 489005 - DNA, 75 bp, synthetic construct
  source 1..75: mol_type = other DNA
atgtcccataccggagggaaagaaggaacgtatcctggcacccgcgccagcgcaaccatgattggcgacgatgaa

SEQ ID NO: 489006 - DNA, 75 bp, synthetic construct
  source 1..75: mol_type = other DNA
tgtgatggacacgcttttactgccgtgggatgtgttccgcaaagacagctcggtgcgctcacgcgttgaaaaaag

SEQ ID NO: 489007 - DNA, 75 bp, synthetic construct
  source 1..75: mol_type = other DNA
gaacataccctggcacccgtgccagcgccaccatgattggtgacaatgaaaccaactggggcactaagtcactgg

SEQ ID NO: 489008 - DNA, 75 bp, synthetic construct
  source 1..75: mol_type = other DNA
gaaatcctaaagccttttttaatgactcaaagttaataaaaaaaataacaaaaaaagaaatagagaaaattgcta

SEQ ID NO: 489009 - DNA, 75 bp, synthetic construct
  source 1..75: mol_type = other DNA
tcttcttcgtgattttaatactccaccctttaaaaaagggccggcttactggcttcatccggggctgacttatct

SEQ ID NO: 489010 - DNA, 75 bp, synthetic construct
  source 1..75: mol_type = other DNA
gtggataacctacaaaggaaagctaccgggaagaattactggttctctgaagacgccgccgacggcattgcggtc

SEQ ID NO: 489011 - DNA, 75 bp, synthetic construct
  source 1..75: mol_type = other DNA
taataatgatctggttaaactggcggctgcagaaaacccaacagcacaaataatttataaaccacatcctgatgt

SEQ ID NO: 489012 - DNA, 75 bp, synthetic construct
  source 1..75: mol_type = other DNA
tctcatagaaatgccatgggggttgatttatttttggatgtgttggataccaaagctcaaatatgttgtgttcca

SEQ ID NO: 489013 - DNA, 75 bp, synthetic construct
  source 1..75: mol_type = other DNA
aaggttgctaaaaaataaaaatattaaaataaattatgttgaagatggttttattcgatcagttgagttaggtgc

SEQ ID NO: 489014 - DNA, 75 bp, synthetic construct
  source 1..75: mol_type = other DNA
ctcgactgcacggataacgttgcggtacgtaatcaattgaacgctggctgttttgccgcaaaggtgccgctggtt

SEQ ID NO: 489015 - DNA, 75 bp, synthetic construct
  source 1..75: mol_type = other DNA
gctctcaaatctgcaacgccagacgctacacagtgacgctacggtcgggcaaccgaaggttgaatctgctcgtga

SEQ ID NO: 489016 - DNA, 75 bp, synthetic construct
  source 1..75: mol_type = other DNA
accggccagcgggaaaatcgtcatgtacgatgcgatgacctgtcagtttcgcgaaatgaaactgatgagtaatcc

SEQ ID NO: 489017 - DNA, 75 bp, synthetic construct
  source 1..75: mol_type = other DNA
tgtctcctgaagttcaccgggcgctaaaagtgcgtgcggcgcttaacgacaggagcactgatgcggaaatacgag

SEQ ID NO: 489018 - DNA, 75 bp, synthetic construct
  source 1..75: mol_type = other DNA
ccgcgtgtatgagcgtgttggtgattcggatgaatatcgtccgattgccctcgatattgcaggtgcaggggtgtg

SEQ ID NO: 489019 - DNA, 75 bp, synthetic construct
  source 1..75: mol_type = other DNA
aatacactaccacccaggctccagagggatactggactgatgctcgcggcgttctgacgccagtcagtctgatta

SEQ ID NO: 489020 - DNA, 75 bp, synthetic construct
  source 1..75: mol_type = other DNA
tgcgtaatcaacttaacgcgggctgttttgccgcaaaggtgccgctggtttctggcgcggcgattcgtatggaag

SEQ ID NO: 489021 - DNA, 75 bp, synthetic construct
  source 1..75: mol_type = other DNA
tgctgcgctacaaccggcaaatcatcctgcgtggttttgattttgacggtcaggaagcgctgaaggattctcgcg

SEQ ID NO: 489022 - DNA, 75 bp, synthetic construct
  source 1..75: mol_type = other DNA
ggcactggcgcgaatcaatcctcacatcgcgattacaccggtgaatgcgctgcttgacgacgctgaacttgctgc

SEQ ID NO: 489023 - DNA, 75 bp, synthetic construct
  source 1..75: mol_type = other DNA
gatggcaccgttgatcggcgtaattggttcgttgcaggcaatggaagcgatcaaactgctggcaggttatggcaa

SEQ ID NO: 489024 - DNA, 75 bp, synthetic construct
  source 1..75: mol_type = other DNA
tgcttgatgacgctgaacttgctgcgatgattgcaaaacacgatctggtactcgactgtacggataacgttgcgg

SEQ ID NO: 489025 - DNA, 75 bp, synthetic construct
  source 1..75: mol_type = other DNA
acctgccagcggaaaaatcgttatgtacgatgcgatgacctgtcagttccgcgaaatgaaactgatgcgcaatcc

SEQ ID NO: 489026 - DNA, 75 bp, synthetic construct
  source 1..75: mol_type = other DNA
aaatactggcagcggcagtgcaaccgctggagctggatgtcattggtcgagaagttggattaagcgaaaaaacca

SEQ ID NO: 489027 - DNA, 75 bp, synthetic construct
  source 1..75: mol_type = other DNA
aatgatattattgatcttgcgaatttaacatgtcataaaaacactgtcgcacctaaattaatatcatttgagtag

SEQ ID NO: 489028 - DNA, 75 bp, synthetic construct
  source 1..75: mol_type = other DNA
cccaattcgttgcccaaaccgctatgtgctgtggagaagggggaatcaaagcctgggattatgttcgaatggggt

SEQ ID NO: 489029 - DNA, 75 bp, synthetic construct
  source 1..75: mol_type = other DNA
acgaggcgctaaccctgtacaaatacgatagtgccggaagccgaatgtttgaagaattggtggcaggaagcgatc

SEQ ID NO: 489030 - DNA, 75 bp, synthetic construct
  source 1..75: mol_type = other DNA
atgaaaaaaaccacattagcattgagtgcccttgctctgagtttaggtttggcgttatctccgctctatgcgaca

SEQ ID NO: 489031 - DNA, 75 bp, synthetic construct
  source 1..75: mol_type = other DNA
cccagggcggtcagatcgcgagcatgcgtatccgtatgttcagtcaaattgccaatatcatcgtgtactgtctcg

SEQ ID NO: 489032 - DNA, 75 bp, synthetic construct
  source 1..75: mol_type = other DNA
ccgggggccttctaccatgttcactggtacaaatacccgctcacctactggctgaacattatcacgtcgatgggc

SEQ ID NO: 489033 - DNA, 75 bp, synthetic construct
  source 1..75: mol_type = other DNA
tccggcagagtttaaagtcgactgccaccattggttgatcctgcacgggcgttatacctgcattgcccgcaagcc

SEQ ID NO: 489034 - DNA, 75 bp, synthetic construct
  source 1..75: mol_type = other DNA
ttccggagaacttggtgacggcagttgaaaccaatgtgttgaggttgcacgatcggttaagccgagaatacggta

SEQ ID NO: 489035 - DNA, 75 bp, synthetic construct
  source 1..75: mol_type = other DNA
aaatactgacggcggcagtacagccgctagagcttgaagagattggccgggaagttggcttgtccgaaagcgata

SEQ ID NO: 489036 - DNA, 75 bp, synthetic construct
  source 1..75: mol_type = other DNA
aaaataatgaaaagattatctataaccgtccgtttaaccttgctttttatgttgctgctgtctgttgctggcgcc

SEQ ID NO: 489037 - DNA, 75 bp, synthetic construct
  source 1..75: mol_type = other DNA
gatgtcgccattcgcaggctccgcgcaaaagttgatgatccttttccggtgatgcttccaattagtagaacatgt

SEQ ID NO: 489038 - DNA, 75 bp, synthetic construct
  source 1..75: mol_type = other DNA
caccgatgtcagcgttaataaggcgacggcgaagctctacccggtggctaatacgcctgcggcaatgctcgaact

SEQ ID NO: 489039 - DNA, 75 bp, synthetic construct
  source 1..75: mol_type = other DNA
tgaacggctggctgccaccatcactccgcagcatctgatgtttaaccgcaaccatatgctggttggtggcgtgcg

SEQ ID NO: 489040 - DNA, 75 bp, synthetic construct
  source 1..75: mol_type = other DNA
aggacccgctttatattgcctaccacgatgaagagtggggcgtgcctgaaactgacagtaaaaaactgttcgaaa

SEQ ID NO: 489041 - DNA, 75 bp, synthetic construct
  source 1..75: mol_type = other DNA
aaacgtggttttaagtttgtcggtaccacaatctgttactcctttatgcaggcatgtgggctggtgaatgatcat

SEQ ID NO: 489042 - DNA, 75 bp, synthetic construct
  source 1..75: mol_type = other DNA
aggacccgctttatattgcctaccatgataatgagtggggcgtgcctgaaactgacagtaaaaaactgttcgaaa

SEQ ID NO: 489043 - DNA, 75 bp, synthetic construct
  source 1..75: mol_type = other DNA
gcacagtggatctggggacgaatcgtgagtctttacgagcaggcagccagcgatgatggcgagatcactcgaccg

SEQ ID NO: 489044 - DNA, 75 bp, synthetic construct
  source 1..75: mol_type = other DNA
aagccggaaccagtggcgaaagtgtgctatgcacaaatggtgaagcagttcctgagtcgtgacccgctcgaatgc

SEQ ID NO: 489045 - DNA, 75 bp, synthetic construct
  source 1..75: mol_type = other DNA
atcgaaagactggtacaggataccgggattatccgccatcgtggaaaaatccaggccattatcggcaatgcgcgc

SEQ ID NO: 489046 - DNA, 75 bp, synthetic construct
  source 1..75: mol_type = other DNA
tggcgcgggtgcgcactctcctgcggcgcggggcggcggtaattatcgaaagtcagtttcaggttgccgacctga

SEQ ID NO: 489047 - DNA, 75 bp, synthetic construct
  source 1..75: mol_type = other DNA
tgaactgatccttcgcgcctgcaggaacatgattaagctgctcacccaggatgacaccgtcaacctcagcaagtt

SEQ ID NO: 489048 - DNA, 75 bp, synthetic construct
  source 1..75: mol_type = other DNA
aaggtgaacaggcgaaaaagcagctgattgctgctgcactggcgcagtttggtgagtatggaatgaacgccacca

SEQ ID NO: 489049 - DNA, 75 bp, synthetic construct
  source 1..75: mol_type = other DNA
ctgtgcggcggccggatggtataccgccgggccattgcggggctgaatgtatcagggctgaagaaaaacgcgcgg

SEQ ID NO: 489050 - DNA, 75 bp, synthetic construct
  source 1..75: mol_type = other DNA
atgctgttttatatgtctttgtgtgtgtcgtttgcgatattttttttgcacaatcatgaatttccaagttctcag

SEQ ID NO: 489051 - DNA, 75 bp, synthetic construct
  source 1..75: mol_type = other DNA
tatccgtctggggcgttcgcctgtacagcgttgtgtgaatcatatttctgaacctgacaccgaaattccaccagg

SEQ ID NO: 489052 - DNA, 75 bp, synthetic construct
  source 1..75: mol_type = other DNA
gggagaaaacgcgtcggcgttttggggcgttaatattgctgtttgatgaggcggaagaagagctggaagggcatt

SEQ ID NO: 489053 - DNA, 75 bp, synthetic construct
  source 1..75: mol_type = other DNA
gcttcgacggattcagaagaatatttatctgtattatgttgtcatcagtatggtccggagtgatgtggtttttta

SEQ ID NO: 489054 - DNA, 75 bp, synthetic construct
  source 1..75: mol_type = other DNA
gtgcattggctctgagtttaggtttggcgttatctccgctctctgcaacggcggctgagacttcttcagcaacga

SEQ ID NO: 489055 - DNA, 75 bp, synthetic construct
  source 1..75: mol_type = other DNA
tttgccctgctttatggcttgattctgcatccgatcgccatgaatacgtttatcaaaaacaagccgtttgagaaa

SEQ ID NO: 489056 - DNA, 75 bp, synthetic construct
  source 1..75: mol_type = other DNA
cattatgggaaccgagctgaactctgaactggcgaaagcaatgaaagttgacgcccagcgcggtgctttcgtaag

SEQ ID NO: 489057 - DNA, 75 bp, synthetic construct
  source 1..75: mol_type = other DNA
aaaattgcttatctacgaaaggtcgatccttatgcatttgaagaactgattctaaccctgcttcagcgcaaaggt

SEQ ID NO: 489058 - DNA, 75 bp, synthetic construct
  source 1..75: mol_type = other DNA
ctgttgagacgattcgaaaagctggctctcagtgaatacgggaatgtcgacggcgtaaaagccatcagaggaatt

SEQ ID NO: 489059 - DNA, 75 bp, synthetic construct
  source 1..75: mol_type = other DNA
agtgtggtgcaattatgaatcagggcgcagcaatggttgttccaatggttatggggtttgagggccaatggaacg

SEQ ID NO: 489060 - DNA, 75 bp, synthetic construct
  source 1..75: mol_type = other DNA
tgccgatgctgacagctatggaagtgccgcgtcctgaagaaatggcaaagtggtgtcacacacttgattatctgc

SEQ ID NO: 489061 - DNA, 75 bp, synthetic construct
  source 1..75: mol_type = other DNA
aatgaacgatgtcctgccgctaccacttgagattgaatttgttcatctgggagagaaaacgcgtcgccgtgcgcg

SEQ ID NO: 489062 - DNA, 75 bp, synthetic construct
  source 1..75: mol_type = other DNA
gcatatcaaatacaaataccgctacccggaaaatcagggcaagtttgatggcaataccgatcatgttccgcctgg

SEQ ID NO: 489063 - DNA, 75 bp, synthetic construct
  source 1..75: mol_type = other DNA
atgtgtatctaccttaacttaatgattttgataaaaatcattaggggattcatcagggctaaacctctttttagc

SEQ ID NO: 489064 - DNA, 75 bp, synthetic construct
  source 1..75: mol_type = other DNA
gcaatatctaccggcttaatgtggaaaaactcgaagctgcagcagcggcagcgcgagaggcatataaaccgaaaa

SEQ ID NO: 489065 - DNA, 75 bp, synthetic construct
  source 1..75: mol_type = other DNA
aacatcgtggtatcgagctatgatgcggttcgccaagggcagcgcgtggccacactaaccgcctcatgggatgcg

SEQ ID NO: 489066 - DNA, 75 bp, synthetic construct
  source 1..75: mol_type = other DNA
cgggattccctgcagtcgagaatgaaactacggttggcgtatcgctgacaaaggccacaccatggacccgcgcac

SEQ ID NO: 489067 - DNA, 75 bp, synthetic construct
  source 1..75: mol_type = other DNA
cgtttcgccgtgactactatggtcggcgggactgtaacactgccgttcgttatccagaatggccaggccattatc

SEQ ID NO: 489068 - DNA, 75 bp, synthetic construct
  source 1..75: mol_type = other DNA
agaaggcacagttatcagcaccaccagcgaaccggagtattactttgttgtggttctggcggggcagtcaaacag

SEQ ID NO: 489069 - DNA, 75 bp, synthetic construct
  source 1..75: mol_type = other DNA
gaaggccttccgctgccggagacatatgaccgtccggacccgcgtattaagcagctggcgcgccgcagtacggtg

SEQ ID NO: 489070 - DNA, 75 bp, synthetic construct
  source 1..75: mol_type = other DNA
aacatcgtggtatcgagctatgatgcggttcgccaggggcaacgcgtggccacgctaaccgcctcgtgggatgcg

SEQ ID NO: 489071 - DNA, 75 bp, synthetic construct
  source 1..75: mol_type = other DNA
attgctggttggttttgatgaaagccaactccctacccgctttgagggaattaatcgacgtatcgcagagataat

SEQ ID NO: 489072 - DNA, 75 bp, synthetic construct
  source 1..75: mol_type = other DNA
tgttggtggtcgcaaaagataaaactgtcacaaatgtcactgcgggtgatttcactgccccggcaacattcaccg

SEQ ID NO: 489073 - DNA, 75 bp, synthetic construct
  source 1..75: mol_type = other DNA
gatttattacaggtattcgattaggtacaaaatcgtcagtgcaaacatggaatggtcctggttggaacgataaat

SEQ ID NO: 489074 - DNA, 75 bp, synthetic construct
  source 1..75: mol_type = other DNA
gggaacagtgccagtatagacagagtggatactacgattgccgataccagccaggcggtcgcacgcgcgctggtc

SEQ ID NO: 489075 - DNA, 75 bp, synthetic construct
  source 1..75: mol_type = other DNA
atggggattctagacggcctcatgcaggcgcaatcttctggcaaagatactgttaaaaaggtagggatcggcggg

SEQ ID NO: 489076 - DNA, 75 bp, synthetic construct
  source 1..75: mol_type = other DNA
atgaataaagtatcattatttaatgattttgtgaatgttaaaatgtctcagataatttgtttaagcgttatttat

SEQ ID NO: 489077 - DNA, 75 bp, synthetic construct
  source 1..75: mol_type = other DNA
gtggtggagcagatgtcagagctgacggccatgacagcctcgtttgtgctggcaacaccgaccgagacggacggg

SEQ ID NO: 489078 - DNA, 75 bp, synthetic construct
  source 1..75: mol_type = other DNA
cagaatgagacctgtaagcggttgctggatattcccggcgttgggccacttattgcgacggcagcggtggctatc

SEQ ID NO: 489079 - DNA, 75 bp, synthetic construct
  source 1..75: mol_type = other DNA
gacataacggtatcttatcctgctattcggatcgggatctgctattgatatataatagctggaaatatactaagg

SEQ ID NO: 489080 - DNA, 75 bp, synthetic construct
  source 1..75: mol_type = other DNA
gattgggccgacgttaaccttagctatgaacgtggcaacacctttatgtttggcgtcacgctgcgcaccaacttt

SEQ ID NO: 489081 - DNA, 75 bp, synthetic construct
  source 1..75: mol_type = other DNA
ttgagtagcgccacactggtaaatgaactgcttgaacagctggaaaacagccctttaccaccacggttattacat

SEQ ID NO: 489082 - DNA, 75 bp, synthetic construct
  source 1..75: mol_type = other DNA
gcgcaggcctggctggataacggcgatgccgatgccacaccggataccattaccaccccgtttattatcaccccg

SEQ ID NO: 489083 - DNA, 75 bp, synthetic construct
  source 1..75: mol_type = other DNA
tcatcagagttgaaactgccaccggtgagctggcgaaaacgcagcgccgcagcctggcggatacccttcagcagt

SEQ ID NO: 489084 - DNA, 75 bp, synthetic construct
  source 1..75: mol_type = other DNA
ggggtatcgggttaatcgcaatctcgacttccagctaaacgtttacaacctgtttgataccgattacgtcgcctc

SEQ ID NO: 489085 - DNA, 75 bp, synthetic construct
  source 1..75: mol_type = other DNA
atgttaatattttttatgaacatcccgccctcaataaaataactgttgatggtttttttagaattgcagttcctt

SEQ ID NO: 489086 - DNA, 75 bp, synthetic construct
  source 1..75: mol_type = other DNA
ttgataaattaattaaccagacgctggattttattcgaggtgctcctgattttggcggtgcagtcgataaggaaa

SEQ ID NO: 489087 - DNA, 75 bp, synthetic construct
  source 1..75: mol_type = other DNA
tggctggtgtagctactttggcagcatctcttttcaaaaatacagaacttcgggtgatagatatcgttgagttgt

SEQ ID NO: 489088 - DNA, 75 bp, synthetic construct
  source 1..75: mol_type = other DNA
ggaaaggcggtcagcaccacgcagggcgggctgacgcgcagtatggagtacgatgctgccggacgtgtcatcagc

SEQ ID NO: 489089 - DNA, 75 bp, synthetic construct
  source 1..75: mol_type = other DNA
tacgtcgcctcaatcaacaagagcggctaccgttatcacccgggcgagccaagaaccttcttgctcacagccaat

SEQ ID NO: 489090 - DNA, 75 bp, synthetic construct
  source 1..75: mol_type = other DNA
acagccataaacattaatggcgtcagattcgatggttcggctgacattaatatcaatactctggtatctcgcggt

SEQ ID NO: 489091 - DNA, 75 bp, synthetic construct
  source 1..75: mol_type = other DNA
gtttaggagatgtcgcagaattacaacgtggttttgatctacccagtactaagcgtattgaaggggagattccta

SEQ ID NO: 489092 - DNA, 75 bp, synthetic construct
  source 1..75: mol_type = other DNA
ggagtatctgcaaagtatatttttgaagcaatgcaaatgttgaaatttaaaataggtgggcatcagcggcattgg

SEQ ID NO: 489093 - DNA, 75 bp, synthetic construct
  source 1..75: mol_type = other DNA
ctacgaagatttctcttttttgaaacttccttatcctgagattgaagaacaacaaaaaatcgccgatgttctttc

SEQ ID NO: 489094 - DNA, 75 bp, synthetic construct
  source 1..75: mol_type = other DNA
gcggcaggaaggctcacggcgcagacggacgcggcgggacggcggacagagtacggtctgaatgtggtgtccggc

SEQ ID NO: 489095 - DNA, 75 bp, synthetic construct
  source 1..75: mol_type = other DNA
gtcacggaaaagctgctcgccaatagtcagcagcagaaaaaagccctgatgcagcaattgcttactgggaaaaaa

SEQ ID NO: 489096 - DNA, 75 bp, synthetic construct
  source 1..75: mol_type = other DNA
cacactttcacattttggtaagtgtattagaggggttagttacaagcctgagaatatatgtgaaaacgaaagtga

SEQ ID NO: 489097 - DNA, 75 bp, synthetic construct
  source 1..75: mol_type = other DNA
ccacagttaggggcgttagttaatactggggtccgaaataatggtttattaaatatcaaaccgacagagtttatg

SEQ ID NO: 489098 - DNA, 75 bp, synthetic construct
  source 1..75: mol_type = other DNA
gtaccgttggatctcttctcgtctggcccgacacgcagccgtgcggcaatcggctggacgccgctgacgcgtgac

SEQ ID NO: 489099 - DNA, 75 bp, synthetic construct
  source 1..75: mol_type = other DNA
ctgataaacaaacactgtttaccgccgctaccgcgggcaacggcgacaacttcaccaaactggcagaggcactgg

SEQ ID NO: 489100 - DNA, 75 bp, synthetic construct
  source 1..75: mol_type = other DNA
tatacagttttaaccccaataaaaaaaattgtagatgagttttataagcaatattacaaatcttacgattttatt

SEQ ID NO: 489101 - DNA, 75 bp, synthetic construct
  source 1..75: mol_type = other DNA
ctgtccgctgccgacaccgaaatctccacacttgagaaaaaactcgcctgcctgaaaaacgagaagaaagccttg

SEQ ID NO: 489102 - DNA, 75 bp, synthetic construct
  source 1..75: mol_type = other DNA
gtttaagactatttcgcaaaagaataattctgaggatgaggagcttctggcagttactcaagacctgggtgtaat

SEQ ID NO: 489103 - DNA, 75 bp, synthetic construct
  source 1..75: mol_type = other DNA
agcgaatctggatatccgcatcccgtatgccacagacccggcaggtaaccgcctgcccgacccggagctgcaccc

SEQ ID NO: 489104 - DNA, 75 bp, synthetic construct
  source 1..75: mol_type = other DNA
gcctcactgtttggcggcgtggaataccagacgccctggcaaccgctgcgtctgaaactggagtatgaaggcaat

SEQ ID NO: 489105 - DNA, 75 bp, synthetic construct
  source 1..75: mol_type = other DNA
aaaggaataaagtagtcggcaattattatttgggtgggtggtcaatggcatttgatacaactatagctatgccaa

SEQ ID NO: 489106 - DNA, 75 bp, synthetic construct
  source 1..75: mol_type = other DNA
tctcgatgcctcaggctctatgaccggccagtttaaaaaagggcatgtacaggccgttcttgaccgtatagctgt

SEQ ID NO: 489107 - DNA, 75 bp, synthetic construct
  source 1..75: mol_type = other DNA
ggcgatacgctgtatgttaccggcgagcaggtgaaatatcgtgattcgcgcgaagggatcatccgtgctaatcgg

SEQ ID NO: 489108 - DNA, 75 bp, synthetic construct
  source 1..75: mol_type = other DNA
tcgcgctacacattaaaaacgtcttgtgtgacaagcgtaagaatgggatctgctgccagttataaaccatcaagc

SEQ ID NO: 489109 - DNA, 75 bp, synthetic construct
  source 1..75: mol_type = other DNA
ttttgttatgcctggcggttggtctgatcgcggttcatatgcggctggttttttctcaatatattctactgctga

SEQ ID NO: 489110 - DNA, 75 bp, synthetic construct
  source 1..75: mol_type = other DNA
attaccagaattccttggctttttctccggcaaacgcttcgtggctatcgcgacggcttttctttccttcatcct

SEQ ID NO: 489111 - DNA, 75 bp, synthetic construct
  source 1..75: mol_type = other DNA
gtagatgattatactacatggattgctgcaaccgtagaaggaaatacacttaatcattactataatatttatggg

SEQ ID NO: 489112 - DNA, 75 bp, synthetic construct
  source 1..75: mol_type = other DNA
caaacgcatgcagttcatgctgaaggtgattgtagtacatgcttatctgatggagttgattcatgaaaatcaagc

SEQ ID NO: 489113 - DNA, 75 bp, synthetic construct
  source 1..75: mol_type = other DNA
ttccgcttcacacagctaccctgactctccggcttgattatccccccagtcctggatttcacagtacccctgaga

SEQ ID NO: 489114 - DNA, 75 bp, synthetic construct
  source 1..75: mol_type = other DNA
gctcgtatcagtctggaaaagaagctcgaaacaaaatctccgcgacttgtaagtctcgctaaaaaggcctcagtc

SEQ ID NO: 489115 - DNA, 75 bp, synthetic construct
  source 1..75: mol_type = other DNA
cgaaagaggagtacggggaaggggatttcaccaaaggcgtgtatgtgtctgtaccgctggatctcttctcgtctg

SEQ ID NO: 489116 - DNA, 75 bp, synthetic construct
  source 1..75: mol_type = other DNA
ccccgtggttgcccgttcgttttaaagacggaacgacaggcaagctggcaccagtcgatctggctgatgaaaatg

SEQ ID NO: 489117 - DNA, 75 bp, synthetic construct
  source 1..75: mol_type = other DNA
gcctctgacgacacttatagaattgctggagtatcagggcaatcaacaaacccctttgtggcgaaagctgtggct

SEQ ID NO: 489118 - DNA, 75 bp, synthetic construct
  source 1..75: mol_type = other DNA
cacaggtcgtgaaacttttgaatgccagcaatctaaagcagacaagggtgggcttatggggatttggttttgatt

SEQ ID NO: 489119 - DNA, 75 bp, synthetic construct
  source 1..75: mol_type = other DNA
aatctttatatcctctaaagttgtaattggcgataattgtacgatacaccaaggagttactataggaaaaggcgg

SEQ ID NO: 489120 - DNA, 75 bp, synthetic construct
  source 1..75: mol_type = other DNA
tctatgcatcttttgtatatggtaagccgggtatatatgctttagcttgtttcatgttaaagttgtttagaattg

SEQ ID NO: 489121 - DNA, 75 bp, synthetic construct
  source 1..75: mol_type = other DNA
gcgtggagcgcggaatatgatgaatggggcaaccagcttaatgaggagaacccgcatcatgtgtatcagccgtac

SEQ ID NO: 489122 - DNA, 75 bp, synthetic construct
  source 1..75: mol_type = other DNA
gattgattgctgcaaacagcattactaacagtgcttaccagttcggttatgatatggatgctattgttggcggag

SEQ ID NO: 489123 - DNA, 75 bp, synthetic construct
  source 1..75: mol_type = other DNA
atggcgacactagataccgccattctcagtctcattggtgaggccgatgtacccgatgaccagatcgagaccgct

SEQ ID NO: 489124 - DNA, 75 bp, synthetic construct
  source 1..75: mol_type = other DNA
caggtcatgataccgccagtgttattccgcggtggtaagcatgagaatttcaacagtaataaccaacagtcatac

SEQ ID NO: 489125 - DNA, 75 bp, synthetic construct
  source 1..75: mol_type = other DNA
atggtggttataagggaaaaaccgcacaagcaatttatttcgttccattcatgaaagatgagaatgataataacg

SEQ ID NO: 489126 - DNA, 75 bp, synthetic construct
  source 1..75: mol_type = other DNA
aggaatcagggctgtactataaccgtcaccggtactacgatccgttgcaggggcggtatattactcaggacccga

SEQ ID NO: 489127 - DNA, 75 bp, synthetic construct
  source 1..75: mol_type = other DNA
accagttcgtgaagctaatgggccacgcgctgatcactgaagatggtgaagcgatagaaggggaagctctgaatg

SEQ ID NO: 489128 - DNA, 75 bp, synthetic construct
  source 1..75: mol_type = other DNA
tcggaccgcatcacgcaccggacggtgaacggcgacccggcagagcagtggcagtatgacggccacggctggctg

SEQ ID NO: 489129 - DNA, 75 bp, synthetic construct
  source 1..75: mol_type = other DNA
gggaggtatattacacaagaccccattgggctggcggggggatggaacctgtataattacccactgaatccgata

SEQ ID NO: 489130 - DNA, 75 bp, synthetic construct
  source 1..75: mol_type = other DNA
ttcacgccgctcatccgggtcgagacagagaacggcgagcgggagaaagcgcagcgccgcagcctggcggagaag

SEQ ID NO: 489131 - DNA, 75 bp, synthetic construct
  source 1..75: mol_type = other DNA
actaccactacgacagccagcaccgtctggtgttcgacacgcggatacagcaaggggagccactggtcgagagcc

SEQ ID NO: 489132 - DNA, 75 bp, synthetic construct
  source 1..75: mol_type = other DNA
actaccactacgacagccagcaccgtctggtgttctacacgcggatacagcaaggggagccacgggtcgagagcc

SEQ ID NO: 489133 - DNA, 75 bp, synthetic construct
  source 1..75: mol_type = other DNA
acgcgcgaccgcatgcaccgtgagacggtgcgcagctttggcagcatggcaggcagtaatgccgcatataaactg

SEQ ID NO: 489134 - DNA, 75 bp, synthetic construct
  source 1..75: mol_type = other DNA
aaattggtccacggcgcgcggtcttcgaaaacccgcagcatccttatacgcgtaaattactggcggcagttccgg

SEQ ID NO: 489135 - DNA, 75 bp, synthetic construct
  source 1..75: mol_type = other DNA
ccttcttccgtggtgaccaaggactacacctttaaacgacccggctgggcagggcgttttgatcaggaaggccag

SEQ ID NO: 489136 - DNA, 75 bp, synthetic construct
  source 1..75: mol_type = other DNA
attacgtttctcagcgaatgaccccggagctcatttgcggcgtcagtattgatacccgcattcttgaaacatcat

SEQ ID NO: 489137 - DNA, 75 bp, synthetic construct
  source 1..75: mol_type = other DNA
cctgccgccggtggagtggctgacctacggcagcggttatctggcgggcatgaagcttggcgacacgccgctgct

SEQ ID NO: 489138 - DNA, 75 bp, synthetic construct
  source 1..75: mol_type = other DNA
tggaggaagaaatccgggcagaccgcgtgagcagtgaaagccgggcgtggcttgcgcagtgcgggctgacggtgg

SEQ ID NO: 489139 - DNA, 75 bp, synthetic construct
  source 1..75: mol_type = other DNA
cccggagaaacgcttttcaaaattcccgttacgtgccccatttgcggttttacatcagaagaacttgacgactcc

SEQ ID NO: 489140 - DNA, 75 bp, synthetic construct
  source 1..75: mol_type = other DNA
ctcagcttcgatcttcacagttacgcgtatggtttgcttggactaggtctgcgccttttagagtcagatggcgac

SEQ ID NO: 489141 - DNA, 75 bp, synthetic construct
  source 1..75: mol_type = other DNA
atggaacaggttaaaagaagcaaaagatatcttaatcgaatggagaaaatctactcgggtattatttcttcttca

SEQ ID NO: 489142 - DNA, 75 bp, synthetic construct
  source 1..75: mol_type = other DNA
acaaacagttaatagttatattgagcgagatttagaaagatttaactcaagagttactattggtgattttataac

SEQ ID NO: 489143 - DNA, 75 bp, synthetic construct
  source 1..75: mol_type = other DNA
tgcaaataaaatggggaaatgacaacaatagctcatgttctgtgaattttaaaaaacttagtaattataatccca

SEQ ID NO: 489144 - DNA, 75 bp, synthetic construct
  source 1..75: mol_type = other DNA
gtttaacgtctatcagattgttttgcaggcacagctcgcagcaatctctgcaattcgccccggcgtgcgctgcca

SEQ ID NO: 489145 - DNA, 75 bp, synthetic construct
  source 1..75: mol_type = other DNA
cacttttgacggtcaccggtggcggtatgctaatcggcacaattgccgcattgctgggcgtgggtggcagcgtaa

SEQ ID NO: 489146 - DNA, 75 bp, synthetic construct
  source 1..75: mol_type = other DNA
gtggttggcgggaatattaagcgaggtgttgattcgcgagctgtttattttttatatgctgattacaattgggga

SEQ ID NO: 489147 - DNA, 75 bp, synthetic construct
  source 1..75: mol_type = other DNA
tgtatagaacgaatttttattgcgccataatggaaaaaatactttttgataattgtattctcgatgactcatatt

SEQ ID NO: 489148 - DNA, 75 bp, synthetic construct
  source 1..75: mol_type = other DNA
taatttatttaaagccgaccttagtttctctaaacttgatttaattaactttgaacatgctgatctgtctcgtgt

SEQ ID NO: 489149 - DNA, 75 bp, synthetic construct
  source 1..75: mol_type = other DNA
ttgaacatgctgatctgtctcgtgtcaacctgaataaagcaaccctccagaatataaacttaattgatagcaaac

SEQ ID NO: 489150 - DNA, 75 bp, synthetic construct
  source 1..75: mol_type = other DNA
tttgaaattaatgatttacccaatatgggagcagctggggaatataaagtaacagtatttgaaactgacgggacg

SEQ ID NO: 489151 - DNA, 75 bp, synthetic construct
  source 1..75: mol_type = other DNA
gaactctaaatgcatgctccgctatgcatgttcaattctacaatgcagcaatgaatagagccaatattaaaaata

SEQ ID NO: 489152 - DNA, 75 bp, synthetic construct
  source 1..75: mol_type = other DNA
gctcggttttgaaggccagcaggtgagttgggaaaccgcgcaccgctggcaggttgaacttaatgcaaagctggt

SEQ ID NO: 489153 - DNA, 75 bp, synthetic construct
  source 1..75: mol_type = other DNA
tggctcttcatcatggcgcattgcctacggcttaccgcaaagaaatcgaacgtttgctgcgagatggggtactta

SEQ ID NO: 489154 - DNA, 75 bp, synthetic construct
  source 1..75: mol_type = other DNA
ccctctgataacaaggagctctgcttagcgacagcctggcgtctaattgaagatggacagaccgtacttatctac

SEQ ID NO: 489155 - DNA, 75 bp, synthetic construct
  source 1..75: mol_type = other DNA
ggctattgctaaaggaaaacgcgacagccgggatacagattttcacttcgtaatggctgctgcaagctatcacct

SEQ ID NO: 489156 - DNA, 75 bp, synthetic construct
  source 1..75: mol_type = other DNA
ttgtatttcaaccttgatacgagcttctgtcatatatttgatttctacacagaagaaaatctaactaattattta

SEQ ID NO: 489157 - DNA, 75 bp, synthetic construct
  source 1..75: mol_type = other DNA
ctttcaacgcttgatactgctattctgagccttcttggtgagaatgatatcccggatgaccagattgaaactgct

SEQ ID NO: 489158 - DNA, 75 bp, synthetic construct
  source 1..75: mol_type = other DNA
actatttcggtcataacaccggtcatgctatcggcattgaagtccatgaagatccgcgtttttcaccgcgggaca

SEQ ID NO: 489159 - DNA, 75 bp, synthetic construct
  source 1..75: mol_type = other DNA
acgcttaccactatcgtcaatcaaatcattgccgatgagcagttgcaaacgctcggttttgaaggccagcaggta

SEQ ID NO: 489160 - DNA, 75 bp, synthetic construct
  source 1..75: mol_type = other DNA
gtttaacgtctatcagattgtcctgcaggcacagctcgcggcaatctctgcaattcgccccggcgtgcgctgcca

SEQ ID NO: 489161 - DNA, 75 bp, synthetic construct
  source 1..75: mol_type = other DNA
caggaaacctatggatggtgcaactctcccgatattaatgaacagcttgaaacatatgaggagttcgattttggc

SEQ ID NO: 489162 - DNA, 75 bp, synthetic construct
  source 1..75: mol_type = other DNA
tttccaacctggagcacaggatgcggcacgagggtcgaacatcactctggtcacatccttggatgattttgccaa

SEQ ID NO: 489163 - DNA, 75 bp, synthetic construct
  source 1..75: mol_type = other DNA
aggctgaactcaatgcgaaattggtaagcgccacgccggacgtactgcggcaaatcaaaacgccagaggaggtgg

SEQ ID NO: 489164 - DNA, 75 bp, synthetic construct
  source 1..75: mol_type = other DNA
cgggcgttcagacctctttgagtcggacatgagagacctgtatcgtgaccagtacggagaactcggtgagaacct

SEQ ID NO: 489165 - DNA, 75 bp, synthetic construct
  source 1..75: mol_type = other DNA
taaggttccccagcgtaaagcctctgaggcgcgtaatgctttctctacggagcaggtacccgacgataaccatac

SEQ ID NO: 489166 - DNA, 75 bp, synthetic construct
  source 1..75: mol_type = other DNA
taagatggcggctgttttcaagtgggccgtgcgtaatgacctgattaaaaagaatatgacagaagggctagagct

SEQ ID NO: 489167 - DNA, 75 bp, synthetic construct
  source 1..75: mol_type = other DNA
ttacttatgaccgctacgctaaagaggttgaggtagaccgattggttaacgttcttgctgatgtttataaggaga

SEQ ID NO: 489168 - DNA, 75 bp, synthetic construct
  source 1..75: mol_type = other DNA
ttcagatctctttgagcctgacatgagggatatctaccgggaccaatacggagaacttggtgagagccttaccga

SEQ ID NO: 489169 - DNA, 75 bp, synthetic construct
  source 1..75: mol_type = other DNA
cggcttagctttccactcgtttagacatacggtcgccactcagttaaaacagcatggcgtcgagttggcttacgc

SEQ ID NO: 489170 - DNA, 75 bp, synthetic construct
  source 1..75: mol_type = other DNA
gcagggttctgacccggttaatttactggaattacatggtttccttgaacatttcgcatattatgtttcatttgg

SEQ ID NO: 489171 - DNA, 75 bp, synthetic construct
  source 1..75: mol_type = other DNA
tggccgcggaaatatcagcccgtctggcataccagctggcggtatggcatgaaattgcacagtggtacggcttcg

SEQ ID NO: 489172 - DNA, 75 bp, synthetic construct
  source 1..75: mol_type = other DNA
aggtggcgcggtgtcccgtacccgttttcagctccgtatgctggacagggtgtggtggaacagccggtgtcttct

SEQ ID NO: 489173 - DNA, 75 bp, synthetic construct
  source 1..75: mol_type = other DNA
tgttaagccgcatcctcaacgaaccggaatccgtgtcacaactgccggggcgtacgctccttcggcacgtacacg

SEQ ID NO: 489174 - DNA, 75 bp, synthetic construct
  source 1..75: mol_type = other DNA
atgctctctttttaaagagaccagagttgatggtttctgaaaattatagatttattcaatttattgatttgcttt

SEQ ID NO: 489175 - DNA, 75 bp, synthetic construct
  source 1..75: mol_type = other DNA
gcgcactggatacgtatctgtgctacttcagaaataaaaatctgaataacaatgcggaaataattaactttttcc

SEQ ID NO: 489176 - DNA, 75 bp, synthetic construct
  source 1..75: mol_type = other DNA
agaactggaagccagcgaccctaagcgagaaccgagcgtcacactctacgttaatcgagatattcgactatctgg

SEQ ID NO: 489177 - DNA, 75 bp, synthetic construct
  source 1..75: mol_type = other DNA
agcaacatgaagcagaagcgttgataaaagaagaaaatctcaatgaagaagcgaccaaacgctatattcgcacgt

SEQ ID NO: 489178 - DNA, 75 bp, synthetic construct
  source 1..75: mol_type = other DNA
atgttgggtggagcggacaatccaaatggtgaattaccgtcttatatcactggcgctgacattcttcaccagttg

SEQ ID NO: 489179 - DNA, 75 bp, synthetic construct
  source 1..75: mol_type = other DNA
aatatattggcaataatgtttataacagaacctccggacgattgaagacccgaagtgtcaggaatcctcaggatc

SEQ ID NO: 489180 - DNA, 75 bp, synthetic construct
  source 1..75: mol_type = other DNA
aatagatactgatacgtttttctctcagtggtcaaccaaaaccaagaaagatctgcaaaaaaaatacaagacctt

SEQ ID NO: 489181 - DNA, 75 bp, synthetic construct
  source 1..75: mol_type = other DNA
ggtcctgacttgattcaaagaaagatgttgcaatttttcaggagtagaggggtgttaggtgaagagttcattaat

SEQ ID NO: 489182 - DNA, 75 bp, synthetic construct
  source 1..75: mol_type = other DNA
cgataaaaatcacaaattaacgattcaatattcacaaggttcttttattaccgaagttaagtctttacgcaaaca

SEQ ID NO: 489183 - DNA, 75 bp, synthetic construct
  source 1..75: mol_type = other DNA
tccatatcaacgaagacgatagcagcttgccgggtaagagcatcaagaacgcccacagtgaccgctgtgtcccgc

SEQ ID NO: 489184 - DNA, 75 bp, synthetic construct
  source 1..75: mol_type = other DNA
cgcctgaccgcttcgcttccttctcacaaccgttataaactagcgtcagtatctttacggaccaaggatagacgt

SEQ ID NO: 489185 - DNA, 75 bp, synthetic construct
  source 1..75: mol_type = other DNA
gcccatagcgaccgctgtgttccgctggtcgatggtgcttatggttttgtattggctgattttatgtcactcgtg

SEQ ID NO: 489186 - DNA, 75 bp, synthetic construct
  source 1..75: mol_type = other DNA
aacggtacaggctgacggaaactttttgtccctgccgaaagtgaatgacagtgcgtttggttacggtaaatccgt

SEQ ID NO: 489187 - DNA, 75 bp, synthetic construct
  source 1..75: mol_type = other DNA
cgcggttgagctttccttactaacttttgtgcgttccagtgagttgcgtttcgcgcgttgggatgagttcgactt

SEQ ID NO: 489188 - DNA, 75 bp, synthetic construct
  source 1..75: mol_type = other DNA
atcgcctttagtgggcaaaatgccagagctatactgctattataattccattatctttgcatgcgtaggaacaat

SEQ ID NO: 489189 - DNA, 75 bp, synthetic construct
  source 1..75: mol_type = other DNA
gcacgactggcatggcaactggcggcctggcatgaaattgctcagtggtatggttttgagtccgtgccgggattt

SEQ ID NO: 489190 - DNA, 75 bp, synthetic construct
  source 1..75: mol_type = other DNA
gaacgtgtacaatcacccccggcctgccaattccaaaatataattgtgaggttaaagtctaccatgttcacggtt

SEQ ID NO: 489191 - DNA, 75 bp, synthetic construct
  source 1..75: mol_type = other DNA
gtgcttgggagcaatacgagcagcttgcaaaatggcttatatatttcggcagccttttagaaattggtggaacta

SEQ ID NO: 489192 - DNA, 75 bp, synthetic construct
  source 1..75: mol_type = other DNA
ttgcgacgctgggcgcttttatgggttattcccattcacatattggttttgatcgtggaggacatggcagtgtgg

SEQ ID NO: 489193 - DNA, 75 bp, synthetic construct
  source 1..75: mol_type = other DNA
ccttattgtgcttaaaacgaataatgacctttcatccgataacttcaagcagggtcctaaagtttatctcagaat

SEQ ID NO: 489194 - DNA, 75 bp, synthetic construct
  source 1..75: mol_type = other DNA
gtcaggggaaaaaagatttcatgatccctgatttttacttcccaaaacttctgtcgaagggtgataagtttgata

SEQ ID NO: 489195 - DNA, 75 bp, synthetic construct
  source 1..75: mol_type = other DNA
ccggagttctgctggtggatggtacgcaacgatctggctgaccttattcctgaatcagtggcgagcaaagccctc

SEQ ID NO: 489196 - DNA, 75 bp, synthetic construct
  source 1..75: mol_type = other DNA
agaaagcatggtttaaaccctgagcaatatgctttttggtgttacgatgaatggccagacgtatgggatgaagag

SEQ ID NO: 489197 - DNA, 75 bp, synthetic construct
  source 1..75: mol_type = other DNA
atcagatgaaacacttaaaacaatatatgacattactcaggcagagcgtgatgctgcgctggaaataaagggaat

SEQ ID NO: 489198 - DNA, 75 bp, synthetic construct
  source 1..75: mol_type = other DNA
cgcagtctgtagtggcggtcctgaaccgcaattatcagtaacttttccagtacgagtgcagctatatattatagc

SEQ ID NO: 489199 - DNA, 75 bp, synthetic construct
  source 1..75: mol_type = other DNA
taaaagatgccctgatgataatatacggaatatcaaaagtagatgcttgcagttgcccgaattggtcaaaaggaa

SEQ ID NO: 489200 - DNA, 75 bp, synthetic construct
  source 1..75: mol_type = other DNA
atatcttagaaatgaactcatatttcttgagagaggaataaatatatcagtaagattgcaaaagaagaaatcaac

SEQ ID NO: 489201 - DNA, 75 bp, synthetic construct
  source 1..75: mol_type = other DNA
attgaaaaaacagagtttgttgttatccatattcccgatcagattggcgatgctatggccggtgatgctgccaac

SEQ ID NO: 489202 - DNA, 75 bp, synthetic construct
  source 1..75: mol_type = other DNA
tatttcacacctgaaacaacagttaaggctagtgattttaaaggggagacaagggcagctataatttttgaggtt

SEQ ID NO: 489203 - DNA, 75 bp, synthetic construct
  source 1..75: mol_type = other DNA
cctattctggttaaaaagaaacatattgaattgctgtcatttgaaaatcctcaatctgaacaaccacaaaccgaa

SEQ ID NO: 489204 - DNA, 75 bp, synthetic construct
  source 1..75: mol_type = other DNA
gcaattgatttataaaattcaaaatccagaaacagcagaatgggcggcaaaaatgacaggttcaatcctggtcga

SEQ ID NO: 489205 - DNA, 75 bp, synthetic construct
  source 1..75: mol_type = other DNA
tgaatataatagttcaagttatattcttcgtatatttgggaatgtaacaaatttctcatcacgcaacccattgat

SEQ ID NO: 489206 - DNA, 75 bp, synthetic construct
  source 1..75: mol_type = other DNA
accaagcggcaggaactgcagatcgccgatgccgccctatccgccgctcgggaagatattgcccgggcacgctcc

SEQ ID NO: 489207 - DNA, 75 bp, synthetic construct
  source 1..75: mol_type = other DNA
ctgtattcaagcgggcggaagcggctttgcgcgaggcagaagcccggcaagcctacgcgcaaacccaggcgcgcc

SEQ ID NO: 489208 - DNA, 75 bp, synthetic construct
  source 1..75: mol_type = other DNA
gatgatcgggtgcgctcacaggagtctgtattcaagcgggcggaagcggctttgcgcgaggcagaagcccggcaa

SEQ ID NO: 489209 - DNA, 75 bp, synthetic construct
  source 1..75: mol_type = other DNA
tgggagatgtactttgaggagcgttgtgcagacaaaatgcggcacaaactgcaaggacggaaaaagctcattcaa

SEQ ID NO: 489210 - DNA, 75 bp, synthetic construct
  source 1..75: mol_type = other DNA
aaaatacgcgctgtaatcaaaggcaacaaagctatggatcagcttacgttgatccgcatgctgaacccaatgatc

SEQ ID NO: 489211 - DNA, 75 bp, synthetic construct
  source 1..75: mol_type = other DNA
attttatatcagtttttgtcaaatattacggaataacaccatataaatacagaatgatatttgagcaaaatctag

SEQ ID NO: 489212 - DNA, 75 bp, synthetic construct
  source 1..75: mol_type = other DNA
cccgcatccagacgatttatcagccggggagcttcacgccactcatcagggttgaaaccgccaccggtgagcagg

SEQ ID NO: 489213 - DNA, 75 bp, synthetic construct
  source 1..75: mol_type = other DNA
gctgccggggcagcagtatgatgaggagtccggcctgtattacaaccgccaccgctattatgacccgctgcaggg

SEQ ID NO: 489214 - DNA, 75 bp, synthetic construct
  source 1..75: mol_type = other DNA
catactatgtttatcaacaatctggacgttactttttttgtaagaagctaacgaaaaagagagatacatcaaatt

SEQ ID NO: 489215 - DNA, 75 bp, synthetic construct
  source 1..75: mol_type = other DNA
gtgcagaatattattcttttatttatatattcattacttatagtcgttaaccatttccgctacaaatttctttta

SEQ ID NO: 489216 - DNA, 75 bp, synthetic construct
  source 1..75: mol_type = other DNA
aaaaatatctcaaagtagattcgggttatcaacctcagcagacaacatagctaatttattggctttttttcacga

SEQ ID NO: 489217 - DNA, 75 bp, synthetic construct
  source 1..75: mol_type = other DNA
agagtaaggatgaagtgtttgagcgtggggtgatcaacgtcttcagagggccgaacggaattacaaaaccaattc

SEQ ID NO: 489218 - DNA, 75 bp, synthetic construct
  source 1..75: mol_type = other DNA
gtttcgcacctgcactggtttatatctccgccgtcgcgttgattggcgcgctctcttacatcctgctggtggacg

SEQ ID NO: 489219 - DNA, 75 bp, synthetic construct
  source 1..75: mol_type = other DNA
tgctgctgaagcgcccccaacttcgtgcactgagcctggcaaaacaagaggctgtattttgcagcacccaccccg

SEQ ID NO: 489220 - DNA, 75 bp, synthetic construct
  source 1..75: mol_type = other DNA
ccatttccgctacaaatttcttttatctggcaacacgggtgaaatgattttatattttgctaacgtattttttaa

SEQ ID NO: 489221 - DNA, 75 bp, synthetic construct
  source 1..75: mol_type = other DNA
taaccttaacgacattggtaatgactccaacttattgatagtgttttatgttcagataatgcccgatgactttgt

SEQ ID NO: 489222 - DNA, 75 bp, synthetic construct
  source 1..75: mol_type = other DNA
atcatggtgcatcaccgccgccacctggctgcgcgtgaagaagagatcgcggcaattatcacgttgtttgcacgc

SEQ ID NO: 489223 - DNA, 75 bp, synthetic construct
  source 1..75: mol_type = other DNA
aaacggctgtcgtttcttcgaagtcagcgagctggaagcgatggaagacatttccaacacgtcgttactggctga

SEQ ID NO: 489224 - DNA, 75 bp, synthetic construct
  source 1..75: mol_type = other DNA
accccttcagaagcatctcagcagtgtgagtttgcttatgatgcaatgaatggggatggtcaatctataataata

SEQ ID NO: 489225 - DNA, 75 bp, synthetic construct
  source 1..75: mol_type = other DNA
tgacgtggtaattaaaggttcatcagtctggcatctggaaagcgactcaactgtcagtacacttacgatggataa

SEQ ID NO: 489226 - DNA, 75 bp, synthetic construct
  source 1..75: mol_type = other DNA
aattcgctagagctaaggactatattagtcgaaatttctgatgtttatcagagagataatggtggtgcagtaact

SEQ ID NO: 489227 - DNA, 75 bp, synthetic construct
  source 1..75: mol_type = other DNA
cactattaagtactggtgtgttattttttgcattacagatttccatggtgtgcacttatacatccgataatatca

SEQ ID NO: 489228 - DNA, 75 bp, synthetic construct
  source 1..75: mol_type = other DNA
atgtatctcagtaaagtcatcattgccagggcctggagcagggatctttaccaacttcaccagggattatggcat

SEQ ID NO: 489229 - DNA, 75 bp, synthetic construct
  source 1..75: mol_type = other DNA
gcaaacatcgttgcttatgcaatgcaggttcgcgaaaccgcaatggaacgctacgccatcaaccgcatgactgaa

SEQ ID NO: 489230 - DNA, 75 bp, synthetic construct
  source 1..75: mol_type = other DNA
gcaggtccgatagtcccaattattcctgtaacttgtgataattgcgggaatgttgttcttgttaatgccattatc

SEQ ID NO: 489231 - DNA, 75 bp, synthetic construct
  source 1..75: mol_type = other DNA
cgtccttttcgctgccgacgccgaaatatcaatgctggagaaaaaactcgcctgcctgaaagatgagaaaaaagc

SEQ ID NO: 489232 - DNA, 75 bp, synthetic construct
  source 1..75: mol_type = other DNA
ttattaagcttctctttaagccaaaagatcaactctccagactttcacttgggttgatgagtttaggtatggcag

SEQ ID NO: 489233 - DNA, 75 bp, synthetic construct
  source 1..75: mol_type = other DNA
ggtttgaaaatattgacccacatgcagcagaaaaaatgctttcatccagagaaaaagtcaaaactctccccgtag

SEQ ID NO: 489234 - DNA, 75 bp, synthetic construct
  source 1..75: mol_type = other DNA
cagatcgaatcaacaaggcgcacgctggaagctatggtgcgtgatggtcttcttgagcggattaatggtaagcgt

SEQ ID NO: 489235 - DNA, 75 bp, synthetic construct
  source 1..75: mol_type = other DNA
gcggggagcagacttaccggtatgtgccgaatccttgtgggtgggttgatccgctgggattggctgcaagttcta

SEQ ID NO: 489236 - DNA, 75 bp, synthetic construct
  source 1..75: mol_type = other DNA
cccgcagacaccggctacccggacccgcgcggggaactggacccggaagccgaccccggcctgctgtatgcagga

SEQ ID NO: 489237 - DNA, 75 bp, synthetic construct
  source 1..75: mol_type = other DNA
tgattatgtcaacctgtcgcctcggcgatcccctaccgcaaactttgcgtgaaagggatattccccatgtgctcg

SEQ ID NO: 489238 - DNA, 75 bp, synthetic construct
  source 1..75: mol_type = other DNA
ggcatacagactaatagcggcattattgatgatgatggctcgctctatatgtccggtttgcccgctcagggagcg

SEQ ID NO: 489239 - DNA, 75 bp, synthetic construct
  source 1..75: mol_type = other DNA
tgaaaaatcattaaaacctgtgagcgaaaacggtttaaatggagtcttatctgatcgtaataaaaaaataaaaat

SEQ ID NO: 489240 - DNA, 75 bp, synthetic construct
  source 1..75: mol_type = other DNA
gtcgtggggcgcggatgattattgatccccagggtgaatatctaccgcaaactcgtcagggggcaaaagaagaat

SEQ ID NO: 489241 - DNA, 75 bp, synthetic construct
  source 1..75: mol_type = other DNA
caagaacagtcaaaatctgttaatcaaaggggataaccttgaggtattaaagcatatggttaatgcttattctga

SEQ ID NO: 489242 - DNA, 75 bp, synthetic construct
  source 1..75: mol_type = other DNA
tgataaatctcatgtgtccattaccgttgatcgtggcggacgttctgcttcaaccgatggcgagaagcaatttca

SEQ ID NO: 489243 - DNA, 75 bp, synthetic construct
  source 1..75: mol_type = other DNA
cggatatgccatcgcaactggctgccaggctggatgaggcctgggcggccattaagaccgggctggtcagggggc

SEQ ID NO: 489244 - DNA, 75 bp, synthetic construct
  source 1..75: mol_type = other DNA
attcgccactatcgacacagtgggaattgagctcgttaaatatggttgtaacacgtttatttgtcccgacaattc

SEQ ID NO: 489245 - DNA, 75 bp, synthetic construct
  source 1..75: mol_type = other DNA
atgacaacgttcaccgacaaagaaatgattaaagaaatcaaagagcgaatcggcagcctggacgtgcgagataat

SEQ ID NO: 489246 - DNA, 75 bp, synthetic construct
  source 1..75: mol_type = other DNA
ttgaaattaccggtaagtcagtctgtctggatgtgctgacgcagtggattgaaggatgtgagacaccgcgttacc

SEQ ID NO: 489247 - DNA, 75 bp, synthetic construct
  source 1..75: mol_type = other DNA
agtgatgagcttaaaacaaaatatgcaaatgaaattctagagataaaaagaataatgggagaatacaatctttga

SEQ ID NO: 489248 - DNA, 75 bp, synthetic construct
  source 1..75: mol_type = other DNA
agtaatttttaaaattatgatgcagacaaacggagataatcgtttcttggaagatttgaaactacgtcgtgcaat

SEQ ID NO: 489249 - DNA, 75 bp, synthetic construct
  source 1..75: mol_type = other DNA
cttcttgaagctcttgacagaatggatgatgctgtagatgagtcaatgaagcgtcttcctgagagcatttcaccg

SEQ ID NO: 489250 - DNA, 75 bp, synthetic construct
  source 1..75: mol_type = other DNA
actatcagtttaagaagcaaaaaacgcgtatgtgtcgcgtatagcaaagcagtctggctatattgttacgggtgc

SEQ ID NO: 489251 - DNA, 75 bp, synthetic construct
  source 1..75: mol_type = other DNA
tggtatcgcaaagatgtgctggcaaaagcggggctggaggagccgaaaaactggcaacagctgctggacgttgca

SEQ ID NO: 489252 - DNA, 75 bp, synthetic construct
  source 1..75: mol_type = other DNA
ttgttgtgaaactgatgactgaccgtactttccgcagagggaagtgggaggacagaaagtttcgttataaatttc

SEQ ID NO: 489253 - DNA, 75 bp, synthetic construct
  source 1..75: mol_type = other DNA
cgcacgctataccggaagcacctttcggcgaggagaagcaacgattaagccgggcaatggtgttgagcaggtaac

SEQ ID NO: 489254 - DNA, 75 bp, synthetic construct
  source 1..75: mol_type = other DNA
gccggtggtctgctttcggcggccggaaaccgcatggggctggggcgttttgccgggctgttccgtggtgccggt

SEQ ID NO: 489255 - DNA, 75 bp, synthetic construct
  source 1..75: mol_type = other DNA
gatgccagcgttgaacaagaaaaattaactaatcctagtgctaatttttccgcatgggtcttagatgcctgtgga

SEQ ID NO: 489256 - DNA, 75 bp, synthetic construct
  source 1..75: mol_type = other DNA
ttttaacagcgatgattgtgttgccttctgtttccgtcggaaatgcctgtacaggcatttccctgacctcccgtg

SEQ ID NO: 489257 - DNA, 75 bp, synthetic construct
  source 1..75: mol_type = other DNA
acaaaagcggtctgttgagggtgatgtcgcgcagctggtagcctcatctctgaatatagtcagagaagttatcgc

SEQ ID NO: 489258 - DNA, 75 bp, synthetic construct
  source 1..75: mol_type = other DNA
tatcgacaacctgaatgcggggctgataagcgcgggcggtagcctggacctgagcgccatcggggatatcagcaa

SEQ ID NO: 489259 - DNA, 75 bp, synthetic construct
  source 1..75: mol_type = other DNA
agaatctcgccgagctccatagtctatatctgaccatagaaacggtacgcaatctgatgatacagactggtttat

SEQ ID NO: 489260 - DNA, 75 bp, synthetic construct
  source 1..75: mol_type = other DNA
atgcccgccatcaccgccgtggtgcttggcggtgccaatatttatggtggttccggttccattatcggcaccgcc

SEQ ID NO: 489261 - DNA, 75 bp, synthetic construct
  source 1..75: mol_type = other DNA
tgtaatcttactttttttcttatcacacgtaatatcatatatgtggtttgcgttagaagggcagcaaggaaatca

SEQ ID NO: 489262 - DNA, 75 bp, synthetic construct
  source 1..75: mol_type = other DNA
ctattgctaatttgtgtggcgttttctgccagggtcttctagttcttttaatggcgccggtttatcttaaacttt

SEQ ID NO: 489263 - DNA, 75 bp, synthetic construct
  source 1..75: mol_type = other DNA
tattgccgaaggtattaatcaggaaggtttatcagccgggttattttatttcaaaaactacggttcattgtcgaa

SEQ ID NO: 489264 - DNA, 75 bp, synthetic construct
  source 1..75: mol_type = other DNA
gcagacggtagagacattcaccgggcagatgggttcgactgttttgttcaaagagggggcgctgacggtaaataa

SEQ ID NO: 489265 - DNA, 75 bp, synthetic construct
  source 1..75: mol_type = other DNA
tgctaggaaaatattaagttacatttccaatgaatcggatattcctaatgaacgtaaagaaaaattaattcgtat

SEQ ID NO: 489266 - DNA, 75 bp, synthetic construct
  source 1..75: mol_type = other DNA
actaccactacgacagccagcaccgcctggtgttcaacacgcggatacagcaaggggagccacaggtcgagagcc

SEQ ID NO: 489267 - DNA, 75 bp, synthetic construct
  source 1..75: mol_type = other DNA
cctgcgtcaatgtcggttgtgtgccgtccaagatcatgatccgcgccgcccatatcgcccatctgcgccgggaaa

SEQ ID NO: 489268 - DNA, 75 bp, synthetic construct
  source 1..75: mol_type = other DNA
cgttacgcaggagttggggcgtgttgagattgtcgagttactcagccaggaatcaacggtacttcataacgcagg

SEQ ID NO: 489269 - DNA, 75 bp, synthetic construct
  source 1..75: mol_type = other DNA
tgacgatgcccgtctggaactggccgctgacttttgcggcctgtttttgatgactgacaagcaggcggcgctgcc

SEQ ID NO: 489270 - DNA, 75 bp, synthetic construct
  source 1..75: mol_type = other DNA
tacttttttgcagacgatataattttaatcatgtatggaaaaacgtatcatgaatctttagaaatactcaaggtt

SEQ ID NO: 489271 - DNA, 75 bp, synthetic construct
  source 1..75: mol_type = other DNA
tgtaaaaacaacatctggcaatacaactgtatcgtctggacaatataatgctgtagtatcaattaccacgcagat

SEQ ID NO: 489272 - DNA, 75 bp, synthetic construct
  source 1..75: mol_type = other DNA
gtttgttgcgcgctgccatcggtatgacagctttggtttttacgcggcattaagccagttgttgctggtgctggt

SEQ ID NO: 489273 - DNA, 75 bp, synthetic construct
  source 1..75: mol_type = other DNA
atggggctcggaacgttacctgaaggatgactggcacggcctgcagctttttgccattgatggcgcacagttcag

SEQ ID NO: 489274 - DNA, 75 bp, synthetic construct
  source 1..75: mol_type = other DNA
gactgaaatcgatcgcagactcacccgcgccgcacacatcgcctttatcatgcaatccaacacattgcacagact

SEQ ID NO: 489275 - DNA, 75 bp, synthetic construct
  source 1..75: mol_type = other DNA
atggcaaaccgcaaacagcaccgcgctatcgcggagcgtcgtcacatccagactgaaatcgatcgcagactcacc

SEQ ID NO: 489276 - DNA, 75 bp, synthetic construct
  source 1..75: mol_type = other DNA
atcaatgagcacagtgccagggatgaaagcctgcttcaggagctgtattctgtcatgtcacagcttatggacgcc

SEQ ID NO: 489277 - DNA, 75 bp, synthetic construct
  source 1..75: mol_type = other DNA
aataatattgagaagcaagacaaaaaatttaaaagccttatagaaaaacagggaagacttatattggttatgggg

SEQ ID NO: 489278 - DNA, 75 bp, synthetic construct
  source 1..75: mol_type = other DNA
tatcgcggcagaaacagaagaaagttacggtcccggagacaggcttctgaaactgaaggtgtcactgcaggcgag

SEQ ID NO: 489279 - DNA, 75 bp, synthetic construct
  source 1..75: mol_type = other DNA
tttgttaattatttatttaatttcggaattgaatatcattgattaccaaattaaatttatcattcttgcatacat

SEQ ID NO: 489280 - DNA, 75 bp, synthetic construct
  source 1..75: mol_type = other DNA
ggcgcgccggtcaaagcgaaagacaaaatcttaaacctcctgaactggtttagtggtggcccggaaatcagcgtc

SEQ ID NO: 489281 - DNA, 75 bp, synthetic construct
  source 1..75: mol_type = other DNA
gggaagccctcagcgagcgtgataatctgacactgaaacacgagcagacgtcagagcctcagttgaaagcgactt

SEQ ID NO: 489282 - DNA, 75 bp, synthetic construct
  source 1..75: mol_type = other DNA
atgagtatggtggcctggacgctgcgctttggcttcttcgcctatggcgatccgtcaacaaccggatttattttg

SEQ ID NO: 489283 - DNA, 75 bp, synthetic construct
  source 1..75: mol_type = other DNA
gaaaagaaggctacaagtaatagtattaagattgctttaatgagcaatccagaaaaaccgtatccgcttaacact

SEQ ID NO: 489284 - DNA, 75 bp, synthetic construct
  source 1..75: mol_type = other DNA
ggcctgccgccggtggagtggctgacgtatggcagcggttatcttgcggggatgaagctgggcggaacgccactg

SEQ ID NO: 489285 - DNA, 75 bp, synthetic construct
  source 1..75: mol_type = other DNA
tatcacccggcgcacggtgaacggtgaaccggcggagcagtggcagtatgacgaccacggctggctgacagaaat

SEQ ID NO: 489286 - DNA, 75 bp, synthetic construct
  source 1..75: mol_type = other DNA
atgcttaggcagtcagacatcgccgcggctttccgcgagtccattttgcgcagttccaaggggttccagtacctt

SEQ ID NO: 489287 - DNA, 75 bp, synthetic construct
  source 1..75: mol_type = other DNA
cctttatctgaaatatcaaacagacttttttatgactcacagcaaagctttcaaagggagtttaaaaagaataca

SEQ ID NO: 489288 - DNA, 75 bp, synthetic construct
  source 1..75: mol_type = other DNA
cgatgattaacccggagaacggcaacaccacgccgctgtttgtggcgcaggggaatcagctgttcatgaacgatg

SEQ ID NO: 489289 - DNA, 75 bp, synthetic construct
  source 1..75: mol_type = other DNA
aaaatgtgttggttgcgactgcggcagcaaaacagtctggtgacagaaaagattctgtttatgcttgaaggtgcc

SEQ ID NO: 489290 - DNA, 75 bp, synthetic construct
  source 1..75: mol_type = other DNA
ctgcttttattgcggccatacagcaaaacccgaagggctatctctgcctgcatacagacagattcatcgctgaac

SEQ ID NO: 489291 - DNA, 75 bp, synthetic construct
  source 1..75: mol_type = other DNA
cagttccaaggggttccagtaccttcacacccgcgacttcgttactgcgcttcgccggcgcggcattcattttac

SEQ ID NO: 489292 - DNA, 75 bp, synthetic construct
  source 1..75: mol_type = other DNA
tacgccgccgtcttcagctacctggcggatgacctggcagaactgcaggaccttatcaaccagcaacaccaccac

SEQ ID NO: 489293 - DNA, 75 bp, synthetic construct
  source 1..75: mol_type = other DNA
ctgcaggacgcatcctgaatccgaaaactgcgcgcagccaggtcattggcgcaatgactatgggcatgggcgcgg

SEQ ID NO: 489294 - DNA, 75 bp, synthetic construct
  source 1..75: mol_type = other DNA
aagggggctttaaaatctgccgatactcttcagaaggtcactcaggaactgaataaacaaatcaccgctaaaggt

SEQ ID NO: 489295 - DNA, 75 bp, synthetic construct
  source 1..75: mol_type = other DNA
tatggacgatgttaaaggttggtttagtagtgcagctgataaaattgctaacttccagcatccagaattaaacaa

SEQ ID NO: 489296 - DNA, 75 bp, synthetic construct
  source 1..75: mol_type = other DNA
atgccattaaatggagtcagtgctgcgatgcgcgaaagggtatcgcagcagttaaaagaaattgaacggcggtat

SEQ ID NO: 489297 - DNA, 75 bp, synthetic construct
  source 1..75: mol_type = other DNA
ctgaagccacaagatgttgaagtacaggtggattactgcgggatttgtcattcccgatctgtcgatgatcgacaa

SEQ ID NO: 489298 - DNA, 75 bp, synthetic construct
  source 1..75: mol_type = other DNA
ggcgcttcgcagagagctggaatactgggaaaaacgctgggttgccgtgaaccgtcgcggtggatctttcaaact

SEQ ID NO: 489299 - DNA, 75 bp, synthetic construct
  source 1..75: mol_type = other DNA
tgctggtcacggtacgccaggcgtatcgtgattctctggacgggaaaagcgtgtcttttactggcgtgaatgggc

SEQ ID NO: 489300 - DNA, 75 bp, synthetic construct
  source 1..75: mol_type = other DNA
tgaagaagcccccaacgccgcctatggctatatcgtcggttccgccattgccaaaggacgcctcaccgcccttga

SEQ ID NO: 489301 - DNA, 75 bp, synthetic construct
  source 1..75: mol_type = other DNA
tctgcaatcttatcaatcacccgaagtcgctaaagcggcagaaaccatttttaacggtggcgcggtgcctggctg

SEQ ID NO: 489302 - DNA, 75 bp, synthetic construct
  source 1..75: mol_type = other DNA
gcatatgctttattttttgcagactgataccgaaattattattatccgtatattaagtcagcatcaggatgctgg

SEQ ID NO: 489303 - DNA, 75 bp, synthetic construct
  source 1..75: mol_type = other DNA
ggctggtgttattgctgtaaataaagttgttggtgttaccagaagtatttacgggcttatgactgctatcacaag

SEQ ID NO: 489304 - DNA, 75 bp, synthetic construct
  source 1..75: mol_type = other DNA
tacgtgacgatgcccgtctggaactggccgctgacttttgcggcctgtttctgatgaccgacaaacaagcggcgc

SEQ ID NO: 489305 - DNA, 75 bp, synthetic construct
  source 1..75: mol_type = other DNA
ccaatctggattatcagcgtcaggcgattgagtcggtaacgggagtattcgctggtcaggaaatctgccatacca

SEQ ID NO: 489306 - DNA, 75 bp, synthetic construct
  source 1..75: mol_type = other DNA
tataataaaaaattcaatgcagatattgatataataaaaatagataatggtaatccaagcacgatggtagccatc

SEQ ID NO: 489307 - DNA, 75 bp, synthetic construct
  source 1..75: mol_type = other DNA
tattcatccatacgggtgaatgagaagtaccgcttaatatttaagtggggtgaaaacggaatcgaggatttgtat

SEQ ID NO: 489308 - DNA, 75 bp, synthetic construct
  source 1..75: mol_type = other DNA
gcattgttcaggtattgcgagaaaccaatggcattgttgccgggccccgtggcgcggcgacacgattagggatga

SEQ ID NO: 489309 - DNA, 75 bp, synthetic construct
  source 1..75: mol_type = other DNA
cgagactgcggcaaaacgggcggaggatattgcgtctgccgtggcgcttgaggatgcgagcacgacgaaaaaggg

SEQ ID NO: 489310 - DNA, 75 bp, synthetic construct
  source 1..75: mol_type = other DNA
cagaggaattatttaaaaacttaactggatatgcccgtctaatggggtgttcagatgagcagattcaaagagcat

SEQ ID NO: 489311 - DNA, 75 bp, synthetic construct
  source 1..75: mol_type = other DNA
aaaacattaggtgaaagttttggtagcttgatgagcgatatgtcacacggtgtcgataacctgactgatatttct

SEQ ID NO: 489312 - DNA, 75 bp, synthetic construct
  source 1..75: mol_type = other DNA
attaaacctgatgaatcagcattctttagatttacacaagcagctagtgaccagttcacagcggatatgctaatt

SEQ ID NO: 489313 - DNA, 75 bp, synthetic construct
  source 1..75: mol_type = other DNA
gaaaccaactggcgggaaagtactggcgtagcgtgattaccaccggcgagccggaaagtgcttaccgttatgacg

SEQ ID NO: 489314 - DNA, 75 bp, synthetic construct
  source 1..75: mol_type = other DNA
tgcgatataaaaaactaaatggtgagatatgcattttaaaatataacaaaaatcaccatgaaataagaataatta

SEQ ID NO: 489315 - DNA, 75 bp, synthetic construct
  source 1..75: mol_type = other DNA
gctatatcaggggttgtccctcatagcatcaaattgttcttttactcatattcagttaactctggaccaggattt

SEQ ID NO: 489316 - DNA, 75 bp, synthetic construct
  source 1..75: mol_type = other DNA
ggcgaagaagttagcgcatctatgaaagatgaggcttttcttgaacgggttgaacacaaccaagcagcattctgt

SEQ ID NO: 489317 - DNA, 75 bp, synthetic construct
  source 1..75: mol_type = other DNA
ctgaaccagtcactctcttcgcttttttccctcgctctctctctggtcagccagcagtttctctcccttgaattc

SEQ ID NO: 489318 - DNA, 75 bp, synthetic construct
  source 1..75: mol_type = other DNA
ctaggagctcgtggtgttgctaaaaaaaatttggatgcttggtatgtatatgatgggaatccgtgtcaaaaaatt

SEQ ID NO: 489319 - DNA, 75 bp, synthetic construct
  source 1..75: mol_type = other DNA
atgcagtgtgtgaactcgcctcgtgtgtcgctggggcatttctttccgcgcatcagtctgcgcatcaaccacaac

SEQ ID NO: 489320 - DNA, 75 bp, synthetic construct
  source 1..75: mol_type = other DNA
tgtaagaaatattactaaatattgtatttttagatttttaccagttggtgtaaaaaaaatgttataccagcatgt

SEQ ID NO: 489321 - DNA, 75 bp, synthetic construct
  source 1..75: mol_type = other DNA
attgtattgtcatctttttttaaggagggggtggcaggacttaacaaattttctttattttttattgcctatgca

SEQ ID NO: 489322 - DNA, 75 bp, synthetic construct
  source 1..75: mol_type = other DNA
ggcttgcgttgtcatggaaaaatgcaaccagtacggattttacgccgcttgaattgaataagtcttttgcacccg

SEQ ID NO: 489323 - DNA, 75 bp, synthetic construct
  source 1..75: mol_type = other DNA
atgtaaagcccggcgaacaattgcaacaacagcgcgcagaggtgtttcagcgtgtcacgactgacggaagctggc

SEQ ID NO: 489324 - DNA, 75 bp, synthetic construct
  source 1..75: mol_type = other DNA
cttttatgaggagcatgcttacaaaagtaccgaccagagcctggtgctgtgcgacacggtccgccatctgcccga

SEQ ID NO: 489325 - DNA, 75 bp, synthetic construct
  source 1..75: mol_type = other DNA
taacgccattctcgcccacgaacgtctgtccattgttgacgttaacgcgggggcgcaacctctctacaaccacaa

SEQ ID NO: 489326 - DNA, 75 bp, synthetic construct
  source 1..75: mol_type = other DNA
ccggtatttagctactacaacgttaacaaagctcgtattcagggcgtggaaaccgaactgaaaattccgttcaac

SEQ ID NO: 489327 - DNA, 75 bp, synthetic construct
  source 1..75: mol_type = other DNA
ggattactccacccttaataaaccaacttcatcttcacaaaatgattgggagaacagacactatttgtttaatga

SEQ ID NO: 489328 - DNA, 75 bp, synthetic construct
  source 1..75: mol_type = other DNA
gattaaccacgttagatctggttaacccacaattaataacgcattacattaatcatctgggaattcctttatcaa

SEQ ID NO: 489329 - DNA, 75 bp, synthetic construct
  source 1..75: mol_type = other DNA
ttgtgcctgttatataccctcttcgccccggtgatgtgtttgccgtcgctggtgtggaagtgctggtggtgtggg

SEQ ID NO: 489330 - DNA, 75 bp, synthetic construct
  source 1..75: mol_type = other DNA
accatgggcgaggcctcagcatttaaatccggacgtgagtttgacgcttatgtctgtctggtgccgaagcagacg

SEQ ID NO: 489331 - DNA, 75 bp, synthetic construct
  source 1..75: mol_type = other DNA
atcagcgatttttcacccgtgaaggtcatttttctgaggatatggagttgatcgcagaagaattcgaagtggttg

SEQ ID NO: 489332 - DNA, 75 bp, synthetic construct
  source 1..75: mol_type = other DNA
ttagaaattaaccatgcgcacttgcagttaatggagtccttattggatgaagggaagaaacacaatatttttaag

SEQ ID NO: 489333 - DNA, 75 bp, synthetic construct
  source 1..75: mol_type = other DNA
gccagatatcgacccattgcaggtgaatattaatattgctgcgcttggcggatattatttgatcaaccagcatac

SEQ ID NO: 489334 - DNA, 75 bp, synthetic construct
  source 1..75: mol_type = other DNA
gcacccagatagatacgctttggcgtgatgttcgctggtctattcgcgatatccagaatgaagatcgcggccttg

SEQ ID NO: 489335 - DNA, 75 bp, synthetic construct
  source 1..75: mol_type = other DNA
ccagacccgcagaggacgacatcaccgataccgatgatggcgatacccgcatttcagcgggtgcattctggccgg

SEQ ID NO: 489336 - DNA, 75 bp, synthetic construct
  source 1..75: mol_type = other DNA
attggctcactggtggtcaaagtgcagggcaaattgcagaacaggctggtcgtggtctggtaaacataccatttg

SEQ ID NO: 489337 - DNA, 75 bp, synthetic construct
  source 1..75: mol_type = other DNA
gctaagggtactattttttccgcgtttcctgtcttaaataataaagccatgtggagatggtatcagaatgaggac

SEQ ID NO: 489338 - DNA, 75 bp, synthetic construct
  source 1..75: mol_type = other DNA
caaaccttccccaaaagataaatatgttgcatatgctattaacattcctgactatgagctggcagcgatgtatat

SEQ ID NO: 489339 - DNA, 75 bp, synthetic construct
  source 1..75: mol_type = other DNA
gaaagtatatctaagaatattgatacagcaattaataatgcttttaaatccagtgtgaaatcatttaaattttat

SEQ ID NO: 489340 - DNA, 75 bp, synthetic construct
  source 1..75: mol_type = other DNA
ttatgcgatcgcagccggtgagcatatccagatggtagcgcaggatttgctgactaaactcaaaggggcgacatc

SEQ ID NO: 489341 - DNA, 75 bp, synthetic construct
  source 1..75: mol_type = other DNA
ccgctcgcttaaggcgctcggtaaagagctgggctgtccggtactggcgctttcccagctcaaccgcctggtgga

SEQ ID NO: 489342 - DNA, 75 bp, synthetic construct
  source 1..75: mol_type = other DNA
gaaatgccttgcgaaaatagcagaaaaatataattatgaaaatattgctatcgagtcagtcaatgaaaaaagtag

SEQ ID NO: 489343 - DNA, 75 bp, synthetic construct
  source 1..75: mol_type = other DNA
atggattacgcggtcgcaaggataacctttgggaaggcggaattcgtgttccagccattattaaatatggtaaac

SEQ ID NO: 489344 - DNA, 75 bp, synthetic construct
  source 1..75: mol_type = other DNA
tcggcgtgctctatatgaaggatatgaatccagggccgacattatttctgttccaggcagataaactttatgccg

SEQ ID NO: 489345 - DNA, 75 bp, synthetic construct
  source 1..75: mol_type = other DNA
ttatgcaacaatacaggactcgccagatttaacggatgcggaaagaaatgctattgaaacagcaaaagaaattgt

SEQ ID NO: 489346 - DNA, 75 bp, synthetic construct
  source 1..75: mol_type = other DNA
gccgtctgcagccaatatcctggcttacgccggggtggtggcggagaaaagccgtctgcggcagctgatgacagt

SEQ ID NO: 489347 - DNA, 75 bp, synthetic construct
  source 1..75: mol_type = other DNA
cagagtaaatttagatgatataacaaacaaaattgtatttgactataatgatagtggagtctcttgttttaagag

SEQ ID NO: 489348 - DNA, 75 bp, synthetic construct
  source 1..75: mol_type = other DNA
aaggaagctggttttttggtataggccaacattacaagaagtctatattgttttacttgaaggctggccagtatt

SEQ ID NO: 489349 - DNA, 75 bp, synthetic construct
  source 1..75: mol_type = other DNA
gcatttatggatgaacttattttccctgcacccccactgatgcacagaaaaaaacactatgaaccgccccgggtt

SEQ ID NO: 489350 - DNA, 75 bp, synthetic construct
  source 1..75: mol_type = other DNA
tggtacattgacacaggtgtttgacgatgctggcaattgcatcaagctcaaagccgctattgagcaaagtccaac

SEQ ID NO: 489351 - DNA, 75 bp, synthetic construct
  source 1..75: mol_type = other DNA
aaggcaaatttaatcgaagggcgctatatctttctcatctatgtaaagtaaacccggatagggcgtcgatttttt

SEQ ID NO: 489352 - DNA, 75 bp, synthetic construct
  source 1..75: mol_type = other DNA
atgagggtagacacttaaaaagatatccagaacgattattagaaatttctaaatacaacaatgtgtattttattg

SEQ ID NO: 489353 - DNA, 75 bp, synthetic construct
  source 1..75: mol_type = other DNA
aataacaccacatcgtattattcttaaaagatactttataggctcatttgctaaaacaagtatcactgacagaga

SEQ ID NO: 489354 - DNA, 75 bp, synthetic construct
  source 1..75: mol_type = other DNA
tgaggtgcaggaaaacaagggcggtcattactcgcggcctgagatgaggcgcttcgtcgaacggctgaacacctt

SEQ ID NO: 489355 - DNA, 75 bp, synthetic construct
  source 1..75: mol_type = other DNA
atataggcatactattagtagtaagattgcgaatgtgatttttgaaaaattatatagtcgtattgactttaacaa

SEQ ID NO: 489356 - DNA, 75 bp, synthetic construct
  source 1..75: mol_type = other DNA
atatcgacaaagagtccgttataaataccattgcattgatgagcaccttttgtaacagtgataatacatcaggtg

SEQ ID NO: 489357 - DNA, 75 bp, synthetic construct
  source 1..75: mol_type = other DNA
ggcttcggagttttgctgaaaacggtaacaccgccggaattcagcctcacttagcgaaaaaacttcgcatgatat

SEQ ID NO: 489358 - DNA, 75 bp, synthetic construct
  source 1..75: mol_type = other DNA
atatggttgatatgttatctcctaatacatcaactaactggatgtccttttttttatataaggatggagaagttc

SEQ ID NO: 489359 - DNA, 75 bp, synthetic construct
  source 1..75: mol_type = other DNA
gaccgctttggtttttacgcagcactaagccagttgttgcaggtgttggtggagtgcgacaaccaaaagggataa

SEQ ID NO: 489360 - DNA, 75 bp, synthetic construct
  source 1..75: mol_type = other DNA
attacgcctggtctgacatcagcggctacgaaattcaaactgctcacggaattattccggcgcaatcaaaatgta

SEQ ID NO: 489361 - DNA, 75 bp, synthetic construct
  source 1..75: mol_type = other DNA
tttccttgaaattcttttctctcttaagaataaatattgtattaaactattaaacgctcaagaacgggcgtttat

SEQ ID NO: 489362 - DNA, 75 bp, synthetic construct
  source 1..75: mol_type = other DNA
tctctatttatcacacactgttgtgaatgaaagcatattgaaaaaatgttgttttgaaaacggcagtttaggtga

SEQ ID NO: 489363 - DNA, 75 bp, synthetic construct
  source 1..75: mol_type = other DNA
cgccagcatgaataccattctcgaaaaagcggaagaactggatattcaatcgatgcctgaaattcaggatatgcg

SEQ ID NO: 489364 - DNA, 75 bp, synthetic construct
  source 1..75: mol_type = other DNA
ctggtaagccctgatgatgtttgtgtgagatatcagcgccaatatggcaaagcactcaccactgacaaattgaag

SEQ ID NO: 489365 - DNA, 75 bp, synthetic construct
  source 1..75: mol_type = other DNA
gaaaacctacctgaacagtcatcaccagcgtgacaatggtaaacagcgtgagttccagccttacattgaagcgaa

SEQ ID NO: 489366 - DNA, 75 bp, synthetic construct
  source 1..75: mol_type = other DNA
atggaggctatttaagattaggtactcaagctgcaggcgtcgggacggttaatgttgagggagaggactcggttt

SEQ ID NO: 489367 - DNA, 75 bp, synthetic construct
  source 1..75: mol_type = other DNA
ctgcaaactgacgcggagctgtcggcagtacgtaaagcctttgaagatctggaactggttatcgttcaggacatc

SEQ ID NO: 489368 - DNA, 75 bp, synthetic construct
  source 1..75: mol_type = other DNA
agttcggcttacgtcagttgaacctgcagataaaggggctgatccctggcgatccaaatgctgtgatctggggcg

SEQ ID NO: 489369 - DNA, 75 bp, synthetic construct
  source 1..75: mol_type = other DNA
aaactgacgcggagctgtcggcagtacgtaaagcctttgaagatctggaactggttatcgttcaggacatcttta

SEQ ID NO: 489370 - DNA, 75 bp, synthetic construct
  source 1..75: mol_type = other DNA
ttccgctatatctatatcggtgatgctggcgacggtgaacttaatgtctcgcgtgaaggtaaagtagattcggga

SEQ ID NO: 489371 - DNA, 75 bp, synthetic construct
  source 1..75: mol_type = other DNA
tggcgaaggtgtttttgtctttaatcatactaataacagtgatgccggctaccaggtcgatatgctgattacggg

SEQ ID NO: 489372 - DNA, 75 bp, synthetic construct
  source 1..75: mol_type = other DNA
ggttataaatcggatgggcgcatcagcggttacagcgctgggctgtacgcgacctggtatcagaacgatgcgaat

SEQ ID NO: 489373 - DNA, 75 bp, synthetic construct
  source 1..75: mol_type = other DNA
tgaacgttatgccaggggggacactgcgtgtcgctaaaaccactgtcggcggtaacctggagaatggtggcacgg

SEQ ID NO: 489374 - DNA, 75 bp, synthetic construct
  source 1..75: mol_type = other DNA
aaggtggagaagtttacttaggtgtttttgaacctgctgtaggaacgctaaacattggtgctgctcacggtgagg

SEQ ID NO: 489375 - DNA, 75 bp, synthetic construct
  source 1..75: mol_type = other DNA
agaatggcggcacggttcaaatgaacagtgaaggaggaaaaccggggaatgtactgaccgttaacggcaactata

SEQ ID NO: 489376 - DNA, 75 bp, synthetic construct
  source 1..75: mol_type = other DNA
gcctggcacacgcgtttgatggaagacggcgttcaggcaatgcgcgattatcttgccggactggatatcgcttcg

SEQ ID NO: 489377 - DNA, 75 bp, synthetic construct
  source 1..75: mol_type = other DNA
cgtcggcatttacacggctggcagagcgcaacgtcagcgtgagccgtttttcgttaagcgtggaaggtgatgatc

SEQ ID NO: 489378 - DNA, 75 bp, synthetic construct
  source 1..75: mol_type = other DNA
catcaccagcagtgggccgcactgtatcgcctggtagacaccactcccttcagcgaggaaaaaacgctgcccttt

SEQ ID NO: 489379 - DNA, 75 bp, synthetic construct
  source 1..75: mol_type = other DNA
caggccgttcagcgccagcgcgtggccgataactttcccggcagcgatgcctattacaactatgtgctgaccctg

SEQ ID NO: 489380 - DNA, 75 bp, synthetic construct
  source 1..75: mol_type = other DNA
gtctgatggcgctcgaaatcgcgatcgacgaactggcggaaaaagcgggcatcgatcccgtcgagtttcgcatcc

SEQ ID NO: 489381 - DNA, 75 bp, synthetic construct
  source 1..75: mol_type = other DNA
ggtcggggcgaagctggatctcgacgaagacgccattctactgttgcagatgattccactgcgtggctgcattga

SEQ ID NO: 489382 - DNA, 75 bp, synthetic construct
  source 1..75: mol_type = other DNA
cctcggcacaccaggaagagagtgacgcattaattcgactgcgggcaagtcatcaccagcaatggactgcacttt

SEQ ID NO: 489383 - DNA, 75 bp, synthetic construct
  source 1..75: mol_type = other DNA
ctactatacaatgacacttaggatccttgccagactaatgccgacgccacttctaaaattcgtatattctaaact

SEQ ID NO: 489384 - DNA, 75 bp, synthetic construct
  source 1..75: mol_type = other DNA
ctctttatgataaagaacaacctgagtttttgaatgattgtttaactagtttagctagacaaagtgttatgccta

SEQ ID NO: 489385 - DNA, 75 bp, synthetic construct
  source 1..75: mol_type = other DNA
ctaaacgatacgatgatctggcacaattgttgccacctcaactagaaaaattaatatcaataattgataagaatc

SEQ ID NO: 489386 - DNA, 75 bp, synthetic construct
  source 1..75: mol_type = other DNA
aaccccttgtatcttccttggggatcatacaggcgatagatttagtactatttttggtgataaatatatccttac

SEQ ID NO: 489387 - DNA, 75 bp, synthetic construct
  source 1..75: mol_type = other DNA
atgccatgctggtgggtaatggcgaaacggttgttgtcggtggattgctggataaatccattaagggtagcgaga

SEQ ID NO: 489388 - DNA, 75 bp, synthetic construct
  source 1..75: mol_type = other DNA
taaagggattggctacataaagagtgaggttttacttcttaaattgaaacggaagttaaaagtccaatctttttt

SEQ ID NO: 489389 - DNA, 75 bp, synthetic construct
  source 1..75: mol_type = other DNA
tggggcttacgtctacacgctggctaaagggaaggggaatgacgagaaaaactggtatctgaccagtaaatggga

SEQ ID NO: 489390 - DNA, 75 bp, synthetic construct
  source 1..75: mol_type = other DNA
tacgcgggaaggccggagatgcgctaccgctacgacgatgcggtgcgggtgacagagcagctgaacccggcaggc

SEQ ID NO: 489391 - DNA, 75 bp, synthetic construct
  source 1..75: mol_type = other DNA
tgcggggcgggtggtggagcagcttaacccggcaggcctgagttaccgctaccagtatgagcaggaccgcatcac

SEQ ID NO: 489392 - DNA, 75 bp, synthetic construct
  source 1..75: mol_type = other DNA
gtcaccctctggtactacgatgaatcggaccgtatcactcaccgcacggtgaacggtgaacggcgaaccggcaga

SEQ ID NO: 489393 - DNA, 75 bp, synthetic construct
  source 1..75: mol_type = other DNA
atgggatttagatttcgcaaaagaatccggattgcgcccggactcgcgatcaacattagcaaaagtggagtaagc

SEQ ID NO: 489394 - DNA, 75 bp, synthetic construct
  source 1..75: mol_type = other DNA
tataaccgtcaccggtactacgatccgttgcaggggcggtatatcacccaggacccgattgggctggcgggggga

SEQ ID NO: 489395 - DNA, 75 bp, synthetic construct
  source 1..75: mol_type = other DNA
gacaaccgtggccggttaatctcagcaaaagacgcgcagggccgtgaaacccgttacgaatacaacacctcaggc

SEQ ID NO: 489396 - DNA, 75 bp, synthetic construct
  source 1..75: mol_type = other DNA
gtgctcggtgtgtccgggcgggatgacttcgggcaacccggtaaatccgctgctggggcgaaggtgctgcccggc

SEQ ID NO: 489397 - DNA, 75 bp, synthetic construct
  source 1..75: mol_type = other DNA
ctacagcgccacgggcaggctggagagcgtgcgtaccctcgcaccggacctggacatccgcatcccgtatgccac

SEQ ID NO: 489398 - DNA, 75 bp, synthetic construct
  source 1..75: mol_type = other DNA
actaccactacgacagccagcaccggctggtgttccacacgcggatacagcaaggggagccaccggtcgagagcc

SEQ ID NO: 489399 - DNA, 75 bp, synthetic construct
  source 1..75: mol_type = other DNA
aggaatcagggctgtactataaccgtcaccggtactacgatccgttgcaggggcggtatattactcaggatgcgt

SEQ ID NO: 489400 - DNA, 75 bp, synthetic construct
  source 1..75: mol_type = other DNA
ccggcgggaaaccggctgccggacccggagctacacccggacagcacgctcacggcgtggccggataaccgcatc

SEQ ID NO: 489401 - DNA, 75 bp, synthetic construct
  source 1..75: mol_type = other DNA
ggttaatatcgacaaaagatacgcagggccatgaaacgcggtatgagtacaacgccgcaggcgacctgaccgccg

SEQ ID NO: 489402 - DNA, 75 bp, synthetic construct
  source 1..75: mol_type = other DNA
ccgatgaccactctgattgaattacaggaatatcagggtaatcaacaaactcccttgtggcgcaaactgtggatc

SEQ ID NO: 489403 - DNA, 75 bp, synthetic construct
  source 1..75: mol_type = other DNA
gaccgacgaaacgcaaactgaaccagtcggaaaactatattggtagtcttcttcaaattgacttgttccctgaat

SEQ ID NO: 489404 - DNA, 75 bp, synthetic construct
  source 1..75: mol_type = other DNA
gcgagtggcgcattagtagtcttgagttgttggacttggttaatcagattcgtgtggctgaaggtcttaacaaac

SEQ ID NO: 489405 - DNA, 75 bp, synthetic construct
  source 1..75: mol_type = other DNA
ttcgaacacaccgaaacgggtctcaccagcaatggtcgacagcattgtccctatgccaatccggatgcgggtgaa

SEQ ID NO: 489406 - DNA, 75 bp, synthetic construct
  source 1..75: mol_type = other DNA
gtttttgtctttaatcatactaataacagtgatgccggctaccaggtcgatatgctgattacaggtgacgataaa

SEQ ID NO: 489407 - DNA, 75 bp, synthetic construct
  source 1..75: mol_type = other DNA
tctgttgagggtgggtatacctttgaagcgggaacatttagcggcagcgaagggacgctgaatacctggtacgtc

SEQ ID NO: 489408 - DNA, 75 bp, synthetic construct
  source 1..75: mol_type = other DNA
ttgttcaaagagggggcgctgacggtaaataaaggtgggatcagtcagggtgaactgacaggtggcggaaacctg

SEQ ID NO: 489409 - DNA, 75 bp, synthetic construct
  source 1..75: mol_type = other DNA
agaccgaatgcgcaagttttgacgtgatgaacaaacagggaagcatgaaggacgtgctggactttatctgcgcgt

SEQ ID NO: 489410 - DNA, 75 bp, synthetic construct
  source 1..75: mol_type = other DNA
ttaggccttatcgaaacgggtaaatcagaaaacaatacggaacttcccgcgctggtggtgaaactctttaatgcc

SEQ ID NO: 489411 - DNA, 75 bp, synthetic construct
  source 1..75: mol_type = other DNA
agggagataaagttcaggtcgcttcgctactgcctgagattcccggcgctcaaacaacgaagtttaataaagacc

SEQ ID NO: 489412 - DNA, 75 bp, synthetic construct
  source 1..75: mol_type = other DNA
ttgggatgatatctgggaagacggactggaggctgaaaagctacgggaagcattgctgtccttagaacacgcttt

SEQ ID NO: 489413 - DNA, 75 bp, synthetic construct
  source 1..75: mol_type = other DNA
atggacaaccgacctgggatggtctttttttacgagaggatgcgtatgaactcgttttcacttctgacaaccccg

SEQ ID NO: 489414 - DNA, 75 bp, synthetic construct
  source 1..75: mol_type = other DNA
gcggcgttattcggtagcgtaatgctagtggggagtgaagttatgctgcgttttgtcttttttagtatcggctaa

SEQ ID NO: 489415 - DNA, 75 bp, synthetic construct
  source 1..75: mol_type = other DNA
gccattactgttggcttttttggcaggtgccgtagggttactgatttctaccttacacctgggttatccacttaa

SEQ ID NO: 489416 - DNA, 75 bp, synthetic construct
  source 1..75: mol_type = other DNA
ccggtttcattatcgtatatttggtattataagctttagtctgttattaacagtgaaccgccccggttttcctgg

SEQ ID NO: 489417 - DNA, 75 bp, synthetic construct
  source 1..75: mol_type = other DNA
aagccatgttatcacttggatataaaaaactcatggttacaggatatttgggacaagtttacttttctcgagaca

SEQ ID NO: 489418 - DNA, 75 bp, synthetic construct
  source 1..75: mol_type = other DNA
cctgaattataatgactcattaaccccatcccagttagctaataagttgttacagttaaaattaacaaaggaaat

SEQ ID NO: 489419 - DNA, 75 bp, synthetic construct
  source 1..75: mol_type = other DNA
ttaaaaactaggttaagtactcttcatgtaaacttggagcaatttataaattcatcggaagatgatgagtatcca

SEQ ID NO: 489420 - DNA, 75 bp, synthetic construct
  source 1..75: mol_type = other DNA
tcttcgcgttgatttctatcattatcggcgcctgcgtaaccgcatcgggcgtagtggggtgggtaggactcgtaa

SEQ ID NO: 489421 - DNA, 75 bp, synthetic construct
  source 1..75: mol_type = other DNA
tcaactccccgaagagaatcagggtggagttcttaaggcggtatcactgcgcctgaaggaactcgacgatctgta

SEQ ID NO: 489422 - DNA, 75 bp, synthetic construct
  source 1..75: mol_type = other DNA
ccggcgctttctgtgcaatttttccctgggaaaaaatcgctggcggaagcggtcatcgcgaaagcaaaagctaac

SEQ ID NO: 489423 - DNA, 75 bp, synthetic construct
  source 1..75: mol_type = other DNA
ttgtcagacaacattgaattaagaatcaacggggaagttgctgatttccgtaaaaaaatagttcccgaatcagat

SEQ ID NO: 489424 - DNA, 75 bp, synthetic construct
  source 1..75: mol_type = other DNA
accgaatccgtggccgttgacgtcgcttatgaaggctccggcagcggtgactggcgtaccaacagtttcatcgtt

SEQ ID NO: 489425 - DNA, 75 bp, synthetic construct
  source 1..75: mol_type = other DNA
cggtaaagacgccgcaacgggtgatgctgacacggttgatacccctgaacaggccgctgatgtggtggcagatgt

SEQ ID NO: 489426 - DNA, 75 bp, synthetic construct
  source 1..75: mol_type = other DNA
ggattgttccgtctcctgaagtctttcagagttatctcagtaatgagatttttattgcaagtcagtttaaagtta

SEQ ID NO: 489427 - DNA, 75 bp, synthetic construct
  source 1..75: mol_type = other DNA
tctgaacatgaacccgaatctgcatcaagggtgaagcgtgatttatctgaagtcgagttcgagtcaacaatgaag

SEQ ID NO: 489428 - DNA, 75 bp, synthetic construct
  source 1..75: mol_type = other DNA
aacaataccatcatcacgttgggaactcccctgaatcagcaacataacgaattcatgatggtcgccgaatggtgc

SEQ ID NO: 489429 - DNA, 75 bp, synthetic construct
  source 1..75: mol_type = other DNA
cctgaaggtgtttagctgtaatggtaacccgtgggacaaagacaatttaccgacgctgctcaaagccgtcgaggg

SEQ ID NO: 489430 - DNA, 75 bp, synthetic construct
  source 1..75: mol_type = other DNA
accgggtattaagccgtggttttgccagcgggccggggggaaaccaactggcgggaaagtactggcgtagcgtga

SEQ ID NO: 489431 - DNA, 75 bp, synthetic construct
  source 1..75: mol_type = other DNA
gcagcagacgagttaaccccggagcgtgcatttcatattcagcttttactgatccatttttatcgccgtgtcgtc

SEQ ID NO: 489432 - DNA, 75 bp, synthetic construct
  source 1..75: mol_type = other DNA
gataaaaatataaaattgagagttaatagtactattatggccattgatgattctataaaatgcatcgatgaataa

SEQ ID NO: 489433 - DNA, 75 bp, synthetic construct
  source 1..75: mol_type = other DNA
aaaccccagttcgctgacagaacctatttctccaattgttcacccgttgatcccacaagtaccagaccaacctat

SEQ ID NO: 489434 - DNA, 75 bp, synthetic construct
  source 1..75: mol_type = other DNA
aatgtatctgatattaaattcgaaacaatgataaaaccccagttcgctgacagaatctatttctccaattgttca

SEQ ID NO: 489435 - DNA, 75 bp, synthetic construct
  source 1..75: mol_type = other DNA
atcacattggctatgacacaggtgcagaatcacaatacgaaagcgatgtagaggccatccgcactgctggagtca

SEQ ID NO: 489436 - DNA, 75 bp, synthetic construct
  source 1..75: mol_type = other DNA
aaatcctgaaaaatatcctggaagaaaacctgccagcaatccgaactgaaaaccgggcagaggcattgcgcagaa

SEQ ID NO: 489437 - DNA, 75 bp, synthetic construct
  source 1..75: mol_type = other DNA
aaatgaaattggaattataagagagagtatatcaaacggtaacctttctaatattaatgactcagtcagtaagat

SEQ ID NO: 489438 - DNA, 75 bp, synthetic construct
  source 1..75: mol_type = other DNA
taatgctaatgatgttgcagttactgagtcgtacaaacccatctgggactggaaaatatcgcaatataatgtatc

SEQ ID NO: 489439 - DNA, 75 bp, synthetic construct
  source 1..75: mol_type = other DNA
taatcttttgctttcaggttatggcgatttaaaaatctacggtgacgtagaatttaatatggatgcggaaagtaa

SEQ ID NO: 489440 - DNA, 75 bp, synthetic construct
  source 1..75: mol_type = other DNA
cgttgccttcgttctctatatcctcacttatgcctatatctctgctaatggtgcgatcattagtgaaacaatatc

SEQ ID NO: 489441 - DNA, 75 bp, synthetic construct
  source 1..75: mol_type = other DNA
attgtcgggatctgcacagccattttcgttgccagcgtattgtggttaagttcgttagccgccagtcgtatcaac

SEQ ID NO: 489442 - DNA, 75 bp, synthetic construct
  source 1..75: mol_type = other DNA
ggaccgtactataacgttatggttcctgggttatggttaatcgaaggcggacaaagtgctgccggtgcggctatc

SEQ ID NO: 489443 - DNA, 75 bp, synthetic construct
  source 1..75: mol_type = other DNA
cttcgctagtctcagcatttatgccttcgtttgtaagggataaagagtttaatttttcaggtaaagtcttcctta

SEQ ID NO: 489444 - DNA, 75 bp, synthetic construct
  source 1..75: mol_type = other DNA
atgaacgttcaaaattaattattaaagatatttcaatttcgcttttatcacttgtggtcgtatacattaccatga

SEQ ID NO: 489445 - DNA, 75 bp, synthetic construct
  source 1..75: mol_type = other DNA
cggtgggcagtctttcatactaaaggtaaatattctcgcactaacactcatgtgcatagcatcatttttgcttat

SEQ ID NO: 489446 - DNA, 75 bp, synthetic construct
  source 1..75: mol_type = other DNA
attcccaataacaccacgcaccgccccgccacccttcagcacctgcgtatcggtgccgaccagagcgggaaaatc

SEQ ID NO: 489447 - DNA, 75 bp, synthetic construct
  source 1..75: mol_type = other DNA
ggtacccgaagcgccatgctacatgaggccaccgcaggcggcagactgatagcggaagagagcattgaattcgga

SEQ ID NO: 489448 - DNA, 75 bp, synthetic construct
  source 1..75: mol_type = other DNA
atgacgagatttatcgccgtcggagggagatgaaggaagaactgagcagtctgggggatttgcattcaatcagga

SEQ ID NO: 489449 - DNA, 75 bp, synthetic construct
  source 1..75: mol_type = other DNA
aataagcttgtaaagaaaatattatctgtttttaacttaaaacaacgctttcctcagaagaattttggatgctcg

SEQ ID NO: 489450 - DNA, 75 bp, synthetic construct
  source 1..75: mol_type = other DNA
tgggtattttaccttcacttcccctgaagggaattcattcaaggcatctatttacggtgtgaagattaatggtaa

SEQ ID NO: 489451 - DNA, 75 bp, synthetic construct
  source 1..75: mol_type = other DNA
gccatcgaagcgccggatgcgctgtttgtgatgaactccccctatgcgctggagaatgaacctaccacctatatt

SEQ ID NO: 489452 - DNA, 75 bp, synthetic construct
  source 1..75: mol_type = other DNA
aatgcggtggaacagttgttatgataacgcatgatacaaatataattacaacagatatgaaggtaatatcacttt

SEQ ID NO: 489453 - DNA, 75 bp, synthetic construct
  source 1..75: mol_type = other DNA
gatacatcttatcatggtagatatgtttttaatgggtatgatgtgtcgaaaataaatcataaaaaacaactctat

SEQ ID NO: 489454 - DNA, 75 bp, synthetic construct
  source 1..75: mol_type = other DNA
aaatcgtttaaatctccctgcaatgaccgaagtaattatgttggcttgcgcagcaaattcattcttcagaattgg

SEQ ID NO: 489455 - DNA, 75 bp, synthetic construct
  source 1..75: mol_type = other DNA
gcacccgccgctattatatcgctctctttaacccattctgttttatcgattctaatcctgaagacgcctcgcatt

SEQ ID NO: 489456 - DNA, 75 bp, synthetic construct
  source 1..75: mol_type = other DNA
atgtctattaagcaaaatttatttgccgcattatttctttgcactctcacaggacacgcatttgccgcaaccgag

SEQ ID NO: 489457 - DNA, 75 bp, synthetic construct
  source 1..75: mol_type = other DNA
ttactcaaacaagaaaaatatcttaatctttctttatctgagttactagaaatagcacacagcaatatacaacaa

SEQ ID NO: 489458 - DNA, 75 bp, synthetic construct
  source 1..75: mol_type = other DNA
tgttgatcgagataaaaccggcatcgagtcgatgaaccgcttcatcagcgaggttaataaagccctccgcaatca

SEQ ID NO: 489459 - DNA, 75 bp, synthetic construct
  source 1..75: mol_type = other DNA
cgttgaacgagataaaaccggcatcgagtcgatgaaccgctttatcagcgaggttaataaagccctccgtaatca

SEQ ID NO: 489460 - DNA, 75 bp, synthetic construct
  source 1..75: mol_type = other DNA
ataagagcctgaccagactgattgccgatgctgacaaaatgcttgatatgcgcggaccgattgtagacagagagt

SEQ ID NO: 489461 - DNA, 75 bp, synthetic construct
  source 1..75: mol_type = other DNA
gagtttcatttgatgatgtttctgggttttctgcttttattaaagatgtagtgaatctaaatagatctgccttta

SEQ ID NO: 489462 - DNA, 75 bp, synthetic construct
  source 1..75: mol_type = other DNA
cagctacgggcgtcaggcaaaccgaacgctgaagaatttactggtaccgtcattagattctgttccggcatgggt

SEQ ID NO: 489463 - DNA, 75 bp, synthetic construct
  source 1..75: mol_type = other DNA
gcgggggttttctctttccagcaaccaatgccaccagggataaagccccgcaacattgcgcctcaccggataacg

SEQ ID NO: 489464 - DNA, 75 bp, synthetic construct
  source 1..75: mol_type = other DNA
tttctatcaaggcgatgttccttctgtcatgattccgaatccaaccggaaaatatgagtccattcatcatagata

SEQ ID NO: 489465 - DNA, 75 bp, synthetic construct
  source 1..75: mol_type = other DNA
acgttggtgtacgtcaatgcaggacgggctctggggcaattagaatcgctgacagatattatctcccccgggata

SEQ ID NO: 489466 - DNA, 75 bp, synthetic construct
  source 1..75: mol_type = other DNA
tagaacacatcgcgccgctgacgacggaaaatatctggatgctgcgtgagaaaccgcaacgactgctcattctgg

SEQ ID NO: 489467 - DNA, 75 bp, synthetic construct
  source 1..75: mol_type = other DNA
cagcacaaagttaccgctgacgaggtcagggaaataatgaaagcggttaaaccctctgttcataccgacactgaa

SEQ ID NO: 489468 - DNA, 75 bp, synthetic construct
  source 1..75: mol_type = other DNA
gataacacatacagtgacgtttatggagaggaaggagagacaaccggagatgtgactgatcggggcgtcgtgaat

SEQ ID NO: 489469 - DNA, 75 bp, synthetic construct
  source 1..75: mol_type = other DNA
atttgttagatctgatattggatactatagacaaatgggagtcggtggaatatttttggtgttattttatatttt

SEQ ID NO: 489470 - DNA, 75 bp, synthetic construct
  source 1..75: mol_type = other DNA
cgactattacaatctcgcttataacaaacgcgggaaattacaactcaccgttactcagcaactcgggcgcacatc

SEQ ID NO: 489471 - DNA, 75 bp, synthetic construct
  source 1..75: mol_type = other DNA
gaggctgacggcagcacgcagatctttaccgtaccctattcgtcagtcccgcttttgcaacgtgaagggcatact

SEQ ID NO: 489472 - DNA, 75 bp, synthetic construct
  source 1..75: mol_type = other DNA
gttactcacactcgccagtgaatggcgtggacatgcggtagatggctggcctgtcttgctaaaaaaaggttacga

SEQ ID NO: 489473 - DNA, 75 bp, synthetic construct
  source 1..75: mol_type = other DNA
tggttgccatatttattttggccgggctttttctattttactcatcaggccacattctgagcctggccggaataa

SEQ ID NO: 489474 - DNA, 75 bp, synthetic construct
  source 1..75: mol_type = other DNA
ccgcgtcagaaaaaataggtgttgccgcgccatcatccaccagccagctatcaactcgcgccctggaagggattt

SEQ ID NO: 489475 - DNA, 75 bp, synthetic construct
  source 1..75: mol_type = other DNA
taagcccttacgactacacactgtattgcaggaagtgggtaaaaccaaatctgacttgtacgccacaggatgatt

SEQ ID NO: 489476 - DNA, 75 bp, synthetic construct
  source 1..75: mol_type = other DNA
cctgggtcgcagcaactcactgatgaatgtcggcgatacgcattgccaggacgatccgcaagactgctacggctg

SEQ ID NO: 489477 - DNA, 75 bp, synthetic construct
  source 1..75: mol_type = other DNA
gcgtgacaatgaacgcgtgagtaataacccgatgattcagcagaccgacaacgctgacagccgtgtccgttcact

SEQ ID NO: 489478 - DNA, 75 bp, synthetic construct
  source 1..75: mol_type = other DNA
atacacatgatttttgtgagctggtgattgtctggcgcggtaatggtctgcatgtgctcaacgatcgcccttatc

SEQ ID NO: 489479 - DNA, 75 bp, synthetic construct
  source 1..75: mol_type = other DNA
cgtgggctggatcatcgcaggatcagtggcgggcatcgtcgccgagatctggaattatcacgctgtgttctggtt

SEQ ID NO: 489480 - DNA, 75 bp, synthetic construct
  source 1..75: mol_type = other DNA
gcggcggcacggtgttatcccagccgccggggcgcagtaatctgcaacgtctggggatgagcatgggctggaaca

SEQ ID NO: 489481 - DNA, 75 bp, synthetic construct
  source 1..75: mol_type = other DNA
atggcggtgcctgcaataaattcagtaatgctgaagaggcggctaaggcagttgtgaaggtgctgggtgataaat

SEQ ID NO: 489482 - DNA, 75 bp, synthetic construct
  source 1..75: mol_type = other DNA
ccaatccgggactgtatgacatgctgaccaacggtgtactacaggcgaacgtctcgttcgacaaagcacaactga

SEQ ID NO: 489483 - DNA, 75 bp, synthetic construct
  source 1..75: mol_type = other DNA
actaccagtagtatctgacattactgaacagtctttatatatgactgtagcaatatgggcaatgaggacatgtaa

SEQ ID NO: 489484 - DNA, 75 bp, synthetic construct
  source 1..75: mol_type = other DNA
gattccgtgaaaggtagagctcaacaccaagagcaagataacgcacttggtttcagtaaacacgcaaaggacttc

SEQ ID NO: 489485 - DNA, 75 bp, synthetic construct
  source 1..75: mol_type = other DNA
ggttttgtactgggattgttgctggctttccttgccgggtacgacgtttcggctgccgtttcgctggcaatcaaa

SEQ ID NO: 489486 - DNA, 75 bp, synthetic construct
  source 1..75: mol_type = other DNA
cccgcactgtcaggtgcgggcttttttctgtgtttcctgtacgcgtcagcccgcaccgttacctgtggtaatggt

SEQ ID NO: 489487 - DNA, 75 bp, synthetic construct
  source 1..75: mol_type = other DNA
aagtatcgcggagtggtttatcaggggttagaaaccgcgccagagaactggcaacacgcgcaaaatcggctggca

SEQ ID NO: 489488 - DNA, 75 bp, synthetic construct
  source 1..75: mol_type = other DNA
gaacagtctttatatatgactgtagcaatatgggcaatgaggacatgtaaaccattagccacagaagaggttaaa

SEQ ID NO: 489489 - DNA, 75 bp, synthetic construct
  source 1..75: mol_type = other DNA
cggtatctgcagaccggtgccgacggtacggcaaccgttacgttgactcagaacctgggcaccatgcggggaacg

SEQ ID NO: 489490 - DNA, 75 bp, synthetic construct
  source 1..75: mol_type = other DNA
agcaagtatgtgaatggcgtctacgattctcctcagtacttcacgttccagggggcatctaagtttgcgaaaggg

SEQ ID NO: 489491 - DNA, 75 bp, synthetic construct
  source 1..75: mol_type = other DNA
gccacgaatacctatgacgccgtgaagaacgtcgccagctccacgctgaccggcttgagcgacatgctgactgag

SEQ ID NO: 489492 - DNA, 75 bp, synthetic construct
  source 1..75: mol_type = other DNA
cctcggagcaatttgagcaggtggcacgctctgtcatcatgatgggtggggctggcttctcctcaatgcagcagc

SEQ ID NO: 489493 - DNA, 75 bp, synthetic construct
  source 1..75: mol_type = other DNA
ttttcttctggaagttaagaagaaatagcccgttacgcctaagtgttggagcaccttcttctcccattatttcaa

SEQ ID NO: 489494 - DNA, 75 bp, synthetic construct
  source 1..75: mol_type = other DNA
ggcgttgcagtcaaacgatatggcccgcgtcgatgaggtcaggcggcgggcgagcgtttatttagccattgagac

SEQ ID NO: 489495 - DNA, 75 bp, synthetic construct
  source 1..75: mol_type = other DNA
ttcttgaagatatggggccacctcctacgcctaagcatcagctagatcggaagaacaatgaaggcccgtattcaa

SEQ ID NO: 489496 - DNA, 75 bp, synthetic construct
  source 1..75: mol_type = other DNA
gcccacagccaaagaaccacacgtcaagctttacctgaaactaaaaccggagcaggtaatcatctctgatatcgt

SEQ ID NO: 489497 - DNA, 75 bp, synthetic construct
  source 1..75: mol_type = other DNA
tgatgtttgagctggtgaatgctgctaccgagactcacaagcctcagcctgttgcaatagagaatcaggtgccga

SEQ ID NO: 489498 - DNA, 75 bp, synthetic construct
  source 1..75: mol_type = other DNA
ttaccagcattatcaaaatcagtttaacggtgctggttataggttatgctctcggcaaaatcgcgatgttgttta

SEQ ID NO: 489499 - DNA, 75 bp, synthetic construct
  source 1..75: mol_type = other DNA
gctaccaatacatacgacgccgttaagaacgttgccagctccactttgacaggattgtccgacatgctaaccgaa

SEQ ID NO: 489500 - DNA, 75 bp, synthetic construct
  source 1..75: mol_type = other DNA
cgctctgctctccctgggcagggaaatgttccgcctcgaaattctggaggacattgcccgggataaagtcagaac

SEQ ID NO: 489501 - DNA, 75 bp, synthetic construct
  source 1..75: mol_type = other DNA
ctggcctggataccgctggaaagcagagaggtcgcgctgcccaacgtgcgggaggcgctcacccgtatcgccgca

SEQ ID NO: 489502 - DNA, 75 bp, synthetic construct
  source 1..75: mol_type = other DNA
atgctttgcaaaatattgctgaaaataaaaagcaaattttcacatttgtgatttttttaacacttagtttcatcg

SEQ ID NO: 489503 - DNA, 75 bp, synthetic construct
  source 1..75: mol_type = other DNA
cacgcggctgacgtttctaaccgtagcgaggcgcaaaaaccagatgcgaagaaattcctggtcagttgtgtcgat

SEQ ID NO: 489504 - DNA, 75 bp, synthetic construct
  source 1..75: mol_type = other DNA
tgccgggtatgcgtcagttcggcgcgttggcaacggtcattcccacctcgattcaggaagtggcgggatggccaa

SEQ ID NO: 489505 - DNA, 75 bp, synthetic construct
  source 1..75: mol_type = other DNA
gctattttcactgccatcaccagcccggatacgccaaaagcgaatttctgggggcatatgccggaaaccttaaca

SEQ ID NO: 489506 - DNA, 75 bp, synthetic construct
  source 1..75: mol_type = other DNA
gccgcaaatataaaaccgtacagattcaagacggcaccagcggtacgatggcggccagcgagtcgaactatttaa

SEQ ID NO: 489507 - DNA, 75 bp, synthetic construct
  source 1..75: mol_type = other DNA
agtgacgctgaacgacaccgcgaccacctatagcgcaatgaccggcagcgacggcagtaaaattcttagcattac

SEQ ID NO: 489508 - DNA, 75 bp, synthetic construct
  source 1..75: mol_type = other DNA
taaagtgccgcatctggcggcggtctggttgaataacggcagtatagagagtgcgaataccacgccaacgtatat

SEQ ID NO: 489509 - DNA, 75 bp, synthetic construct
  source 1..75: mol_type = other DNA
ttgcaggaagaagtcgaaggcaacgggctggaacaggaaggcttacccttcccgattcgccagagcgatgccctg

SEQ ID NO: 489510 - DNA, 75 bp, synthetic construct
  source 1..75: mol_type = other DNA
gggaatagtgaccctgactggcgggggctcggatcccggtaccggctctactggctgttacctgaggaactgata

SEQ ID NO: 489511 - DNA, 75 bp, synthetic construct
  source 1..75: mol_type = other DNA
tttaagcaataatattgataatgttaaagtagtgttgaatggtaaagtgaatgaaaatgatattaacgtaattag

SEQ ID NO: 489512 - DNA, 75 bp, synthetic construct
  source 1..75: mol_type = other DNA
gcccggtgagcatcgatagcacggaacttaccacgaccacaacagagtatcacggcacaaccgatgccaacggca

SEQ ID NO: 489513 - DNA, 75 bp, synthetic construct
  source 1..75: mol_type = other DNA
cgcagcctcgcgccgatcgctccttctgcgcgcaaaacctggcggggcataagctggtagtcattccacagtttg

SEQ ID NO: 489514 - DNA, 75 bp, synthetic construct
  source 1..75: mol_type = other DNA
gatgccgtcatcaatggcgttgctggcaccaaacgtgaactcgtatcgccgcttccagccaggtatgtatgtacc

SEQ ID NO: 489515 - DNA, 75 bp, synthetic construct
  source 1..75: mol_type = other DNA
acatcatcaacgattatctgttgtttttaaataagaacttaacctgtgtaaagccctggtcgcggctggcaaccc

SEQ ID NO: 489516 - DNA, 75 bp, synthetic construct
  source 1..75: mol_type = other DNA
ggtagaggtaagcgtcaataaccatgctacgtttacccttccgaaaaactacctggccgccttcgcgtgcaacaa

SEQ ID NO: 489517 - DNA, 75 bp, synthetic construct
  source 1..75: mol_type = other DNA
atgaaagtcgcacgcatctacctgcgcgtgagcacggaggaacaagacctaagccggcaggatgccatcgtggag

SEQ ID NO: 489518 - DNA, 75 bp, synthetic construct
  source 1..75: mol_type = other DNA
ggctggtattccgggtacagaacccgccatcagggggaacacagtatgattttgaacgctgggcacgggaagtac

SEQ ID NO: 489519 - DNA, 75 bp, synthetic construct
  source 1..75: mol_type = other DNA
ttatttttgaggatggggaaagatactgcttattgtttaatagagaaactgatattccaatgtattatgagaata

SEQ ID NO: 489520 - DNA, 75 bp, synthetic construct
  source 1..75: mol_type = other DNA
taagattcaactcatcatctaataagttaacatcactccttacatcagaggaagtgatactcacttatcctgcgg

SEQ ID NO: 489521 - DNA, 75 bp, synthetic construct
  source 1..75: mol_type = other DNA
caactggacgtcaaggttgaagaagaggacgggcgcgtcacgcaatggcaagttgcatctaatagcattccttat

SEQ ID NO: 489522 - DNA, 75 bp, synthetic construct
  source 1..75: mol_type = other DNA
tgcaaaactaactataggtcaatacgatactgaatcctctattttcgactctttccatttttctggcgtttcgtt

SEQ ID NO: 489523 - DNA, 75 bp, synthetic construct
  source 1..75: mol_type = other DNA
taattccagcggagcgttagttggttatatgcttaatgccaataaaattgcaaccgctgagataacaccagttta

SEQ ID NO: 489524 - DNA, 75 bp, synthetic construct
  source 1..75: mol_type = other DNA
tgtcgccagttcgctatgtttaagccccagcctactcaaaaagaaattaaaaaacgaaaataccagctatagcca

SEQ ID NO: 489525 - DNA, 75 bp, synthetic construct
  source 1..75: mol_type = other DNA
atctgccgcattattcaaagcgatattcagcattactggaatctgcgaattgtcgccagttcgctatgtttaagc

SEQ ID NO: 489526 - DNA, 75 bp, synthetic construct
  source 1..75: mol_type = other DNA
ccgtacaccggaagtgttccggctagccgccaaccacagcaagcagcaacccagcaaaccctgcgaagcggagtt

SEQ ID NO: 489527 - DNA, 75 bp, synthetic construct
  source 1..75: mol_type = other DNA
aagagagttatcttttgcaataataatattaatatttacaaattaatattaaccggttcacttcatgagacagag

SEQ ID NO: 489528 - DNA, 75 bp, synthetic construct
  source 1..75: mol_type = other DNA
aaggatatctggaacaggccatggagtgaggaagacgtaatgactgggagagatggctggctctggcggccaaca

SEQ ID NO: 489529 - DNA, 75 bp, synthetic construct
  source 1..75: mol_type = other DNA
catcgcggtcaggatgccgccggcatcatcaccatagatgccaataactgcttccgtttgcggaaagcgaacggg

SEQ ID NO: 489530 - DNA, 75 bp, synthetic construct
  source 1..75: mol_type = other DNA
aagagaaaacctcgacgtatatcagtcgtgcattgaaagaatcagggtttatcgttgatatttcagctgatggtg

SEQ ID NO: 489531 - DNA, 75 bp, synthetic construct
  source 1..75: mol_type = other DNA
aatttgcctgttatatcagctgaatcagtgtctcaaaaatatatcggggataaagttcgtcaagccgagcaattg

SEQ ID NO: 489532 - DNA, 75 bp, synthetic construct
  source 1..75: mol_type = other DNA
tccgcctatgagatgttgcaaaaaggctttcaggccagtaccgagcagcaaaataatccccccgcgaaagggaaa

SEQ ID NO: 489533 - DNA, 75 bp, synthetic construct
  source 1..75: mol_type = other DNA
acggaagatgagcgtaatggcttgattaatcactctccggtgtatggcaagtacgaggatgaggtggaccgggaa

SEQ ID NO: 489534 - DNA, 75 bp, synthetic construct
  source 1..75: mol_type = other DNA
aggtgccagatttttcattcccttgcgctgccattgatgccacccccttttacgcacaaggaaaatggtggatgt

SEQ ID NO: 489535 - DNA, 75 bp, synthetic construct
  source 1..75: mol_type = other DNA
tatgaccgcagcaatacgcaggtgcgcgctttcacgtatgacgcgcagcacccgggccggatggtggggcaccgt

SEQ ID NO: 489536 - DNA, 75 bp, synthetic construct
  source 1..75: mol_type = other DNA
agagtacggtctgaatgtggtgtccggcgatatcacggacatcaccacaccggacgggcgggagacgaaatttta

SEQ ID NO: 489537 - DNA, 75 bp, synthetic construct
  source 1..75: mol_type = other DNA
gtcatagcagtggcggcaggagtactgttttacaccggattgattttctttaatagccgtatggcgttgatgacg

SEQ ID NO: 489538 - DNA, 75 bp, synthetic construct
  source 1..75: mol_type = other DNA
tcaatgtggtagcgcggcctgcccacagtgtttccgcctgcacaggttacgtaagctgactgaactgctcccact

SEQ ID NO: 489539 - DNA, 75 bp, synthetic construct
  source 1..75: mol_type = other DNA
cagatctgccaaaggggcaagctgttcatgtattacggcatacattcgctacgcattttatgatgaatggaggga

SEQ ID NO: 489540 - DNA, 75 bp, synthetic construct
  source 1..75: mol_type = other DNA
tcccaaaggagataaaccccatcattaccagtttaaagtatgggctctaaaaactgataagattcctgtggattc

SEQ ID NO: 489541 - DNA, 75 bp, synthetic construct
  source 1..75: mol_type = other DNA
ccgagcggccgggcggggatagcgcgtcatcgctgctgccggccagcctgacctttagcgccatcgaaaaggaag

SEQ ID NO: 489542 - DNA, 75 bp, synthetic construct
  source 1..75: mol_type = other DNA
atctggtggaacagaaccgctttagccgccagctgtactatgcgctgcactcctttgagatcgtcatcccgccgc

SEQ ID NO: 489543 - DNA, 75 bp, synthetic construct
  source 1..75: mol_type = other DNA
ggctatatctacccaaccatacgctggactgctcataataatattgacaacgcattgtatctcaatccacaagtc

SEQ ID NO: 489544 - DNA, 75 bp, synthetic construct
  source 1..75: mol_type = other DNA
atgcaggagctgctggaagccaaaaaagaagggttgacgcgtgagatcggtatttccaacttcacgatcccattg

SEQ ID NO: 489545 - DNA, 75 bp, synthetic construct
  source 1..75: mol_type = other DNA
tacttttgcatctacagtctgattaacccaatacctgaggcaaatgattttctttgggattataaagtccatcaa

SEQ ID NO: 489546 - DNA, 75 bp, synthetic construct
  source 1..75: mol_type = other DNA
acgtctgactcaacatttgaattctattcctgttcttggagagaacagttactgggagatccttttaccagaaga

SEQ ID NO: 489547 - DNA, 75 bp, synthetic construct
  source 1..75: mol_type = other DNA
ttgaacctcgtctggggaagatacgttactgcgaccttcgggcccgggagatccagcaggtgctttttgacatgt

SEQ ID NO: 489548 - DNA, 75 bp, synthetic construct
  source 1..75: mol_type = other DNA
cgctacacattccacggtaccaaaaaaagtatcagtattggcagattccctgaaatcgatgtggggacagcccgt

SEQ ID NO: 489549 - DNA, 75 bp, synthetic construct
  source 1..75: mol_type = other DNA
ctattttaggcggtaatggtggacattggggggatgctataaatggtagcaatatgaccattgctaatagcggat

SEQ ID NO: 489550 - DNA, 75 bp, synthetic construct
  source 1..75: mol_type = other DNA
agttactcacgaagacctggtgaaaaacaggcctcgctcccctgtcagaccacctatacccgcaacctccaaaac

SEQ ID NO: 489551 - DNA, 75 bp, synthetic construct
  source 1..75: mol_type = other DNA
atggttttctgcaataacgcgaatcttctcaacgtatttgtacgccatattgcgaataatcaacttcgttctctg

SEQ ID NO: 489552 - DNA, 75 bp, synthetic construct
  source 1..75: mol_type = other DNA
agccatgcaaactgaggggccggtcattgtactcagcccagggcgatgcgttccccgtgggtgggtggcatggcg

SEQ ID NO: 489553 - DNA, 75 bp, synthetic construct
  source 1..75: mol_type = other DNA
ttaagtcaaaccagaaaggggatcagccaattatatgaatacagatatcgatatcaaaacatcattggctatgac

SEQ ID NO: 489554 - DNA, 75 bp, synthetic construct
  source 1..75: mol_type = other DNA
ttctgccaaacgatttttagttaatgaagaaccaaatgtatcggcttttttattaatacagctatcaatattcca

SEQ ID NO: 489555 - DNA, 75 bp, synthetic construct
  source 1..75: mol_type = other DNA
taaaacgtactacctcattgaaaacattaaagcaacattgtaatgcaataataaatgactgtgctgtaagtgatt

SEQ ID NO: 489556 - DNA, 75 bp, synthetic construct
  source 1..75: mol_type = other DNA
cgctgacgctgggcgaaaatctgctggatttggatcacaacgtggatcaccgtctgcgccacagtgaataccgtg

SEQ ID NO: 489557 - DNA, 75 bp, synthetic construct
  source 1..75: mol_type = other DNA
gcagtggctatcgcccaaatttgcagtccaggtttcaagatgggttcgtgaatggatgtcaggggaaagaactac

SEQ ID NO: 489558 - DNA, 75 bp, synthetic construct
  source 1..75: mol_type = other DNA
attctggttgctgtgggtgtcggcggactggtcgtaacgctgggtatcccggaagccattattggcgcgttttta

SEQ ID NO: 489559 - DNA, 75 bp, synthetic construct
  source 1..75: mol_type = other DNA
tgcagttcttgaagtgttggaaaaacgaggttttaaaaatgctaagattaaaaaaccttgtgtgactgctgatta

SEQ ID NO: 489560 - DNA, 75 bp, synthetic construct
  source 1..75: mol_type = other DNA
catgagagccaaggagccgattctgggataaatggattcaagctggtcttgccgaagggtgtgcgcacgttccca

SEQ ID NO: 489561 - DNA, 75 bp, synthetic construct
  source 1..75: mol_type = other DNA
aaataagaataaaagaatttatattatttgtcatagttttggtacctaccttgtatattgtgccttaagtaaact

SEQ ID NO: 489562 - DNA, 75 bp, synthetic construct
  source 1..75: mol_type = other DNA
gcgcagtgcgggctgacggtggagcaactggccagacaggtggagccggaatacacaccggcgcgaaaagctcat

SEQ ID NO: 489563 - DNA, 75 bp, synthetic construct
  source 1..75: mol_type = other DNA
ttttatttttatttttcatttccaacgaggtgctttctgcaggaagtaattaccagaactttttatgggctccag

SEQ ID NO: 489564 - DNA, 75 bp, synthetic construct
  source 1..75: mol_type = other DNA
tgataaaaagaaagtgagcttaaataattataaaggatctttgtttgagcaatgcccatttattaatgaaataga

SEQ ID NO: 489565 - DNA, 75 bp, synthetic construct
  source 1..75: mol_type = other DNA
gtggataccgctgaagattccgtacaaccggagccggtaaaagttaccgctgacgaagtaaacaaaattatgcag

SEQ ID NO: 489566 - DNA, 75 bp, synthetic construct
  source 1..75: mol_type = other DNA
ggatatgaaacaacctgagccagtagtgcaacaggaaccggaaatagcctgcaatgcctgcggccagactggcgg

SEQ ID NO: 489567 - DNA, 75 bp, synthetic construct
  source 1..75: mol_type = other DNA
ctcgatcatcgcggctggggtcaatccgacgcgccttcgatgggctacgggctggcagaccttgcagccgatgca

SEQ ID NO: 489568 - DNA, 75 bp, synthetic construct
  source 1..75: mol_type = other DNA
tatccagcgcatataacagccgcgaatctgtcggctttgtgattgataatgtcctgacagcgggggcactaagtt

SEQ ID NO: 489569 - DNA, 75 bp, synthetic construct
  source 1..75: mol_type = other DNA
aacaatggttatttcagtaccaccctgaacaggattgcgcgaataaacgcaatggttgtacatcttgcgccgtat

SEQ ID NO: 489570 - DNA, 75 bp, synthetic construct
  source 1..75: mol_type = other DNA
attaatgatcaatatacttgtggttataataaccctgataggatgtctcccctgccgatagatattgctattgcg

SEQ ID NO: 489571 - DNA, 75 bp, synthetic construct
  source 1..75: mol_type = other DNA
ccaagtaaattgccggacatagcgaaacaattaagactgccatatcctattgaccaggccagtagtgcgcctaat

SEQ ID NO: 489572 - DNA, 75 bp, synthetic construct
  source 1..75: mol_type = other DNA
atagtgaacgttttctgccctccgcctggcagcgattcattcagcaccctaaatcagtgtttatggattattctt

SEQ ID NO: 489573 - DNA, 75 bp, synthetic construct
  source 1..75: mol_type = other DNA
ttgatttccgtgaaaacatcaaggtcaacgtgcttcatgtcaccaagcaggaacttctggaagactttgagtttg

SEQ ID NO: 489574 - DNA, 75 bp, synthetic construct
  source 1..75: mol_type = other DNA
gccagaaattattcagtccggattttataagcacgtttattcgtccggtttcggacagtttggcggtgaacccat

SEQ ID NO: 489575 - DNA, 75 bp, synthetic construct
  source 1..75: mol_type = other DNA
ggagaagggacgtgctgctattgtaaatgacagtcactcgtggcgatcttcagttaatggagttgacagatattt

SEQ ID NO: 489576 - DNA, 75 bp, synthetic construct
  source 1..75: mol_type = other DNA
ttaagtatgcatctatctctggaatgatggtgtctctttggcttatgcttcacggttttggtgaaaactttggtt

SEQ ID NO: 489577 - DNA, 75 bp, synthetic construct
  source 1..75: mol_type = other DNA
taagcgcagaaacgagctatggtggggcgcaaacagtagatataacgctggtggcaggcccggcagacgcctcgc

SEQ ID NO: 489578 - DNA, 75 bp, synthetic construct
  source 1..75: mol_type = other DNA
gagggcggcgcgacgtttttcctctatgacgaattcgggcagacggtcagtatcacctcccagggaaagatcatc

SEQ ID NO: 489579 - DNA, 75 bp, synthetic construct
  source 1..75: mol_type = other DNA
gaagcggacggcagcgtcaatagctacagcgtaccgttctccagtgtgccattactccagcgtcaggggcgaatc

SEQ ID NO: 489580 - DNA, 75 bp, synthetic construct
  source 1..75: mol_type = other DNA
aaagcactggcctggggaaaacagtacgagatgaaccgccccgggtttcctggagagtgttttatctgtgaactc

SEQ ID NO: 489581 - DNA, 75 bp, synthetic construct
  source 1..75: mol_type = other DNA
caaacaaaaataaaattacgattataacatctgtattgggatgtggagcatttttgttttttgttgtcaatatat

SEQ ID NO: 489582 - DNA, 75 bp, synthetic construct
  source 1..75: mol_type = other DNA
aacaagcaaaaaaatcacattgttactagggttaatatgttacgtatcggttttttttacaggttcaaaggcaag

SEQ ID NO: 489583 - DNA, 75 bp, synthetic construct
  source 1..75: mol_type = other DNA
aattcttgcaatttcaatcggaattgtaatggctctaaaaaatatgacctcgtcattaaattataatatcagtaa

SEQ ID NO: 489584 - DNA, 75 bp, synthetic construct
  source 1..75: mol_type = other DNA
ctggaattacatgccgtccttgccggagaagttattgctcaggttgcagcaccgacagcagcgcaatacatacga

SEQ ID NO: 489585 - DNA, 75 bp, synthetic construct
  source 1..75: mol_type = other DNA
gtaatcaccgctgtaatacatttcgacatgcggcaaccgggcgattacttccctggactgtgaaggaaggagagg

SEQ ID NO: 489586 - DNA, 75 bp, synthetic construct
  source 1..75: mol_type = other DNA
accccattaagggcgagaaagacggccgtatgctgatgtctgtgggtctgaacgcagaggtccgtgacaacatcc

SEQ ID NO: 489587 - DNA, 75 bp, synthetic construct
  source 1..75: mol_type = other DNA
atatagaggaaacgactgacgtcgatattatccgccgcgcttatctggcgctgttaccgtcctttcatccagaaa

SEQ ID NO: 489588 - DNA, 75 bp, synthetic construct
  source 1..75: mol_type = other DNA
acccgcgactctatataccagaatcagccagaaacggaacagaacgaccaaaatacgcaacaaaacgagccagaa

SEQ ID NO: 489589 - DNA, 75 bp, synthetic construct
  source 1..75: mol_type = other DNA
ggtgctaatgctggcggcggaaacctcaccgatcgcggcgaaggtttcgtacacgatctgacgtcactggcgcgc

SEQ ID NO: 489590 - DNA, 75 bp, synthetic construct
  source 1..75: mol_type = other DNA
cagtcttacggtgcccggactgaactactgcgcccgcgtgtgcaggtcagtaatgcagaggggcaactggtgtat

SEQ ID NO: 489591 - DNA, 75 bp, synthetic construct
  source 1..75: mol_type = other DNA
aatctgtacgccgtacagctgatgttattgaggacagcattcaggaaaccatgctggagtatgttgaccgcccac

SEQ ID NO: 489592 - DNA, 75 bp, synthetic construct
  source 1..75: mol_type = other DNA
ctagataacgttatcgacttcacggcaaccattaaggggcgggaaggcaatgtcatcaatgtcgctgcgctggcc

SEQ ID NO: 489593 - DNA, 75 bp, synthetic construct
  source 1..75: mol_type = other DNA
tcaggcgggaaaactgggggccgccgggacactgtatccggctctgcgagatatttttgaccagaccggtgctct

SEQ ID NO: 489594 - DNA, 75 bp, synthetic construct
  source 1..75: mol_type = other DNA
tgcgctttgagtccgtgcgccgtacagctgatgtgattgaagacagtgttcaggaatccatgttgccttatgttg

SEQ ID NO: 489595 - DNA, 75 bp, synthetic construct
  source 1..75: mol_type = other DNA
ctgaaccaaaagagcaacaagaaccggaaaaagtctgcaccacctgcagtcagaccggcggcggcaactgtcctg

SEQ ID NO: 489596 - DNA, 75 bp, synthetic construct
  source 1..75: mol_type = other DNA
tgtggtgcggtgatgggcgacgcaacataccaggaaacattcgatgaagagagtcaggttgaagctaaggaaaat

SEQ ID NO: 489597 - DNA, 75 bp, synthetic construct
  source 1..75: mol_type = other DNA
gagccagtagtgcaacaggaaccggaaatagcctgcaatgcctgcggccagactggcggggataactgccctgac

SEQ ID NO: 489598 - DNA, 75 bp, synthetic construct
  source 1..75: mol_type = other DNA
taagatttcggttgttgctgtggctgccacagaacaaaacgcgcagacagtggcctcgctgaaaggtacgaccct

SEQ ID NO: 489599 - DNA, 75 bp, synthetic construct
  source 1..75: mol_type = other DNA
gttttccggcacactgagtggtggcgaagatgaaccgtttccgctgaacacgccagtggcgatggcgggaacgac

SEQ ID NO: 489600 - DNA, 75 bp, synthetic construct
  source 1..75: mol_type = other DNA
gagcttcgcgccgctcatccgcatcgaaacagacaacggcgagcgggagaaagcgcagcgccgcagcctggcgga

SEQ ID NO: 489601 - DNA, 75 bp, synthetic construct
  source 1..75: mol_type = other DNA
actggtcgagagccgctacctctacgacccgctgggacggcgaccggctgacgacggtacagaccgacaccacgc

SEQ ID NO: 489602 - DNA, 75 bp, synthetic construct
  source 1..75: mol_type = other DNA
tcgggagtcagcaattcagtaggtgtaacggttggcggcggagttggggggcattttgcgtatacttatgtagtg

SEQ ID NO: 489603 - DNA, 75 bp, synthetic construct
  source 1..75: mol_type = other DNA
tataatgatgatggtctttggatttgcccctatatttccagacatctgttatcacttaacccattacaagcccgc

SEQ ID NO: 489604 - DNA, 75 bp, synthetic construct
  source 1..75: mol_type = other DNA
acgcctacaagcaaagaattgaaaaaaggatgggtggtaaaataaacgaattatttatacgttcaaactcagttc

SEQ ID NO: 489605 - DNA, 75 bp, synthetic construct
  source 1..75: mol_type = other DNA
tttttacgtctattccttgaaaaagactggattgactatcttgcaagtactgacatggggattgttttagtcagc

SEQ ID NO: 489606 - DNA, 75 bp, synthetic construct
  source 1..75: mol_type = other DNA
gtaaatggaatcatgatcccaccatttgatattcagtctctagcggacgcaatggtattttttatacaaaaccct

SEQ ID NO: 489607 - DNA, 75 bp, synthetic construct
  source 1..75: mol_type = other DNA
tggaattgatgctgcacaaattgtaaattggaaagcggaaggttatgttgaatttttaggaccgtgctcttatat

SEQ ID NO: 489608 - DNA, 75 bp, synthetic construct
  source 1..75: mol_type = other DNA
atgcatccgcttactcatccactgcctgtcacggcgcatgccccattgttagatgtgggcattctcactccggcc

SEQ ID NO: 489609 - DNA, 75 bp, synthetic construct
  source 1..75: mol_type = other DNA
agatagcatcccttttggatatgttcgtgaaaaggttttttcacttatatcgaaagatgatatgcatcttgtgag

SEQ ID NO: 489610 - DNA, 75 bp, synthetic construct
  source 1..75: mol_type = other DNA
gtggtggagcaacttaacccggcaggcctgagttaccgctaccagtatgagcaggaccgcatcaccgtcacggac

SEQ ID NO: 489611 - DNA, 75 bp, synthetic construct
  source 1..75: mol_type = other DNA
caaaaactgacagctgaagatgaagatagagaccttcctctaactgtacccaccgaccatctgggaggcgtacat

SEQ ID NO: 489612 - DNA, 75 bp, synthetic construct
  source 1..75: mol_type = other DNA
aagccggatgccccgttgaaactgtccgctattatgagaaagaggggctgctacaggcacctctgcgggatattg

SEQ ID NO: 489613 - DNA, 75 bp, synthetic construct
  source 1..75: mol_type = other DNA
actcaacgacagcggcggcaggagcattcactttgagccgctgtttcccggcgagataagctacagccgcagcga

SEQ ID NO: 489614 - DNA, 75 bp, synthetic construct
  source 1..75: mol_type = other DNA
gtttaaacgatactcagtatgaagcccgtgttccagtgagcaattcctttgcgcctaacatcactttttcggtgc

SEQ ID NO: 489615 - DNA, 75 bp, synthetic construct
  source 1..75: mol_type = other DNA
aatacatatttaacaataatggaatatattgacactttagatgaagagaaaaaaaagaacataaaaataacggta

SEQ ID NO: 489616 - DNA, 75 bp, synthetic construct
  source 1..75: mol_type = other DNA
atcattcagaaaaatatagtatgctatcgggcatgcgcgctcatattctacgtaggaataactgttatcagttta

SEQ ID NO: 489617 - DNA, 75 bp, synthetic construct
  source 1..75: mol_type = other DNA
gccgcagcgagtccctgtggctggtgcgtggcggtaaggcaacgcagccggacggccacacgctggcacggctgt

SEQ ID NO: 489618 - DNA, 75 bp, synthetic construct
  source 1..75: mol_type = other DNA
aataaaaaatgtgaaagcatcgttgaaaaacacacttattgatgttaaaaaaagatgcatgccaactagtggcat

SEQ ID NO: 489619 - DNA, 75 bp, synthetic construct
  source 1..75: mol_type = other DNA
ctgagcgatgggcagttaataaattctcaggctgaaatgtgttactggaccagtagttgtcctttagatagccca

SEQ ID NO: 489620 - DNA, 75 bp, synthetic construct
  source 1..75: mol_type = other DNA
tctggcactacgatgcgtcggaccgcatcacgcaccgcacggtgaacggcgaaccggcagagcagtggcagtatg

SEQ ID NO: 489621 - DNA, 75 bp, synthetic construct
  source 1..75: mol_type = other DNA
gccgcagcgagtcactctggctggcgcggggcggggtggcggcgcagcacagttcgcagccgctaagcgcgctct

SEQ ID NO: 489622 - DNA, 75 bp, synthetic construct
  source 1..75: mol_type = other DNA
aggtggtcatgcaggacttggcgttgcgtttgctaaaaagaaaggtgaaatgttatctgatatttgtatttatgc

SEQ ID NO: 489623 - DNA, 75 bp, synthetic construct
  source 1..75: mol_type = other DNA
tggcgaagcggtcagcggcaaactgcaactgctctacccggatggcgagccggtaaaaaatgcccgcgtgcagtt

SEQ ID NO: 489624 - DNA, 75 bp, synthetic construct
  source 1..75: mol_type = other DNA
ttcattaaagatagtagtgagtatttaacttctgacgcagttaatagttataatgtaaaaatcgtccctaaagat

SEQ ID NO: 489625 - DNA, 75 bp, synthetic construct
  source 1..75: mol_type = other DNA
ggtacttgatgtgagcgcaagcgccggggcaggacatatacacggtagtgacgtcatagatgtcattcatgctat

SEQ ID NO: 489626 - DNA, 75 bp, synthetic construct
  source 1..75: mol_type = other DNA
ttgtatcgggtagcggaacaggtagtacttgaagcgtttccgaaacaagagatgctggcccgtcttaatacaagg

SEQ ID NO: 489627 - DNA, 75 bp, synthetic construct
  source 1..75: mol_type = other DNA
ccagcgtgtttatgacatgcgcatttctcatgtcttcctgcaggcgtacgccgatcctaaaggcgacgggaatat

SEQ ID NO: 489628 - DNA, 75 bp, synthetic construct
  source 1..75: mol_type = other DNA
cttaataattacgaaaatgaaaagttaaccgccctccgcgacaccctgctccctaaactcatctccggcgagcta

SEQ ID NO: 489629 - DNA, 75 bp, synthetic construct
  source 1..75: mol_type = other DNA
acgccattgcgaataccctgggacaagtagctgcgctggtattctcgattgatgccccgcttaaagtgctattag

SEQ ID NO: 489630 - DNA, 75 bp, synthetic construct
  source 1..75: mol_type = other DNA
atgctgccgactctcggcattggtgatatgaacaatctctataaatggctgttgaaccttaattcggtagtgatg

SEQ ID NO: 489631 - DNA, 75 bp, synthetic construct
  source 1..75: mol_type = other DNA
agtcatgccgtcagcggtaagggcagcacggcgcatactggtacggtagatatcgtggcggataaaacgctgtac

SEQ ID NO: 489632 - DNA, 75 bp, synthetic construct
  source 1..75: mol_type = other DNA
gttatcaggcaattacagtgaaagaaaaatcgatatggttgagatactcaaccgaaagctgaaaggctgggctgc

SEQ ID NO: 489633 - DNA, 75 bp, synthetic construct
  source 1..75: mol_type = other DNA
gggtgatgtcggcggtggttatggcgctgacgcgctgggaaccccgcctcgagattatcggcgtggactttgctg

SEQ ID NO: 489634 - DNA, 75 bp, synthetic construct
  source 1..75: mol_type = other DNA
cacatcctgatggatgggctgtaaaaggtgaaggtaatgaacgggcaacttctgtacattcaacgcaagctgaag

SEQ ID NO: 489635 - DNA, 75 bp, synthetic construct
  source 1..75: mol_type = other DNA
tggattgacccattaggattgacgcagtgcgattccgaagggtgtaataatgatatattatttacaggaggaagt

SEQ ID NO: 489636 - DNA, 75 bp, synthetic construct
  source 1..75: mol_type = other DNA
aactggcctgaaacagcgcatatgatggcacttcttggtattcacccggacacatggcttgtgcgtatcacttcc

SEQ ID NO: 489637 - DNA, 75 bp, synthetic construct
  source 1..75: mol_type = other DNA
gccagccgttcaatgccagaaactcaaggttttctgaaagcgccattgatcagcttctgcaatataaaccatttg

SEQ ID NO: 489638 - DNA, 75 bp, synthetic construct
  source 1..75: mol_type = other DNA
ttattctacggcgctagacgcgcccgccgcaggcgctgacggcttatatgaagatgaaagccttggccaacccga

SEQ ID NO: 489639 - DNA, 75 bp, synthetic construct
  source 1..75: mol_type = other DNA
attccatgccgattttgccgccatcaccctgaacacgctgggcattccccagcttggcctgcgcgagcatattca

SEQ ID NO: 489640 - DNA, 75 bp, synthetic construct
  source 1..75: mol_type = other DNA
tccccccaaaacgcgcgcatttggtcgttttacccacgcaggcagctacaccaccacgattactcgccctactct

SEQ ID NO: 489641 - DNA, 75 bp, synthetic construct
  source 1..75: mol_type = other DNA
aaaaaatggaattactttagagaagaagaaagatcctatttctcatgcaaaaatattatcatgggataatgacaa

SEQ ID NO: 489642 - DNA, 75 bp, synthetic construct
  source 1..75: mol_type = other DNA
ctggtgtttgtaggggtggaaacgccaggacagtttgaattcgtccgttctcttggcctcggttacctagttcag

SEQ ID NO: 489643 - DNA, 75 bp, synthetic construct
  source 1..75: mol_type = other DNA
agcgcagggctgtatgccacctggtttgccgatgacatcagtaaaaaaggcgcatacattgactcctgggcgtaa

SEQ ID NO: 489644 - DNA, 75 bp, synthetic construct
  source 1..75: mol_type = other DNA
aaagctgattctgcgtctttgtcggacattctgcttgggttactacgcgagtatgcggcttatatcgaagatgaa

SEQ ID NO: 489645 - DNA, 75 bp, synthetic construct
  source 1..75: mol_type = other DNA
ccctggataaagactgggagaaagacttcctcccactgtgcagcgacatcttcaaacggcaaattcttgaggcgt

SEQ ID NO: 489646 - DNA, 75 bp, synthetic construct
  source 1..75: mol_type = other DNA
gaccgctccctggagaaccgccgtatacagtccgggcaagttatcagtggcgcgattcttatcgtgacaactgag

SEQ ID NO: 489647 - DNA, 75 bp, synthetic construct
  source 1..75: mol_type = other DNA
ttttcaatgaggtggtgaagccgcagttccaaaatccgcaaatcaaacgcgtgttcgtgataatttccgatgccc

SEQ ID NO: 489648 - DNA, 75 bp, synthetic construct
  source 1..75: mol_type = other DNA
cgggcgagacggaccttgcgctgcccggcccgctgccgttcattctttcccgcgcctacagcagttaccggacca

SEQ ID NO: 489649 - DNA, 75 bp, synthetic construct
  source 1..75: mol_type = other DNA
gcgtggtggacggcttcgggcggacgctggcctttcaccgggcggcggagggtgatgtggcgggcgcggtgacgg

SEQ ID NO: 489650 - DNA, 75 bp, synthetic construct
  source 1..75: mol_type = other DNA
tgcaaacactttatgggcgaagatgaatggagttaacgtctcaggaaacggaaaaccaatcaagagtattaccgt

SEQ ID NO: 489651 - DNA, 75 bp, synthetic construct
  source 1..75: mol_type = other DNA
gaacccggagacgggggaactgctgtggcagcatgagacgaaacacgcctacaacgaacaggggctggcaaaccg

SEQ ID NO: 489652 - DNA, 75 bp, synthetic construct
  source 1..75: mol_type = other DNA
gtacgggtgggacggcgaccggctgacgacggtacagaccgacaccacgcgtatccagacggtataccagccggg

SEQ ID NO: 489653 - DNA, 75 bp, synthetic construct
  source 1..75: mol_type = other DNA
tgcaatgagacattgttacttgatgtgtcgaatgactaagacatttggatcaacaatagctgacgtgataggtaa

SEQ ID NO: 489654 - DNA, 75 bp, synthetic construct
  source 1..75: mol_type = other DNA
ctgtcgtttgcgagctcgatatatgagcttgtttgatgcgtggctgatcggcgatgcgcaatggaaagttgtata

SEQ ID NO: 489655 - DNA, 75 bp, synthetic construct
  source 1..75: mol_type = other DNA
atggcggaatatggcagggagtatatgaaacggaaaacgaagcacggtttgcgttcaaatgtgaccctgacagag

SEQ ID NO: 489656 - DNA, 75 bp, synthetic construct
  source 1..75: mol_type = other DNA
agccgtgctgatcttctggcatgaactggccataaatggctattcttcaatgaatgccataaagagacaggagag

SEQ ID NO: 489657 - DNA, 75 bp, synthetic construct
  source 1..75: mol_type = other DNA
acaattgaaacagatgatcagtgaaattgatacggtaattgctaataaaattgcaggtggtgctaattactcaat

SEQ ID NO: 489658 - DNA, 75 bp, synthetic construct
  source 1..75: mol_type = other DNA
ttaacggaaaggctggagttgtcggaattgatttaatcaaatgccgtaataactcgggcatttttggattgtggg

SEQ ID NO: 489659 - DNA, 75 bp, synthetic construct
  source 1..75: mol_type = other DNA
atcattgagccaagttattctcactcggatattcagtcgctactgagctctggtggagatatttatttcatgcca

SEQ ID NO: 489660 - DNA, 75 bp, synthetic construct
  source 1..75: mol_type = other DNA
aacccaccgtcaaccgttcaggattttaatgattatgaatattcctttaattttggcacgcttaataatgaatac

SEQ ID NO: 489661 - DNA, 75 bp, synthetic construct
  source 1..75: mol_type = other DNA
gcgaagaagcaagggtatagcatatcagatggtgcttttaataagtgtaatggagattggtatgagtggattatc

SEQ ID NO: 489662 - DNA, 75 bp, synthetic construct
  source 1..75: mol_type = other DNA
taaaggcgcatccggtgtaccaaccggttttttcctggccgagctgactcatccgctgaaagtactggaagatgc

SEQ ID NO: 489663 - DNA, 75 bp, synthetic construct
  source 1..75: mol_type = other DNA
agcacacagcttcataagtctcagttaactgagtggctgaaacgtgctgttgatgacggggtggtgaaaaagctc

SEQ ID NO: 489664 - DNA, 75 bp, synthetic construct
  source 1..75: mol_type = other DNA
atatgcaccaggcctttttgcagcaaaatttcgatctgcctcctggcagcgtaccctgccatatcgttaattctt

SEQ ID NO: 489665 - DNA, 75 bp, synthetic construct
  source 1..75: mol_type = other DNA
ttcttgccggtatcagcgccggcggcatgttctgcccggagtgtggcaccgttcactggccggatggtgtaaccc

SEQ ID NO: 489666 - DNA, 75 bp, synthetic construct
  source 1..75: mol_type = other DNA
aacaagaacgtggactatatctagcaatactgttagatattatggggcagcaacgcatattggattttctgatgc

SEQ ID NO: 489667 - DNA, 75 bp, synthetic construct
  source 1..75: mol_type = other DNA
gaaagacaagattggctctaacctagctggtggccttgctggcagtattgataacttccgcaggcagatactcga

SEQ ID NO: 489668 - DNA, 75 bp, synthetic construct
  source 1..75: mol_type = other DNA
tgagcaatatgcccaccagcgccccggtgattcagcaggaaacgaatattaacatccacggcgtttccgatccgc

SEQ ID NO: 489669 - DNA, 75 bp, synthetic construct
  source 1..75: mol_type = other DNA
ttggttgcatggcggctgctaaataccgctttcatgtcatcacccttgggcatgataacgacgcttattattgca

SEQ ID NO: 489670 - DNA, 75 bp, synthetic construct
  source 1..75: mol_type = other DNA
caattagtggggcagaggaaaatcttaagaaaggatgggtgccactatgggtcaatccaacaaccgatctagatt

SEQ ID NO: 489671 - DNA, 75 bp, synthetic construct
  source 1..75: mol_type = other DNA
aaacagcccaggcgaccttacttctgactagttatttttctaaagcaactagcgaaaacgccaaaccactttcca

SEQ ID NO: 489672 - DNA, 75 bp, synthetic construct
  source 1..75: mol_type = other DNA
gacagccgaacggttgataaaagcaggtggggtacatgaaaacaatcaggttgaccatggcgcaggctttggtgc

SEQ ID NO: 489673 - DNA, 75 bp, synthetic construct
  source 1..75: mol_type = other DNA
cgttgaaaccgataatagttgtgtggagaactgtttaaaagggaagtttaaagaggtaaggccgcgttattctgt

SEQ ID NO: 489674 - DNA, 75 bp, synthetic construct
  source 1..75: mol_type = other DNA
tacggatgcctgaactgagccaattgttaggtatatctcgttcgacaatttacgaaaaaatgaatccgttatcga

SEQ ID NO: 489675 - DNA, 75 bp, synthetic construct
  source 1..75: mol_type = other DNA
ccatcacatgatctacttcccgactacagagttctcagaaatgttccgattcgagcgttcaatccatatgtcggt

SEQ ID NO: 489676 - DNA, 75 bp, synthetic construct
  source 1..75: mol_type = other DNA
caaataatcttggcggggaaattggtaactgggtcggagctatgataggtaaagcttactctggcagcctcaaaa

SEQ ID NO: 489677 - DNA, 75 bp, synthetic construct
  source 1..75: mol_type = other DNA
tgatttactatataacaataaattgttaagttctttcgaggacgaaattatgcggatgaagaacaaaaaagaatg

SEQ ID NO: 489678 - DNA, 75 bp, synthetic construct
  source 1..75: mol_type = other DNA
gaaatatttaaaagaaatccacgtaagctacatgttgtcgatattagtgagaataatctagttgaattggtacgt

SEQ ID NO: 489679 - DNA, 75 bp, synthetic construct
  source 1..75: mol_type = other DNA
accgggaagctggagaaagaataaaatcaacaaacaatctgcagaatcagcttaataccctctctggtcaggtca

SEQ ID NO: 489680 - DNA, 75 bp, synthetic construct
  source 1..75: mol_type = other DNA
ggcagcggttatcttgcggggatgaagctgggcgggacgccgctggtggagttcacgcgcgacaggctgcaccgc

SEQ ID NO: 489681 - DNA, 75 bp, synthetic construct
  source 1..75: mol_type = other DNA
aacatcatcaattgatattactggcagtggagatctaatatcattaggtggtcatgcaggacttggcgttgcgtt

SEQ ID NO: 489682 - DNA, 75 bp, synthetic construct
  source 1..75: mol_type = other DNA
acccgtattacctgcaccagccataccgtctgccggggcagcagcatgatgaggaatcagggctgtactataacc

SEQ ID NO: 489683 - DNA, 75 bp, synthetic construct
  source 1..75: mol_type = other DNA
ccttctttagataccttaccaccgtacagagtcattactgaggctcctgtaatggctctcaacccatattcaggc

SEQ ID NO: 489684 - DNA, 75 bp, synthetic construct
  source 1..75: mol_type = other DNA
catcgagttctcgttgatttatgcaataaaaggtttttgttcaccgtaaatcacggagatccaacagcttcatca

SEQ ID NO: 489685 - DNA, 75 bp, synthetic construct
  source 1..75: mol_type = other DNA
tgatgaattaaggttggctttttctgattctatactttacttggatgaagactcctttgataaatgttatgtttc

SEQ ID NO: 489686 - DNA, 75 bp, synthetic construct
  source 1..75: mol_type = other DNA
cagcgccgagtcggccatgtcctccctcgaagggctggccggtttcatgcgtagcaatccgggggcggaaggctt

SEQ ID NO: 489687 - DNA, 75 bp, synthetic construct
  source 1..75: mol_type = other DNA
actgcaggcgggagggtatggttcatttcagatagccgcacgtctgagtcttccgctggagagttatctcagtga

SEQ ID NO: 489688 - DNA, 75 bp, synthetic construct
  source 1..75: mol_type = other DNA
gaacccgcatcagctgcagcagcttatccgcctgccggggcagcagtatgatgaggagtccggcctgtattacaa

SEQ ID NO: 489689 - DNA, 75 bp, synthetic construct
  source 1..75: mol_type = other DNA
tgagaaagtatcagcttatcatactcatggtgcagatagtcatggagaatattgggacgaaatattttcaggtaa

SEQ ID NO: 489690 - DNA, 75 bp, synthetic construct
  source 1..75: mol_type = other DNA
ttgccagtgcttgcgtgctttcttattggattttctgtagaaaaaacgccctaaaacaccaagcaaaagcggttg

SEQ ID NO: 489691 - DNA, 75 bp, synthetic construct
  source 1..75: mol_type = other DNA
aaaaatcatgagagacaaaaagtacttgataaggaaatagttcaacatcagaagcaaagaaaatattggtggtta

SEQ ID NO: 489692 - DNA, 75 bp, synthetic construct
  source 1..75: mol_type = other DNA
tgcggtggaggcatatcgcggatcaccacaactgatggtcgaacgcctcaatgccctgactgaaaaccagcgcca

SEQ ID NO: 489693 - DNA, 75 bp, synthetic construct
  source 1..75: mol_type = other DNA
gtatcaatgaggttgctgaatatttacaaatcccacggaaaaaactctatctcagaatgaaaaaatacggtctta

SEQ ID NO: 489694 - DNA, 75 bp, synthetic construct
  source 1..75: mol_type = other DNA
tatgctgaaagccaagaaaaccttggattaactggttggcctgcggaaagagggttgcatgaaacattactagta

SEQ ID NO: 489695 - DNA, 75 bp, synthetic construct
  source 1..75: mol_type = other DNA
aatgggtgaaagaagcagaaggtggcacgctgttattaaaagaacttgagcatttaacgccagaaaatcagcgcg

SEQ ID NO: 489696 - DNA, 75 bp, synthetic construct
  source 1..75: mol_type = other DNA
accagctcgctgtttatcgctgaacaggaaaacacggatcttcccctacttacggaagttaattacgaggaaact

SEQ ID NO: 489697 - DNA, 75 bp, synthetic construct
  source 1..75: mol_type = other DNA
ttatgactttgacgcagcagttacatttgttccagaaaagacgaagtatggtcgagttataatttctcatcttgg

SEQ ID NO: 489698 - DNA, 75 bp, synthetic construct
  source 1..75: mol_type = other DNA
aatattccgccatcggcatggcattagtgggcaccgagggacaatggctgcaatccaacaaagcactctgccagt

SEQ ID NO: 489699 - DNA, 75 bp, synthetic construct
  source 1..75: mol_type = other DNA
aatctggacagccagggcgcgatttatctctgcgagtcagccaaagccggagccgtgctgatcttctggcatgaa

SEQ ID NO: 489700 - DNA, 75 bp, synthetic construct
  source 1..75: mol_type = other DNA
gtcactgcgcaccggcgcgacagtccagggaattcagtctattggctatgcggtttcgcaggttggcggcagtgt

SEQ ID NO: 489701 - DNA, 75 bp, synthetic construct
  source 1..75: mol_type = other DNA
gctatgccgcatcgcaaaccggtgccagcgcggagtcggctatgtcctccctcgaagggctggcggggttcatgc

SEQ ID NO: 489702 - DNA, 75 bp, synthetic construct
  source 1..75: mol_type = other DNA
ctcaatattgaccccaaatcatggtccctgaagtgggatttcagcaacttcatcgaccagatgggcgaattcagc

SEQ ID NO: 489703 - DNA, 75 bp, synthetic construct
  source 1..75: mol_type = other DNA
tgctgggtaagatcagtgcctggcacacgcgtttgatggaagacggcgttcaggcaatgcgcgattatcttgccg

SEQ ID NO: 489704 - DNA, 75 bp, synthetic construct
  source 1..75: mol_type = other DNA
catttctgaatatgccaaccccggtagctttccttgaaataagtaataagccctatttggggaatatgttaaatg

SEQ ID NO: 489705 - DNA, 75 bp, synthetic construct
  source 1..75: mol_type = other DNA
cacgctgtcggtaatgaggttgcacgtcggcaacagtctgcaaatgctcaggtcatgcgaagtaatcaggtgagg

SEQ ID NO: 489706 - DNA, 75 bp, synthetic construct
  source 1..75: mol_type = other DNA
atgaaaatggaagaaatatctattctcgagagctgattaataaggctgccgtggcaggaattagtggcaaagtga

SEQ ID NO: 489707 - DNA, 75 bp, synthetic construct
  source 1..75: mol_type = other DNA
ttagatatgaaggagttactcggcgaagttgtatttcgccaggatatattttactcgttacgtaaagttgcagtc

SEQ ID NO: 489708 - DNA, 75 bp, synthetic construct
  source 1..75: mol_type = other DNA
ttgcggcagaacggcggagaccttagcaaagcactggcatcatataactgggggatcgggaatgttaagcgttat

SEQ ID NO: 489709 - DNA, 75 bp, synthetic construct
  source 1..75: mol_type = other DNA
gggcgacttgtcgccggatttatggggcttggtaaggcaattggcggctctattggtgggctgggtaagctggcg

SEQ ID NO: 489710 - DNA, 75 bp, synthetic construct
  source 1..75: mol_type = other DNA
ccgcttcgggcgcacgcaaaccttccaccgtgaggccgcaggcgaatttaccggagaaatcaccggcgtgaccga

SEQ ID NO: 489711 - DNA, 75 bp, synthetic construct
  source 1..75: mol_type = other DNA
acggtttatcaaaacagccagaaagcatggaaaacgtcttatcgttgttacattcccgtcagatggtgatcgaat

SEQ ID NO: 489712 - DNA, 75 bp, synthetic construct
  source 1..75: mol_type = other DNA
atttgcatttcatttgataccgctgaaaaacgccgatacgcaacttatttgatactaaatcggcgcttttctttt

SEQ ID NO: 489713 - DNA, 75 bp, synthetic construct
  source 1..75: mol_type = other DNA
cgcagggccgtgaaacgcagtatgaatacaacgccgcaggcgacctgaccgccgtcattaccccggacggcaacc

SEQ ID NO: 489714 - DNA, 75 bp, synthetic construct
  source 1..75: mol_type = other DNA
atcatcctaaatttaaacctggaatgtcagtaagactgttatcctgtaatacaggaaaaggaaataactcttatg

SEQ ID NO: 489715 - DNA, 75 bp, synthetic construct
  source 1..75: mol_type = other DNA
ggagtgaggacggtcacggtgtggtgttcccggtggaactggtgaggatgctggacaggctggagggggaaatcc

SEQ ID NO: 489716 - DNA, 75 bp, synthetic construct
  source 1..75: mol_type = other DNA
tcagaatattacttcagataatataaaaattttaatagtcggggatggggatccgaaatatatcacagcaattca

SEQ ID NO: 489717 - DNA, 75 bp, synthetic construct
  source 1..75: mol_type = other DNA
acgtcctaatttagtatattgttttttaaagattttcttcgattttaagttaatatgtgttcatcactctagttt

SEQ ID NO: 489718 - DNA, 75 bp, synthetic construct
  source 1..75: mol_type = other DNA
ttatatgaacgaaaatcacacaactttcataggcagtaaaattaaaagtcgtgtggaggagtttaatattatgaa

SEQ ID NO: 489719 - DNA, 75 bp, synthetic construct
  source 1..75: mol_type = other DNA
agtggctgatctgatcgttatcaacaaagacgatggcgataaccataccaatgtcgccattgcccggcatatgta

SEQ ID NO: 489720 - DNA, 75 bp, synthetic construct
  source 1..75: mol_type = other DNA
gttgatggcggggactcgcaagattaagcaggacacgattgtccaccgaccgcagcgtaaaaaatcagcgaagtg

SEQ ID NO: 489721 - DNA, 75 bp, synthetic construct
  source 1..75: mol_type = other DNA
atgtgatggttcaggcgtttatcgatgccgtaaatgaggggatcgatttggtgcctgtggtggctgattcaacgt

SEQ ID NO: 489722 - DNA, 75 bp, synthetic construct
  source 1..75: mol_type = other DNA
ctgacagaaatcagccacctgagcgaaggccaccgtgtcgctgtccactacggctatgacgataaaggccgcctg

SEQ ID NO: 489723 - DNA, 75 bp, synthetic construct
  source 1..75: mol_type = other DNA
acttcggagcggatgatgaacggctggcgcgtgcgctgatgctttctcatttgagcgcaatttacatccataacc

SEQ ID NO: 489724 - DNA, 75 bp, synthetic construct
  source 1..75: mol_type = other DNA
actggggaggcgactattcgcgagggtgggctgattacggctgaaaatacgattatcggtggcaatgccaccggt

SEQ ID NO: 489725 - DNA, 75 bp, synthetic construct
  source 1..75: mol_type = other DNA
gtaagacgacacgggaagatccagccacgaaagcgaaccgtaaggcgggcatgtatcgcgagcaggaagaacggg

SEQ ID NO: 489726 - DNA, 75 bp, synthetic construct
  source 1..75: mol_type = other DNA
aatattacagagccttcagcaaaactcagcccggcacactgtgcactgttagagaaagttattagccagttttct

SEQ ID NO: 489727 - DNA, 75 bp, synthetic construct
  source 1..75: mol_type = other DNA
atgccttatgcaggcctatttcaacgacagtcaggatgatgattctgacgtattacctctcttcaaaattagcgt

SEQ ID NO: 489728 - DNA, 75 bp, synthetic construct
  source 1..75: mol_type = other DNA
tactggcaacaggagggcctggcgagctttatcgcgacagtgtgtatccacacaaatgtttcggctcgctggggc

SEQ ID NO: 489729 - DNA, 75 bp, synthetic construct
  source 1..75: mol_type = other DNA
agcgcagcggcgcagcctggtggagaagttacagcaggaagggagtgaggacggtcacggtgtggtgttcccggt

SEQ ID NO: 489730 - DNA, 75 bp, synthetic construct
  source 1..75: mol_type = other DNA
ctacgacccgctgggccgccggacggggaaacgggtgtggcgtcgcgagcgtgatctgacaggatggatgtcgct

SEQ ID NO: 489731 - DNA, 75 bp, synthetic construct
  source 1..75: mol_type = other DNA
acgggtgggacggcgacaggctgacgacggtgcagactgacaccacgcgtatccagacggtgtaccagccgggaa

SEQ ID NO: 489732 - DNA, 75 bp, synthetic construct
  source 1..75: mol_type = other DNA
cctgagtccgcatatttatctggcgacgaacagtccgcaggggccgtggtggatactcggctggagtgagcgggt

SEQ ID NO: 489733 - DNA, 75 bp, synthetic construct
  source 1..75: mol_type = other DNA
ctgctccgctgccgccgtaccgggtactgaccggcctggtggaccgcttcgggcgcacactgaccttccggcgtg

SEQ ID NO: 489734 - DNA, 75 bp, synthetic construct
  source 1..75: mol_type = other DNA
atgaaagtcaccgtcttgccccactctggcaggctctgccggaagaactccgcctgagtccgcatatttatctgg

SEQ ID NO: 489735 - DNA, 75 bp, synthetic construct
  source 1..75: mol_type = other DNA
ggaacttttatcctttctgaaatattacacagcgcagctgctcgggaatatggcccgccgtcgagcccctgctgt

SEQ ID NO: 489736 - DNA, 75 bp, synthetic construct
  source 1..75: mol_type = other DNA
gaaccttgcctggtgcggttattttacattttctatgcctaatatatttaagggctttttagaagcatcaagatt

SEQ ID NO: 489737 - DNA, 75 bp, synthetic construct
  source 1..75: mol_type = other DNA
tatcaaaatttgaagaacgattactagactcgctaaatatacgagccatctacttatcaccaaatttaagcttag

SEQ ID NO: 489738 - DNA, 75 bp, synthetic construct
  source 1..75: mol_type = other DNA
tggctgacatccggcgatgaggaaaaacaggccgggtatcgtgaaacccccgttgtggatttaatcccacagaga

SEQ ID NO: 489739 - DNA, 75 bp, synthetic construct
  source 1..75: mol_type = other DNA
gtacaaaatttcttgaatcaaagaaacaaaatgagttcagagaacagcaactcaatgcccccgtagctgatctca

SEQ ID NO: 489740 - DNA, 75 bp, synthetic construct
  source 1..75: mol_type = other DNA
aaggaattgatagaagcggattctataagctaatgaagaaatacgaaattcagataaagattaacgttcaagttt

SEQ ID NO: 489741 - DNA, 75 bp, synthetic construct
  source 1..75: mol_type = other DNA
ggcttccgctggcgcagaaggccagcaaaaatatgacgctcgataccgggttccagaccgaccagccagcggtcg

SEQ ID NO: 489742 - DNA, 75 bp, synthetic construct
  source 1..75: mol_type = other DNA
caacatctggaagggtcgaagtttgaatatattgaacaagagtgcgggattctgattggcggtaattatgaaagc

SEQ ID NO: 489743 - DNA, 75 bp, synthetic construct
  source 1..75: mol_type = other DNA
ctggacggcaacgtcaccctgaatgcgtcaaatggcagcatcaagttgaccgggatcgggaacggtagcacctcc

SEQ ID NO: 489744 - DNA, 75 bp, synthetic construct
  source 1..75: mol_type = other DNA
aagatccgtttaccctgatgcgcatgattgaagtcaatattctcaatactgacaaaaccattgagcagtctattg

SEQ ID NO: 489745 - DNA, 75 bp, synthetic construct
  source 1..75: mol_type = other DNA
gatgttgcttgccgggtggaaactgacggggctggtttatgtatctaccgttgccattggcttagcaatcaagga

SEQ ID NO: 489746 - DNA, 75 bp, synthetic construct
  source 1..75: mol_type = other DNA
caggtgtttgccttggggtttatgatgactatcagtggttcagggatgaattaaagaccagtaaaaatacccgat

SEQ ID NO: 489747 - DNA, 75 bp, synthetic construct
  source 1..75: mol_type = other DNA
ccgtaaagccattgacctgctggtagcgtgggggctggtggtccgccgccacggcagcggcacttacctggtgcg

SEQ ID NO: 489748 - DNA, 75 bp, synthetic construct
  source 1..75: mol_type = other DNA
aaacgcaccttctttgatacattgctggaacaagcggtgctaaccacgccggaagcccatgtgtatccacatgca

SEQ ID NO: 489749 - DNA, 75 bp, synthetic construct
  source 1..75: mol_type = other DNA
cagagctaccgggccagtgggctgacattgctgactgcggcgatctcactgtggaatacgatatatatagaaaga

SEQ ID NO: 489750 - DNA, 75 bp, synthetic construct
  source 1..75: mol_type = other DNA
gctgggctgaataaaggagaagcccgtaatgctcttgcgcgagcggtttttatgcatcggctgggtgaaatcagg

SEQ ID NO: 489751 - DNA, 75 bp, synthetic construct
  source 1..75: mol_type = other DNA
gcgcagccatgcgtgaagttacgccaaatactggcacgatcggcccatttgatgccaaagtcacgtttaatttca

SEQ ID NO: 489752 - DNA, 75 bp, synthetic construct
  source 1..75: mol_type = other DNA
ttcagagcattaagcccttacgactacacactgtattgcaggaagtgggtaaaaccaaatctgacttgtacgcca

SEQ ID NO: 489753 - DNA, 75 bp, synthetic construct
  source 1..75: mol_type = other DNA
ctgtacttggcgaagggacttttgctcttaaatctgaaaccctcgacaataagtcaaatgtcgtggcatcaacga

SEQ ID NO: 489754 - DNA, 75 bp, synthetic construct
  source 1..75: mol_type = other DNA
tgtccccgctgggatgggaacacatcaacttgagtggagattacgtctggcgaacaaacctcaagctgggacagg

SEQ ID NO: 489755 - DNA, 75 bp, synthetic construct
  source 1..75: mol_type = other DNA
acagctattgattcctgcctgcgccttgaatacctgatggaacgccgcttcagcagaacacctttgttccgtgcc

SEQ ID NO: 489756 - DNA, 75 bp, synthetic construct
  source 1..75: mol_type = other DNA
atgtactatgatggactcattcattgcgaacgaaaaagtttgggaagatctaaaaggatttgaacgtttaattat

SEQ ID NO: 489757 - DNA, 75 bp, synthetic construct
  source 1..75: mol_type = other DNA
ggcggcggggaaattcagaaccattccgcggcgttcagtgcaatgactgcggatatttccggtctcgaaaaacat

SEQ ID NO: 489758 - DNA, 75 bp, synthetic construct
  source 1..75: mol_type = other DNA
tgtcggggcttgggttacatcactgagtcatgtccgggtgaagttttccgatactaatgagaaagtaaaacgttg

SEQ ID NO: 489759 - DNA, 75 bp, synthetic construct
  source 1..75: mol_type = other DNA
gggccataacactggcgatgaaattctgcgtaaagtctctcaggccttttatgacaacgtccgcagtagtgatta

SEQ ID NO: 489760 - DNA, 75 bp, synthetic construct
  source 1..75: mol_type = other DNA
tttgctagccaattagctaaagagttacatacaaatgtaataggacctgacacgctatggacgtggtgggggcga

SEQ ID NO: 489761 - DNA, 75 bp, synthetic construct
  source 1..75: mol_type = other DNA
tacaggtgataaatcaggtgggttaatgccctgttttaaccaggtactccttgaacgaattggccttaatagcag

SEQ ID NO: 489762 - DNA, 75 bp, synthetic construct
  source 1..75: mol_type = other DNA
ctggtggagatggctataggtcctgtagctacgattgctgcaggaatcctggctaattttttctactttatcggg

SEQ ID NO: 489763 - DNA, 75 bp, synthetic construct
  source 1..75: mol_type = other DNA
agcaaatttacctggtttgccagcgaccgctttacccacgatttaaccttaaaatataccggctccagccgtgat

SEQ ID NO: 489764 - DNA, 75 bp, synthetic construct
  source 1..75: mol_type = other DNA
agcctgaagaaaagtcatggaaaataaccatcagaaatttgataattgagacaaagaacagaactaccaaccaaa

SEQ ID NO: 489765 - DNA, 75 bp, synthetic construct
  source 1..75: mol_type = other DNA
cactttgacattgaattggctaaagccaattcctggttcaatgtcaagacaatgctcataagtgaatcacagcaa

SEQ ID NO: 489766 - DNA, 75 bp, synthetic construct
  source 1..75: mol_type = other DNA
tttcatacgatataaaaaacaccttaatgatatattatcggcaaaggcaagacttgagaagttagttcttttcgc

SEQ ID NO: 489767 - DNA, 75 bp, synthetic construct
  source 1..75: mol_type = other DNA
aaatggtttcttgtgtgatggcacggaacaatgggtatcagttattgagacattaatagattctgccgagttacg

SEQ ID NO: 489768 - DNA, 75 bp, synthetic construct
  source 1..75: mol_type = other DNA
acgagcataacggaaaatcatcagataaatgggatatttatctccatacatatcaccagtacctttccagttcca

SEQ ID NO: 489769 - DNA, 75 bp, synthetic construct
  source 1..75: mol_type = other DNA
aacattgaagtaaaactcacttcgggaaaaataggaaccaacgataaacaactattagctaatctggagacgtct

SEQ ID NO: 489770 - DNA, 75 bp, synthetic construct
  source 1..75: mol_type = other DNA
atcggcctggcgagttataccgggatgccggtttccactactcacgtactctcctcttctgtcgcggggacgatg

SEQ ID NO: 489771 - DNA, 75 bp, synthetic construct
  source 1..75: mol_type = other DNA
ggcctgggtgtttacccttccggctgcggtactgctttccggcggactgtactggctctccttgcagttcctgta

SEQ ID NO: 489772 - DNA, 75 bp, synthetic construct
  source 1..75: mol_type = other DNA
ggcagtacatccgttctggctcacaacgcattatgcagatggtgtttcaggacccgctctcttcgctcaatccgc

SEQ ID NO: 489773 - DNA, 75 bp, synthetic construct
  source 1..75: mol_type = other DNA
ctgtttatcatccagggcgcatgggtggccatttacagccttatgttcaccattgtgggggcgctgccttttggg

SEQ ID NO: 489774 - DNA, 75 bp, synthetic construct
  source 1..75: mol_type = other DNA
tttgtgccattgccgccgccagacggtggcgactggcgacccggacagcaggacgtagccgccgctgtgtttgcc

SEQ ID NO: 489775 - DNA, 75 bp, synthetic construct
  source 1..75: mol_type = other DNA
gccatgcagacttttccagactgggagacaccccggaatttcgccagctatggtgcggtgagtcgaaacccacgg

SEQ ID NO: 489776 - DNA, 75 bp, synthetic construct
  source 1..75: mol_type = other DNA
gcgccagattatccagccgggcgatgcaatccactgccgccgcgctgagctggtgatgtggctaaacaaaaagcc

SEQ ID NO: 489777 - DNA, 75 bp, synthetic construct
  source 1..75: mol_type = other DNA
tgccttcacttacccattgatttatgaatcccgcgctggggttggcctgtctgttatcgttgttcctactaatac

SEQ ID NO: 489778 - DNA, 75 bp, synthetic construct
  source 1..75: mol_type = other DNA
aacggcaactataccggaaacaatggcctgatgacgttcaacgcgacgctgggcggcgataattcgcccaccgat

SEQ ID NO: 489779 - DNA, 75 bp, synthetic construct
  source 1..75: mol_type = other DNA
gatgcggatggtgcacttggcaacacccgggaactgaacatcagcaacgcggccatcgtcgatcttaatggatcg

SEQ ID NO: 489780 - DNA, 75 bp, synthetic construct
  source 1..75: mol_type = other DNA
aatttaccaaaatctcttatgatactagcctgaatcagctgggtctgtttgctcagaaggtaaaaatgataacag

SEQ ID NO: 489781 - DNA, 75 bp, synthetic construct
  source 1..75: mol_type = other DNA
gcaggttgcattgttacgaaagatgtacctgaaggaaagattgcagttggttcaccaatgagaattatcgataaa

SEQ ID NO: 489782 - DNA, 75 bp, synthetic construct
  source 1..75: mol_type = other DNA
atcaaaacattaggtgaaaacaaaaccactttacctcatccggtaggaatagttataggtaagaatgttaatatc

SEQ ID NO: 489783 - DNA, 75 bp, synthetic construct
  source 1..75: mol_type = other DNA
atccattgccttggtggggtgggaagaaccgggaccctggcggcggcaacgttattgctgaaagcgccgaatatt

SEQ ID NO: 489784 - DNA, 75 bp, synthetic construct
  source 1..75: mol_type = other DNA
ttactaaagttgattacgataccagcctgaaagaacttgacctgtttgctcggaaggcaaatgagataacaggcc

SEQ ID NO: 489785 - DNA, 75 bp, synthetic construct
  source 1..75: mol_type = other DNA
actgacgatttacgccagctggctcagctggttaaccagtatcagtcaggcagtccggaggcttctgtaccgatg

SEQ ID NO: 489786 - DNA, 75 bp, synthetic construct
  source 1..75: mol_type = other DNA
tgaacccgcgccaacgggtgaacaactgcaaaacatcctgcgtgcgggtatgcgtgcgccggaccataagtccat

SEQ ID NO: 489787 - DNA, 75 bp, synthetic construct
  source 1..75: mol_type = other DNA
gctggattaactggttcacgctgtcgggtgttgaaggcctgaagtcattgccgtcaggacgtgggaggcgctggc

SEQ ID NO: 489788 - DNA, 75 bp, synthetic construct
  source 1..75: mol_type = other DNA
ttacccagcagtggtttcctggcaaagatgaagtccatgttattggcctcgatacaccgctggaacgtttgttac

SEQ ID NO: 489789 - DNA, 75 bp, synthetic construct
  source 1..75: mol_type = other DNA
agaacatggggccgaattattaccggataattttgaagtcgacagagtcataaggaatattgcgcggatagctaa

SEQ ID NO: 489790 - DNA, 75 bp, synthetic construct
  source 1..75: mol_type = other DNA
gattacatcgtgaaacatatatctagagctatgaaaatgaggacaatacatagttctgaaaatgatgtaatgctt

SEQ ID NO: 489791 - DNA, 75 bp, synthetic construct
  source 1..75: mol_type = other DNA
atgaacgcctcgtcccaggtgaatacaggcctggttatttcccggccttctttgacaggaatggtatggtgccag

SEQ ID NO: 489792 - DNA, 75 bp, synthetic construct
  source 1..75: mol_type = other DNA
cggcctccatctaagtcctcttggcgcgtatgtactgacgagagcaattaaaaaagaattttttatcgggggttg

SEQ ID NO: 489793 - DNA, 75 bp, synthetic construct
  source 1..75: mol_type = other DNA
ccgtacctatgccatttgataagtggtacagcgccagtggctacgaaacaacccaggacggcccaactggttcgc

SEQ ID NO: 489794 - DNA, 75 bp, synthetic construct
  source 1..75: mol_type = other DNA
atcgcgttacggagatcgaccgactgcttgagcaaaagccacgcttaactgctgatcaggcatgggatgttattc

SEQ ID NO: 489795 - DNA, 75 bp, synthetic construct
  source 1..75: mol_type = other DNA
cagggattgtattgaaatatgttccagaaacagcaggtacatcttgggtttggaatgaattaaaaactcattcaa

SEQ ID NO: 489796 - DNA, 75 bp, synthetic construct
  source 1..75: mol_type = other DNA
gaaattatgggacagaaatcaggggaggagacaaaaacggatttggtggtactgcttcaggttaaaaaggtctga

SEQ ID NO: 489797 - DNA, 75 bp, synthetic construct
  source 1..75: mol_type = other DNA
agagggaaaattaactgggaaattttccctaccagatattaaagatcctgaagctattgcatgggctggggagga

SEQ ID NO: 489798 - DNA, 75 bp, synthetic construct
  source 1..75: mol_type = other DNA
aataatctgtctggcctgacctggtcagataaacacaaacttctgtttgctgttgttaataacccaccagaactg

SEQ ID NO: 489799 - DNA, 75 bp, synthetic construct
  source 1..75: mol_type = other DNA
cgggttactttaagtaactcacaaaatttgcaaccatctttaagagggttacaaatttccccgaaagtgaaccgc

SEQ ID NO: 489800 - DNA, 75 bp, synthetic construct
  source 1..75: mol_type = other DNA
aatgagcttacgacactctgttttgctgtgggtaattaccaacaaggaacggctgcattcagtaaacagcggcca

SEQ ID NO: 489801 - DNA, 75 bp, synthetic construct
  source 1..75: mol_type = other DNA
gacccgcgcatgaagcgcgaaggaattcaccacatcgtcgttgagcgggatccgcaatacatgtccgagttcaac

SEQ ID NO: 489802 - DNA, 75 bp, synthetic construct
  source 1..75: mol_type = other DNA
gcatgaagaaacttcctgatggagctatacctgcgctcgagtcagaactgctcgaaagactcagcaagcagtttg

SEQ ID NO: 489803 - DNA, 75 bp, synthetic construct
  source 1..75: mol_type = other DNA
aataaaatttcttaacccacgaacaagaaataaggtagtgcatgaagaaataaaggaaagcataaaaaaagagga

SEQ ID NO: 489804 - DNA, 75 bp, synthetic construct
  source 1..75: mol_type = other DNA
aaatatttgcaatgaagatacgccaggttgaggtctggtcaagtcaggatcagaaaattaaagctgcatttgata

SEQ ID NO: 489805 - DNA, 75 bp, synthetic construct
  source 1..75: mol_type = other DNA
ctgtcctgattgtggggcggtgatgggcgatgcgacttattcagaaatggtcgcttctggtgcttttgaagatca

SEQ ID NO: 489806 - DNA, 75 bp, synthetic construct
  source 1..75: mol_type = other DNA
atgttgttcgcatttttgcacggcggagaatattcagatttttggaaatccatatttttcccgtgcgcgattaca

SEQ ID NO: 489807 - DNA, 75 bp, synthetic construct
  source 1..75: mol_type = other DNA
tcttgagaaacagtgtcgaccctaatttgctatattgttttaaacttaacagtcatgaccatgtttggattaatg

SEQ ID NO: 489808 - DNA, 75 bp, synthetic construct
  source 1..75: mol_type = other DNA
gatgacgatttgtgtagtgtgttttacgttgaagccagagcatttcctatcaagatatttgctgaggagggcttg

SEQ ID NO: 489809 - DNA, 75 bp, synthetic construct
  source 1..75: mol_type = other DNA
cacttctctgccactagagtctaattatgtacaaactggccgtgatggtttaacaccacagactaggggggaaga

SEQ ID NO: 489810 - DNA, 75 bp, synthetic construct
  source 1..75: mol_type = other DNA
gcagatatctggctcagggcatcgctggtctggaaagccatagccgtcgccctaaacattcaccatcaacgaaaa

SEQ ID NO: 489811 - DNA, 75 bp, synthetic construct
  source 1..75: mol_type = other DNA
gaatgacaaaccggtgcacgtctccgaactcttctgccgcgctaatcgcatcaccttaacgattgataaccaacg

SEQ ID NO: 489812 - DNA, 75 bp, synthetic construct
  source 1..75: mol_type = other DNA
cgccaaattttagagtattcctggtccgcgaaggtttcattttcccgggcgaatcatgggtgtgtgattccgggt

SEQ ID NO: 489813 - DNA, 75 bp, synthetic construct
  source 1..75: mol_type = other DNA
gtttcctgtcttaaataataaagccatgtggagatggtatcagaatgaggacatcggtgagtattattggcaaac

SEQ ID NO: 489814 - DNA, 75 bp, synthetic construct
  source 1..75: mol_type = other DNA
tcttttggagagaattacattttatgcgaaaaaaaatagagatgagcttgataaactctcctgcaaatggtgttg

SEQ ID NO: 489815 - DNA, 75 bp, synthetic construct
  source 1..75: mol_type = other DNA
atggaaattaatgagtcgcgcaccgtcctgaaaacggaagacaacagctactcgtttgacgtttttattgatgcc

SEQ ID NO: 489816 - DNA, 75 bp, synthetic construct
  source 1..75: mol_type = other DNA
ttggagaagtgcttgttagcgacaaactccaaattgaaatatttatttcatcttataaaggtataccatatttta

SEQ ID NO: 489817 - DNA, 75 bp, synthetic construct
  source 1..75: mol_type = other DNA
ccggcacctaactggcctgcgccaacgccgccagtacaaaatgaacaatcaagacctctgcctgatgtggctcag

SEQ ID NO: 489818 - DNA, 75 bp, synthetic construct
  source 1..75: mol_type = other DNA
ataacaaaatatgcaaaagcatataaagcagcttatcctgatttttcttttaatttgtggatagaccctaacgca

SEQ ID NO: 489819 - DNA, 75 bp, synthetic construct
  source 1..75: mol_type = other DNA
ctccagttgttcaggataatatatctgaaataattagttcattgcatagcgaatataaatcacttaaggtggaaa

SEQ ID NO: 489820 - DNA, 75 bp, synthetic construct
  source 1..75: mol_type = other DNA
ggcaagaaatagcctataaaaagcttcttgaggtaagagagaagttacgagatacaggcaacatagcacaacaac

SEQ ID NO: 489821 - DNA, 75 bp, synthetic construct
  source 1..75: mol_type = other DNA
atcaggaaaatatattcacagtttttcacaatttcttcatgttatcggtaatgactcattttctgggtatactaa

SEQ ID NO: 489822 - DNA, 75 bp, synthetic construct
  source 1..75: mol_type = other DNA
gttaacgctgttatcggaggttgccttatggctacgatcctcaccccgtcacacccgcagtttgtctttgtgttt

SEQ ID NO: 489823 - DNA, 75 bp, synthetic construct
  source 1..75: mol_type = other DNA
gcgtcatttatgctgttatcggaggttgccttatggctacgacccttaccccctcacaccctgaatttgtctttg

SEQ ID NO: 489824 - DNA, 75 bp, synthetic construct
  source 1..75: mol_type = other DNA
gaaaagtgaaatggctactggtaagtggcgataacggacgtaaaaattacgatgaagcctcaggtatgcaggctt

SEQ ID NO: 489825 - DNA, 75 bp, synthetic construct
  source 1..75: mol_type = other DNA
atggaatatttgcaacaacgaaaaagtatggattagtttataccgaagagttaggttggatcgatttggggcatg

SEQ ID NO: 489826 - DNA, 75 bp, synthetic construct
  source 1..75: mol_type = other DNA
ctttctattacattaataacaattataggcttttcacttggtgcattactatcatccatactatttggtatagta

SEQ ID NO: 489827 - DNA, 75 bp, synthetic construct
  source 1..75: mol_type = other DNA
cttcggaaggagtttgatgtagaaggcgttgtaattgaaataataaataagattaatgggttttatgaaaaaaat

SEQ ID NO: 489828 - DNA, 75 bp, synthetic construct
  source 1..75: mol_type = other DNA
acaattactgcaaaatacgtgggaaggcatcgtggtgtgcgacgtttgtatgccggatatttcaggcatcacgct

SEQ ID NO: 489829 - DNA, 75 bp, synthetic construct
  source 1..75: mol_type = other DNA
tgaagctgcttcaagaagtcacggcaagttaattgttattggaattttgcatcaagcatttagacaatactcatc

SEQ ID NO: 489830 - DNA, 75 bp, synthetic construct
  source 1..75: mol_type = other DNA
ctcaacaatatcaacgctctgtccgaattgatacagacttgggacgcttggattcattagatggatatatttgta

SEQ ID NO: 489831 - DNA, 75 bp, synthetic construct
  source 1..75: mol_type = other DNA
gcgcggggcgttctgacgccctgcttaatgcccaacttgcgtttgccttgaacgggtattcattcgacggactgg

SEQ ID NO: 489832 - DNA, 75 bp, synthetic construct
  source 1..75: mol_type = other DNA
gcgggtttttaatggtcgagtgcatccagtgcgcaagacacctgatgaagtttacgccgccattgcccgccgttt

SEQ ID NO: 489833 - DNA, 75 bp, synthetic construct
  source 1..75: mol_type = other DNA
gcgcggggcgttctgacgccctgattaatgcgcagctcgcttacgccctgaacgggtattcatttgatgggttgg

SEQ ID NO: 489834 - DNA, 75 bp, synthetic construct
  source 1..75: mol_type = other DNA
aaagaactttttacattacagtatccccattacaaaaacgtagatgtcttatataattgggcagatcttaatagc

SEQ ID NO: 489835 - DNA, 75 bp, synthetic construct
  source 1..75: mol_type = other DNA
taagaaaatgccttgaggccgcacatggcctcgctcatatcggcattcgttttgtgccgatcccggtagcgacag

SEQ ID NO: 489836 - DNA, 75 bp, synthetic construct
  source 1..75: mol_type = other DNA
tcgcgagatatttaacggaactgttcacccggatattaagacgcgcgatgagatattccagtctgtacaacgccg

SEQ ID NO: 489837 - DNA, 75 bp, synthetic construct
  source 1..75: mol_type = other DNA
acagacatgaaaatgtcctacttccacacgctgctcgccgaggtatgcacaggcgtcgcgccagaggttaacgcc

SEQ ID NO: 489838 - DNA, 75 bp, synthetic construct
  source 1..75: mol_type = other DNA
ggcggtctggcggtcagtatttcagcgggagcattatcggcagctattgctgatattatggctgccctgaaagga

SEQ ID NO: 489839 - DNA, 75 bp, synthetic construct
  source 1..75: mol_type = other DNA
gagataacttaaaaactcttctttcccagagtaaaattacaaaggctgatattaaatccatattgcgacagagag

SEQ ID NO: 489840 - DNA, 75 bp, synthetic construct
  source 1..75: mol_type = other DNA
ccgctggaaccgggagtaccagaacctcctggggatctcgacggaagaggaactgcgccgtatgttgctgaacac

SEQ ID NO: 489841 - DNA, 75 bp, synthetic construct
  source 1..75: mol_type = other DNA
agttgcacagggtaaaccgtgggctggtttgcgagttgctaaagaatgccatgctttttattttgatggtgaaac

SEQ ID NO: 489842 - DNA, 75 bp, synthetic construct
  source 1..75: mol_type = other DNA
agtgacctgcgggttattacccgccagggcgatattggcatggaagagttgcgccaggcgctgacggtggagaac

SEQ ID NO: 489843 - DNA, 75 bp, synthetic construct
  source 1..75: mol_type = other DNA
gctgagccgtccgtctattttaatgcgtccaatgggccgtggaaaatatcgctggcctattaccaggaagggccg

SEQ ID NO: 489844 - DNA, 75 bp, synthetic construct
  source 1..75: mol_type = other DNA
gacggtcagctaaatactcaggctaaccgctatgtattgcagctaggcggcgatttggcgcagtggagtagcaac

SEQ ID NO: 489845 - DNA, 75 bp, synthetic construct
  source 1..75: mol_type = other DNA
ggactcagcggagtttcgtcaattgtggtgtggagagtcgaaacctaccgaggataaatttaacagtacaaatca

SEQ ID NO: 489846 - DNA, 75 bp, synthetic construct
  source 1..75: mol_type = other DNA
gcgctgatggcttacggtgttgatcgttttatcatcgacgaagcgcacacggttaaagactgggattttcggcct

SEQ ID NO: 489847 - DNA, 75 bp, synthetic construct
  source 1..75: mol_type = other DNA
gaatacttcggattcagatacctggtatcaggtgggggtataccagcagctgggttggcatcagttattcactct

SEQ ID NO: 489848 - DNA, 75 bp, synthetic construct
  source 1..75: mol_type = other DNA
gtcagtatcacctgcgccagattctggttttcctcgatgcaatggtgatgaacaagccggaatttatgggcggcg

SEQ ID NO: 489849 - DNA, 75 bp, synthetic construct
  source 1..75: mol_type = other DNA
gtcgtgtggtgtcttcattgatattatccaaataaaggacaagttgacaggaagcacaaattcaggtgcttcagt

SEQ ID NO: 489850 - DNA, 75 bp, synthetic construct
  source 1..75: mol_type = other DNA
gtcaattagatagtagtggattacttgatacgttattagataagtttcagcaagtagccagcacatggtcattag

SEQ ID NO: 489851 - DNA, 75 bp, synthetic construct
  source 1..75: mol_type = other DNA
ctggatatgctgatcctcaatattaccagggaggcgaagaaaaccgggcagaaaaagcgacttaggacgctcaag

SEQ ID NO: 489852 - DNA, 75 bp, synthetic construct
  source 1..75: mol_type = other DNA
aggccctgtcactatcagcggccccgcattcactgaagcacttgaacgttacactcgcctgcgcagcctggaatt

SEQ ID NO: 489853 - DNA, 75 bp, synthetic construct
  source 1..75: mol_type = other DNA
tcagtataaggttggcaatataaacccaaaagcccagccttgggcaatagaccttgtccttagactaaatagatg

SEQ ID NO: 489854 - DNA, 75 bp, synthetic construct
  source 1..75: mol_type = other DNA
gccagtctgcgcgaacagaactggccttcaaatgcaaatcgtgtgcactcattgcaggaggaataatggcaaaaa

SEQ ID NO: 489855 - DNA, 75 bp, synthetic construct
  source 1..75: mol_type = other DNA
tctgttctggctactggggtatcagttttccccccggcttgccgatgcaggtgaagcggtgttctggcgggtgaa

SEQ ID NO: 489856 - DNA, 75 bp, synthetic construct
  source 1..75: mol_type = other DNA
gtggcttcagctgatggcatgcgctttgtcacgccggtgaaaaccgtcaattcaggacctaacagaaaatatttt

SEQ ID NO: 489857 - DNA, 75 bp, synthetic construct
  source 1..75: mol_type = other DNA
ctctcggcaaacaagagccgggactgtacctcgtcgaggcgatggtcggtggatatcgggcgacgacggtggtat

SEQ ID NO: 489858 - DNA, 75 bp, synthetic construct
  source 1..75: mol_type = other DNA
catgccgtcagcggtaagggcagtatgtcgcatactggtacggtagatatcgtggcagataaaacgctgtaccag

SEQ ID NO: 489859 - DNA, 75 bp, synthetic construct
  source 1..75: mol_type = other DNA
gtgtggaccgcgggtaaaaaacagggtgaagcgaagcccggctcagagatcttgtggactgacggtcttggcgtg

SEQ ID NO: 489860 - DNA, 75 bp, synthetic construct
  source 1..75: mol_type = other DNA
ggcaggactgtttatcttcagtcagcaggataacgaaccggtggcgctggtgactaaatttgcaggcgctgagat

SEQ ID NO: 489861 - DNA, 75 bp, synthetic construct
  source 1..75: mol_type = other DNA
gttgcgcctggcgcaactaaccgcagcgagcggcgagtaaaaatgcttgaacgtccacggcgtgaagaggtggat

SEQ ID NO: 489862 - DNA, 75 bp, synthetic construct
  source 1..75: mol_type = other DNA
cgcgttgaacagcagtcgctgctatcgcatccggcaaactggctgacgttacaacgtttaaacgatactcaatat

SEQ ID NO: 489863 - DNA, 75 bp, synthetic construct
  source 1..75: mol_type = other DNA
taaactcaccgccgcgcgcaaaaagcagatcgagcagtggcagcagcaggtatcgcttgaagtgattatcctcta

SEQ ID NO: 489864 - DNA, 75 bp, synthetic construct
  source 1..75: mol_type = other DNA
ttaacttccgtggctggccggacgcccaaatacgatgcacagagtgctggttctgggggcaaaaattcggtcgca

SEQ ID NO: 489865 - DNA, 75 bp, synthetic construct
  source 1..75: mol_type = other DNA
aagaaagagagattataaattgatcgggtgggaacattttgcacataatgctcctatgtcactatttaccagaat

SEQ ID NO: 489866 - DNA, 75 bp, synthetic construct
  source 1..75: mol_type = other DNA
gaagcactggcaaatgagattgagtccgaagtgaaaaagttcctggaagagctggagaaagaaatttccagcata

SEQ ID NO: 489867 - DNA, 75 bp, synthetic construct
  source 1..75: mol_type = other DNA
cagcaaatgagaatcagcgtttctttgatgtcctctatcatgttgtgggtgatgtccctgttgatagcgttaaga

SEQ ID NO: 489868 - DNA, 75 bp, synthetic construct
  source 1..75: mol_type = other DNA
atgaatatttccgatattcgcgcaggactgcgcacgcttgtagaaagtgaaaaaacaacttatgcacaaattgcc

SEQ ID NO: 489869 - DNA, 75 bp, synthetic construct
  source 1..75: mol_type = other DNA
ctgaaaggaaaactgcgcgggcagaaaattgatgccgccgcagaattttttggtgtcacgacgcccatacgccag

SEQ ID NO: 489870 - DNA, 75 bp, synthetic construct
  source 1..75: mol_type = other DNA
tatagatatagctttatatgcaaataataaatgtgacgatagaattacgagaagagtttaccttagtaaagaaaa

SEQ ID NO: 489871 - DNA, 75 bp, synthetic construct
  source 1..75: mol_type = other DNA
ccatcaggaaaaatcacgaaggaaacggacaggaaaatacataaatattttatagatatagcttcacatgcaaat

SEQ ID NO: 489872 - DNA, 75 bp, synthetic construct
  source 1..75: mol_type = other DNA
attaccgtaactccgctttacgccgcccctccagagacggtatctgtgcctgatgcgatggaaatggatgatgac

SEQ ID NO: 489873 - DNA, 75 bp, synthetic construct
  source 1..75: mol_type = other DNA
tgtcatccagatgaaacatttattggtgtaccaaaagtcatttctacactaccggatattcaaagcattgatgta

SEQ ID NO: 489874 - DNA, 75 bp, synthetic construct
  source 1..75: mol_type = other DNA
accagatattcaaagcattgatgtaacgcgttacctgagcggaatttcaattgagcaatgtcatatacaagatac

SEQ ID NO: 489875 - DNA, 75 bp, synthetic construct
  source 1..75: mol_type = other DNA
tttataaataatgtcaccgtccataataatactatcgaaatcccacagacagtaaatggggtagtgactccaact

SEQ ID NO: 489876 - DNA, 75 bp, synthetic construct
  source 1..75: mol_type = other DNA
gaagagtatgtatctttatttcaatccttatatatatacatatgtaatgccttggagtatctttatataccgaag

SEQ ID NO: 489877 - DNA, 75 bp, synthetic construct
  source 1..75: mol_type = other DNA
agcgcaagccgctgatagagtatcaattgacgttaaggtgactctggaagctgcagcttgtactccaatactaag

SEQ ID NO: 489878 - DNA, 75 bp, synthetic construct
  source 1..75: mol_type = other DNA
aacgatttctaactttatttaagactttgcaaattgacgattgcccaccgcaatcaactttaaatattcatgtac

SEQ ID NO: 489879 - DNA, 75 bp, synthetic construct
  source 1..75: mol_type = other DNA
gtaatggccgcttctgcaccgggtattcttgttgctgggttggcggtgtttattttgatgagtcggagatcaaga

SEQ ID NO: 489880 - DNA, 75 bp, synthetic construct
  source 1..75: mol_type = other DNA
atcggttattcaatactgaagtgaatggtgcgaaagacgcttttttggacgctatgaccgcatacgtagatagta

SEQ ID NO: 489881 - DNA, 75 bp, synthetic construct
  source 1..75: mol_type = other DNA
aaaccagacggaacgaaagcgccaacagtaaggaagatgcggtatgacgcaaacacagcctggaaagcggcgctg

SEQ ID NO: 489882 - DNA, 75 bp, synthetic construct
  source 1..75: mol_type = other DNA
ctgcagcttgtactccaatactaagcaacggcggagttgttaacttcggtagtcattcagtcaatagactttcaa

SEQ ID NO: 489883 - DNA, 75 bp, synthetic construct
  source 1..75: mol_type = other DNA
gcggatcaaaacgccggcgctggatgtcgagttgttgttgattcatcagatgcaggggggcgacgtttacagtga

SEQ ID NO: 489884 - DNA, 75 bp, synthetic construct
  source 1..75: mol_type = other DNA
gctgttccattgaggaatgatttcttttttgctccgtatgaaataaatgctagagaggacatggtttatggtcgt

SEQ ID NO: 489885 - DNA, 75 bp, synthetic construct
  source 1..75: mol_type = other DNA
attcgcaaaaagatatgttgaattaatgacggaagaaaatagtgttccagagtggattagtgagattagagaggt

SEQ ID NO: 489886 - DNA, 75 bp, synthetic construct
  source 1..75: mol_type = other DNA
gtccgttactggccgggaaaatgctggcattaggcactggcacggtcggcgtaatggccgcttctgcaccgggta

SEQ ID NO: 489887 - DNA, 75 bp, synthetic construct
  source 1..75: mol_type = other DNA
ggggttgtttgcgacaggtgggcaaagcgttttgtatgccctggcaccgttgttttacagttcgcagatccgcgc

SEQ ID NO: 489888 - DNA, 75 bp, synthetic construct
  source 1..75: mol_type = other DNA
gcaatcgcaagcggatggatgtgaaagacaatatcaacgtcaaaatcaagaggtcggctatgcccgggatgcccg

SEQ ID NO: 489889 - DNA, 75 bp, synthetic construct
  source 1..75: mol_type = other DNA
attattgatgcactattggttcataagatggccagggctttattgccgctggtggatgctggcgatacaagcgag

SEQ ID NO: 489890 - DNA, 75 bp, synthetic construct
  source 1..75: mol_type = other DNA
tcgaaatagaggtgtcaggtaagtatatttctaatgatgacgaaagcatgatacgaatggcgctgaatggaacgg

SEQ ID NO: 489891 - DNA, 75 bp, synthetic construct
  source 1..75: mol_type = other DNA
tatatatgtttcatcacgggtgagaatgccctctaaagttcgtgcttttattgattttatggtggagaaaagagt

SEQ ID NO: 489892 - DNA, 75 bp, synthetic construct
  source 1..75: mol_type = other DNA
tttaattccgcttacagaactgcatcaaccagctccacagtatcgatgaattacagttggtgggctgttggtgag

SEQ ID NO: 489893 - DNA, 75 bp, synthetic construct
  source 1..75: mol_type = other DNA
ctacggtcagttgctggcgttcaccgactgctcgggctaccagacccgctatgaatacgaccgcttcggccagat

SEQ ID NO: 489894 - DNA, 75 bp, synthetic construct
  source 1..75: mol_type = other DNA
ggtgaaaaaagaactggcggacggcagcgtcacgcacagcgggtatgacgcggcaggaaggctaacggcgcagac

SEQ ID NO: 489895 - DNA, 75 bp, synthetic construct
  source 1..75: mol_type = other DNA
tattggtcgatgacgatccgggattgctgaaactgcttggcctgcgcctgaccagcgaaggctacagtgtggtca

SEQ ID NO: 489896 - DNA, 75 bp, synthetic construct
  source 1..75: mol_type = other DNA
tgctgaaaaaaccgcagtatccacaggcccaataggtattaattcctggggagtatccgaactaacaaaaacaga

SEQ ID NO: 489897 - DNA, 75 bp, synthetic construct
  source 1..75: mol_type = other DNA
aatgaaatggcgaagtatggtaccggcagtgaaattcagcggggtatccaggccgcgacagcggcgcttcagggg

SEQ ID NO: 489898 - DNA, 75 bp, synthetic construct
  source 1..75: mol_type = other DNA
cagtacagatacgtcctggcgctttaaggaaacgaagaaatccggtctgatgggtaccggcggtattggtttcac

SEQ ID NO: 489899 - DNA, 75 bp, synthetic construct
  source 1..75: mol_type = other DNA
tctggtgatggtggtgcgcctttaggcgctggacggggattcgtgatgactgcagaaggtccaacactaaccggt

SEQ ID NO: 489900 - DNA, 75 bp, synthetic construct
  source 1..75: mol_type = other DNA
tacccaacgggaaaatcctgcaatatggtcgtggtgcgattacgccgacattatcgacgcaaacaatgagaatta

SEQ ID NO: 489901 - DNA, 75 bp, synthetic construct
  source 1..75: mol_type = other DNA
ttgggagaagcggcaaaacgggatgtggggacaggggaaaatcagataccggacatggcctcttttgccagtggt

SEQ ID NO: 489902 - DNA, 75 bp, synthetic construct
  source 1..75: mol_type = other DNA
gacagagaagctccgttagcgctggggggtatctactacgacggtgagcaggtgcgggtggattatgccaaagcg

SEQ ID NO: 489903 - DNA, 75 bp, synthetic construct
  source 1..75: mol_type = other DNA
agtttatgttagacactttgataaaaatctaatgtttaaaacattacaaagagccagagaaaactctattttaaa

SEQ ID NO: 489904 - DNA, 75 bp, synthetic construct
  source 1..75: mol_type = other DNA
acgttacgcgttcatttttctgagcaagacatccccatcgccgccacgctggggctgatgggggaaagattccct

SEQ ID NO: 489905 - DNA, 75 bp, synthetic construct
  source 1..75: mol_type = other DNA
atgaataccgtattgaactcacgtgaagaagcccttgaccggggcaaactgattagccttgatgacgaggcgctg

SEQ ID NO: 489906 - DNA, 75 bp, synthetic construct
  source 1..75: mol_type = other DNA
cgttattacgccagatcatcataaacaagccgagaaaagtggcttggaaaggtgtcaccttgaggcggcattaaa

SEQ ID NO: 489907 - DNA, 75 bp, synthetic construct
  source 1..75: mol_type = other DNA
gagaaacaaatggtgggcagttactgacgatggggaagaaccggcattgaaagtaacccactggatgccgctacc

SEQ ID NO: 489908 - DNA, 75 bp, synthetic construct
  source 1..75: mol_type = other DNA
tctgatcaatgcgtctcttggatgggttaataaagcgaaagctagaaatataaagtgctttgacgaacgatttaa

SEQ ID NO: 489909 - DNA, 75 bp, synthetic construct
  source 1..75: mol_type = other DNA
atggggggggggttatatattctggtggaggaagcaatacatattttgttcctgctacactacagcataatttgc

SEQ ID NO: 489910 - DNA, 75 bp, synthetic construct
  source 1..75: mol_type = other DNA
tcataactgtggtatgtgcaacgtccagcgttatggcagctgatgataatgctatcacggatggcaaagtaacat

SEQ ID NO: 489911 - DNA, 75 bp, synthetic construct
  source 1..75: mol_type = other DNA
ccttaatactgatgatgtcacaagtctcagtggcgagtgaaaaagcgcgtgaattatatgacagtatatacgatg

SEQ ID NO: 489912 - DNA, 75 bp, synthetic construct
  source 1..75: mol_type = other DNA
tgcaccagccgtaccggctgccggggcagcagtatgataaggagtcggggctgtactacaaccggaaccggtact

SEQ ID NO: 489913 - DNA, 75 bp, synthetic construct
  source 1..75: mol_type = other DNA
aatctattaaagattatttgcttgatgaagctaatcgtaaagccgatggccgtatagaaacagaaacggaacttg

SEQ ID NO: 489914 - DNA, 75 bp, synthetic construct
  source 1..75: mol_type = other DNA
ctctccctttcattcagcttgtctatttcatttcctctgaaaagaaactaactattcacattgtgcagatgtttc

SEQ ID NO: 489915 - DNA, 75 bp, synthetic construct
  source 1..75: mol_type = other DNA
atgcgccctcgcgtaacagtggcaaacggtttatccccgctggcgcggggaacacctgccacaactatggatgtg

SEQ ID NO: 489916 - DNA, 75 bp, synthetic construct
  source 1..75: mol_type = other DNA
atgaacgggcgcgcgtgtggcccgaattcggtttatccccgctggcgcggggaacacgcgggcggattcaatctg

SEQ ID NO: 489917 - DNA, 75 bp, synthetic construct
  source 1..75: mol_type = other DNA
ccgtctctgataaagatttaaaagtcaggacagtacgtatgtggcttctgatgcgcaagctgaagaaaaatgagc

SEQ ID NO: 489918 - DNA, 75 bp, synthetic construct
  source 1..75: mol_type = other DNA
ctaccaaatgcgaaaacaacgcgtattttgccgctcgctacgcgtttaaacaggcgactggaaccaaaatgaaac

SEQ ID NO: 489919 - DNA, 75 bp, synthetic construct
  source 1..75: mol_type = other DNA
aaggctgcgcatcagctaacctggcaacaggcacaaaaaccatcagagccattaaacattatcgaccttgaaaag

SEQ ID NO: 489920 - DNA, 75 bp, synthetic construct
  source 1..75: mol_type = other DNA
gacaaataatgttgattctttcagcttcaataaagatggggatgagttttcattcgacatctctgataatccatc

SEQ ID NO: 489921 - DNA, 75 bp, synthetic construct
  source 1..75: mol_type = other DNA
caagtcagcctatgtaatcagcaatcagtacggcaaccgttacatgtataaaggatttaatgaaatgtgggttga

SEQ ID NO: 489922 - DNA, 75 bp, synthetic construct
  source 1..75: mol_type = other DNA
ccaaaaaccgagagcgctatgtgactgacaaagaataccaggccgtattaagcgtggctcctgtgcctgttttta

SEQ ID NO: 489923 - DNA, 75 bp, synthetic construct
  source 1..75: mol_type = other DNA
caagggaaaacaggaaaaaaacagataaaagcatggagtccacgattacaggcggcgatcgaaaaagcaaaacag

SEQ ID NO: 489924 - DNA, 75 bp, synthetic construct
  source 1..75: mol_type = other DNA
aaatagtcggtcgtaaactctcttcacacgatattattcgcgggctgcgtgtcgatggcgtagggacaatgatag

SEQ ID NO: 489925 - DNA, 75 bp, synthetic construct
  source 1..75: mol_type = other DNA
aagataataagctgccaccccgcgtttataaaaacaaatacagctattatttcaaaccaacgccccgagagtgta

SEQ ID NO: 489926 - DNA, 75 bp, synthetic construct
  source 1..75: mol_type = other DNA
atgggaagaccaagaaaaaacaaaaaagataatgcactaccgccacgtgttagatcgaatggttacagttacgta

SEQ ID NO: 489927 - DNA, 75 bp, synthetic construct
  source 1..75: mol_type = other DNA
cgacaggccattatcgatgccgttgacctattgctactacatccggaagcggcacaccacatcatgaacgtggtg

SEQ ID NO: 489928 - DNA, 75 bp, synthetic construct
  source 1..75: mol_type = other DNA
gttttatggggtgtattggacatcataaggagaactaccttactatctcttatacattatggttagcaaaagatg

SEQ ID NO: 489929 - DNA, 75 bp, synthetic construct
  source 1..75: mol_type = other DNA
aaggagggctggcagccatttggcagtccggtggccatcacgccttataccctgatgcaggccattgcggcggaa

SEQ ID NO: 489930 - DNA, 75 bp, synthetic construct
  source 1..75: mol_type = other DNA
caaaatttcagcggtctgcggcagagagttcaagagatgtttccggaccggcaaatcagtttcaccagctacaac

SEQ ID NO: 489931 - DNA, 75 bp, synthetic construct
  source 1..75: mol_type = other DNA
agcatcaccctgactgtgtttatctgacatcaacccgccatccggtcgatgccgaactgttgtgcgagtttaaag

SEQ ID NO: 489932 - DNA, 75 bp, synthetic construct
  source 1..75: mol_type = other DNA
aatttcgttaaaacgacaacgggggtgaatgattcgccgacactgattaaacgggatatccggacgcaggtatcg

SEQ ID NO: 489933 - DNA, 75 bp, synthetic construct
  source 1..75: mol_type = other DNA
gtttttccgttgttgagacagacgaattacctgaaggtactgatatttcaggtaactggaagtttgataatggtg

SEQ ID NO: 489934 - DNA, 75 bp, synthetic construct
  source 1..75: mol_type = other DNA
agctacgagcgcgttctggcgttcgcgcagagcttcattggtcgcgtattcctgttcctgatgatcgttctgccg

SEQ ID NO: 489935 - DNA, 75 bp, synthetic construct
  source 1..75: mol_type = other DNA
atgagtgatgtaacggcattcaacaactgcatgagcgcgttatggcggcaacatgaagccgaactttctcgcttc

SEQ ID NO: 489936 - DNA, 75 bp, synthetic construct
  source 1..75: mol_type = other DNA
aaaaagcagcagaccttctgcaagagctattcctgcgtgcccgcgctcattcagacagtttctgcgaaatggaga

SEQ ID NO: 489937 - DNA, 75 bp, synthetic construct
  source 1..75: mol_type = other DNA
tgtttaagcttacaactaaagatggaaaaacgcccccattaggagctatagcccatgaaaaaaatggaaaacaga

SEQ ID NO: 489938 - DNA, 75 bp, synthetic construct
  source 1..75: mol_type = other DNA
acagttaccggcagcccgctggaaaatgcagcgcgcgttatcgccaaatatgaagcatccggacgaggctattat

SEQ ID NO: 489939 - DNA, 75 bp, synthetic construct
  source 1..75: mol_type = other DNA
tctagaaaatctcgcattagctttaaccggaaagtcagacctgccagtggagctacggctgcgaaatgttgagat

SEQ ID NO: 489940 - DNA, 75 bp, synthetic construct
  source 1..75: mol_type = other DNA
acgagggtatgtaaaggctaatccttgtgccggtgtaagtaaattcaaggccaaaaaccgagagcgctatgtgac

SEQ ID NO: 489941 - DNA, 75 bp, synthetic construct
  source 1..75: mol_type = other DNA
agagattaatgcgcgcggccttgctcaacgccaaagccggtctgggagcggataaactgcgcacggaacagttca

SEQ ID NO: 489942 - DNA, 75 bp, synthetic construct
  source 1..75: mol_type = other DNA
gggagagattaatgtgcgcggccttgctcaacgccaaagccggtctgggagcggataaactgcgcgcggaacagt

SEQ ID NO: 489943 - DNA, 75 bp, synthetic construct
  source 1..75: mol_type = other DNA
ccagcacgcggagttaacgctatcgaactaatgcacgacgccatcgggcatattttgcaattgcgcgataacctg

SEQ ID NO: 489944 - DNA, 75 bp, synthetic construct
  source 1..75: mol_type = other DNA
gtgccggacaaatgccgttgacgtggtgctaatggacatgagtatgccgggcattggcggtcttgaggcggacgc

SEQ ID NO: 489945 - DNA, 75 bp, synthetic construct
  source 1..75: mol_type = other DNA
atagcatagtcttgcttgctttattattttgttatttgaagagattttttttaccccgttactttactgtctgct

SEQ ID NO: 489946 - DNA, 75 bp, synthetic construct
  source 1..75: mol_type = other DNA
agccgcttaaataactttttttgcttcccttatcttaataaaattgacgttctaaataccccctcctgggtataa

SEQ ID NO: 489947 - DNA, 75 bp, synthetic construct
  source 1..75: mol_type = other DNA
cgatggctgaagcgattgaaaataacgttcgcagaactattgttgatgaaaacccagtcaacccgaaatactacg

SEQ ID NO: 489948 - DNA, 75 bp, synthetic construct
  source 1..75: mol_type = other DNA
taaaccctggcttatatgttcgctagtacataaatttggtcgtcaggaggaggatgacaaagacgctgacacgga

SEQ ID NO: 489949 - DNA, 75 bp, synthetic construct
  source 1..75: mol_type = other DNA
agccttccccatgactggaagagtaagagtgttgaatcggaggcaaacttccgctttcatcagcaaaatgtgcgt

SEQ ID NO: 489950 - DNA, 75 bp, synthetic construct
  source 1..75: mol_type = other DNA
ctaccgccctgcgcccggattgcgccatcattggcgaaccgacgtcactacaaccggtacgcgcacataaaggtc

SEQ ID NO: 489951 - DNA, 75 bp, synthetic construct
  source 1..75: mol_type = other DNA
attctgtaagcctgggccgtcgtctgctcaaccatgcgttgggtggtagccgtaagctcaatgaaatcccgcagg

SEQ ID NO: 489952 - DNA, 75 bp, synthetic construct
  source 1..75: mol_type = other DNA
gatggcaaagtgccgtcatggaagattaagccaaaatatcaggattatatacaactagaatgtagattccggtgg

SEQ ID NO: 489953 - DNA, 75 bp, synthetic construct
  source 1..75: mol_type = other DNA
catacagccaaggggcggaaatgaaagagctatcgaattacgtggagctggtcagctattcagaaattgaggcca

SEQ ID NO: 489954 - DNA, 75 bp, synthetic construct
  source 1..75: mol_type = other DNA
ctggtgaaagtgaaccaggacggcgtggtgggtaaagctgaagccgagcgactgacggagctgaatgatgcggtg

SEQ ID NO: 489955 - DNA, 75 bp, synthetic construct
  source 1..75: mol_type = other DNA
tggaacaatatcaggaactgatattgttatgggggcaggaaatgatactgttctggctttagggtatgaaggtaa

SEQ ID NO: 489956 - DNA, 75 bp, synthetic construct
  source 1..75: mol_type = other DNA
atcccagagattagattcaggagctaatcaatataattacaatggtcatacaggttctgatgttatctcaattac

SEQ ID NO: 489957 - DNA, 75 bp, synthetic construct
  source 1..75: mol_type = other DNA
atgggaagacgaaggaaaaatcctgaacacgaaaaattacctccaaatgtatacccaaataaatatagttatgta

SEQ ID NO: 489958 - DNA, 75 bp, synthetic construct
  source 1..75: mol_type = other DNA
tagcaggttccacgcatatcgagatgatcagcaatacgctggcgatgggctggaactcgccgctaaccaccgtac

SEQ ID NO: 489959 - DNA, 75 bp, synthetic construct
  source 1..75: mol_type = other DNA
ctggaaaagcggtgaagcaagtcataccttttgaaggcaatgaaaagtcttttgaaacaatattgaaacagctaa

SEQ ID NO: 489960 - DNA, 75 bp, synthetic construct
  source 1..75: mol_type = other DNA
tatcgctacgttgcccctctggcggataaaggcgtaccgatgcaggggcttaaatggatggggaaaagtgactcc

SEQ ID NO: 489961 - DNA, 75 bp, synthetic construct
  source 1..75: mol_type = other DNA
cacagtatatccggaggcccgcatccagttatgcatcgtgcatatggtgcgcaacagcctgcgcttcgtgtcatg

SEQ ID NO: 489962 - DNA, 75 bp, synthetic construct
  source 1..75: mol_type = other DNA
tttatgcaaacaaagacgggatattcatctttcaaatccatataccagtgtacatgcgccacttatggaacgggc

SEQ ID NO: 489963 - DNA, 75 bp, synthetic construct
  source 1..75: mol_type = other DNA
ccggcagaggcgaaagccgtggaagatgccaatacggcgctggatacggcgaagcaggcagcccaggaggcggtg

SEQ ID NO: 489964 - DNA, 75 bp, synthetic construct
  source 1..75: mol_type = other DNA
cgtggtgttaggcgctctgctgtcgggcgaagaccctgcaatttcacttgatggactgacatggagccaatcagc

SEQ ID NO: 489965 - DNA, 75 bp, synthetic construct
  source 1..75: mol_type = other DNA
aaatggggatcgcaccacaaatcagtgtcaccgactatggtcataaaattgtctatgcccgactcggtgatcggt

SEQ ID NO: 489966 - DNA, 75 bp, synthetic construct
  source 1..75: mol_type = other DNA
agagtatcgaccgtataggccgcttagagcatcttgaaacagaagccttgatgaatcgcatcttaggcaacggtt

SEQ ID NO: 489967 - DNA, 75 bp, synthetic construct
  source 1..75: mol_type = other DNA
ccagaaggtacgattttgcttgttgagagtatcgaccgtataggccgcttagagcatcttgaaacagaagccttg

SEQ ID NO: 489968 - DNA, 75 bp, synthetic construct
  source 1..75: mol_type = other DNA
ttgaaattaacagaatggtaggagacataatttttaagggcctttgggcatgtaagcctgaaacatcagggaata

SEQ ID NO: 489969 - DNA, 75 bp, synthetic construct
  source 1..75: mol_type = other DNA
taacctgaatgtgatgtatcacaaagggagcggaagtcaacagataggatcgtatggtgtctttgatcatgaatg

SEQ ID NO: 489970 - DNA, 75 bp, synthetic construct
  source 1..75: mol_type = other DNA
gtcagactgggataatgcagaaacacatacccgtccggcaggaaatgaaacggcttccagctccccttcctggta

SEQ ID NO: 489971 - DNA, 75 bp, synthetic construct
  source 1..75: mol_type = other DNA
ggaattaagaaatattttaattttactacattgcatgattacaatcatttttgtgactttattgagtttaaacac

SEQ ID NO: 489972 - DNA, 75 bp, synthetic construct
  source 1..75: mol_type = other DNA
ttgaaattaacagaatggtaggagacataatttttaaaggcctttgggtgtgtaaaccggaaacatcagggaata

SEQ ID NO: 489973 - DNA, 75 bp, synthetic construct
  source 1..75: mol_type = other DNA
ccatttctgccgccagcgataccggccccgatgcaccaacccgcgtcagtgtggtagcaacgaccggttatctgg

SEQ ID NO: 489974 - DNA, 75 bp, synthetic construct
  source 1..75: mol_type = other DNA
attttgaaattaacagaatggtaggagacataatttttaaaggcctttgggcgtgtaaaccggaaacatcaggga

SEQ ID NO: 489975 - DNA, 75 bp, synthetic construct
  source 1..75: mol_type = other DNA
cattaaaggccgaagatggtggacaatggggtaatgaatcgtttcctgccgttgccgaacgtcgccagcaggtgg

SEQ ID NO: 489976 - DNA, 75 bp, synthetic construct
  source 1..75: mol_type = other DNA
taactaacgtggtggcactgctggttatgttggtaacaaccttgccgatcctgggggcctggtggctaacccgcg

SEQ ID NO: 489977 - DNA, 75 bp, synthetic construct
  source 1..75: mol_type = other DNA
attttgaaattaacagaatggtaggagacataatttttaaaggcctttgggcatgtaaaccggaaacgtcaggga

SEQ ID NO: 489978 - DNA, 75 bp, synthetic construct
  source 1..75: mol_type = other DNA
tagcagaaataaaaagagaggcattgggttttgaggggttgacatcatttgaattaagtaaaataaagcattcaa

SEQ ID NO: 489979 - DNA, 75 bp, synthetic construct
  source 1..75: mol_type = other DNA
acttagggtaagagctttgcggcctgatgagcgaattgtatcgaaaacagtgctcagggagatcgtgtatcagtt

SEQ ID NO: 489980 - DNA, 75 bp, synthetic construct
  source 1..75: mol_type = other DNA
tcttgataaacaagaattaaacctaaaatcagatagaaaagaaaaagaattcccaagaattaaacttaatggtta

SEQ ID NO: 489981 - DNA, 75 bp, synthetic construct
  source 1..75: mol_type = other DNA
attttaactctctcagggctaaccaattccaacccatcgcaaacgaaaaatgttggtacaggcgttggtattttc

SEQ ID NO: 489982 - DNA, 75 bp, synthetic construct
  source 1..75: mol_type = other DNA
atatgtaattattatggcttatattggttttaattatttcaataaaggcgtaactttttttgaacctacagcaag

SEQ ID NO: 489983 - DNA, 75 bp, synthetic construct
  source 1..75: mol_type = other DNA
cagtgccgcagcctggcggagaagatacagcaggaagggagcgaagacggtcacggtgtggtgttcccggctgaa

SEQ ID NO: 489984 - DNA, 75 bp, synthetic construct
  source 1..75: mol_type = other DNA
ctgggatgatggcaccgaatatccggatccgcactcagttacgcactggcgtgaaatgccagcagcaccgcagca

SEQ ID NO: 489985 - DNA, 75 bp, synthetic construct
  source 1..75: mol_type = other DNA
gtgatcccgacgccggaagccgaatccttcatgatcggcatggcgcagaaggaagcagaagagcaatctaccagc

SEQ ID NO: 489986 - DNA, 75 bp, synthetic construct
  source 1..75: mol_type = other DNA
cgcacccagcgagtgatgatggtggcggtcagtttccgcaaagaagtgactaacaccgcgctgtggctgatgcag

SEQ ID NO: 489987 - DNA, 75 bp, synthetic construct
  source 1..75: mol_type = other DNA
ccttgatgagagcaactggccagcgatgatcgactggctgctggttaacctgacggcgtttgaaaaagcgctcga

SEQ ID NO: 489988 - DNA, 75 bp, synthetic construct
  source 1..75: mol_type = other DNA
ctacctatttcattgctactgcgctaagtgatgacaaagaagagaaatacttatcgtggttaactttagctcata

SEQ ID NO: 489989 - DNA, 75 bp, synthetic construct
  source 1..75: mol_type = other DNA
catatattcaatgaaatgatttttcatgccgaaaaaaacagagcactagaaataagcacatcaaatcacaatatg

SEQ ID NO: 489990 - DNA, 75 bp, synthetic construct
  source 1..75: mol_type = other DNA
gtcttatatccgacggtatgtctatatttgtggacagacatactccaacaagcatgtcctccataatcagatggc

SEQ ID NO: 489991 - DNA, 75 bp, synthetic construct
  source 1..75: mol_type = other DNA
cattgatatcccgtatgcgacggacccggcaggaaaccggctgccggacccggaactgcacccggacagcacctt

SEQ ID NO: 489992 - DNA, 75 bp, synthetic construct
  source 1..75: mol_type = other DNA
atcagcggcgaccagcctttgcagcgggcgctgaccgtgctgcgtgacaacacacagccaggcgtcttttctgaa

SEQ ID NO: 489993 - DNA, 75 bp, synthetic construct
  source 1..75: mol_type = other DNA
tggggacagacaacctcgcggaaagtcatttacaggtggcgaacgaactgttttaccgcaataaagccgcctggc

SEQ ID NO: 489994 - DNA, 75 bp, synthetic construct
  source 1..75: mol_type = other DNA
ctcaaaaaactcctatacagcctcaataaaccactcattaggagagcttggtagtttaaactttagtggaacatg

SEQ ID NO: 489995 - DNA, 75 bp, synthetic construct
  source 1..75: mol_type = other DNA
tcctgatacgttttttaatatatctagtttggaaaaaattattcagcaagttgaagtctggggcatatatacttt

SEQ ID NO: 489996 - DNA, 75 bp, synthetic construct
  source 1..75: mol_type = other DNA
tgcagtgaatataacaatatagtaatattgaataatggtagcaacattggatattgtggtggaaataacctagca

SEQ ID NO: 489997 - DNA, 75 bp, synthetic construct
  source 1..75: mol_type = other DNA
taaattatcattcttctgaatatatattgtcttctattagtaatataaataaacagaagtctgatatcgtacagt

SEQ ID NO: 489998 - DNA, 75 bp, synthetic construct
  source 1..75: mol_type = other DNA
aacaattaaaatgtactaaaaactgtcgagctaaactattcgtactattatttttatgtgattctgttaatgcag

SEQ ID NO: 489999 - DNA, 75 bp, synthetic construct
  source 1..75: mol_type = other DNA
tgtttctaatggggaaaaaggctttagaatttatttatggtgcgttaggttgatttttatttcatcaatcatgtt

SEQ ID NO: 490000 - DNA, 75 bp, synthetic construct
  source 1..75: mol_type = other DNA
tgctatctatggtttctttctttttgtcatttttcttttacgaaagaaaaaagaaggttccacttacctcaaata

SEQ ID NO: 490001 - DNA, 75 bp, synthetic construct
  source 1..75: mol_type = other DNA
agatataataaaaatattccggacctaaatacatatttgagtttttctgctgttagccaaactagaggggggtat

SEQ ID NO: 490002 - DNA, 75 bp, synthetic construct
  source 1..75: mol_type = other DNA
tcagtactctgtactacaggatataggtgtaactgtgagtgggaatcaggatgaatgtgcaaatcttgatgatga

SEQ ID NO: 490003 - DNA, 75 bp, synthetic construct
  source 1..75: mol_type = other DNA
ttaacattattggagtcaagtgcctacccctctggtcgttattatgttagtttgtatttgaatggggaatacatt

SEQ ID NO: 490004 - DNA, 75 bp, synthetic construct
  source 1..75: mol_type = other DNA
tacgcgaaattattgctatcccgctgttcagcgatttagtgcaatgcgggttcccgagcccggccgctgattacg

SEQ ID NO: 490005 - DNA, 75 bp, synthetic construct
  source 1..75: mol_type = other DNA
taaaaggtttgattggtgtatcttttgtggtttctgatgaacctctacctatttatgaaaaccataccggcatgg

SEQ ID NO: 490006 - DNA, 75 bp, synthetic construct
  source 1..75: mol_type = other DNA
gttatagttattacaattccacttctagcatcttattctagttatgatggggatatttattatcgtgctggcgat

SEQ ID NO: 490007 - DNA, 75 bp, synthetic construct
  source 1..75: mol_type = other DNA
tctaatgcccctcgatgaaaaagaaatttttggtattgccagaagcattgctaaatggacatattcgaagttcac

SEQ ID NO: 490008 - DNA, 75 bp, synthetic construct
  source 1..75: mol_type = other DNA
ttgataatggaagatgcctggcaatctgttgatatgggcgatatatcattaggatatttggatgatagtcctgtc

SEQ ID NO: 490009 - DNA, 75 bp, synthetic construct
  source 1..75: mol_type = other DNA
tactgattgttagcagtcctttagtatatgcagcggaaaatttaattacaaaatcatccaaagataatgtttggt

SEQ ID NO: 490010 - DNA, 75 bp, synthetic construct
  source 1..75: mol_type = other DNA
agttaacggttgagttcgaaactgatgggtggtttgccctgacgggtgccggttgcgaagcgcggctggatgata

SEQ ID NO: 490011 - DNA, 75 bp, synthetic construct
  source 1..75: mol_type = other DNA
ctatggtccactagtcaatcaccaactggttgaacttggctacggcgccagtgctcacggcagcggcacgtcagt

SEQ ID NO: 490012 - DNA, 75 bp, synthetic construct
  source 1..75: mol_type = other DNA
aggttgttcctaaaatgtctggggtgcaacaaatatcctttgatatcttaaaaaatcttgatcccgatgaatttg

SEQ ID NO: 490013 - DNA, 75 bp, synthetic construct
  source 1..75: mol_type = other DNA
agatgctgcgagaattgcaaaatatgcaaaaatgttcgatgaacaaccagaggaatataccagtctaattaacaa

SEQ ID NO: 490014 - DNA, 75 bp, synthetic construct
  source 1..75: mol_type = other DNA
cgtcttttccgtgccggtgatggtgtattggttgattctttgttggtcattctgtgtacctgtaaagcaatgcgc

SEQ ID NO: 490015 - DNA, 75 bp, synthetic construct
  source 1..75: mol_type = other DNA
ggggcggtcgccagtggcataacactaaacttgagcatatccagaataccaggttgtcggctagtgggcaatgct

SEQ ID NO: 490016 - DNA, 75 bp, synthetic construct
  source 1..75: mol_type = other DNA
gacatgtgcgcacacatgattttaatctgtgcgcacagtttgagttttgtcattcaaattaagcaacgccccgca

SEQ ID NO: 490017 - DNA, 75 bp, synthetic construct
  source 1..75: mol_type = other DNA
ctggaagccaatttacctgatgagctgaaagtagaagaccctattacacacgatgagttagatcgtgacgctatc

SEQ ID NO: 490018 - DNA, 75 bp, synthetic construct
  source 1..75: mol_type = other DNA
tgacgcgatggacgaaaatatgctgcgcatgagattgatctttgcggttagcaatgcgcttgggcatggagccaa

SEQ ID NO: 490019 - DNA, 75 bp, synthetic construct
  source 1..75: mol_type = other DNA
cacgaagtattttctctacggcgtatcaaccttgccagtaaagaaaactggcgtgaggatgaacgggcaatattg

SEQ ID NO: 490020 - DNA, 75 bp, synthetic construct
  source 1..75: mol_type = other DNA
attcaaaagaactacaagagatttttgcagcaacggataccagtccctggcatcatcatacgaaaattgcattgg

SEQ ID NO: 490021 - DNA, 75 bp, synthetic construct
  source 1..75: mol_type = other DNA
gttaacgctgcaccaggtgctgcgacaggcggcgtaaaggttgccgatgttaagaaagtcaggccccggacaaac

SEQ ID NO: 490022 - DNA, 75 bp, synthetic construct
  source 1..75: mol_type = other DNA
acggcggaaaaaggccagcggatcctcgcctgtctggtggatgtgctttgcacgttgctgagaaagctggatgcg

SEQ ID NO: 490023 - DNA, 75 bp, synthetic construct
  source 1..75: mol_type = other DNA
acaaaatcactaccaacaaagcaaaactggacaagttaaaaatctggaagcaaggcttgctccagcagatgtttg

SEQ ID NO: 490024 - DNA, 75 bp, synthetic construct
  source 1..75: mol_type = other DNA
tattcaaagatgataaatcatcaagatggtctctagctaaacttggtgaaatagttgaatttaaaaaaggtaaag

SEQ ID NO: 490025 - DNA, 75 bp, synthetic construct
  source 1..75: mol_type = other DNA
tccacagataacagtggcatcaacctggtcattacccgcgaagccgttccacagggaaccctgacaccagagctg

SEQ ID NO: 490026 - DNA, 75 bp, synthetic construct
  source 1..75: mol_type = other DNA
ttgttatctcaaaaaatatacccaattataatttccgaaaaatatgcagaggggcagaaatatattgttgcagga

SEQ ID NO: 490027 - DNA, 75 bp, synthetic construct
  source 1..75: mol_type = other DNA
atgacgaagcgctggcattgtcgcatctgactcaaagtctgacatggaacacgatgcgtgattttgtcatgacta

SEQ ID NO: 490028 - DNA, 75 bp, synthetic construct
  source 1..75: mol_type = other DNA
tgattacaaaatcaacttaattgacgatagtaagtttaccaaaacagctggtattgataccgacgacatcgtcgc

SEQ ID NO: 490029 - DNA, 75 bp, synthetic construct
  source 1..75: mol_type = other DNA
tggtccagttgtcgaaattgaaagagctcgtaaaattgcagaaagcatcaataattttgactgtcatgaaaagga

SEQ ID NO: 490030 - DNA, 75 bp, synthetic construct
  source 1..75: mol_type = other DNA
acaaaccaacaggagccgcatccagacgatttaccagccggggagctccacccccctcatcagagttgaaactgc

SEQ ID NO: 490031 - DNA, 75 bp, synthetic construct
  source 1..75: mol_type = other DNA
tcaacattattcctggcgttcgcctcaacctgagtaacggtgcagcgagcctgagtgtcgggccgagaggtgctt

SEQ ID NO: 490032 - DNA, 75 bp, synthetic construct
  source 1..75: mol_type = other DNA
gatataaatgatacgacacttatgattctgaccctgttatccagtgttgatggtttttgcttatctcccactgaa

SEQ ID NO: 490033 - DNA, 75 bp, synthetic construct
  source 1..75: mol_type = other DNA
gcgcggctgatggggctacgttcgcaggaggcggtacagagttcacagtcgctgaaaacgtggctgaaaaccatt

SEQ ID NO: 490034 - DNA, 75 bp, synthetic construct
  source 1..75: mol_type = other DNA
cgttttgttctcattacagatgcacctgagtctgggggccaataccagtttattggggcgaagttattccggtgg

SEQ ID NO: 490035 - DNA, 75 bp, synthetic construct
  source 1..75: mol_type = other DNA
gacatcaaagaaaatattcattttcaggcgcgaaatcagcagattaagcacggattttatcgtgatttaccacga

SEQ ID NO: 490036 - DNA, 75 bp, synthetic construct
  source 1..75: mol_type = other DNA
tccgcgaaattttaatcagcgagtcagcttgggaagaaatgacctgcttattcgcaccttccttagctaagaaca

SEQ ID NO: 490037 - DNA, 75 bp, synthetic construct
  source 1..75: mol_type = other DNA
tctagacaaaacatatttttagacgtgcttttcaaggttgaagtaaaagatacagatgaatatattttagcaaaa

SEQ ID NO: 490038 - DNA, 75 bp, synthetic construct
  source 1..75: mol_type = other DNA
cggtaaaataaatcaacctgattcaacattgtttgaattagttgttgcgattatgtatgcgcgcaatggttatag

SEQ ID NO: 490039 - DNA, 75 bp, synthetic construct
  source 1..75: mol_type = other DNA
aacgtaaatccgcccctcaaagaagcaaacttccccgctatgtcgtgaagcttcacgaagatgatttttttgatg

SEQ ID NO: 490040 - DNA, 75 bp, synthetic construct
  source 1..75: mol_type = other DNA
atttctctggaggcttgcattaaggccaggatgtcttatggtggaaccggacctgatgctgtcaaaaaacaaata

SEQ ID NO: 490041 - DNA, 75 bp, synthetic construct
  source 1..75: mol_type = other DNA
tcgtaaaatgttcaattggagaacggactattagggaaggtgcgaataagcggggaaatacttctcggctgactc

SEQ ID NO: 490042 - DNA, 75 bp, synthetic construct
  source 1..75: mol_type = other DNA
tgcaaataatagcgagcgttattattttttcagtcatatttaatgctaacgatattattaaaatggtgaagcgta

SEQ ID NO: 490043 - DNA, 75 bp, synthetic construct
  source 1..75: mol_type = other DNA
atgaagttgttgatcaaggaattgggtcggctaattttaaactttttggtggaaagcgccagggtaatcaggaaa

SEQ ID NO: 490044 - DNA, 75 bp, synthetic construct
  source 1..75: mol_type = other DNA
atttggttctgttgcaggcgattatggcacgactgccgggagtaccttcgccggatactggaatgggaatggtag

SEQ ID NO: 490045 - DNA, 75 bp, synthetic construct
  source 1..75: mol_type = other DNA
atgctaccggcgctaacagcgtgttcaggtacagacatttataataagagtttgaaagatgttaatcagattctg

SEQ ID NO: 490046 - DNA, 75 bp, synthetic construct
  source 1..75: mol_type = other DNA
aggaaccgtggcggctcggtggttctagagatcgttcactgccgtacaggcagcttagaaaggtaccttgcaggc

SEQ ID NO: 490047 - DNA, 75 bp, synthetic construct
  source 1..75: mol_type = other DNA
actgccgtacaggcagcttagaaatgatggcgcagcagtcctccctcctgccgccagttcactgccgtacaggca

SEQ ID NO: 490048 - DNA, 75 bp, synthetic construct
  source 1..75: mol_type = other DNA
aaatgtgttaaagacgcttatttaactttattagataagacgaaaacagaactgaatgactctatctgtaaaatt

SEQ ID NO: 490049 - DNA, 75 bp, synthetic construct
  source 1..75: mol_type = other DNA
cgcatcacgagcagttcaggaaattcgggcagcacgtgagcagtgggaacgtgaaaacggatttatcagcgacgg

SEQ ID NO: 490050 - DNA, 75 bp, synthetic construct
  source 1..75: mol_type = other DNA
tgggctgatgttgaaccatctttgcgggagtttttttgcgataacggcgacgaatgggtgcatcttcggattgag

SEQ ID NO: 490051 - DNA, 75 bp, synthetic construct
  source 1..75: mol_type = other DNA
gcggaggggaaagtgttcacgcagattcagtgggagcagaaattcgcccgtcacgtaaatcacgtcagggcgcag

SEQ ID NO: 490052 - DNA, 75 bp, synthetic construct
  source 1..75: mol_type = other DNA
ggttggaagagaagcaacgtagttttgaactgacaactcagcataatgataatttgtcccaattcgatgacaata

SEQ ID NO: 490053 - DNA, 75 bp, synthetic construct
  source 1..75: mol_type = other DNA
agttaaatctgagaacttccgcatttttttcgacaaaatattagaatctaaaaagcacagcaagataaacactga

SEQ ID NO: 490054 - DNA, 75 bp, synthetic construct
  source 1..75: mol_type = other DNA
ctgattgttgataatggcagcacagtagaagaactttcaattttacaaaatttaagtgataggatcccgttaaat

SEQ ID NO: 490055 - DNA, 75 bp, synthetic construct
  source 1..75: mol_type = other DNA
gtttggcctaaaaaaaattcttgtttcttttccgggatacaaccttgatgaagaaaaattagagaggctgacatt

SEQ ID NO: 490056 - DNA, 75 bp, synthetic construct
  source 1..75: mol_type = other DNA
tgggtatcggcgttcagaacgccctgggggggaattcaattgttcttggtgataatgacaccggatttaaacaga

SEQ ID NO: 490057 - DNA, 75 bp, synthetic construct
  source 1..75: mol_type = other DNA
atgtattacaaccctggcagcaacaccgtttcatggacgtttcgctcaccttcgggacacgggctgtcagggata

SEQ ID NO: 490058 - DNA, 75 bp, synthetic construct
  source 1..75: mol_type = other DNA
cgatccaacgccgacacccgttccggagaaacgcatcacgccttctacggcagccgtactcaatatggctgcaac

SEQ ID NO: 490059 - DNA, 75 bp, synthetic construct
  source 1..75: mol_type = other DNA
cgccggatgcgcgcggaaacagcagcctgtcagaaaatgcagtgactgtggaaatcgcggtgaattattaccgtc

SEQ ID NO: 490060 - DNA, 75 bp, synthetic construct
  source 1..75: mol_type = other DNA
tgtggaaaccatctgcgttattccggaggaatttgtgcgtcgtatcaatggcgttaatgtgttgtcggatcttaa

SEQ ID NO: 490061 - DNA, 75 bp, synthetic construct
  source 1..75: mol_type = other DNA
accgcgactggtttttgttcgatgaggtcgaaccaaaggccgggcaggtggtaccggctctcgcacacattgggc

SEQ ID NO: 490062 - DNA, 75 bp, synthetic construct
  source 1..75: mol_type = other DNA
aggagttatcatcttactttgctgcgagcaatgttttttgtttaccttcaattgaaaaatctgaggcttttggag

SEQ ID NO: 490063 - DNA, 75 bp, synthetic construct
  source 1..75: mol_type = other DNA
aacaatggttattaaaacgagctgacgctattattaccacatcaccagtatacggtgaattttctgatgatttga

SEQ ID NO: 490064 - DNA, 75 bp, synthetic construct
  source 1..75: mol_type = other DNA
gcagaggcgttatctcagcccagccccactttttacaatgaggctctgatgtttctttgtctcctcgtgcaagtc

SEQ ID NO: 490065 - DNA, 75 bp, synthetic construct
  source 1..75: mol_type = other DNA
gatataataacgaaactagttttttcttaaagtatttagtggttttttttattagcacatctatagcattaacac

SEQ ID NO: 490066 - DNA, 75 bp, synthetic construct
  source 1..75: mol_type = other DNA
tttccccgttcgaacagctggctataagcacgcctaacgattcattcgaccatgttgtgggtaacgttccgttcg

SEQ ID NO: 490067 - DNA, 75 bp, synthetic construct
  source 1..75: mol_type = other DNA
tatggcaattttgactcacgctatgtgagagatgtccgacttggcacacgtgttgttcaattgatggcgcgtggt

SEQ ID NO: 490068 - DNA, 75 bp, synthetic construct
  source 1..75: mol_type = other DNA
tgtgacctccagagggaacgtcccgatcacaggcaaacaatcctgggggcgactcgggatgcagataccggcgag

SEQ ID NO: 490069 - DNA, 75 bp, synthetic construct
  source 1..75: mol_type = other DNA
actgatgccctgagacaaacatatcccctgacagaattactgcgtgttctaggtcttgctcgtagcagttatttt

SEQ ID NO: 490070 - DNA, 75 bp, synthetic construct
  source 1..75: mol_type = other DNA
taattcctgcattcggcggcgacgataatatcgaacatgttgaagcctgtattacccgtctgcgcgtcacggtaa

SEQ ID NO: 490071 - DNA, 75 bp, synthetic construct
  source 1..75: mol_type = other DNA
tggtacaaccgccatatgaacatgatgtatcacctagataatggtgacatagaggtcgtccccgctggcacaaaa

SEQ ID NO: 490072 - DNA, 75 bp, synthetic construct
  source 1..75: mol_type = other DNA
gtggattctcttcagaagaatttgacgactcctgtaacaatcaggcagacacccaatatatcgaagataatgccg

SEQ ID NO: 490073 - DNA, 75 bp, synthetic construct
  source 1..75: mol_type = other DNA
tccggcgtggttctgatcggattcagtatctttcttggcaatcttccgtacaggcttcttaaacctgaaatgcat

SEQ ID NO: 490074 - DNA, 75 bp, synthetic construct
  source 1..75: mol_type = other DNA
aatattgctgaatatcggcgtagcgtggcaattgatcttatcaatacgctaaatcccacggaggaacagctgttg

SEQ ID NO: 490075 - DNA, 75 bp, synthetic construct
  source 1..75: mol_type = other DNA
cgagcctggtgttgctggtgatgagtgcgagcgttccaaagagctatgccggggataaactcaccagcgcgagtt

SEQ ID NO: 490076 - DNA, 75 bp, synthetic construct
  source 1..75: mol_type = other DNA
aattgcgctgagctgctcgctgggaaatatcgccgcatccatcctgcttttttccaccagctcgctgaacatgac

SEQ ID NO: 490077 - DNA, 75 bp, synthetic construct
  source 1..75: mol_type = other DNA
atcgaacatgggttgcagcaaatgatcgaggcctccaatataatggaaaatctatagcccaaatggatggggtca

SEQ ID NO: 490078 - DNA, 75 bp, synthetic construct
  source 1..75: mol_type = other DNA
atgcatctaataatgctcgatacatgtgtttggcttgatatttcctctaaaaaatctgaattgccaatgcttact

SEQ ID NO: 490079 - DNA, 75 bp, synthetic construct
  source 1..75: mol_type = other DNA
actttgaatgggggatgctgaatgggaagctgtctgccctgcgatgggtcttgggtgatgagtgggacatgctcg

SEQ ID NO: 490080 - DNA, 75 bp, synthetic construct
  source 1..75: mol_type = other DNA
ctgccgcgtggtctcggaactgttaacctttacctcttacggttgcgataaatcgacagtaacggtttcccctac

SEQ ID NO: 490081 - DNA, 75 bp, synthetic construct
  source 1..75: mol_type = other DNA
ggacggtggcgcgatgacctaccgtgtgcataccgacacggaagataacccgttcagcggtgggttgttcagcca

SEQ ID NO: 490082 - DNA, 75 bp, synthetic construct
  source 1..75: mol_type = other DNA
aactcagagcatgtacatacgcttagtatttatctaattaatgatttacataaaaaaataaaggtaatcacatta

SEQ ID NO: 490083 - DNA, 63 bp, synthetic construct
  source 1..63: mol_type = other DNA
atgacatttaaacattatgatgttgtcagggcggcgtcgccgtcagaccttgcggaaaagctg

SEQ ID NO: 490084 - DNA, 75 bp, synthetic construct
  source 1..75: mol_type = other DNA
aggtaggtatgtgactttcttggattcggatgatatatggagtccagattaccttagaatcatagagtctataat

SEQ ID NO: 490085 - DNA, 75 bp, synthetic construct
  source 1..75: mol_type = other DNA
gtgcttgaattatataattcaaatgaaaaccaagaactgttaattgaagaaattgttaacctttgttcaaagatt

SEQ ID NO: 490086 - DNA, 75 bp, synthetic construct
  source 1..75: mol_type = other DNA
aatatcgcgttggcgtaacgcattcaaatgcagactttgacggaacgtatctgacaaacggcttatcggtttggg

SEQ ID NO: 490087 - DNA, 75 bp, synthetic construct
  source 1..75: mol_type = other DNA
ggacgtgattgaactgaacgaagcgttcgcggcccaggcgttgggtgtactacgcgaattggggctgcctgatga

SEQ ID NO: 490088 - DNA, 75 bp, synthetic construct
  source 1..75: mol_type = other DNA
gcagcccctgataatcacctgccccacgaagagcgctctgctttgcagaaactctggggcggtttggagacagga

SEQ ID NO: 490089 - DNA, 75 bp, synthetic construct
  source 1..75: mol_type = other DNA
gtgaaggtgaataccagcagtcggcaaccgattgattctacgtgtcgttttcagtatgtattgaatgagttgtag

SEQ ID NO: 490090 - DNA, 75 bp, synthetic construct
  source 1..75: mol_type = other DNA
ttgtgcatatatgaccttaaagatcaccgttgcatctgataattatggttgcccgtggatcgcgtccttttattc

SEQ ID NO: 490091 - DNA, 75 bp, synthetic construct
  source 1..75: mol_type = other DNA
catcccttggtacttggaaaagtctatcgagctaaagcgcagattcaaatgctcgcaagaaaactactgtctcac

SEQ ID NO: 490092 - DNA, 75 bp, synthetic construct
  source 1..75: mol_type = other DNA
gctatttaacgtccgccaggtcaacggtaaaccaataatgtttggcgcgatggcaaccgcctctctcgaaacggg

SEQ ID NO: 490093 - DNA, 75 bp, synthetic construct
  source 1..75: mol_type = other DNA
gttgcttttggctatccaaataaagatgccttatatgctaaatcaccacgattgtctctaaataacttttacaca

SEQ ID NO: 490094 - DNA, 75 bp, synthetic construct
  source 1..75: mol_type = other DNA
taatgcccgccgtgatggaaattgagcacagcactgggattaaaagcggattaatccgtatgaagaatttttgtg

SEQ ID NO: 490095 - DNA, 75 bp, synthetic construct
  source 1..75: mol_type = other DNA
tcccgattaccgcgaaatatgtccgcgtgaatgaggaagcactacagccaggagaagtccaaagcaaagccatat

SEQ ID NO: 490096 - DNA, 75 bp, synthetic construct
  source 1..75: mol_type = other DNA
taagaatgccagaaacaacgataagtgagatgcaatctgccaataacacaaaatcaggttctatagatctggttt

SEQ ID NO: 490097 - DNA, 75 bp, synthetic construct
  source 1..75: mol_type = other DNA
ttgttcattccccgtttgttgtgctctttgaaggaaaagagctctctctggaaagtggtagtgcacttcttgtca

SEQ ID NO: 490098 - DNA, 75 bp, synthetic construct
  source 1..75: mol_type = other DNA
agccacttcggaataacggatgaatcactctctaatccgataacaccaaaaacaattggtgatattggtgataga

SEQ ID NO: 490099 - DNA, 75 bp, synthetic construct
  source 1..75: mol_type = other DNA
agcaaaaaaacacaaacaaaacaccaagagaagccaaaaaacaagaataaaccaccacccaccccttcatctcct

SEQ ID NO: 490100 - DNA, 75 bp, synthetic construct
  source 1..75: mol_type = other DNA
tggagtatctcaacgcagcccgcagcgctgcctggtactggaaggcaaatggctgcaacgagctggctgacaaag

SEQ ID NO: 490101 - DNA, 75 bp, synthetic construct
  source 1..75: mol_type = other DNA
gcagaagccaaccttaacgaacaatcacagcaggacttgcaggatctcgaaaaaattatcttcggtgagaaataa

SEQ ID NO: 490102 - DNA, 75 bp, synthetic construct
  source 1..75: mol_type = other DNA
aacattaaccgatccattatcaaaacgaagaattacagcgctacgtcaaataatagcaaaaaaagaaatggctga

SEQ ID NO: 490103 - DNA, 75 bp, synthetic construct
  source 1..75: mol_type = other DNA
caattgctcagggccagtactcagccacaacggctcgcaaccttgaaaccctccagcgctgggctggcggcactg

SEQ ID NO: 490104 - DNA, 75 bp, synthetic construct
  source 1..75: mol_type = other DNA
tgggcaaggttgtcgctttcccgtcaaagaataacgacctacaggatgggctcgttattcagcgcgaaggacaga

SEQ ID NO: 490105 - DNA, 75 bp, synthetic construct
  source 1..75: mol_type = other DNA
ggattcattcgaattgaaaaaagcggcggctaattttttgtctgataatacatgtagttcaaatattctttcatg

SEQ ID NO: 490106 - DNA, 75 bp, synthetic construct
  source 1..75: mol_type = other DNA
cgactaaatagtgatgtttcttacactcagaatatagaatttagcatcaaacacaaacccacaacctgtagtttt

SEQ ID NO: 490107 - DNA, 75 bp, synthetic construct
  source 1..75: mol_type = other DNA
atgaagatattctgaatattgtcagagaacggctgaaaaatcctgccagacgcatcagggtgaatattgatgacc

SEQ ID NO: 490108 - DNA, 75 bp, synthetic construct
  source 1..75: mol_type = other DNA
caactgatggaacgcatcacgctggctaacgaagcgggcgggattggcatctgggagtgggagctgaagccgaat

SEQ ID NO: 490109 - DNA, 75 bp, synthetic construct
  source 1..75: mol_type = other DNA
attttagcaatagtgattcaggagggccaaccgaagaacagcgacagctgacaataaaagtatgttcaatggtaa

SEQ ID NO: 490110 - DNA, 75 bp, synthetic construct
  source 1..75: mol_type = other DNA
ggctgaggaagatgctttccgacgcgatttaattgacagcataattcgtgattttagcaatagtgattcaggagg

SEQ ID NO: 490111 - DNA, 75 bp, synthetic construct
  source 1..75: mol_type = other DNA
ttgtattctctttgtgagcgccgaaagcctcaaggaataaccgatcaattcttagattctttcatggaaaaatgc

SEQ ID NO: 490112 - DNA, 75 bp, synthetic construct
  source 1..75: mol_type = other DNA
tcaccagcgctctttctccttatcatgaaaaccgtatcgcgctggatatcaacgatcttgagaacgatgttgaat

SEQ ID NO: 490113 - DNA, 75 bp, synthetic construct
  source 1..75: mol_type = other DNA
ggaacgcaaacacatttccgaaagcgaaacccgctttcggaacgcgatggaatattccgctatcggtatggcgtt

SEQ ID NO: 490114 - DNA, 75 bp, synthetic construct
  source 1..75: mol_type = other DNA
ccgcgtgatatacaattacgacaacgtgaaagagtacaaagttgacggtgtggaagggtctgaaacttatcgttg

SEQ ID NO: 490115 - DNA, 75 bp, synthetic construct
  source 1..75: mol_type = other DNA
agtatcatctttccactaaaagaaatttcgcaagtttcttggtttgatatggatattcataaaatagttgaaaat

SEQ ID NO: 490116 - DNA, 75 bp, synthetic construct
  source 1..75: mol_type = other DNA
acatattaagttggtcaggttttttattagctaacaaaaagaatcagagggtaatagatgctatagattttgctc

SEQ ID NO: 490117 - DNA, 75 bp, synthetic construct
  source 1..75: mol_type = other DNA
acagcatctgaatttaaaccattatatcacacatggagtctggctgtagaagaacagtattatcttgtggcacct

SEQ ID NO: 490118 - DNA, 75 bp, synthetic construct
  source 1..75: mol_type = other DNA
aaccatttagaaacaagaaaaaaacttctacaaaaaagattgtatcatacgcaatagcatcgtcgttagtgttat

SEQ ID NO: 490119 - DNA, 75 bp, synthetic construct
  source 1..75: mol_type = other DNA
tatagaagatagcaaagagttagttaaattaaggacattgcaagatttagtcaccgaaggatcaatggatagtgt

SEQ ID NO: 490120 - DNA, 75 bp, synthetic construct
  source 1..75: mol_type = other DNA
gcaatggtaatacttccatcaacggaatatccaataccgggaacggtgtgtatatttttggtgatgtcgatggtt

SEQ ID NO: 490121 - DNA, 75 bp, synthetic construct
  source 1..75: mol_type = other DNA
ggcgggcaggtggagacatcctcccacggtaatcttcaggcttttggctcggtcagtgcatccgcgaataaaggc

SEQ ID NO: 490122 - DNA, 75 bp, synthetic construct
  source 1..75: mol_type = other DNA
tcgcccgagctatcatgccgagtctgcgaaagacggctggcagcgaatgttggaatggtttacacagtatggtgt

SEQ ID NO: 490123 - DNA, 75 bp, synthetic construct
  source 1..75: mol_type = other DNA
ccattgctgctattgctacagctctgacagcatcactggctccggtgccagctaaaagcacgatactaccaacaa

SEQ ID NO: 490124 - DNA, 75 bp, synthetic construct
  source 1..75: mol_type = other DNA
gcaaacggcaaggccacgcatctggacggcaacgtcaccctgaatgcgtcaaatggcagaatcaagttgaccggg

SEQ ID NO: 490125 - DNA, 75 bp, synthetic construct
  source 1..75: mol_type = other DNA
ttaaacactccaacatcaccgcgggcaactttgcgctgaatgcgacagtggccggctctgaaatcagcaatacca

SEQ ID NO: 490126 - DNA, 75 bp, synthetic construct
  source 1..75: mol_type = other DNA
attataacgcgctgaacaactatattcggaacctgaaagacccggttaacccgcaggatgcagccacaaagaatt

SEQ ID NO: 490127 - DNA, 75 bp, synthetic construct
  source 1..75: mol_type = other DNA
gtatcccattatgttacatgcaatagacacagctaaaataagtgtctttaatagccggttcagagcaaccactac

SEQ ID NO: 490128 - DNA, 75 bp, synthetic construct
  source 1..75: mol_type = other DNA
gaccattgccagttctttggcggtgtccagggtgaggtggtagtccttgcggcggcggcctggagttttcgccaa

SEQ ID NO: 490129 - DNA, 75 bp, synthetic construct
  source 1..75: mol_type = other DNA
ctcgctatgcgcaatttactacgtgacctgaaagaggccgatttttatctgtccgttcgttcctcactgcctgcg

SEQ ID NO: 490130 - DNA, 75 bp, synthetic construct
  source 1..75: mol_type = other DNA
tgcatttaatttctactcgacaattccaaattcaacaagcttggaaatgtctgaaattaaaaactgtacagttca

SEQ ID NO: 490131 - DNA, 75 bp, synthetic construct
  source 1..75: mol_type = other DNA
gcctttgctttagatcaaggtgattccctatcgacaaaaatgattcagatttttattgatggtctttatattttc

SEQ ID NO: 490132 - DNA, 75 bp, synthetic construct
  source 1..75: mol_type = other DNA
tgtctgacgaaaatgtgaaaacaatgattattgccgagcataaaaatatgggactcccggctccggagttttcct

SEQ ID NO: 490133 - DNA, 75 bp, synthetic construct
  source 1..75: mol_type = other DNA
gaacagagaattcttagtgatttatcaaaaaaaatgctttacgtcaaatttcctataatttttcaattgttatta

SEQ ID NO: 490134 - DNA, 75 bp, synthetic construct
  source 1..75: mol_type = other DNA
ttctttcttgtctattatttttatgttattacatgaaaaaaatggaatacacataacacaaacaacacaaataag

SEQ ID NO: 490135 - DNA, 75 bp, synthetic construct
  source 1..75: mol_type = other DNA
ggtcacgtgaagaactccgcattcttgaacagaacgcgggaaaggtaagtgtaagcggtctggcactgcaactgg

SEQ ID NO: 490136 - DNA, 75 bp, synthetic construct
  source 1..75: mol_type = other DNA
aaatgaaaagccagcttctggcgttgagcttgtatttttcggccgccttgaaacccgtaaaggacttgacatatt

SEQ ID NO: 490137 - DNA, 75 bp, synthetic construct
  source 1..75: mol_type = other DNA
cagagagcagcctgagcatctacgtgagtatttcatggagcgcgtccgctactaccgcgagcagagcatccaact

SEQ ID NO: 490138 - DNA, 75 bp, synthetic construct
  source 1..75: mol_type = other DNA
atgagtaaattcaacattgcagccaaatcgaaagacgatcaggacaaggtcaacgtcgacctggcagcgtccggc

SEQ ID NO: 490139 - DNA, 75 bp, synthetic construct
  source 1..75: mol_type = other DNA
ctgcgtagcggcgtatatgccaacagcggcgatttgtttgttcgctggtatcaaaacgaacgacgtgaataccaa

SEQ ID NO: 490140 - DNA, 75 bp, synthetic construct
  source 1..75: mol_type = other DNA
cgctacaatcagcaagcccttactgaagcgaataaatgggcgcaggcgcatcccggggctgattctgatgcgcta

SEQ ID NO: 490141 - DNA, 75 bp, synthetic construct
  source 1..75: mol_type = other DNA
gtacctgcccggggcaaagtcgccgctgcacgagcatatcgcaaccagaagaactggaatgattctttagccatc

SEQ ID NO: 490142 - DNA, 75 bp, synthetic construct
  source 1..75: mol_type = other DNA
tactacaacatattcctgaaactctttgttgcccgaacaacccggggagctcaaattatttaaaaagggtaaagt

SEQ ID NO: 490143 - DNA, 75 bp, synthetic construct
  source 1..75: mol_type = other DNA
tcaacgggctgtaaacctcgcttcggagagaatgaacagctggattatggcgggttccccggcgcttcacttctg

SEQ ID NO: 490144 - DNA, 75 bp, synthetic construct
  source 1..75: mol_type = other DNA
aattattgtgcaaacacctatatcctctaactctttaataattcagaaagcaaatgacattgccatattttattt

SEQ ID NO: 490145 - DNA, 75 bp, synthetic construct
  source 1..75: mol_type = other DNA
tagaagatgacactgaaatgtggtacacagttgacaaaaaaattgttgatgttaaaacacctcatatagcatata

SEQ ID NO: 490146 - DNA, 75 bp, synthetic construct
  source 1..75: mol_type = other DNA
aatcagtttacagcagcgtattccaggagtgagtattcaggggccagtcaggcagacgagttatggcaaaagctg

SEQ ID NO: 490147 - DNA, 75 bp, synthetic construct
  source 1..75: mol_type = other DNA
ctcagtgcaggacacaaacccgctaaagtaatggagctggctggagtatcacgtgccactttttaccgcatcaag

SEQ ID NO: 490148 - DNA, 75 bp, synthetic construct
  source 1..75: mol_type = other DNA
gctaagcatgtttatgatgtaaagaaaatcctaagtaaaagagatataaaataccgaattgccatcgttaaatcg

SEQ ID NO: 490149 - DNA, 75 bp, synthetic construct
  source 1..75: mol_type = other DNA
gacggttgtcctgaaggatctgagtgaagaacttatcatggcaaggccgccgcacggtttaatatctcaaatgaa

SEQ ID NO: 490150 - DNA, 75 bp, synthetic construct
  source 1..75: mol_type = other DNA
accgatcgcttcaacgggtatgtgagctggagtccgaaagatgtgttcgacaaagcctaccgaccagtggcgggg

SEQ ID NO: 490151 - DNA, 75 bp, synthetic construct
  source 1..75: mol_type = other DNA
aatgagagggtgaagcaagaagaatttttgcatgtggacgagacgcgtcatcaatgggtgaatgaaaggaatggt

SEQ ID NO: 490152 - DNA, 75 bp, synthetic construct
  source 1..75: mol_type = other DNA
ctgttttgataaatccctgacggctgaaaagcccgttttcaaaaagaaaaccaaaggctgcgactctattcggtt

SEQ ID NO: 490153 - DNA, 75 bp, synthetic construct
  source 1..75: mol_type = other DNA
aatcaacagttcaggtatataacctcggtgattgcaaatgtagttcttgttatcgaccaccagaacaacataggg

SEQ ID NO: 490154 - DNA, 75 bp, synthetic construct
  source 1..75: mol_type = other DNA
cggcagcatcgggtaagtggcctgccgtgttacgtgctttaggcgtcgacgtgccggaaaagcaggcgcacatcc

SEQ ID NO: 490155 - DNA, 75 bp, synthetic construct
  source 1..75: mol_type = other DNA
aaaatatcgcttattatttgcctcaatatcatcgtatccctgaaaatgataaatggtggggcgatgggtttaccg

SEQ ID NO: 490156 - DNA, 75 bp, synthetic construct
  source 1..75: mol_type = other DNA
agctgaaagacctgcataccgcatggaaacgttgttttgataaaaagctcgcagctaaggctccggtatggaaac

SEQ ID NO: 490157 - DNA, 75 bp, synthetic construct
  source 1..75: mol_type = other DNA
tcgcttacagcgccatctggcccggaaggttaaattctccgccaactggaaaaagcagaaagcgaagatttcccg

SEQ ID NO: 490158 - DNA, 75 bp, synthetic construct
  source 1..75: mol_type = other DNA
atgtcaatagagatatcaaagaagctaaaagcaattcgagaatctgaggggcttagtcaggcaaagttcgcggat

SEQ ID NO: 490159 - DNA, 75 bp, synthetic construct
  source 1..75: mol_type = other DNA
attatttttataaaaatggaattgtttttaaaatgcatcttaaaattttaacagcatatagaaagaatagtgtgt

SEQ ID NO: 490160 - DNA, 75 bp, synthetic construct
  source 1..75: mol_type = other DNA
catcgattgatatttataatatttattataatgcgctgcttaaatcaaaaatcaatacaataattaacattgctg

SEQ ID NO: 490161 - DNA, 75 bp, synthetic construct
  source 1..75: mol_type = other DNA
tccgtttactgagcaggatcacgagatctggcggaatatcctggacagttttgtcccgcgtgagacggtaacgga

SEQ ID NO: 490162 - DNA, 75 bp, synthetic construct
  source 1..75: mol_type = other DNA
tgaagaagacattacgtaatctcgaagatcaaattcatcaactggatttgaagattgagcgtattctgacaattc

SEQ ID NO: 490163 - DNA, 75 bp, synthetic construct
  source 1..75: mol_type = other DNA
ggaaagaaggatcgtctcaaagcgatgagggatgcagtaaaagatgatcctaacgaaagttatcttcatcttgat

SEQ ID NO: 490164 - DNA, 75 bp, synthetic construct
  source 1..75: mol_type = other DNA
ttgtcaacgttggtgtactggttgcgggatttgacagcgatgttcgctgcctgatctacgcccgtccgaccaaat

SEQ ID NO: 490165 - DNA, 75 bp, synthetic construct
  source 1..75: mol_type = other DNA
ggtctggtgatttcggaaccaacgatatttccaccttctccggcgaatggaaagtatacgacgccgacaccgttg

SEQ ID NO: 490166 - DNA, 75 bp, synthetic construct
  source 1..75: mol_type = other DNA
ggcggtggcccgctgtacaccgccagtaaacatgccgcaaccggacttattcgccaactggcttatgaactggca

SEQ ID NO: 490167 - DNA, 75 bp, synthetic construct
  source 1..75: mol_type = other DNA
aaaaatacactacgtggttgatgagtaacgaaacaaatgaggctgctgggcagatcagtccttctctctcccctg

SEQ ID NO: 490168 - DNA, 75 bp, synthetic construct
  source 1..75: mol_type = other DNA
agacttgcaggggcttgttatcccaaccagacaaatcacctcgctctgcgaatgggcgctacgcgggcagtaccg

SEQ ID NO: 490169 - DNA, 75 bp, synthetic construct
  source 1..75: mol_type = other DNA
gtgaattaccctggtggcgcaaaccctacagctgattcgtcaatgttcacacttcagaccttctggcttgacacc

SEQ ID NO: 490170 - DNA, 75 bp, synthetic construct
  source 1..75: mol_type = other DNA
agtgacgtccggccatccggtcaatccgctgctgggtgcaaaggtccttcccggtgaaaccgacatcgccctgcc

SEQ ID NO: 490171 - DNA, 75 bp, synthetic construct
  source 1..75: mol_type = other DNA
atgagagctattcgcgcgttgcgaattttgcgcctgcttcgctttatgcctgccttaaacagtttatggcgggcg

SEQ ID NO: 490172 - DNA, 75 bp, synthetic construct
  source 1..75: mol_type = other DNA
aactataatttatatgtttgtgctatttccatgttggatagtactgcatctttgttttatggttttggtagtatt

SEQ ID NO: 490173 - DNA, 75 bp, synthetic construct
  source 1..75: mol_type = other DNA
ttttgagcaggcgatgcaaacacgtgtcttccagccactcaaactcaaccatacgtggattaatgtaccgcccgc

SEQ ID NO: 490174 - DNA, 75 bp, synthetic construct
  source 1..75: mol_type = other DNA
agcaggtatataaaaggtagttttgtatttttctgcaagtcatcaacttataacagaataagccagacgtataat

SEQ ID NO: 490175 - DNA, 75 bp, synthetic construct
  source 1..75: mol_type = other DNA
ctccatgaaattgcttgaagcaggtgctaaaggctgtgtctggaagacaagccatcccgctaaacttaacagagc

SEQ ID NO: 490176 - DNA, 75 bp, synthetic construct
  source 1..75: mol_type = other DNA
cccaaaatcatgcacaggatgcgaagtattgtcgtatttgtggcaatgaactggggagggaaaaggtagatgtgt

SEQ ID NO: 490177 - DNA, 75 bp, synthetic construct
  source 1..75: mol_type = other DNA
cagttcattaaagccatgctcaagaaaaaattccaaattgaaggtgctaatgtcttaattatggggcttaccttt

SEQ ID NO: 490178 - DNA, 75 bp, synthetic construct
  source 1..75: mol_type = other DNA
ctatcctgttttatttgtcgatgaataccaagatctggggcacgctcttcatgagctggttctgctgctgtgctt

SEQ ID NO: 490179 - DNA, 75 bp, synthetic construct
  source 1..75: mol_type = other DNA
gtttgaaagagggtttcagcctgaacgtatcggggttctttaccgggcagcctggcttggcgataaagttgcgga

SEQ ID NO: 490180 - DNA, 75 bp, synthetic construct
  source 1..75: mol_type = other DNA
gttgcagtcgtgctggcgtatgcaaccaagtactttataccaagccttacactggtcacatgggtatcacatctt

SEQ ID NO: 490181 - DNA, 75 bp, synthetic construct
  source 1..75: mol_type = other DNA
aagttaacggacaacgattttcttatggaattactggtgggaatgtttttgttagttgtcttgtttttgtttttg

SEQ ID NO: 490182 - DNA, 75 bp, synthetic construct
  source 1..75: mol_type = other DNA
gcatcattggtcttggttatgttggcctgcctttggcggtggaattcgggaaaaaatataatactgttggttttg

SEQ ID NO: 490183 - DNA, 75 bp, synthetic construct
  source 1..75: mol_type = other DNA
gcttggcagaatgtgggggaaaatgaattcagaaagctaatcgcaaaatttgctcagtatgcttctgcccgaaga

SEQ ID NO: 490184 - DNA, 75 bp, synthetic construct
  source 1..75: mol_type = other DNA
tgattatcatgctcttagccccgggtgtgcaggcacacaatttcgtcactggcaaaacggttacccctgtttata

SEQ ID NO: 490185 - DNA, 75 bp, synthetic construct
  source 1..75: mol_type = other DNA
gggctgctgcatatgggatttataagctttttggtcgcgcagaaccccagaaagatgaggacaaactcggtttct

SEQ ID NO: 490186 - DNA, 75 bp, synthetic construct
  source 1..75: mol_type = other DNA
gcaagccgccagcctggcggcttttttatttatatctacagctgacactgatttaccatagcatccactgtatct

SEQ ID NO: 490187 - DNA, 75 bp, synthetic construct
  source 1..75: mol_type = other DNA
taagtgttctaatttcagaagtatggcggcggattaaattgatccgctcgaatcactttttttacatttattttt

SEQ ID NO: 490188 - DNA, 75 bp, synthetic construct
  source 1..75: mol_type = other DNA
caaggttgcctgaggtagatatatctttgctttacccctgtgatattgatgataattttgaccctcctatattta

SEQ ID NO: 490189 - DNA, 75 bp, synthetic construct
  source 1..75: mol_type = other DNA
ttataaaaaaacaggacttgaatatgctggtcttgaaaaggttagagtaagcagaataaaaacatctctggatat

SEQ ID NO: 490190 - DNA, 75 bp, synthetic construct
  source 1..75: mol_type = other DNA
atccgcctgccggggcagcagtatgatgaggagtccggcctgtattataaccgccaccgctattatgacccgctg

SEQ ID NO: 490191 - DNA, 75 bp, synthetic construct
  source 1..75: mol_type = other DNA
acaacggctgtgtcgggtactgaatatcgacatcggcggtggcaccgcgaactacgccctgttcgatgccggaaa

SEQ ID NO: 490192 - DNA, 75 bp, synthetic construct
  source 1..75: mol_type = other DNA
gagattatggctgatgacttggctgaactattacctagaagtggtaagtttgaaagcttcgatcctgacaattta

SEQ ID NO: 490193 - DNA, 75 bp, synthetic construct
  source 1..75: mol_type = other DNA
cgagcagttttccgctgaactggcggaactggctaatgatatctatctgaacggtgaattattcgcgcgggtaga

SEQ ID NO: 490194 - DNA, 75 bp, synthetic construct
  source 1..75: mol_type = other DNA
ctgtgggacggcgacagtattgcggaaatccgggaataccgcgatgatgaactgtacagcgtaaggcacctggtg

SEQ ID NO: 490195 - DNA, 75 bp, synthetic construct
  source 1..75: mol_type = other DNA
tttttatcagtatccgttgaatccgatctcaaatatagatccattaggattagaaacactaaaatgcattaagcc

SEQ ID NO: 490196 - DNA, 75 bp, synthetic construct
  source 1..75: mol_type = other DNA
tgataaaacgcggttcccgtcttgcacgctttattgagtcttgtagccaatggattacaggcggatggagagaag

SEQ ID NO: 490197 - DNA, 75 bp, synthetic construct
  source 1..75: mol_type = other DNA
acactaatgaagtgaccattgatttatcttataaactggcaatcacaaatatcgataccagtgatgaacatcttg

SEQ ID NO: 490198 - DNA, 75 bp, synthetic construct
  source 1..75: mol_type = other DNA
caaccatattgcacatttaaacaccaaaaccactacaagactggaatatttaaacttaagcaataacaatttatt

SEQ ID NO: 490199 - DNA, 75 bp, synthetic construct
  source 1..75: mol_type = other DNA
gaagaattaaaatctattctgcctatgtatcgcgcgtgtcggtttgataacgacacgcccctatcctcatcctca

SEQ ID NO: 490200 - DNA, 75 bp, synthetic construct
  source 1..75: mol_type = other DNA
atggcgggccgttttgtatggaaaccagaccctatgttcaaaacgacgctctgcgccttattaattaccgcctct

SEQ ID NO: 490201 - DNA, 75 bp, synthetic construct
  source 1..75: mol_type = other DNA
acattcaatacctttaccagaaaaagaacattttttatgcaattcatattgtttaaatactggcaaatattatta

SEQ ID NO: 490202 - DNA, 75 bp, synthetic construct
  source 1..75: mol_type = other DNA
atgtctattcgttatagatcaaaatattattccagagattacgccttaatagaagaagatacaatattttctgac

SEQ ID NO: 490203 - DNA, 75 bp, synthetic construct
  source 1..75: mol_type = other DNA
ctttcattgcggttgctgaaacaggaagtttttcaaaagcggcagaacgattgtgtaaaaccacggcgacgatca

SEQ ID NO: 490204 - DNA, 75 bp, synthetic construct
  source 1..75: mol_type = other DNA
taattttaaattataatacatatagagagaccgttgaatgtgttgaaatgtataagcttcaaagggaaatatctt

SEQ ID NO: 490205 - DNA, 75 bp, synthetic construct
  source 1..75: mol_type = other DNA
aagcttcagtcttttatacctgagtgggatgttccaccccttgaagataccttacgttggatgttggaaagtgac

SEQ ID NO: 490206 - DNA, 75 bp, synthetic construct
  source 1..75: mol_type = other DNA
aaacataacgtcaatgagatgatccatcgttatgtgcgcgagcaaaatattgccgtgctgtgggtgacacacgat

SEQ ID NO: 490207 - DNA, 75 bp, synthetic construct
  source 1..75: mol_type = other DNA
ttgattcgtaacctgcaatttatgccgaaggttttattgctggatgaaataaccagtgcgctggatgaaagtaat

SEQ ID NO: 490208 - DNA, 75 bp, synthetic construct
  source 1..75: mol_type = other DNA
gtcagttccatctgttcatcaacaaaaacagtcatctcaaaaacatcagagtttcagacgtgatgaaaatcgcgg

SEQ ID NO: 490209 - DNA, 75 bp, synthetic construct
  source 1..75: mol_type = other DNA
cacatctcgattttttgaagcaatatggtgattttgataatggtattcctgttcacgataccattgccagagttg

SEQ ID NO: 490210 - DNA, 75 bp, synthetic construct
  source 1..75: mol_type = other DNA
gaagacactggcagttgtaagcaatgttccacatgttcagctaatgtccccattccttgttatacatgtatgcat

SEQ ID NO: 490211 - DNA, 75 bp, synthetic construct
  source 1..75: mol_type = other DNA
gctttaacacgttataatgaaagtaaagcgaagaagaagataaataaatttgctacaggaaaaatgagttatcaa

SEQ ID NO: 490212 - DNA, 75 bp, synthetic construct
  source 1..75: mol_type = other DNA
agattgggttaataataatgacttaaaaattctaaataaacctgaggttcacatctatgatagagatgttgccat

SEQ ID NO: 490213 - DNA, 75 bp, synthetic construct
  source 1..75: mol_type = other DNA
gaaagaattgcatttggtttacgaaaagggaaagcattctccatggctaaatgaagtctatcatcgtagcctgca

SEQ ID NO: 490214 - DNA, 75 bp, synthetic construct
  source 1..75: mol_type = other DNA
atgctggctaacaaaaactatcccaatccagcgagagttaccgccgcctggcagattctcaacgctctacagtaa

SEQ ID NO: 490215 - DNA, 75 bp, synthetic construct
  source 1..75: mol_type = other DNA
gacagagcacgcgaggaaaattgacgacatattgggtgacgatgtcccaaatttgtcccaccctgaggtttttga

SEQ ID NO: 490216 - DNA, 75 bp, synthetic construct
  source 1..75: mol_type = other DNA
aataatagacggtactcaggaaaacattaccggaaacggggttttcaggaagtcggcacaaagtacttcgcaaaa

SEQ ID NO: 490217 - DNA, 75 bp, synthetic construct
  source 1..75: mol_type = other DNA
gatttgggcgatattgatataacaaattttgagaatactcagacgctggctaaccaggggcggtcgttttccctg

SEQ ID NO: 490218 - DNA, 75 bp, synthetic construct
  source 1..75: mol_type = other DNA
gggagcgattcacgttattagtgtgttctcaataatgcacagtcagattccttggaagatcaagacgaatgaaaa

SEQ ID NO: 490219 - DNA, 75 bp, synthetic construct
  source 1..75: mol_type = other DNA
gatgcaaactcgtgttttccagcctctcaaactcacccatacgtggattaatgtgccatcagcggaagaaaagaa

SEQ ID NO: 490220 - DNA, 75 bp, synthetic construct
  source 1..75: mol_type = other DNA
atgtagaagtgatcatcaaatccaccagcaacgatggccttgaaccgccccggttttcctggagagtgttttatc

SEQ ID NO: 490221 - DNA, 75 bp, synthetic construct
  source 1..75: mol_type = other DNA
atgaaacgctttccgctatttcttttattcaccctgctcaccctgctcacgctgtccaccgttccggcccaggcc

SEQ ID NO: 490222 - DNA, 75 bp, synthetic construct
  source 1..75: mol_type = other DNA
cgcagctggccggtatagccgtcatcatatcagttgcccgcctgcttaaactgcgtgagcagcatcagagccagt

SEQ ID NO: 490223 - DNA, 75 bp, synthetic construct
  source 1..75: mol_type = other DNA
ctgaaggtctggttcagggtggtgcagaaactgcacgtctgaacgccattgaaagtaactatgttggtaaagtct

SEQ ID NO: 490224 - DNA, 75 bp, synthetic construct
  source 1..75: mol_type = other DNA
tcgtggtgttcgttgtactgctgtttgcgctggctcagacccgccataaacagtggagtctggcgaaaaaagtgc

SEQ ID NO: 490225 - DNA, 75 bp, synthetic construct
  source 1..75: mol_type = other DNA
caaatcaaaggcatcctccgctgagtttagcaagctattaacgctgggtgttatgtcaggcgggtcaacctatta

SEQ ID NO: 490226 - DNA, 75 bp, synthetic construct
  source 1..75: mol_type = other DNA
acaactaagccagataacagcaattccctgtttaacactattaaaggctggtttacgccagaagaaacggtaggc

SEQ ID NO: 490227 - DNA, 75 bp, synthetic construct
  source 1..75: mol_type = other DNA
catatcagttgcccgcctgcttaaactgcgtgagcagcatcagagccagttagaatcacaggtaggctgtcagga

SEQ ID NO: 490228 - DNA, 75 bp, synthetic construct
  source 1..75: mol_type = other DNA
gctggtggcgatgacgaccacgaccttttattttattactgtctatacccccacttacgggagaacggtgttgaa

SEQ ID NO: 490229 - DNA, 75 bp, synthetic construct
  source 1..75: mol_type = other DNA
gagcaactggccagacaggtggagccggaatacacaccggcgcgaaaagctcatctttatcactgcgaccaccgg

SEQ ID NO: 490230 - DNA, 75 bp, synthetic construct
  source 1..75: mol_type = other DNA
tgattgctgcaaacagcattactaacagtgcttaccagttcggttatgatatggatgctattgttggcggagctc

SEQ ID NO: 490231 - DNA, 75 bp, synthetic construct
  source 1..75: mol_type = other DNA
gaccacgatcacgagaccgggctatgccgcctaatcctcaatcgtgccacaaacacgtttgaaggaaaagtcagg

SEQ ID NO: 490232 - DNA, 75 bp, synthetic construct
  source 1..75: mol_type = other DNA
ccgtttaacgacatcgggtcagaggtgctgtacatcggcgagttttttggcgttcagttctcgttctcccggcgt

SEQ ID NO: 490233 - DNA, 75 bp, synthetic construct
  source 1..75: mol_type = other DNA
gctgcggcggtgaacgaactggaagctaaaatcgccgcattgacggttcgtgacgacgcccgtctggaactcgcc

SEQ ID NO: 490234 - DNA, 75 bp, synthetic construct
  source 1..75: mol_type = other DNA
gcgtggcaattctgccctgagtatgcgatgctcagcagttgggtttgcagagggtgattgtctgcaatgtgtaca

SEQ ID NO: 490235 - DNA, 75 bp, synthetic construct
  source 1..75: mol_type = other DNA
attaaaacatggtgagcctattaacccaaacgaagaagaaaaactttataggctttggtatgaaggaaacgcttg

SEQ ID NO: 490236 - DNA, 75 bp, synthetic construct
  source 1..75: mol_type = other DNA
ccgaagaacaacagtctccctccctgatgccgctgattaacgcgctggaatcgcgtctggcgcagtcgggtggga

SEQ ID NO: 490237 - DNA, 75 bp, synthetic construct
  source 1..75: mol_type = other DNA
ctgacggtttccttcgccgcatggcccgaagaacaacagtctccctccctgatgccgctgattaacgcgctggaa

SEQ ID NO: 490238 - DNA, 75 bp, synthetic construct
  source 1..75: mol_type = other DNA
gtgctgaatgctatcgttcgtctgacctatggctggtctaagagttctgaccgcatcgccaatagcctcattgca

SEQ ID NO: 490239 - DNA, 75 bp, synthetic construct
  source 1..75: mol_type = other DNA
cgtattacctgcaccagccataccgtctgccggggcagcagcatgatgaggaatcagggctgtactataaccgga

SEQ ID NO: 490240 - DNA, 75 bp, synthetic construct
  source 1..75: mol_type = other DNA
agtcccctggtgcatcattctgacaggggctgcaatactgttcagcgctctatcagtcagttcatgaaagaaatg

SEQ ID NO: 490241 - DNA, 75 bp, synthetic construct
  source 1..75: mol_type = other DNA
gttgcggtgcagcaggggcagttgatagtgaccggcggggatcacgaaattctcgtacaggagacgctgcatctt

SEQ ID NO: 490242 - DNA, 75 bp, synthetic construct
  source 1..75: mol_type = other DNA
ccgccaccgctattatgacccgctgcgggggcggtatatcactcaggatccgattgggctgaaggggggatggaa

SEQ ID NO: 490243 - DNA, 75 bp, synthetic construct
  source 1..75: mol_type = other DNA
acagcgtggtgcgcagaatacgatgaatggggcaacctgctgaatgaagagaacccgcaccagctgcagcagctc

SEQ ID NO: 490244 - DNA, 75 bp, synthetic construct
  source 1..75: mol_type = other DNA
tagcattgttcagggttcagccggggtgcgcatcggtgcccccaccggcgtggcctgttcggtgtgccccggcgg

SEQ ID NO: 490245 - DNA, 75 bp, synthetic construct
  source 1..75: mol_type = other DNA
cagaaaccgcgcggggaatgagtcgctcgccggagatatggccgggacgacgaattgtgctgacggggcatccgc

SEQ ID NO: 490246 - DNA, 75 bp, synthetic construct
  source 1..75: mol_type = other DNA
gtcccggctgggcagggcgttttgaccaggagggccagcaccaggactaccagcgcacgcagtatgaagtgtatg

SEQ ID NO: 490247 - DNA, 75 bp, synthetic construct
  source 1..75: mol_type = other DNA
ggcagcagcatgatgaggaatcagggctgtactataaccgtcaccggcactacgatccgttgcaggggcggtata

SEQ ID NO: 490248 - DNA, 75 bp, synthetic construct
  source 1..75: mol_type = other DNA
ccgtcgttttcacctggcgctgaccacgcaggcgcagcgggcggaagccttccgtaaacagcgcgccacgtcttt

SEQ ID NO: 490249 - DNA, 75 bp, synthetic construct
  source 1..75: mol_type = other DNA
ctgtttcccggcgagataagttacagccgcagtgagtcgttctggctggcgcggggcggggtggcggagcagcac

SEQ ID NO: 490250 - DNA, 75 bp, synthetic construct
  source 1..75: mol_type = other DNA
cagatagccgtattccagcggcgtggagatacgctgctgaccttcactttcagcacctccttatccctgagacga

SEQ ID NO: 490251 - DNA, 75 bp, synthetic construct
  source 1..75: mol_type = other DNA
cgctgaaagtctctggcacgaaggccgatctgattcaggccgtgaaggcagtcaaaccagatgcagtgttcgccg

SEQ ID NO: 490252 - DNA, 75 bp, synthetic construct
  source 1..75: mol_type = other DNA
gcgcattcacaacggccgcgaccctgcgcgcctttatcgatgagcacaatgccagcctgccggcgctgctgtctg

SEQ ID NO: 490253 - DNA, 75 bp, synthetic construct
  source 1..75: mol_type = other DNA
taagctacagccgcagcgagtcgttctggctggcgcggggcggggtgctgaaacagcagaaaggccacccgctgg

SEQ ID NO: 490254 - DNA, 75 bp, synthetic construct
  source 1..75: mol_type = other DNA
gactttgggaaaatcctttcatcagaacttggtgagcagggtgttacacgtaaggcaaagaacgatactcttact

SEQ ID NO: 490255 - DNA, 75 bp, synthetic construct
  source 1..75: mol_type = other DNA
tcgtttcggggatgtgactctaaaccggctaaccgaccaggcggtgtaccatatcctgcaggtgcgccagggtca

SEQ ID NO: 490256 - DNA, 75 bp, synthetic construct
  source 1..75: mol_type = other DNA
agagtgctgggtaagggaaacaaggagcgactggcatatgtcccggccggtgcctggcagcggctgcagatctgg

SEQ ID NO: 490257 - DNA, 75 bp, synthetic construct
  source 1..75: mol_type = other DNA
aacgcggcgggaatggctggcgttatgtaccagctactttggtcatgccagcgatacgccagaaaagaatccgca

SEQ ID NO: 490258 - DNA, 75 bp, synthetic construct
  source 1..75: mol_type = other DNA
aaagataatattctggcagccactctgacccgttattatcagtcggcttttaaacatcaaacgcatttcgaactc

SEQ ID NO: 490259 - DNA, 75 bp, synthetic construct
  source 1..75: mol_type = other DNA
ccagagcctgcatcgttgcctgaacatgaagtcagtgatgcaaagtcagaccgggaagagcaaaccaacatcatc

SEQ ID NO: 490260 - DNA, 75 bp, synthetic construct
  source 1..75: mol_type = other DNA
ttgaagcggaaaaagcatcgttagcaacgcagccgcaggtcacgaaccgtggcgatggcatgttcactatcgata

SEQ ID NO: 490261 - DNA, 75 bp, synthetic construct
  source 1..75: mol_type = other DNA
agacgaatcccagcaggcagaacagccgcagttgatcactgtcgccaccctatccttgcgccagcgtatcttggc

SEQ ID NO: 490262 - DNA, 75 bp, synthetic construct
  source 1..75: mol_type = other DNA
gctgacctgaaaaccatcagcatgtggaatgttaagcaggaaagcctgcgcgccaggctacaccgggaaattatt

SEQ ID NO: 490263 - DNA, 75 bp, synthetic construct
  source 1..75: mol_type = other DNA
acaacgccaccctgcccgcgcagctgccgctgggcgccagcctggaggaaacggcccagagctatatggctttgc

SEQ ID NO: 490264 - DNA, 75 bp, synthetic construct
  source 1..75: mol_type = other DNA
tcaattatttacggttattttatggtaacgccaatgacttcattgcggatgcatatccatttcgtaccttttgca

SEQ ID NO: 490265 - DNA, 75 bp, synthetic construct
  source 1..75: mol_type = other DNA
tatttctattcttttttgtttttttagtactaatggttttctataaaatagaggcaaattactttacgccagatg

SEQ ID NO: 490266 - DNA, 75 bp, synthetic construct
  source 1..75: mol_type = other DNA
gccgctgggcgctagcctggatgaaacggcgcagaactatatggcgctgccagctgaattccaacgtatcgatgc

SEQ ID NO: 490267 - DNA, 75 bp, synthetic construct
  source 1..75: mol_type = other DNA
cagcaactgagcaccgcactggccattcagaaagccctgctacagcacccaactgccgggatgctgcttcagtac

SEQ ID NO: 490268 - DNA, 75 bp, synthetic construct
  source 1..75: mol_type = other DNA
ccagaagagtaccagcggatcgaagcggaccagaagcagaccgcagcggcgatgaaagcctgcatcaaagagtac

SEQ ID NO: 490269 - DNA, 75 bp, synthetic construct
  source 1..75: mol_type = other DNA
gtattgaagaaggccagaagcagacagcagctgcaatgaaggcatgcattaaagagtacaacgccaccctgcccg

SEQ ID NO: 490270 - DNA, 75 bp, synthetic construct
  source 1..75: mol_type = other DNA
ggttcaagaaactgtcagtgatgaaaaaaatgttggtaatgaaatgcagtcaggcgaaagcagtctggaaactgg

SEQ ID NO: 490271 - DNA, 75 bp, synthetic construct
  source 1..75: mol_type = other DNA
gacgaaccggctgttgtttaccctgcttactttgagccaggccgctatgaagggttgccgaacgaggtttatcac

SEQ ID NO: 490272 - DNA, 75 bp, synthetic construct
  source 1..75: mol_type = other DNA
gtgaagagtcacataccggccagcaggccgatgtaaaccagaatgcggattctgttagccaaaacagcgattctg

SEQ ID NO: 490273 - DNA, 75 bp, synthetic construct
  source 1..75: mol_type = other DNA
aaagccaatctgtacgcgcagctctatattcgtcctaacgaacagaacctctcccgctcgctgtttttagccact

SEQ ID NO: 490274 - DNA, 75 bp, synthetic construct
  source 1..75: mol_type = other DNA
tttacgagctactttatcggccccttaatggcggatttctatgcgcgctaccccggcatcacgctccagctacag

SEQ ID NO: 490275 - DNA, 75 bp, synthetic construct
  source 1..75: mol_type = other DNA
acaatgtagtgtattttaataaaaataattatgatttaaaatggaaaatagttatagaagatagcattaataatg

SEQ ID NO: 490276 - DNA, 75 bp, synthetic construct
  source 1..75: mol_type = other DNA
gttgcgcctcaaagccaggccagttaaaacgtcgagtcgtttacttaaggcctgaagagttcaaacagactttac

SEQ ID NO: 490277 - DNA, 75 bp, synthetic construct
  source 1..75: mol_type = other DNA
gcctgtatcgtggaagacgaattcgaggccatcagcatggccatgacggacagcctgacgggcattcccaaccgg

SEQ ID NO: 490278 - DNA, 75 bp, synthetic construct
  source 1..75: mol_type = other DNA
caggatatcgtatttgaatcgacaacagaaaatacaggtgataaatcaggtgggttaatgtcctgttttaactag

SEQ ID NO: 490279 - DNA, 75 bp, synthetic construct
  source 1..75: mol_type = other DNA
cctttacgcccaatcgtggcagaggatattgatgacatttatggtgatgatgaagggaatggttcatgcaatata

SEQ ID NO: 490280 - DNA, 75 bp, synthetic construct
  source 1..75: mol_type = other DNA
ctgcggcgtttcctcttcttattttgcagtcgtcttcattcattaccacgtccagacgccagtgcagcttattct

SEQ ID NO: 490281 - DNA, 75 bp, synthetic construct
  source 1..75: mol_type = other DNA
ccttcaatagcccacttgaggcgggtatacgtgcggtctcgattctgggtgctgcctatccgcaaacctacgacc

SEQ ID NO: 490282 - DNA, 75 bp, synthetic construct
  source 1..75: mol_type = other DNA
ggcttctggtcggtcgttatgctttccgtcgctggcttgtgccagctactggcaagtactgccgcgatcggctgg

SEQ ID NO: 490283 - DNA, 75 bp, synthetic construct
  source 1..75: mol_type = other DNA
gcgaacggcagacggtggagaacccggagacgggggaactgctgtggcagcatgagacaacacacgcctacaacg

SEQ ID NO: 490284 - DNA, 75 bp, synthetic construct
  source 1..75: mol_type = other DNA
gatactgccggagggctggatgtgtgggccgttcttgataatcgctatgttcagaaggttactcactatgccttt

SEQ ID NO: 490285 - DNA, 75 bp, synthetic construct
  source 1..75: mol_type = other DNA
cagatgttgaaccattactggatatgctgcttgccagtggacaatttgatcaagatggccttcatcatgtacaaa

SEQ ID NO: 490286 - DNA, 75 bp, synthetic construct
  source 1..75: mol_type = other DNA
ggatgcttggtatgttaagaactggtctatgtggaatgatatagcgatattatttaaaacgattaccgttgtctt

SEQ ID NO: 490287 - DNA, 75 bp, synthetic construct
  source 1..75: mol_type = other DNA
ggattttgaacaaatgtggttattggttacgtgatacatggattatcggaagtggtaaaaatgctaaggatgcat

SEQ ID NO: 490288 - DNA, 75 bp, synthetic construct
  source 1..75: mol_type = other DNA
tttgtagtatgtctttggcagcttcagacttcatcagttttgttttttcactttatctttcattggccatacttt

SEQ ID NO: 490289 - DNA, 75 bp, synthetic construct
  source 1..75: mol_type = other DNA
atgaagttatgatatttcgtgtacaacagaatttagcaaagtggtcatcaagaataattaaaagaatatttgata

SEQ ID NO: 490290 - DNA, 75 bp, synthetic construct
  source 1..75: mol_type = other DNA
ggtgtctaaataaaataggattctggttgcgggatacatggataattggcaatgggaaaaatgcaatcgaagctt

SEQ ID NO: 490291 - DNA, 75 bp, synthetic construct
  source 1..75: mol_type = other DNA
gatattgaaaatgattattttaaaagtttacatctcaagcattataaattcgattctttcccaattgattctatt

SEQ ID NO: 490292 - DNA, 75 bp, synthetic construct
  source 1..75: mol_type = other DNA
ttgcaaatgttttctttttctcttgttgttcatatggaggtgaaatccccccccctattaagctccataacattg

SEQ ID NO: 490293 - DNA, 75 bp, synthetic construct
  source 1..75: mol_type = other DNA
aattggacggaatacgctgagttcaatcgagaagaacaaactgtaacattagtatttagctcatatattcaacca

SEQ ID NO: 490294 - DNA, 75 bp, synthetic construct
  source 1..75: mol_type = other DNA
gcagaacacttaggactggcagggattgcctattgtgctcctgaagtgatgacaaatgatgtctggaatttatta

SEQ ID NO: 490295 - DNA, 75 bp, synthetic construct
  source 1..75: mol_type = other DNA
caatgagttattacaaaatgatccagaggcgaaaagagaatgggatactacatttaaattaaaaaacgatcccag

SEQ ID NO: 490296 - DNA, 75 bp, synthetic construct
  source 1..75: mol_type = other DNA
tatatatatatgaaagttaaaaaagacggcggtcccgctatttacggacatgatcgagtgggtattcatggaaag

SEQ ID NO: 490297 - DNA, 75 bp, synthetic construct
  source 1..75: mol_type = other DNA
tcagagtgatattagaaacacatggcttagaaatttcatgataaagggattccgctatgtgtctgttatacctac

SEQ ID NO: 490298 - DNA, 75 bp, synthetic construct
  source 1..75: mol_type = other DNA
gatccacctggcgcggctggttgaaatggaatacctgctggtccaccgtcgcgggctgacgttctgctatgaact

SEQ ID NO: 490299 - DNA, 75 bp, synthetic construct
  source 1..75: mol_type = other DNA
acggatgttgaccagcgaaatccgaaccatccgggctggatcagcatttacgtgcggctggatgcgccccggctg

SEQ ID NO: 490300 - DNA, 75 bp, synthetic construct
  source 1..75: mol_type = other DNA
gcgtccgccaatgccagcatctgtctgggttcaggtcgatgtggcagactccccgcatttaattgaacgcttcac

SEQ ID NO: 490301 - DNA, 75 bp, synthetic construct
  source 1..75: mol_type = other DNA
aaatcagccgatagcaggttttccgctgattttttttatcacgcggcatggggcaaaaatgttatggctggactt

SEQ ID NO: 490302 - DNA, 75 bp, synthetic construct
  source 1..75: mol_type = other DNA
aattgaacgctttaccgcactttttgacgcgcaccatatgaacattgcggagctagtgtctcgcacgcaacctgc

SEQ ID NO: 490303 - DNA, 75 bp, synthetic construct
  source 1..75: mol_type = other DNA
tgaagaaaaaacaaatgaaattgtaaaaaacatccgggttatgtcgttgagatttttgaagaaaagatgggtaat

SEQ ID NO: 490304 - DNA, 75 bp, synthetic construct
  source 1..75: mol_type = other DNA
atgtaaaaatactggagtggtgttttaataaaagcatgcaatattttgatgattctgcaaagatagagcatgcat

SEQ ID NO: 490305 - DNA, 75 bp, synthetic construct
  source 1..75: mol_type = other DNA
gccaacgatgggtatgattcaaaagaggaatgggaactggcgacaatcttcagaagagcatatacgcaaggccgg

SEQ ID NO: 490306 - DNA, 75 bp, synthetic construct
  source 1..75: mol_type = other DNA
ggaaactacctgatctccgtggtgagtttattcgtggatgggatgacaggcgtggtattgatgcaggacgtgctt

SEQ ID NO: 490307 - DNA, 75 bp, synthetic construct
  source 1..75: mol_type = other DNA
tgcattgcctgttggtgtacctgttccgtggccctccgcaaccccgccaacgggctggctgaaatgcaacggcgc

SEQ ID NO: 490308 - DNA, 75 bp, synthetic construct
  source 1..75: mol_type = other DNA
accgacgtcggctggtcttatgcgccgggggcagcataccgtcccgaccttgcccgctatcaggggacgcttcaa

SEQ ID NO: 490309 - DNA, 75 bp, synthetic construct
  source 1..75: mol_type = other DNA
aaagttacatcgatgtgtcaacagtatcgtaatgaggaaagactgttcctggggaaatcagtgactgcatcttgg

SEQ ID NO: 490310 - DNA, 75 bp, synthetic construct
  source 1..75: mol_type = other DNA
gtattgtcggtgaagtcgatggtgatgaccccgcagtattcagaccaatacaaaaatacatcaatggcacatggt

SEQ ID NO: 490311 - DNA, 75 bp, synthetic construct
  source 1..75: mol_type = other DNA
acctgtctcatattcttattgattccttagatgatgcgaaagttaaccttacaccgattatcggttcgattctgg

SEQ ID NO: 490312 - DNA, 75 bp, synthetic construct
  source 1..75: mol_type = other DNA
atcagaatcagatcccggaactgaacgtctaccagtgtggcacttaccagatgcactcgttgcaggaagcgcagg

SEQ ID NO: 490313 - DNA, 75 bp, synthetic construct
  source 1..75: mol_type = other DNA
atgaaagtagccttgcttggggaagcctgggatatcgtccaacgacaacccaaaaaatcagaattcatttttcca

SEQ ID NO: 490314 - DNA, 75 bp, synthetic construct
  source 1..75: mol_type = other DNA
tgaaaaatgcaagtattataatgagtttagttatgatgactattggactggggagttcaataacacgttcttatc

SEQ ID NO: 490315 - DNA, 75 bp, synthetic construct
  source 1..75: mol_type = other DNA
ggacaggccgctggcggtgctgatccagtcatcgagcgcggcgggtaagtccagcttaatggatgcggtgctcaa

SEQ ID NO: 490316 - DNA, 75 bp, synthetic construct
  source 1..75: mol_type = other DNA
gaatccactaacctgacggcggcctacctggcggcggtatcgcgcaaactggacaggccgctggcggtgctgatc

SEQ ID NO: 490317 - DNA, 75 bp, synthetic construct
  source 1..75: mol_type = other DNA
tggaaaaacaggggtgggctcttgtaaaccggagcgcaattaaaaatatgactgtggaacaattactttctttaa

SEQ ID NO: 490318 - DNA, 75 bp, synthetic construct
  source 1..75: mol_type = other DNA
aagttagcctactctcattcagaactggagcggataatcgttacgctgattatttctaggcttaaggaaaacact

SEQ ID NO: 490319 - DNA, 75 bp, synthetic construct
  source 1..75: mol_type = other DNA
catggaaacaacattcgtgctggatgcactggagcaggcgttgtgggcccgtcggccgtccggcacaatccatca
